United States Patent Application Publication US 2013/0332133 A1 - sequence listing, part 21

SEQ ID NO: 200394 - DNA, 778 bp, Unknown
  Bacterial polypeptide expressing nucleotide sequence isolated from the Sargasso Sea
catggttgagttgagcctccccacgaactcccgtccaaccacaggcaagacgtggtcgtcaggaagagaggcatctaacaataagaaatttcagatctaccgctatgacccagacttgggggaaaacccgcgcatcgacacgttctttgttgatctagacaagtgcggaccgatggttttggacgcgttaattaaaatcaagaacgagattgatccgaccctaacattccgtcgatcctgccgggaaggagtctgtgggtcttgcgcgttcaatattgacggcactaatacgctcgcctgtactaaacctatctcggaaatcaccggcgatgtgaaaatctatccattgccccacatgccagtgatcaaagacttggtgccagatttgaacggaccttattctcagtaccgtgctattgaaccttggctccaagcggacactccggcgccaaatcgagagcgccttcagagccgagaggagcgcgccaagcttgatggactttgggaatgcatcctttgtttttgctgccagaccagttgcccgagctactggtggaatggagatcgctacatgggtccggcgatcctcttgcaggcctaccgctggattgcagactcccgcgatgaagccacgggtaagcgtttggatagcctgaacgacggcttccggctgttccgctgccacacgattatgaattgcacaaatacctgtccaaaaaacctcaatccggggcaggctatcggcaagatcaaggaatcggtgttccagcgtctttga

SEQ ID NO: 200395 - DNA, 833 bp, Unknown
  Bacterial polypeptide expressing nucleotide sequence isolated from the Sargasso Sea
ggtgctagaggtgaaggtggatatttaactaatagcgacggtgaaagatttatggagcgatatgctccaaatgctaaagacttagcatcaagggatgtagtaagtcgagctatgacaattgaggtaaatgaaaatagagggtgtggagaaaatgctgatcatgttcttttacacttagagcatattgatgctgcaactcttcataagagattacctggtatttcagaaactgcaaaaatttttgcaggtgtagatttaacgaaagaaccaattcccgtattgccgactgttcattataatatgggtggtattcctacaaatcatagaactgaagtacttcgaccaaccgaagataatcctgataatgtatgtgagggcttgttagctgttggggaagcagcatgtgtatctgttcatggagctaaccggttaggaacaaattctttaattgatcttgttgtttttggaaaagcttcaagcatcaccgctaaagaaaaagttaaacctaacagtaaggctattgatattgattctagtacactagatccaattttagatcgctttgataaaatcaggtttaataaaggagatagttcaactggtgaggtgagaacttcgatgcaaaaagttatgcaagaaaaatgtgctgtttttagaactgatgaattaatctctaaaggcattgaggagtttaatcagattgaaagctctatggacaatataagcgtaaaagataaatcaatgatttttaacacagatttaactgagtctcttgaacttcataatttaatggctcaatcaaaggttacacttcattcagcgttaaacagaaa

SEQ ID NO: 200396 - DNA, 768 bp, Unknown
  Bacterial polypeptide expressing nucleotide sequence isolated from the Sargasso Sea
ttgaaacaagacttggatatttacaagaagtatccgttgaatttttaggaattgatatggccgagaaacctgttccaattcgaccaggaatgcactacattatgggtggaattaagactgatgtagacggagagactggagttccaggtttatacgctgctggagaatgtgcaaatgtaagcgttcatggagctaatagattaggcgctaattctcttctagatactgtagtttttggaagaagatcagcagagaaagcttcagattatgttaaaggtatttctaatgaggtcattcctacagatgaatatgttaagcgagatctagatatgattaagagaatcttggattctgaaggtaaattcaaagtagctgaagttagaaataagatggcaacggcgatgactaaaggaattggtgtttttagagatcaagaatctatggaatatgccaaaaaaattgttgatcaaacaaaaattgattatcgcgattccataagaattgataataaaggaaaaatttataacacagatttattatttgcactcgagttgggaaatatgattgattgtgctgaatctatagttcatggagctttaactcgaaaagaaagcaggggagcccattttaggaccgatataccaggtagaaatgatgaagaatggctcaagcatactcttatctacaaaagctcagaaggagaaataagtgttaagactcctgatgtaacaattactgaatggcaaccagttgaaagagtatattaaa

SEQ ID NO: 200397 - DNA, 902 bp, Unknown
  Bacterial polypeptide expressing nucleotide sequence isolated from the Sargasso Sea
ccgttctggcaccggcggttacggccgggtctatttctcctgcacctcggcgcatacctgtaccggcgacggcaatgcgatggcgcttcgcgctggactgccgctccaggacatggagttcgtgcagttccatccgacaggcgtttacggcgctggcgtcctgatcaccgaaggcgcgcgtggcgagggcggctacctgacgaattcagagggcgagcgtttcatggagcggttcgcgccgacagccaaggatctcgcaagccgcgatgttgtcagccgcgccatgacgatcgagatcaatgaaggccgcggtgtgggcccgaacaaggaccacatcatgctgcatctcgagcatatcgatgccgacacgctgcaccagcggctcccgggtatcaccgagacggcgaagattttctgcggcgtcgatgtgacccgcgagccgatcccggtgctgccgaccgtgcattacaatatgggcggcattccgacgaactatcacggcgaggtgatttcggccgcgaacggagacgacagcgcgaccgtgccgggcctgatggccatcggcgaggcagcctgcgtgtcggttcatggcgccaaccggcttggcacgaactcgcttctcgacatcgtggtgttcggccgtgccgccgcgcaccgtgccgccgagacctgtaccgctggcgggaccgcgcgcagcgcgccgcaagaagccacggaaaaggcgctcgacaggttcgaccggatgcgccatgccaaaggtgatgtcggcgctgccgaaatccgcctcgagatgcagcaggcgatgcagcgtcatgccgcagtcttccgctcggcagacagcctgtcggacggcgtcgccagcatggacaagatcgccgcgaaaatgggtcatatcggggtga

SEQ ID NO: 200398 - DNA, 677 bp, Unknown
  Bacterial polypeptide expressing nucleotide sequence isolated from the Sargasso Sea
tatgaaagcttataaaattatagatcacgaatatgatgtagtagtcctgggagcaggtggctcaggattaagagcagctgtgggcctttccgaagcaggtcttaaaactgcttgcatttcaaaagtttttccaaccagaagccatacatcggctgcacaaggaggtatatcagcagcccttggaaatatgggcgaagatgattggagatggcatatgtatgacacagttaaaggatctgattggttaggagatcaagacgcaatagaacatttatgtaaagaagctccaaaagctgtcatagaattagaaaagtatggagttccattcagcagaacaaaagagggtaaaatttatcaaagagctttcggcggtatgactaagaattatggaaatgaatccgttcaaagaacctgtgccgcagctgatcgaactggtcatgcaatcttacacactttatatggacaagcattaaaacataatacagaattttttattgagtattttgctcttgatcttttaatgaaaaatggagagtgcaaaggtcttatagcttggaacttaaatgatggaacaattcatagatttagatcacatataacgataattgcaacaggtggatatggaaaagtttattatacggccacttcagctcatacttgcacaggtgatggaaaat

SEQ ID NO: 200399 - DNA, 797 bp, Unknown
  Bacterial polypeptide expressing nucleotide sequence isolated from the Sargasso Sea
tgcagctgcagatagaactggacatgctatgctgcatactctttatcaacagtctttatcctatgaggctgaattttttattgaatattatgttctagatttaataatgaatgaagaaaaagaatgctgtggtgttttagcttggagtttacatgatggaaaaatttataatttcagctctaaaatggttattttagcaactggtggttatggaagggcatattattcttgtacttcagctcatacttgtactggagatggtggtggcatggcattaagagcaggtttacctctacaagatatggaatttacccaatttcatcctacaggtatttatggagccggagttcttattacagaaggtgctagaggtgaaggtggttatctaactaacagaaatggtgagaggtttatggaaagatacgcaccaaacgctaaagatttagctagtagagatgtagtttctcggtcgatgactacagaaataatggaaggaagaggttgcggaccaaaaaaagatcatattcacctaaatttgagtcatcttgataaaaaaatattgaatgaaaaacttccgggtataaccgaatcagcaaaagtttttgctggtatagatgtaacaaaaaaaccaataccagttcaaccgacagttcattacaatatgggaggaattccaacaaatattcatggagaagtacttacttcaaaaaaaggaagtgacaatgtagttaaagggttaatgtctattggagaagctgcttgtgtatcagtccatggtgcaaataggcttggttcaa

SEQ ID NO: 200400 - DNA, 850 bp, Unknown
  Bacterial polypeptide expressing nucleotide sequence isolated from the Sargasso Sea
cgagcagggctacccttgcaggatatggagtttgtgcaatttcaccccactggaatttacggatccggctgccttattactgagggctctagaggcgaaggtggatatctaaccaattccgaaggtgaggcctttatggaaagatatgctcccacagctaaagaccttgcctctagagatgtagttagtagagctatgacagttgaaattcgagagggaagaggtgtgggagatgataatgaccatattcttttgcacttggagcatctaggggaggatgttttacacaaaaggcttccaggaattactgaaacagcaagaatttttgctggggttgatgcaactcaggagccgattccagttttacctacggtccactacaacatgggggggataccgacaaactaccatggggaagttttgcgacccacgttaaacgatccggatgcaatttgtcccggtctgatgtctataggggaggcggcctgtgtatcggttcatggggccaatagacttggaacgaattctttgattgatcttgtcgtttttggaagggctgcggctctaagagccaaagacattttgaaaaattatgatttaaataagccaattgacaataattcactagaatctggtttggagcggtttgatagcttaaggtattctgatggaaagcaaagtactgcagacgttcgtcttaacatgcaacgaataatgcaaaataacgcggcggtttttagaacttctgagatattgacggagggttgtgaattgattgataaggcgggggctgcgatgaaggatttaaaaacaaaagatagatctttaatttggaactctgaccttgtga

SEQ ID NO: 200401 - DNA, 899 bp, Unknown
  Bacterial polypeptide expressing nucleotide sequence isolated from the Sargasso Sea
gttcccccgacaggtgtctacggcgccggcgtcctgatcaccgagggcgcgcgcggcgagggcggctatctgaccaattccgagggcgagcggttcatggaacgtttcgccccgaccgccaaggatctggcaagccgcgatgtggttagccgggcgatgaccatcgaaatcaacgaaggccgcggcgttggtcccaataaggaccatatcatgctgcatctcgagcatatcgacgccgacacgctgcatcggcggcttccggggatcaccgagacggcgaaaatcttctgcggtgtcgacgtcacccgagagccgattccggtgctgccgaccgtgcattacaatatgggcggcatcccgacaaactatcatggcgaggtgatttcggcagcgaacggggacgagaacgccacagtgccggggctgatggccatcggagaggccgcctgcgtgtcggtgcatggcgcgaaccgccttggcaccaactcgctcctcgatatcgttgtcttcgggcgggccgcggcgcaccgcgccgccgagacctgcacccccggggggaccgcgcgcagcgcaccgcaggaggccaccgacaaggcgcttgaccgcttcgaccggatgcgccacgccaagggtgatgtcggggctgcggaaatccgcctcgagatgcagcaggtgatgcagcgccacgccgctgtcttccgttcgaccgacagcctgaccgacggcgtctccaacatggacaatatcgccgcgaagatgggccatatcggagtcaaggaccagtcgctgatctggaacaccgaccttgtcgaatcactcgagctcgagaatctgatgggacaggcgcttgtcaccatccgctcggccgaccagaggcaggaatcgcgcggcgcgcacgc

SEQ ID NO: 200402 - DNA, 797 bp, Unknown
  Bacterial polypeptide expressing nucleotide sequence isolated from the Sargasso Sea
tatttctgaaacagcaaaaatttttgctggtgtagatctaacaaaggaacctattcctgtattaccaacagttcattacaatatgggaggtataccaacaaattatagaactgaagttcttcgtccaacagaagataaccccgaaaatatatgtgaaggattattagcggttggagaagcagcatgtgtatcagttcatggagctaatcgattaggaacaaattcattaattgatctggttgtctttggaaaagcatcaagtattactgctaaagaaaaagtaaaaccaaatagcaagaatattgatataaataccagtatattagacccaattttagaacgttttgataaaataagatttaataaaggagatagctcaactggtgaggttagaacatcgatgcaaaaaattatgcaagataaatgtgctgtatttagaactgatgaacttatatctagaggaattgaggagtttaaacatgtagagagcacaatggataatattgaagtaaaagataagtctatgatttttaacacagatttaactgagtcacttgaattacataatttaatggctcaatcaaaagttactcttcactctgctttaaatagaacagaaagcagaggagcgcactctagagaagattaccaagaaagagatgactcaaactggcttgttcattcgttatcatggcttgatagtaatggtgatgtaaaaattggtaaaagacctgttcacatgaacacattaactaatcatgttcaacccattccacctaaaaaaagagtttattaaa

SEQ ID NO: 200403 - DNA, 787 bp, Unknown
  Bacterial polypeptide expressing nucleotide sequence isolated from the Sargasso Sea
atggccgagtttacattacccttaaattctattgtaaaatctggtaaacattttaaatgtgatactgcagacaaaaaaaatatccgaatttttaagatctatcggtacgatccagatgatgaaaaaaatccacgtgtagatacttatgaaatcgatacttctgactgtgggccaatggttcttgatgcgcttctgaaaataaaaaatgaaattgatacatctattacttttagaagatcttgcagagaaggtatatgtggttcttgctcaatgaatattgatggaagaaatgcattagcttgtacaaaaagtattgatgaaatcaaaggcgatataaaaatatatccattaccacacatgccagttattaaagatttagtaacagacttaacagatttttacaagcaatatgaatctgttcagccctggcttcaagccgaagagcctaaagatttgactactgaaagactccagtcaaaagaagagttagcagaattagatgggtctgacgaatgtattttatgtgcatgttgttccacaagttgcccaagttattggtggaatagtgataaataccttggtccagcaaccttaatgcaagcttatcgttggattgctgattctcgagatgaacatcaaaaagaaagattagaaaaattagaagacacatttaagctttataagtgtcataccataatgaattgtaccaacgcatgtccaaaaggactaaaccctgcaaaacaaatagcaaaaataaaatcattaatagtttctaacaaaatttaag

SEQ ID NO: 200404 - DNA, 781 bp, Unknown
  Bacterial polypeptide expressing nucleotide sequence isolated from the Sargasso Sea
aatggtgcaattgactcttccaaaaaattctaaagtgttaaaaggaaatttattctctttagaaacagatataactggaaaaaaaatatttaaaatttatagatacgatccagaaaaaaaagaaaatcctagattagatacatatgaaattgatcttaaaaaatgtggaccaatggttttagatgctttgatttatataaaaaatgaattggaccctagtttaacctttagaaggtcttgtagagaaggagtatgtggttcatgttcaatgaatatagatggaacaaatacgcttgcatgtactaaaaatataaatgatgtaaagggagatttaaaaatttacccattgcctcatatgaaagttattaaagatttagttccagatttatctaatgcttataaacaatatgcatccatagagccgtggttaaagagtaattctaatactgaagatgggctagaaacaagacaatctccagaggaaagaaaagaattagatggagcatatgaatgtatactttgtttttgctgttctaccagttgtccatcttattggtggaatggagatgaatatttaggtccagcaactttgcttcaggcgtatagatggatttctgattctagagatgaagcacgcgaagagcgtttagactatttagaagattcttttaagttatatagatgtcatactattatgaattgcaccaaaacttgtccaaaaggcttaaatccagctaaggcaatatcaaaaataaaaaaagcaatttctgaaagagcttaa

SEQ ID NO: 200405 - DNA, 1744 bp, Unknown
  Bacterial polypeptide expressing nucleotide sequence isolated from the Sargasso Sea
tatgaaagtaattaaacattcatttgatggagtaatagtcggagcaggtggcgctggtctcagagctgctattgaagcagctccgcatatgagacttgcggtaataacaaaactttatccaacaagatcacataccggtgctgcccaaggtggcatgagtgctgctctcgcaaacgtagaagaagataattggaactggcacgcttttgacacagttaaaggatccgattatcttgctgatcaacctgcagttgatattctttgtaaagaagcaattgatgctgttattgaattagagcattggggtcttccatttagcagattagataatgggaagatagcacaaagacgttttggtggacatactgtcaaggaagggacatctccagcatttagagcatgctatgcagctgacagaacagggcatatgattcttcagaccctttatcagaagtgtgtctcaatgggagttactttttttgatgaattccaagttttagatatcaaaatcgaagatggtatttgtcaaggcgtagtagcttatgaacttgcaacaggagatatccatatttttgaaactagggctgttacttttgcaactggtggttttggtaaaattttcaaagttagctctaatgctcactctctaacaggggatggtccaggaatactttatcaaaaaggtatacctttggaagatatggaattttaccaattccatcccactggtatttatagattaggaatactactttcagaagctgccagaggtgagggcggaattcttagaaataaagatggagagagatttatggaaagatatgccccttcaattaaagatctagctcctagagatatggtatctagagcgattgctactgaaataagtgcaggcaatggtgcaggtccagatagtgattatgtatatttagatttaactcatcttggagcagagacaataaagaaaaagcttcctgatattactgattttgtaagaacttacgtaaaaatagaaccaattgaagaacctatcccagttcaacctaccgcccattatgcaatgggtggaattccgacagatgtaaattcaagagtattaagtgatgaaaaaggtacggtactccctggggtttatgcagcaggggaagctgcttgtgtaagtgttcatggagcaaataggcttggaacaaattcacttttagacatagtagtttttggtaagagagctggccaaagtatggttgattatgtaacacagacaaaaccaaaccaactcagcgacaatgcttctaatgatctaacaaaaaagattacaaatttaatagaaaaagaacataccaatgaattctctgtagcaaagataagaaaagatttgcaagattctatggaagaaaatgcaaaaatctttaggacaaaagaaactttagaaaagcagactgaaattttagaggaattaagagaaagatatgaaaatgttacaatttacgacaaaggtaaagttcacaattcagaacttgtagaagcaatagagttagattatcttctagatatgtccgaagcaacagtatcaagtgcactcgctagaaacgaatctagaggtgctcattcaaggcaagactatccagatagagacgatactaactttatgaaacattcttttgcatttaaaaatgagaattcagcaaatcttaaatatagagatgtggaattgggcaaatacgagccaatggagcgaaaatactaa

SEQ ID NO: 200406 - DNA, 769 bp, Unknown
  Bacterial polypeptide expressing nucleotide sequence isolated from the Sargasso Sea
aatggctaaatttactctaccaataaattcaattgtcagaaaaggcaaaacattttctgatgttaataaatctgagaatatgcttactgtagaaatatatagatataatccagatactaagagtaatccttataccgatacatatttattgaataaagataactttggtccaatggcattggatgtattgatttatataaaaagtaaaattgattcctctttaacatttagaaggtcatgtagagagggaatttgtggttcttgctctatgaatatcaacggtactaataatcttgcatgtattacagatatatcaacagagacaaaactaaaattttaccctttgccgcatatgcctgtaataaaagatttagtgccggatttaaataatttctatgcacaatataaatctattaaaccttggttaattacagacaagaaaccagaacgtgaacatattcaatctcaagaagatcgcagcaaacttgatggtctctttgaatgtgtactttgtgcatgttgttcgacaagttgcccaagttattggtggaattccgataaatatcttggaccggctacattaatgcatgcatataaatggataattgatagtagagatacagcaaaagaagagagactatctaatttagctgataaatttaaactatacagatgtcatactattatgaattgcactaaaacatgtcctaagaatctcaaccctgctcgagcaatatctgagataaaaaaaatgcttgtaaaagcttaa

SEQ ID NO: 200407 - DNA, 1129 bp, Unknown
  Bacterial polypeptide expressing nucleotide sequence isolated from the Sargasso Sea
tttgtactggcgacggcagtgccatggctttagacaaaacttacctttatcagatatggaatttattcaatttcatccaactggtgtttacggagcaggcgttttgattactgaaggtgctagaggagaaggtggatatttaacaaatagtgatggagaaagatttatggaaagatatgcgccaaacgccaaagatcttgcttcaagggatgttgtcagtagagcaatgacaattgaaattagcgaaaatagagggtgtggagataatgctgatcatgtaatgcttcacttagagcatattgattctgatacgcttttaaaaagacttccaggtatttcagaaactgcaaaaatatttgctggtgtagacctaacaaaagaccctattccagtattgccaactgttcattataatatgggaggtattccaacaaattatagaactgaggttataagacctacaaaaaataatccagataatgtatgcgaggggttaatggcagttggagaagccgcttgtgtttctgttcatggtgcgaacagacttggtactaactctttaattgatcttgttgtttttggaaaagcagcaagtcttacatgctcagaaaaaacaaaacctaattcaaaaaaaattgacgttagtaagtcttacacagacaacataattgataggtttgacaaaatcagatacagcaaaggaaattcaacaacaggtgaactcagaacttcaatgcagcacataatgcaaaaaaattgtgctgtatttagaacacatgatttaataactaaaggtattgaggaatatcatgaggtagaaaattctatggacaacatagatatcaaagataaatctcttgtttttaatacagatcttgttgaggcattagaacttcataatctaatggctcaatcaaaagttactttacattctgcactgaatagaacagagagtagaggggctcatgctagagaagattttaaagaaagagatgacaaaaattggcttgttcattctttagcttggttaaatcataatggagatgttaaaatgggatcaagaggagtacacatgaatactctaacaaatcacgtacaaccaattcctccaaagaaaagagtatattaa

SEQ ID NO: 200408 - DNA, 769 bp, Unknown
  Bacterial polypeptide expressing nucleotide sequence isolated from the Sargasso Sea
aatggcaaaatttacattacccataaactcaatagttaaaaaaggcaaaacatttaatgataatccatcatctgagaacaaacttagagtagatatatatagatacaatcctgatcaaaataaaaatccttatgttgatacttatatactcaataaagagaaatttggtccaatggcattggatgtacttttttatattaaaaataatatcgattcaacattaacctttagaagatcttgtcgggagggtatttgtggttcatgttctatgaatattaatggaacaaatactctagcatgtatactaaacattgcagatgaatcatctcttaaattttaccctttaccacatatgcctgtaattaaagaccttgttcctgatttaagtaatttttataaacaatatgaatctatcaagccgtggctcatcaatgatacaaaacctgaacgagaacatcatcaaagtcaggacgatagagaaaagcttgatggactcgtagaatgtgtgctatgtgcttgttgttcaacaagttgtccaagttattggtggaattctgataaatatctaggtcctgcatctttgttacatgcttatagatggataatcgacagtagagatcaagctagtgatgagcgtttatcaagcatagccgataaatttaaactttttagatgccatacaattatgaattgtactaaaacttgtccaaaattactaaaccctgccaaggctatctctcatatcaaaaaaatgattgcatctaagtaa

SEQ ID NO: 200409 - DNA, 2002 bp, Unknown
  Bacterial polypeptide expressing nucleotide sequence isolated from the Sargasso Sea
ctgatttatagcgattcattagtggttggtgccggattggcaggcctgagggtggccattgcctctaaagagcgtgggctggataccttagtgctttcgcttattcctgccaaacgttctcattccgccgcagcgcaggggggaatgcaggcaagccttggtaacgcagttaaaggcatgggcgatgatgaagacgtgcactttcaagacactgtgaaaggttcggactggggctgcgatcaagaagtcgccaggatgtttgcccattgtgcgcctaaggcggtacgcgagttagctaactggggcgtgccttggtcgcgcgtgagtgcagggcctagggaagtgattgttaacgcgcaaaaagtcacgttgcaggaagcggaagaagcccacgggctgatcaatgcccgcgattttggtggcaccaaaaagtggcgcacctgctacaccgccgacggtaccggccactctttactctatgccatggataacaaagcgatttcgatggatattcccgtccatgaacgcgttgaagcgctagcgattatccacgacggtcaacgctgtcacggggtgattgcccgctgtttaatcacgggtgagttgcgtgcctacgtcgcgaaatcgaccaccatagccactggtggctatggccgaatttatgaagtctcaaccaatgcgattatttgcgaggggataggtcaggcactggcactcgaaacgggcgttgcgacccttggtaatatggaagcggtacagttccatcccacagcgattgtgcccgtggggattttaaccacagaaggttgccgcggtgacggtggcttgctgcgggataaggacggctaccgttttatgccggactatgagccagagaagaaagagctagcgtcgcgggacgtggtgtctcgccgtatgaccgagcatatgcgtaaaggtaagggcgtcgatagcccctatggcccacatttatggctcgatatcaccctgctggggcgcaaacatatcgaaactaacctgcgtgaagtgcaggagatttgtgagaacttcctcggcattgaccctgcgaaggattggatccccgtgcgcccgactcagcattactctatgggcgggatccgcactaaggcaacgggcgagagtccgcagcttaagggtctgttcagcgtgggtgaagcggcctgttgggatatgcatggctttaaccgcttgggtggcaactcactcgccgaaaccgtggttggtggcatgattatcggcaaatatgtggctgatttttgcgaaaataatagcctcgaaatcgacactcagcttgccgaaaaatttatgcgacaggtacagacagaaatcgataccttagtcgatggtgaaggccatgaaagccccttcgaacttaagcgcgaaatgcagcggattatgatggattacgtggggattttccgtaacggccctgagcttgataaagcggtgaatgagctaaaagccctgcttgaacgctcacgtaagctcggagttaagtgtaggaaacgccatgccaatcctgagctggttgaagctctaagggtgaagcgcatgctcaaggttgcgctgaccgttgcttgcggcgctgccgctcgtacagaaagccgtggagcccacgcccgtgaagattatccgcagcgtaatgacagagactggctcaaccgtactctcgccagttggcctgacgccaatgcactagcccccgtattaagctacgagccgctggatgtgatgaagatggaattgccgccgggatatcggggttatggtatcgacaatgccattgctcaccccgataccgccaaacgcgagcagcaaattgccgagattttggcaggactgggcgacgatgccgatcgttatcaacgccaagcggcgctgatgccctttgaactgccgccgagcctacaagctaaaaatgaacgtttaagcgataccttacaaagaccatctgccaatgcgctaggagaaaaatcataat

SEQ ID NO: 200410 - DNA, 742 bp, Unknown
  Bacterial polypeptide expressing nucleotide sequence isolated from the Sargasso Sea
atgattagtaataaattaaaagttagtctatatcgttacaatcctgaggaggataaatttccatacatgaaagaatattctattgaaaagcctgatagagatattatggttttagacttattacacttattaaaagaggatgatcaatctatttcttttagaagatcctgtagagagggtgtatgtggttcagatggtatgaatatcaatgggaaaaatggactagcatgcatcaccccgatctcttctgtaattaaaagaaataaaattgaacttcgacccttgcctggattgcctgttattagagatttagttgtagatatgacagagttttatgctcaatacgaaaaaatcaaaccttttttacaaaatgaaacaactgctccagaacaagaaagacttcaatcacccgaagaaagagataaactagatggattatatgaatgcattttatgtgcttgctgttctacaagctgcccttctttttggtggaatcctgataaatttgttgggccagcagcattacttcaagcatatagatttttagcagattctcgagatttaaaaacacaagaaaggctagagtctttatcagatccatttagtgtatacagatgtcatggaattatgaattgtgtaaatgtttgccctaaaggactcaatccaaataaggcaattggtgaaataaaatcaatgttacataaaaataaaaaggatataattgtctctgatggagtataaa

SEQ ID NO: 200411 - DNA, 1247 bp, Unknown
  Bacterial polypeptide expressing nucleotide sequence isolated from the Sargasso Sea
atataatttgcatatttatgaagaatggtttgtcactaaactaattaaagaagatggtcgaattgctggtgcaatcgcctttgatataaaaactggccagatggaaatgataagtgcaaaagcagtagttttagccactggtggagctggtagagtatttgaaccttcaactaatgcattgatctgtactggagatggattaagtcttgcaatgcaagtgggagttcctttaatggatactgagatgattcagtatcatccaacaacacttgctggaaatggaattttgctttctgaagcagctagaggagatggtgcatatttaattaattcagaaggtgaaagatttatggaaaaatacgcccctgagtatatggagttagcttcaagagacgttgtttcacgtgctgagcagacagaaattgatgaaggaagaggcgtagatggttgcgtttttctagatttaaggcatcttgggaaaaaatttattgaagacagattaggttatcttcaagaagttgcacttgaatttagaggcatagatttatctgaaaagcctatacctattaaacctggaatgcattacataatgggtggtattaaaaccgatttaaatggagctacaaatgtaccaggactctatgccgcaggtgaatgtgcaaatgtaagtgttcatggagctaatagattaggagcaaattctcttcttgatacgattgtttttggtagaagatctgctatagaaagtgttgaatatattaaatcagtaaaagacgtggagatagatcctaaggagctatcaaaagaaaaatctcgtattcaatcaattttggatagacctaaaggaatgagatctgctgaattaagagacaaaatgggttcgacaatgacaaagggtattggtgtttggagagacacaaatagtataaattttgccattgaaggaatgaagaatgttagaggtcaattatcaaatgtttatgttgaaaataaaggtaaagtatttaatactgatcttacttcctaccttgaattagaatttatggttgatgttgctgattcaatttgccaaggtgcaaatgcaagatttgaaagtaggggagcacactttagaacagatgtgactactagaaatgataaagattggttaaaacacactattgttgaatataatggagaagaattaaatacaactagtgaaaaagtgaccataacagattgggaacctactgaaagagtttattaat

SEQ ID NO: 200412 - DNA, 409 bp, Unknown
  Bacterial polypeptide expressing nucleotide sequence isolated from the Sargasso Sea
cttattcctgatctaactcatttttatgcgcaacatgcctcgataatgccatggttagagaccaaatccaacaggccggcaaaggagtggaaacagtctatcgaagataggaagaaattggatggcctatacgaatgcgtaatgtgtgcatcgtgttcgacctcatgtccatcttattggtggaatagtgataagtacctaggtcctgctgcattgcttcacgcttatcgttggattattgacagcagagatgaggcgaccggcgaacgcctgggtgagcttgaagacccgtttaaactatatcgctgtcatacaataatgaattgcacaaatacatgtcccaagggacttaatcctgccaaagcaatagctgaggtaaaaaaaatgatggtagagagaagtttttagc

SEQ ID NO: 200413 - DNA, 1222 bp, Unknown
  Bacterial polypeptide expressing nucleotide sequence isolated from the Sargasso Sea
atgggatcaatccatcgatttttatctcatcaaacaattctagctactggtggatatggaagagcctacttctcatctacaagtgctcatatatgtactggtgacggtagtgcaatggctttaagacaaaacctacctctttctgatatggaatttattcagtttcatccaacaggtgtttacggtgctggagtattaataactgaaggcgccagaggtgaaggcggttatttgacaaatagtgatggtgaaagatttatggaaagatatgctccaaatgcaaaagatctagcatcaagggatgtagtaagccgagcaatgacaattgaaattagtgaaaatagaggttgtggtgacaatgccgatcatgttctccttcatcttgagcacattgatgctgatacattacataaaagattgcctggtatttcagaaactgcaaaaatatttgccggagttgatctaactaaagatccaataccagttcttccaacggttcattataatatgggtggtataccaacaaattatagaacagaagttctaagaccaacaaatgaaaatccagataatgtgtgtgaaggtttaatggctgttggtgaggctgcatgcgtttctgtacacggtgcaaatagattaggaacaaattcattaatagatcttgttgtttttggcaaagcagctagtctaacatgtaaagaaaaagtaaaaccaaattctaaaaaaattgaaattagtaaatcaaaaacagataatattattgagcgatttgataagattagaaatagcaaaggaaattcaacaactggagaacttcgtacttccatgcaacatataatgcagcaaaaatgtgcagtatttagaacgcatgaactcatatcaaatggtattgaagaatattcaaaagtagaaagctctatggatgacttagatattaaagacaaatcattaatctttaatacagacttggtcgaagctttagagttacacaatttaatggcacaatcaaaagttactcttcattctgctttaaatcgaactgaaagtagaggcgcacatgcaagagaagattataaagaaagagacgataataattggttagttcactctttagcctggttaaacgataacggagatgtaagtatgggttctagaggtgttcacatgaatactctaactaatcatgttcaaccaataccacctaaaagaagagtttattaat

SEQ ID NO: 200414 - DNA, 1684 bp, Unknown
  Bacterial polypeptide expressing nucleotide sequence isolated from the Sargasso Sea
tatgtatgatcacgatttattaatagtgggagcaggtctagctggcttgcgatgtgctgtagaagcacaaagattaggattggacgttgctgtcataactaaagttcatcctgtcagaagtcactcaaatgctgctcaggggggaattaatgctccactgacagatagaggagatgattggaagggacatgctttagacacaattaaaggaagcgattatctagccgatcaagatgctgttgaaattatgagtcaagaagctggtgaagctgttcttgaacttgaaagaatgggagttattttttcaagaggagatgatggtaaattaggaactcgaaggtttggggggcaaaaagtagctagaacattttttgtgggagctattaccggttcagctttactccatgtattatatgaacaatctctaaaattaggacttactgtttatgaagaatggtttgtaacatcactgataaagcatgaaggtgctgtcaagggagtcgtagctcttgatctaaaaacaggagaacttgaatcaattactgctaaatctgttgttatcgcagctggtggtgcagggcgagtatttgaaccttcaaccaatgcattaatatgtacaggcgatggtctatctttagcatggaataatggtgctggattgatggatatggaaatgattcaatatcatcctacaacgttggctagaactggtattttattatctgaagctgcaagaggggagggtgcttacctactgaattcagaaggtgacagatttatggaaaaatatgcacctgactatatggaattagcctcaagagatgttgtttcaagggctgaacaaactgagattaatgaaggaagaggcattgatggtaatgtacttcttgatttgaggcatcttggtaaagaatttattgaaactagattaggttatctacaagaagtttctgtcgaatttctgggtatagatatgtcagaaaaaccagttcctataagacctggaatgcactacattatgggtggaataaaaactgatgtagatggcgagacaggtgttccgggcttatatgcagcgggtgaatgtgcaaatgtaagtgttcatggagctaacagattaggtgccaattctttattggatacagttgtttttggaagaagatctgctgaaaaagcatccgactatgtgaaaacagtttcaaatgaagagattcctacaaaatcatatgtcgaaaaagatcttaagagaattaaaaatataatgaattcagatggtaacctcagagtttctgaagtaagaaatgaaatggctgaagctatgacaaaaggaattggtgtatttagagatcaaaaatctatggaatatgctaagtcagttgttgatcaaactaaaattaagtatagagattctataaagattgataataaaggaaaagtatataatactgatttactattcgctttagaacttggaaacatgattgattgcgctgaatctatagttcatggagctctaactagaaaagagagcaggggagctcatttcagaacagacttaaccgacagaaatgataaagattggctaaaacatacattggtttataaagaccttgaaggagaaatatcaattaaaacccctgacgtaactattactcaatggcaaccagtggaaagagtctattag

SEQ ID NO: 200415 - DNA, 787 bp, Unknown
  Bacterial polypeptide expressing nucleotide sequence isolated from the Sargasso Sea
catggccaaatttattttaccggtaaactcaagggttaaaaaagggaagcattttgaggctccaaaagaggccgaaaatgtgaggagatatattgtttatagatataatcccgatctcaatgagaatcctagaatggatatatttgatatcgatatggataattgtggtcctatggtactggacgttcttattaagatcaaaaatgagattgatccaagcctgacattcagacgatcttgcagagaagggatatgcggttcatgtgcgatgaacattaatggtggcaattcacttgcgtgtacgatttctgcatcgagcatcagcggtgatacaaaaatatatccattgcctcatatgccggtagtcaaagatctggtagcagatcttacacatttttatcaacaatatgcttccataaaaccttggctgcagtcgaagaaggagccacctgagcataaagaaagaattcagtcgaaagaagaacaagaaaaaatcgatgaacccgcagcatgcattttatgcgcttgttgttcaacaagttgccccagttattggtggaatagtgatcgttatcttggacctgctgctctccttgcatcatacagatggttagttgatagtagggatgattcaaaagatgaaagacttgatgaaattgaggactcttttcgattatacaggtgtcataccatcatgaattgtactaacacctgtccaaaaggcttgaatcctgcagaagcaatagccaatacaaagaaaatgctaatagaaagacattcacaataa

SEQ ID NO: 200416 - DNA, 467 bp, Unknown
  Bacterial polypeptide expressing nucleotide sequence isolated from the Sargasso Sea
aatgaaagatggagagtgcaaaggattaatagcatggaatcttaatgatggtacaattcatagatttagagcgcacacagtaattattgcaactggaggatatggaaaggtatactactctgctacatcagctcatacttgtacaggtgatggtaatgccatggtcttaagagcaggactacctttgcaagatatggaatttgtacaatttcatccaactggtatttatggacatggaacacttatatcagagggagtaagaggcgaaggtggctatttagtaaattcaaaaggtgagagatttatggaaagatacgcacccaacgcacaagatttaacgtcaagagatgttgtcagtcgatcaatgtctatagaaattaatgaaggaagaggtgtaggtaaagatcaagatcatgttcatttacatttaagtcatttagataaaagtgtaattgaaaatcgattac

SEQ ID NO: 200417 - DNA, 1456 bp, Unknown
  Bacterial polypeptide expressing nucleotide sequence isolated from the Sargasso Sea
actgaaagtactagagtttgatggaattgtcgtaggaggcggtggatctggcttgatggcttccttgcaattagcccaatccggtttcaaaaccgctgtagtttcaaaagttttcccaacaagatcacatactgtttccgctcaaggaggcattacttgtgcaatacaaagtgctgatccggatgatgactggagatggcatatgtacgacactgttaaaggttcggactttattggcgatcaagattctatcgagtacatgtgtcaagaaggccccaaagcagtttttgaacttgagcatatgggattacctttttctagaacagaggaaggaaaaatttatcagagggcttttggaggccaatcaaaggattacgggaaaggcggtcaagcagagagaacttgcgcagccgcagatagaaccggtcatgctcttttgcatactctttatcaagcaaaccttaaagccggaacaaattttctaagtgaatggtttgcagtcgatctggttaaaaatggagataatcaagtcgttggagtcatagctttcgaaatagaaacgggagagccatattttctaaaatctaaagctacagttttagcaacaggcggcgctggaaggatataccaaacgacatcaaacgcgatgatcaacactggcgatggaactggaatggttctaagagccggcttcccagttcaagacatggagatgtggcagttccatccaactgggatctatggtcacggcactctagttactgaaggatgcagaggtgagggcggttacctggtgaataaagatggtgaacgattcatggaaagatatgcacccaattataaagatcttgccagtagagatgtagttgcaagatcaatgatgttagaaattcttgaaggtagaggatgtggccccgatgcagatcacgtttaccttaaattagatcacttgggacctgagattgttcataaaagacttccaggcataacagaactttctaaaacatttgctcacgttgatcccgttgaacaccctattcccgtagtgcctacttgccactatgcaatgggaggaataccaaccaatgttcatggtcaagttcttactcaagcaacagacggaactgacaatgtagttcacggtctctatgcggcaggagaagcagcttgcgtctctgttcacgggggcaatagactgggtggaaactctctcttagatcttattgtctttggaagatctgctgggcttcatatcgaaaatgcactcaaagatggaataactttatctaaggctaccaatgacgatattgatcaagctttagttaatttaaatagggtgaatatcagttcaactggtgaggatgttgcaactgtaaaagctgagttacaaaaaaatatgcaattaaacttaagtgtgtttagaacccggggacttaatggagaaggggttagttga

SEQ ID NO: 200418 - DNA, 541 bp, Unknown
  Bacterial polypeptide expressing nucleotide sequence isolated from the Sargasso Sea
tatggttgaattatcgttacctcagaactcaaaattaacaaaaggtaagacctttggtaaaaaaggcaagaccatgacttgtcttaaagtttacagatggaatagagaatccggatccaatccgagcatcgatgaatattttatcaataaaaagaaatttggaccaatgatcttagatgcattgatgtatatcaaaagttatgtcgatccaagtttaaccttcagaagatcctgcagggagggaatatgtggttcctgctcaatgaatattaacggtacaaacactctagcatgcataaaacctctgccagattctaaagaaattaatatttatccacttcctcatatgaaagtgttaaaggaccttgttccagacctaacagaattttttgaacaatacaaatcaataaaaccttggataaaaaatggcaaaaaaaataaaaaagaaaatacccaatccccggaggatagaaaaaaacttgatggtttatatgagtgtgttttatgtgcttgttgctcaacttcttgcccaagctactgg

SEQ ID NO: 200419 - DNA, 1284 bp, Unknown
  Bacterial polypeptide expressing nucleotide sequence isolated from the Sargasso Sea
cagaggtgatgattggagagatcatgctttagcaactataaagggcagtgattatttagctgatcaagatgcagtggaagttatgtgtagagaagccggggaagcaattattgagttagagaatatgggtgttatttttagtagagatgatgatggtaaattggggaccagagcttttggtggtcaaaaaaaagcaagaacctactttgttggagcaattactggcagtgcattacttcatgttctttatgagcagtctgttaagtataatttgcatatatatgaagaatggtttgttacaaaattaattaaacaagacggaaagatagctggcgcaattgcatttgatataaaaacaggtcaaatggagttaataactgcaaaggctgtagttcttgctacaggtggagctggaagagtttttgagccttctactaatgctctaatttgtactggagatggtttaagtcttgcaatgcaagtaggtgctccagtaatggatactgaaatgattcagtaccacccaaccacactcgcaggaaatggaatattattatcggaagctgccagaggagatggtgcttacctaatcaattctgaaggggatcgatttatggaaaaatatgcccctgattatatggagctagcttctagagatgtagtatcaagggcagagcaaactgaaattgacgaaggaagaggggttgatggttgtgtttatttagatttaaggcatctcggaaagaagtttattgaagaaagacttggatatttgcaagaagttgctcttgaatttagaggcattgatctttctgagtctccaattccaattaagcctggaatgcactatataatgggaggtattaaaactgacctggatggagcaactaatataccaggcctatatgctgcaggtgaatgtgcaaatgtaagtgttcatggggcaaacagattaggagcaaattctttattagacaccatagtttttggaagaagggcagccgtaaatagcgtggattacatcaagtcatcaaattcagtagatattgatgaaagagaactttcaaaagaaaaatccaggattcaaaacattttggacaggcctaaaggaatgaggtcagctgaactaagaaataagatgggatcgactatgaccaaaggaattggggtctggagagataaaaatagtatcagtgaagctataacaaaaatgaaagatttaagaggccagttgccaaatgtatctattgaaaataaaggtaaggtatttaatacagatttagt

SEQ ID NO: 200420 - DNA, 365 bp, Unknown
  Bacterial polypeptide expressing nucleotide sequence isolated from the Sargasso Sea
ttggttgcacactaagaaggaagatccaaatgaagagtggcttcaatcaaaagaggacagagagcaacttgacggtttatatgagtgtatcatgtgcgcatgctgttcaacttcatgcccaagttattggtggaattctgataaatatcttggtccggctgccttacttcaagcctatcgttggataattgatagcagggacgatgaaagagatgaacgacttgataagttggaagatccatttaaattatatcgctgtcacactatcatgaactgtgcaaaagcatgccctaaaggactaaatcctgcaaaagcaattgctagtattaagaaaatgttagttgaaagaagggtttccaaataac

SEQ ID NO: 200421 - DNA, 1183 bp, Unknown
  Bacterial polypeptide expressing nucleotide sequence isolated from the Sargasso Sea
atgaatggaaaaggatatttagaagcgtcaagtcttcccgttaaagaattcgatggaattattgtcggcggcggcggttcaggacttatggcaggtctacaattagctcaatctggcatgaataccgctgttgtttctaaagtttttcctacaagatctcacacagtttctgctcaaggaggtataacttgtgccatcgcaagtgctgatcccaatgatgattggagatggcatatgtacgatactgttaaaggttcagattttattggagatcaagattctattgaatatatgtgccaagaaggtcctgctacggttttcgaactcgaaaatatggggctaccattttcaagaacagaagatggaaaaatttatcaaagagctttcgggggacaatcaaaagattatggaaaaggcgggcaagcagaaagaacttgtgcggctgctgatagaactggccatgctcttttgcacacgctatatcaagccaatattaaggccggaactaattttttaagtgagtggtttgctgttgatttagtcctcaatgattcaaaacaggtcactggtgttatcgcgtttgagatagaatctggagaggcctactttttaaaagctaaagctacagtcttagcaactggcggagctggaagaatttacaaatctacaactaacgcgcttattaatactggagatggcacaggaatggctttaagggcaggtttagctgttcaagatatggaaatgtggcagtttcatccaactggaatccacggcgcaggaacacttgtcacggaaggatgcagaggagaagggggatatttaataaataaagatggtgaacggtttatggaacgttatgctcccaacgcaaaagacttagcgagtagagatgttgttgctagatcaatgatgttagaaattatcgaaggtagaggttgcggacctgaaaaagatcattgttttttaaaactcgatcacttaggagcagaattactccacaaaagacttcccggtataacagagctttcgaaaacttttgctcacgttgacccagcagaccatcctatacctgtagttcctacttgccattatgcgatgggaggaattcctactaatgtacatggtcaagttttaacgcaacaagccgacggttcagataaggtggttgacggactttatg

SEQ ID NO: 200422 - DNA, 553 bp, Unknown
  Bacterial polypeptide expressing nucleotide sequence isolated from the Sargasso Sea
aatggcgcaattttccttaccaaaaaactccaaaatcggcaccggcaaaacttacgaaggtgatcaaaagtcggctaaaaaacgctcctttcgcatttataggtgggatcccgatactgaagagaatcctcgtattgacacttatacgataggtctcgaggactgcggtccgatggtactagacgctatcatccacataaaagacgaaattgatccatcgctaaccttccgccgatcgtgtcgagaaggtatttgcggatcgtgcgctatgaacatagatggtaccaacactttggcctgcaccaagtctatcgaatcgattaaaggggacgtaaaagtttatccacttccgcatatgagtgtcttaaaagatctcgtgccagatctcaaacacttctacgcacaatacgcatccataaaaccgtggttgcaatcggatactcccgcacctccggataaggaaagattacaatccaaagaagatcgagaaaaactagatggattatatgaatgtatcctgtgcgcctgttgttccacgagttgtcctagctac

SEQ ID NO: 200423 - DNA, 769 bp, Unknown
  Bacterial polypeptide expressing nucleotide sequence isolated from the Sargasso Sea
aatggcaaagtttacactaccagtcaactcaattgtaaaaaaaggcaatacttactctgatttaaataaatctgagaatatgcttactgtagagatatatagatataatccagataatcaaagtaatccatatacagatacctaccttttaaataaagataactttggtcctatggcattagatgtactaatttacataaaaagtaaaattgaccctactctcactttcagaaggtcatgcagagaaggtatttgcggatcttgttcaatgaacataaatggcacaaataatcttgcgtgtattacggatatttctaatgaaagtaagctaaaatttaatcctcttcctcacatgcctgtaattaaagacttagttcctgatctgaataatttttatgctcagtataagtctattaaaccttggttaataaatgataataagcctgagagggaacatatccagtctcaggaagatagatctaagcttgatggtttagttgaatgcgtattgtgcgcatgttgctcaaccagttgcccaagctattggtggaactcagataaatacctgggtcctgcaaccctaatgcatgcatataagtggataattgatagtagagatactgccaaagaggagaggctctcaggcctagccgataagtttaaactttatagatgccatactattatgaattgcactaaaacttgccctaaaaatctaaatccagcaagagccatatctgaaataaaaaaaatgcttgttaaagcttaa

SEQ ID NO: 200424 - DNA, 781 bp, Unknown
  Bacterial polypeptide expressing nucleotide sequence isolated from the Sargasso Sea
atggttcagctgagattgccaaaaaattctagggttttgacgggtaaaacctggccaaaaccagaaggcgcatctaatatccgtaagtttaaaatctatcgctggtcgcctgacgatgacgaaaacccgcgagttgatacatattttgttgatatagactcctgtggacctatgatacttgatgctcttattaagattaaaagcgagattgatcctactctaacttttagacgctcttgccgagaaggtatttgtggatcttgtgctatgaatattgatggtattaacactttagcttgtatttatggacttgatgaaattaaaggcgacataaatatatatccacttcctcatatgcctgtgattaaggatttaattcctgatttaaccgatttctacgctcaacatgcttctattatgccttggctagaaaccaaaacaaataggcctaatgaagaatggaagcaatccatagaagatcgaaaaaagttggatggtctttatgaatgtgtgatgtgtgcttcttgctcaacatcctgtccttcttattggtggaatagcgatagatatttaggtccagcagcgcttttacatgcttatcgctggattattgatagtagagatcaagcaactgatgagcgactcgaagacttggatgatccatttaaactgtatcgttgtcatactataatgaactgtgcaaaaacttgtccaaaaggcctaaaccctgctttagcaatagctgaagttaaaaagttaatggttgaaaaaaccaactaaa

SEQ ID NO: 200425 - DNA, 681 bp, Unknown
  Bacterial polypeptide expressing nucleotide sequence isolated from the Sargasso Sea
ccaatatatcggggcaggcatataagagaataaataatgaggaccatttgatacctggattattttctgttggtgaagcggcatgtgtttcggttcatggtgcaaatagattagggggaaattccctgcttgatctcgtggtatttgggagagctaccggtaagcatatacaggaagaattaaaatcaggtgggggtgttacttcagcaactaaaggcgatatagattcgtcattagaaagactaaataaattaaatgaatcagattcaggctttgatacagctgatatcaaaaaagaacttcaagaatgtatgcaaaattattttggtgtttttaggcgaggggaatttatgaagcaaggacttgatcaactaaaagatttaaaggagaaagttgataatcttcatttaatcgataaaagtgatgcatttaatactagcagagtggaagcaattgaattacaaaatttatttgatgtagcagaggcaaccgcaatatccgcatatgaaagaaatgaaagcaggggagcgcatgcaagagatgattatcctgatagagatgatgaaaactggttgtgccatacaatgtttgaccctaaatctaaattagttagtaagagagaagtaaattttaatccatcaaaagtagaggctttccctcctaaggtaagaacatattaat

SEQ ID NO: 200426 - DNA, 946 bp, Unknown
  Bacterial polypeptide expressing nucleotide sequence isolated from the Sargasso Sea
gagagtcgtggtgataattgggatgaccatgcatataacactgttaaaggtagtgattaccttggagaccaagatgcaatagaaattatgtgtcaagaagctggtcctgcagtcgttgaacttgagcatatgggcgttgtcttcaatcgagatgaaaacggacgactaggtacccggcattttggtgggcaagaagttgcacgaacattttttgtagctgatattacaggtcaagcccttctacatgccttgtatgaacaaattatgaaatataacccacgtgtgtatgaagaatggtttgtaacctctctagtaatcgaagacggaaaatgttgtggagttgtagctttagaattaatgactggacaaattcatttaatcaaagccaaggctgtaatactagccacaggaggtacaggaagatgttttgaaccaagtacaaatggtcttgttgttactgcggatggacaaggtttagcttatcaagttggtgttcctcttatggatatggaaatggttcaatatcatcctaccactctcaagggaaatggcgttttaatgacagagggtgctcgtggagaaggtggttatcttcttaattctgaaggcgaaagatttatgaaaacatatgctcctaatatgatggaacttgcgtctcgtgatgtggtttctcggtctgaacaaacagaaattaatgaaggcagaggaattgatggttgtgttcttttagatttaagacatcttggtcgagaattgatagaaacaaaacttgcctatattaatgaagttgcaatggattttgctaatgttaacttagcagaagagccatgcccaatacgtccaggtaaccattatgaaatgggtgggattaagactgatgtacatggagttactagtatgcctggcttatatgctgctggtgaatgtgcaaatgttagcgttcatg

SEQ ID NO: 200427 - DNA, 769 bp, Unknown
  Bacterial polypeptide expressing nucleotide sequence isolated from the Sargasso Sea
atggcaaaatttactttaccaataaattcaatagttaaaaagggaaagacttataagttagatagcgatcctaaaaatattttgactgtggatatttatagatataatccagatgatggttctaacccatctattgatacttatattcttgataaaaataattttggaccaatggccttagatgttcttctttacataaaaaacaaagtagactcaactctatcttttagaagatcatgtagagagggtatatgtggttcatgttctatgaatataaatggtacaaatacgctggcatgcatattgaatatcgccgaagaatcacatcttaagatctatccattaccacatatgcctgttgtaaaagacctgtttccagatatgaaaaaattttacaaacaatatgagtcaataaagccatggcttattaatgataacaaaccacagcgagaacatcttcaatctcaatcagatagagaaaaattagatggtttgattgaatgcgttttatgtgcctgctgctcaactagctgtccgagttattggtggaattctgacaaataccttggccctgcgtctctattacatgcctataggtggattatcgatagcagagatactgccaaaaaagagagattgtctaatttagctgataaatttaaattatttagatgtcatacaataatgaattgcacgaagacatgcccaaagaatttaaatcctgctaaagctatatcacatatcaaaacaatgttagcttcagactaaa

SEQ ID NO: 200428 - DNA, 1010 bp, Unknown
  Bacterial polypeptide expressing nucleotide sequence isolated from the Sargasso Sea
gatgagtaaagattacgaaattattcaacatcaatatgatgtagttgttgttggtgcaggtgggtctggcctgaggtcaacgcttgggcttgtagaatctggctttaagactgcatgcatcactaaggtttttcctacaagaagccatactgttgcagcacaaggcggaatcagtgcagctcttgggaataatggagaggatgactggaggtggcacatgtatgacacagtcaaaggctcggactggctgggtgaccaggatgcgattgcttatatgtgtaaggaagcaccaaacgcagttttagaattggagcgttatggtattccattctcgagaacagatgatggaaaaatttaccaaagagcatttggaggaatgacgacacatttcggcgatggtatagcacaaaggacatgtgctgctgcagatcgaacaggtcatgcgatgttgcataccctgtatcaacaatccattaaaaataaagctgaattcttcattgaatattttgcactcgatttaattatggaagatggtgaatgcactggagttgtagcgctagaaatggcaactggcaaaatccatgcttttcgggctcaacgggtaatattggcaactggtggacacggaagagcttacttctcctgcacagcagctcacacatgtacaggtgatggttctggtatggcacttagagcaggtttgcctttacaagacatggaatttgttcaatttcatccaactggtatctatggtgttggatgccttattacagaaggtgttcggggagaaggaggatatcttactaattctgatggcgagcgatttatggaacgttatgcgcccaatgcaaaagaccttgcctcaagagatgttgtgagtcgatctatgacaatggagatacttgaagggagaggtgtgggagagaaaaaagaccatattcatcttaatcttcagcacttagggcctgaagtaatcgaagagcgtcttcctggtattgctgaaacagcaa

SEQ ID NO: 200429 - DNA, 784 bp, Unknown
  Bacterial polypeptide expressing nucleotide sequence isolated from the Sargasso Sea
atggctaaatttacattaccagttaattccatagtaaaagagggaaaagtttttaaggataacttttcagaaactcctttgcttaaaactattcttgtttatagatataatccagataaaagtgaaaatccaagagttgataaatatattctagatacgaccaactttggcccaatgttactagatgctttgatatatattaaaaataatatagattcaacaataacatttagaagatcttgtagggaaggaatatgtggatcatgttccatgaatatagatggaaaaaacgctttagcttgcacaaaaggtatagctgattatggagacgaaattaaaatatatccattaccccatatgaaagtggtgaaagacttagttaccgatttaacaaatttttataaacaatacaaatctgttcaaccatggcttcaagctgacgaaccacttgataaaagtcaagaaagacttcaatctaagaaggaaagagagcaattggatggatcggatgaatgtatcttatgcgcatgttgttctactagctgtccaagttattggtggaatggtgataaatatttaggtccggctgcacttcttcaggcttatagatggatttttgattcaagagataagaagcaaaaagaaagggtaaaaagcatatcggattcctttaagttatatagatgccatactattatgaattgcactgatgcatgtcctaaaggacttaatccagctaaaaaaattgcaaaaataaaaaagttaattgttaatacagcataat

SEQ ID NO: 200430 - DNA, 778 bp, Unknown
  Bacterial polypeptide expressing nucleotide sequence isolated from the Sargasso Sea
gatggccgaattagtattacctaagaattcaaaagttaaagatggaaaaaaatatcctcttgattcgggtagtaaaaataaaaaatcattcaaagtatatcgttgggatcctgagaaaaatgataacccaagatatgatttatatgagattgatctcgataaatgtgggcctatggttttggatgctcttattaaaattaaagatgaaatagactcaacacttacttttagaaggtcatgtcgggaaggaatctgtggatcttgtgctatgaatattgatggcgtcaacactttagcttgcacaatggccatagaagatacaaagaaagaggtaggcattaatcctcttccacatcaaccagtagtcaaggatttagttccagatctgacaaatttttataatcaacataaaaagatacaaccctggctgaaaaccaatggtaagtctacagaagctgaattctctcaatctaaggaagaaagagagaaaattgatggattatatgaatgtattatgtgcgcctgttgctcaacatcttgcccaagttattggtggaattctgataaatatcttggtcccgcagcccttttacaggcatataggtggattagtgatagtagagatgaggaaaaacaaaagcgactagaccaacttgatgatgaatttaaagtatatagttgtaggacaataatgaattgttcaaaagcatgccctaaagggttatccccagcaaaagctatcgcaggtataaaaaaagaattggcttcaagaaaataa

SEQ ID NO: 200431 - DNA, 702 bp, Unknown
  Bacterial polypeptide expressing nucleotide sequence isolated from the Sargasso Sea
gatggctgaattagtattacctaaaaattcaaaagttaaagatggtaaaaaatatcctctggattctgaaagtagaaataaaaaatcatttaaaatttatcgttgggaccctgaaaagaatgaaaacccaagatacgatttatacgagatcgacttggataaatgcggaccaatggttttagatgcacttattaagataaaagatgaaattgattctactcttacctttagaaggtcatgtcgtgaaggaatatgcggatcatgtgcaatgaatattgatggtgttaatacattagcatgtacaatggcaatagaagacacaaaaaaagaagtaggaatcaatcctttaccgcatcaacctgttgttaaggacttggttccagatttaacaaatttttataatcaacataaaaaaattcaaccatggttaaaggctaatggtaaatctgcagaaactgaatactctcagtcaaaagaagatagagaaaaaatcgatggattgtatgaatgtattatgtgtgcatgctgttcaacatcttgtccaagttattggtggaattctgacaaatacttaggacctgcggctcttttacaagcctatagatggattagtgatagcagagacgaagagaaagaagaaagattagatcaacttgatgatgagtttaaagtttatagctgtagaacaatcatgaaatgttc

SEQ ID NO: 200432 - DNA, 2002 bp, Unknown
  Bacterial polypeptide expressing nucleotide sequence isolated from the Sargasso Sea
ctgatttataccgattcattagtggttggtgccggattggcaggcctgagggtggccattgcctctaaagagcgtgggttagataccttagtgctttcgcttattcctgctaaacgttctcactccgccgcagcgcagggggggatgcaggcaagccttggcaacgcagttaaaggcatgggcgatgatgaagacgtgcactttcaagacactgtgaaaggttcggactggggctgcgatcaagaagtcgccaggatgtttgcccattgtgcgcccaaggcggtacgcgaattagccaactggggcgtgccttggtcgcgcgtcagcgctggacctcgagaagtgattgttaacgcgcaaaaagtcacgttgcaggaagccgaagaagcccacgggctgatcaatgcccgcgactttggtggcaccaaaaagtggcgcacctgctacacggctgacggtaccggccactctttactctatgccatggataacaaagcgatttcgatggatattcccgtccatgaacgcgttgaagcgctagcgattatccacgacggtcaacgctgtcacggggtgattgcccgctgtttaatcacgggcgagttgcgtgcctacgtcgcgaaatcgaccaccatagccaccggtggctatggccgcatttatgaagtatcaaccaatgcgattatctgcgaggggataggtcaggcgctggcgcttgaaacgggcgttgctacccttggtaatatggaggccgtgcaattccaccccacggcgattgtgcccgtgggcattctgacgaccgaaggttgccgcggtgacggtggcttgctgcgggataaagacggttaccgttttatgccggactatgagccagagaagaaggagctggcatcgcgggatgtggtatcccgccgcatgacagaacacatgcgtaaaggtaagggcgtcgatagcccctatggcccacatttatggctcgatatcaccctgctggggcgcaaacatatcgaaaccaacttgcgtgaagtgcaggagatttgcgagaacttccttgggatcgaccctgcgaaggattggatccctgtgcgtccgactcagcattactccatgggcgggatccgcactaaagcaacgggcgagagtccgcagcttaagggcttattcagcgtgggcgaagcagcctgttgggatatgcatggctttaaccgcttgggcggtaactcgctcgccgaaactgtagttggcggcatgattatcggcaaatatgttgctgatttttgtgaaaataatagccttgaaatcgatactcagcttgccgaaaagtttatgcaacaggtacagacagaaatcgataccttagtcgatggcgaaggccacgaaagtcccttcgaacttaagcgcgaaatgcagcgaattatgatggactacgtggggattttccgtaacggcccagagcttgataaagcggtgactgagctaaaagccctgcttgagcgctcacgtaagctcggagttaagtgtaagaaacgccatgccaatcctgagctagtagaagcgctaagggtgaagcgcatgctcaaggtggcgctaacggtagcctgtggcgcggcagcgcgtaccgagagccgtggtgcccacgcccgtgaagattatccgcagcgtaacgacagagattggcttaaccgtactctcgccagttggcccgatgccgaggcgttggcccctgtattaagctacgagccgttggatgtgatgaagatggagctgccgccgggataccgggggtatggtatcgacaatgctattgctcaccccgataccgccaaacgcgagcagcaaattgccgagattttggcagaactggatgacgatgccgatcgttatcaacgccaggcggcgctgatgccctttgagctgccgccgagcctacaagctaaaaatgaacgtttaagtgataccttacaaagaccatctgccaatgcgctaggagaaaaatcataat

SEQ ID NO: 200433 - DNA, 2002 bp, Unknown
  Bacterial polypeptide expressing nucleotide sequence isolated from the Sargasso Sea
ctgatttataccgattcattagtggttggtgccggattggcagggctaagggttgccattgcctctaaagagcgtgggctggataccttagtgctatcgcttattcctgccaaacgttctcactccgccgcagcgcaggggggaatgcaggcaagccttggcaacgcagttaaaggcatgggtgatgatgaagatgtgcactttcaagacactgtgaaaggttcggactggggctgcgatcaagaggtcgccagaatgtttgctcactgtgcgccaaaggcagtacgtgagttagccaactggggtgtaccttggtcacgcgtcagtgctggtccgagggaagtcattgttaacgcacaaaaagttactctacaggaagccgaagaagcccacgggttaattaatgcccgcgactttggtggcaccaaaaagtggcgcacctgctacaccgccgacggtacaggccactctttactctatgccatggataacaaagccatttcgatggatattccggtccatgagcgcgtcgaagcgctggcgattatccacgatggagagcgttgtcacggggtgattgcccgctgtttaatcacgggcgagttgcgtgcctatgtcgcgaaatcgaccacgattgccactggtggctatggccggatttatgaagtctcaaccaatgcgattatctgcgagggtataggtcaggcgctggcgctcgaaacgggcgtggcgacccttggtaatatggaagcggtgcagttccacccaacggcgattgtgcccgtagggattttaaccacagagggttgccgcggtgacggtggcttgctgcgggataaagacggctaccgttttatgccggactatgagccagagaaaaaagaactggcatcgcgggatgtagtgtctcgccgcatgaccgaacatatgcgtaaaggtaagggcgtcgatagcccctatggcccgcatttatggctcgatatcaccctgcttgggcgcaaacatatcgaaaccaacctgcgtgaagtgcaagaaatttgtgagaacttccttgggatcgaccctgcaaaggattggatacccgtgcgtccgactcagcattactccatgggtggcattcgcaccaaagcaaccggtgaaagtccgcagcttaagggcttattcagcgtgggcgaagccgcctgttgggatatgcatggctttaaccgcttgggcggtaactcgctcgccgaaaccgtagtgggcggtatgattattggtaaatatgtcgctgatttttgtgagaataatagccttgaaatcaatacccagcttgccgaaaaatttatgcggcaagtacagactgagatagacaccatagtcgatggcgatggtcaagaaaaccccttcgaacttaagcacgcaatgcagcgaattatgatggattacgtggggattttccgtaatggccctgaactcgataaagcagtgacagagctgaaagccctgcttgaacgttcacgcaaactcggtattaagtgtaaaaaacgccacgccaacccagagctggtggaggcattgagggtgaagcgcatgctcaaggtagcgctgaccgttgcttgcggcgctgccgctcgcaccgaaagccgcggtgcccatgcccgtgaagattatccacagcgtaatgaccgcgattggcttaatcgcaccctcgccagttggcctgatgccaatgcgttggaacccgtgttgagctacgagccgctagatgtgatgaagatggaactgccaccgggataccggggttatggtatcgacaatgcgattgctcaccccgataccgctaaacgtgagcaacaaattgctgaaattttggctgtgctcggggaggatgccgatcgctatcaacgccaagcggcgctgatgcctttcgagctgccgcccagcctgcaagctaaaaatgaacgtttaagtgataccttacaaaaaccctctgccaatgcgttaggagaaaaatcataat

SEQ ID NO: 200434 - DNA, 718 bp, Unknown
  Bacterial polypeptide expressing nucleotide sequence isolated from the Sargasso Sea
gatggcacaagtacaattttcagtttatcgttacaatccagatgttgacaacgcaccccgtatgcaagattacaccttgcaaattgacgatggtcacgacatgatggttctggatgcacttttattattaaaagagcaagatccttcactttcattccgtcgttcatgccgtgaaggcgtgtgtggttctgacggtgttaacatgaatggtaagaatggtttagcatgtattactcctttatccacgttacaaaataacggtaaaggtacaatagtagttcgtcctcttccaggattacctgtggtacgtgaccttgttattgacatgagtcagttctacactcaatacgaaaaagttaaaccttatctaattaatgacacacctgctgcaggtgaacgtcttcagtctattgaagaacgtgataaattagatggcttatatgagtgtattttatgtgcatgttgttcaacatcgtgtccttcgttctggtggaatccagacaagttcattggtccagcaggccttcttcatgcttaccgtttcttagctgatagccgagatacagcaacagaagagcgtttagcagacctagacgatgcgttcagtgtgttccgttgtcacagtatcatgaactgtgttagcgtttgtcctaaaggtcttaatccgaccaaagcgattgggcaaatcaaatctatgttattaaaccgttcggtttaa

SEQ ID NO: 200435 - DNA, 667 bp, Unknown
  Bacterial polypeptide expressing nucleotide sequence isolated from the Sargasso Sea
tcaaatcaatgctcaaggcgatgagaaagtagttgaaggtttatttgctgtaggcgagattgcatgtgtatctgtgcacggtgcaaaccgtcttggtggtaactcattgctagatttagtagtatttggtcgtgccgcaggtaatttcttaggtacatacctcagagatgttgaagtatcaaaagctgcctctgaatcagacttagaagcgtctcttgcacgttttaatcgttgggaaaactcaacagctggtcaaggtgaagatcctgttcaaattaagaaagatcttcaacaatgtatgcagcttaacttctcggtattccgtgaaggtgattcaatggcgactggtcttcaagaacttaaagaaattcgcgagcgtttacaacatgctcgtcttgacgataaatcgtcagacttcaacacgcagcgtatcgaatgtcttgaacttgataacttaatggaaacagcttactcaacagcagtagctgcaaacttccgaacagaaagccgtggtgcacactctcgttttgacttcccagatcgtgatgacacgaattggttatgtcactcagtatacaatcctgttacggatgaaatgagtaagcgtgacgtaaactacgcgcctaagacgcgtgaagcatttccacctaaagcacgtacatactag

SEQ ID NO: 200436 - DNA, 678 bp, Unknown
  Bacterial polypeptide expressing nucleotide sequence isolated from the Sargasso Sea
gatggccgaactagtattacctaaaaattcaaaagttaaagatggtaaaaaatatcctctggaatctgacagtagaaataaaaaatcttttaaaatttatcgttgggatcctgaaaagaatgaaaacccaagatacgatttatacgagatcgacttggataaatgtggaccgatggttttagatgcgcttattaagataaaagatgaaattgattctacccttacttttagaagatcatgtcgtgaaggaatatgtggatcatgtgcaatgaatattgatggagtgaatacattggcatgtacaatggctatagaagatacaaaaaaagaagtaggaattaatcctttgccccatcagcctgttgttaaggatttggttccagatttaacaaacttttacaatcagcataaaaaaattcagccatggttaaaggccaatggtaaatctgcagaaactgaatactctcaatcaaaagaagatagagaaaaaatagatggattgtatgaatgtattatgtgtgcatgctgttcaacatcttgtccaagttattggtggaattccgacaaatacctaggacctgcagctcttttacaagcctacagatggatcagtgatagcagagatgaagagaaagaagaaagattagatcaacttgatgatgagtttaaagtttatag

SEQ ID NO: 200437 - DNA, 1394 bp, Unknown
  Bacterial polypeptide expressing nucleotide sequence isolated from the Sargasso Sea
cgagccagcaagtcgagcatgcgctgcagctgacaggaccggccatgcattactccataccctatatcaacaaagcctcaaaaataatgttgatttttataacgaatatttcgctatagacttactaaaagatgacaatgatacaatttgtggtcttttagcaattagtatagaggacggatcattgcatcgttttattgcaaaaatgacaattctcgcaactgggggttatggaagaatttttcaatcctcaacaagtgcccatatttgcactggtgatggagcaggcatagcgctgagagccggtcttcctttatctgatatggagtttattcaatttcatccaacaggaatttacggtgtgggtgttttaatttcagaagcagctagaggtgaaggaggcattcttaagaacaacgaaggcacaaggtttatgttagaatatgccccgaatgcaaaagatcttgctgctagagatgttatatcaagattcataagtaaagagattagtgcaggtagagggtgcggacctaacaaagattatataaatctccatttggaacatcttgatgctgatatgcttgcaaaaagactacctggtatttctgagtcagttaaagccttttgtggaagagatatttcaaaagagccaatcccagtaattccaaccgttcattattgtatgggcggaattcctacaaactttaaagcagaggttttgaaaccaagtgactctaacacagaagaagtctgtgagggactaatggctatcggagaagctgcatgcgcttcagttcatggagctaatcgacttggaacaaatgctttagctgagctcgtagtttttggaaggggcgcagcaattcaggctggccaagttattgataccaaagagtcattgagaaccccatctgtgtcgcaaacaaattctatcatagagagattagaatccattaaaagtaacaaaggtgatgtttcagtcggtgagctaagagagaggatgcaaaagactgttcaaaaaagatttggtgtttacagagaaagtgaaactttgaaattaggcaatgatgaattagcctcaatgtcacaagatttaaaacatattaaagtcaaagatcagtcagatgtttttaatacagatttagttgaagctttagaactacataatttaatgcaagttgctggaagtgttggtgtttctgctgagcaaagaactgaaagtagaggtgctcacgctagagaggactttccagacagagatgatgaaaattggttaaaacacactcttttttggggtgatgtcactgattataaagtcacccatagaccagtgagaatgactacactgagtaatcaaatctctgtcatccaaccacaagtaagggtttattaaa

SEQ ID NO: 200438 - DNA, 1387 bp, Unknown
  Bacterial polypeptide expressing nucleotide sequence isolated from the Sargasso Sea
aggacatactgtaaaagaaggtgagtctcctgcttttagagcatgctatgctgccgatagaaccggacacatgatacttcaaactctatatcaaaaatgtgtatcgatgggggtagaattttttgatgagttccaagtattagatataaaaattgaagatggagtgtgcaaaggtgttgttgcttttgaactctctactggagatatccacatatttgaatcaagagcagtaacttttgcaacaggtggttttgggagaatatttaaagtaagttctaatgctcactcactaacaggtgatggtcctggaattttatatcaaaaaggaattcctcttgaagacatggaattttatcagttccatccgactggtatttacagactaggaattttgttatccgaagcagcaagaggtgagggaggaattttaaggaataaagatggtgaaagatttatggaaagatatgcaccttctataaaagacttggcacctagagatatggtttctcgagctattgctacagaaattagtcaaggaaatggcgcaggaccagatagcgattatgtatatcttgacttaacacatcttggagctgaaacaattaagaaaaaacttcctgatattacagacttcgtaagaacatatgtaaaaattgaacctattaatgaacctataccagtacaaccaactgctcactatgcaatgggaggaataccaacagatgttaatggaagagttctaagtgatgaaaaaaacactgtattaccaggcgtttatgccgccggcgaagctgcttgtgtaagtgttcatggagcaaacagacttggcactaactcattacttgacattgtagtttttggtaagagagcaggggaaagcatgcttgaatatgtatctaaaaccaaatccacttcaatcagtgacagtgcagctgatgatttagtaaataaagtaaataacctaattgagaaggagcatactgatgaattttcagtaggaagaataaggaatgatttacaagaatcaatggaagagaatgcaaaaatatttagatctgaagaaactctgagcaagcaaactgaaattcttgaaaacttaagagagcgatatgaaaatgtaacaatatttgataaaggaaaagtatttaacacagaattaatggaagcaatagaattagactaccttcttgatatgtctgaatcaacagtagcaagtgctctagcaagaaaagaatctagaggtgctcattcacgacaagacttcccagatagagatgatagtaattttatgaaacattcatttgcatttaaaaatggtaactctgcaaatttaagatataaagatgtagaattaggaaaatacgaacctatggaaagaaaatattaa

SEQ ID NO: 200439 - DNA, 1059 bp, Unknown
  Bacterial polypeptide expressing nucleotide sequence isolated from the Sargasso Sea
tccacccaactggagtttacggtgcaggagtgttaatcactgagggagcaagaggagaaggtggatatctaactaatagtgatggtgaaagatttatggaaagatatgctccaaatgcaaaagatctagcatcaagggatgtagtaagccgagcaatgacaattgaaattagtgaaaatagaggttgtggagacaatgccgatcatgtgctccttcatcttgagcacattgatgctgatacattacataaaagattacctggtatttcagaaactgcaaaaatatttgccggagttgatctaactaaagatccaataccagttcttccaacggttcattataatatgggtggtataccgacaaattatagaacagaagttctaaggccaacaaatgaaaatccagataatgtatgtgaaggtttaatggctgttggtgaggctgcatgtgtttctgtacacggtgctaatagattaggaacaaattcattaatcgatcttgttgtttttggcaaagcagctagtctaacatgtaaagaaaaagtaaaaccaaattctaaaaaaattgaaattagtaaatcaaaaacagataatattattgagcgatttgataagattagaaacagcaaaggaaactctacaactggagaacttcgcacttccatgcaacatataatgcagcaaaaatgcgcagtatttagaacacatgatctcatatcaaaaggtattgaagaatattcaaaagttgagagttcaatggatgacatagatattaaagacaaatcattaatctttaataccgacttggtcgaagctttagagttacacaatttaatggcacaatcaaaagttactcttcattctgcattaaatcgaactgaaagtagaggtgcacatgcaagagaagattataaagaaagagatgataataattggttagttcactctttagcctggttaaacgataagggagatgtgaatatgggttctagaggtgttcatatgaatactctaaccaatcatgttcaaccaataccacctaaaagaagagtttattaat

SEQ ID NO: 200440 - DNA, 887 bp, Unknown
  Bacterial polypeptide expressing nucleotide sequence isolated from the Sargasso Sea
agaggagaaggagcaattttagttgataaaaatggcgaaagtccagtcaaaaatcttaaaaatcgtgatctagctactagagatcaggtgagtagagcaattttgaagaatatgcatgataataaagttgatcatgttggcttagatcttagatatattgatccagaaaaaattgtagaaagatttcccactatcttaagtagatgtcaggattatggtgttaatcctttaaatgaggttattcctgttgctcctgcagctcactattggatgggaggggttaaaactgacttaagtgcatctactacaaaaaaaggattatacgccgtaggagaagttgcttctactggtgttcatggtgctaatagattagcaagtaattcgttgatggaatgcctagtttttgcgagaaaaatgtcttcaattgttttgaatgatcctcctaaattagtaaaatttgatagatcatccaaagagtttgatactcaagatcctaaagaagaccaaattcctaagattgctgaaaaaattgatgaactaagaaaactatgttggttaaatttaggtgtgtctcgaaataagttaaatatgaataaatttctaaattttatgcaagacgatatagataaattacataaaaatgctttactttatagtcttgaaaaaataaaatttgatcaaaaaatcaaacttagtgaaccaaataggagagtattgaatcttttacttgatttaaagaatagacaaataacaactattactttattaaaagcttgtctatttagagaagagagtagaggaggtcattatagagatgattttccagataaagataaaaattgggaatgtcatactagacaacagttaggtcaaaaaattcataaaag

SEQ ID NO: 200441 - DNA, 730 bp, Unknown
  Bacterial polypeptide expressing nucleotide sequence isolated from the Sargasso Sea
tgtagagcgcttccccacgatcttaagtcgatgtcaggattatggcgttaaccctttaaacgaggttatacccgtagctcctgcagctcattattggatgggaggtgttaaaactgatctaaatgcatcttcaacaagaaaaggattatatgccgttggagaagttgcttctacaggggtgcatggtgctaatagattggcaagtaattcactaatggaatgtcttgtttttgcaagaaaaatgtcttcaattgttttgaatgacccttctaaatttgaaaaatttgatagatcattccaagagtttgatattcaagacccaaaagaagatcaaatttctcaaatctctgaaaaaattgatgaattaaggaatctatgttggtcaaatctaggcgtatctcgaaataaggtaaatatgagtaaatttttacataatattcaagccgatatttctcaattacaaaaaaatgctttactaagttctcttgaaaaaataaaatttcatcaaaaaataaaacttagtgagcgcaacaggagggcactgaatcttttacttgatttaaagaatagacaaataacaactataactttattaaaagcgtgcctatttagagaagaaagtagaggaggacattatagaaatgacttcccctacaaagataaaaattgggaatgccatactagacaacagttagatcaaaaaattcaaaaaagatttattaaaaattaa

SEQ ID NO: 200442 - DNA, 815 bp, Unknown
  Bacterial polypeptide expressing nucleotide sequence isolated from the Sargasso Sea
tggactagaagctgctcatagtttcaatcgaattgtaaaatctaagggcgatagttctggtattgaaataatgcgaggactaactgacaaagtaagatcctgtaatcatattactatcctcgaaaacgtatcaattgacagtattatgatggaaaacaatacgatttatggagtaattggacacctaaataatcaaaatttgcctgagaataacgttgttattcaaagccctaacgtcattttagcgacgggcggccttggggggatctttgcaaatacaaccaatcctcgaacatcatatggtgaaggtattgctcttgcggctgaagctggtgctacaataactgacatggagtttgttcaatttcatccaacaggcttagattttggtcttgatcccactccccttgcaacagaagcaattagaggtgaaggtgcaacattagtgaatcagcataatgaaagatttatggttgatgtccatccacaagctgaattagcatcaagggatattattgctcaaagtattttcgatcaaattgaaaaaggcaactctgtatttctcgattgtagggaaaatattggaaatgactttggcaaacaatttccacaagtacaatcttactgtgacaacgcagatatagatccaagttctgaattaatacctattattcctgtagctcattatcatatcggtggagtcaaaacagatcttaaaggtcgttcatctgttgatggactttggtgctgtggagaagtagcggctacaggtattcatggtgctaatcgactagcgtcaaattcaatattagagt

SEQ ID NO: 200443 - DNA, 901 bp, Unknown
  Bacterial polypeptide expressing nucleotide sequence isolated from the Sargasso Sea
gaagttatttctcgagtccataaatataattaaagatttagaaaatataggagttgagtttgataaaaatccagacggaacttttaatcttggactagaagctgctcatagtttcaatcgaattgtaaaatctaagggcgatagttctggtattgaaataatgcgaggactaactgagaaagtaagatcctgtaatcatattactattctcgaaaacgtatcaattgacagtattatgatggaaaacaatacgatttatggagtaattggacatctaaataatcaaaatttgcctgaaaataacgttgttattcaaagccctaacgtcattttagcgacaggcggcctcggggggatctttgcaaatacaaccaatcctcgaacatcatatggtgaaggtattgctcttgcggctgaagctggtgctgcaataactgacatggagtttgttcaatttcatccaacaggcttagattttggtcttgatcccactccccttgcaacagaagcaattcgaggtgaaggtgcaacattagtaaatcagcataatgaaagatttatgcttgatgtccatccacaagctgaattagcatcaagggatattattgctcaaagtatttttgatcaaattgaaaaaggtaactcagtatttctcgattgtagggaaaatattggaaatgactttggtaaacaatttccacaagtacaatcttactgtgacaacgcagatatagatccaagttctgaattaatacctattattcctgtagctcattatcatatcggtggagtaaaaacagatcttaaaggtcgttcatctgttgatggactttggtgctgtggagaagtagcggctacaggtattcatggtgctaatcgactagcgtcaaattcatattag

SEQ ID NO: 200444 - DNA, 754 bp, Unknown
  Bacterial polypeptide expressing nucleotide sequence isolated from the Sargasso Sea
taggtatattgatccagaaaaaattgtagagcgcttccccacgatcttaagtcgatgtcaggattatggagttaaccctttaaatgaagttataccagtagctcctgcagctcactattggatgggaggtgttaaaactgatctaaatgcatcttccacaagaaaaggattatatgccgttggagaagttgcttctacaggtgttcatggtgctaatagattggcaagtaattcactgatggagtgtcttgttttcgcaaggaaaatgtctgcaattgttttgaatgaccttcccgaattcgaaaaatttgatagatcattgcaagaatttgatattgaagatccaaaagaagatcaaatttcccaaattgctgaaaaaattgatgaactcagaaaactatgttggttaaatttaggtgtatctcgaaataaggtaaatatgagtaaatttctaaattttattcaagatgatatggataaattaaataaaaatgatttattaaatagtcttgaaaaaataaaatttgatcaaaaaataaaacttagtgaacgcaataggagggtgttaaatcttttacttgatttaaagaatagacaaataaccacaataactttattaaaagcttgtctatttagagaagaaagtagaggagggcattatagggatgatttccctgataaagataaaaattgggaatgccataccagacaacagttagatcaaaaaattcaaaaaagatttattaaaaattaa

SEQ ID NO: 200445 - DNA, 571 bp, Unknown
  Bacterial polypeptide expressing nucleotide sequence isolated from the Sargasso Sea
agaagttgcttctacaggtgtgcacggtgctaatagactggcaagtaattcactgatggagtgtcttgttttcgcaagaaaaatgtcttcaattgttttgaatgacctttctaaatttgaacaacttgatagatcatttcaagagtttgatattgaagatcctaaagaagatcaaatttctataattgctgaaaaaattgatgaactaagaaaactatgttggttaaatttaggtgtatctcgaaataaggtaaatatgagtaaatttttaaattgcattcaaaatgatatagataaattaaatacaaatgatttactaaattgtcttgaaaaaataaaatttgatcaaaaagtaaaactcagtgaacgtaatagaagagcattaaatcttttacttgatttaaagaatagacaaataactactataactttattaaaagcttgtctatttagagaagaaagtagaggagggcattatagagatgatttccctgataaagataaaaattgggaatgccatacaagacaacaattagatcaaaaaattcaaaagagatttattaaaaattaa

SEQ ID NO: 200446 - DNA, 1063 bp, Unknown
  Bacterial polypeptide expressing nucleotide sequence isolated from the Sargasso Sea
cgcagcgacaccctggccgctggggcgggactgtgtgaacccatggcagtggactgccttgtggagaagcttccgggctgcatccgcaatctgttgagccttggcctgaaccttgaccgacagggcaaggacctcagcaccaccttggaagcagcccatagccgacggcgcgtgcttcatgcccgcgaccaaacaggcctggccctggtggagttgctggagcactgcattgaaaaccgccccaatgtgacctggtggcgcggcgccatcgccctgcaattactgcaaacgtctggccgctgcagcggagtgcaggttcttcacaacggtgtgctgggctggctgagcagcgctgctgtggtgcttgccactggtggtagtggccatctctttgccaataccaccaatccacggggagcccacggcgatggcattgccatggcctggcaagccggagcgatcctgcgcgacatggaatttgtgcaattccaccccaccgccttaatgcaaccaggggccccacatttcctgctctcagaagcgttacgcggagagggcgcacgacttgtgcaggccgatggccaacccctgttctcaagtggaagtgaactcctgcctcgcgatcaactcagccgggccatggttcgcgtcatgcaacagcagcaagcagcacagctctggctggacctgcggccagtcggcgaagccaagctcaggcggcagttccccaccatccttgggcgctgccgagagctggggttggaccccatgcagatccccctgccggtagcaccagctgcccactactggatgggcggcatcgccaccgatctcaatgcagccacctccctgcctgggctctatgccgttggcgaagtggccagcagcggcgtgcacggagccaatcgcttggccagcaattcactcagtgaatgcctggtgatggctagtcagctcagccagctgcaaccagaaacgagggggtcagagtcggcccagcccagccaacggcgcccactggaatgggctccgcccgcggctttggaaggaccgtgcggtgaac

SEQ ID NO: 200447 - DNA, 928 bp, Unknown
  Bacterial polypeptide expressing nucleotide sequence isolated from the Sargasso Sea
tcctgctcaatcctctggtgaagggattgctcttgcatggaaagcaggagctgctatcgaagatttagagttcgttcaatttcatccaacagctttaaaattttatggtgcaccttgcttcttaatatctgaggcactcagaggggaaggagcgattttagttgataaaaatggtgaaagtccagttaaaaatcttgaaaatcgtgatctagctacaagagatcaggttagtagagcaattatgaaaaatatgtatgataataatgtagatcatgttggcttagatcttaggtatattgatccagaaaaaattgtagagcgcttccccacgatcttaagtcgatgtcaggattatggcgttaaccctttaaatgaggttattcccgtagctcctgcagctcattattggatgggaggtgttaaaactgatttaaatgcttcttcaacaagaaaaggattatatgccgttggagaagttgcttctacaggtgtgcatggtgctaatagactagcaagtaattcactgatggagtgtcttgttttcgcaagaaaaatgtcttcaatagttttgaatgacatttctaaagttaaaaaatttaatagatcatttcaagattttgatattgaagattctaaagaagatcaaatttctataattgctgaaaaaattgatgaactaagaaaactatgttggttaaatttaggtgtatctcgaaataaggtaaatatgagtaaattttttaattacattcaaaatgatatagataaattaaataaaaatgatttactaaatagtcttgaaaaaataaaatttgatcaaaaaataaaacttagtgaacgcaatagaagagcattaaatcttttacttgatttgaagaatagacaaataaccactataactttattaaaagcttgtctattagagagg

SEQ ID NO: 200448 - DNA, 776 bp, Unknown
  Bacterial polypeptide expressing nucleotide sequence isolated from the Sargasso Sea
ttttattgaaaatgaagaatgtaaaggagttcaggttcttgatggagcaaatttatattggattaaatcgagagcggttgttttagctacagggggaggtgggcatttatttactaatacaactaatcctgctcaatcctctggagaagggattgctcttgcatggacagcaggcgctgcaattgaagatttagagtttgttcaatttcatccaaccgctttaaaattttatggcgccccttgtttcttgatttcagaggcacttagaggagaaggagccattttagtcgataaaaatggtgaaagcccagttaaaaatcttaaaaatcgtgatttagctactagagatcaggtaagtagagcaattatgaagaatatgtatgaaaataatgtagatcatgttggtttagatcttcggtatattgatccagaaaaaattgtcgtgcgattccccacaattttaagtcgatgtcaggattatggcgttaatccattaaatgaggttattcctgtcgctccagcagctcactattggatgggaggagtcagaactgatttaagtgctgcttctacaagaaaaggattatatgccgtaggagaagttgcttccacaggcgttcatggtgcgaatagactggctagcaattcactgatggaatgccttgtttttgcgagaaaaatgtcttcaattgttcttaatcattatcctaaattcgaaaaattagatagatcaatccaagagttagatattgaagatccgaaagaagatcaaattt

SEQ ID NO: 200449 - DNA, 866 bp, Unknown
  Bacterial polypeptide expressing nucleotide sequence isolated from the Sargasso Sea
ctgctcatcctctggagaagggattgctcttgcatggaaagcaggcgctgctatcgaagatttagagtttgttcaatttcatccaaccgctttaaaattttatggtgcaccttgtttcttaatatctgaggcacttagaggagaaggcgctattttagttgataaaaatggtgaaagcccagttaaaaatcttaaaaatcgtgatttagctactagagaccaggtaagtagagcaattatgagaaatatgcatgataacaatgtagatcatgttggtttagatcttcggtatattgatccagaaaaaattgtagagcgatttcccactattttaagtcgatgtcaggagtatggagttaatcctttaaatgaggttattcctgtagctcctgcagcgcactattggatgggaggtgtaaaaaccgatttaaatgcttcttctacaagaaaaggattatacgctgtaggagaagttgcttcaacgggtgtacatggtgctaatagattggcaagtaattcactgatggaatgccttgttttcgctaggaaaatgtcttcaattgttttgaatgatcctcctaaatttgtaaaatttgatagatcattccaagagtttgatattcaagatcccaaagaagatcaaatttctagaattgctgaaaaaattgatgaactaagaaaattatgttggtcaaatttaggcgtatctcgaaataagtttaatatgagtaaatttctaaattatattcaagacgatatggatcaattacataaaaatgctttattaaatagtcttgaaaaaataaaatttgatcaaaaaatcaaacttagtgaatcaaataggagggccttgaatcttttacttg

SEQ ID NO: 200450 - DNA, 760 bp, Unknown
  Bacterial polypeptide expressing nucleotide sequence isolated from the Sargasso Sea
ggagaaggagcccggttggtgcaggccgatggtgaacccctgttctgcagcggcagtgaacttctgccccgcgaccagctcagtcgacgcatggtgcgcgaaatgcacaggcagcaactggctcagctctggctcgacctgcgtccgatcggggagaaacgcctgcagcggcagttccccacgatcctgggccgctgccgtgagctgggcctcgatccactccaggtagcgctgccggtggcgccggcggctcactactggatgggaggggtggccaccgacctggaggccgccacctccctgccagggctctatgccgtcggtgaagtggccagcagcggggtgcatggcgccaatcgactggccagcaattccctcagtgaatgcctggtgatggcccgccagctggccagcgccagcctccccgcagcaccggtgttccaaggcaccatcagcacccgtgcgctggagtgggaaccgccagaacccctgcgccaaccctgcacccgcacgattcatgacctgcggcacttgagttggagcaccgcgggcgtggaacggcacagcagcctgctgcaccagggcctgcagcagtggcagcgcctgcaggagcaactgaatctcgatcgggtgctgggggcagtgagcaggttgcagccaggtgagcaaagggaattgcagcccgctcaggtgcagcagctgggctggctgtgggaatgccgtcaacggctgatcaccacacacctgctgctggaggccg

SEQ ID NO: 200451 - DNA, 871 bp, Unknown
  Bacterial polypeptide expressing nucleotide sequence isolated from the Sargasso Sea
ggggggggcgggcatttatttactaatacaacaaatcctgctcaatcatctggagaggggattgctcttgcatggaaggcaggcgctgctattgaagatttagagtttgttcaatttcatccaaccgctctaaaattttatggtgcaccttgcttcttaatatctgaggcacttagaggcgaaggcgctattttagttgataaaaatggtgaaagcccagttaaaaatcttaaaaatcgtgatttagctactagagatcaggtaagtagagcaattatgaaaaatatgcatgacaacaatgtagattatgttggcttagatcttcggtatattgatccagaaaaaattgttgagcgatttcccactatcataagtcgatgtcaggattttggggttaatcctttaaatgaggttattcctgtagcacctgcagctcattattggatgggaggtgtaagaaccgatttaaatgcttctactacactaaaaggattatatgctgtaggagaagttgcttccactggtgtgcatggtgctaatagattagcaagtaattcactaatggaatgtcttgtttttgcaagaaaaatgtcatcaatagttttgaatgatccttctaaatctaaaaaatttgatagatcattcaaagactttgatattcaagatccaaaagaagatcaaatttctaaaatctctgaaaaaattgatgaattaagaaaactatgttggttaaatctaggcgtctctcgaaataaggcaaatatgagtaaatttttacataatattcaagatgatatttctcaattacaaaaaaattctttactaagttctcttgaaaaaataaaatttgatcaaaaaattaaacttactg

SEQ ID NO: 200452 - DNA, 1669 bp, Unknown
  Bacterial polypeptide expressing nucleotide sequence isolated from the Sargasso Sea
aatgttaaggcctccattttcgcaagaaccgataccaataaataattgggatgtaatcgttataggcgctggagctgctggccttatgacttgtcttgaattaccctcaaatttaaaagtgcttcttttaaatagaaatactagtaaggtatcttccagtagatgggctcaaggcggaattgcatctgttgttagacaagatgattcatttgatcttcatgctgaggatactttaaaagcaggtgatggactatgtgattttcaagctgtagaaatgctagttaaagaagctccaggttgtgtagaaaggttgcagaatttagggatgatttttgatcaaagttctgatcaactagctactaccttggaagcagcccattcacgaagaagagtcttacatgttaaagatcgtactggacgagcattagttgaagttctagaagatcatattgagaatcaaaaaaatattcttcactgcaggggtgtaagagtaactgaacttctcattgaaaataaagaatgtagaggagttcaggttcttgatggagcaaatttatattggattaaatctagagctgttgttttggctacaggtgggggtgggcacttatttacaaatacaacaaatcctgctcaatcctctggtgaagggattgctcttgcatggaaagcaggagctgctatcgaagatttagagttcgtgcaatttcatccaacagctttaaaattttatggtgcaccttgcttcttaatatctgaggcacttagaggggaaggagcgattttagttgataaaaatggtgaaagtccagttaaaaatcttgaaaatcgtgatctagctactagagatcaggtaagtagagcaattatgaaaaatatgcatgataataatgtagaccatgttggcttagatcttcggtatattgacccagaaaaaattgtagagcgcttccccacgatcttaagtcgatgtcaggattatggcgttaaccctttaaatgaggttattcccgtagctcctgcagctcattattggatgggaggtgttaaaactgatctaaatgcatcttcaacaagaaaaggattatatgccgttggagaagttgcttctacaggtgtgcatggtgctaatagactggcaagtaattcactgatggagtgtcttgttttcgcaagaaaaatgtcttcaattgttttgaatgacctttctaaatttgaaaaatttgatagatcatttcaagagtttgatattgaagatcctaaagaagatcaaatttctataattgctgaaaaaattgatgaactaagaaaactatgttggttaaatttaggtgtatctcgaaataaggtaaatatgagtaaatttttaaattacattcaaaatgatatagataaattaaataaaaatgatttactaaatagtcttgaaaaaataaaatttgatcaaaaaataaaacttagtgaacgcaatagaagagcattaaatcttttacttgatttaaagaatagacaaataaccaccataactttattaaaagcttgtctatttagagaagaaagtagaggagggcattatagagatgatttccctgataaagataaaaattgggaatgccatactagacaacagttagatcaaaaaattcaaaaaagatttattaaaaattaa

SEQ ID NO: 200453 - DNA, 1438 bp, Unknown
  Bacterial polypeptide expressing nucleotide sequence isolated from the Sargasso Sea
aatgttaaggcctccattttcgcaagaaccgataccaataaataattgggatgtaatcgttataggcgctggagcagctggccttatgacttgtcttgaattaccctcaaatttaaaagtgcttcttttaaatagaaatactagtaaggtctcttccagtagatgggctcaaggaggaattgcatctgttgttagacaggatgattcatttgatcttcatgctgaggatactttaaaagcaggcgatggactatgtgattttcaagctgtagaaatgctagttaaagaagctcccggttgtgtaaaaaggttacagaatttagggatgatttttgatcaaagttctgatcaactagctactaccttggaagcagcccattcacgaagaagagtcttacatgttaaggatcgtactggacgagcattagttgaagttctagaagatcatattgagaatcaaaaaaatattcttcactgcaggggtgtaagagtaactgaacttctcattgaaaataaagaatgtagaggagttcaggttcttgatggagcaaatttatattggattaaatctagagctgttgttttggctacaggtgggggtgggcacttatttacaaatacaacaaatcctgctcaatcctctggtgaagggattgctcttgcatggaaagcaggagctgctatcgaagatttagagttcgtgcaatttcatccaacagctttaaaattttatggtgcaccttgcttcttaatatctgaggcactcagaggggaaggagcgattttagttgataaaaatggtgaaagtccagttaaaaatcttgaaaatcgtgatctagctacaagagatcaggtaagtagagcaattatgaaaaatatgaatgataataatgtagaccatgttggcttagatcttcggtatattgacccagaaaaaattgtagagcgcttccccacgatcttaagtcgatgtcaggattatggcgttaaccctttaaatgaggttattcccgtagctcctgcagctcattattggatgggaggtgttaaaactgatctaaatgcatcttcaacaagaaaaggattatatgccgttggagaagttgcttctacaggtgttcatggtgctaatagactggcaagtaattcactgatggagtgtcttgttttcgcaagaaaaatgtcttcaattgttttgaatgacctttctaaagttgaaaaatttgatagatcatttcaagagtttgatattgaagatcctaaagaagatcaaatttctataattgctgaaaaaattgatgaactaagaaaactatgttggttaaatttaggtgtatctcgaaataagctaaatatgagtaagtttttaaattatattcaaaatgatatagataaattaaataaaaatgatttactaaatattcttgaaaaaataaaa

SEQ ID NO: 200454 - DNA, 1459 bp, Unknown
  Bacterial polypeptide expressing nucleotide sequence isolated from the Sargasso Sea
cgatcttctgctgatgatactttaaaagcaggggatggactatgtgattttcaggctgtagaaatgcttgttagggaagctccaggttgtgtggatagattgcagaatttaggcatgatttttgatcaaagttatgatcaattagccactactttagaagcagctcattctagaagaagagttttacacgtaaaagatcgtactggaagagcattggttgaagttttagaagatcatgttgaaaataaaaaaaatattcttcactgtaggggtgtaagggtcactgaacttcttattgaaaatgaagtatgtaaaggagttcaggttcttgatggagcgaatttatattggattcaatcgagagctgttgttttggctacaggtggaggtggtcatttatttactaatacaactaatcctgctcaatcctctggagaaggaatcgctttagcatggaatgcaggagctgctattgaagatttagagtttgttcaatttcatccaactgccttaaaattttatggagcaccttgtttcttaatatctgaagcactcagaggagaaggagctatcttagtcgataaaaatggcgaaagcccagttaaaaatttaaaaaatcgtgatttagcaaccagagaccaggtaagtagagcaattatgaagaatatgaatgataataacgttgatcatgtcggcttagatcttagatatattgacccagaaaaaattgtagaaagatttcccactatcttaagtagatgtcaggattatggtgttaatcctttaaatgaggttattcctgttgctcctgccgcgcactattggatgggaggtgtcaaaactgacttaaatgcatctactacaagaaaaggattatacgccgttggagaagtggcttcgactggtgttcatggtgctaatagattggcaagtaattcgctgatggaatgcctagtttttgcgagaaaaatgtcttcaattgttttgaatgatcctcctaaattagtaaaatttcaaagatcatctcaagagtttgatactcaagatccgaaagaagatcaaatttccaaaattgctgaaaaaattgatgaactaagaaaactatgttggttaaatttaggtgtttctcgaaaaaaggaaaatatgagtaaatttctcaattttattcaagacgatatcgataaattacataaaaatgctttactaaatagtcttgaaaaaattaaatttgatcaaaaaatcaaacttagtgaacgcaataggagagtattgaatcttttacttgatttaaagaatagacaaataacaactataactttactgaaagcttgtctatttagagaagagagtagaggagggcattatagagatgattttcctgataaagataaaagttgggaatgccatactagacaacagttaggtcaaaaaacttatagaagatttattaaaaattaga

SEQ ID NO: 200455 - DNA, 964 bp, Unknown
  Bacterial polypeptide expressing nucleotide sequence isolated from the Sargasso Sea
tatgtataatatcggaattatagatactatgaactctaaaggtatcgaattgctaaaatcacataaaaattttaatgttgaagttattacagacttgtccaaagaaaatcttttaaaagtattaccaaaatatgatggtgtaacattaagacgtggaaaactagactcagaaatactaaaaaattgcaagaaattaaaagttatcgcaagacatggtgtaggttatgacaatgtagacacaaattatttaaaggaaaataatattactttattagttacacataattcaacatcaacatcacctgccgaacacatcatgtttatgattttaaatatttataaaggccgagaaatgtttgataaaatggtaagagatggaaattttcataaagcaatccatttacaaattgatgataattttgaattatttaacaaaaaaatattaatagttggttttggtcgtataggaaaaaaattaataaaaaaatgtcttggttttgacatgaaagtattggtttatgatccttatgttgatgaaaaaagtataaaattattaggtggtgaaaagattattgatttagaaagtgctttaaaagaaatagatatactatcaatgagtgtgcctttgacagaaagtactagagacatgatttcatataagcaaatttcattaatgaaaaaaaacgcaataatagtaaatatttcaagaggtgggataataaatgaaaatgatttgaatgatgctttaaacaaaaatgttatatcttttgctggcttggatgtttttgaaaaagaaccaccagaaatgagcaatcctttacttaaaaataaaagggttttactaagtcctcatgctgcaacatttactaaagaatgtttagaggatatgagtcttgaaacagctcaaaatattattgatttttttgataaaaagttagaaaaatttaaaattgtaaaattataa

SEQ ID NO: 200456 - DNA, 1018 bp, Unknown
  Bacterial polypeptide expressing nucleotide sequence isolated from the Sargasso Sea
atggtaaaaaaaactaaatcattaaatttaaattttggacctcaacatccagctgcccatggagtgttaagactaatattagaattagacggtgaagttgttgaaaaagctgacccacatatagggttattacatagagggactgaaaaacttattgagcaaaaaacttatactcaagccttaccatattttgataggctggattatgttgctccaatgaatcaagaacatgcgtttgccttagcagctgagaagttgcttaagatagaagttcctattagagcgaagtatattagggtgattttttgtgaaattggaagaattttaagccatattttaaatgttacaactcaagctctagatgttggagctttgacaccttctttatggggatttgaagaaagagaaactttaatgactttttatgaaagagcttcaggttcaagattacacgcaaattatttcagaacaggaggcgttcatcaagatatacctttaaaactagtagatgatatagagaagttttgtaaatcatttccaaagattattgatgatctagaaggacttcttactgaaaatcgaatatttaaacaaagaaatgttgaaattggcttggtaactaaacaagatgcattggattatagtttttctggcgtgatgttaagaggatctggagttccgtgggatttaagaagatcacaaccttacgagatttataaagatttagattttaaaataccggttggaaagaatggtgattgttatgatcgctacctttgcagaatagaggaaatgagagaaagtgttaagattattttacaatgtattgaaagattgcctaaaggacctgttaaatcaattgatggaaaaatttctcctcctaatagagatgatttaaaacaatctatggaagctttaatacatcattttaaattatttactgaaggttatagagtgcctaaaggcgatgtatatacagctgttgaagctcctaagggtgagtttggagtatacttaa

SEQ ID NO: 200457 - DNA, 310 bp, Unknown
  Bacterial polypeptide expressing nucleotide sequence isolated from the Sargasso Sea
catatcattcatatcataagtgtcagtcagcttgggtacatgatgttggctttaggtgttggcgcctatggcccagctatattccatttagtgactcacgcatttttcaagtctcttttatttttgggagctggtagtgtaaatcatgcgactgacacttatgatatgaatgatatgggtggattgcgaaaaaagatgccaaagacgcatatcacgttcgccgtaggagcctttagtttaattggaatattcccgttgtctggattttggagcaaagatgaaattttgggttatgccttagatgctggca

SEQ ID NO: 200458 - DNA, 517 bp, Unknown
  Bacterial polypeptide expressing nucleotide sequence isolated from the Sargasso Sea
catgaactttccaattctgtcatcattaatacttctaccttttattggagcgttatttttattttttacacgaagtagtaatgacaataaaattactgttaaatatgttgctttatttacatctcttgttactttttttctttcgctttatttatggattttatttgatcaaacaatatcagaatttcaatttgtagaggatagggtttggattaaagatttaatcaattacaaagtaggagttgacggaatttcaatactttttataattcttacaacatttattactccattatgtataatctcagtaaataattctatcaaaagtagactaaatgaattcttaatagctattttaatcatggaaactttcatgattggagttttttgttcattagatcttgtagttttttatttattttttgaggctggattaattccaatgtttttaattataggaatttggggcggttctagaagagtttactctgcttttaagttttttttattcactctt

SEQ ID NO: 200459 - DNA, 1003 bp, Unknown
  Bacterial polypeptide expressing nucleotide sequence isolated from the Sargasso Sea
aattttggcccccagcatcctgcagcacatggagttttaaggcttattctagaattagatggtgaagttgttgaaaaagcagacccacatattggattacttcatcgaggtacagaaaagttaattgagaataaaacatatatgcaagctgttccttattttgatcgtcttgattatgtagctccaatgaaccaggaacatgcttttgcattagctattgaaaaaattttaaaaattgaagtacctataagagctcaatttataagagtaatgttttgtgaaattggtagaattttaagtcatattttaaatgtaactacacaagctctagacgtgggtgctttaacaccctctttgtggggttttgaggaaagagaaacattaatgactttttatgagagagcttctggttccagattacatgcaaattactttagggctggtggagttcaccaagatttaccagcgggtttagaggatgatattgcaaaattttgtgacaatttccccaaaattatagacgacctagaaaatttgttaactgataatagaatttttaaacaaagaaatgttgatattggaatagtaactaaagatgatgctttagattattcatttagtggagtaatgataagaggatctggagtaccttgggacattagaaagtcgcaaccttatgattgttacgaacaattagaatttaaggtgccagttggaaagaatggagattgttatgatcgttatttatgtagaattgaagaaatgagggaaagtgtgtcaattataaaacagtgtttaagtaagatggaaaaaggaccagtaaaaagttttgatggaaaaataaccccaccatctaaaaaggaaattaaacaatcaatggaggcattaatccatcattttaaactgttcacagagggttaccgtgtacctaaggatgaaatatatacagcagttgaagcacccaaaggtgagtttggagtttatttaatttctgatggatcaa

SEQ ID NO: 200460 - DNA, 281 bp, Unknown
  Bacterial polypeptide expressing nucleotide sequence isolated from the Sargasso Sea
cgtcatgatcgtcgcaggaacgcttgtcaataagatggcccctgcacttagaaaagtatacgaccaaatggctgaaccaaaatgggtcatttccatgggatcatgtgccaatgggggtggctattatcaccattcgtattctgtggttagaggttgtgatcagattatccctgttgatatctatgttcccggatgcccgccgacttcagaggcattgatcaatggaatcatagaactccaagaaaaaatcaagaatgaagaatcgatcgcaaatggatagt

SEQ ID NO: 200461 - DNA, 217 bp, Unknown
  Bacterial polypeptide expressing nucleotide sequence isolated from the Sargasso Sea
atcttaccatttaatgctattccaggtcctttttggttaatttttaaaatattatttttatttattttatttgcgttagttaaagcaactgttccaagatacagatatgatcaattaatgaagcttggttggaagatatttctcccattttcactgttttatgttgttttaacttcaagttttttactatattttgatttactaccagggaaataaa

SEQ ID NO: 200462 - DNA, 487 bp, Unknown
  Bacterial polypeptide expressing nucleotide sequence isolated from the Sargasso Sea
aatgaaaatttcaagattattaaaaactatattcatgattgattttgtgactggtttattaattgcaataaaagagacttttaaggcaaaaaagacaatcaattatccttttgaaaagggatctttaggaacaaggtctagaggggagcacgctcttagaagatatcctaacggtgaagaaagatgcatagcatgtaagctttgtgaagctgtatgtccagcccaagctattacaattgagtcaaaggaaagagatgatggtagtagaaaaactgtaagatacgatattgatatgcttaaatgtatatactgtggtctttgtgaagagtcatgtcccgtagatgcaattgtccaaggtcctaattttgaatttgcaacagagtctagagaagagctttattacacaaaagaaaaactcttggaaaatggagacaggtgggaaaacattttagctgccaatataaaggctgatagttctcacaggtaa

SEQ ID NO: 200463 - DNA, 956 bp, Unknown
  Bacterial polypeptide expressing nucleotide sequence isolated from the Sargasso Sea
tttaaaaacatttaaaatatacaatattgaatacccagttcttattttgagctctattcttggtatgatggtgatgattagttcaaatgatttaattgttttttatatgggcttagaattacaatcactagctctttacgtattagcaacatataatagagatcaattaaaatcatctgaagctggtttaaaatattttgttttaagtgcattatcttctggattattgttatatggttgctcattaatatatggtttttctggttcaactaattttgatataatatcaaatcaattaaattctaatgaatatgttttaacatttggaattgtatttatcttagttggtttagcatttaaaatttctgcagttccatttcatatgtgggcacctgatgtttatgaaggatcaccaacaactgtaactttattttttacaatggtgccaaaaatcgctgctttaactgtatttataagatttttatatgtccctttcctaaatttaattgatcaatggcaaatgataataattttcttgtcaattgcctctatggtttttggagctgttgcagcaatagggcaaactaatattaaaagacttattgcttatagctctattggacatattggttacacattagcaggactagccacagcttcgaatgaaggaattcaaagttcaataatctatatttcaatatacgtagttatgaatttagctcttttctcatgtctattgatgttaagaagaaaggatcaatattatgaagatattgaggatctctcgggattatcaaaaaaccatccattattatctctatgtttgcttgtaatacttttttctttagctggaataccacctctagcgggtttctttgccaagttttatgtttttaaagctgtattagaacaatcaatgtttttcttagctatagtaggattttatctaccgtagt

SEQ ID NO: 200464 - DNA, 487 bp, Unknown
  Bacterial polypeptide expressing nucleotide sequence isolated from the Sargasso Sea
aatgagcttaattagatttttcaaaacaatttttatgattgattttttaacaggattaatcatggcaataaaagaaatatttaaaccaaaaaaaacaattaattatccatttgaaaaaggttcaattagtccgagagctaggggagaacatgcgctaagaagatatccaaatggtgaggagagatgtattgcttgtaaattatgtgaagctgtttgtcctgctcaggctataacaatagagtctagcgagagagaagatggaagtagaaaaactactcgttatgatattgatatgttaaaatgtatttattgtggtttgtgcgaacaatcctgtccagttgatgcgattgtgcaaggtccaaatttcgaatttgctacagaaacaagagaagaactttactacaacaaagaaaagttgttagagaatggagatagatgggagaatattttagcagcaaatattaatgctgatagctcccacagataa

SEQ ID NO: 200465 - DNA, 286 bp, Unknown
  Bacterial polypeptide expressing nucleotide sequence isolated from the Sargasso Sea
tgctaatattttacttatgtgtgcaatgggatctattttatttcttggtggctggttatctccaatagatttatttccatttaatgttattccggctccaatatggttaatcttaaaaatactctttttatttatcttatttgctttgataaaagcaatagtacctagatacaggtatgatcaattaatgaaacttggatggaaaatttttctaccattttcattgatttatgtagtattaactgcaagttttttaatgtattttgatttattaccagggaattag

SEQ ID NO: 200466 - DNA, 652 bp, Unknown
  Bacterial polypeptide expressing nucleotide sequence isolated from the Sargasso Sea
atgaattttcctattctttcatctttaattttattaccaatagttggtgctttatttttattttttactaaagataaggaaggaaataatttaaccgctagatatgtagctttatttacaacagttgttaattttttaatctctatatacatgtggatttctttcgaccaatctacatccagctttcaatttatagaagatagaacatggattgaaggatttattaattacaaagttggagtagatggtatttcaattttatttattatattaactacattcataactcctctgtgcattatatctgtaaataattctgtcaaaaatagattaagagattttttaattgcaattctaatcatggaaagtttcatgattggtgttttctgcgcacttgatttggttgtattttatttattttttgaagctggattaattccaatgtttttaattattggaatttggggtggaccaaaaagagtttattcagcatttaaattctttttatatacattacttggatccgttttgatgttagttgcaataatttctatttattggattgtgggcacaacagatgtaatccaactttacgaacttggtatagaatgcaagtatcaaaatcttttatggctagcattcttcagctctt

SEQ ID NO: 200467 - DNA, 205 bp, Unknown
  Bacterial polypeptide expressing nucleotide sequence isolated from the Sargasso Sea
atgactgaaagcaatctgacgcttaacttcggtccacaacaccctgcagcgcatggtgttttaaggttaattatggagatggacggtgaggtcattacaaatctcgacccacacatcggccttttgcacagaggcacagaaaaacttgctgaaatcaaaccgttcaatcattcgatcggatatatggatagaatggactatgttt

SEQ ID NO: 200468 - DNA, 940 bp, Unknown
  Bacterial polypeptide expressing nucleotide sequence isolated from the Sargasso Sea
tatgaaggaattagaacttaatacaacaactataaattttggccctcaacatcctgctgctcatggagtattgaggttggttgttgagctagagggagaagttgtacaaagggccgagccacatattggattacttcatagaggtactgaaaagttaattgaatataaaacttatcttcaagctattccttattttgatagattagattatgtatcgccaatgtgccaagagcatgcttttgcgctagctactgaaaaacttttagggattgaaatacctgaaagagcaaagtttattagagttatttttgctgaagtcacaagaatacttaatcatttacttaacatacccgcatacgcagcagatatcggtgcagtaacaccttttttatggtgttttgaagaaagagaaaaactactagagtttcatgaagctgtatcaggtgcaagatttcatgcagcatattttagaccaggtggtgtacatcaagatatgcccgaagggatggaagaaaaattattcaatcatttaaaaactcttccaaaatttattgatgatcttgaaagtttattaactaacaataggattctaagacaaagatcagttgacataggaataatttcaaagtctgaagctattgaatggggttgttccggaccagttcttagaagtgctggtgttgcatgggatttaagaagatctcagccatatgatgcttatgatcaagttaattttgatgttcctgtaggaaaaaaaggagattgttttgatcgatatttagttagaatagaagaaatgagacaaagtataagtattattaatcaatgtttaaataaaattaaagccggacctatttcaattgaggataataaaattacaccacctaagaggaatcaaatgaaaaaatcaatggaagcattaattcatcattttaagctt

SEQ ID NO: 200469 - DNA, 363 bp, Unknown
  Bacterial polypeptide expressing nucleotide sequence isolated from the Sargasso Sea
aatgaaaaaaaaaattaagaatttaaatttaaattttggtcctcaacatcctgcagctcatggtgttttgagattaatactagaattagatggagaagtagttgaaaaagctgatccacatattggtttactacatcgcggaactgaaaaattaatagaaaataaaacctatatgcaagctgtaccttactttgacaggctagattatgtagccccaatgaatcaggaacacgcttttgcattggcaattgagaaaattttagaaatagatgtaccaatacgagctcaatatatacgggtgatattttgtgaaataggaagaatattgagtcatattttaaatgttacaacaccaagcacttg

SEQ ID NO: 200470 - DNA, 199 bp, Unknown
  Bacterial polypeptide expressing nucleotide sequence isolated from the Sargasso Sea
atgagaatattagactcagacgaaagacttaaaaaagtaccagatgaatttaagcaaatagcaaaagattttgctgaaaagggatttataacaacttctacaaataatttaatcaattgggctagaacaggttctttacactggatgacttttggtcttgcttgttgcgcagttgaaatgatgcatacttctatgccta

SEQ ID NO: 200471 - DNA, 244 bp, Unknown
  Bacterial polypeptide expressing nucleotide sequence isolated from the Sargasso Sea
aatgaattatgcggaaaaacaaaaacaggttccagatgaatttaaacaattagcaaaagattttagtgaaaaaggttttatcactacatcttttgataatttggtaaattgggctaggacaggctctcttcattggatgacttttggtttggcatgctgcgctgtagaaatgatgcaaacctctatgcctaggtataacttagaaagatttggtgctgcgccacgagcatcgcctcgacaatcc

SEQ ID NO: 200472 - DNA, 859 bp, Unknown
  Bacterial polypeptide expressing nucleotide sequence isolated from the Sargasso Sea
aatgaaaaacttttctatcgcaaaatcaagaagacttagaggtacgccttatacatcaagaattgaaaaacaaggtgttacagcttacacaatatacaatcatatgttgcttcctgctgcatttggttctttagaagactcatatcatcatttaaaagagcatgttcaagtttgggatgtggctgctgaaaggcaagtagagattactggaaaagatgctgcaaaattagttcaacttatgacttgtagagatctttcgaaatcaaaagatggaagatgttattactgtccaattatagatgataatgctggattaattaatgatccagttgttctaagatttaatcagaataaatggtgggtttctattgcagatacggatgtaatcttatttgcaaaaggattggcaattggaaataaatttgatgtaaatattatagagcctgaagttgacattatggctgtgcaagggcctaaatcttttaaattgatggaaaaagtttttggagaaaagataacaaaattaaaattttttggttttgattattttgattttgctggagccaaacatttaattgctcaatcaggatggtctaaacaaggtggatatgaaatttatgtagagaataatgcttcaggtttaaaactatacgatcatctatttaaaattggagatgagtttaatattagagcaggatgtcctaatttaattgaacgtatcgaaagtggattactttctcaaggaaacgatatggacaatggagacaatccttacgaatgtggctttgataaatatattaatattgatagtgatgttgaatttttaggaaaagagaaaattaaaaaaaataaagtctga

SEQ ID NO: 200473 - DNA, 880 bp, Unknown
  Bacterial polypeptide expressing nucleotide sequence isolated from the Sargasso Sea
aaattggttcaacttatgacttgtagagatctttcgaaatcaaaagatggaagatgttattattgtccaatcatagatgataatgctggattaattaatgatccagttgttttaagatttaatgagaataaatggtgggtttctattgcagatacggatgtaatcttatttgcaaaaggattggcaattggaaataaatttgatgtaaatattatcgaacccgaagttgatattatggctgtgcaagggcctaaatcatttaaattaatggaaaaagtttttggtgaaaaaataacaaatttaaaattttttggttttgattattttgattttgctggagccaaacatttaattgctcaatcaggatggtctaaacaaggcggatatgaaatttatgtagagaataatgaggcgggtttaaaactatacgaccatttatttgaaatcggagatgagtttaatattagagcaggatgtcctaatttaattgaacgtattgaaagtggattactttctcaaggaaacgatatggacaatggagacaacccatacgaatgtggctttgataaatatattaatattgatagtgatgttgaatttttaggaaaagagaaattaaaaaaaataaagtctgaaggaattaaaagaaaactaatgggcgttaaaattgatactgataaaataagcgtaactggttcaatgaatttaacagatgaaaaaaataatataatcggagaactaagatcaggttgttacaatccaacttttaaacaggtaattggtatagctatgataaaaaaaccatattttgaagcaaagcaaacattcaaaattgatataaatggtaatagttttaacggaaccagtttgcgatttacct

SEQ ID NO: 200474 - DNA, 487 bp, Unknown
  Bacterial polypeptide expressing nucleotide sequence isolated from the Sargasso Sea
atgaaaatttcaagattattaaaaaccgtattcatgattgattttgttactggtttattaattgcagtaaaagaaacttttaaggaaaaaaagacaataaattatccctttgaaaagggatctttaggaacaaggtctagaggggagcacgctcttagaagatatcctaacggtgaagagagatgcatagcgtgtaagctttgtgaagctgtatgtccagctcaagctattacaattgagtcaaaagaaagagaagatggtagtagaaaaactgtaagatacgatattgatatgcttaaatgtatatactgtggtctttgtgaagagtcatgccccgtagatgcaattgtccaaggtcctaattttgagtttgcaacagagtctagagaagagctttattacacaaaagaaaaactcttggaaaatggagacaggtgggaaaacattttagctgccaatataaaggctgatagttctcacaggtaat

SEQ ID NO: 200475 - DNA, 1154 bp, Unknown
  Bacterial polypeptide expressing nucleotide sequence isolated from the Sargasso Sea
aaaaaacaaccttttaaaaaccaaaactaactttctttttataaaaaatgttaagagcttttttgcgctcttttttctagtgttctttttttcgttttcgtctcattctcaggatgttgacatcgctaaaggtaaatctcttttcaatgctaattgtgctgcttgtcataaacttaacaaaaacttagttggtcctaagcttgctggagttaccgaaaaatatgaaaaggaatggctgtatacatggataaagaatagttctgcgatgattaaatcaggtgatgaacgtgccgttgcggtttgggaggagtggaataaactagcaatgaacgcttttccacagttatcaaatgaagatattgacaatattttagcttatactgattataagcccgagccagtggttagtacagctgtagccgatagtggtgtagctcaatctcaatctagtggatcaatttctcaagatttaatcttggttgtcttaatcgttgttttgatggttttaattaccatgctttatcttgtaaacaaaactttaagggaaattgcttttagaaatggagttgtaactgagaagaaagataagaaaccttcaaaaccaatatggatattatttatcagaaaccaatttttggtcttttgttccgtaattttcttccttctatctagtgcgtattttgcatatggatggttaatgcaagttggaattgatcaaggttacatgccaatacaacctatccattactcacacaaaattcattcgggtgataatcaaatagattgtcaatattgccactcatcggctcgagtttctaagcattctggaataccatctctgaatgtctgtatgaattgtcatgaaaatattgctgagtacgatggagaagaagatttagaaaaaggatatacaaaagacttttacacaaatgaaataaaaaaactttataaagccgttggatgggatgaaaataagaggatatataccggggatgttgaacctgtaaaatgggttaggattcacaatcttccagattttgtttacttcaatcattcacagcatgtcaacgttgctggtgttgaatgtcaaacatgtcatggacccgtcgaggaaatggaaattgcttatcagcattcatcattaacaatgggtt

SEQ ID NO: 200476 - DNA, 659 bp, Unknown
  Bacterial polypeptide expressing nucleotide sequence isolated from the Sargasso Sea
aatgccaaaacaaaataaaactttaaaccttaattttggacctcaacatcctgctgctcacggtgttttaagattgatacttgaacttgatggtgaagttgtagaaaaagccgatcctcacattggtctacttcacagaggaactgaaaaattgattgaaaacaaaacttatatgcaggcagtaccttattttgataggttagactacgttgcaccaatgaatcaagaacatgcatttgctttggctatagaaaaaatacttaaaattgaagtccctgcaagagcacaatttataagagttatgttttgtgaaataggtagaattttaagtcatattttaaacattactactcatgcattagatgttggagctttaactccctcattatggggatttgaagaaagagaaactttaatgactttttatgaacgtgtttcagggtcaagacttcatgctaattattttagagctggcggggttcatcaagatttaccaagaggcttagataatgatattgctaaattttgtgaaacttttcctaaaattataaatgatcttgaaactttgcttaccgataatagaatttttaagcaaagaaatgttgatattggaattgtatcaaaagaagatgcattagattattctttttctggtgtta

SEQ ID NO: 200477 - DNA, 173 bp, Unknown
  Bacterial polypeptide expressing nucleotide sequence isolated from the Sargasso Sea
aatgacaaaaaaaattaaaaatttaaatttaaattttggacctcagcatcctgcagcgcatggtgttcttagattaattctagagcttgatggagaggtggttgagagagcagacccacacattggtttacttcatagaggaacagaaaaacttatagaaaataaaacttata

SEQ ID NO: 200478 - DNA, 853 bp, Unknown
  Bacterial polypeptide expressing nucleotide sequence isolated from the Sargasso Sea
atgtttgaatatttaaatataatattttccgaaatttataaaataatgtatttactaattcctatccttgtttctgttgcaatgattgtttggttagatagaagagtttgggctttagttcaaaaacgaagaggtccaaatgttgttggaccttttggtttattgcagtctttagctgatgctttaaaatatatatttaaagaagtaataataccagctagtgcaaataaaactatatttgttcttgctcctattattacaatgactttagcgcttatatcgtgggctgtaataccatttagtgaagattttgttttatcaaatattaacgttggaattttatatctttttgcaatttcatctttgggagtttatggaataataatgggtggttgggcttctaattcaaagtatccatttttaggagcaattagatctgcagcccagatggtttcctatgaggtatccataggtattataattataaacgttttgctttgcgttggatcacttaatctaagcgaaattgttttagctcaaaaaaaaatttggtttgtaattccattatttcccatgtttgtgatattttttatatcagcattagctgaaacaaacagaccaccatttgatcttccagaggctgaagctgaacttgttgcaggttatcaaacagaatattcaggaatgatgtatgcaatgttttggttgggagagtatgcaaatatcttattaatgtgcgcaatgggatcaattttatttcttgggggttggttaccgccttctgaaatgtatctatttgaaataataccatctccattatggatgataataaaaatattatttttatttatac

SEQ ID NO: 200479 - DNA, 295 bp, Unknown
  Bacterial polypeptide expressing nucleotide sequence isolated from the Sargasso Sea
tatgaatatttcaagattttttaaaacgatattaatgacagatttcattggtggcttgtttattgctattaaagaattatttaaatcaaaaaaaacaatcaattacccttttgaaaaaggtaaaataagtcctcgttttagaggtgagcatgctttgagaaggtatccaaatggtgaggaaagatgtatcgcttgcaaattatgtgaagctgtatgcccagctcaggcaataacaatcgagtcagctgaaagagaagatggaagtagaaaaacaactcgttatgatattgatatg

SEQ ID NO: 200480 - DNA, 835 bp, Unknown
  Bacterial polypeptide expressing nucleotide sequence isolated from the Sargasso Sea
acaatatggtctaacattaggaatagtatttatactggttggtttagcatttaaaatttcggcggttccttttcacatgtgggcaccagatgtttatcaaggttccccaacatcagttacaatattttttgctattctacttaagatagctgcgttatcagtatttataagatttttatatgttccatttattaatcttattgatcaatggcaaactataattatttttgtgtccattgcctcaatggtctttggtgcggttgcagctattggacaaagaaatttaaaacgtctgatggcctatagttctattagtcacatgggttttgcattagctggactagcagtaggtactaatgagggaattcaaagttcaattatatatatttctatatatttattaatgaacttagctttttttagttgtttatttatgttgaaaagaaatgatatctactacgaagatttaagtgatttatccggtttatcgaaaaatcatccaattttagctttatgtttgttaatttcattgttttcattagctggaataccgccattagcgggtttttttgcaaaattttatattttcttagcagttataaaagaagaaatgtattttttagctatagttggattgctttcaacggttgttgcagccttttattacttaagagtaataaaaactatttactttgatagtcaaacagaaaaattcgatattaatcatgatatcggacttaagatttctttattagtttctacggtgataattttaatttattttatttatccaagtcctttacaggcactaatctctaaaatagtaattttgtaa

SEQ ID NO: 200481 - DNA, 451 bp, Unknown
  Bacterial polypeptide expressing nucleotide sequence isolated from the Sargasso Sea
atgaaagatgatttatcgagtaacccagtaaataagccgggttcggtcagaaattttaatattaattttggtccccaacatcctgcagcgcatggcgttctgaggatggttcttgaattagatggtgaggtcgttgagcgctgtgaccctcatattggtcttcttcacagaggaaccgaaaagttaattgaaagtagaacttatcttcaaaacctaccatattttgatcggttggattacgtggcgccgatgaatcaagagcatgcgtggtgcctggccatcgaaaagttggtaggggtaacaattcctcaaagagcttcattgttgcgcgtgttattttgtgaaattggacgaattttgagtcaccttctaaatattactactcaagcaatggatgttggagcattaactccaccgctttggggttttgaagaaagagaaaaattaatgg

SEQ ID NO: 200482 - DNA, 682 bp, Unknown
  Bacterial polypeptide expressing nucleotide sequence isolated from the Sargasso Sea
atgaaagaaatagaagtaaacacaacaacaattaattttggccctcagcatccagcagcacatggagttttgagattagtagttgaacttgatggtgaggttgtcgagagagcagaaccccatattggattgttgcacagaggaactgaaaaattaattgaatacaaaacttaccttcaagctgttccatattttgatagattagattatgtttcacctatgtgtcaagagcatgcctttgcaattgctacagaaacccttctgaaaattgaagtgcctcaaagagctcaatatataagagttatttttgctgaaatcacaagattattaaatcacttattaaacattcctgcttatgcagctgatattggagcagttactccatttttatggtgctttgaagaacgtgaaaaacttcttcaatttcatgaagctgtatcaggtgctagattccatgcagcttattttagacctggaggcgttcatcaagatatgcctgaaggtatggaagaaaaattaaatgatcattttaaaactttacctagatttattgatgatcttgaagatcttttaacaaacaacagaatattaagacaaagatctgttgatattggagttatatctaagcaagaagcaattgaatggggatgcacaggcccagtcttaagaagtgctggtgttg

SEQ ID NO: 200483 - DNA, 481 bp, Unknown
  Bacterial polypeptide expressing nucleotide sequence isolated from the Sargasso Sea
tatgataaaatatattaaatcatttacactttttgagttgttgcaaggaatgtttttaactttgaaatatatgttcaaagctaaggtaacaataaattatcctcatgaaaaaggccctctcagtcctaggttcagaggtgaacacgcattaagaagatatccaagcggtgaagagagatgtattgcatgtaaattgtgtgaagctgtttgtcctgcgcaagctattacaatcgaagctgagccaagagaggatggcagtagaagaactactagatacgacattgatatgagtaaatgtatttattgtgggttgtgccaggactcatgtcctgttgatgcaatcgtagaaggtccaaattttgaatttgccacagaaacaagagaagaattaatgtacacaaaagaaaaacttcttgaaaatggagataggtgggaacaggagattgctcaaaacatttatttagataggaaatatcgttaa

SEQ ID NO: 200484 - DNA, 206 bp, Unknown
  Bacterial polypeptide expressing nucleotide sequence isolated from the Sargasso Sea
aataatgacaaaaaaaattaaaaatttaaacttaaattttggtcctcaacatcctgctgctcatggagtattaagattaattttagagcttgacggtgaagtagttgaaaaagcagatcctcatattggattattacacagaggtactgaaaaattaattgagaataagacttacatgcaggctgtaagtcttattctcaattaat

SEQ ID NO: 200485 - DNA, 327 bp, Unknown
  Bacterial polypeptide expressing nucleotide sequence isolated from the Sargasso Sea
aatgacaaaaaaaattaaaaatttaaatttaaattttggcccccagcatcctgcggcacatggagttttgagacttattcttgaattagatggtgaagttgttgaaaaagcagacccacatattgggttactgcaccgaggtacagaaaaattaattgaaaataaaacatatatgcaagctgttccttattttgatcgtcttgattatgtagctccaatgaaccaagaacatgcttttgcattagctattgaaaaaattttaaaaattgaagtacctataagagctcaatttataagagtaatgttttgtgaaataggaagaattta

SEQ ID NO: 200486 - DNA, 753 bp, Unknown
  Bacterial polypeptide expressing nucleotide sequence isolated from the Sargasso Sea
aatggactcttatttttcaatattatttactgaagtttataaaattttatttttattagtacctgttttagtttctgtagcaatgatagtttggctagatagaagagtttgggcctttgtgcaaaaaaggagagggcctaatgttgttggtccatttggtttatttcaatcactagctgatgcattaaaatatatctttaaagaaattataatacccgcaagctcaaacaagcttgtatttgtattagctccagttgtgactatgacattagcattaatatcgtgggccgtaataccatttgatgaagattttgttctagctgacatcaatgttggtattttatatctttttgcagtttcatcattaggtgtatatggaataattatgggaggatgggcctccaactctaaatacccttttttaggtgcaatcagatctgctgcacaaatggtatcttatgaagtttcaataggagtcataataatcaatgttctattatgtgttggatctttaaacttaagcgacatcgttatggcacaacaaaacttgtggtttgtaattcctttatttcctatgtttgtaattttttttatttctgcattagcagaaacaaaccgtcctccatttgatttacccgaagcagaggcagaattagtggcaggatatcaaactgaatattcaggaatgatgtatgctatgttttggttaggagagtatgcaaatattttgttaatgtgtgccatgggagcagt

SEQ ID NO: 200487 - DNA, 736 bp, Unknown
  Bacterial polypeptide expressing nucleotide sequence isolated from the Sargasso Sea
aatgacaaatatagctttagttttaccagaaatttttctttctttatcaataatgtttcttcttattttaggtgtctttaagaaaaatagttctaagttgattcaaaatatttcattaattattttacttttaacttctgtaattattttaaatgaaactttaggtattcaagaaacactattattcaactctagtattataattgattatttatcatcttttatgaaaattattacactgttggctgcttttttagttttggtaatctcctcaaattatttaaagattttaaagatttttaaaattgaatatccaattctaattttaagttcagttctaggtatgatgataatgattagttccaatgatttaattgtattttatatgggtctagaacttcaatcattagctttatatgttttagctacttttaatagggatcaactgaagtcttcagaggctggtttaaaatattttgttttgagtgcattgtcttcaggtttattactttacggatgttcgttaatatatgggtttacaggctcaacaaattttaacattattgctaatcaactaaattcaaacgaatatgcaatcacttttggcatagtctttattctagttggtctagcatttaagatttctgctgtgccatttcatatgtgggctcctgatgtttatgaggggtcaccaacatctgttacgttattctttataatggttccaaaaatagca

SEQ ID NO: 200488 - DNA, 747 bp, Unknown
  Bacterial polypeptide expressing nucleotide sequence isolated from the Sargasso Sea
cattagctgattcagacgtgggactttacgcgaaagggctagcaagtggtttaaaactacaagctgaagttagtgaaccagacgtaaatatactagctgttcaaggtccaaaatcatttaaattaatggagaaagttttaggtaaaaaaattaccgaacttaaattttttggttttgattattttacttttaagggaaatgaattttttatagctcgatcaggatggtctaaacaaggtggatacgaaatctatgtggaaaatagaatggcaggactaaatttatatgacgagctattttcagctggaaaagaattcaacgtaaagccgggctgcccaaacttaatagaaagaattgaaagtggccttttatcatgtggtaacgattttgataatggtgacaatccctatgagtgtggatttgataaatatatagatattaaatctgatattaattatttaggaaaaaaggctttaatcaaaatttcgagagacggaattaaaagaaaacttatgggtgtgaaaatagaattagacaagttagaaatgatgaatgaagtgccccttcaaaatggcgagagtttagtaggacatttaagatcagcagtttattcgccttatttcaaaaaagtggtaggcatagcaatgatttacaaagagtattgggataaaaagactttttttgaaatagatattgagggtgagaaaagtaaagggtcaatttgcgatttgcccttattatcttgat

SEQ ID NO: 200489 - DNA, 739 bp, Unknown
  Bacterial polypeptide expressing nucleotide sequence isolated from the Sargasso Sea
ttttcctttttatcaggtttctattctaaagatgcaataatagaatttgcgtacttaagtgggaatggagttggaatgcttgcagcttttgtaggtattgttacagctttattaacatcaatttattcctggagacttatatttaaaacattccatggtaattttaataataaaaaacttagtattgataaagtacacgagtctccttttgttatgattgctcctttaattatcttagcaataggagctatttttgctggtatggcctttaaaggtttgtttataggtcatgagatagcatatgaattttggggtaaatctataaagtttttagaaccattaagcacagatcatccaccaatgtggtttttgttttcaacgcctatacttgttacttctgcaattccattttcttattatttatatttaaaaaacacaaacatagtaaatggactgaaagaaatgaatgaaccaatttatcaatttctagttaagaaatggtatttcgatgaaatgtacgattatttattcgtcaatccttcaaaaaaaattggacagtttttatggaaaaaagttgatggatcaataatagataaatttggtcctgatgggatttcaagtgtgattaaaaatttatcaattaaagcagtcaaatttcaatctggatttatttatcaatatgcatttgttatgttgattggattttcagttttactaacaatactgatattaaactaat

SEQ ID NO: 200490 - DNA, 928 bp, Unknown
  Bacterial polypeptide expressing nucleotide sequence isolated from the Sargasso Sea
tatttaaaaatatttagaatttttaaaattgaatatccaattttaattttaagttcagttttaggcatgatggtaatgattagttctaatgatttaattgtattttatatgggattagaacttcaatcattagctttatatgttttagcatcttttaatagagatcaacttaaatcttctgaagctggattaaaatattttgttttaagtgcattatcttcaggcctactactttatggttgttcattaatctatggttttactggttctactaattttaatattattgctaatcaattaagctcagatgaatatacattaacttttggaattgtttttattttagttggtttagcatttaaaatttcagcagttccatttcatatgtgggcaccagatgtttatgaaggatcaccaacatccgtaaccttatttttcacaatggttccaaaaattgcagcattaactgtatttataagatttttatatgttccttttttaaatttaattgatcagtggcaaatgattttaatttttctatcaattgcatcgatgctttttggagcaattgcagcaattggacaaactaatttaaaaagacttatagcctatagttcaatagggcatgtgggttatactttagctggtttggccactggtacaaatgatggaatacaaaattccgttatatatataactatttatattttaatgaatttgggtttattttcatgtttgttaatgtttaaaagagataataaatattatgaaaatatagaagatttatctggattatcaaaaaatcatcctctgttatctttttctttattagtaattctattttctttagcagggattccacctcttgcaggtttttttgcaaaattttatatttttaaatctgttatagaacaatcgatgtattttt

SEQ ID NO: 200491 - DNA, 160 bp, Unknown
  Bacterial polypeptide expressing nucleotide sequence isolated from the Sargasso Sea
atgcaaaacaaaatagatcaggttcctgaagaatttaaacaacttgcagacgattttagcaagaatggttttattacaacttctctagacaatttaataaattggtcaagagcaggatcacttcattggatgacatttgggctagcctgttgtgctgtcg

SEQ ID NO: 200492 - DNA, 787 bp, Unknown
  Bacterial polypeptide expressing nucleotide sequence isolated from the Sargasso Sea
aatgcttgaaaatttaaatattttattaactgaaatttacaaaattgttcttttacttattccaattttaacagcagtagcaatgatagtttggcttgatagaagagtatgggcttttgttcaaaaaagaagagggccaaatgtagttggtccatttggtttatttcaatctttggcagatgctttaaaatatatttttaaagaaataatcattcctgcaagtgctaataaagttatatttattcttgcaccaatcgtaacaatgacattagctttaattgcttgggctgttataccatttagcgaagaaattgttcttgcagatataaatgtaggaatattatatatttttgccgtttcatccttaggagtttatgggattattatgggtggttgggcgtcaaattcaaaatatccttttttaggtgcaataagatctgcagctcaaatggtatcatatgaagtttctataggagtaataataataaatgttttattgtgtgttggctctttgaatctaacagatattgtcttagcccaagaaaatttatggtttatagttcctctttttccaatgtttgtcattttttttatctctgctcttgcagaaaccaatagacctccgtttgatttacctgaggcggaagctgaattggtagcaggttatcaaacagaatattctggaatgatgtatgcaatgttctggttaggcgaatatgcaaatattttattaatgtgtagtttgggatcaattttatttttaggtggatggttatcaccaatagat

SEQ ID NO: 200493 - DNA, 847 bp, Unknown
  Bacterial polypeptide expressing nucleotide sequence isolated from the Sargasso Sea
gtatttattttagttgggtttgggtacaaaatttctgcagttccttttcatttttggactccagatgtttatgaaggttctccaacaactataacggcgtacttatcagttgcgccaaaagcagctggccttgcactattaattcgttttttcaatcaagtctttggagatggctcagcaatttcatctgagttttggttagctgtaaatgatattccttggccgcaacttatggcagttctatctgcagcaacgatgactgtaggaaatttggttgctattcaacaaaatagtgtaaaaagaatgttagcatattcaagtattgcgcatgctggttatatgatgatggcgctgccattaatgtctcaatctggtatttatggaattatgatgtatgtttttgtatatcttttcatgaatctaggtgctttttttgtgctaatatatgttcaaagtgaatttggtggtgaaacttttgatgatttcaataatttgggttggaaaatgccatttattggagctgttatgacattatttatggtcgcattaactggtttacctccgacagcaggctttataggaaaattttatatatttgctgccgttattgaggcaggatctgaatattattggttagcctttgtaggcgtgatcaatagtgtggtttcactatattattatattcgcgttgttaagcatatgtatttggttggagatcgaagtgagtcaattggtatgccctcctcaaaattggtcaccttacttcttgttgtattagcaattcccacttttatttttggttggtattttggccctgttacagattggattagccaatcttttgtta

SEQ ID NO: 200494 - DNA, 218 bp, Unknown
  Bacterial polypeptide expressing nucleotide sequence isolated from the Sargasso Sea
cgaccaaatgcctgaaccgaggtacgtaatatcaatgggaagttgtgctaatggtggtggatactatcattactcttattctgtagtcagaggttgtgacaaaatcgtgccagtggatatttatgttcccggatgcccgccatctgcagaggcattattgtatggaattcttcaacttcaaaaaaaaataagaagagatggggacattaacagataat

SEQ ID NO: 200495 - DNA, 274 bp, Unknown
  Bacterial polypeptide expressing nucleotide sequence isolated from the Sargasso Sea
aatgactgagagcaatcttacccttaattttgggccacagcatccggcggcacacggcgttttgagattaatcatggaattggatggcgaggtcgttaccaatcttgacccgcatataggtctcttgcatagaggcactgaaaaactcgctgaaattaagccttttaatcattcaattggctacatggatagaatggactatgtatcaatgatgtgctgtgaacatccatatgttctggccattgagagcttattagaaatcgaacccccctaa

SEQ ID NO: 200496 - DNA, 871 bp, Unknown
  Bacterial polypeptide expressing nucleotide sequence isolated from the Sargasso Sea
atgcttgaaaatttaaatattttattaactgaaatttacaaaattgttcttttacttattccaattttaacagcagtagcaatgatagtttggcttgatagaagagtgtgggcttttgttcaaaaaagaagaggaccaaatgtagttggtccatttggtttatttcaatctttagctgatgctttaaaatatatttttaaagaaataatcattcctgcaagtgctaataaaattatatttattcttgcaccaattgtaacaatgacattagctttaattgcttgggcagttataccttttagtgaagaaattgttcttgcagatattaatgtcggaatattatatctttttgctgtttcatccttaggagtatacgggattattatgggtggttgggcgtcaaattcaaaatatccttttttaggtgcaataagatctgcggctcaaatggtatcatatgaagtttctataggagtaataataataaatgttttattgtgcgttggttctttgaatctaacagatattgtcttagcccaagaaaatttatggtttatagttcctctttttccaatgtttgtcgttttttttatctctgcacttgcggaaactaatagacctccatttgatttacctgaagcagaagctgagttggtagcaggttatcaaacagaatattctggaatgatgtacgcaatgttttggttaggtgaatatgcaaatattttattaatgtgtagtttaggatctattttatttttaggaggatggttatcaccaatagatatttatcctttcacagttatacccgcgccactttggttgatatttaaaatattattattgtttattctattctctttagtaaagc

SEQ ID NO: 200497 - DNA, 344 bp, Unknown
  Bacterial polypeptide expressing nucleotide sequence isolated from the Sargasso Sea
aatgacaaaaaaaattaaaaatctaaatttgaatttcggaccccaacatccagctgcgcatggagttttaaggttaattcttgagctagatggtgaagttgtggaaaaagctgatccgcacattggtctgttacatcgtggtactgaaaaattaattgaaaataaaacttatatgcaagcagttccgtatttcgatcgtttggattatgtagctcctatgaaccaagagcatgcttttgcattagcaattgaaaagattttaaagattgatgttccaattcgagcacaatttataagagtaatgttttgtgaaattggtaggattttaagtcatattttaaatg

SEQ ID NO: 200498 - DNA, 487 bp, Unknown
  Bacterial polypeptide expressing nucleotide sequence isolated from the Sargasso Sea
aatgaaaattacaagattttttaaaacaatatttatggtcgactttgtaaccgggttatttattggtttaaaagaaatttttaaatcaaaaaaaactataaattatccatttgaaaaaggaaagattagcccaagatataggggagaacatgcactaagaagatatcctaatggtgaagaaagatgtatagcttgcaagttatgtgaagctgtatgtccggcgcaggcaataacgatagagtctgctgaaagatcagatggtagcagaaaaactactcgctatgatattgatatgatgaaatgtatatactgtggtttatgtgaagagtcttgtccagttgatgcaattgtgcagggaccaaattttgaattttctacagagacacgggaggaactttattatactaaagataaattacttgataacggagatagatgggaaaatattttagcagcaaatattaaatcagataacccttacaggtga

SEQ ID NO: 200499 - DNA, 175 bp, Unknown
  Bacterial polypeptide expressing nucleotide sequence isolated from the Sargasso Sea
atgagctcagaatttttaaaagactatctacctataatgctatttttattcatagcgttaggattaagtttcggttttataatactgaattatattttttcaccaaagaaaccagatcccgaaaagttatcggcttatgagtgtggttttgaaccattcaatgattcaagaatga

SEQ ID NO: 200500 - DNA, 812 bp, Unknown
  Bacterial polypeptide expressing nucleotide sequence isolated from the Sargasso Sea
aatgacaaaaaaaattaaaaacttaaatttaaattttggtccacaacatcctgctgctcatggtgttttaagattaatattagagttagacggagaagttgtggaaaaagctgatcctcacattggtttacttcatagaggaactgaaaaattaattgaaaacaaaacttatatgcaagcagtaccttattttgataggttggattatgttgctcctatgaatcaagaacatgcttttgctttagctgttgaaaagattttgaaaattgatgtaccaattagagctcaatatattcgtgttatattttgtgaaattgggagaatattaagtcatatcttaaacgttactactcaagcgcttgatgttggtgcgcttacaccatctttatggggatttgaagaacgtgaaacattaatgactttttatgaaagagcttctggatcaagattacatgcaaattattttagagctggtggagttcatcaagatttaccagcagggttagaggatgatattgcaaaattttgcaaaacttttccaaaaattattgatgatttagaaaatttattgactgataacagaatttttaaacaaagaaatgttgatattggtgttgttacaaaagaagatgcacttgattattctttcactggagtaatgatcagaggttccggagttccttgggatttacgtaaatctcaaccatatgattgttatgatcaactagattttaaaattccaataggcaaaaatggtgattgttacgatcgttatttatgtagaattgaggaaaatgaagaaagtgtattat

SEQ ID NO: 200501 - DNA, 250 bp, Unknown
  Bacterial polypeptide expressing nucleotide sequence isolated from the Sargasso Sea
tatgaaaatatcaagattttttaaaaccatattcatggtagactttgcgagtggtctatctatggctattaaagaagtatttaaatcaaaaaaaacaataaattatccattcgaaaaaggtaagataagtcctcgttttagaggagaacatgcattaagaagatatccaaatggtgaagaaagatgtattgcatgtaaattatgcgaagccgtttgtccagctcaggccataacgattgaatcaactcaa

SEQ ID NO: 200502 - DNA, 460 bp, Unknown
  Bacterial polypeptide expressing nucleotide sequence isolated from the Sargasso Sea
aatggattcttttttctggacgtatctctggcccgcgctgatcatgatcggccagtcgctgctgcttctggttctgctgctcgtcggcatcgccttcatcctgctcgccgaccgcaagatctgggcggcggtgcagatgcgtcgtggcccgaacgtcgtcggtcccttcggtctgatgcagtcctttgccgaccttctgaagttcgtgttcaaggaaccggtcattccggcgagctcggacaaggtcgtgttcctgctggccccgctgatctcggtgacgctggcgcttgcaacctgggcggtgatgccggttgccgagggctgggtgatcgccaatatcaatatcggcattctctatatcttcgccatttcctcgcttgaggtttacggcgtgatcatgggcggctggacctcgaactcgaaatacgccttcctcggctcgctgcggtccgcggcgcag

SEQ ID NO: 200503 - DNA, 925 bp, Unknown
  Bacterial polypeptide expressing nucleotide sequence isolated from the Sargasso Sea
atcaaaagactaatggaaaatttccaatatatattacctgaaatcttcatatcggtatctataatgctatttttactatttggagttttcaaaaaaaatagcgcaaatttaatttataatttatctaatatatcgctagtcattttattagcactaataataaatcttagctcattagatacaatctacttattcaataattcatatttaatagataacttatctaattacatgaagattatgcttgtaggatctggaatttttgtaatgttaactggatcaaaatatattcaagttatcaatttaaataaaattgaatatccaatccttatattaagcagcattttaggaatgatgataatgataagttcaaatgatttaatagttttttatatgggtcttgaacttcaatcattagctttgtatgttcttgcgtcatttaatagagataatttactttctactgagtctggattaaaatattttgttcttagcgccttatcttcgggtttactattgtatgggtgttcattgacttacgggttttctgaaagtacaaatttcgatcaaattcttataaactctactgaatttaattatggtaccacatttgggatagtctttattttagttggtcttgcatttaaaatatcagctgtgccttttcatatgtgggcaccagatgtttatcaaggctcccctacatcagtaactttattctttgctatactgccaaaaatagcagcactctctgtattcatcaagtttttatacacgccttttgctaacatgaatgatcagtggcagactattattgtatttatatccattgcatcaatgatatttggtgcagtagcggctataggtcaaaaaaatctgaaaagactaattgcatacagttcaattagtcatatgggctatgctt

SEQ ID NO: 200504 - DNA, 487 bp, Unknown
  Bacterial polypeptide expressing nucleotide sequence isolated from the Sargasso Sea
aatgaaattaaatagaatttttaaaataatatttttatcagaatttgttaaggcaataattattgctataaaagaaattctccaaaagaaaaaaacaataaattacccctacgaaaaagggaagataagcccaagatttagaggcgaacatgcgcttagaaggtacccaaatggcgaagaaagatgcatagcttgcaaactatgcgaggctgtatgtccagctcaggcaattactattgagaatgaagaaagagccgacggaagcagaaagactacaagatatgatattgatatgctgaaatgtatatactgcgggctttgtgaagagtcatgtcccgtagatgcgatagtccaagggccaaattttgaatttgcgactgagactagagaagagctttattataataaagaaaaattattagaaaacggagatagatgggagtccgttttagctgaaaatattaaattagataaaccttatagatga

SEQ ID NO: 200505 - DNA, 487 bp, Unknown
  Bacterial polypeptide expressing nucleotide sequence isolated from the Sargasso Sea
atgaatataattcgaatatttaaaacagtatttttagtagattttttgacaggtttgttgatagctataaaggagtcatttaaaccaaaaaaaacgcttaactatccttttgaaaaaggcaagatttcaccacgatataggggtgagcacgccttaagaagatacccaaacggcgaggaaagatgtatagcatgtaaactttgtgaagctgtttgtccagctcaggcaataacaatagagtctacagcaagagaagacggaagtagaaaaacaactagatacgatattgatatgctaaaatgtatctattgtggtttgtgtgaagagtcgtgtccggtcgatgctatagtgcaaggtcctaactttgaatttgcaacacatactagggaagaactttactacaataaagaaaagcttttagaaaatggagatagatgggagaatgttttagctgcaaatataaaagctgataacccttatagataat

SEQ ID NO: 200506 - DNA, 713 bp, Unknown
  Bacterial polypeptide expressing nucleotide sequence isolated from the Sargasso Sea
aatggctaaagagaaaaaaacattaaatttaaattttggtcctcaacatccagctgctcatggtgtattaagacttattttagaattagatggtgaaatagttgaacatgctgaccctcatattggattattacatagaggcacagaaaaattaattgaaaataaaacttatctccaagcattaccttattttgacaggcttgattacgttgcaccaatgaatcaagaacatgcatttgcacttgctatagaaaaaatattaaatatcgaagttcctataagagcacaatttataagagtaatgttttgtgaaattggcagaatattaagtcacatcttaaatataaccactcaagcacttgatgtaggtgcgttaacaccttcactttggggttttgaagaaagagaaactttaatgactttttatgaaagagtttctggatcaagacttcatgcaaattattttagaactggtggtgtccatcaagacttgcccagaggattaagtgatgatattgcaaaattttgtcaaaattttccaaaggttataaatgatttagaaacccttttaactgacaatagaatatttaaacaaagaaatgttgatattggtgttgtttcaaaacaggacgccttagactattccttctctggtgtaatgttaagaggttctggaataccatgggatttaagaaaatctcaaccttatgaat

SEQ ID NO: 200507 - DNA, 709 bp, Unknown
  Bacterial polypeptide expressing nucleotide sequence isolated from the Sargasso Sea
atgtttgaatacttaaatttactatttgttgaaatttacaaaattatttttctactgataccaattttagtatctgtagcactaattgtttggttagatagacgtgtttgggcatttgttcaaaaaagaaaaggacctaatgttgttggtccttttggcctattacaatcaattgccgatgctttaaaatatatatttaaagaaataattgttccagctagttctaataaaattatatttatcttagcacctgtagttacaatgactttagctttgatatcatgggctgtaataccttttggtgaaaattttgttttagccaatataaatgttggaattttatacttgttcgctgtctcttctttgggtgtttatggcattattatgggtgggtgggcctctaattctaaatacccttttttaggatcgataagatctgctgctcaaatgatttcttatgaagtttctataggtgtgataattattaacgtattattatgcgttggatcactcaatcttacagacatagttcttgctcaaaaaaaaatatggtttgtagttcctttgtttccaatgtttgttatattttttatttcagcgctagctgaaacaaatagaccaccttttgatttacctgaagcagaagctgaattagttgcaggttatcaaacggagtattctggaatgatgtatgcaatgtttggttagg

SEQ ID NO: 200508 - DNA, 742 bp, Unknown
  Bacterial polypeptide expressing nucleotide sequence isolated from the Sargasso Sea
tggattcccttttctttcaggtttttattccaaagatgcaattattgagtttgcttttttaagaggtaacaatcttggtttttatgcatccggtataggtgtatttacagctttattaacgtctatttattcctggaggttaataattaaagcatttttcggaaaatataataattcaaatgttaaacatgagtcattgaatgaatccccaatgatcatgcttataccattaataattttagcaattggtgctatttttgctggtattttatttaaagatttgtttataggccacgaaacatcctatgaattttggtcaaactcaataaaatttttagaaccactaagtaaaggtcatcccccaagttggtttttatttttaacaccaatattagtaaccatatcaattccattgtcttactatttatttttaaaaaatactaaaatagtggattcaattgtaaactctaacaaatctttatatctttttttaaaaaacaaatggtatttcgatgaaatttatgagtatatttttgttaagcctgcaaaaaaaattggttattttttctggaaaaaaattgatgtttcttttatagataaatttggtcctgatggattatctcaattaataaaatatttttcattgaaagcagtcaaatttcaaagtggatatatttatcagtatgcatttgttatgctaataggattttctatacttttaactttacttttggttaattaa

SEQ ID NO: 200509 - DNA, 422 bp, Unknown
  Bacterial polypeptide expressing nucleotide sequence isolated from the Sargasso Sea
tatgaacatttcaagattcttcaaaacaatattaatgacagatttcattggtggtttatttattgctattaaagaattatttaaaccaaaaaaaacaattaattacccttttgaaaaaggtaaaataagtcctcgttttagaggtgagcatgctttgagaagatatccaaacggagaagaaagatgcattgcttgtaaattatgtgaagcagtatgtcctgctcaggcaataacaatcgagtcagctgaaagagaagatggaagcagaaaaacaactcgttatgatattgatatgatgaagtgtatttattgtggcttatgtgaagaagcttgtccagtagatgcaatagtacaaggtccaaattttgaatttttcacagaaacaagagaaagaactttattacacaaaagaaaaattatta

SEQ ID NO: 200510 - DNA, 487 bp, Unknown
  Bacterial polypeptide expressing nucleotide sequence isolated from the Sargasso Sea
atgaaaatattaagatttattaaaacagttttattagttgattttgttagtggtttatttattgcaattaaggaaacttttaaagcaaaaaaaactttaaattatccatttgaaaaaggaaaaattagcccaaggtttcgtggtgaacacgccttaagaagatatccaaatggtgaagaaagatgtattgcttgtaaattatgcgaagcagtttgtcctgcacaagcgattacaatcgagtcagctgaaagagaagatggtagtagaaaaactacaagatatgacatagatatgcttaagtgtatatattgtggactatgtgaagagtcttgtcctgtagatgcaattgttcaagggcctaattttgagttttcgacagaaacaagagaagagctttattataataaacaaaaattattagataatggtgatagatgggaaagtttattagctgcaaatattaaagctgataacccttacagataaa

SEQ ID NO: 200511 - DNA, 149 bp, Unknown
  Bacterial polypeptide expressing nucleotide sequence isolated from the Sargasso Sea
tttttctttagtaaaagcaattgtgccaagatatagatatgatcaattaatgaaattaggttggaaaattttcctacctttctcattaatttgggtagttttgacatcaagttatctattttattttaatttattaccaacaaattaat

SEQ ID NO: 200512 - DNA, 787 bp, Unknown
  Bacterial polypeptide expressing nucleotide sequence isolated from the Sargasso Sea
aatgccatttacctggttagccatgattgttggtacacttgcattaaccggatttccacttttatccggattttattccaaagatgcaataattgaatacgcatatttaagtcaaagtaatattggttatattgcaaccgcagtaggaataataacagcgcttttaacagctatttattcttggagattaatatttaaaacttttcatggaaaatttaacaacaagaatatttcgaaatcaaaaattaaggagtcgggcctatctattaccatacctttaggtattcttattttaggatcaatctttacgggatttcttttcaaagacttattaattggaaaaactaatcaagaattttgggcatcatctattttaattttgaaaaatttcgatcatagtttgataccattatggattttatacattactccagttcttgtagtttctgctatacctttgtcttattacttatttttaagtaaaccaaaatatttggatgaaataattttaaaaaataaaaaaatttataaatttttgttaaacaaatggtattttgatgagttatatgatgctatttttgttaaaccaattcaaaaattaggatcttttttttggaaatctggcgatcaaaaaactattgatagatacggaccggatggtatttcgcatttaatcaaaattatttcatacagggtatcaaagtttcaaactggttatttgtttgattatgcttttgtcatgttaattggattttctctactattaacttttttaattataaaataa

SEQ ID NO: 200513 - DNA, 172 bp, Unknown
  Bacterial polypeptide expressing nucleotide sequence isolated from the Sargasso Sea
aatgacaaaaaaaattaaaaatttaaatctaaactttggtcctcaacatccagcagctcatggtgttctaagattaatattagaattagacggtgaggttgttgaaaaagcagacccacatataggtttgctccacagggggacagaaaaattaattgaaaacaagacatac

SEQ ID NO: 200514 - DNA, 172 bp, Unknown
  Bacterial polypeptide expressing nucleotide sequence isolated from the Sargasso Sea
aatgaacttaaattttggacctcaacatccagctgcacatggagttttgagattaattctagagttagatggcgaacttgttgaaaaagttgatccacatataggattattacatagaggaactgaaaaactaatcgaacataaaacttatgctcaagcattaccttacttt

SEQ ID NO: 200515 - DNA, 916 bp, Unknown
  Bacterial polypeptide expressing nucleotide sequence isolated from the Sargasso Sea
cgtcacttatttaaaacatttaaaatatataatatagaatacccggttcttattttgagttcaattcttggaatgatggtaatgatcagttcaaatgatttaattgttttttatatgggattagaattacagtcattagctctatatgttttagctacatataacagagatcaattaaaatcatcagaagctggtttgaaatattttgttttaagtgcattatcatcaggattattattatatgggtgttctttagtttatggtttttcaggttctaccaattttgatataatatcaaatcaactaaattctgaggaatatgttttaacttttgggattgtcttcatattagttggtttagcatttaaaatttctgcagttccattccatatgtgggcacctgatgtttatgaaggatctccaacgaccgtaactttgttttttacaatagtaccaaaggtagctgctttgactgtatttattagatttttatatgttccttttttaaatttaattgatcaatggcaaatgataatagttttcttatctatagcttctatggtttttggagcagttgctgctatagggcagactaatattaaaagactaattgcttacagttctataggccacattggctacacattagctggtttagccacagcatcaaacgagggaattcaaagttcgataatttatatttctatttatgttgttatgaatttagctcttttttcatgtctattaatgttaagaagaaaagatcaatattatgaagatattgatgatctctcaggattatcaaaaaatcatccattgttatctttgtgtttgttgttaatactattttctttagcaggcataccacccctagcaggtttcttcgcaaaattttacgtttttaaagcagtgttgg

SEQ ID NO: 200516 - DNA, 76 bp, Unknown
  Bacterial polypeptide expressing nucleotide sequence isolated from the Sargasso Sea
atgatgatctttttgggtattttaacagttggatttatttatgagtggaaaaaaggagctttagaatgggagtaaa

SEQ ID NO: 200517 - DNA, 487 bp, Unknown
  Bacterial polypeptide expressing nucleotide sequence isolated from the Sargasso Sea
atgaaaattaaaagaatattaaaaacagttttcttagtagaatttatagttggacttgctattgcgattaaagaaacctttaaaaagaaaaagacaattaattatccttttgagaaaggtacaattagcccacgtgctaggggcgaacatgcattgagaagatatccaaatggtgaagaaagatgcattgcatgtaagttgtgcgaagcagtttgtcctgctcaagcgataacaattgaatctacagaaagagaagatggtagtagaaaaactacgaggtacgatatagacatgctgaagtgtatatattgtggtttatgcgaagaatcttgtcctgtcgacgcaattgttcaaggaccaaattttgaatttgcgacagaaacacgagaagaattattctataataaggaaaaattattagaaaacggcgacaggtgggaaaatattctatcagctaatattaaagctgataacgctcacagataat

SEQ ID NO: 200518 - DNA, 173 bp, Unknown
  Bacterial polypeptide expressing nucleotide sequence isolated from the Sargasso Sea
aaaaataatactattatttgtattatttgctctggttaaagctattgttccaagatatagatatgaccaacttatgaaactaggatggaaaatatttctgcctttttccttattttacgtagttttaacatctggtttcttgctttattttgatctattaccgaataaataaa

SEQ ID NO: 200519 - DNA, 487 bp, Unknown
  Bacterial polypeptide expressing nucleotide sequence isolated from the Sargasso Sea
tatggatatttttttttatattattaatacagtcatatctatactagttgttgttgtcccacttttcttgattgttgcttacgttacatattctgagagaaaaataattggttttatgcaatctcgaatggggccaaccagagttggtccatcggggttacttcaaccaatcgctgatgtattaaaattagtatccaaagaaatcataataccaactaacgccaataaaggaatatttctcacagctccgatgcttatgctcgtgccatctcttcttgtctggtcggtgataccattatcagaatattttataattgctgatatcaacgcaggattattgttcattttggctctgacatcattaagcgtttatggtgttattctagcaggctgggcatcgaattctaaatatgcttttttaggctcaatgagatctgcagcacaaattattgcttatgaaattgcaatggggttcgctttagtgggc

SEQ ID NO: 200520 - DNA, 487 bp, Unknown
  Bacterial polypeptide expressing nucleotide sequence isolated from the Sargasso Sea
atgaaaattacaagatttataaaaactgtattattatttgattttataaacgctttattaattgcgttaaaagaaatttttaaaaaaaaaaaaacaattaattatccttttgaaaaaggaaaaattagcccaagattcagaggagaacatgccctaagaagatatcccaatggagaggaaagatgtatagcatgtaagttatgtgaagctgtttgtcccgctcaagcaataacaattgaatcagctgaaagaagtgatggtagccgtaaaactacaagatacgacatagatatgatgaaatgtatttattgtggactttgtgaagaatcttgtccagtagatgctatagttcagggaccaaactttgagttttctactgaaactagagaagaactttattacaataaagaaaaacttctagataacggtgacaggtgggaaagtgtattagaagcaaatattaaagcagataatccgtatagataat

SEQ ID NO: 200521 - DNA, 922 bp, Unknown
  Bacterial polypeptide expressing nucleotide sequence isolated from the Sargasso Sea
agccctttgttatgcgggcttgctgattgcctttggggtgaaattgccgatcgtgccgctgcacacgtggctccccgatgcccacggcgaagccaccgcgccggtgcacatgctgctggcgggcatcttgctgaagatgggcggctacgccctgttccgcttcaacgcgtcgatgttccccgacgcccacgtgcagttcgcgccactgctggtggtgctgggggtggtgaacatcatttatgcggcgctcacctcgtttgcgcagcgaaacctcaaacgcaagatcgcctacagctccatcagccacatgggctttgtgctgatcggcatcggcagcttctcgcccttggccgccagtggcgccatgttgcagatgatcagccacggcttgatcggagccagtctgtttttcctagtgggggccacctacgaccgcacccacaccctgcagctcgatgagatgggcggggtcggccagcgcatgcgcaagatgtttgccatgtggaccgcctgctcgctggcctctctggcgctccctggcatgagcggctttgtctcggagctgatggtgtttgtgggctttgccaccgacgacgcatacagcctggccttccgcatcgtgattgatggggccgctgcgatcggtgtgatcctcacgccgatctatctgctctcgatgctcagggagatcttctttggccaagagaagcccgagctctccgacgccaatttggtggacgccgagccccgggagatctacatcatttcctgcctgctggtgccgatcattggcattggcctctacccgaagctggtcaccgacagctaccgggcaacgatcgaacaggtggtggcccgggatgagtcatccatgaaggcgctgacggctccttactttgcattgcgttctgctccgaagtga

SEQ ID NO: 200522 - DNA, 946 bp, Unknown
  Bacterial polypeptide expressing nucleotide sequence isolated from the Sargasso Sea
ttaagctcagttttaggtatgatgataatgataagttcgaatgatttaattgtattttatatgggattagaactacagtctttagctttatatgttttagcaacatttaatagagacaatattaaatcttcagaggctggattaaaatacttcgttttaagtgccttatcttcaggtttattattgtacggatgttcactaatatatggttttacaggatcaacaaattttgatttaattgcaacccaattaaactcaaatgaatacgctttaacatttggtattgtttttatattggttggtttggcatttaaaatttcagccgtaccattccatatgtgggcacctgatgtatatgaaggatcaccgacttcagttacattattttttactatggtccctaaaatagctgctttatcagtttttataagatttttatacgttccttttttaaatttaattgatcaatggcaaatgattttaatttttttatcaatagcctcaatgctttttggcgctgttgcagctataggacaaactaacttaaaaagattagtggcatacagttcaataggacatgtcggttttgcattggcaggattagcaactggaactaatgagggaatacaaagttctgtaatttatataactatttatatattgatgaatcttggtcttttttcatgtttattaatgatgaaacgaaacaatgaatattacgaaagtattgaagatttgtctggattatcaaaaaatcatccattactgtctttgtctttattaataattttgttttctttagctggaattcctcctctagctggtttttttgccaaattctatatttttaaatcagtaatagaacaatcaatgtattttttagctgtggttggcttattatcaactgtcgttgcagcattttattacttaagattaattaaaataa

SEQ ID NO: 200523 - DNA, 663 bp, Unknown
  Bacterial polypeptide expressing nucleotide sequence isolated from the Sargasso Sea
aatgaatagtttttcatatttaaatgatttaataattcctggtggaattattattgctcaaataatggcagtattgatgccagttctaatttcagttgcatttttagtatatgctgaaagaaaagttctcgctcttattcagctgcgtcgtggcccaaatgtggtgggcccctttggcatccttcaaagttttgctgatgctctaaaattattaactaaagaaaatattgttccagctaattctaataaaattgtttttttattagcacccatcattacaatggtgctcagtttagcaggctgggccgttataccttttgctccaaattgggtgatagcagatattaatgtgggaataatgtatctctttgctgtatcatcacttggtgtttatggaataattatggctggatgggctagtaactcacagtatccttttcttggtgcattacggtcagcagctcaaatggtatcatatgaagtgtcaattggttttgttattattactgtattactttgtgtaggatctcttaacttatcaaaaatagttgaagcacaagaaacagtatggtttgcaattcctctacttccaatgtttgtcgttttttttatttcagctctggcagagacaaatagattaccttttgacttacctgaggatga

SEQ ID NO: 200524 - DNA, 304 bp, Unknown
  Bacterial polypeptide expressing nucleotide sequence isolated from the Sargasso Sea
gatggccgctttggtaaatgctgttcgttcttttctgcttttagagcttgggaaagcgttgtttttaactttaaaatatttttttaaaccgaaagtcacgattaattacccttatgaaaagggtaatctgtcgcctcggttccggggcgaacatgcattgcgccgctatcctaatggtgaggagcgctgcattgcctgcaaattatgcgaagcggtatgtccagctcaggcaatcaccattgaggcggagccgcgtgatgatggcagccggcggaccaccagatatgatattgatatgaccaag

SEQ ID NO: 200525 - DNA, 845 bp, Unknown
  Bacterial polypeptide expressing nucleotide sequence isolated from the Sargasso Sea
tgatataaaatctgctgaagcttctcttaaatactttttattaggtgctttatctagtgggtttattctatttggaatttctttaatatatggatttgttggaagcatatcatttgaacaactttctaatataagtattaaaaatgatatggggataaactttggattaattttaattttagctggagtcgcttttaaaatttcatcagcaccatttcatatgtgggcaccagatgtttatgagggtactccatctccaattactttttttattgcaactgctccaaaaatttcgataattggtatttttgtttatttaatatatattgttttcaaaggtattcacgataatttatctgatttgattatcgttttatctttatcatctatgttggtcggatccgttggggctatagttcaaaaaaatttaaaaagactaattgcgtattcaagtattgcacatatggggttcatcttagttggtatggttgcattttctgaaaatggacttcatgcaataatttattatttgattatttacttatttcttttaactggtgtgtttgccattattttaagtcttcaaaaagatgataaacccatagaattaatttcagacttaagaggtctttataatgatcatccattcatatcaatttgtttattaatttttatgttttctttagctggaattccaccattatcgggtttttttggtaaatggcttgttttcttttcagcaatagacagtggattttacatattagctgttttaggtgttttattttcagttatttctgcattttattacttaaaaattataagagtaatgttttttgaaaatt

SEQ ID NO: 200526 - DNA, 703 bp, Unknown
  Bacterial polypeptide expressing nucleotide sequence isolated from the Sargasso Sea
acaatagtttcttcaatatttgttatgatctcatccgttacttaccttaaatcattaaatattttaaaaatagaataccctatattaattttatcatcaattcttggcatgatggtaatgataagctcaaatgacttaattgtattttatttaggattagagcttcaatcattagcgctgtatgtacttgcatcatttaatagagataatcttttgtcatcagagtcaggactaaaatattttgtattaagtgctttgtcatcaggtttattgctttatggatgttcactcgtatatggattttcaggttctactaattttcattatattgctaattcatctttagatattaaacaaggagtaacttttggtttagtatttattatagtaggattagcatttaaaatttcagcagtaccttttcatatgtgggcacctgatgtttatcaaggatcaccgacgtctgtaactttattttttgcagctttaccaaaaattgctgctttaactgtttttattagatttttatatacaccatttgttaatttgattgatcaatggcaaacaatacttgtatttatatcaatagcttcaatgatatttggtgctgtagctgctattggccaatccaatttaaagagacttatagcatatagctccataagtcatatgggatatgctctagcaggggtggcctctggta

SEQ ID NO: 200527 - DNA, 781 bp, Unknown
  Bacterial polypeptide expressing nucleotide sequence isolated from the Sargasso Sea
atgacaaaacaaactaaaactttaaatttaaactttggccctcaacatccagcagcacatggtgttttaagattaatcttagaattagatggagaggtggttgaaaaagctgatcctcatataggcttgcttcatagaggaacagagaagttaatagagaataaaacttatgctcaagcagtcccttactttgataggttagattatgtggcacctatgaatcaagaacatgcatttgctctagctattgaaaagattttgaaaattgaagttccaattcgagctcaatttatcagagtgatgttttgtgaaattggtagaattcttagccacattttaaatataacaacacaagcattagatgttggagcgcttactccatctttatggggatttgaggaaagagaaactttaatgacattctatgagagagtttctggatcaagattacatgcaaattattttagagcaggtggagttcaccaggatatgcctagaggactagacgcagatatctttgatttcacaaaaaaatttcctaaaattattgatgatttggaaagtctacttacagaaaatagaatttttaaacaaagaaatgttgatattggcgttgtatcaaaacaagatgcattagattattctttttctggcgttatgttacgtggatcaaatgttccatgggacttgagaaagtcacaaccttatgattgttatgaccaaatggattttaaaattcctgttggtaaaaatggtgattgctatgatcgttatctttgta

SEQ ID NO: 200528 - DNA, 535 bp, Unknown
  Bacterial polypeptide expressing nucleotide sequence isolated from the Sargasso Sea
caattaatggaaaaagtttttggagaaaaaattgtaaatttaaaattttttggttttgattattttgaatttggtggagataaacatcttattgcaaagtctggatggtctaaacaaggtggctatgaaatttatatggaacacaacaagtcaggtttaaaactatacgatcatctttttgaaattggaaaggaattcaatattagaccaggtggaccaaaccttatcgaacgtatcgagagtggtttactttcccatggtaacgatatggacaatggagataatccatatgagtgtggttttgataagtatgtaaatatagatagtgatgctgatttcttaggtaaagaaaaactaaaaaaaattaaagctgaaggaattaaaaaaaaacttatgggagtaaaaattgatgccaaggaaataagtgttaatggctcaatggatctagtagatgaagataatactgtaattggagaattaagatctggttgttacaatccaacttttaaacaagtcattgggattgcaatgatta

SEQ ID NO: 200529 - DNA, 211 bp, Unknown
  Bacterial polypeptide expressing nucleotide sequence isolated from the Sargasso Sea
atgagaaatattgataaagaccaaaaaataccagaagagtttaaggatatagctaaaaattttagcgacaatggttttattacaacctcaatggacaacttggtgaattgggcacgtactggatctttgcattggatgacttttggtttagcatgttgtgcagtggagatgatgcagacttcaatgccgagatatgatttagaaagatttg

SEQ ID NO: 200530 - DNA, 192 bp, Unknown
  Bacterial polypeptide expressing nucleotide sequence isolated from the Sargasso Sea
tagtatcaatgggtagctgtgctaatggtggaggttattatcactattcttattcagtcgtaagaggttgcgataagattgtacccgttgatatttatatacctggctgtcctccatctgcggaagcacttttatatggaattttacaacttcaaaaaaaaataagaagagagggaaatattcaaagataaa

SEQ ID NO: 200531 - DNA, 553 bp, Unknown
  Bacterial polypeptide expressing nucleotide sequence isolated from the Sargasso Sea
aatggaatatatattagtatttcttcctcttctaggagcaataatatcaggtttttttggtcgatatataggagatcgtatttcagaaattattactagcttatttgttttaatttcagcagcaatatctctaattatttttaatgaagtaataattaatagttatgaaaataatttaattatagcaacatggataaattctggcagcttggatgttcattggtctattaaaatagatacaatatcatcagtaatgctagttgttgtttgttttatttcattcttaattcatgtttattcaattggttacatgtcaagggatcccggtaaaacgagatttatggcctacctatcattatttacttttgcaatgctgatgttagttacatcagataattttttacaactgttttttggttgggaaggagtaggcctttgttcttattttttaataggcttttggtttaaaaaagattcagctaatgcagctgccataaaagcttttgtagttaaccgtgtgggagactttgcttttgctcttggaattttctta

SEQ ID NO: 200532 - DNA, 268 bp, Unknown
  Bacterial polypeptide expressing nucleotide sequence isolated from the Sargasso Sea
atgcctaaaaatactaaaactatgaatttaaattttggacctcaacatccagctgcccatggagtattaagactaatattagagcttgatggtgagatagttgagaaaattgacccacatatcgggcttttacatagaggaacagaaaaacttattgaacataaaacttatacccaagcagttccctatttcgatcgacttgactatgtggcgccaatgaaccaagagcacgctttcgctttggcaattgaaaaactgttagatattc

SEQ ID NO: 200533 - DNA, 726 bp, Unknown
  Bacterial polypeptide expressing nucleotide sequence isolated from the Sargasso Sea
aatggaaaatttgatattagtaacaccagaagtttttatttctttatcaattatgtttttgcttattttaggagttttcaaaaataatagctctaaactaattcaaaatattgctttgatagttttattaatttcggctgttatcatatttaatgaaacttttgccataaaagaaataactttattcaatgacagtgtaataattgattacttatcatcttttatgaaaatagttactctattatcagcttttttagtattggtaatttcatcaagttatttgagatcattaaaaatttttaaaattgaatactcaatattaatcttaagttcagttttaggaatgatgattatgattagctctaatgatttaattgtattttatatggggcttgagcttcaatcactagctttgtatgtgctagcaacatttaatagagatgaaattaaatcctctgaagctggattgaaatattttgtacttagcgctttatcttcagggttgttactatatggttgttcgttgatttatggttttacaggttccactaattttaatgttattgccaatcaacttaattcaaatgaatatgcattgacttttggaattgtttttattttagttggattagcattccaaatttctgctgttccatttcatatgtgggcaccagatgtttacgaaggttctccaacttctgttacgttatttattactatggtacc

SEQ ID NO: 200534 - DNA, 279 bp, Unknown
  Bacterial polypeptide expressing nucleotide sequence isolated from the Sargasso Sea
tatgaagaatttaaaaaaagtagcatttgtttttaaagaattttttttaattgagataatctcaggcttatttctaactttaaaatacttttttaaaccaaaagtaacaattaactacccatttgaaaaaggtgttttaagttctagatttagaggtgagcatgcattaagacgttatgattcaggagaggaaagatgtattgcgtgtaaattatgtgaagccgtttgccccgctcaagcaatcacaatagaatcccagcctagaaacgatgggtcaag

SEQ ID NO: 200535 - DNA, 469 bp, Unknown
  Bacterial polypeptide expressing nucleotide sequence isolated from the Sargasso Sea
attaaaaacaatttttttagttgattttattactggtttatttttagcaataaaagaatcttttaaagcaaagaaaacacttaactatccctttgaaaaaggaaagataagtccaagatttcgtggagaacatgctttaagaagatatccgaacggagaagaaagatgtattgcttgtaaattgtgtgaagctgtttgtcctgctcaagctataacaatagagtctaccgaaagagaagatggtagtagaaaaacaacaaggtacgacatagatatgcttaaatgcatttattgtgggttatgtgaagaatcttgccccgtggatgcaattgtacaaggcccaaattttgaattttctacagaaactagagaagaactttattacaataaagagaaattattagataatggtgatcgatgggaaagtgtattagcagctaatattaaagcagataacccttacagataa

SEQ ID NO: 200536 - DNA, 688 bp, Unknown
  Bacterial polypeptide expressing nucleotide sequence isolated from the Sargasso Sea
atgatcgaagccataagttatattcttccagaactgtttattgtagtcttcaccctatctttcctcatgatagctgtattttcaaatggaaaatctatcattgaatatagtaacaatatatcgtcgctatctcttattgtcgcagccttaatattattttatgggcagacaaccgcgtctgaacctgttatgggtggatattattcaagcaatgatttcacatcatttttcaaagggcttgtattaatcttatcggccttgatattgcacttgagtgatgattatttgaagaagaacaatttacaaatttttgaatttccaattttaattaatttttcgattgttggaatgatgataactatttcagcaaatgatctattatcgctttacataggaatagagatgcaagccctttccttgtacatattagcttcgtttagtagggacaatgcaaaatctaccgaggcaggattaaagtatttcattttaggtgcattgtcgtcaggacttcttctatacgggatatcacttgtttatggaacaacaggatcaactcaatttgaccttatttatgaaactataatgtacacagacactcttctaggtttgcaagtggggatggtgtttattatatcatcaatagcatttaagttttcggcttttccttttcatatgtggactccagatg

SEQ ID NO: 200537 - DNA, 846 bp, Unknown
  Bacterial polypeptide expressing nucleotide sequence isolated from the Sargasso Sea
aagatgggagatgttattattgtccaataattgatgataatgcaggtctgattaatgatccagttgtacttagattaaatgaaaataaatggtgggtttctcttgctgactcagatgtaattttatttgcaaaaggattagctattggaaataaatttgacgtaaagatttttgaacctgatgttgatataatggctatacaaggtccaaagtcatttgaattaatggaaaaagtttttggagataagatagttaatttaaaattttttggttttgattattttgaatttggtggtgataaacatttaattgcaagatctggttggtcaaaacaaggtggttatgaaatttatgttgagcataatgtttctggattaaaattatatgatcatctttttgaaattggaaaagaatttaatatcaaaccaggttgtccaaatttaatagaacgtattgaaagtggattattatcgtatggaaatgatatcgataatggagataatccttatgaatgtggatttgataaatatattaacatagacagcgaagtcaattttttaggtaaagagaaattaaaaaaaattaaatctgaaggaattaaaaaaaaattaatgggagtaatgcttgatatagataaaataagtattacaggatcattagaattaagtgatcaaaacaataatataattggagaattgagatcagcttgctattcaccacattttaaaaaagttattggtattgctatgatgaaaaaaccacactggaacgtcgatcaggatataaaagccaagataaatggtgaaatttgtgtgggtaaagtttgcgatttaccttttatttagt

SEQ ID NO: 200538 - DNA, 374 bp, Unknown
  Bacterial polypeptide expressing nucleotide sequence isolated from the Sargasso Sea
gatggcaaaaaaaactaaatcgcttagtcttaattttggacctcaacatcctgctgcacacggtgttttaaggttaatattagaattggatggagaaatagtagaaaaagctgatccacacataggattactgcacagaggcaccgaaaaattaattgagcaaaaaacttatactcaagctttaccttactttgatagattggactacgttgcaccgatgaatcaagaacacgcctttgctttagctgcagaaaaattacttaatgtagaagttcctattagagcaaaatacattagagtaatattttgtgaaattgggagaattttaagtcatatttttaatgttactactccagccttagatgtaggagctt

SEQ ID NO: 200539 - DNA, 704 bp, Unknown
  Bacterial polypeptide expressing nucleotide sequence isolated from the Sargasso Sea
gatgaaagaagttgaggttaatacaacaactataaattttggacctcagcatccagctgctcatggagttttaagacttgttgtggaattagatggtgaggtggtagaaagagcagagcctcacatagggttactccataggggtacagaaaagcttattgaatataaaacgtatttacaagctattccatattttgatcgtctagattatgtatctcctatgtgtcaggaacatgcttttgctctagctactgaaaatttattacaaattgaagtacctcaaagagcaaaatacattcgagttatatttgctgaaataactagaattttaaatcatttattaaatatcccagcatatgcagcagatataggagctgtaacaccttttttatggtgttttgaacaaagagaaaaattgcttgaatttcacgaagcagtatcaggcgcaagatttcatgcggcttattttagaccaggtggtgtgcatcaagatatgcccgcaaaaatggaagaaagactttacaaacatataaatacacttccagaatttataaatgatcttgaagaactgcttaccaacaatagaatattaaggcaaagatcagtagatattggggttatcacaaaggaagaggcaattgaatggggatgcacaggtccagttttaagaagtacaggaattgcatgggacctaagaagatctc

SEQ ID NO: 200540 - DNA, 939 bp, Unknown
  Bacterial polypeptide expressing nucleotide sequence isolated from the Sargasso Sea
ggatgtggcgcaccagtggcaggaatgttccaccttgttactcatgcttgttttaaggccatgttgttccttggctcaggttcagttattcatgcaatggaggaggtggttggtcatgaaccaattcttgctcaagacatgcgcttaatgggaggcctacgtaaaaaaatgcctatcacagcaataacttttttcattggttgtattgctatcagtgggatacctcctctagcaggtttttggagtaaagatgaaattcttggtcaagcctttaatagttttccaatactttggtttattggttttttaactgcaggaatgacagctttctatatgtttaggctttattttctcacttttgaaggagaatttcgaggcgaaaatcaagagattcagctttctttgattgctttagcaggtaaagaaaaagatgaagaacatgaagaacatgaagttggcaaaatacatgaatctgcatggccaatgacacttccattggcagttttggcaattccttctgtattaattggatttataggagttccttggaatagcattttcgcaaacttgttagaccctcgtgaggctcttgaagctgcagaaagttttagttggggagaatttcttccacttgcaactgcatcagtggcgatctcatctactggaatagtattggcggttttaacttattatttgaaacgacttgatcttggtgtctcaatatccaagaagtacccacaaatcaattcatttcttcagaacaaatggtacctagatgacatcaatgagaagatttttgtaaaaggtagtagaaaactcgcaagagaagtactagaagtagatgcaaaagtagttgatggagttgttaatctgactggattattgacgttgggtagtggagaaggactcaaatatttgagacaggtagagctcagttct

SEQ ID NO: 200541 - DNA, 859 bp, Unknown
  Bacterial polypeptide expressing nucleotide sequence isolated from the Sargasso Sea
gaagctggattaaagtactttgtacttagtgcgctatcttcaggtttacttctatatggttgttcattagtatatggtttttctggttcaacaaattttgatataatctcaaatcagctgaattcaaacgaatatgttttaacttttggaattgtatttatattagttggacttgctttcaaaatttctgcggtacctttccatatgtgggctccagatgtttatgaaggatctccaacatctgttactttattttttacaatggttccaaaaattgctgcattaactgtatttataagatttttatatgtaccttttttaaacttaatagatcagtggcaaatgataataatatttttatcactagcttcaatgatatttggtgctattgcagctatcggacagacaaatataaagagacttatcgcttatagttctattggtcatgttggttatacattagctggtttagccactggtacaaatgaaggaattcaaagttcaataatatatataactatatatatagttatgaatttagctctattctcaggcttattgatgttaagaagaaataatcaatatcatgaggatattgaagatctatcaggtttatcaaaaaaccatcctttattatctatatcattattgattgtattgttttcattagctggaattccaccacttgctggcttttttgcaaaattttatatttttaaagctgtcttagaagaatcaatgtattttctagcaattgtaggtttgttatcgacggttatttctgcattttattatttaagaattatcaagattatttattttgataatcaaaaagatcaatatgataatgatcacagtt

SEQ ID NO: 200542 - DNA, 196 bp, Unknown
  Bacterial polypeptide expressing nucleotide sequence isolated from the Sargasso Sea
aatggctatagattttttaaaagattatctgccaattataatatttttaatcatcgcattagggttaagcgtagcctttgtgtttttaaattttattttttcacctaaaaaaccagatccagaaaaactttcagcatatgaatgcggctttgagccttttaatgactcacgtatggagtttgatgtacggttttat

SEQ ID NO: 200543 - DNA, 907 bp, Unknown
  Bacterial polypeptide expressing nucleotide sequence isolated from the Sargasso Sea
aatggaaaattttcaatatatattacctgaaatattcatatcggtatctataatgatatttttactcattggagttttcaaaaaaaatagtgcaagtttaatttataatttatctaatatatctttagttattttattagccctaataataaatcttaactcaattgatacagcttacatattcaataattcgtatttaatagacaatttatctaactatatgaagattatattggtcggatcaggaatttttgtaatgttaactggatcaaaatatattcaagtaattaatttaaataaaattgaatatccaattcttatactaagcagcattttaggaatgatgataatgataagttcaaatgatttaattgttttttatatgggtcttgaactccaatcattagctttgtatgttcttgcgtcatttaatagagataatttactttctacagagtctggacttaagtattttgttcttagtgccttgtcatctggtttgttattatatggatgttcattaacttatgggttttctgaaagcacaaactttgatcaaatactcattaattccacagaatttaattatggtactacatttgggatagtctttattttagttggtcttgcatttaaaatatcagctgtaccttttcatatgtgggcaccagatgtttatcaaggttctccgacgtctgtaactttattctttgctatacttccaaaaatagcagcactctctgtatttattaagtttttatatactccatttgctaatatgaatgatcagtggcagactattattgtatttatatcaattgcttcaatgatatttggtgcagtagcagccataggtcaaaaaaatttaaaaaggttaattgcctatagttcaattagtcatatgggg

SEQ ID NO: 200544 - DNA, 795 bp, Unknown
  Bacterial polypeptide expressing nucleotide sequence isolated from the Sargasso Sea
aaaaacttccatacacatattccctgatggtaattggaactttatcattaacaggttttccatttttatcgggcttctattcaaaagatgcaataatcgaatttgcatatcttagaggaaatactactggatattatgctgctggagttggtatcttaactgctttcttaacatcaatttattcatggagactgatgtttaagacatttcatggagaatataataataaagaaattaaaatagaagaaactcatgagtcaccattagtgatgttaattcctctaatttttttatctgtaggtgcaatctttgctggtattacatttaaagaattatttattggcgatgaaggattaaaatacttttggagggactcaatattttttttaaaacctttaagtacagaacatcctccattatggtttttaattttaactccaattttagtgattatttctattccaactgcatactatttgtttgtaaaaaataaaaacttaactaaacaaattgtaaaagtgaaccaacctctttatcaatttttattaaataaatggtattttgacgaactttacgacaatgtattcgttaaaccgtctaaaagaataggattatttttatggaaattttttgatcttaaaatcattgatggttttggccctgatggtatttcaacattgataaaaaaattttctatcaaagcaaataaatttcaaagtggatttatataccaatatgcatttataatgcttcttggtttttccgcattattaactttcttaattttaaaatgat

SEQ ID NO: 200545 - DNA, 364 bp, Unknown
  Bacterial polypeptide expressing nucleotide sequence isolated from the Sargasso Sea
ttgggaacaaggtctagaggggagcacgccctaagaagatatcctaacggtgaagaaagatgcatagcgtgtaagctttgtgaagctgtatgtccagcccaagctattacaattgagtcaaaggaaagagatgatggtagtagaaaaactgtaaggtacgatattgatatgcttaagtgtatatactgtggtctttgtgaggagtcatgtcctgtagatgcaattgtccaaggtcctaattttgaatttgcaaccgagtctagagaagagctatattatacaaaagaaaaactcttggaaaatggagacaggtgggaaaacattttagctgccaatataaaggctgatagttctcacaggtaat

SEQ ID NO: 200546 - DNA, 520 bp, Unknown
  Bacterial polypeptide expressing nucleotide sequence isolated from the Sargasso Sea
aatgaataaacaaaaaaaaacactaaacttaaattttggaccccaacatcctgcagcacatggtgttctaagacttattcttgagttagatggagaacttgtagagaaagctgatccccacataggtttgctccacagaggtacagaaaaattaattgaacataaaacttatacccaagccttaccttattttgatagacttgattatgtagctccaatgaatcaagaacatgctttcgcattggctactgaaaaattattaaagatagatgtacctatcagagcacagtttttaagagtgattttttgtgaggtgggaagaatattgagtcatttattaaatgtaacaacgcaagctttagatgtcggagctttaactccatctttatggggctttgaagaaagggaaactctaatgactttttatgaaagagcatctggttctagattacatgcaaattattttagaaccggtggcgttcatcaagacgttccaaataatcttttagatgatattggt

SEQ ID NO: 200547 - DNA, 487 bp, Unknown
  Bacterial polypeptide expressing nucleotide sequence isolated from the Sargasso Sea
aatgaatatttcaagattttttaaaacaatatttatgactgacttcattggaggtttgtttattgctattaaagaattatttaaatcaaaaaaaacaattaattacccttttgaaaagggtaaaataagtcctcgttttagaggtgaacacgctttgagaagatatccaaatggtgaagaaaggtgtattgcttgtaaattatgtgaagcagtatgcccagctcaggcaataacaatcgagtctgctgaaagagaagatggaagtagaaaaactacacgttacgatattgatatgatgaagtgtatttattgtggtttgtgtgaggagtcttgtcctgtagatgcaatagtacaaggtccaaattttgaattttcaacagaaacaagagaagaactttattatacgaaagaaaaattattagataatggagatagatgggagaatgttttggaggctaatattaaagctgacaatatccatagataa

SEQ ID NO: 200548 - DNA, 158 bp, Unknown
  Bacterial polypeptide expressing nucleotide sequence isolated from the Sargasso Sea
aatgaaagaagtagagctaaatacaacaaccattaactttggaccacaacatccagctgctcatggtgttttacggttagtagttgagcttgaaggagaagtagttcaaagagcagaaccgcatatcggattacttcacagaggaacagaaaaattaa

SEQ ID NO: 200549 - DNA, 325 bp, Unknown
  Bacterial polypeptide expressing nucleotide sequence isolated from the Sargasso Sea
tatgaagtttaatagattaattaaaaccatttttttaagtgaatttgttaaaggcttatatttagctttaaaatttatttttaagcctaaagctacattaaactatccttttgaaaaaggtccaattagcccaagattcaggggtgaacatgcgttacgtagatatcccaatggtgaggagagatgtattgcttgtaagctctgtgaggctgcttgccctgctcaagcaataactattgaatctgaacctcaagaggatggctctagaaaaacaacaagatatgatattgatatggtaaaatgcatttattgtggtttatgccaa

SEQ ID NO: 200550 - DNA, 826 bp, Unknown
  Bacterial polypeptide expressing nucleotide sequence isolated from the Sargasso Sea
attgacattagggatagtttttattttagttggactagcatttaaaatttctgctgtgccatttcacatgtgggctcctgatgtttatgaaggatcccctacgtctgttactttattcttttcaatagttcctaaaatagccgcattaacggtgtttattaggtttttatatgtcccttttttaaatttaatagatcagtggcaaatgatattaatctttctatcaatcgcctcaatgttatttggtgctatagcagcaatcggacaaacaaatttaaaaagacttatagcgtacagttcaattgggcatgtgggttatgcgctggctggattaacaacaggatctaatgagggaatacaaagttcaataatatatattactatatatatacttatgaatttaggatttttttcatgtttattaatgttaaaaagaaataacgtatattatgaaaaaattgatgatcttgcaggattatcaaaaaatcaccctttattatccttgtcttttttaataataatgttctctttagctgggataccaccattagctggtttttttgctaagttttatatttttaaggctgtcattgaagagtcaatgtattttctagcaatagtgggattattgtccactgttgttgccgcattttattatttaagaattattaaaattatttattttgataaggaaaaagaaaaatatgatattgatcatggtttgtggttaaagttttcattgacttcatctactttatttattcttatgtattttgtcttcccaagcaaattaattgagattatctcaaaaataaatattatttaa

SEQ ID NO: 200551 - DNA, 739 bp, Unknown
  Bacterial polypeptide expressing nucleotide sequence isolated from the Sargasso Sea
atggccgagaccgaaatcaagaacctgacgatgaatttcggcccgcagcatcctgcggcgcacggcgtgctgaggctggtggtcgaaatggacggcgaaatcgtcgagcgctgcgatcctcatatcggcctgctgcaccgcggcaccgagaagctgatcgagtacaaaacctatctgcaggccgtgccgtatttcgatcggctcgattacgtctcgccgatgtgccaggaacataccttcgcgctagcggtcgaaaagctggcggacatcacggtgccgctgcgcggacagtacatccgagttctgttcagcgagatcactcgcatcctgaatcacatcctcaacatcagcgcctttgcgctggatgttggcgcgatgacaccgctgctgtggggcttcgaagagcgcgagaagctgatggaattctacgaacgggtgtcgggcgcccgcctgcattcggcgtattttcggcccggcggagttcatcgagacctgcctgcggggttgctggaagaagtcaccgagttttgcgagagtttccctgcgatcatcgacgatatcgaatcgctgctcaccgagaaccgtattttccgccagcggaccgtcgatgtcggcatcgtgagcaaggacgaggccatggactggggcttctccggtccgatgctgcgcggcagcggcgttccatgggatctgcgtaaatctcagccctacgacgtttacgacccgggtcgattttgat

SEQ ID NO: 200552 - DNA, 806 bp, Unknown
  Bacterial polypeptide expressing nucleotide sequence isolated from the Sargasso Sea
aatgtcagaacagcagatcaaaaatttcacacttaactttggtccgcaacaccccgcggctcatggcgttttgcgccttgttttggagatggacggagaagtaattgatcgagcagatccgcatattggacttttgcatcgtgggacagagaaactcatagagcataaaacctatctgcaagcggttccctattttgaccgccttgattatgtggcgccgcaaaaccaggagcatgcgtttgcactggctgtcgaaaaactagctggtatcgaggtgccaccacgcggtcagtacatacgagtgctatatgccgaaattgggcgcattctcaatcatatccttaaccttacggcctatgccatggatgtgggggcaatgaccccgatgttgtgggcgtttgagcatcgagaactgctgatggaattttgtgagcgcgcgagtggcgcacgtttacacatggcctatttccggcccggcggggttgcccaggatgttccgcaaaaacttctggatgatattggtaaatgggcagacgaatatccggaaatgattgatgatctggagagtctgttaacagaaaaccggatcttcaaacaacggaccgttgatataggtgtggtaagcgcggaacaggccaataactgggcatttactggtcctaatttgcgggcgtctggtgtcccctgggacctacgtaagtcccaaccctatgatgcatatgcaaaaatggattttgacgtccccataggaaaacatggcgattgctatgaccgctatctcgtccggatgtttgagatgcgagagt

SEQ ID NO: 200553 - DNA, 487 bp, Unknown
  Bacterial polypeptide expressing nucleotide sequence isolated from the Sargasso Sea
atgaaaattactagattatttaaaactatattgatggtcgactttgtaagtggattattaattgctataaaagaaatgttcaaatcaaaaaaaactattaattatccatttgaaaaaggaaaaattagcccaagattcagaggtgaacatgccctcagaagatatccaaatggtgaagaaaggtgtatagcttgtaaattatgtgaagcagtatgccctgctcaagctattactatcgagtccacacaaagagaagatggaagtagaaaaacaactcgatacgatattgatatgatgaaatgtatttattgtggtctatgtgaagaatcctgtcccgtggatgcaattgtgcaaggaccaaattttgaattttctactgaaactagagaagaactgtattacactaaggaaaagctacttgataatggagatagatgggaaaatattttagctgcaaatattaagtcagataatccttacagataat

SEQ ID NO: 200554 - DNA, 322 bp, Unknown
  Bacterial polypeptide expressing nucleotide sequence isolated from the Sargasso Sea
ttttatccctaggtcatcgcctaggcaagcagatgtgatgatagttgctggtactgttacaatgaaaatggcgattcgagtcaaaaaactttatgagcagatggcagatccaaaatacgttgtcgccatgggttcatgcgctacgagtggagggccatattggcaacatggttaccatgtgctaaagggtgtggacatagttatcccagttgatgtttatgttccaggttgtccacccaggccagagtcattgatagaagggcttctcaagctagaagaacagatactggaagataaaccactaacacgtaaaatggtatga

SEQ ID NO: 200555 - DNA, 217 bp, Unknown
  Bacterial polypeptide expressing nucleotide sequence isolated from the Sargasso Sea
tatgtctagtaatagtgaattagttacagttaattttggtccgcaacatccaagtatgcatggagtttttcggatgagagtaacattggatggagaaagcattgtagatattgagccagtctttgggtatttgcatagaggcacggaaaaattggctgaagagagaacgtacgtacaaatagttacacttacagatagattagattacgttgcttca

SEQ ID NO: 200556 - DNA, 487 bp, Unknown
  Bacterial polypeptide expressing nucleotide sequence isolated from the Sargasso Sea
atgaaatttacaagattttttaaaacagtatttatggtcgactttgtaactgggttatttattggtctaaaagaaatttttaaatcaaaaaaaactataaattatccatttgaaaaaggaaagattagtccaagatacaggggagaacatgcattaagaagatatcctaatggtgaagaaagatgcatagcttgtaagttatgtgaagctgtatgtccagctcaggcaataacgatagagtctactgaaagatcagatggtagcagaaaaactactcgttatgatattgatatgatgaaatgtatatactgtggtttatgtgaagaatcttgtccagttgatgcaattgtgcaaggaccaaattttgaattttctacagaaacacgggaagaactttattatactaaagaaaaattacttgataacggagatagatgggaaaatattttagcggcaaatattaaatcagataatccttataggtgac

SEQ ID NO: 200557 - DNA, 120 bp, Unknown
  Bacterial polypeptide expressing nucleotide sequence isolated from the Sargasso Sea
gatatcgatatgatcaacttatgagattagggtggaaaatatttcttccattatctttaacttatgtcattttgaccgcaagttatttattttattttaaccttttaccaacaatttaaa

SEQ ID NO: 200558 - DNA, 484 bp, Unknown
  Bacterial polypeptide expressing nucleotide sequence isolated from the Sargasso Sea
atgacaaaaaaaattaaaaaccttaatttaaactttggtcctcaacacccagcagctcatggtgtgttaagattaattttagaattagatggtgaagtagttgagaaagctgatcctcatattggattgttacaccgaggcacagaaaaactaattgaaaacaaaacttatatgcaagcagttccttactttgatagattagattatgttgctccaatgaaccaagaacatgctttcgcgttagcgactgaaaaaatactggaaatagatgtaccaattagagctcaatacataagagttatattttgtgagataggaagaattttaagccatatattaaatgtcactactcaagctatggatgttggggctctaactcctacattatggggatttgaggaaagagaaaagttaatgggtttttataagagagtttctggctcacgacttcatgcaaattattttagagctggggagtcatcaa

SEQ ID NO: 200559 - DNA, 182 bp, Unknown
  Bacterial polypeptide expressing nucleotide sequence isolated from the Sargasso Sea
actttttaccttctctatgttaacactagtatcctctgataattttttacagttgttttttggctgggaaggtgtcggtttatgttcatattttttaattggtttttggtataaaaaagatagcgctaactcagcagcaataaaagcatttttagtcaacagagtgggtgattttggatttg

SEQ ID NO: 200560 - DNA, 487 bp, Unknown
  Bacterial polypeptide expressing nucleotide sequence isolated from the Sargasso Sea
atgaaaattagtagatttttaaaaacaatatttatgattgatttcatttcagggtttatcattgcaattaaacaaacttacaaacctaaaaaaacaataaattatccatttgaaaaaggaaaaataagcccaagagcaagaggagaacatgctttaagaaggtatcccaatggagaagagaggtgtattgcatgtaaactttgtgaagcagtttgtccggctcaagctataacaatagagtcaacagaaagagaagatggaagcagaaagacaactagatatgacatagacatgttgaaatgcatttattgtggattatgtgaagaatcttgtcctgtggatgcaattgtgcagggtcctaattttgaattttcaacagaaacaagagaagaactttattataataaggaaaaattattagaaaatggtgacagatgggaaagcgtattagctgctaatattagatcagataaagcttatagataat

SEQ ID NO: 200561 - DNA, 374 bp, Unknown
  Bacterial polypeptide expressing nucleotide sequence isolated from the Sargasso Sea
tttacctgaagcagaagcagaactagttgcaggttatcaaactgagtattcaggaatgatgtatgcaatgttttggttaggcgaatatgcaaacattctgcttatgtgtgcaatgggatcaatactttttttaggaggatggctttctcctttatcaatttatccatttgatttaataccaagccctctttggttaatttttaaaataatatttttatttattcttttttcattagtgaaagcaattgtacctagatatagatacgatcaactaatgaaattaggctggaaaatatttctaccactttcattaatttgggtagttttaacttcaggctatttactttattttaatttattaccagtgaaataat

SEQ ID NO: 200562 - DNA, 712 bp, Unknown
  Bacterial polypeptide expressing nucleotide sequence isolated from the Sargasso Sea
atgtcaaaagaatttaaaactgtaaatcttaattttggacctcagcacccagcagctcatggagtgcttagattaattttagaacttgatggagaagtggttgagagggctgatccacacataggtttattacatcgaggcactgagaaactcattgagcataaaacttatatgcaagcaattccatattttgatagacttgactatgtagcaccaatgaatcaggagcatgcttttgctttagcagtagaaaaactcttaaaaattgatgtacctataagagctaaaaatattcgaattgcattttgtgaaattggaagaattttaagtcatatattaaatattacaactcaagcattagatgttggagctttgacaccttctttgtggggttttgaagaaagagaaaaattaatggtattttatgaaagagtttctggatctcgattacatgcaaattattttagaccaggtggcgtacacattgatctacctactggattagataaggacattctggatttttgtaagacatttccgaaagtaattgacgacctagagtctttattaactgacaatagaatttttaaacaacgaaatgttgatattggtatagtgtcagctcaggaagcactcgatcatggtttttcaggtgttatgatcagaggctctggtgttccttgggatttgagaaaatctcaaccctatgatg

SEQ ID NO: 200563 - DNA, 436 bp, Unknown
  Bacterial polypeptide expressing nucleotide sequence isolated from the Sargasso Sea
aatgaaaaaagaaaaaaaaaccttgaatcttaattttgggcctcaacatcctgcggctcatggagtacttagattaatacttgagcttgacggtgaagtagtagaaaaagcagatcctcatattgggttgcttcacagaggtacagaaaaacttatagagaataagacgtatatacaagctgtgccatattttgatagacttgattatgtagcaccaatgaatcaagagcatgctttcgcattagcaatagaaaaaattcttaaaataaatgttcccattagagctcaatatataagagttatgttttgtgaaattggaagaatacttagccatttactaaatataacaacgcaagctatggatgttggggctctaacccctactttgtggggatttgaagaaagagaaacattaatgggtttttatgaaaaagtt

SEQ ID NO: 200564 - DNA, 370 bp, Unknown
  Bacterial polypeptide expressing nucleotide sequence isolated from the Sargasso Sea
aatggcaaaagaaactaaaactttgaatctaaattttggacctcagcatcctgctgctcatggagttttaaggctaattttacatttggatggagaaatagttgaaaaagcagaccctcacattggtttattacacaggggaacagaaaaattaattgaaaataaaacgtatactcaagcagttccatattttgatcgacttgattatgttgcaccaatgaatcaagaacatgcatttgctttagcaattgaaaaaatattaaaaatagaggttccaatacgagcacagtacataagagtaatgttttgtgagattggaagaatacttagtcatattttaaatgttactacgcaagcaatggatgttggg

SEQ ID NO: 200565 - DNA, 745 bp, Unknown
  Bacterial polypeptide expressing nucleotide sequence isolated from the Sargasso Sea
gtcatcatttatgaaaataattacattattagctgcttttttcactttagttatttcgtccaattatttaataatattcaaaatttttaaaattgaatatccaattttaattttaagctcagttttaggaatgatggtcatgattagttctaatgatttaattgttttttatatgggattagaacttcaatcattagctttgtacgttttagcaacattcaaaagagacaatattaaatcctcagaagctggattaaaatattttgttttaagtgctttatcttcaggattattattatacggttgttctttaatttacggttttacaggtacaacaaattttaatgttattgctaatcaatttaactcaaatgaatatgtactgacttttggaattgtttttattttagttggattagcatttaaaatttccgcagtaccatttcacatgtgggctccagatgtttacgaaggatcccctacatcagtaactttattctttactatggttccaaaaatagctgctttaacagtatttataagatttttgtatattccatttttagatttaattgatcaatggcaaactattttaattttcctgtctattgcatcaatgttatttggagctatagctgctataggtcagactaatttaaaaagacttatagcttatagttcaattgggcatgttggttatattcttgctggtttagccacaggatcaaatgatggaatacaaagc

SEQ ID NO: 200566 - DNA, 193 bp, Unknown
  Bacterial polypeptide expressing nucleotide sequence isolated from the Sargasso Sea
tatgaatttacaagatagaaaaaaagatattcctgatgagtttaaacaattagctcaagactttagtgacaatggttttataacaacatcactagacaatcttgttaattgggcaagaactggttcgttgcattggatgacatttggattagcatgttgtgctgttgaaatgatgcaaacatctatgccaaga

SEQ ID NO: 200567 - DNA, 835 bp, Unknown
  Bacterial polypeptide expressing nucleotide sequence isolated from the Sargasso Sea
aatggattacttaaatattatttttgaagaagtttataagatcttatttttattaattccagttcttgtttcagtagcgatgattgtttggttagatagaagagtctgggcttttgtccaaaaaagacaaggaccaaatgttgtagggccatttggattattacaatctttggcagatgcattaaaatatatttttaaagaaataattattcctgctagctcaaataaagttatttttattcttgctccaataataacaatgacgctggcattagttgcttgggctgttattccttttagtgaagatcaagttttagcaaatattaatgtaggaattttatatatttttgcagtctcttctctaggggtttatggaattataatgggggggtgggcctctaattcaaaatatccattcctaggatcaatcagatctgctgcacaaatggtatcttatgaagtttcaataggaattattattattaatgttttgttatgtgttggatcattgaatttgaatgacatcataattgcccaaaaaaatatatggtttattgttccattatttccaatgtttgtaattttttttatctctgctctagctgaaactaatagaccgccttttgatttacctgaagctgaagctgagttggtcgcaggatatcaaactgaatactcgggcatgatgtatgctatgttttggttaggagaatacgcaaatattttattaatgtgtgctttaggttcaatcttatttttaggtgggtggctttcgccattagatttttatccatttactatgataccaggagctatttggttgatattcaaaatt

SEQ ID NO: 200568 - DNA, 775 bp, Unknown
  Bacterial polypeptide expressing nucleotide sequence isolated from the Sargasso Sea
atgaatagtttttcatatttaaatgatttaattattccaggaggaattattgtagctcaaataatggcagtgttaatgccagttctaatttcagtagcatttttagtatatgctgaaaggaaagttcttgctcttattcaactgcgtagaggtccaaacgtagtcggcccctttggcatccttcaaagttttgctgatgctctaaaattactaactaaagaaaatattgtcccggcaaattctaacaagattgtttttttattagcacctattattacaatggttctcagtttagcaggttgggcagttataccttttgcgcccaattgggtaattgcagatattaatgtaggaataatgtatctttttgctgtatcatctcttggtgtgtatggaattattatggctggttgggcaagcaactctcaatatccttttctgggtgcattaagatcagcagctcaaatggtatcttatgaagtctcaatcggctttgttattataacagtattgttgtgtgtaggatctcttaacttgtcaaaaatagttgaggcacaagaaacagtatggtttgcaattcctttgcttccaatgtttgtcgttttctttatttcagctctggcagagacaaatagattaccttttgacttacctgaagatgaatcaactcttgttgctggattttttactgagtattcatctgcttcattcgtattattttttcttggtgaatatgcaagtatgattttgatgagttccatgacagtaatattat

SEQ ID NO: 200569 - DNA, 334 bp, Unknown
  Bacterial polypeptide expressing nucleotide sequence isolated from the Sargasso Sea
atgaaaatatcaagattttttaaaacaattttattaatagattttataagtggtttaataattgctattaaagaatcttttaaaccaaaaaaaactttaaattatccatttgaaaaaggtaaaattagtccaagatttcgtggtgaacatgctttaagaagatatccaaatggcgaagaaaggtgcatagcgtgcaaattatgtgaagcagtttgtcctgctcaagcaattacaattgaatcaacagaacgagaagatggtagtagaaaaaccacaaggtacgatattgatatgctgaaatgtatatattgtggactatgtgaagagtcgtgtc

SEQ ID NO: 200570 - DNA, 262 bp, Unknown
  Bacterial polypeptide expressing nucleotide sequence isolated from the Sargasso Sea
ttgggatctattttgtttttaggtggttggttatcaccaatagatctttatccttttaacataattccggcaccactatggcttatacttaagatattattactatttattctgttctctttagtgaaggcaattgttccaagatatagatacgaccaactaatgaaattaggttggaaaatttttcttccattatcgcttatttgggtagttttaacagcaagttatttattttattttaatctattaccagtaaattaat

SEQ ID NO: 200571 - DNA, 484 bp, Unknown
  Bacterial polypeptide expressing nucleotide sequence isolated from the Sargasso Sea
aatgaaaatttcaagattattaaagactatattcatgattgattttgtgactggtttattaattgcaataaaagagacttttaaggaaaaaaaaacaatcaattatccttttgaaaaaggatctttaggaacaaggtctagaggggagcacgctcttagaagatatcctaacggtgaagaaagatgcatagcgtgtaagctttgtgaagctgtatgcccagcccaagctattacaattgagtcaaaagaaagagaagatggcagtagaaaaactgtaaggtacgatattgatatgcttaagtgtatatattgtggtctttgtgaagagtcatgtcccgtagatgcaattgtccaaggccctaattttgaatttgcaacagagtctagagaagaactttattatacaaaagaaaaactcttggaaaatggagacaggtgggaaaacatattagcggccaatataaaggctgatagtctcacaggt

SEQ ID NO: 200572 - DNA, 698 bp, Unknown
  Bacterial polypeptide expressing nucleotide sequence isolated from the Sargasso Sea
agtgcaaaaaagacgaggaccaaacgttgttggtccatttggcttatttcagactttagctgatgctcttaaatatatttttaaagagataattattcccgcaagtgcgaataaaactatttttattcttgcccctataattacaatgactttagctttaattgcttgggcagtcatacccttaagtgaaacacttgtactttcaaatataaatgtaggaatactttatttgtttgcagtttcttctttaggcgtttacgggataataatgggaggctgggcctctaattcaaaatatccatttcttggagcaatcggatctgcagcacaaatggtttcatacgaagtttctattggaataattattataaatgtacttttatgtgtcggttctctaaatttaaatgacatagtattagctcaaaaaaatctttggtatgtagtcccactttttccaatgtttgtaatattttttatatctgccttggcggaaactaatagaccgccctttgatttacctgaagctgaagcagaattagttgcaggataccaaactgagtattcaggaatgatgtatgctatgttttggttaggagaatatgcaaatattcttttaatgtgtgcaatgggatctattttatttttaggagggtggttgcccccactagatatttatccgttaaatatagtcccagccc

SEQ ID NO: 200573 - DNA, 445 bp, Unknown
  Bacterial polypeptide expressing nucleotide sequence isolated from the Sargasso Sea
ttgtttctggtttatttctttgctattgcaaaaatatttaaatcaaaaaaaactataaattatccctttgaaaaaggaaaaataagtccacgatttagaggggaacatgcattaagaagatatccaaacggagaagaaagatgtattgcatgtaaattgtgcgaagctgtttgtcccgcacaagctataactattgagtcagaaattagaaacgatggaagcagaaaaacaacaagatatgatattgatatgttaaaatgtatttactgtggtttatgtgaagagtcttgtcccgtagatgcaattgttcaaggtccaaattatgaatttggaacagaaacaagagaagagctttattataataaacaaaaacttttagaaaatggagacaagtgggaatctgttttagctgaaaatataaaagcagatttaccttttagataaa

SEQ ID NO: 200574 - DNA, 598 bp, Unknown
  Bacterial polypeptide expressing nucleotide sequence isolated from the Sargasso Sea
ccagttttaatatctgtagcttttttagtttatgctgaaagaaaagttttagcattaattcaattaagaagaggtccaaatatggtagggccttttggtatattacaaagctttgctgatgcattaaaacttattactaaagaaaatattatacctagtggatcaaataaaattgtttttattttagcacccataataacaatggtacttagcttagcaggttgggcagtaataccttttgctccaggatgggtagtctctgatattaacgtaggtatcatgtatctgtttgcagtatcatctcttggagtatacggaataataatggctggatgggctagtaactctcaatatccttttctaggagcattaagatcagctgctcaaatggtttcatatgaagtatctattggatttgtaataattacagtattattatgtgtaggttctttaaatttatcaaagatagttttagctcagcagactgtatggtttgcaattccattattacctatgttcattattttttttatttctgcgttagctgaaacaaatagattaccttttgatcttcctgaagatgaatcaacacttgttg

SEQ ID NO: 200575 - DNA, 295 bp, Unknown
  Bacterial polypeptide expressing nucleotide sequence isolated from the Sargasso Sea
aatgagtaaagaaaaaaaaacattaaatttaaattttggtccccaacatccagcagcacacggtgtgttgcggcttattttagaactggatggagaagttgtagaacatgctgatccacatattggattgttacatagaggtactgaaaagttaattgaaaataaaacttatcttcaagcactaccttattttgatagacttgactatgttgcgcccatgaaccaagaacatgcgtttgctcttgcagttgaaaaaattttaaatattgaagttcctattagagctcaatttata

SEQ ID NO: 200576 - DNA, 397 bp, Unknown
  Bacterial polypeptide expressing nucleotide sequence isolated from the Sargasso Sea
aaaaccataaactacccgtttgaaaaggggaaaataagcccaagatatagaggggaacatgctttaagaagatatccaaatggtgaggaaaggtgtatagcttgtaaattatgtgaagcagtgtgccctgcacaagctatcacaattgagtccacacaaagagacgatggaagtagaaaaacaactcgatacgatatagatatgatgaaatgtatctattgtggtttatgcgaagaatcttgtcctgtggatgcaatcgtgcaaggtccaaattttgaattttctactgaaactagagaagaattgtattacactaaggaaaagctccttgataatggagatagatgggaaaatattttagctgcaaatattaagtcagataatccttacagataat

SEQ ID NO: 200577 - DNA, 487 bp, Unknown
  Bacterial polypeptide expressing nucleotide sequence isolated from the Sargasso Sea
aatgaaaatcactagatttattaaaactatattgatggtcgactttgtgagtggattattaattgctattaaagaattgttcaaatcaaaaaaaactattaattatccttttgaaaaaggaaaaattagcccaagatttagaggtgagcatgctttaagaagatatcctaatggtgaagaaaggtgtatagcttgtaaattatgtgaagctgtatgtcctgcgcaagcaatcacaatcgagtctactcaaagagatgatggaagtagaaaaacaactcgatacgatatagatatgatgaaatgtatttattgtggtttatgtgaagagtcctgtcctgttgatgcaatcgttcaaggaccaaattttgaattttctactgaaactagagaagaactgtattacactaaggaaaagctccttgataatggagatagatgggaaaatattttagctgcaaatattaaatcagataatccttacagataa

SEQ ID NO: 200578 - DNA, 867 bp, Unknown
  Bacterial polypeptide expressing nucleotide sequence isolated from the Sargasso Sea
cttaattttggacctcaacatcctgctgcgcatggtgttttaaggttaatattagagttggatggagaaatagtagaaaaagctgatccacatataggattactgcacaggggaacagaaaaactaattgagcaaaaaacttatacccaagccttgccttacttcgataggctggattacgttgcaccgatgaatcaagaacacgcctttgctttagctgctgaaaaattactcaaggtagaagtacctattagagctaaatacattagagttatattttgtgaaattggaagaattttaagtcatattttaaacgttactactcaagccttagatgtaggggctttgacaccatcattatggggttttgaagaaagagaaactttgatgactttttatgagagggcatccggttcaagattacacgcaaattactttagaactggaggcgtacacaaagatattccaatgaaacttgttgaagatatagaaaaattttgcaagtcgttcccaaaaattattgatgatttagagggtttacttacagataatcgtatttttaaacaacgtaatgttgaaataggcattgtttcaaaacaagaggctctagatcacagtttttctggtgttatgctaaggggttcaggagtgccttgggatctaagaagatcacaaccttatgaaatttataaagacttagactttaaaattccaattggaaaaaatggagattgttacgatagatatctttgtagaatagaggaaatgagagaaagtgtaaaaattatacttcaatgtattgagaggttacctaaaggcccagttatatctattgataataaaatttcaccgccaaacagagatgat

SEQ ID NO: 200579 - DNA, 556 bp, Unknown
  Bacterial polypeptide expressing nucleotide sequence isolated from the Sargasso Sea
tatgaaggagattgaagtaaacacaactacaattaattttggcccccaacacccagctgctcatggtgttttgagattagttgttgagctaaatggtgaggttgttgagagggcggagccacatataggcttattgcacagaggaacagaaaaattaattgaatataaaacttatctgcaagctgtaccttattttgatagattagattatgtttcaccaatgtgccaagaacatgcatttgctttagcgactgaaaatttacttaaaattgaagtaccgcaaagagctcaatatattagagttattttttctgaaattactagattgttaaatcacttattaaatattcctgcatatgctgccgatattggcgctgttactccatttttatggtgtttcgaagaacgtgaaaaacttcttgaatttcatgaagctgtatcaggcgcaagattccatgctgcttattttagaccaggaggagttcatcaagatatgcctgaaggaatggaagaaaaattaaataatcattttaaaattttacctaaatttattgat

SEQ ID NO: 200580 - DNA, 241 bp, Unknown
  Bacterial polypeptide expressing nucleotide sequence isolated from the Sargasso Sea
atgtttaactatctatattcgaatattaaaaaattttttcttttagaaatattttatggtttattcttaactttaaaatatttttttaaacctaaagttactttaaattatccttatgaaaaaggcccgatatctcctagatttagaggagagcatgctttaagaagataccctaatggtgaggaaagatgtatagcttgtaagttgtgtgaagacaatttgtcctgcacaagcaattaaa

SEQ ID NO: 200581 - DNA, 487 bp, Unknown
  Bacterial polypeptide expressing nucleotide sequence isolated from the Sargasso Sea
tatgaaaatttcaagattttttaaaacgatatttttattagatattttaagtggtctgataattgctcttaaagaaatttttaaagataaaaaaacaattaattatccttttgaaaaaggaaagattagcccacgctttagaggggaacatgctttaagaagatatcctaatggtgaggaaagatgtatagcatgtaaattatgtgaagctgtctgtccagcacaagcaattacaattgaatcagcagagagaagcgatggtagccgtaaaactacaagatacgacattgacatgatgaaatgtatttattgtggtctttgtgaagagtcatgtcctgttgatgctattgttcaaggtccaaattttgaatttagtacagaaactagagaggaactttactacaataaagaaaaattacttgataatggtgatcgttgggagactattttagcagctaatattagagcagacaaaccgtatagataa

SEQ ID NO: 200582 - DNA, 319 bp, Unknown
  Bacterial polypeptide expressing nucleotide sequence isolated from the Sargasso Sea
aatgatgtatgcaatgttttggcttggggaatatgcaaatatattgttaatgtgttccttaggttcaattttgtttttaggaggttggcttccagctattgaagcattcccttttaattttattccagattttatgtggcttatattgaaaattttatttctttttattttgttttcgttagtaaaagctattgtacctagatatagatacgatcaattaatgaaattaggttggaaaatatttttaccaatgtcacttttatgggttgttattacagcttcatatttattttattttgatttactaccgagcaactaa

SEQ ID NO: 200583 - DNA, 288 bp, Unknown
  Bacterial polypeptide expressing nucleotide sequence isolated from the Sargasso Sea
aatgtcaaaagaaaaaaaaacattaaatttaaattttggtccccagcacccggctgcacatggtgtattaagactaattttagaattagatggtgaagtagttgagcacgctgatcctcacattggattgttacacagaggaacagaaaaattaatagaaaataaaacctatattcaggcactaccttactttgatcgacttgattatgtagctccaatgaaccaagagcacgcatttgcacttgcaatagaaaaaattttaaatattgaagttccaatcaggggcga

SEQ ID NO: 200584 - DNA, 183 bp, Unknown
  Bacterial polypeptide expressing nucleotide sequence isolated from the Sargasso Sea
gttggcagaagcgataccgcccggtgctgatcaggacgcgatattaaatgccgttggtgaagaaatcactaatcgggggtttgtaattgctaaagctgataagcttttcaattgggcgagatcaggttcgctgtggccaatgacatttggtcttgcttgctgtgctgtggaaatgatgcattc

SEQ ID NO: 200585 - DNA, 152 bp, Unknown
  Bacterial polypeptide expressing nucleotide sequence isolated from the Sargasso Sea
tatgcttgcggaatttttaaaagattacctgtcaattatactatttttgataatagcttttggattaagtataggtttcattttaataaattatttattttcaccaaaaaaaccagaccctgaaaaactttccgcttacgaatgtggctttg

SEQ ID NO: 200586 - DNA, 934 bp, Unknown
  Bacterial polypeptide expressing nucleotide sequence isolated from the Sargasso Sea
agcatttagttcaggggtaatgttatttggcttgagcatcgtatatgggttagttggtagtacaaattattttgctatccaagagactctttctattctggatagttctgcaaatccagcgcttataatggcattattaatgatatttgctggatttggttacaaaatttcttctgttccttttcatttttggacgccagatgtttatgaaggttcaccctcaacaattacagcatatctatctgttgctccaaaagcagcgggttttgcaatgattataaggttttttcatcaagtcttttcagacagtataggattaactagtaatgctattggatctacagatttaccatggcctgaaattattggcgttctagctgttgtgactatgacgatggggaatttagttgccattcaacaaaaaagtatcaaacgtatgcttgcgtattctagcatagcccatgcaggttacatgatgctagcacttccagttttgtcagtggatgcagttgagtcagtaatgatttatctttttatatatgtttttatgaatctaggtgcattttttattgttatttttgttaagaacaaaacaggtggagaatcttttgaggattttgagggtctgggatggaaaatgccaatagtaggcgcatttatgacattatttatgttgtccttaacagggttgcctcctactgcaggctttataggtaaattgtacatatttaaaacattagttggtgctggcagtgaattcttatggttagttgtagctggaggcgtaaacagtgtcatttcactatattattattttcacgttgtgaaagtgatgtttttaggcgggaaaagaagcgatgtgattacttatcctccctcaacaatgtttggtcttatgatttttacagcaattccttccttattgcttggttaa

SEQ ID NO: 200587 - DNA, 406 bp, Unknown
  Bacterial polypeptide expressing nucleotide sequence isolated from the Sargasso Sea
atgacaaaaaagattaaaaatttaaatttaaattttggtcctcaacatcctgcagcccatggtgttttaagacttattcttgaactagatggagaggtcgtcgaaaaagcagacccgcatataggattattacatcgaggtacagaaaaacttattgagaataaaacttatatgcaagcagtaccatattttgatcgtctagattatgttgcgcctatgaatcaagaacacgcttttgctttagctattgaaaaaattttaaaaattgatgttccaattagagctcaatacataagagtaatgttttgtgaaataggaagaattttaagccatattttaaatgtaactacacaagcattagatgtaggagcattaacaccctctctatggggattgaagaaagaga

SEQ ID NO: 200588 - DNA, 475 bp, Unknown
  Bacterial polypeptide expressing nucleotide sequence isolated from the Sargasso Sea
atgtcaaaaaaacaaaaaactttaaatttaaattttggcccacagcatcctgctgctcatggtgttttaagattgattttagaattagatggtgaagtagttgagaaagcagatccacatatagggttgcttcacagaggaacagaaaaattaatagaaaacaaaacttacgtacaagccataccttactttgacaggctcgattatgttgccccaatgaatcaagagcatgcttttgcacttgctattgaaaaaatattaaaaattgaagttccaatacgtgctcaatatatcagagttcttttttgtgaaataggaagaattttaagtcatattttaaatataacaacacaagcattagatgttggcgctttaactccttccttgtggggatttgaagaaagagaaacattaatgactttttatgaacgtgcctcaggttcgagattgcatgcaaattttttcagagcaggtg

SEQ ID NO: 200589 - DNA, 652 bp, Unknown
  Bacterial polypeptide expressing nucleotide sequence isolated from the Sargasso Sea
tttgttaattcctgttttggtaacagttgcgttgatagtttggctggatagaagagtatgggcatttgttcaaaaaagaagaggtcctaatgttgttggaccatttggtttacttcaatctctagcagatgctttaaaatatatttttaaagaaataataattcctgcgagttcaaacaaagtaatttttatactggctccaattattactatgacgctagcacttattgcttgggcagtaataccatttagtgaaagtttagttctagcagatattaatgttggcattttatacttgtttgctgtttcctctcttggcgtttatggaataataatgggcggatgggcttcaaattctaaatatccttttttaggcgctataagatctgctgcgcaaatggtatcttatgaagtttctataggagtgattattattaacgttttgttatgtgtaggttcgttaaacttaaatgatattgttttagctcagcaaaatatgtggtttatattaccattatttccaatgttcgttattttttttatttctgctttagcagaaactaatagaccaccctttgatttacctgaagcagaagcagaattagttgctggatatcaaactgaatattctggaatgatgtacgcaatgttt

SEQ ID NO: 200590 - DNA, 487 bp, Unknown
  Bacterial polypeptide expressing nucleotide sequence isolated from the Sargasso Sea
tatgaagatttcaagattctttaaaacaatattaatgactgattttattggtggtttatttattgctattaaagaattatttaaatcaaaaaaaacaattaattacccttttgaaaaaggtaaaataagtcctcgttttagaggagagcatgctttgagaagatatccaaacggagaagaaagatgtattgcttgcaagttatgtgaagcagtgtgcccagctcaggcaataacgatcgagtcagctgaaagagaagacggaagtagaaaaacaactcgttatgacatcgatatgatgaagtgcatttattgtggtttgtgtgaggaggcttgtccggtagatgcaatagtccaaggtccaaattttgaattttctacagaaacaagagaagaactttattatacaaaagaaaaattattagataatggagatagatgggagaatgttttggaggcaaatattaaagctgacaatatccatagataa

SEQ ID NO: 200591 - DNA, 282 bp, Unknown
  Bacterial polypeptide expressing nucleotide sequence isolated from the Sargasso Sea
gatggcggagattaaaaattacagcctgaattttgggcctcagcatccggcggctcatggtgtcttaagattaattcttgagttggatggtgaggtggtccaaaatgctgatcctcatataggtttacttcatcgaggtacagaaaaattagcagaaactcgcactttccttcaaacccttccttacatggatagactggattacgtatccatgatgtgtaatgagcatgcttacgttttggctatagaaaagttgattggtattgagcctcctatcagggc

SEQ ID NO: 200592 - DNA, 849 bp, Unknown
  Bacterial polypeptide expressing nucleotide sequence isolated from the Sargasso Sea
ttgcttccagctgcctttggttcaattgaagattcttatcatcatttaaaagagcatgttcaaatttgggatgtagcagctgaaagacaggtagaaatttcaggaaaagattctgcaaaattagttcagctaatgacttgtagagatttatcaaaatctaaagatggaagatgttattattgtccgattatagatgataatgctggattaattaatgatccagttgttttaagaattaatgaaaataaatggtggatttctattgcagatacggacgtaatattatttgcaaaaggattggcaattggaaataaatttgatgttaaaattatagaacctaaagttgatattatggctgtacaaggtccaaaatcatttcaattgatggaaaaagtatttggagaacagatcacaaaattaaaattttttggttttgattattttgaatttggaggtgcaaaacaccttatcgcacaatctggatggtctaaacaaggaggttatgaagtatatgttcaaaatactgaagcaggcttaaaactatatgatcatttatttgaaattggaaaagaatttaatattaaaccagggtgtcctaatttgattgaacgaatagaaagtggactgttgtctcatggtaatgatatggataatggagataatccttatgaatgtggtttcgataaatatattaacatagatagtgatgttatctttttaggaaaagaaaaactgaagacaattaaatctgaaggaataaataaaaaattaatgggagttaaatttgatatagagaaaataagtttaacaggatctttagatcttatggatgatcagaacaacatcgtt

SEQ ID NO: 200593 - DNA, 487 bp, Unknown
  Bacterial polypeptide expressing nucleotide sequence isolated from the Sargasso Sea
atgagcttaataagatttttcaaaacaatttttatgattgattttttaacgggattaatcatggcaataaaagaaatatttaaaccaaaaaaaacaattaattatccatttgaaaaaggttcaattagtccgagagctaggggagaacatgcgctaagaagatatccaaatggtgaggagagatgtattgcttgtaaattatgtgaagctgtttgtcctgctcaggctataacaatagagtctagcgagagagaagatggaagtagaaaaactactcgttatgatattgatatgttaaaatgtatttattgtggtttgtgcgaacaatcctgtccagttgatgcgattgtgcaaggtccaaatttcgaatttgctacagaaacaagagaagaactttactacaacaaagaaaagttgttagagaatggagacagatgggagaatattttagcagcaaatattaatgctgatagctctcacagataat

SEQ ID NO: 200594 - DNA, 271 bp, Unknown
  Bacterial polypeptide expressing nucleotide sequence isolated from the Sargasso Sea
atgtgtgcaatgggatctattttatttcttggcggctggttatctcccatagatttatttccatttaacattattccagctccaatatggttaatcttaaaaatactctttttatttatcctatttgccctgataaaagcaatagtacctagatacaggtatgatcaattaatgaaacttggatggaaaatttttctaccattttcattaatttatgtagtattaactgcaagttttttaatgtattttgatttattaccagggaattaga

SEQ ID NO: 200595 - DNA, 409 bp, Unknown
  Bacterial polypeptide expressing nucleotide sequence isolated from the Sargasso Sea
aatgtctaaacaaaaaaaaaaactaaacttaaactttggtccacagcaccctgctgctcatggtgttctaaggttaatactagaattagatggagaagttgttgaaaaagcagatccgcacattggtttacttcatagaggaactgaaaaattaattgaaaataagacttacactcaagctataccttattttgataggcttgattatgtagcaccaatgaatcaagaacatgcatttgcattagctatagaaaagatactaaaaatagacgttccaatcagagcacaatatataagagttattttttgcgaaataggaagaattttaagtcatattttaaacgtcaccacacaagcacttgatgttggagctttaacaccttccttatgggggtttgaggaaagagaa

SEQ ID NO: 200596 - DNA, 684 bp, Unknown
  Bacterial polypeptide expressing nucleotide sequence isolated from the Sargasso Sea
aatgaactttccaattttatcttcattaattctacttcctacgattggaggtctattcatattgtttggtagatcttcttcaaaatataattcagcaaaatatatttcattatttatttccttagctaattttgttttatcaatttatctttggtatttatatgatgcaaataattcaaattttcaatttgtagaagaaaaaatttggataaaaggttttattaattataaagttgggatagatggtatatcaatattatttattattttaacaacttttattaccactttatgtattatttctgtaaattctactattaaaaataaacttaaagattttcttgttgccattctatttatggaaacaatgatgattggtgtattttgttctcttgatttagtaattttttacttgttttttgaagctggattaatacctatgtttttaattattggaatatggggtggcgagagaagagtttattctgcttttaaatttttcttgtacacattgctaggatcagttttgatgctaattgcaatcatttccatatattggattacaggcacaactgatgttattaaattatatcagttaggtattgatcctaagtaccaaaatttgctttggttagctttttttagttcatttgctgtaaaaacaccgatgtggcctgtgcacac

SEQ ID NO: 200597 - DNA, 325 bp, Unknown
  Bacterial polypeptide expressing nucleotide sequence isolated from the Sargasso Sea
tatgaaaatttctagattatttaaaactatattcatgattgattttttaactggtttagtaattgctattaaagaaatatttaaaccaaaaaaaacaattaattatcctcatgagaaaggtgctataagcccaagaaccagaggcgaacatgcattgagaagatatcctaatggagaggaaagatgtatagcttgtaaattatgtgaagctgtatgtccagcacaagctattacaatagaatcaaaagaaagagaggatggaagtagaaaaacaacaagatacgatattgatatgatcaaatgtatttattgtggtctttgtgag

SEQ ID NO: 200598 - DNA, 973 bp, Unknown
  Bacterial polypeptide expressing nucleotide sequence isolated from the Sargasso Sea
attgactatttcacaactttaattaagtctgtaatatggatctcagcatttcttgtaatgctatgttcattaaattatgtcaaacaaaatgatattttaaaaattgagtatccaattttaattttatcttcaattcttggtatgctagtaatggtaagttctaacgatctaatagttttttatgttggtctagaattacaatctttagctttatatgttcttgctgcctttaaaagagataatatactttcatctgagtcaggcttaaaatattttatattaagcgcactatcatcaggattattgctatatggatgttctttaatatatggtttttctagctcaacaaactttgatttgatttatcaaaatagtgagtcaatcgaatatggtattatttttgggatagtatttattttggttggattagcatttaagattactgcagtaccttttcacatgtgggccccagatgtttatgatggatcacctacatctgtgactgtcatatttgcaattcttccaaagattgctgcattaacagtattcattaattttttatatggtcctttccttgaaatgtttgaacaatggcaagcagttataatttttttatcaattggttcaatggtatttggggcagtagctgcgattggtcaaaaaaaattgaaaagacttattgcttatagttcaataagccacatgggttttgcgctcgctggtttaagtgttgggacaaacgaaggtattcaaaattcaataatatacttaataatatatctaataatgaatatagcatttttctgctgtctatttatgctcaaaagagaaaatcaatatttcgataaagttgaagatctctcaggtttatcaaaaaatcatcctttattatcgctctctttgatgattattttattctcgttagcaggaatacctccattggctggtttttttgcaaaagttttatattttt

SEQ ID NO: 200599 - DNA, 733 bp, Unknown
  Bacterial polypeptide expressing nucleotide sequence isolated from the Sargasso Sea
tatgcaaactttaaatttattatttaatgaaatttataaaatattatttttattaataccagtattagtgacagttgcaatgatagtgtggcttgatagaagagtttgggcgctcgttcaaaaaagaagaggtcctaatgttgttggaccttttggtttgttgcaatcattagctgatgctttaaaatatatttttaaggagataattatcccagcaagttccaataaagttatttttattcttgctccaataattaccatgaccttagctttagttgcctgggcagtaataccatttagtgaaaatttagttttgtccgatattaatgttggtgttttatatctatttgctgtttcttctctaggtgtttatggaataataatgggtgggtgggcatcaaactcaaaatatccatttttaggagcaattagatcagcggcacaaatggtttcgtatgaagtttctattggcgttataataattaacgttctgctatgtgtgggctctttaaatttaagtgatattgttttggctcaacaaaatacatggttcgtacttccgttatttccaatgtttgtaatattttttatttcagcacttgctgaaacaaaccgacccccatttgacttgccagaggcagaagcagagttggttgcaggatatcaaacagaatattctggtatgatgtatgcaatgttttggcttggcgaatatgcaaatatacttttaatg

SEQ ID NO: 200600 - DNA, 731 bp, Unknown
  Bacterial polypeptide expressing nucleotide sequence isolated from the Sargasso Sea
tccgtccttgggcttactttttgggctagcactagttattgctgggctggcatttaaggtttctgctgtgccttttcatatgtggacaccggatgtctatgaaggtgcaccgaccccagtaaccgcctttttggctactgttcccaaaatggctgcgatttgtttatttatgagggtaatgtttgacgcctttgggaatattttgggtgattggcaacaaataattgttcttatttctatcctatcaatgtttctaggcgcctttgccgcaataggtcaaaatgattttaaacgtttgttagcctactcttcaatagcacatatgggctacgcactgattggtttggctgcaggtaccgaatttggggttcaatcagttttagagtacatgacgatttatatcactatgaatatcggtgtttttgctattttgatgtcaatgcagagagatgggcaatctgtgaccgaaatagcctcgttaaggatgatttctgaaacggaccctggaaaagcaatagcattattaattctattatttagcctggcgggggttccgcctatgttaggtttttttgcaaagtttgaagttttgagggcagccataaatgcggatttaatttatttggctattatgggagtcttggcctcggtgattggtgctttttactacttgaaaatagtttacttaatttattttgggggaatgcccgaaacccctctggataattcaa

SEQ ID NO: 200601 - DNA, 817 bp, Unknown
  Bacterial polypeptide expressing nucleotide sequence isolated from the Sargasso Sea
gttcaaatttgggatgtagctgctgaaagacagttagaaatttctggtaaagactcagcgaaattagttcagttgatgacttgtagagatttatctaaatcgaaagatggaagatgttattattgtccaataattgatgataacgcaggtcttataaatgatccagttgtacttagattaaatgaaaataaatggtgggtatctcttgctgactcagatgtaatattatttgcaaaaggattagctattggaaataaatttgacgtaaagatttttgaacctgatgttgatataatggccgtacaaggtccaaagtcatttgaattaatggaaaaagtttttggagataagatagttaatttaaaattctttggttttgattattttgaatttggtggtgataaacatttaattgcaagatctggctggtctaaacaaggtggttatgaaatttatgtagaacataatgtctctggattaaaattatatgatcatctttttgaaattggaaaagaatttaatatcaaaccaggttgtccgaatttaatagaacgtattgaaagtggattattatcgtatggaaatgatatcgataatggagataatccatatgaatgtggatttgataaatatattaacatagacagcgaagttaattttttaggtaaagagagattaaaaaaaattaaatctgaaggaattaaaaaaaaattaatgggagtaatgcttgatatagataaaataagtattacgggatcattagaattaagtgatcaaaacaataatataattggagaattgagatcagcttgctatt

SEQ ID NO: 200602 - DNA, 658 bp, Unknown
  Bacterial polypeptide expressing nucleotide sequence isolated from the Sargasso Sea
tttttttaagaaaagctataatttagtcactaacttatctctagtagctttagtaattttaattgtgataattttaaatactgagagcacttcagtgaaaatatttactgatagctttattagagatggatacgcaaaatttataaaaatattaattattatttcgactatatttattctactatcatctcaagtatttattaaagataataatatagctaaatttgaatatccaataataatacttttatctattttaggtatgttttttatggttagttcaaatgatttaattcttttttatcttggtttagaacttcaatcattatcgctttatgttttggcttcaatagacagagacaatactagatctactgagtctggggttaagtattttgtattaagcgctctgtcttctgggctacttctttatggttgctctttactctacggttttactggctcaactaattttgatattataaataattcattgaatataggtagcgttggctcaatatttgcaatggtatttattcttgtaggtcttgctttcaaagtttctgcagtaccttttcatatgtggacacctgatgtatatgaggggtctccaacctccgtaacaaattttttttctgcggttccaaaagttgctgga

SEQ ID NO: 200603 - DNA, 868 bp, Unknown
  Bacterial polypeptide expressing nucleotide sequence isolated from the Sargasso Sea
tattggtctcttggtggaatgtttttaacctatatcgctatcaggcttcaaaacattgaacccaccagtctctttatggatacagttgcgcatgacccattctcccagttcttcaaaattttaatccttatctcaacagctatagtcatgctaatgagtcttgtgtctggtgaattgaaaaaatacaggatgggtgagtacttcagcataatgacaattatgacttttggattatttttaatgacctcatcgattgatatattaatggtttatctcgctattgagattgtatcaattatgtctttctttcttgcgggctacttaaaaagaaattcattaagcaatgaggcttcattgaagtatgtcatttatggagctttttcatctggaatcatgctttacggtttaagcatactttttggacttactggatctacgaacttttttgaaatgcagaaagcaatttctttgttgggtactgattcaaatcttgccctagttctttctactgtttttattttagttggatttggctacaagatatctgccgtacctttccatttctggactccagatgtttatgaaggatctccttcaacaatcacagcctatctttctattgcaccaaaagcagcaggctttgctctaatgttgcgtttttttaatcaggtttttggtgacatgtcaattgatatttcgacttcatggtcagcgattaatgacgttccatggccagagctaattgctgtattatctgccgctacaatgacagttggtaatcttgttgcgattcagcaaaataacgtcaaacgaatgctagcttattctagcatcgcgcatgcaggctatatgatgatggctcttcccc

SEQ ID NO: 200604 - DNA, 730 bp, Unknown
  Bacterial polypeptide expressing nucleotide sequence isolated from the Sargasso Sea
atgatagagtatttacaaattttaggtgaagaagtctataaaatattttttttactagttccaattcttgtatcagtagctatgattgtttggttagatagaagggtgtggggtttagttcaaaaaagaaaaggacctaatgttgttggtccatttggacttttacaaacattagcagacgcattaaagtatatatttaaagaaataattatacctgcaagtgcgaataaagttgttttcatacttgccccaatagtaaccatgacactggctttgattgcatgggcagtaattccaatgagtgaaaatttggttttggcagatattaatgtcggaattttatatttatttgctgtttcttctcttggagtctatggaattatcatggggggatgggcgtctaattcaaaatacccttttcttggagccattaggtctgctgcgcaaatggtttcctatgaagtttcaattggaattataattataaatgttcttttatgcgttggatcattaaacctaaaagatattgttattgcacagaaagaattatggtatgtgattccgctttttcccatgtttgtaatttttttcatttcctcactagcagaaacaaatagaccgccttttgacttgcctgaggcagaagcagagctagttgcgggatatcaaactgaatattcaggcatgatgtatgcaatgttttggctgggggaatatgcaaatatacttt

SEQ ID NO: 200605 - DNA, 826 bp, Unknown
  Bacterial polypeptide expressing nucleotide sequence isolated from the Sargasso Sea
ttcgctgtatgtgggcctggaactgcagagcctggccctttacgtgatcgccgccttccgacgcgattccacgaaatcgtccgaagccggattgaaatacttcgttctcggcgcgttgtcgtcgggcatgctgctgtatggcgcgtcaatgatctacggttttgctggtacaacccggtttgacacgctggccacactgtttacaggcccaaatgccgatcctggcgtaggcgtcgtcgttggcctggtcttcctgcttgccgggctcgccttcaaggtgtctgccgttccattccatatgtggacgcccgatgtttatgaaggcgcacccacaccggtaacggccttcttcgcagttgcccccaagatcgcggcaattgcactgctggttcgcacgatggtgggtccgttcggcgaattgtttgaacagtggcaacagatcgtgatcctgatctcgatcctgtccatgctgctgggcgcgctggccgcgatctggcaacagaaccttaaacgcctgcttgcctatagttctatcgggcatgtcggatatgcgctggtaggccttgctgccgggtctaaggaaggcatcaccggcatcggcgtctatatggcgatctatctggccatgaatgtgggcacattctgctgcgttctgtccatgcgacggcagggcctgatggcggaagggatcgacgatctggccggcctggcccgcaatcatccgatgatggcggcagcgatggcggtatttatgttctccatggccggcataccgccgctcgcgggttttttcggcaaactttacgtctttctggcagcggtcaat

SEQ ID NO: 200606 - DNA, 892 bp, Unknown
  Bacterial polypeptide expressing nucleotide sequence isolated from the Sargasso Sea
cactttggcctgcttggcggcttggccagtgacgttcaagccgcggctgttttatttcctgctcttggccatggacggcggccaaatcgccgtgttcgcagtgcaggacatgctgctgttcttccttgcctgggaactcgagctcatacccgtttatctcttgctagcgatttggggcggcaagaaacgccaatacgcagccaccaaattcatcctctacaccgcaggcagctccctcttcatcctgctggtggcactggccatggccttcagtggcgggcctgtgagctttgaatacaccgacctggccgcaaaacaccttggggcaggtttccaggccctctgttatgcgggcctattgattgccttcggcgtcaagctgccgatcgtgcctctgcacacatggcttccggatgcccacggggaagccacagccccagttcacatgctgctagcaggcatcttgttaaagatgggcggctacgccttgttccgcttcaacgcgtcgatgttccccgacgcccacgtgcaattcgcgccgctgctcgtggtgctgggggtggtgaacatcatttatgcggcgctcacctcttttgcccagcgcaacctcaaacgcaagatcgcctacagctcaatcagccacatgggctttgtgctgatcggcatcggcagcttctcgccgctagcggccagtggcgccatgctgcagatgatcagccacggcttgatcggagcgagtctgttcttcctggtgggggccacctacgaccgcacccacacgctgcagctcgatgagatgggtggggtcggtcagcgcatgcgcaagatgtttgccatgtggaccgcctgctgcttggcctcgttggccttgcctggcatgagcggcttcgtt

SEQ ID NO: 200607 - DNA, 316 bp, Unknown
  Bacterial polypeptide expressing nucleotide sequence isolated from the Sargasso Sea
aatgagcttaataagatttttcaaaacaatttttatgattgattttttaacaggattaatcatggcaataaaagaaatatttaaaccaaaaaaaacaattaattatccatttgaaaaaggttcaattagtcctagagcaagaggagaacatgcgctaagaagatatccaaatggtgaggagagatgcattgcttgtaaactatgtgaagctgtttgtcctgctcaggctataacaatagagtctagcgagagagaagatggaagtagaaaaacaactcgttatgatattgatatgttaaaatgtatttattgcggt

SEQ ID NO: 200608 - DNA, 235 bp, Unknown
  Bacterial polypeptide expressing nucleotide sequence isolated from the Sargasso Sea
tatgaatttaaattttgggcctcaacatccagctgcccatggtgttttaagattgatacttgaattagatggagaagtagtagaaaaaatcgatcctcatataggacttctacataggggaacagaaaaacttatcgaacataaaacctatatgcaggcactcccttattttgatcgtcttgattatgtggctcccaatgaatcaagagcacgcctttgctttaggaatagaaaa

SEQ ID NO: 200609 - DNA, 166 bp, Unknown
  Bacterial polypeptide expressing nucleotide sequence isolated from the Sargasso Sea
atgaatttagaagagaaaaaaaaacaaataccagatgaatttaaacagttagctcaagactttagtgataatggttttattacaacttcgttggataacctagttacctgggcaagaacaggatcacttcattggatgacatttggcttagcgtgttgtgcagtga

SEQ ID NO: 200610 - DNA, 736 bp, Unknown
  Bacterial polypeptide expressing nucleotide sequence isolated from the Sargasso Sea
attgataccagttttagttacagtcgcaatgatagtttggcttgatagaagagtctgggcatttgttcaaaaaagaagaggccctaatgttgtcggaccttttggtttgttgcaatctttggctgatgctttaaaatatatatttaaagaaataataattcccgcaagttcaaataaattaatttttattcttgcccctattattacaatgacattggcacttgcggcatgggcagtaataccatttagtgaaagtttagttctttcagatataaatgttggaatattgtatttatttgctatctcttctttgggagtttatggaataatcatgggtggatgggcttcaaactctaagtaccccttcctcggcgcaataagatcagctgctcaaatggtgtcctacgaagtttctattggagtgattattattaatgttttattatgtgtaggatccttaaatttgaatgaaattgttttagcacaaaaagatatgtggtttgtattaccactatttccgatgtttgtgattttttttatttctgctctagcagagacaaatagacctccttttgatctacccgaagcagaagctgaattagttgcaggatatcaaactgaatattcaggaatgatgtatgccatgtttttggttaggcgagtatgcaaatattttattaatgtgtgctatgggttccattttatttttaggtggatggcttttctcagtggataa

SEQ ID NO: 200611 - DNA, 352 bp, Unknown
  Bacterial polypeptide expressing nucleotide sequence isolated from the Sargasso Sea
atgtcaaaacaaagaaaaaaattaaatttaaattttggacctcaacatccagcagctcatggggtgcttagattaattttagaattagacggtgaaattgttgaaaaagcagatccacatatcggattacttcatcgtggtactgaaaagttaattgaaaataaaacatatgttcaagcgataccttattttgatagattagattatgttgcacccatgaaccaagagcatgcatttgctttagcaattgaaaaaatattaaaaattgatgtacctattagagcccaatatataagagttatattttgtgagataggaagaattttaagtcatatattaaatattactactc

SEQ ID NO: 200612 - DNA, 822 bp, Unknown
  Bacterial polypeptide expressing nucleotide sequence isolated from the Sargasso Sea
ttaattatttcatcaaattatttaagaacttttaaaatttttaagattgaatatccaattttaatattaagctctgttttgggaatgatgattatgattaattctaatgacttgattgtattctatatggggttagagcttcaatctttagcattatatgttttggccacttttaatagagatcaaataaaatcttcagaagctggactaaaatattttgtgctaagcgccttatcctctggattacttttgtatggatgttcactaatatatggttttactggatcaaccaatttcaatgttattgcaaatcaactaggttctagtgaatatgctattacctttggaattgttttcatcttagttgggttagcgtttaaaatttcggctgtgccgtttcatatgtgggctccagatgtttatgagggctcaccaacttctgtaactttgttttttacaatggtaccaaaaattgcagctttaactgtatttattaggtttttatacgtaccttttttaaatttaattgatcagtggcaaatgatattgatatttctctctattgcttcaatgctttttggagcaattgctgcaataggtcaaaccaatttaaaaagactagtagcttacagttctataggacacgtgggttatgctttagcaggtgttgcaacgggcacaaatgaaggaatgcaaagttcagtaatatatataattatttatataataatgaatttaggattattttcttgtttgctaatgatgaaaagagaaaatcaatactacgaaaaaatagaggatttatcgggattatctaaaaat

SEQ ID NO: 200613 - DNA, 827 bp, Unknown
  Bacterial polypeptide expressing nucleotide sequence isolated from the Sargasso Sea
acaagatataaataaaatgggtggagttataaaaaaactcccatacacatatgtattaatgcttattgggacacttgctttaacaggttttcctttattatcaggtttttattctaaagatgcaataatagaatttgcttacctaagaggaaatggagttggaatacttgcagcttttgtgggtattgttacagctttattaacatcaatttactcttggagacttatttttaaaacattccatggtaattttaataataaagaacttagtgttgataaaatacatgagtctccttttgttatgattgccccgttaataatcctagcaataggagctatttttgcaggtatggcgtttaaaggtttatttatagggcatgaaatagcatatgaattttggggtaaatctataaaatttttagaacctctcagcacagatcatccaccaacatggtttttgtttttaacacctgtacttgttactgctgcaattccattttcttattatttatacctaaaaaataaaaacatagttataggattgaaagaaatgaatgaaccaatttatcaatttttagttaaaaaatggtactttgatgaaatatatgattacttatttgttaatccttcaaaaagaattggcaaatttttatggaaaaaagttgatggatcaataatagataaatttggtcctgatgggatttcaagtgtaattaaaaatttatcaactaaagcagtcaaatttcaatctggatttatttatcaatatgcattcgttatgttgataggattttcggttttactaacaatactgatattgaactgat

SEQ ID NO: 200614 - DNA, 721 bp, Unknown
  Bacterial polypeptide expressing nucleotide sequence isolated from the Sargasso Sea
tatggagtatattgttgtttttttacccctctttggagctattttatctggtttttttggaaaatttattggtgacagaagttcagaaatactcacaagtctatttgtttcaattagtgcaatactttcaatcattgtattttataatgttatcacatttgattatagtaataatatagaaatatttacttggattaattctggtcaattaaatataaaatggtcaataaaaattgatgctctatcagctctgatgttggtagttgtaaatttaatttcttcaatagtacatgtttattcaattggatacatgtctaacgaccctcacaaaacaagattcatggcttttttatctctttttacttttgctatgcttactttagtaacatcagacaactttttgcaacttttttttggttgggaaggtgttgggctttgctcatatttcttaattggtttttggtacaaaaaagagagcgcaaatgcagctgctataaaagcatttttagtaaatagagtcggcgatgttggattcgcattaggaatatttttaatattttatatgtatggaacgcttaattatcaggaagtttttcaattaatacccaatactttagatagagaaattaattttttaggtatgaatataaatagtattaatttaatttgtatacttttgttcaatggtgctatgggtaaatctgcacaatttattttacac

SEQ ID NO: 200615 - DNA, 810 bp, Unknown
  Bacterial polypeptide expressing nucleotide sequence isolated from the Sargasso Sea
actaaagaaaaaaaaactctcaatttaaattttggtcctcagcaccctgcggcacatggagttttaaggttgatattagagttagacggtgaaattgttgaaaaagcagatccacacataggtttattacacaggggtactgaaaaattaatagaaaataaaacttactctcaagccataccctattttgatagacttgattatgttgcacctatgaaccaagagcatgcatttgctttagcaattgaaaaaataatggatgttgaagtcccaattaggggtcaatttataagagtaatattttgtgaaataggtagaattttaagtcatattttaaatattactacgcaagcattagatgttggagctttaacaccgtctctttggggttttgaagaaagagagaaactaatgggcttttatgaaagagtatctggttcaagattacatgccaactactttagacctggaggagttcataaagatttaccgagaggtttagataaagatatattagagttttgtaaaacatttccaaaaataattgatgatttagaaacattgctgacagataacagaatatttaaacaaagaaacgttgacattggaattgtgtctaaagaagatgcattaaattactctttttcaggagtaatgctcagaggttcaggaataccttgggatttaagaaaatcacaaccttatgattgttatgaacaaatagattttaaaattccgattggaaagaatggagactgttacgatagatatttgtgtagaattgaagaaatgagagaaagtgtaaaaatt

SEQ ID NO: 200616 - DNA, 340 bp, Unknown
  Bacterial polypeptide expressing nucleotide sequence isolated from the Sargasso Sea
aatgacaaaaaaaattaaaaacttaaatttaaatttcggtcctcagcatcctgcggcccatggtgttcttagattaattttagagcttgatggagaggtggttgagaaggcagatccacatattggtttgctccacagaggaactgaaaaacttattgagaataaaacttatatgcaagcagttccttattttgatcgtttagattatgtggccccaatgaatcaagaacatgcttttgcattagcggtagaaaaaatacttaaaatagatgtaccaattagagcacaatacataagggttatgttttgtgaaatagggagaattctaagtcatatttta

SEQ ID NO: 200617 - DNA, 202 bp, Unknown
  Bacterial polypeptide expressing nucleotide sequence isolated from the Sargasso Sea
aatgacaaaaaaaattaaaaatttaaatctaaattttggaccccaacatcctgcggctcatggtgttttaagattgattttagaactggatggtgaggtagtggaaaaggcagatcctcatatcggactattacatcgtggaactgaaaaattaattgaacataaaacctatatgcaagcagtgccttactttgatagactt

SEQ ID NO: 200618 - DNA, 604 bp, Unknown
  Bacterial polypeptide expressing nucleotide sequence isolated from the Sargasso Sea
atggcaaaacaatctaaaactttaaatcttaattttggacctcagcatccagctgctcatggagttttgagattgatacttgagctagatggagaagttgtggaaaaagctgatcctcatattggacttttacatcgtggaactgaaaaacttattgaaaataaaacttatatgcaagctgtaccttattttgatagattagattatgttgctccaatgaatcaagagcacgcatttgctttagctatagaaaaaattttaaaaattgaagtacctattagagcacaatttattagagtaattttttgtgaaataggaagaattttaagtcatattttgaatattactactcaagctctagatgttggggctctaacaccatctttatggggctttgaagaaagagaaacattaatgactttttatgaaagagcctctggttctagacttcatgctaactacttcagagcaggtggtgttcatcaggatttaccaagaggtttagaagatgatataagtaaattttgtgaaagttttccaaaaattattaatgatttagagtcactattaactgataatagaattttcaaacaaagaaatgttg

SEQ ID NO: 200619 - DNA, 769 bp, Unknown
  Bacterial polypeptide expressing nucleotide sequence isolated from the Sargasso Sea
cgatgctccgtacaggctccgactagtgggtcagtattattagcggctatattgcttaaaatgggggggtatggctttatcaggtttagtattccgatgttctatgatgcatcgttatactttcaaagctttatttttatactttctgttattgctataatttatacatctctagtggcattggttcaaacagatatgaaaaaattgattgcttattcttcggtagctcacatgggttttgtaaccattggactgttctcattaaaccaacagggcatcgacggggccatattccaaatggttagtcatggctttatttctgcagcgttatttcttgtggtgggtgtagtctatgaaagaactcatacaagggaaattatagcttttggtggcctcataaggagaatgccaaattatgcaatggtgttcatggttctgactttagctaatgttggactgccaggaacatcgggttttataggcgaattcctttcacttgttggtgtttttcaggttaagcccctctatgcgatcttcggtgctcttggagtgatactatctgcctgctatggtcttatgttatataaaaaggtcatattaggagaacttataaaagaaaatttaaaaagaataaacgatatctcattaagagaaaaattttgcctttaccctctagttttgttaatcatatttttcggtatttatccgaaacctatcatagagacctacagtgcaactgtttctgactatttacaaatgttgaattgat

SEQ ID NO: 200620 - DNA, 201 bp, Unknown
  Bacterial polypeptide expressing nucleotide sequence isolated from the Sargasso Sea
aatgttagcggaatttttaaaagattacttaccaataataatatttttgataatagctttaggcttaagccttgcttttgttgcaatcaactatattgctgcacctagtaaacctgaccctgagaaactttcagcatatgaatgtgggtttgagcccttcaatgactctcgaatggaatttgatgtaagattttatttggt

SEQ ID NO: 200621 - DNA, 439 bp, Unknown
  Bacterial polypeptide expressing nucleotide sequence isolated from the Sargasso Sea
actggcttattaattgctttaagagaaatgtttaaaacaaaaaaaacaataaattatccttttgaaaaaggaaaaattagtccaagatttagaggagagcatgcacttagaagatatccaaatggcgaagagagatgtatagcatgtaagttgtgtgaagcagtctgtccagcgcaagcaattacaatcgagtcagctgagagatctgatggaagcagaaaaactacgcgttacgatattgatatgatgaaatgtatttattgtggtctatgtgaagaatcttgcccagtagatgcaatagtacaaggtccaaattttgaattttcaacagaaacaagagaagagctttattatactaaagagaaattacttgataatggtgatagatgggaaaatattttagcagcgaatattaaatcagataatccttataggtaaa

SEQ ID NO: 200622 - DNA, 838 bp, Unknown
  Bacterial polypeptide expressing nucleotide sequence isolated from the Sargasso Sea
actttctacagagtctggacttaagtattttgttcttagcgcattttcatctggcttgctgttgtatggttgttcattaacatatgggttttctgaaagtacaaattttgatcaaatacttataaactctactgagtttaactatggtaccacttttgggatagtctttattttagttggtcttgcatttaaaatctcagctgtaccttttcatatgtgggcaccagatgtttatcaaggttctcctacatctgtaactttattttttgctatactgccaaaaatagcagcactctctgtattcattaagtttttatatactccatttgctaacatgaatgatcagtggcagactattattgtatttatatcaattgcttcaatgatatttggtgcagtagcagccataggtcaaaaaaatttaaaaaggttaattgcctatagttcaattagtcatatgggttatgctttggctggattagcaacaatcagcaatcaaggaatacaaagctcaattacttatatatcaatttatttagtcatgaatttagccttttttagttgtttatttatgcttaaaagaaatgatcaatattatgaaaatatagaagacttatcaggactttctaaaaaacatccaattttgtctttctcgttgttaatagttttattttccttagcgggaatacccccgcttgcaggtttttttgcgaaattttatgtcttcttagctgtcatagaacagtctatgtattttttagcaattgttggattactagcaaccgttgtagcagctttttattatctaagaattataaaaattatatattttgatcca

SEQ ID NO: 200623 - DNA, 230 bp, Unknown
  Bacterial polypeptide expressing nucleotide sequence isolated from the Sargasso Sea
aatgaaattaaatagattattaaagacagtttttttggctgagtttgtttcagctttatttattgctattaaagaaattttcaaaggaaaaaaaactattaattatcctcatgaaaaaggtaaaataagtccaagattcaggggtgagcacgcccttagaagatatccaaatggtgaggaaagatgtattgcatgtaaattgtgtgaagctgtctgtccagctcaggcaa

SEQ ID NO: 200624 - DNA, 226 bp, Unknown
  Bacterial polypeptide expressing nucleotide sequence isolated from the Sargasso Sea
atgaaaatttcacgattattaaaaactatattcatgattgattttgtgactggtttattaattgcaacaaaagagacttttaaggcaaaaaagacaatcaattatccttttgaaaaggggtctttaggaacaaggtcaagaggtgagcatgctcttagaagatatcccaacggtgaagaaagatgcatagcatgtaagctttgtgaagccgtatgtccagcccaag

SEQ ID NO: 200625 - DNA, 256 bp, Unknown
  Bacterial polypeptide expressing nucleotide sequence isolated from the Sargasso Sea
aatgacaaaaaaaattaaaaatttaaatttaaactttggaccacaacatccagctgcgcatggagttttaagattaattttagaattagatggtgaaattgttgaaaaagctgatccacatattggtttgttgcatagaggcactgagaaattaattgaaaacaaaacttacatgcaagcagtgccttattttgatcgattagattatgtggctccgatgaaccaagaacatgcattcgcgttagcaattgagaaa

SEQ ID NO: 200626 - DNA, 227 bp, Unknown
  Bacterial polypeptide expressing nucleotide sequence isolated from the Sargasso Sea
gatgaaaaaaataatttttataatcaaacaacttttattgattgaaattttatcaggtatggccctgacacttaaatatttctttaaaaaaaaagtaacaattaattatccatttgaaaaaggatatttaagtccgagatttagaggtgagcacgccttaagaagatatgaatctggagaagaaaggtgtatagcttgtaaactttgtgaagctgtttgtccagcac

SEQ ID NO: 200627 - DNA, 517 bp, Unknown
  Bacterial polypeptide expressing nucleotide sequence isolated from the Sargasso Sea
aatgaagaaagataataaaactataaatctaaactttgggcctcaacatccagcagcccatggtgtattacgacttattctggaattagatggtgaggtagttgaaaaagctgatccacatattggtttattacacagaggtactgagaaattaattgagcataaaacctatatgcaggcagtgccatattttgacagacttgattatgttgcaccaatgaatcaagagcacgcatttgctctagcaattgaaaaaattttaaaaatacaggtcccattgagagctcaatacataagagttattttttgtgaaatagggagaattttaagtcatatccttaacgtaactacccaagctatggacgtaggcgctcttacaccaactctgtggggctttgaagaaagagaaacactgatgggtttttatgaaagagtttcaggatcaagattgcacgcaaattacttcagagctggaggtgtgcatcaggatcttccaactggacttgataaagatata

SEQ ID NO: 200628 - DNA, 490 bp, Unknown
  Bacterial polypeptide expressing nucleotide sequence isolated from the Sargasso Sea
atgaattttattataaaaaatattaaatcttttgcactttatgaactttttttaggtatgtttttaactttaaaatatatgttcaaatcaaaggtgacaataaactaccctcatgaaaaaggacctttaagtccaagatttagaggagaacacgctcttagaagatatcctaatggagaagaaagatgtatagcttgcaagctttgtgaagcagtttgcccagcacaggccattactattgatgctgaaccgagagaagatggaagtagaagaactactagatatgatattgatatgagtaaatgtatttattgtggtttatgtcaggaatcttgtcctgtagatgcaatagttgaaggtcctaattttgaatttgcaacagagactagagaagagttaatgtataacaaagaaaaacttctttctaatggtgataaatgggaatatgaaatttctaaaaatctagaattagattcaccttatcgataaa

SEQ ID NO: 200629 - DNA, 601 bp, Unknown
  Bacterial polypeptide expressing nucleotide sequence isolated from the Sargasso Sea
tacattgttagcagctttttgggttttagtaatatcttcaaattatttagaaacatttaaaatatttaaaattgaatatcctattttgattttgagctctgtacttggaatgatgatcatgattagttcaaatgatttaatagtattttatatggggttagagcttcaatcattagctttatacgttcttgcaacattcaatagagaccaattaaaatcttctgaagcaggattaaaatattttgtcttaagtgcgctatcttcaggtttattactatatggttgctctttaatttatggttttacaggttcaacaaattttaatattatttcaactcaattaaatactgatcaatatgcattaacatttgggattgtttttattcttgtaggattagcatttaaaatttcagcagttccttttcatatgtgggcaccagatgtctacgaaggatcaccaacttctgtaaccttgtttttcactatggtacctaaagttgctgctcttacagtgtttattagatttttatacgttccttttttaaatttaatagatcaatggcaaatgatattgatttttctttctcttgcctcaatgctt

SEQ ID NO: 200630 - DNA, 841 bp, Unknown
  Bacterial polypeptide expressing nucleotide sequence isolated from the Sargasso Sea
atgtacaatcttaatttagtattacctgaaatatttgtctctttatctataatgttcttattaattctaggtgtgtttaaaaagaatagttcacaactaacttttaatctttctttacttacatttttaattacaacaatttttactattaatgaaactttctcagtggaaagaattactttattcaatggaagtgttgttattgatcgtatggcctcacttatgaaaattattacacttattggtggttttttggttttagtgatttcgtcaagctatctcaaaacatttaaaatttttaaaattgaatatccaatactgatattaagctctgtattgggaatgatgattatgattagttccaatgatttaatggttttttacatgggacttgaattgcaatctcttgctctgtatgttttggcaacttttaatagagatcaattaaaatcatctgaagctggattaaaatattttgttctaagtgctttatcttcaggtttattgttgtacggttgctctttaatttatggattttctggatcaacaaattttgatgtgatagcaaatcagcttgactcaaatgaatatgctctaacttttggaatagtttttatattagttggtttggcatttaaaatttctgcagttccatttcatatgtgggcacccgacgtttatgaaggatctccaacaaccgtaacgcttttctttacaatggtgcctaaaattgcagcactcacagtttttataagatttttatatattccttttttaaatttattagatcaatggcaaatgatcattgtcttcctctcaatcgcttctatgatttttggag

SEQ ID NO: 200631 - DNA, 260 bp, Unknown
  Bacterial polypeptide expressing nucleotide sequence isolated from the Sargasso Sea
tatgataaaatatattaaatcatttacactttttgagctgttgcaaggaatgtttttaactttgaaatatatgctcaaagcaaaggtaacaataaattaccctcatgaaaaaggccctctaagtcctaggttcagaggtgaacacgctttaagaagatatcccagcggtgaagagagatgtattgcatgtaaattatgtgaagccgtttgtcctgcgcaagctattacaattgaagctgagccaagagaggatggtagta

SEQ ID NO: 200632 - DNA, 259 bp, Unknown
  Bacterial polypeptide expressing nucleotide sequence isolated from the Sargasso Sea
atgaaaatatcaagattttttaaaacaatatttatggttgattttgcatctggtctatttatggctattaaagaagtttttaaatcaaaaaaaacaataaattatccatttgaaaaaggtaagattagtccacgttttcgaggtgagcatgcattaagacgatatccaaatggagaggaaagatgtattgcatgtaaattatgtgaagctgtgtgtccagctcaagctataacaattgagtcttcagaaagagaagatg

SEQ ID NO: 200633 - DNA, 859 bp, Unknown
  Bacterial polypeptide expressing nucleotide sequence isolated from the Sargasso Sea
attgtttgatcaagtttataaaattctttttttattagttccagttttagtatctgttgccatggtagtttggcttgatcggagggtgtgggcgtttgttcaaaaaaggcaaggtcctaatgtagttggaccgttcggtctattacaaactattgctgatgcattaaagtatatttttaaagaaatcattatcccatcaagttcgaataaagtaatttttattcttgcaccaatagtaacaatgacactagctttaattgcttgggctgtaattccattcagtgcaacacaggttttggctgacataaatgttggaattctttatttatttgctgtttcatctcttggtgtatatggaattataatgggaggatgggcttcaaattctaaatatcctttcttaggagcaattagatctgctgctcaaatggtatcttatgaggtatctattggtgtaataattataaatgttctgttgtgtgtaggatcacttaatttaaatgatattgttttagctcaacaaaacttatggtttgttattccgttattcccaatgtttgttattttttttatttctgcattagctgaaacgaatagaccaccatttgatcttccagaagcagaagcagaattggttgctggttatcaaacagaatattctggaatgatgtatgcaatgttttggcttggtgaatatgcaaatattcttttaatgtgtgcaatgggtgcgattttatttttgggtggatggttatctccactggaaatttatccttttactttagtgccagggcttgtatggttagtgttaaagatattactattatttttgttgtttgctttagttaaagcaattgtt

SEQ ID NO: 200634 - DNA, 487 bp, Unknown
  Bacterial polypeptide expressing nucleotide sequence isolated from the Sargasso Sea
aatgaaaatttcaagattattaaaaactatgttcatgattgattttgtgactggtttattaattgcaataaaagagacttttaagacaaaaaagacaattaattatccgtttgaaaaaggatctttaggaacaaggtctagaggggagcacgctctcagaagatatcctaacggtgaagaaagatgcatagcgtgtaagctttgtgaggctgtgtgtccagcccaagctattacaattgaatcaaaggaaagagatgatggtagtagaaaaactgtaagatacgatattgatatgcttaagtgtatatattgtggtctttgtgaagagtcatgccccgtagacgcaattgtccaaggtcctaattttgaatttgcaacagagtctagagaagagctttattacacaaaagaaaaactcttggaaaatggagacaggtgggaaaacattttagctgcaaatataaaggctgatagttctcataggtaa

SEQ ID NO: 200635 - DNA, 286 bp, Unknown
  Bacterial polypeptide expressing nucleotide sequence isolated from the Sargasso Sea
atgggagtagatgaagcaaaaaaaattgttgatgatactctaaacacagaattatcctctaagggtttcttagttgctagctatgataaaattcttacctgggctagaactggttccttatggcctatgacattcggattggcatgttgtggagtagaaatgatacattcttatatggcaagatatgatctagatcgttatggagttataccaagaggtagtcctagacaatctgatgtaatgattgttgctggaacactaacaaataaaatggcaccggcttaag

SEQ ID NO: 200636 - DNA, 325 bp, Unknown
  Bacterial polypeptide expressing nucleotide sequence isolated from the Sargasso Sea
aatgaaaatttcaagattattaaaaactatactcatgattgattttgtgagtggtttattaattgcaataaaagagacatttaaagcaaaaaaaacaattaattatccttttgaaaagggatctttaggaacaaggtctagaggggaacatgctctcagaagataccctaacggtgaggaaagatgtattgcctgtaaactttgtgaagcagtatgtccagcccaagcaattacaattgaatcgaaggaaagagatgatggaagtagaaaaactgtaagatacgatattgatatgcttaagtgtatatactggtggtctttgtga

SEQ ID NO: 200637 - DNA, 271 bp, Unknown
  Bacterial polypeptide expressing nucleotide sequence isolated from the Sargasso Sea
gatgactaaagagaaaaaaacattgaatcttaatttcggcccccaacatccagctgcccatggagttttaagattaatcttagaattagacggtgaagttgttgaaaaagctgatcctcacattggtttattgcatagaggaacagaaaaattaattgaacataaaacttattcccaagcagttccatattttgataggctagattatgtagctccaatgaaccaggagcatgcatttgccttagcagttgaaaaaattttaaatttagaa

SEQ ID NO: 200638 - DNA, 277 bp, Unknown
  Bacterial polypeptide expressing nucleotide sequence isolated from the Sargasso Sea
aatgaaattttcaagattattaaaaactatattcatgattgattttgtgactggtttattgattgcaataaaagagacttttaaagcaaaaaaaacaattaattacccttttgaaaagggatctttaggaacaaggtccagaggagaacacgctcttagaagatatcctaacggcgaagaaagatgcatagcatgtaagctttgtgaagctgtatgtcctgcccaagctattacaattgaatcaaaagaaagagatgatggtagtagaaaacagtaa

SEQ ID NO: 200639 - DNA, 825 bp, Unknown
  Bacterial polypeptide expressing nucleotide sequence isolated from the Sargasso Sea
tttaaattcgaatatccaattttaattttaagctctattcttggaatgttagtcatgattagttctaatgacttaatagttttctacttaggtttagaactacaatctttatcactttatgtattagcatcttttagaagagacaatttattgtcaacagaatctggtttaaaatattttgttttaagtgcactttcatcgggcttactactttatggatgttctttaatttatggattttcaggctcaacaaattttaatgaaatatcagaaagtatatctaatgttcaatatggacttacttttgggatagtttttatattagttggtttagcttttaaaatatctgcagtaccatttcatatgtgggcaccggatgtttatcaaggatctccatcatctgttacaatattttttgctattttgcccaaaatagctgcattaactgtttttataaggtttttatatattccatttattaatctaattgaccaatggcaaatgattataatatttttgtctatagcatctatgcttttgggggcagtagcagcaataggtcaaaaaaatttaaaaagaattattgcttacagttcaattagtcatatgggttatgcattggccggcctaacaactgttaccaatgaaggcatacaaagttcaattatatatatttctatatacttagttatgaatttggcattgttcagctgcatgtttatgattagaagaaacgagaattactttgaaaatatagatgatctatctggtttatccaaaaaccatcctgttttatctttgtcgctattaataattttattttct

SEQ ID NO: 200640 - DNA, 727 bp, Unknown
  Bacterial polypeptide expressing nucleotide sequence isolated from the Sargasso Sea
atgacaaaaaaatctaaaactttaaatcttaattttggaccccaacatcctgcagcgcatggcgttctaaggttaattttagaacttgatggtgaaattgtagaaaaagctgatccacatataggcttacttcatagaggtacagaaaagttgatcgaaaataaaacttatatgcaggcagtgccatattttgaccgacttgattacgttgcgccgatgaatcaagagcatgcatttgctcttgcaatcgaaaaaatattaaaaattgaagtcccaattcgtgctcaatttataagagttattttttgtgaaattggaagaattttaagtcatattttaaatgttacaacacaagccttggatgttggtgccttaactccatctttgtggggttttgaagaaagagaaactttaatgactttttatgagcgtgcctcaggttctagactacatgccaactatttcagaacaggtggcgttcatcaagatttaccaggagatttagaaaaagatattgctaaattttgcaatcattttccaaaagttatagacgacctagaaacattacttacagataatagaatttttaaacaaagaaatgttgatattggaattgttagtaaagaagatgcattagactattctttttcaggagtaatgctaagaggatcaggtataccttgggatcttagaaagtctcaaccgtatgaatgctatgatgaactag

SEQ ID NO: 200641 - DNA, 773 bp, Unknown
  Bacterial polypeptide expressing nucleotide sequence isolated from the Sargasso Sea
agttccatttcatatgtgggcacctgatgtttatgaaggatctccaacaactgtaactttgttttttacaatagtaccaaagatcgctgctttaactgtatttataagatttttatatgttcctttcttaaatttaattgatcaatggcaaatgataataattttcttatcaatagcttccatggtttttggcgcagttgctgcaatagggcaaaccaatattaaaagactaattgcttatagctctattggacatattggttacacattagcaggactagccacagcttcgaacgatggaattcaaagttcaataatctatatttcaatttacgtagttatgaatttagctcttttctcatgtttattgatgttaagaagaaaagatcaatattatgaggatattgaggatctctcaggattatcaaaaaaccatccacttttatctttatgtttgcttgtaatattgttttctttagcaggtattccgcctctagcaggtttctttgctaagttttatatttttaaagctgtagtagagcaatcaatgtttttcttagctatagtaggattgttatctactgtagttgcagctttttattatttaagaattataaaaataatttactttgataaagaaaaagataaatacgatacggaccatagcttatggttaaaattttcacttacagtttcaacgatattaattcttttatacttcatattcccaagtcagttaatagaagttgtttcaagaattaatattatttaat

SEQ ID NO: 200642 - DNA, 862 bp, Unknown
  Bacterial polypeptide expressing nucleotide sequence isolated from the Sargasso Sea
atggctaaagagaaaaaaacattaaatttaaattttggacctcaacacccagctgcgcacggtgtattgagacttattttagaattagatggtgaagtggttgaacatgccgaccctcatattggattgttgcacagaggtacagaaaagttaattgaaaacaaaacttatcttcaagcattaccttattttgacagacttgattatgttgctccgatgaatcaagaacatgcatttgcgctagcagtagaaaaaattctaaatattgaagttcctattagagctcaatttataagggtgatgttttgtgaaattggaagaatattaagccatattttaaatataactacgcaggcacttgatgttggtgcattaactccttcgctatggggttttgaagaaagagaaactttaatgactttttatgaaagggtttctggttcaagactacatgcaaattattttagaactggtggagttcatcaagatctacctagaggattaagtgatgatatagcactattttgccaaaattttccaaaagttattaacgatttagaaactcttttaactgataatagaatatttaaacaaagaaatgttgatataggaattgtttcaaaacaagatgctttggaatattctttttctggtgtaatgctgagaggatcagggattccgtgggatctaagaaaatctcagccttacgaatgttacgatcaacttgattttaaaatacctataggcaaaaatggagactgctatgacagatatttatgtcgtattgaagaaatgaaagaaagcgtagatattataaacccaatgcttagtaaaaatgccaagtggccctataaaatcactt

SEQ ID NO: 200643 - DNA, 487 bp, Unknown
  Bacterial polypeptide expressing nucleotide sequence isolated from the Sargasso Sea
atgactctaagtagaatttttaaaactatttttttagttgagtttatcaaaggtttgttaatggccattaaagaaatgtttaaaaaatctaaaaccgttaattatccttttgaaaaaggtccaataagccctcgaatgagaggagaacatgctttaagaagatatcccaatggcgaggaaaggtgtatagcctgtaaactttgtgaagcagtttgtcctgcccaagctattacaattgagtcagctgaaagagcagacggcagcaggaagacaacaagatacgatatcgatatgttgaaatgtatttattgtggtttatgccaagagtcgtgtcctgtagaagcaatagttcaaggaccaaattttgagtttgcaacagaaacaagagaagaactttattacaataaagaaaaactattagacaatggagatagatgggagtcagtcttggcgaagaatattaagctagataaaccttatagataaa

SEQ ID NO: 200644 - DNA, 751 bp, Unknown
  Bacterial polypeptide expressing nucleotide sequence isolated from the Sargasso Sea
atgacaaaaaaaattaaaaatttaaatctaaattttggacctcaacatcctgctgctcatggagtattaaggcttatacttgaattagacggcgaggtagtggaaaaagcagacccgcatattgggttattacatagaggaacggaaaaacttatagaaaataaaacctatatgcaagccgtaccatattttgatcgtcttgattatgtagctccaatgaaccaagaacatgcttttgctttggctatcgaaaaaatcttaggaattgatgtgcctataagagctcaatatatcagagttatgttttgtgagattggcagaattttaagtcatattttaaatgttacaactcaagcattagatgttggtgctctaactccctctttatggggatttgaagaaagagaaactctgatgacattttatgagcgagcatcaggatctagattacatgcaaattattttagagctggtggtgttcatcaagatttgccagttggactagagaaagacattgcaaaattttgtgaaacttttccaaaggttataaatgatttagaaaaccttttgactgataatcgaatatttaagcaaagaaatgtagatattggaattgttacaaaagaggatgcacttgattattcatttagtggagtgatgataaggggctcgggtgttccatgggatttaagaaaatcacaaccatatgattgctatgatcaattagagtttaagatacctatggcaagaa

SEQ ID NO: 200645 - DNA, 360 bp, Unknown
  Bacterial polypeptide expressing nucleotide sequence isolated from the Sargasso Sea
aatgttttcaataataaaattctttaaatcatttgttctttttgagctttttttaggaatgtatttaactttaaaatatatgttcaaaagaaaagttactattaattatcctcatgaaaaagggcctcttagtcctcgatttagaggtgagcatgctttgagacgttacccaaatggtgaagaaaggtgtattgcatgtaaattatgtgaagctgtatgtcctgctcaagcaataactattgaggctgagccacgaattgatggaagtagaagaacaacaaaatatgatattgatatgactaaatgtatttattgtggattgtgtgaagaatcatgcccagtagatgcgatagtggaagg

SEQ ID NO: 200646 - DNA, 694 bp, Unknown
  Bacterial polypeptide expressing nucleotide sequence isolated from the Sargasso Sea
ttgttcttacttgttcctttgctagtttttgttgcaatggtagtttggcttgatagacgtgtttgggctttcgttcaaaaaagacgtggaccaaatgttgttgggccgttcggtttatttcaatctttagctgatgctttaaaatatatatttaaagaaattattatcccagcaagctcaaataaagttatttttgtcctagcacctatagttacaatgactcttgcattaacagcatgggcagtaattccttttggggaaaatcaggtcttggcaaatatcaatgtaggtatactgtatttatttgcggtttcatcgcttggtgtttatggaattataatgggtggatgggcttctaattcaaaatatccatttttaggctcaataagatctgccgcacaaatgatttcatacgaagtatcaattggagtaattattataaatgttttgttatgtgttggatcgttaaaccttaaagatattgttttagctcaacaaaatatttggtttataattccactgtttccaatgtttgttattttttttatatcagcgctagcagaaacaaatagacctccatttgatttacccgaagctgaagctgaattagtggcagggtatcaaacagaatattctggaatgatgtatgctatgtttaggctaggtgaatacgcaaacatattattaatgtgtg

SEQ ID NO: 200647 - DNA, 661 bp, Unknown
  Bacterial polypeptide expressing nucleotide sequence isolated from the Sargasso Sea
aatgaaagaagtagagttaaatacaacaacaattaactttgggcctcagcatcctgctgcacatggtgtcttacgtttagttgttgaattagaaggtgaagtagttcaaagagcagaaccacacattggattactacatagaggaactgaaaaattaattgaatataaaacttatcttcaggcagttccttattttgatagattggattacgtttcaccaatgtgccaagagcatgcatttgcattagcaactgaaaatcttttaggtatagatgttcctgaaagagccaaatatgttcgtgtaatttttgctgaaattacaagaatacttaatcatttattaaatatacctgcatatgctgctgacataggtgcggttacgccatttctgtggtgttttgaagaaagagaaaaacttttagaatttcacgaagcagtatctggtgcaagatttcatgcagcctattttaggcctggcggtgttcaccaagacatgccagaaggtatggaagagaaattatttgaacattttaaaactcttccaaaatttattgatgatcttgaaagcttgcttactaataatagaatactaagacaaaggtcagtagacattggaattatttcaaaatctgaagcaattgaatggggctgctcaggtcct

SEQ ID NO: 200648 - DNA, 977 bp, Unknown
  Bacterial polypeptide expressing nucleotide sequence isolated from the Sargasso Sea
atataatagagaccagcttaaatcttcagaggcaggtttaaaatattttgtcttaagtgcgctatcttcaggtttattattatatgggtgttctttggtttatggattttcaggatcaacaaactttgatgtaatttcaaatcaacttaattctaatgaatatgttttgacttttggaattgtatttattttagttggattagcatttaaaatttctgctgttccatttcatatgtgggcgcctgatgtttatgagggatctccaactactgtcacactattctttactatagtgccaaaaattgcagctttaactgtttttataagatttttgtatgttccttttttaaatttaattgatcaatggcaaatgataatagtttttttatcgattgcttccatggttttcggagcagttgcagcaattggacaaactaatattaaaagacttatagcttatagctcaatcggacatgttggttatactttagctggtttagcaacagcatcaaacgagggaattcaaagttcaattatctatatatcgatttatgtgattatgaatttagcaatattttcatgtttgttaatgttgaaaagaaaagatcaatactatgaagatattgaagatctctctggtttgtctaaaaatcatccattattatcaatatgtttacttataattttattctctttagcgggtattccaccattagcaggtttctttgcaaagttttatgtatttaaagcagttttagagcaatccatgtacttcttggctattgtaggattattgtcaacagtagttgctgctttctactacttgagaataattaaaataatttattttgataaagaaaaagaaaagtatgacagtgatcatagtctatggttaaaattttcattgacagtttcaactatattaattcttttatacttcatattccccagtcagttaatagaaagttgtatcaaga

SEQ ID NO: 200649 - DNA, 271 bp, Unknown
  Bacterial polypeptide expressing nucleotide sequence isolated from the Sargasso Sea
atgaaattttcaagaattattaaaactatttttttagtagaatttattcgtgctttaattattgcaattaaagaaatttttaaaccaaaaaaaactataaattacccatttgaaaagggaaaaattagtcctagatttagaggagagcatgcacttcgtagatacccaaatggagaagaaagatgtattgcttgcaaattatgtgaagctgtttgtccagctcaggcaattacaattgagtcaactgaaagaaatgacggtagtagaaaaa

SEQ ID NO: 200650 - DNA, 856 bp, Unknown
  Bacterial polypeptide expressing nucleotide sequence isolated from the Sargasso Sea
atgattgaatatttaattattttactatctgaaatatataaaatttcaattttattaattccagtattaacagcagttgcaatgatagtctggcttgatagaagagtttgggcatttgttcaaaaaagaagaggacccaatgttgttggtccatttggtctatttcaatctttagctgatgctttaaaatatttatttaaagaaataataattccggcaagctcaaataaaattatatttattctagctccaattgtcactatgacgttagctcttgtagcttgggcggtaataccatttagtgaaacattcgttattgctgatattaatgttggtatactttatttattcgcagtttcttcattaggcgtttatggaattataatgggcggttgggcatcaaattctaaatatccatttttaggatcaataagatcagcagcacaaatggtatcttatgaagtttctataggaataattattattaatgttttactttgtgtaggttcattaaatttaagtgatattgtaaaagcccaacaaaatctttggttcattatacctttatttccaatgtttgttattttttttatttctgcattggctgaaacaaatagacctccattcgatcttcctgaagctgaagctgaattggttgcgggatatcaaaccgaatattcaggaatgatgtatgcaatgttttggcttggcgagtatgcaaatattttattaatgtgcgctatgggttcaatattatttttaggtggctggttatcaccaatagatctttttccttttaatataataccaggatcattatggatgatatttaaaattttatttttgtttattttat

SEQ ID NO: 200651 - DNA, 211 bp, Unknown
  Bacterial polypeptide expressing nucleotide sequence isolated from the Sargasso Sea
aatgattctaaaaagtcatgcagcccgcactgtattactttccgaactttggttcgggatgtacgtcacatttaaggcaatgttcaagcgccgagtaacgttgaactatccctacgagaagggttacctcagtccccgatttcggggcgaacacgcactgcggcgttacgccaacggcgaagagcgctgtattgcttgcaaactttgcgag

SEQ ID NO: 200652 - DNA, 220 bp, Unknown
  Bacterial polypeptide expressing nucleotide sequence isolated from the Sargasso Sea
tttacgatcaatgccggacccaggtatgttatatccatgggtagctgtgcaaatggtggcggatattatcattattcatattctgttgttagaggttgtgacagaataattccagttgatgtttatgtgccaggatgtccaccttcagcagaagcattactttacgggattttgcaactacaaaaaaaaataagaagagaaggcaatttagaaagataaa

SEQ ID NO: 200653 - DNA, 403 bp, Unknown
  Bacterial polypeptide expressing nucleotide sequence isolated from the Sargasso Sea
ttgtttttagtttctgtatttcttccgcttttaagtttcttagtttgtattttttttcaggacagcctttcaaaaaaacatttaaattttttttcatgtttaatgatgattattgcaactattttttctttcttttcgttgatacttgttaagattaatggcgagtcagcaattattttaagtagatggattgactccggtaacttgagtttagattggtctctccagctaaaccttctcacaacgtcaatggtattaatggttaatttagtatctactttaattcatatttattctgtaggttacatggaaaaagatccaaagaaaattttatttatggcgtacttgagcctttttacatttttcatgctctttctagtaacatcatctaaccttcttcaac

SEQ ID NO: 200654 - DNA, 557 bp, Unknown
  Bacterial polypeptide expressing nucleotide sequence isolated from the Sargasso Sea
attgagtgaaactgaaataaagcctattactatgaattttggtcctcaacatcctgcggcgcatggtgtgttaagacttgtttttgagatggatggtgaaataataaaaagagcagacccgcatattggtcttttacatagaggcacagaaaaacttatagaaaacaagacctaccttcaagctctgccatattttgacagacttgattatgtctctccaatgaatcaagaacatgcttggtccttagccgtagaaaaggtgttaggcattaaagtaccagaaagaggtcagtatattagggttttgttttgtgaaataggaagaattttaaaccatattttaaaccttacagcttttgctattgatgttggggctatgacaccacttttatgggggtttgaagaaagagaaattatgttaggtttttatgaaagagcctcaggggcaaggttccatgctgcgtactttagaccaggtggtgtgcatcaagatatccctgaagatttacttgatgatatacataagtggttaaaaaactttcctaattttataaatg

SEQ ID NO: 200655 - DNA, 172 bp, Unknown
  Bacterial polypeptide expressing nucleotide sequence isolated from the Sargasso Sea
tatgaatatagataatagatatgataaaattccaaatgaatttaaacaattagctaaagattttagtaaaaatggttttataactacttctttggataacttaattaattggtcacgtgctggttcacttcattggatgacatttggtctagcttgttgtgcagtgaaatga

SEQ ID NO: 200656 - DNA, 826 bp, Unknown
  Bacterial polypeptide expressing nucleotide sequence isolated from the Sargasso Sea
atggaaaatttaaatttagttttacctgaaatatttatttcactttcaataatgtttttacttgttttgggtgtttttaaaaaagatagttcaaaaatcactttcaatttatctttgtttgcaattttaattacagcaacaataacaataaatgaaacgttctcagttagtagggaaactttgtttaatgaaagtgttgtgattgacagtatgtcttcactaatgaaaattataactttaattggtggttttttagttttagttatttcatcaagctatttaaaaacatttaaaatatataatatcgaatatcctgttctaatcttgagttctattcttggaatgatggtgatgatcagttcaaatgatttaattgttttttatatgggcttagaattacaatcattagctctttacgtattagcaacatataatagagatcagctaaaatcatccgaagctggtttgaaatattttgttttaagtgcattatcttcaggattattattatacggatgctcattagtatacggtttttctggttcaactaattttgatataatatcaaatcaattaaattctaatgaatatgttttaacatttggaattgtatttatcttagttggtttagcatttaaaatttctgctgttccctttcatatgtgggcacctgatgtttacgaagggtcaccaacaactgtaactttattttttacaatagtaccaaagatcgctgctttgactgtatttataagatttttatatgttccttttttaaatttaattgatcaatggcaaatgataataattttcttgtcaattgctt

SEQ ID NO: 200657 - DNA, 433 bp, Unknown
  Bacterial polypeptide expressing nucleotide sequence isolated from the Sargasso Sea
ttgataattgctctcaaagaactttttaaatcaaaaaaaactatcaactatccctttgaaaagggaaaaataagtccaagatttcgaggtgaacatgctttaaggcggtatcctaatggtgaagaaagatgtatagcatgtaagttatgcgaagctgtatgtcccgctcaagctattacaatcgagtccagtcaacgtgaagatggaagtcgtaaaactactagatatgatatagatatgatgaagtgtatttattgtggtttatgtgaggagtcctgtcctgtagatgcaatcgtgcaaggtcctaattttgaattttctacagaaacaagagaagagctttattatactaaagaaaaattattggataacggagatagatgggaaaacgtgttagctgcaaatataaaagctgataatccttatagataaa

SEQ ID NO: 200658 - DNA, 184 bp, Unknown
  Bacterial polypeptide expressing nucleotide sequence isolated from the Sargasso Sea
aatgcttgcggaatttttaaaagattatctcccgataatattatttttgataatagctctaggcttaagtcttgcctttgttgcaattaattatatagctgctccaagtaaaccagatcctgagaaactttcggcttatgagtgcgggtttgaacctttcaatgactctagaatggaatttgat

SEQ ID NO: 200659 - DNA, 465 bp, Unknown
  Bacterial polypeptide expressing nucleotide sequence isolated from the Sargasso Sea
aatgaattttcctattctttcatctttaatattattaccaatagttggtgctttatttttattttttaccaaagataaagagggaaataatttaactgctaaatatgttgctttatttacaactgtagttaattttttaatttcgatttatctttggatttcttttgaccaatcaacgtctagttttcaatttgtagaggatagaacatggattgaaggatttattaattataaagtgggcgtagatggtatttcaattttatttataatattaacaacatttataactcccctttgtataatatctgtaaataattctgttaaaaatagattaagagattttttaattgcaattctaatcatggaaagtttcatgattggtgttttctgtgcacttgatttagttgtattctatttattttttgaagctggattaataccaatgtttttaattatcggtatctt

SEQ ID NO: 200660 - DNA, 928 bp, Unknown
  Bacterial polypeptide expressing nucleotide sequence isolated from the Sargasso Sea
tgttcttagcgccttatcatcaggtttgttattgtatggatgttcgttaacttatgggttttcagaaagtacaaactttgaccaaatactcattaattctagggaatttaattatggtactacatttggaatagtctttattttagttggtcttgcatttaaaatatcagctgtaccttttcatatgtgggcaccagatgtttatcaaggctctccaacttctgtaacgttattctttgctatactgccaaaaatagcagcactatctgtattcattaagtttttatatacgccttttgctaatatgaatgatcagtggcagactataattgtatttatatcaattgcttcaatgatatttggtgcagtagctgccataggtcaaaaaaatttgaaaagactaattgcatacagttcaattagtcacatgggttatgctttggctggattggctacagttagtaatcaaggaatacaaagttcaattacttacatatcaatttatttagtaatgaatttagccttttttagctgcttatttatgcttaaaagaaatgagaaatattatgaaaatatagatgacttatcaggactttctaaaaaacatccaattttatctttctcattattgatagttttattttctttggctggaatccctccgctagcaggtttctttgcaaagttttatgtattcttagctgttatagaacaatctatgtattttttagcaattgttggattgttggcaactgttgttgcagctttttattacctaagaataataaaaattatatatttcgatccagaaaaagaggaatatgaaacgtcacataatttaggattaaaaataacattggctatctcaacaatatttatattagcatattttatatacccaagcggtataacagaaatagtatcttaa

SEQ ID NO: 200661 - DNA, 453 bp, Unknown
  Bacterial polypeptide expressing nucleotide sequence isolated from the Sargasso Sea
aatgtctgagaattttaaacctgtaactcttaactttggaccccaacatcctgccgctcatggagttttaagacttcttgtacaattagaaggggaggtagttaataaagccgaacctcacattggacttttgcatagaggaactgaaaaattaattgaacagaaaacttatactcaagctattccatattttgatcgtcttgattatgtctcaccaatgtgtcaagaacatgccttcgctttagctgttgagaatttattaaatattgaagctcctaaacgagctcaatacatcagagttatgtttgcagaagtcactaggatactaaatcatttattaaatattccagcatttgctatggatataggtgctgctactccaatgctgtgggcttttgaagaaagagaaaaaaatgttggagttccacgaagctgtatctggtgcaagatttc

SEQ ID NO: 200662 - DNA, 571 bp, Unknown
  Bacterial polypeptide expressing nucleotide sequence isolated from the Sargasso Sea
tcatacttggcttcctgacgctcatggagaggctacagcgccagttcatatgctcttagctggcattttattgaagatgggggggtatgctcttttaagatttaatgcccaattattacctgttgctcatgctcaatttgctccattactaatagttcttggagtagtaaatataatttatgctgcattaacttcttttgcgcaaagaaatctcaaaagaaaaattgcttatagttctataagtcatatgggctttgtccttattggaataggaagttttagtagcctaggaacaagcggggcgatgctacaaatggttagtcatggattgattggtgctagtttattttttcttgttggagctacctatgacagaacaaagactcttaagcttgatgaaatgagtggtgtaggacaaaaaatgagaatcatgtttgctttatggactgcatgctcgcttgcttcacttgctttgccaggtatgagtggatttgtttccgaattaatggtatttacgggatttgttaccgatgaagtttatacactacctttcaggataattatggcctct

SEQ ID NO: 200663 - DNA, 764 bp, Unknown
  Bacterial polypeptide expressing nucleotide sequence isolated from the Sargasso Sea
ttatgctctattgtgtattatggtatttggtatgtttttgatggctagtgcaattgatttgataacggtttatctatctattgaagttgtatcgctaatgtcatttattttagctggttatcttaaaaatgatcctagatcaaatgaagcttctttaaaatatgttatttatggcgcattttcatcagggataatgttatatggtttaagtattatttttggcctcacaggaacaactaaattttttgcaattcgagatgcaattgctactttggactcatcatcaaatcttgccttaaccttatcaaccatatttgttttagctggattcggttacaaaatatcggctgttccatttcatttttggacacctgatgtatatgaaggttcacccactcctattactgcatatttatctgttgcgccaaaagcagcaggttttgcattaatgataagattctttaatcaagttttaattgaaagcgattctctcagtacgataggatggtatgcggatgttagttttgcctggccaggattattaggtgttatttctgttgtaacaatgactatgggtaatttagttgctattcaacaaaacagtgtaaaaagaatgcttgcctattcaagtattgctcatgctggttatatgttgatggtgtttcctaccatttcttctgaaggggtttttgcagtaatgatttatttagtcatgtatctattcatgaatttaggagcatttttttgtcctgatatatgtagcc

SEQ ID NO: 200664 - DNA, 487 bp, Unknown
  Bacterial polypeptide expressing nucleotide sequence isolated from the Sargasso Sea
atgaattttagtaggctattaaagactatatttcttgttgagtttatctctgggttgtatgtggcagtgagagaattatttagaaaatctaaaacaataaattatccttttgaaaagggacgaataagtcctagaatgaggggtgaacatgcattaagaagatatcctaatggagaggagagatgtattgcttgtaaattgtgcgaagcagtctgtccagctcaagctatcacgattgagtcttcagagagatcagatggcagtagaaaaactacacgttacgacattgacatgctaaaatgtatatactgtgggttatgtcaagagtcatgtccagttgatgctatagtgcaaggaccaaattttgaatttgctaccgaaactagagaagagctttattacaataaagaaaaacttttagataatggagatagatgggagtcagttatagcaaaaaatatcaaactggataaaccttacagataaa

SEQ ID NO: 200665 - DNA, 886 bp, Unknown
  Bacterial polypeptide expressing nucleotide sequence isolated from the Sargasso Sea
tgaaacaataagtgttagtgaggaaaagctctttaataatagtgtgataattgattatttatcatcgtttatgaagataataactttattagctgctttcttggttttaataatttcatcagcctatcttagaacattaaagatttttaagattgaatatccaattctaatcttaagctcagttttgggtatgatgataatgataagttctaatgatttaattgtattttacatggcgttagagctacagtcgttagctttatatgttttagctacatttaatagagataatattaaatcttcagaggcaggattaaaatactttgttttaagtgccttatcttcaggtttgttattgtatggatgctcattaatatatggttttactggatcaaccaatttcaatgtaatcgctgcccaactaaactcaaatgaatatgctttaacatttggtatcgtttttatattagttggtttagcgtttaagatttcagctgttccatttcatatgtgggcacctgatgtgtatgaaggatcaccaacttcagtaacattatttttcactatggttcctaaaatagcagcattatcagtttttataagatttttatatgttccttttttaaatttaattgaacagtggcaaatgattttaatttttttatcaatcgcctcaatgctttttggagctgttgcagcgataggacaaactaatttaaaaagattagtagcatacagctcaataggtcatgttggttatgctttggcaggcttagcaactggaactagcgacggaatacaaagctcagtaatctatataacgatttatatattaatgaatcttggacttttttcatgcttattaatgatgaaacgaaacaatgaa

SEQ ID NO: 200666 - DNA, 829 bp, Unknown
  Bacterial polypeptide expressing nucleotide sequence isolated from the Sargasso Sea
aatggactcttatttttcaatattatttactgaagtttataaaatactctttctcttagttcctgttttggtctctgtagcaatgatagtttggcttgatagaagagtttgggccttcgttcaaaaaagaagaggacccaatgtagttggcccattcggtttattccaatcattagctgatgcattaaaatatatctttaaagaaataataatacccgcaagctcaaacaaacttgtatttgtattagctccagtcgtgactatgacattagcattaatatcatgggctgtaataccatttggcgaagattttgttctagctgacatcaatgtaggtattttatatcttttcgcagtttcatcattaggtgtatatggaataattatgggaggatgggcctccaattctaaatacccttttttaggtgcaatcagatctgctgcacaaatggtatcatatgaagtttcaataggagttataattatcaacgttctattatgtgttggatctttaaacttaagtgacattgttatggcacaacaaaatttatggtttgtaattcctttgtttcctatgtttgtaattttttttatttctgcattagcagaaacaaatcgtcctccatttgatttaccagaagcagaagcagaattagtggcaggatatcaaactgaatattcaggaatgatgtatgctatgttttggttaggagagtatgcaaatattttgttaatgtgtgcaatgggagcagttttatttttgggtggttggttatctccaaatagatatcttccccatttaatgctattcccaggtcccattttggtt

SEQ ID NO: 200667 - DNA, 902 bp, Unknown
  Bacterial polypeptide expressing nucleotide sequence isolated from the Sargasso Sea
tcaacttggttatatgatgctcgcaatgggttgtggagcaccagtagcaggaatttttcatttagtgactcatgcttgctttaaagcaatgctatttttgggatctggttcagtaatacatgctatggaagaggtagttggccatcagccagtattagcccaagatatgagattgatgggaggtttacgaaaaaaaatgccttatacagcaacaacatttttaataggttgtgtagcaattagtggaattcccccattggcaggtttttggagtaaagacgagatactcggaaatgcttttatatcatttccagctttttggtttgtaggacttctaacagcaggtatgactgctttttatatgtttaggctttatttcttgacatttgaaggagatttcagaggggagaataaagaattgcaaaaagagcttcttgtagcctccaaaacaaacctagatgatgaaaatgaagaggagcatgaagaacatggctttattcatgagtcaccctggtcaatgacatttcccttggtatttctagctgtaccgtctgtaataatcggttttatgggacttccatgggatagcaaaattgcaaatttattggatcctgaagaagcagagactgctgcaaaagccttcgaattaaaagaatttttgcctttagcacttgcgtcagtgcttattgcatctgctggaatcattatcgcttatcaggcatattttgtgaaaaaaattaatttgtcagttttatttgccgaaaagtttccaagcatcaaccgatttttatctaataaatggtacttagatgatattaatgaaaaactttttgttaagggtagtagaaaacttgctaaagaagttttagaggttgattctaaggttgttgatggtgttgtaa

SEQ ID NO: 200668 - DNA, 751 bp, Unknown
  Bacterial polypeptide expressing nucleotide sequence isolated from the Sargasso Sea
tgctttactggttttcattactctctgggcttttattctaaagatgcaattattgaatttgcttatttaaagggaaatactttaggatattatgcagctagcataggaatatttactgccttattaacctctatttattcatggagacttttttttaaaacttttcatggagattttaataaccagactattagtattgataaaattcatgaatctccaatggtaattacaattcctcttgttattctagcagttggctcgcttctcacaggctatttttttaaagatttatttataagtcatgaggaaagttataaattttggaattcttctatattttttcttgaacaattgagcaaagaccatccacctaaatggtttttatttttgacaccatcattggtagtgctttctatacctttggcttattttttatttgttaaacgaaaagatttactaataaatatcgtagagggcaatcaaccactttataactttttaaaaaataaatggtattttgatgaagtttacgaatatatatttgtaagaagcctaaaaaaaattggaatttatttttggaaaaaaattgacggactcataattgatagatttggtcctgatggaatatcgaatgtaataaaaactctgtcaaataaagcagtcaagtttcaaagtggttatatttatcaatatgcatttataatgcttgttggattttctgctttattaacctatttaataattaaataat

SEQ ID NO: 200669 - DNA, 434 bp, Unknown
  Bacterial polypeptide expressing nucleotide sequence isolated from the Sargasso Sea
aatgacaaaaaaaattaaaaatttaaatttaaattttggtcctcaacatcctgcggcccatggtgttctaagattaattctagagcttgatggagaggtggttgagaaggcagatccacatatcggtttgcttcatagaggaacagaaaagcttattgaaaataaaacctatatgcaggcagttccttattttgatcgtttagattatgtagcaccaatgaatcaagaacatgcttttgcgttagcagttgaaaaaatacttaaaatagatgttccaattagagcacaatacataagagttatgttttgtgaaattggcagaatcttaagtcatattttaaatgttacaacacaggcacttgatgttggtgcacttacaccttctctttggggttttgaagaaagagaaacgttaatgacattttatgaaagag

SEQ ID NO: 200670 - DNA, 265 bp, Unknown
  Bacterial polypeptide expressing nucleotide sequence isolated from the Sargasso Sea
gatgactaaaacagaaaattatactcttaactttggtcctcagcatccagcagcccatggtgttttaagattagttcttgaacttgatggggaaattgttgaaagagcagatccacatataggcttattacatagaggaaccgaaaaacttattgaaaataaaacttatatccaagctttaccatattttgataggcttgattatgttttcgcaatgtgtcaggagcatgcttatgcactggcgattgaaaattatacaaaatag

SEQ ID NO: 200671 - DNA, 178 bp, Unknown
  Bacterial polypeptide expressing nucleotide sequence isolated from the Sargasso Sea
aatggctaaacaaagaaaaaagttaaatttaaattttggacctcagcatcctgctgcacatggtgttttaaggttgatattagagttagatggtgaggttgtggaaaaagcagatccacatataggtcttctccatagaggaacagaaaaattaatagaatataaaacttatagtcaa

SEQ ID NO: 200672 - DNA, 253 bp, Unknown
  Bacterial polypeptide expressing nucleotide sequence isolated from the Sargasso Sea
attatttttaggcggatggcttccaccagtagattctgaaatatttgcttttattccaagtccattttggttaatttttaaaattcttttcttatttattctttttgcattaattaaagcaattgttccaagatataggtatgaccaattaatgaaattgggttggaaaatatttttacccttttcattaatatgggttattttaacagcgggttatctgctatattttaatatgttgccaggacaaatatga

SEQ ID NO: 200673 - DNA, 430 bp, Unknown
  Bacterial polypeptide expressing nucleotide sequence isolated from the Sargasso Sea
atggttaaagaaaaaaaaacaataaatttaaactttggacctcagcatcctgctgcacatggtgtgcttagacttattttagaactagacggtgaagttgtagagcatgctgatccgcatattggcttgttacacaggggcacagaaaagttaattgaaaacaaaacttatcttcaagcattaccatattttgatagactagattatgttgccccaatgaatcaagaacatgcatttgcacttgctgtagaaaaaatattaaatattgaagttcctataagagctcaatttataagagtaatattttgcgaaattggaagaatattaagtcatattttaaatataacaactcaagctcttgatgttggagcattaactccttcactgtggggttttgaggaaagagaaacattaatgactttttatgaaa

SEQ ID NO: 200674 - DNA, 358 bp, Unknown
  Bacterial polypeptide expressing nucleotide sequence isolated from the Sargasso Sea
gatggtaaaaaaaactaaatcattaagtcttaactttggaccacagcaccctgccgctcacggtgttttaagattgatattggaattagatggagaggttgtagaaaaagcagacccgcatattggtttacttcacagagggacagaaaaattaatagaacaaaaaacctacacacaagccttaccttattttgacagactggattatgtagctccaatgaaccaagagcatgcatttgctttagctgcagaaaaactattaaatgttgaagtacccataagagctaaatacataagagtaatattttgtgaaataggaagaattttaagtcatatattaaatgttacaactcaagcc

SEQ ID NO: 200675 - DNA, 625 bp, Unknown
  Bacterial polypeptide expressing nucleotide sequence isolated from the Sargasso Sea
aatgacgaagcaatcaaaaactttaaatttaaattttggccctcaacacccagctgctcatggtgttttaaggttaatacttgaacttgacggcgaagttgtagaaaaggcagatcctcatattggtttacttcatagaggaactgaaaaattaatagaaagcaaaacatatatccaggctattccttattttgatagattggattatgtggcaccaatgaatcaagaacatgcttttgctttagcaatagaaaaaattttaaaaatagaagttcctattagagcgcagtttataagggttatgttttgtgaaataggaagaattctaagtcatatattaaacataaccactcatgctttagatgttggagctttaacaccttctctttggggatttgaggaaagagaaactctaatgactttttatgagagagtttcagggtcaagacttcatgctaactattttagagcaggtggtgttcatcaagatttacccaggggtctagatgatgatatttcaaaatttgctaacaagtttccaaaaattattgatgatttagaaaccttgctaacggataatagaatatttaaacaaagaaatgttgatataggtgttgttacaaag

SEQ ID NO: 200676 - DNA, 859 bp, Unknown
  Bacterial polypeptide expressing nucleotide sequence isolated from the Sargasso Sea
atgacaaaaaaaattaaaaatttaaatttaaactttggaccacaacatcctgctgcacatggagttttaaggttaattctagaattggatggtgaggttgttgaaaaagccgatcctcatattggtttattgcatagaggtactgaaaaattaattgaaaacaaaacttatatgcaagctgtaccttattttgatcgtttagattatgtagctccgatgaatcaagaacatgcgtttgcattagcagttgagaaaattctaaaaatagatgttcctattagagctcaattcataagagttatattttgtgagattggaagaattttaagtcacatattaaatgttacgacgcaagcaatggatgtcggggctttaacaccaactttatggggatttgaagaaagagaaaaattaatgggtttttatgagagagtgtctggttctaggcttcatgcaaactattttagagctggtggagtccatcaagatttacctcaaggactcgaggaagatattgctgagttttgtgagagttttccaaaaataattaatgatttagaaagtttgctaactgataacagaatttttaaacaacgtaacgttgatattggtgtagttaccaaacaagatgcactagattattcattttccggagtgatgataagaggatcaggagttccatgggatttaagaaaatcccaaccttatgattgttatgaaaatttagatttcaaagtgccagtaggaaaaaatggagattgttatgatagatatttatgtcgaattgaggaaatgaaagagagtgtatctataataaaacaatgcttattaaaaatggaaaaaggaccaattaaatctt

SEQ ID NO: 200677 - DNA, 607 bp, Unknown
  Bacterial polypeptide expressing nucleotide sequence isolated from the Sargasso Sea
cttgatatctattttagtggtcattgtgcctttatttttaatagttgcgtacgtcacttattcggaaagaaaaataatcggatttatgcaatcaagaatgggtccgatgagagtaggcccttctggtcttttgcaaccgattgcagatgttctcaagctggtatcaaaagaaataataattcctagtaatgctaacaaaggaatttttctaacagcgcctatgcttatgctcataccctctttattagtttggtctgtaataccactttcagaatacttcattatttctaacatcaatgcagggttattatttattttagcacttacatcattaagtgtttatggtgtgatattagctggatgggcttctaattctaaatatgcattcctaggttctatgaggtcagcggcacaaataattgcatatgagatcgcaatgggttttgccttggttggagtgctgatgctttctggaagtctaaacttgcaaaatattatttacgctcaatctggaagtctatttaattggtattggctgcctttgtttccattattcctaatatactttattgctggagttgcagaaactaatagagcgccattttga

SEQ ID NO: 200678 - DNA, 355 bp, Unknown
  Bacterial polypeptide expressing nucleotide sequence isolated from the Sargasso Sea
tatgaaattaggaagactattaaaaacaatatttatgttagattttgttaaaggtctactaattgcaattaaagaagtttttaaatcaaaaaaaactataaattatccatttgaaaaaggccaggttagtccaagagctaggggtgaacatgctttaagaagatatcctaatggagaagaaagatgtattgcttgtaaattatgtgaagctgtttgtcctgctcaagcaattacaattgagtcttcagaaagagaagatggtagtagaaagactacaagatatgacattgatatgttaaaatgtatttattgtggtctttgtgaagaatcgtgtcctgtagatgcaattgttcaa

SEQ ID NO: 200679 - DNA, 736 bp, Unknown
  Bacterial polypeptide expressing nucleotide sequence isolated from the Sargasso Sea
atggcaaaagaaacaaaaaaattaaatttaaattttggacctcaacatcctgcagctcatggtgttttaagattaattttagaacttgatggtgaagttgttgaaaaagctgacccccacataggattgttgcatagaggtactgaaaaattaattgaatataaaacttatgcccaagcagtaccatattttgatagacttgattatgtcgctccaatgaaccaagaacatgcatttgcattagctatagaaaaaattttaaaaataaatgttccaataagagctcaatttataagagtaatattttgtgaaattggaagaattttaagtcatttattaaatgttactactcaagctatggatgttggagctttaactccaacattatggggatttgaagaaagagaaacgttaatgggtttttacgaaagagtttccggttcaagattacacgccaactatttcagagcaggtggagtacatcaagatttaccaagaggacttgaagaagatattttaaaattttgtaaaaagtttcctaaaattatagatgatcttgaaacattgctaactgacaatagaatttttaaacaaagaaatgttgatataggagttgtctcaaagcaagacgcgctagattattctttttcaggtgtaatgttaagaggttcaggaatttcttgggatttacgtaaatctcaatcttacgaatgctacgatcaattagagtttgata

SEQ ID NO: 200680 - DNA, 731 bp, Unknown
  Bacterial polypeptide expressing nucleotide sequence isolated from the Sargasso Sea
atatggttttataagattttcagttggtatgtttccaattgcatcagaatattttaccccattaattttttcattaagtgtgatcgcaataatttatacttcattagttgccctcatgcaggacgatatgaaaaaattaattgcttattcatcgattgcccacatgggttttgtgaccttgggaatttttacatttaataaacaagggatcgaggggagtattgttcaaatgtttagtcatggacttatttccgcagcactttttttatgtgttggagttctttatgacagaacacattctagattaataaaatcatacgggggtatagtgcacgttttacctaagtattcttttctttttatggtttttgttttagctactttaggattaccaggaacaagcggatttgttggtgaatttttaattttagttggggctttcaaagttaacatagtagtagctattatggcaagtataggggtaattcttgcagcggcctatatactttggctgtataagagagtggtatttgggaaattagataatgtccatttaaaaaaaataaaagatgtaaattttaatgaaggctctgttcttcttatacttggtattgtaattttgttttttggattttatccagaaccactttttgaaactgtaagtgtttctgttaataatctaataaataattataacctagaaataggaaaaaatactgtgttacattaat

SEQ ID NO: 200681 - DNA, 931 bp, Unknown
  Bacterial polypeptide expressing nucleotide sequence isolated from the Sargasso Sea
gatctaatagtattttatataggacttgaattacaatctcttgctttatatgtattagcatcttttaatagagataatgtactttcatctgagtcaggtttaaaatattttgttcttagcgccttatcatcaggcttgctcttgtatggttgttctttagtttatggcttttcctcatcaactaatttttctcaaatttcatttaattatgaccagtcaacacaaggcataatatttggaatggtgtttattttagttggcttagcatttaaaatttctgctgttccatttcatatgtgggctccagacgtatatcaaggatccccaacatcagttacattattttttgcaattttgccaaaaattgctgcactaacagtatttataagatttttatatactccattcgttaatttaattgatcaatggcaagcaataattatttttttatcaattgcctccatgctttttggtgctgtggcagctattggacaaaaaaaccttaagagactgattgcatatagttctataagtcatatgggttatgcattagctggtttaacaactggcacgaatgaaggtatacaaagttcagtatcttatatttcaatatatttagtgatgaatctagcatttttcagttgtatttttatgttaaaacgtgaggataaatattatgaaagtatagatgacttatctggattatcaaaaaatcatccactattatcattttctttattgatagtacttttttcattagctggaataccacctttagctggattttttgcaaaattttatgtctttatggctgtaattgaacaatctatgtttttcttagcaatagtaggtttattggcaacagttgttgctgcattatattatttaagaattattaaagtaatatattttgataatgaagttgagaaat

SEQ ID NO: 200682 - DNA, 880 bp, Unknown
  Bacterial polypeptide expressing nucleotide sequence isolated from the Sargasso Sea
aaaataatgagtaaacagacaaagacacttaatctaaattttggccctcaacatccagctgcgcacggtgttttaagattgatattagaattggatggagaaattgtagaaaaagctgatccccatattggcttgcttcatagaggcacagaaaaattaattgaaaacaaaacgtattctcaagcaataccttattttgatagacttgattatgtagctccaatgaatcaagaacatgcttttgctttggccatcgaaaaaattttagatattgaagttccaattagaggtcaatacattagagttattttttgtgagattggaagaattttaagccacatactaaacatcactacacaagctttggacgttggcgcattaactccttcattgtggggttttgaggaacgagaaaaacttatggaattttatgaaagagtttcaggttcaagattgcatgccaactattttagaccaggaggcgttcatcaagacttaccaagaggacttgacactgatattttaaaattttgtaatgagttcccaaaaataatcgacgatttagaaactttacttactgataacagaatttttaaacaaagaaatgttgatattggaatagtttcaagagatgatgcattggactattcattctcaggtgtaatgatgagaggttcaggcgtaccttgggatttaagaaaatctcaaccttatgattgttatgaacaattatcatttaaggtgccggtaggtaaaaacggagattgttacgacagatacctttgtagagttgaagaaatgagagaaagtgttaaaataattaaacaatgtctagagcagttaccaaaaggacctgtaaaatctcaagataataagatac

SEQ ID NO: 200683 - DNA, 914 bp, Unknown
  Bacterial polypeptide expressing nucleotide sequence isolated from the Sargasso Sea
aatgccaaaagaaacaaaaacattaaatctaaattttggtccacaacatcctgcagcccatggtgttttaagactaatattagaattagatggagaggtagttgaaaaagcagaccctcatataggtttacttcacagaggaacagaaaagttaattgaaaacaaaacttatatgcaagctgttccttactttgatagacttgattatgtagcaccaatgaatcaggaacacgcttttgccttagccattgaaaaaattttaaaaatagaagttccaattagagctcaattcataagagttatgttttgtgaaattggaagaattttaagtcatattttaaatgttactacacaagccttagatgttggtgccttaactccttcactgtggggatttgaagaaagagaaacattaatgactttttatgaaagagcatctggttcccgtttgcatgcaaattattttagagctggaggaattcatcaagacttaccagcaggattagaaaaagatattctaaatttttgtgagtcatttccaaaaataattaatgatttagaaaatctattaacagacaatagaatttttaaacaacggaatgttgatataggtattgtttcaaaagacgacgctttaaattactcattttcaggagtcatgttgagaggttcaggcattccttgggatttaagaaaatcccaaccctatgattgttatgaacaaattgaatttaaaattccgattggaaaaaatggcgattgctatgatagatatttatgtagaattgaagaaatgagagaaagtgtaagtattataaaacaatgtttatcaatgatgccaaaaggaccaattaaatcacttgatggcaaaaatactccaccatcaaaaaaagagattaaagaatcgatggagg

SEQ ID NO: 200684 - DNA, 364 bp, Unknown
  Bacterial polypeptide expressing nucleotide sequence isolated from the Sargasso Sea
aataagtcctcgttttagaggtgagcatgctttaagaagatatccaaatggagaagaaagatgtattgcttgtaaattatgtgaagcagtatgtcctgcacaagcaataacaatagaatctactgaaagagaagacggaagtagaaaaacaacacgttacgatattgatatgatgaaatgtatttattgtggattatgtgaagagtcttgtccagtagatgcaatagtacaaggtccaaattttgaattttcaacagaaacacgagaagaactttattatacaaaagaaaagttattagataatggtgatagatgggagaatgttttagaggctaatattaaagctgacaatatccatagataa

SEQ ID NO: 200685 - DNA, 819 bp, Unknown
  Bacterial polypeptide expressing nucleotide sequence isolated from the Sargasso Sea
aatgatttttttaaattttatttattcggaaatatttatttgtttagcaataatgattttgttaattataggagtatttaaaaaaaatagttcatatttaatttacaatttaagtattttatccttatttgtttgtttagccctgatttttaatttcccaataaatgaaaatgtggaattatttaataatagttacaagattgattacttatcatcctttatgaaaattttattaattttgtcaggaatttttgtattgctttcatctagtaaatatatccaaataattaaaataaataaaattgaatatccaatcttagttttatcatcaataacaggaatgatggtaatgattagttcaaatgatttaatcttattttatatgggtttagaattacagtcactagcattatatgttttatcatcatttaatagagacaatatattatcttcggagtctggattaaaatattttgttttaagcgcattatcatctggtctacttctttatggttgttcattaatttatggtttttcgggttcaacaaattttaatataattgcagaaaatataaatcaagatagttatggattaacttttggaataatttttataattaccggattagcgtttaaaatatctgctgttccatttcatatgtgggccccagatgtttatgaagggtcgccaacatcagtaactattttttttgcaatattgccaaaaatcgcagctttaacggtctttataagaattttatatgttccgttttttaatattatagatcaatggcaaactataatcgtttttctttctat

SEQ ID NO: 200686 - DNA, 517 bp, Unknown
  Bacterial polypeptide expressing nucleotide sequence isolated from the Sargasso Sea
aatgaacttaaattttggaccacaacatcctgctgcacacggtgttctaagattaatacttgaattagacggagaagttgtagaaaaaattgatcctcacattggacttttacatagaggaactgaaaaacttattgaacataagacctatatgcaagcagtaccctattttgatcggctggattatgtggccccaatgaatcaagaacacgcatttgctttgggaatagaaaaacttttaaatattgaagtaccgattagaggacaatacataagagttttattttgtgaaattggaagaattttaagtcatttactaaatataactactcaggcacttgatgttggagctctaaccccatccttatgggggttcgaagaaagagaaacactaatgactttttacgagagagtttcaggttccagactgcatgcaaattatttcagagctggcggagtgcatcaagatttaccaagaggattaagtgaagatattttacatttttgtaatactttt

SEQ ID NO: 200687 - DNA, 244 bp, Unknown
  Bacterial polypeptide expressing nucleotide sequence isolated from the Sargasso Sea
aatgacaaaaaaaactaaaacattaaatcttaattttggacctcaacatcctgcagctcatggtgtattaaggttgattttagaactagatggtgaagtaattgaaaaagcagatcctcatattggattacttcatagaggaacagaaaaattaattgaaaataaaacctatatgcaagcagtaccatattttgacagactcgattatgttgcacctatgaatcaagagcatgcttttgctctt

SEQ ID NO: 200688 - DNA, 229 bp, Unknown
  Bacterial polypeptide expressing nucleotide sequence isolated from the Sargasso Sea
atgacaaaaaaaattaaaaatttaaatttaaattttggacctcagcatcctgcagctcacggtgttctaagattaatcttagagttagatggtgaagtagttgaaaaagcagatccacacatcggtttacttcatagaggaacagaaaagcttattgaaaataaaacttatatgcaggcagttccctattttgatcgtttggattatgtcgctccaatgaatccaggag

SEQ ID NO: 200689 - DNA, 350 bp, Unknown
  Bacterial polypeptide expressing nucleotide sequence isolated from the Sargasso Sea
catgaaaatatctagatttttaaaaaccatattaatgattgattttttaacaggtttaattttggctgtaaaagaaacatttaagtcaaaaaaaactattaattatccttttgaaaaaggatcaattggtgcaagagctagaggagaacatgctcttagaagatatcctaacggcgaagaaagatgtatagcatgtaaattatgtgaagctgtttgccccgctcaagcaataaccattgaatctaaagagagaaatgatggaagtagaaaaaccacaagatacgatatagatatgcttaaatgtatttattgtggtttatgcgaagaatcttgcccggtagatgcaattg

SEQ ID NO: 200690 - DNA, 935 bp, Unknown
  Bacterial polypeptide expressing nucleotide sequence isolated from the Sargasso Sea
tcttttagttttaggagttttcaaaaacaatagttctaaaattattttttacttctcttgcttaattatattggtatctctcgcgattaatttaaacatcaatataacgcaaacaatctttctttttaataatagttatttggtagatcagctgtctttatttataaaatcaataattatgatttcagctttctttgtaatgctttgttcatataattatgtcagaattaacaatatacttaaaattgaatacccaatattaattttatgttcgttactaggtatgctggtaatgataagctcaaacgatctcattgtattttatataggtttagaattacaatctctcgcattatatgtgttagcatcttttaatagagataatattttatcctcagagtcagggttaaaatactttgttttaagtgctttatcatcaggtttacttttatatggttgctcattaatttatggtttttctaattcgactaattttaatgaaatatctcagaattttaattttgagtacggagttatttttggtatggtttttgtaattgttggtttagcgtttaaaatttccgctgtaccttttcatatgtgggctcctgatgtttatcaaggttcaccaacctctgtaactgtgttatttgcaattttaccgaaaatagcagctcttacggtttttataaaatttttatatggtccatttataaatctcttcgaggagtggcaggccataattatatttttatcaattgcatcgatgattttaggtgcagttgccgctattggtcagaaaaatcttaaaagacttatagcttatagctcaatcagtcatatgggttatgcattagcaggcttaactactggtactaaccagggtattcaaagttcaataatttatttaattatttatttaattatgaatcttg

SEQ ID NO: 200691 - DNA, 487 bp, Unknown
  Bacterial polypeptide expressing nucleotide sequence isolated from the Sargasso Sea
atgaattttagcaggctattaaaaactatatttctagttgagtttatatctggtctttacattgcagtaaaagagttgtttagaaaatctaaaacaattaattatccttttgaaaaaggtccaatcagtcctcgaatgagaggagaacatgctttaaggagatatcccaacggagaagagagatgtatagcttgtaaattatgtgaagctgtttgccctgctcaagctattactatcgagtcttcagagagatcagacggaagtaggaaaactactcgttacgatattgatatgcttaaatgtatttattgtggactttgtcaagaatcttgcccagttgatgcaatagtacaaggaccaaactttgaatttgctactgaaacaagagaagagctttattataacaaagataaacttttagaaaacggggatagatgggagtcagtcctggcaaaaaatatcaaactggataaaccttatagataga

SEQ ID NO: 200692 - DNA, 253 bp, Unknown
  Bacterial polypeptide expressing nucleotide sequence isolated from the Sargasso Sea
tatgaatttttttagaataattaaaacaatttttttattagattttttgaaagctttattaatggctattaaagaaatttttaagtctaagaaaactataaattatccttttgaaaaaggtaaaatcagtccaagatttagaggagaacatgctttaagaagatatccaaatggtgaagaacgatgtatcgcctgtaagttatgtgaaacagtttgtccagctcaagcaatcaccattgaatcttatgaaaga

SEQ ID NO: 200693 - DNA, 487 bp, Unknown
  Bacterial polypeptide expressing nucleotide sequence isolated from the Sargasso Sea
atgaattttattaggcttttcaaaactatctttcttgtagaatttgttaaaggattatacatggcgattaaggaactatttaggaaatcaaaaactattaattatccctttgagaagggacctattagcccacgaatgagaggtgagcacgcgctaagaagatatccgaatggtgaagagaggtgtatagcttgtaaattatgtgaagctgtgtgtcctgcccaagcaattacaattgagtcagcagagagatcagatggtagtagaaaaacaacacgatacgacatagacatgcttaaatgcatttattgtgggttatgccaagagtcttgccctgtagatgctattgtacagggcccaaattttgagttcgcaactgaaaccagagaagagctttattataataaagagaaactcttagacaatggtgatagatgggagtcagtactagctaaaaatattaagttagacaagccttacagataaa

SEQ ID NO: 200694 - DNA, 733 bp, Unknown
  Bacterial polypeptide expressing nucleotide sequence isolated from the Sargasso Sea
tttgatatttaacgacagttataaaatagattatttatcaaattttgtaaaaattttaattataatttcaaccatatttgttcttttaacctcatctcaatatcttaaatcaataaaaatatttaaggtagaatatccaattttaattcttagttcgatacttggaatgatggtaatggttagttcaaatgatcttatagttttttacattggactagaattacaatctcttgccctatatgtcctggcatcatttaatagagacaatatattatcatcagagtcaggtttaaaatattttgttcttagcgctttatcttcaggtttattactttacggatgttctttggtatatggtttttcttcctcaacaaatttttcgcaaattggtattaattatgatcaatcaactcaaggaataacttttggtatggtatttatattagtaggtctagcatttaaaatttcagcagttccatttcatatgtgggctcccgatgtttatcaaggatcacctacatctgttacattgttttttgcgatattaccaaaaattgctgctttgacagtgtttataagatttttgtattcaccttttttagaattaattgaccaatggcaatcaataattatatttttgtcgatagcgtctatgctttttggagcagtagcagctattggacaaaaaaatttaaaaagattagctgcttacagttctataagccatatgggg

SEQ ID NO: 200695 - DNA, 730 bp, Unknown
  Bacterial polypeptide expressing nucleotide sequence isolated from the Sargasso Sea
aatggaatatttaagcactattttcaatgaggtttataagatcttatttttattagttccagttcttgtttcagttgccatgattgtttggctggatagaagagtttgggcttttgttcaaaaacgacagggacctaatgttgttggtccatttggacttcttcaatcgttagctgatgctctaaagtatatttttaaagaaataatcataccggctagttcaaacaaagttatatttattcttgcgccaataattactatgactttagccttaatagcttgggcagtaattccatttggtgaagatcaagtattagcaaatattaatgttggaattttatatatatttgcagtctcatctttaggtgtctatggaataataatgggtggatgggcatcaaactcaaaatatccatttttgggagctataagatctgcagctcaaatggtatcatatgaagtttcaataggcataattattataaatgtattactttgtgttggatcactaaatttaagtgaaattgtattagctcaaaaagaaatgtggtttgtaattcctttatttccaatgtttgttattttttttatttcatccttggctgaaacaaatagaccgcctttcgatcttccagaggcagaggctgagttagttgctggatatcaaacggaatattctggaatgatgtatgcaatgttttggtttggagatatgcgaatattttgttaa

SEQ ID NO: 200696 - DNA, 727 bp, Unknown
  Bacterial polypeptide expressing nucleotide sequence isolated from the Sargasso Sea
tatgtataatcttaatttactatttcctgaaatatttgtctctttatctgtaatgttcttgttgatcctaggtgtttttaagaagaatagttcacaactaacttttaatctttctttacttacgtttttaattgcaacaatctttgctgttaatgaaactttttcagtagaaagaattactttatttaatggaagtattgttattgatcatttggcctcacttatgaaaatcattacacttattggtggttttttagttttagttatttcgtcaagttatctcaaaacatttaaaatttttaaaattgaatatcctatattgatattaagctctgtattgggaatgatgatcatgattagttcaaatgatctaatggttttttacatgggacttgaactacaatctcttgctttatatgttttagcaacttttaatagagatcaattaaaatcatctgaagctggattaaaatattttgttctaagtgctttatcttctggtttattgttatacggatgttctttaatttatggattttccggatcaacaaattttgatgtaatagcaaatcaacttagctcaaatgaatatactttaacttttggaatagtttttatcttagttggtttagcatttaaaatttctgcagttccatttcatatgtgggcacctgacgtttatgaaggatcaccaacaactgtaacgcttttctttacaatggtgcct

SEQ ID NO: 200697 - DNA, 408 bp, Unknown
  Bacterial polypeptide expressing nucleotide sequence isolated from the Sargasso Sea
ttaaaaaatcaaaaacaattaattatcctttcgaaaaaggtccaataagcccaagaatgagaggcgaacatgctttaagaagatatcctagcggagaagaaagatgtattgcttgcaagttatgtgaagcggtatgtcccgctcaagctataacaatcgagtcaactgaaagacctgatggtagcagaaaaacaacaagatatgatattgatatgctaaaatgtatatattgtgggttatgccaggagtcttgtccagtagatgcaattgtgcaaggaccaaattttgaatttgccacagaaactagagaagaactttattataacaaacaaaaacttttagataacggagatcgatgggagtctgttttatctaaaaatattaagctagacaaaccttacagataac

SEQ ID NO: 200698 - DNA, 854 bp, Unknown
  Bacterial polypeptide expressing nucleotide sequence isolated from the Sargasso Sea
aatggactcttattttttaatattatttactgaaatttataaaattttatttttattagtacctgttttagtttctgtagcaatgatagtttggcttgatagaagagtttgggcatttgtacaaaaacgtagaggacccaatgttgttggtccatttggtttatttcaatcattagctgatgcattaaaatatatctttaaagaagtaataatacctgcaagctcaaacaagcttgtatttgtattagctccagtcgtaactatgacattagcattaatatcatgggctgtaataccatttagcgaagattttgtactagctgacatcaatgttggtattttatatcttttcgcagtttcatcattaggtgtatatggaataattatgggaggatgggcctccaattctaaatacccttttttaggtgcaatcagatccgctgcacaaatggtatcatatgaggtttcaataggagttataattatcaatgttctattatgtgttggatctttaaacttaagtgacatcgttatggcacaacaaaatttatggtttgtaattcctttgtttcctatgtttgtaattttttttatttctgcactagcagaaacaaatcgtcctccatttgatttaccagaagcagaggcagaattagtggcaggatatcaaactgaatattcaggaatgatgtatgctatgttttggttaggagagtacgcaaatattttgttaatgtgtgcaatgggagctgttttatttctgggaggctggttatctccaatagatatcttcccatttaatgctattccaggtccattttggttatatttaaaatattatttttatttattct

SEQ ID NO: 200699 - DNA, 356 bp, Unknown
  Bacterial polypeptide expressing nucleotide sequence isolated from the Sargasso Sea
aagagcaagaggggagcatgctttacgaagatatcctaatggtgaggaaagatgtatagcatgtaaactttgtgaagcagtctgccctgctcaagcaatcacaattgagtccacagaaagagaagacggaagtagaaaaacagtaagatacgacatagacatgcttaagtgtatttattgcggactatgcgaagaatcttgcccagtagatgctattgtgcaaggtcctaactttgagtttgctacggaaacaagagaagaactttattataataaagagaagcttttagagaatggagataggtgggaaaatatacttgctgcaaatataaaggcagataacccttacagataat

SEQ ID NO: 200700 - DNA, 361 bp, Unknown
  Bacterial polypeptide expressing nucleotide sequence isolated from the Sargasso Sea
atgactgaaagcaatctaacgcttaacttcggtccacaacatccagcagcgcatggtgttttaagattaattatggaaatggatggtgaggtcattacaaatctcgatccacacatcggccttttacacagaggcacagaaaaacttgctgaaatcaaaccgtttaatcattcaatcggatatatggatagaatggactatgtttcgatgatgtgttgtgagcatccttatgttctggcaatcgagagtctattagagattgaaccacccaaaagggcacaatatatcagagtcatgtacgatgaaatcacaagaatcatgaatcatttattgtggttgggttgtcatggtcttgatattg

SEQ ID NO: 200701 - DNA, 160 bp, Unknown
  Bacterial polypeptide expressing nucleotide sequence isolated from the Sargasso Sea
tggttattatcattattcctattcagttgtaagaggatgtgatcgcatagtacctgttgatgtctatgtcccagggtgtcccccttccgcagaagcacttttgtatggaataatgcaattacaaaaaaaaattagaaacaaaggttctttagaaagataa

SEQ ID NO: 200702 - DNA, 735 bp, Unknown
  Bacterial polypeptide expressing nucleotide sequence isolated from the Sargasso Sea
tgttattatgcaccaataatagatgagcaaggaaacatgataaatgatcctattattttaaaacttgatgaaaataagtggtggatatcattggctgattcagatgttgggctttatgctaaaggattggcaagtggtttaaaattacaagctgacgtcagcgaaccagatgtaaacatattggctgtacaaggaccaaaatcatttaaattaatggaaaaagttttaggtaaaaaaattaccgaacttaaattttttggttttgactattttaactttaaaggaaataaattttttatagctcgatcaggatggtctaaacaaggtggatatgaaatttatgtagaaaatagaaaagcaggattagatttatatgatgaactattttctgttggcaaagaatttaatgtgaaaccaggctgtccaaacttaatcgagagaattgaaaatggtcttttgtcatgcggtaacgattttgataattatgataatccttatgagtgtggatttgataaatatatagatctcaattctggtgttgattatttgggaaaaaaagccttaatccaagtttcaaaagaaggaatcaaaaaaaagcttatgggtgtaaaaatagatttagataagattgaaatgatgcaggaaagacctcttttaaacggaaaaagtttagtaggatatttaagatcagcggtttactcacctcatttcaaaaaagtggtgggaatcgcaatg

SEQ ID NO: 200703 - DNA, 359 bp, Unknown
  Bacterial polypeptide expressing nucleotide sequence isolated from the Sargasso Sea
aatgaaaataacaagattttttaaaacaattttgatgacagattttataagtggtttatttattgctataaaagaactctttaaacccaaaaaaactattaattatccatttgaaaaaggaaaaattagcccaagatacagaggtgagcacgctctcagaaggtatcctaatggtgaggaaagatgtattgcatgtaaattatgtgaagctgtatgtcctgctcaagcaatcactatagagtcaactgaaagatcggatggaagtagaaaaactactcgttatgacattgatatgatgaaatgtatatattgtggtttatgtgaagagtcttgcccggtagatgcgattgtccaaggac

SEQ ID NO: 200704 - DNA, 487 bp, Unknown
  Bacterial polypeptide expressing nucleotide sequence isolated from the Sargasso Sea
tatgaaattaggaagattattaaaaacgatttttatggttgattttattactggattacttattgccattaaagagatttttaaatcaaaaaaaacaattaactatccatttgaaaaaggtcaagtaagttcaagagccagaggtgaacatgctttaagaagataccctaatggtgaagaaagatgtattgcttgtaaactttgtgaagcagtttgtccagctcaagcaataacaattgagtctgccgaaagagaagatggaagcagaaagactactcgatacgatattgacatgctaaaatgtatttattgtggactttgcgaagaatcttgcccggtagatgctatagttcaaggtccaaattttgaatttgctacagaaactcgagaagaactttattacaacaaggaaaaacttttagaaaatggagatagatgggaaaatattcttgccgcaaacataaaagctgacaacccatatagataa

SEQ ID NO: 200705 - DNA, 847 bp, Unknown
  Bacterial polypeptide expressing nucleotide sequence isolated from the Sargasso Sea
aatgaaaaaaattccaatcataaaaaatagaagagtaagaagtacaccttttacatcaagaattgaaaatcaaggagtatcagcttattcagtttataatcatatgcttctaccagtaagttttggttcgatagaggatgaatatctacatttaaaagaacatgttcaagtttgggatgtttcagttcaaagagaagttgagatatcaggggaagacgctgacaaacttgttcaatatatgacttgtagagacttatctaatgcaaaacttggaaaatgttattattctcctttgattgatggtaatggaaatttagttaatgatcctcttatttttaaattagatgaaaaaaaatggagattgtgtatagctgactctgatgtattgttttttgccaaaggtttagcgtctggaaaaaattttaatgtcaacatttacgaagccaatgtagatacaatagcagttcaaggacctaaatctcaaagtttaatgcaaaaagtttttggtgatgaaattaaagaattaaaattttttaattataaatattacaattttaaagggactaaacatctaatctcaaaaacaggttattcaaaacaaggggggtatgaaatacacattgaaaacactaactctgggttagagctctatgattattttttcaaaattggcaaagaatttaaactaaaaccaggagcaccaaatgcaatagagagaatagagggaggtttattgtcatatggtaatgatattgataatagagacaatccatatgagtgtggatttgataagtatgtaaaccttgatacagacatggtttttctgggaaaagataaattgaaagaa

SEQ ID NO: 200706 - DNA, 863 bp, Unknown
  Bacterial polypeptide expressing nucleotide sequence isolated from the Sargasso Sea
tatgcttttattttttctaacttgggaacttgagttaattcccgtttatttattactggctatatggggtggcaaaaatcgacaatatgcagcaacaaaattcattatttataccgctggcagttctatcttcattcttattgcagcgttagcaatgggtttctatggtacagaaattcctaactttgagttttctcacttggcggctcaagattttagtcaaaaattccaaatattatgttatgtagggcttttaattgcatttggtgtgaaacttccaatagtaccccttcatacttggcttccggatgctcatggagaggctacagctccagttcatatgcttttagcaggaattttattaaagatgggaggatatgctcttttaagatttaatgcacaattattacccgttgctcatgctcaatttgccccattattaatagttctaggggtagtcaatataatttatgctgcattaacttcttttgctcaaagaaatcttaaaagaaaaatcgcatacagttcgataagtcatatgggtttcgttcttattggaataggtagttttagtagccttggaacaagcggagctatgctgcaaatggttagtcatggattaatcggtgcaagtttattttttcttgttggtgctacctatgacagaacaaagactcttaaacttgatgaaatgagtggtgtaggacaaaaaatgagaatcatgtttgctctatggactgcttgctgcctggcttccctggctttacctggtatgagtggatttgtttccgaattgatggtatttacaggatttgttactgatgaagtgtatacactaccgtttagggtagtgatggcatctt

SEQ ID NO: 200707 - DNA, 809 bp, Unknown
  Bacterial polypeptide expressing nucleotide sequence isolated from the Sargasso Sea
agatatgtccaagtgattaacttaaataaaattgaatatcccattcttattttgagttctattttaggaatgatgataatgataagttcaaatgatttaattgttttttacatgggacttgaacttcaatcattagctctttatgttcttgcatcttttaatagagacaatttactttctacagaatctggacttaaatattttgttcttagtgcattatcatcaggtttgctcttatatggatgttcattaacttatggattttctgaaagtacaaattttgatcaaatacttataaactctactgaatttaattatggtaccacgtttgggatagtctttattttagttggtcttgcatttaaaatatcggctgtaccttttcatatgtgggcaccagatgtttaccaaggctccccaacatctgtaacattattctttgctatacttccaaaaatagctgcactctctgtattcattaagtttttgtacacaccttttgctaatatgaatgatcagtggcaaacaataattgtatttatttcaatagcttcaatgatatttggtgctgtagcagcaataggtcaaaaaaacttaaaaagactaattgcttatagttcaatcagtcatatgggttatgcgttggcaggattagcaacagttagcaaccaaggaatacaaagttctattacttatatatctatttatttggtaatgaatttagccttttttagctgcttatttatgcttaagagaaatgataaatattatgagaatatcgaggatttgtctggactttctaaaaaaca

SEQ ID NO: 200708 - DNA, 931 bp, Unknown
  Bacterial polypeptide expressing nucleotide sequence isolated from the Sargasso Sea
gcattatcatcaggacttttattatatggatgttctttagtttatggtttttcaggttctactaattttgatataatatcaaatcaactaaattctgaggaatatgttttaacttttggaattgtgttcatattagttggtttagcattcaaaatttctgcagttccattccatatgtgggcacctgatgtttacgaaggatctccaacaactgtaactttgttttttacaatagtaccaaaggtagctgctttgactgtatttattagatttttatatgttccttttttaaatttaattgatcaatggcaaatgataatagttttcttatctatagcttctatggtttttggagcagttgctgctatagggcaaactaatattaaaagactaattgcttacagttctataggacacattggttacacattggctggtttagccacagcatcaaacgagggtattcaaagttcgataatttatatttctatttatgttgttatgaatttagctcttttttcatgtctattaatgttaagaagaaaagatcaatattatgaagatattgatgatctctcaggattatcaaaaaatcatccattgttgtctttgtgtttgttgttaatattattttctttagcaggcataccacccctagcaggtttcttcgcaaaattttacgtttttaaagcagtattggaacaatcaatgtatttcttagctatagtagggttgttatcaactgtggttgcagctttttattatctaagaattataaaaattatgtattttgataaggaaaaggataaatatgatacagaccatagcttatggctaaaattttcactgacagtttcaactatattaattcttttatacttcatattcccaagtcagttagtagaagttgtttcaagaattaatattattt

SEQ ID NO: 200709 - DNA, 253 bp, Unknown
  Bacterial polypeptide expressing nucleotide sequence isolated from the Sargasso Sea
atgattgttgattttttaaaagactatttatctattataattttcctttttgttgctttagctttgagcataggttttatagttttaaattttttattttcacccaaaaatccagatcctgaaaaactttctgcttatgaatgtggctttgaagcatttagtgattcaagaatggaatttgatgtcagattttatttagttgcaataaaatttattatatttgatttagaaatagcgattttatttccttggg

SEQ ID NO: 200710 - DNA, 760 bp, Unknown
  Bacterial polypeptide expressing nucleotide sequence isolated from the Sargasso Sea
atggctaataattatcaaaatgaaaaaaaaacaagtgaaaattctattaggaattttaacataaattttggtccccagcaccctgcagctcatggagttttgagaatggtactagagttggatggtgaaatagttgaacggtgtgatccacatattggacttcttcataggggtacagaaaaattaatggaaagcaggacttatctgcaaaacttaccttattttgacaggttagactatgttgctccaatgaatcaagagcatgcttggtgtttagcaatagaaaaacttttgaatgttcaaataacttatagagcatcattaataagagtattatactgtgagattggtagagtgctaaaccacttattaaatattactacacaagctatggatgttggagcatttactcctatttcttggggatttgaagaaagagagaaattaatggttttttatgagcgagcctgtggtgcaagacttcatgcagcttattttagaccaggtggtgttcatcaagatctttctgaagatttactaaatgatattatggactggtccatatcatttccaaaagtagttaatgacatagaagagttattaactgaaaatagaatatttaaacagagaaatgtagacattggtattgtaagtaaagacgaagcctttgattggggattttcgggtgttatggttagaggttcgggcttagcctgggatttaagacgatcgcaaccctacgaatgttacaatgacttcg

SEQ ID NO: 200711 - DNA, 877 bp, Unknown
  Bacterial polypeptide expressing nucleotide sequence isolated from the Sargasso Sea
ggcggcatggccggtgacgttcaagccgcggctgttttttttcctgctcctggccatggacggcggtcagatcgccgtgttcgccgtgcaggacatgctgctgttcttcctggcctgggaactggagctcatccctgtctatctcttactggctatttggggcggcaaaaagcgccaatacgcggccaccaaattcatcctctacacagccgtcagctccctcttcatcctgctagtggccctagccatggccttcagcggcggcggacctgtcagctttgagtactccgatttggcggctaagcatctcggaacagggttccaggccctttgttatgcgggcttgctgattgcctttggcgtgaagttaccgatcgttccgctgcatacgtggctccccgatgcccacggggaagccacagcaccagtgcacatgttgctggctggcatcttgctgaagatgggcggctacgccttgttccgcttcaacgcgtcgatgttccccgacgcccatgtgcagttcgcaccgcttcttgtggtgctgggggttgtgaacatcatttatgcggcgctcacctcgtttgcgcagcgcaacctcaaacgcaagatcgcctacagctccatcagccacatgggctttgtgctgatcggcatcggcagcttctcgcccttggcggccagtggcgccatgttgcaaatgatcagccatggcttgatcggagccagtctgtttttcctggtgggggccacctacgaccgcacccacaccctgcagctcgatgagatgggtggtgtcggtcaacgcatgcgcaaaatgtttgccatgtggaccgcctgctcgctggcctcgctggcgctccctggcatgagcggcttt

SEQ ID NO: 200712 - DNA, 217 bp, Unknown
  Bacterial polypeptide expressing nucleotide sequence isolated from the Sargasso Sea
aatgggagtaaaaataaattctaatttagatagacaaaataaaattccagatgagtttaaagacttagcaaaagactttgctgaaaaaggttttatcaccacttcaagtgataacctgatcaattgggcgagaacaggatcattacactggatgacatttggtcttgcttgttgtgctgtagaaatgatgcaaacttccatgccaagatatgatctt

SEQ ID NO: 200713 - DNA, 772 bp, Unknown
  Bacterial polypeptide expressing nucleotide sequence isolated from the Sargasso Sea
atttttgtaatcacttctctaggatttaaaatatcagctgttccttttcatatgtgggcgcctgatgtttatgaaggatcaccaactccaattacagctttttttacaactgctccaaaaatagcaggtatcgctcttttaattagatttttatttgaaccatttggaaatttttggtttgattggcaccaaataataatatttatttccatagcttcaatgatacttggagcttttgcagctatagttcaagataattttaaaagattactagcatacagctctataggtcatattggttatattttaattggcgttgtttcagcaaatgattcaggaataaaggcaatatttatatatttagtaatttatatatttatgaattttggaatatttgctatcttattatctttaaaaaatgacaatggatatattgaaaaaattagtaacctttcagggttaggtaaaagcaatccaatagtttcgatagttttaactattatgttattttcaatggctggcataccgcctttagcaggtttttttgggaaattttatatatttattgctgcaattgagtcaaaactctttgttcttgcaattataggtgttctaagcagtgttattgctgcattttactatttaagaataattaaggttatttattttgaagaaaataaagaaaatttagaaataactttaaatcttaatacaaagtttgtaatttatttatctgctttatttataattttatttattttctttcagtcaa

SEQ ID NO: 200714 - DNA, 847 bp, Unknown
  Bacterial polypeptide expressing nucleotide sequence isolated from the Sargasso Sea
attttatttttactaataccagttttagtctcagtagctatgatcgtttggcttgacagaagagtttgggcatttgttcaaaaaagaagaggaccaaatgtagtgggtccatttggattgtttcaatcattggcagatgcattaaaatacgtttttaaggaaattattattccagctacctctaacaaagtcgtatttattttagcacccattgttacaatgacacttgctctaatatcatgggcagttataccatttagtgaagatattgttttatctaatataaatgtaggaattctttatttatttgccgtttcatctttaggtgtttacggaattataatgggtggttgggcttcaaattcgaaatatcccttcctaggtgcaattagatccgcagcccaaatggtttcctatgaagtctctataggtgttatcattatcaacgttttactttgcgttggatcattaaatctcagcgatatagttaaagctcaacaaaatatttggtttgttattccattatttccaatgtttgtaattttttttatttctgctttagccgaaaccaatagaccaccgtttgatcttccagaggcagaagcagagttagttgcgggttatcaaacggaatactctggtatgatgtatgcaatgttttggttgggagaatatgcaaatatattattgatgtgcgcaatgggatcaattttattcttaggaggatggttatcaccaatagatatatatccatttaatgttatcccaggccccttttggtttatacttaaaattctatttttatttattctttttgctttagttaaagctacagtaccaagataca

SEQ ID NO: 200715 - DNA, 487 bp, Unknown
  Bacterial polypeptide expressing nucleotide sequence isolated from the Sargasso Sea
atgaaactaaatagattttttaaaattatatttttatcagagtttataaaagcaacaataattgcaattagcgaaatttttaaaaagaaaaaaacaattaattatccttttgaaaaaggaagtattagcccgagattcagaggtgagcatgctttaagaagatatcctaacggagaagaaagatgtatagcctgtaaattatgtgaagcagtttgcccagctcaagcaataacaattgaatctgaagaaaaagaagacggaagcagaagaacaacaaaatacgatatcgatatgcttaagtgtatttattgtggtttatgtgaagaatcctgcccagttgatgcaattgttcaaggaccaaattttgaattcgcaacagaaacaagagaagaactttattataataaagaaaaattattagacaacggcgatagatgggaaactgttttagcccaaaatataaagcttgataaaccctatagataac

SEQ ID NO: 200716 - DNA, 213 bp, Unknown
  Bacterial polypeptide expressing nucleotide sequence isolated from the Sargasso Sea
agatgcctgaaccaaggtatgttatatcgatgggaagttgcgcaaatggtggtggctattaccactattcttattcagttgtaagaggttgtgataaaatcgttccagtcgatatttatgttcctggatgtcctccgtcagcagaagcacttctttatggcattttgcaactccagaaaaaaataagaagagaaggtacgttacaaagataat

SEQ ID NO: 200717 - DNA, 451 bp, Unknown
  Bacterial polypeptide expressing nucleotide sequence isolated from the Sargasso Sea
atgaatttgagcagacttttaaaaaccatattccttgtggagttcatttctggattatctatggctattaaggaattattccgaaaatcaaaaactataaattatccttttgaaaaaggagcaattagtccacgtatgaggggtgaacatgcattaagaagataccctagtggggaagaaagatgtattgcctgtaaattatgtgaagcagtttgtcctgctcaagctattacaattgaatcaacagaaagagaagatggtagcaggaaaacaactagatatgatattgacatgttgaaatgtatctactgtggactatgccaagagtcttgtccggtagatgctattgttcaaggtccaaattttgagtttgctacagaaactagagaagaactttattataacaaagaaaagttattagagaacggcgataagtgggagtcagtttagc

SEQ ID NO: 200718 - DNA, 895 bp, Unknown
  Bacterial polypeptide expressing nucleotide sequence isolated from the Sargasso Sea
tttgagttctattcttggtatgatggtaatgatcagctcaaatgatttaattgttttttatatgggcttagaattacagtcattagctctttatgttttagctacatataacagagatcaattaaaatcatcagaagcgggtttgaaatattttgttttaagtgcattatcatcaggacttttattatatggatgttctttagtttatggtttttcaggttctactaattttgatataatatcaaatcaactaaattctgaggaatatgttttaacttttggaattgtgttcatattagttggtttagcattcaaaatttctgcagttccattccatatgtgggcacctgatgtttacgaaggatctccaacaactgtaactttgttttttacaatagtaccaaaggtagctgctttgactgtatttattagatttttatatgttccttttttaaatttaattgatcaatggcaaatgataatagttttcttatctatagcttctatggtttttggagcagttgctgctatagggcaaactaatattaaaagactaattgcttacagttctataggacacattggttacacattggctggtttagccacagcatcaaacgagggtattcaaagttcgataatttatatttctatttatgttgttatgaatttagctcttttttcatgtctattaatgttaagaagaaaagatcaatattatgaagatattgatgatctctcaggattatcaaaaaatcatccattgttgtctttgtgtttgttgttaatactattttctttagcaggcataccacccctagcaggtttcttcgcaaaattttacgtttttaaagccagtattggaacaatcaatgtatttcttagctatagtagg

SEQ ID NO: 200719 - DNA, 205 bp, Unknown
  Bacterial polypeptide expressing nucleotide sequence isolated from the Sargasso Sea
aatgacaaaaaaaattaagaacctaaatttaaattttggtccgcaacatccagcggcacatggagtgctaagactcattttagagttagatggagaggttgtagagaaagcagatccacacattggtttattacatcgtggtacagagaagctcatagaaaataaaacttatatgcaagcagttccatattttgatcgtcttgat

SEQ ID NO: 200720 - DNA, 460 bp, Unknown
  Bacterial polypeptide expressing nucleotide sequence isolated from the Sargasso Sea
aatgacaaaaaaaattaaaaatattaaccttaactttggaccacaacatcctgcagcacatggagttttaagattaattttagagctagatggagaagtcgtggaaaaagcagatcctcatattggtttacttcaccgtggaaccgaaaaattaatagaaaacaaaacatatatgcaggctgttccttattttgatagattagattatgtggcaccaatgaatcaagagcatgcatttgctttagcagtagaaaaaattttaaaaattgatgtaccaatcagagctcaatatatcagagtaattttttgtgaaattggtagaatattaagccatatattaaatgttactacccaagctcttgatgttggagcccttacaccatctttgtggggctttgaagagcgagaaactttaatgactttttatgaaagagcttctggatcaagattacatgcaaat

SEQ ID NO: 200721 - DNA, 751 bp, Unknown
  Bacterial polypeptide expressing nucleotide sequence isolated from the Sargasso Sea
ccagatgtttatcaaggatctccgacgtcagtaactatattttttgcaattctaccaaaaattgctgctcttactgtttttattaaatttttatatgttccatttgtcaatttaatagatcaatggcaaataataattatttttttatctattgcatcgatgctttttggttctatagctgcaataggtcaacaaaatttaaagagattaatggcttatagttctataagtcatatgggttttgcattagctggagtagcggtgggttcgaacgaaggtattcaaagttctattatttacatatcgatttatttaatgatgaacttagcattttttagttgtatttttatgttaagaagaaataacgaatattacgaaaaaattgatgatctatctggattatcaaaaaatcatcctatactatcaatttctttactaatatctttgttttcattagcaggaatacctccattagcaggtttttttgctaaattttatatttttatggctgtaattgaagaacagatgtacgcccttgcaataattggacttttatccacagtaatcgctgccttttattatcttagattaataaaaacaatttattttgataaagaattagaaaaatatgataccaatcacaacattggattaagagtttctttggcaatatcaacaataattattttattatattttatatatcctagttcattattagcaattatttcaaacataaaagtaatttaat

SEQ ID NO: 200722 - DNA, 202 bp, Unknown
  Bacterial polypeptide expressing nucleotide sequence isolated from the Sargasso Sea
tatgagtctaaattttgggccccaacatccagctgctcatggagttttaaggcttatattagaactagagggagaaatagttgaaaaggctgacccacatattggattattacatagagggacagaaaaactaattgaaaacaaaacttatactcaagccttaccttattttgacagattagattatgttgccccaatgaac

SEQ ID NO: 200723 - DNA, 487 bp, Unknown
  Bacterial polypeptide expressing nucleotide sequence isolated from the Sargasso Sea
atgaaaatttcgagaattttaaaaacaatatttttaactgattttataactggtttaggtatagcaattaaggaaagtttcaaagcaaaaaaaactttaaactatccatttgaaaaaggtaaaattagtccaagatttagaggagagcacgcgcttagaagatatccaaatggtgaggagagatgcatagcatgtaaattgtgtgaagctgtttgtccagcacaagctataactattgagtctacagaaagggaagatggcagtagaaagacaaccagatatgatattgatatgttaaaatgcatatattgtggtttatgtgaggaatcttgcccagtagacgctatagttcaagggcctaattttgaattcgcaacacacacaagagaagaattatattataataaagaaaagcttcttgataatggagataaatgggagagtatcctagaagcaaatattaaagctgacaaaccttatagataaa

SEQ ID NO: 200724 - DNA, 228 bp, Unknown
  Bacterial polypeptide expressing nucleotide sequence isolated from the Sargasso Sea
ctatagaaatatatccatttaatttaatacctcaacctatatggttaatattgaaaattttaattttatttattttatttgcattagtaaaagcaattgtaccaagatatagatatgatcaattaatgaaactaggatggaaaatttttctccctttttctttattatgggtagtgcttacttcatcctttttactttatttcaatttactaccaggaagtaattaat

SEQ ID NO: 200725 - DNA, 187 bp, Unknown
  Bacterial polypeptide expressing nucleotide sequence isolated from the Sargasso Sea
atgattacgaactttttgtcagaatacctgtctataataatatttttatttatctcattactattgagtataggttttatagtaataaattatattgcttctccaagcaatcctgatccagaaaaactatctgcttatgagtgtggttttgaagctttcgataatgccagaatagaatttgatgtaa

SEQ ID NO: 200726 - DNA, 540 bp, Unknown
  Bacterial polypeptide expressing nucleotide sequence isolated from the Sargasso Sea
aatgagtaaagaaaaaaaaacattaaacttaaattttggaccacaacatccagcagctcatggtgtattaagattgatattagaacttgatggcgaagtagttgaacatgctgacccgcatattggtttattgcacagaggtactgagaaattaattgaaaataaaacttatctccaggcattaccttattttgatagacttgattatgtagctccaatgaatcaagagcatgcatttgcacttgcagttgaaaaaattttgaatattgaagttcccataagagctcaatttataagagtgatgttttgtgaaattggaagaatattgagccatattttaaatattactactcaggctcttgatgttggtgcattaacaccttcactatggggatttgaagaaagagaaactttaatgactttttatgaaagggtttctggctcaaggcttcacgcaaattattttagaactggtggagttcatcaagatttaccaagaggattgaacgaagatattgcaaaattttgtcaaaattttcc

SEQ ID NO: 200727 - DNA, 188 bp, Unknown
  Bacterial polypeptide expressing nucleotide sequence isolated from the Sargasso Sea
aatgttatctgattttttaaaagattatttatctattataatttttttattcatcgctttagggttgagctgtgcttttgtattagtgaattttatactttcaccaaaaaaacctgaccctgaaaaactttcaccttatgaatgtggatttgaaccttttcaagactcaagaatggagtttgatgtta

SEQ ID NO: 200728 - DNA, 928 bp, Unknown
  Bacterial polypeptide expressing nucleotide sequence isolated from the Sargasso Sea
actagtacaactaatgacttgcagagatctttctaaatctaaagttggaaattgctattacgtacctttagttgatattgaaggcggcatggtcaacgatccgcttatttataaattaaaaaatgatttatggagactttgcatagccgattccgacgtattgttatttgccaaaggtatagctgcaggaaaaaatcttaaagtgaatatctttgaagcaaatatagacacactagctattcaaggacctaaatcatttaagttaatggaagaagtatttggaaacgaaattaataatcttaaattttttaaatatgattattttaattttagaagtaataaatatttgatttcaagaacaggtttttctaaacaaggaggatatgaggttcatgtcgaaaatgcaaagtttgggcaagatttgtatgatcatttttttaacattggtaaaaaatataatttaaaaccaggagcccctaaccacgcagaacgaattgaaggcggattattatcttatggaaatgatatgcttataagtgataatccatatgaatgtggttttgaaaagtatgtacatctagactctgatattgattttctaggcaaagataatctaaaaaaaataaaaaacaaaggaattaaaaaaaaacttatgggagttaaaatcaatacaaacaaaatggaattagtagatgttgatttactaaacaacgataataaaataataggtgatctaagatctgctgctttttcacctacattcaaaaagattgttggcatagcaatggtcaaaaagcaaagtgtagaaaataaagaaaattttaagatgaatattaatggtaaatttgtagaaggagagatttgcgaactacctataaatctaattatgaaaaaagctaaaatttatataccaacaaaaacagcaatg

SEQ ID NO: 200729 - DNA, 712 bp, Unknown
  Bacterial polypeptide expressing nucleotide sequence isolated from the Sargasso Sea
ttgattccacttctagtttctgtggcaatgattgtttggcttgatagaagagtatgggcatttgtgcaaaaaagaagaggtccaaatgtagtaggaccatttggtttattacaaactcttgctgatgctttaaaatatatatttaaagaaattataattccggctagttcgaataaatttatttttattatcgcgccaattataacgatgacattagctctagttgcttgggctgtaattccttttagtaaagattttgttttagcagatataaacgtaggaattttatatttatttgcagtttcgtctcttggcgtatatggaattataatgggtggatgggcatcaaattctaaatatcctttccttggagcaattagatcagctgcccaaatggtttcttacgaagtttcaattggggttattatcattaatgttttgttatgtgtaggttctttaaatctaaatgacattgttcttgctcaacaaaatatgtggtttgttttacctctttttccaatgtttgttatattttttatatctgctttagcagaaacaaatagacctccttttgatttgccagaagctgaagcagaacttgtagctggatatcaaacagaatattcgggaatgatgtatgcaatgttttggttaggcgaatatgcaaatattttattaatgtgcgcaatgggatctatattatttttgggag

SEQ ID NO: 200730 - DNA, 760 bp, Unknown
  Bacterial polypeptide expressing nucleotide sequence isolated from the Sargasso Sea
tttttacttgcgggtatagtttttaaaatttctgctgtcccttttcatatgtgggctcctgatgtttaccaaggtgcagcaactcctgttacatcattttttgcatcagtcccaaaaatggcagcaataataattttaataagaatattatatgttccttttgataactttatatccagctggtcacaaataattatatttgtatctttttcttctattttgctcgggtctgtggttgctatatggcaaaaaaatataaaaagattaattgcctatagctcaattgcacatatgggatttgcaacactagctttatctactggaaacaagagcgatatagaaagtatattggtttatatgattatatatatagttgccaatatcggattcttttcatgcttaataaatattcaaaataagactgaaaaaaatattaataacatctctgatctagctggcttgtcagtaaataatcctagcttagctatttctatagctctttatatgttttcttttgctggaattccacctttggcaggtttttttgcaaaatattatgtttttatttctttaataaatgagggattaatctttttagcaacctttgctcttattgctagtgttattggagcattttattatattcgttttgttaaagtaatgttttttgatgaggttgctaatactaaaaaaattacattttcaagatctttaggattaatcaattcaatatgttttatttttatacttggatttattt

SEQ ID NO: 200731 - DNA, 421 bp, Unknown
  Bacterial polypeptide expressing nucleotide sequence isolated from the Sargasso Sea
ttaaaagaaatttttaaatcaaaaaaaacaattaattatccatttgaaaaaggacaagttagcccaagaagtagaggagaacatgctttaagaagataccccaatggtgaggaaagatgtatagcatgtaaactttgtgaagcagtttgtccagctcaagcaattacaattgaatctactgaaagaaaagatggtagtagaaaaacaacaagatacgatattgatatgttaaaatgtatctattgtggactatgtgaagaatcatgtcctgttgatgcaattgtacaagggcctaattttgaatttgctacagaaacaagagaagaactttattacaataaagaaaaacttttagaaaatggtgacagatgggaaaatatactttctgccaatataaaagcagacaacccttatagataaa

SEQ ID NO: 200732 - DNA, 819 bp, Unknown
  Bacterial polypeptide expressing nucleotide sequence isolated from the Sargasso Sea
tatgtcaaaaaaacaaaaaactttaaatttaaactttggcccacaacatccggctgctcatggagttttaagattgattttagaattagacggtgaagtagtagagaaagcagatccacatatagggttgcttcacagaggaacagaaaaattaatagaaaacaaaacctatgcgcaagctataccttactttgatagacttgattatgtagctccaatgaatcaagaacatgcatttgcacttgctattgaaaaaatattgaaaatcgaagttccaatacgtgctcaatatattagagttcttttttgtgaaataggaagaatcttaagtcatattttaaatataacaacacaagcattagatgttggtgctttaactccttctttgtggggatttgaagaaagagaaacattaatgactttttatgagcgtgcttcaggttcgagattacatgcaaattattttagagcaggtggagttcatcaagatcttccaagaggccttttagaggatattgataaattttctaataatttccctaaagtaattgatgatcttgaaactctattgacagataacagaatttttaaacaaagaaacgttgatataggaattgttagtaggcaagatgctctagattattctttttcaggagttatgttaagaggctcaggtattccttgggatcttagaaaatcacaaccttatgaatgttatgagttatttgattttaaaattccagtaggaaaaaatggagattgctatgataggtatctttgcaggattgaggagatgagagagagtgtaaaaattattaa

SEQ ID NO: 200733 - DNA, 838 bp, Unknown
  Bacterial polypeptide expressing nucleotide sequence isolated from the Sargasso Sea
gagatgttattatgctcctattattgataaacaaggcgggactttaaatgatcctgtggttttaaagttatcagaagatagatggtggttatcactagctgattcagacattggtctttatgcaaaaggaattgctagtggcttatccttgcaagttgagattagtgaacccgatgttaacataatggctgttcaaggacctaaatcatttaaattaatggaaaaagttttaggaaaaaaaatcacagaactaaaattttttggttttgattattacacatttaaagaaaataaatttttaatagctcgttcaggttggtcaaaacaaggtggctatgaaatatacgttgaaaaccgtgaggcagggcaaatgttatatgatgaattattttcagcaggcaaagaatttaatattgagcccggatgtccaaatttaattgagagaattgaaagtgcacttttgtctgcaggtaatgattttgatagcggagataatccttatgagtgtggttttgacaaatatatagatactaattccgatataaattatcttggaaaaaaagctttaattaaaatctctaaagagggaattaatagaaaacttatgggagttttaatagatttagataaaattgaagttacagaagaactccctctttataacggaaataatttagtgggcaatctaagatcagctacttattcacctaatttgaaaaaagttgtcggtatagcaatgatcaaaaaagaatattgggataaaaaaactcctattgaagtgaaaattggtgaaaaaaaaagcaaaggatcaatttgtgatctaccatttaaaatatag

SEQ ID NO: 200734 - DNA, 544 bp, Unknown
  Bacterial polypeptide expressing nucleotide sequence isolated from the Sargasso Sea
atgagtaaagaaaaaaaaacattaaatttaaattttggaccccaacatccagcagcacatggtgtgttgcggcttatattagaacttgacggtgaagttgtagagcatgccgatcctcatattggattactacacagaggcactgaaaaattaattgaaaataaaacttatctccaggcactaccttattttgatagacttgactatgtggcgcccatgaatcaagaacatgcgtttgctcttgcggttgaaaaaattctaaaaattgatgttcctattagagcccaatttataagagtaatgttttgtgaaattggaagaattttaagtcatattttaaatattacaacccaagctcttgatgtaggagcgcttacaccttctttatggggatttgaagaaagagaaactttaatgactttttatgaaagagtttcaggttctagacttcatgctaattattttagaactggtggggttcatcaagatttacctagaggattagctgatgatattggaaaatttgtcaaaatttccaaaagta

SEQ ID NO: 200735 - DNA, 812 bp, Unknown
  Bacterial polypeptide expressing nucleotide sequence isolated from the Sargasso Sea
tcatgttgaggcaccaacaggaggatcagtgatacttgcagcgatacttcttaagatgggcggttatggtttacttagattcagtttaccaatcacgccagatgcatcgagtgaactctcaatgattatggttgtgctatcccttattgcaattatctacatcggtatggttgcactgtctcaaacagatatgaaaaagctcatcgcttattcatcggttgctcacatggggtttgtaacactcggtacttttgtcgttttcctgaatcatgaaattgcttctctagaaaatatgaatttagcaatcagtggtgcaatgatacagatgatttcacatggattaatatcgggtgctttattcctatgcatcggtgtgatgtatgacagagttcatagtagagaaatagatgattatggtggtattgctttaatgatgcctcgttttgcaggcttgatggtcttttttgcactagccaatgcggctctgcctgggacatcagggtttgttggagaagttttggtcattctagcgagcctgaaagttaatttctggatcgcactcttatcaggtacaactttagtcattggagcggcatacacattgtggatgatcaagcgtgttatttttggtgatgtcactaatgaaaaaatcaatgatattcaggatatttctgctattgagcttataccacttatgattcttgcgatcatggtattggcaatgggtgtataccctgaaccgttaatgaatttgatgtatgcgtcaatcaatgacttatctaaattagtatttctaggagctgggatatgac

SEQ ID NO: 200736 - DNA, 124 bp, Unknown
  Bacterial polypeptide expressing nucleotide sequence isolated from the Sargasso Sea
agatatcgttatgatcagttaatgagattaggttggaaaatatttttacctttttcattagcttgggtggttctaactgcaagtgttttagttttttttgatataatgcctaaaagtatttgag

SEQ ID NO: 200737 - DNA, 809 bp, Unknown
  Bacterial polypeptide expressing nucleotide sequence isolated from the Sargasso Sea
aatgattgaatatttttttcagctttttgatcaaatttataaaatattttttttattaatacccattcttgtatctgtagctatgatagtttggttagatagaagagtatgggcttttgttcaaaaaagaagaggtcctaatgtcgtaggtccatttggattacttcaatctttggcagatgctttgaaatatatttttaaagaaataattattcctgctagtgctaataaaataatttttattttagcacctatagtaacaatgactttggctcttgccgcttgggcagtaattccatttagtgatgactttgttttagcaaatattaatgttggcatattatatttatttgctatttcttcattaggtgtctacggaataattatgggtggctgggcttcaaattccaaatatccttttttaggcgcaatcagatctgctgctcaaatggtttcctatgaagtgtctattggagtaattataattaatgtacttctaatagttggatcattgaatttgattgatattgtactagctcaaaaaaatatttggtttataattccattattccctatgtttataatattttttatctcggctttagctgaaacaaatagaccaccttttgatttacctgaagctgaagcagagttggtagctggatatcaaactgagtactcaggcatgatgtacgcaatgttttggttaggcgaatatgcaaatattttattaatgtgcgcaatgggatcaatactttttttaggggggtggctaccacctttagaattatacccgttcaatttgatac

SEQ ID NO: 200738 - DNA, 844 bp, Unknown
  Bacterial polypeptide expressing nucleotide sequence isolated from the Sargasso Sea
aatttagatgaaaaaaatactggagctgtatttggaattgtttttattattgttggtttagcttttaaagtttctgctgtgccttttcacatgtggacaccagatgtttacgaaggatcaccaacttctgtaaccagtttttttgctcttgttccaaaaattgccgcaatatcagtttttattagatttatgtatgttccgtttattaatgttattaaccaatggcagacaataattatctttttgtcaattgcatcaatgattttaggtgctgttgcggctatagggcaatccaacattaaaagattaatggcatatagctcaattggtcatatgggttatgcgcttgcaggtatagctactggaactaacgcgggaattcaaagcacaataatttatttaactatttatttggttatgaaccttggtgcatttggctgcatttttatgatgagacgagaaaatatttttcatgaaaatataaacgaattgtctggtttatcaaaaaatcatcctatgctttctttaagttttttagttatacttttttccttggctggcatacctccactagctggtttttttgcaaaattttatgtttttatggcagttattgaagttgaaatgtattcactcgcaattattggacttttaaccacagttgtttcggcattttattatttaagaattataaaagtgatttattttgacaaacctaagaagccttttgaagaaagttatgactggggacttaaaatttcattgattttgtctagtatactagttttaatttatttaatttacccatcaatattagttgacgcaatattcttcgatcttaatt

SEQ ID NO: 200739 - DNA, 442 bp, Unknown
  Bacterial polypeptide expressing nucleotide sequence isolated from the Sargasso Sea
atgaatataggtagaattttaaaaataatatttctcgtagagtttatttctggtttatacatggccgtaaaagagatgtttagaaagtcaaaaactataaattatccatttgaaaaaggaccaattagcccacgtatgaggggtgagcacgctcttagaagatatccaaatggagaagaaaggtgtattgcttgtaaattatgtgaagcagtttgtcctgctcaagcaataactatagagtccactgagagatcagatggtagtagaaaaacaactcggtatgacatcgatatgcttaaatgtatttattgtggactatgtcaagagtcttgtcctgtagatgcaatagtacaaggtccaaattttgaattcgctacagaaactagggaggaacttaattacaataaagaaaagcttttagataatggagatagatgggaaa

SEQ ID NO: 200740 - DNA, 317 bp, Unknown
  Bacterial polypeptide expressing nucleotide sequence isolated from the Sargasso Sea
aatgacaaaaaaaattaaaaatctaaatttaaattttggtcctcaacatccagctgcgcatggggttttaagacttatattagaattagatggagaggttgttgaaaaagcagatccccatataggtttacttcatcgaggaactgaaaaattaattgaaaacaaaacttatatgcaagcagttccttattttgatcgtttagattatgtagcgccaatgaatcaagaacatgcttttgcacttgctatagaaaaaattttaaaaattgaagttccaatacgtgctcaatttataagagtaatgttttgtgaaatag

SEQ ID NO: 200741 - DNA, 304 bp, Unknown
  Bacterial polypeptide expressing nucleotide sequence isolated from the Sargasso Sea
atgaatttaaattttggtccacagcatcctgctgcacacggcgttcttagactaatacttgaacttgatggggaggttgtagaaaaagttgatccacatataggattgttacatagaggtacagaaaaattaatcgaacacaaaacatacactcaagcgttaccatattttgatagattagattatgtggcaccaatgaaccaagaacatgccttcgcactagcaactgaaaagttattaaaaatagaagttccgattagagctcagtatttaagagtaatattttgcgaaattggaagaattt

SEQ ID NO: 200742 - DNA, 818 bp, Unknown
  Bacterial polypeptide expressing nucleotide sequence isolated from the Sargasso Sea
aatgacaaaaaaatcaaaaacgttaaatttaaattttggtccacaacatcctgcagcacatggagtactaagattgatacttgaattggatggtgaagttgtagaaaaagctgatccacatattggtttacttcatagaggtacagaaaaattaatagaaaataaaacatatattcaggccataccttattttgatagattagattatgtggctccaatgaatcaagagcatgcgtttgctttagcaatagaaaaaattttaaaaatagaagtacctatcagagcacaatttattagagttatgttttgtgaaattggaagaattttaagtcacattttaaatattactacacatgctttggatgtaggtgctttaacaccttcactttggggttttgaagaaagagaaactctaatgacattttacgaaagggtttcagggtcaagattgcacgctaactattttagagctggcggtgttcatcaagatttaccaagaggtttagctgaagatatttccaaatttgcaactgaatttccaaaaattattgatgatttagaaactttattaactgataatagaatatttaaacaacgaaatgttgatattggtgtagtcacaaaacaagatgcacttgattattctttttcaggagtaatgctaagaggatcaaatgttccttgggatcttagaaaatcccaaccttacgactgttatgaacaaatggaatttaaaattcctgttgggaaaaatggtgattgttatgatcgatatctttgtagaattgaggaaatgagagagagtgtaaaaattataa

SEQ ID NO: 200743 - DNA, 640 bp, Unknown
  Bacterial polypeptide expressing nucleotide sequence isolated from the Sargasso Sea
aatgaatttcccaattctttcctcattaatacttttaccttctattggagcactctttttattttttacaaaaagtaaaagtgaaaataaaattactacaaaatatgtagccttatttacatctctagtaaacttttttttatctatttatttatggtttttatttgaccaaacaacttctgcctttcaatttgtcgaagatagaatttggatcaagggtttaattaattacaaagtaggagttgatgggatatcaatactttttataattctaacaacatttattacacctctgtgtataatttcagtaaataattcagttacgaaaagattaaatgaatttttaatagctatcctcgttatggaaactttcatgataggagttttttgttctctagatcttgttgttttttacttattttttgaggctggattaatcccaatgtttttaattattggaatttggggtggagctagaagagtttattctgcttttaagttttttttattcacacttttaggatcagtgctaatgttagtggcaataatttcaatttattggatcacaggcaccacagatgttgttcaactctatgagttaggtatagatacgaaatatcaaaatttattgtggttagct

SEQ ID NO: 200744 - DNA, 661 bp, Unknown
  Bacterial polypeptide expressing nucleotide sequence isolated from the Sargasso Sea
aatgacaaaaaaaattaaaaatctaaatttaaattttggtcctcaacatcctgctgctcatggtgtcttaagattaattttagaattagatggtgaagtagttgaaaaagcagatccacatattggattattgcataggggtaccgaaaaattaattgaaaacaaaacttatatgcaggccgtaccttattttgatagacttgattatgttgctcccatgaatcaagagcatgcttttgctcttgctattgaaaaaattttaaaaatagaagtccctataagagctcaattaattagagtaatgttctgtgaaataggtagaatattaagccatgtattaaatgttacaactcaggctttggatgttggtgcattaacaccatctctatggggatttgaagaacgtgaaacattaatgactttctatgaaagggcatctggttcaagattacatgcaaattattttagagctggaggagttcatcaggacttacctgctggattagaggaagatatcttaaaattttgtgagacatttcctaaagtgataaatgatcttgaggatttgttaacagataatagaatttttaagcaaagaaatgttgatattggaatagttagtaaacaaaaaggtttagattattcttttactggaataatg

SEQ ID NO: 200745 - DNA, 783 bp, Unknown
  Bacterial polypeptide expressing nucleotide sequence isolated from the Sargasso Sea
attgggaattacatttggtttagcgtttttacttgcgggtatagtttttaaaatttctgctgtcccttttcatatgtgggctcctgatgtttaccaaggtgcagcaactcctgttacatcattttttgcatcagtcccaaaaatggcagcaataataattttaataagaatattatatgttccttttgataactttatatccagctggtcacaaataattatatttgtatctttttcttctattttgctcgggtctgtggttgctatatggcaaaaaaatataaaaagattaattgcctatagctcaattgcacatatgggatttgcaacactagctttatctactggaaacaagagcgatatagaaagtatattggtttatatgattatatatatagttgccaatatcggtttcttttcatgcttaataaatattcaaaataagactgaaaaaaatattaataacatctctgatctagctggcttgtcagtaaataatcctagcttagctatttctatagctctttacatgttttcttttgctggaattccacctttggcaggtttttttgcaaaatattatgtttttatttctttaataaatgagggattaatctttttagcaacctttgctcttattgctagtgttattggagcattttattatattcgttttgttaaagtaatgttttttgatgaggttgctaatactaaaaaaattacattttcaagatctttaggattaatcaattcaatatgttttatttttatacttggatttat

SEQ ID NO: 200746 - DNA, 769 bp, Unknown
  Bacterial polypeptide expressing nucleotide sequence isolated from the Sargasso Sea
atcaggactattattatatggatgttctttggtttatggtttttcaggttcaacaaattttaatataatatcaaatcaattaaattctgaggagtacgttttaacatttggaattgtgttcatattagttggtttagctttcaaaatttctgcggttccatttcatatgtgggctcctgatgtttacgagggatctccaacaactgtaactttatttttctcaatagtaccaaaggtagctgctttaactgtatttattagatttttatatgttccctttttaaatttaattgatcaatggcaaacgataatagtttttttatctatagcttctatggtcttcggagcagttgctgcaatagggcaaactaatattaaaaggttggtagcttacagttctattgggcatataggctacacattagctggattaacaactgcatcaaatgagggaattcaaagctcaataatatacatatctatatatgttgttatgaacttagctcttttttcttgtttattaatgttaagaagaaaagatcaatactatgaggatattgatgatctttccggtttatcaaaaaatcacccattattatctttatgtttgttattaatactgttttcattagcaggaatacctcctctagcgggtttctttgcaaaattttatgtttttaaagcagttttagaacaatcgatgtatttcttagctatagtggggctattatcaaccgtgattgcagctttttattatctaaggataata

SEQ ID NO: 200747 - DNA, 837 bp, Unknown
  Bacterial polypeptide expressing nucleotide sequence isolated from the Sargasso Sea
aatgacaaaaaaaattaaaaatttaaatttaaactttgggccacaacatcctgctgcacatggagttttaaggttaatattagaactggatggtgagattgttgaaaaagctgatccacatattggtttattgcataggggtactgaaaaattaattgaaaacaagacttacatgcaagcagtaccttactttgatcgattagattatgtagctccaatgaatcaagaacacgcatttgcattagcggttgagaaaattctaaaaatagatgttcctattagagctcaattcataagagttatattttgtgagattggaagaattttaagtcacatattaaatgttactacacaagcgatggatgtgggggctttaacaccaactttatggggatttgaagaaagagaaaaattaatgggtttttatgagagagtgtctggttctaggcttcatgcgaactattttagagctggcggagttcatcaagatttaccccaaggacttgaggaagatattgcagagttttgtgagagttttccaaaaataataaatgatttagaaagcttactaacggataacagaatttttaaacaacgtaatgttgatattggtgtagttaccaaacaagacgctctagactattcattttctggagtaatgattagaggatcaggagttccatgggatttgagaaaatctcaaccttatgattgttatgaaaatttagatttcaaagtgccagtaggaaaaaacggagattgttatgatagatatttatgtcgaatagaggaaatgaaacagagtgtatctataataaaaacatgtttattaaaaat

SEQ ID NO: 200748 - DNA, 487 bp, Unknown
  Bacterial polypeptide expressing nucleotide sequence isolated from the Sargasso Sea
aatgaattttagtaggttatttaaaactatatttctcgtagaatttatatctggattgctaattgcaattaaagaattattcagaaaatcaaaaacgatcaattacccatttgaaaaaggaccgatcagccctcggatgagaggagagcatgctctgagaagatatccaaatggagaagaaagatgtatcgcatgtaaattatgtgaagcggtttgtcctgctcaagctattacaattgagtcttcagaaagatcagatgggagcagaaaaacaactcgatatgatattgatatgctaaaatgtatttactgtggactttgtcaagagtcatgtccagttgatgctattgtacaaggaccaaactttgaatttgctacagaaaccagagaagagctttattataataaagaaaaacttcttgagaatggagataaatgggaaccagttttagcaaaaaatataaaactagataaaccttatagataa

SEQ ID NO: 200749 - DNA, 169 bp, Unknown
  Bacterial polypeptide expressing nucleotide sequence isolated from the Sargasso Sea
atgactaaaagagaaaattattcacttaattttggcccacaacaccctgcagcgcacggtgttctaaggcttgtattagaattggatggagaagttgttgaaagggcagaccctcatataggacttttacacagagggacagaaaagttaatagaaaacaaaacatata

SEQ ID NO: 200750 - DNA, 536 bp, Unknown
  Bacterial polypeptide expressing nucleotide sequence isolated from the Sargasso Sea
aatgactaaagaaaaaaaaactttaaatttaaattttgggcctcaacacccagctgcgcacggtgtattgaggcttattttagaattagacggagaagttgtagaacatgcagatcctcatattgggttactacataggggaactgaaaagttaatagaaaataaaacatatcttcaagcactaccttattttgaccggcttgattatgttgcaccaatgaatcaagaacatgcatttgcaattgcagttgagaaaattttaaatattgaagttccaattagagctaaatttataagagtaattttttgtgaaattggaagaatattaagtcatattttaaatattacgacgcaggccttagatgtaggagctttaactccttcattatggggtttcgaagaaagagaaactttaatgactttctatgaaagagtttcaggttcaagattacacgcaaattattttagaacaggtggggttcatcaagatttacctagaggattaacagatgatatagcaaagttttgtcaaaatt

SEQ ID NO: 200751 - DNA, 426 bp, Unknown
  Bacterial polypeptide expressing nucleotide sequence isolated from the Sargasso Sea
aatgactaaagaaaaaaaaacgcttaatttaaattttggcccccagcatccagctgcgcatggtgttttaaggttgatattagaattagatggtgaaatagttgaaaaagcagatccacacataggattgttacatagaggcactgaaaaattaattgaaaacaagacttactcacaagctataccttattttgatcgacttgattatgttgctccaatgaaccaagagcatgcatttgctcttgcaatagaaaaaattatggatgttgaggttccaattcgaggtcagtatattcgagtaatattttgtgaaattggcagaattttaagtcatattttaaacattaccacacaagcacttgatgtcggagctttaacaccttctctttggggatttgaagaaagagaaaaattaatgggttttta

SEQ ID NO: 200752 - DNA, 167 bp, Unknown
  Bacterial polypeptide expressing nucleotide sequence isolated from the Sargasso Sea
aatgaataatttagaaaataaaaaacaaataccagacgaatttaaacaacttgcagaagattttagtaaaaatggttttataactacatcttttgataatttagtaaactgggctagaacagggtctttgcattggatgacctttggtctagcttgttgtgctgttg

SEQ ID NO: 200753 - DNA, 410 bp, Unknown
  Bacterial polypeptide expressing nucleotide sequence isolated from the Sargasso Sea
aatggttaaaaaaaataaaacattgaatttaaattttggaccacagcatccggctgctcatggtgtactgcgccttatattggagctagatggagaaattgttgaaaaaatagacccgcatattggacttttgcacagaggtacagaaaaacttatagagcacaaaacttacactcaagcagtcccatattttgacagacttgattatgtagctccaatgaatcaggagcatgcatttgctttagcgatagaaaaactattaagaataaatgttcctattagaggtcaatatataagaattttattttgtgaaataggaagaattctgagtcatttattaaatataactacccaagctttagatgttggagctttaacaccatctctttggggttttgaagaaagagaaa

SEQ ID NO: 200754 - DNA, 502 bp, Unknown
  Bacterial polypeptide expressing nucleotide sequence isolated from the Sargasso Sea
aatgaattttcctattctttcatctttaatattattaccaacagttggagctttatttttattttttactaaagataaagaaggaaataatgtaactgctaaatatgttgctctatttacgactgtagtaaattttttaatttcgatttacctgtggatttcttttgaccaatcaacgtctagttttcaatttgtagaagatagaacatggattgaaggatttattaattacaaagttggtgttgatggtatttcaattttattcattattttaactacattcataacacctttgtgcattatatctgtaaataattctgtcaaaaatagattaagagattttttaattgcaattctaatcatggaaagttttatgataggtgttttctgttcacttgatttagttgtattctatttattctttgaagcaggtttaattccaatgtttttaattatcggaatttggggtggacccaagaagaagtttattcagccaatttaa

SEQ ID NO: 200755 - DNA, 538 bp, Unknown
  Bacterial polypeptide expressing nucleotide sequence isolated from the Sargasso Sea
gatggtaaaaaaaactaaatctcttaatttaaattttggccctcaacaccccgctgcacacggtgtattgagacttattttagagttagatggagaagttgtagaaaaagcggatccacatatcggattattacatagagggactgaaaaacttattgaacaaaaaacctatactcaagctttgccttattttgatcgcttagattacgttgcaccaatgaaccaagagcatgcttttgctttagctgcagaaaaattgcttaatatagaggttcctataagagcaaaatacataagagtgattttttgtgaaattggaagaatcttaagtcatatattaaatgtgactactcaagctttagatgttggagccttaactccttctttatggggctttgaggaacgagagacactaatgaccttttacgaaagagcctctggttcaagattacatgctaattattttagaactggtggagttcatcaggatataccacttaaactcgttgatgatatagaaaaattttgtaaatctttt

SEQ ID NO: 200756 - DNA, 442 bp, Unknown
  Bacterial polypeptide expressing nucleotide sequence isolated from the Sargasso Sea
tttgaaaggtttgttgatagctataaaggagtcatttaaaccaaaaaaaacccttaattatccttttgaaaaaggcaagatttcaccacgatataggggagagcacgccttaagaagatatccaaacggcgaggaaagatgtatagcatgtaaactttgtgaagctgtttgtccagctcaggcaataacaatagagtctacagcaagagaagacggaagtagaaaaacaactagatacgatattgatatgctaaaatgtatctattgtggtttgtgtgaagagtcgtgtccggttgatgctatagtgcaaggtcctaattttgaatttgcaacacatactagggaagaactttactacaataaagaaaagcttttagaaaatggagatagatgggagaatgttttagctgcaaatataaaagctgataacccttatagataa

SEQ ID NO: 200757 - DNA, 787 bp, Unknown
  Bacterial polypeptide expressing nucleotide sequence isolated from the Sargasso Sea
gatggtaaaaaaaactaaatcgttaaatttaaattttggcccacaacatccagcggctcacggcgtattaaggcttatattagagctagatggtgaagttgttgaaaaagcagatccacacatcgggcttcttcatagaggtaccgaaaaacttatagagcaaaaaacttacacacaagctttaccttactttgacagactagattatgtcgccccaatgaatcaagagcacgcttttgcacttgctgctgaaaaattacttaaaattgaggtgccaataagagcaaaatacataagagtaattttttgtgaaattggaagaattttaagccacatcttaaatgttactacacaagctttagatgtgggagccttaacaccgtctctgtggggtttcgaagaaagagaaactttaatgacattttacgaaagagcttcaggatcaagattgcatgcgaattattttagaactggtggagttcatcaagatattccattaaaattagtagaagatatagagaaattttgcaggtcattccccaaaataattgatgatttagagagtttactcacagacaatagaatttttaaacaacgaaatgttgaaatcggaatagtaactcaacaagaagctttggatcatagtttttcaggagtaatgttaagaggttctggcgttccttgggatctaagaagatctcagccttatgaaatttataaagatttagattttaaaatacctgtaggtaaaaatggagattgctatgaccgatatctctgcagaatt

SEQ ID NO: 200758 - DNA, 169 bp, Unknown
  Bacterial polypeptide expressing nucleotide sequence isolated from the Sargasso Sea
gtcatatctatctttatttactttttcaatgttaatgttggtaacgtcagaaaattttttacaactcttttttggttgggagggagttggtgtgtgctcttattttttgattggtttttggtttaaaaaacaaagcgcaaataaggcagcaataaaagcttttctggtt

SEQ ID NO: 200759 - DNA, 424 bp, Unknown
  Bacterial polypeptide expressing nucleotide sequence isolated from the Sargasso Sea
gatgaaaattacaagattttttaaaacaatatttatggttgattttataactgggttattaatcgccttaagagaaatgtttaaaacaaaaaaaacaattaattatccttttgagaaaggaaaaattagcccaagatttagaggagagcatgcacttagaagatatccaaatggcgaagaacgatgtatcgcatgtaaactatgtgaggctgtgtgtccagcacaagcgattacgattgagtcagctgaaagatctgatggaagtagaaaaactacccgttacgatatagatatgatgaaatgtatttattgtggtctatgtgaggagtcatgccctgtagatgcaatagttcaaggtccaaattttgagttttctacggaaacaagagaagaactttattacactaaagaaaaaattatttag

SEQ ID NO: 200760 - DNA, 487 bp, Unknown
  Bacterial polypeptide expressing nucleotide sequence isolated from the Sargasso Sea
atgaaaatttcaagactattaaaaacaatattcatgattgattttgtgactggtttattaattgcaataaaagagacttttaaagcaaaaaagacaataaattatccttttgaaaaaggatctttaggaacaaggtctagaggggagcacgctcttagaagatatcctaacggtgaagaaagatgcatagcgtgtaagctttgtgaagctgtatgtccagcccaagctattacaattgagtcaaaggaaagagatgatggtagcaggaaaactgtaagatacgatattgatatgctcaaatgtatatactgtggtctttgtgaagagtcatgtcctgtagatgcaattgtgcaaggccctaattttgaatttgcaacagagtctagagaagagctttattatacaaaagaaaaactcttggaaaatggagacaggtgggaaaacattttagccgcaaatataaaggctgatagttctcacaggtaat

SEQ ID NO: 200761 - DNA, 251 bp, Unknown
  Bacterial polypeptide expressing nucleotide sequence isolated from the Sargasso Sea
tttatttttgggtggctggttatccccaatagatatcttcccatttaatgctattccaggtcctttttggttaatcttcaaaatattatttttatttattttatttgcgttagttaaagcaactgttccaagatacagatatgaccaattaatgaagcttggttggaagatatttctcccattttcactgttttatgttgttttaacttcaagttttttactatattttgatttactaccagggaaataaa

SEQ ID NO: 200762 - DNA, 676 bp, Unknown
  Bacterial polypeptide expressing nucleotide sequence isolated from the Sargasso Sea
aaagttgccatacacctatgctttaatgattattggaacacttgctttaacaggttttccatttttatcaggattttattctaaagatgcaattatagaatttgcgtatttaaaaggtaatactactggttattatgcagctgggattggaataattacagcatttttaacatccatttattcttggagattgatatttaaaactttccatggagagtataataataaagagatcaagatagaggaaacacacgagtctcctttagtaatgcttgttcctttatttatcctctcaataggagcggtatttgctggttttctatttaaaggactatttattggtcatggtgaaaatttattctgggcagagtctattaagtttttagaacctttaagcactgaacatccccctttatggtttttacttttaacaccttgtttagttttagtatctattccaattgcttattacttatttgtaaaaaacaaagagttacctaattcaatagtttctatgaacaaacctttgtataattttttagtcaataaatggtatttcgacgagttgtatgatgtgttgtttattaaatcctcaaaaaaactaggtctatttttatggaaattttgtgatggaactataattgatggttttggtcctgatggaatttcttctttt

SEQ ID NO: 200763 - DNA, 797 bp, Unknown
  Bacterial polypeptide expressing nucleotide sequence isolated from the Sargasso Sea
gatggcagaatcacaaataaagccgctcacgttgaactttggcccgcagcaccccgccgctcacggtgttttgagacttgtgatggagatggatggagaaattgttgaacgcgccgatcctcatataggattactgcatcggggaaccgagaagcttatagaacataaaacatatctacaggcggtaccgtactttgatcggctagattacgtggctcctatgtgtcaggagcatgcgtatgccctagcagtggaaaaattgttaggtatagatgttcctaaacgtggtcagtacgtcagagttctattttcagagctatcacggatattgaatcatattttgaatattacaacattcgccctagatgttggagcaatgacgccgttgctttggggttttgaagaacgcgagtttttaatggaattttatgaacgtgcgtccggtgcacgtcttcatgcagcatatttcaggcctggaggcgttcatcaagatttgccagaaggcatgattgaggatgttgcaaaatgggcagaaaaattcccagatttcgtagaggatatggaacaccttttgacgaataatagaatatttaagcagcgaacagtcgatattgggatggttaatcaagacgaagctcagtcccttgggtttactggcccctgtattcgggcctctgggttgccttgggatttgagaaaatcgcagccgtatgacgcttactctgaaatggattttgatattcctattggaaaaacaggtgattgttatgcacggtatcttgttcgcgtggaggaaa

SEQ ID NO: 200764 - DNA, 370 bp, Unknown
  Bacterial polypeptide expressing nucleotide sequence isolated from the Sargasso Sea
tatgaaattatcaagaatatttaaaactatttttttactggattttattagtggattatcaattgcaattaaagaaattttcaaatcaaaaaaaactttaaattacccttttgaaaaaggtaaaataagtccaagatttagaggtgaacatgcattaagacgataccctaatggggaagaaagatgtattgcatgtaaattatgcgaagcagtctgtcccgctcaagcaattacaatagagtcaactcaaagagcagatggcagccgtaaaacaacaagatacgatatagatatgatgaaatgtatttattgtggtttatgtgaagagtcatgtccagtagatgcaatagttcaaggaccaaatttttga

SEQ ID NO: 200765 - DNA, 901 bp, Unknown
  Bacterial polypeptide expressing nucleotide sequence isolated from the Sargasso Sea
cagcttcatcaccacgttggcctgcctggcggcttggccggtgacctttaaaccgcggctgttttatttcctgctgctggccatggacggcggccagatcgctgtcttcgcagtccaggacatgctgctgttcttcctggcctgggaactcgaactgatccccgtttacctcttattagccatttggggcggcaaaaaacgccaatacgccgccaccaaattcatcctctacaccgctggcagctcccttttcatcctgctggtagccctggccatggccttcagcggcggcgggcctgtcagctttgagtactccgatctagcggccaaacatctcggtgcaggcttccaagctctttgttatgcgggcttgctgattgccttcggcgtgaaattgccgatcgtgccgctacacacgtggctcccggatgcccacggcgaagccacggcaccagtccacatgctgctagcgggcatcttgctgaagatgggcggctacgccttgttccgcttcaacgcgtcaatgttccccgacgcccacgtgcagttcgcgccactgctggtggtgctgggggtggtgaacattatttatgcagcgctgacctcgtttgcacagcgcaacctcaaacgcaagatcgcctacagctccatcagccacatgggctttgtactgatcggcatcggcagcttctcgcccttagccgccagtggcgccatgttgcagatgatcagccacggcttgatcggcgccagcttgtttttcctggtgggggccacctacgaccgcacccacaccctgcagctcgatgagatggggggagttggccagcgcatgcgcaagatgtttgccatgtggaccgcctgctcgctggcatcactggcgctgccgggcatgagcggc

SEQ ID NO: 200766 - DNA, 487 bp, Unknown
  Bacterial polypeptide expressing nucleotide sequence isolated from the Sargasso Sea
gatgaaaattacaagatttttcaaaacaatattcatgattgattttattaccggtcttttaatcggtgtagtagaaatgtttaaatcaaaaaaaacaattaattatccttttgaaaaaggaaaaattagtccaagatttagaggtgagcacgcgctcagaagataccccaacggagaggaaagatgcatagcatgtaaattatgtgaggctgtatgtccagcccaagcaataacaattgagtctacagaaagatctgatggaagtagaaaaactacccgttatgatattgatatgatgaaatgtatttattgtggcttatgtgaggagtcttgtccagtagatgctattgtgcaaggtccaaattttgaattttcaactgaaacaagagaagaactttattacactaaagaaaaattattagataatggtgatagatgggaaaatattttagcagcgaatataaaatcagataacccttatagataa

SEQ ID NO: 200767 - DNA, 724 bp, Unknown
  Bacterial polypeptide expressing nucleotide sequence isolated from the Sargasso Sea
atggttgataattttcaaaatgaaaaaaatataaaagaaagttctgttagaaattttaacattaactttggaccacagcatcctgctgctcacggtgttttgagaatggtcttagaattagatggagaagttgttgataggtgtgatcctcatattggacttcttcacaggggaactgaaaaattaatggaaagcagaacttatcttcaaaatttaccttattttgatagattagattatgttgctccaatgaaccaagaacatgcttggtgcttagctatagaaaaacttttaaatgttaaaattacctatagggcgtcattgataagagttttatattctgagattggtcgagtgctaaaccacttattaaacattactactcaggctatggatgtaggagcgttcacacctatatcttggggatttgaagaaagagaaaaattaatggttttttatgaacgagcttgtggggcaagacttcacgcagcctatttcagacctggtggcgttcatcaagatctttcagaacaacttttaaatgatattatgatctggtctgaagaattcccaaaaatagtaaatgatatagaagacttattaactgaaaatagaatattcaaacaaagaaatgtagatattggtgtggtaaataaagatgatgcttttgaatggggattttcaggtgtcatggttagaggctcaggtttagcttgggattaag

SEQ ID NO: 200768 - DNA, 487 bp, Unknown
  Bacterial polypeptide expressing nucleotide sequence isolated from the Sargasso Sea
atgaaaatttcacgattattaaaaactatatttatgattgactttgtgactggtttattaattgcaataaaagagacttttaaaacaaaaaagacaatcaattatccttttgaaaagggatccttaggaataaggtccagaggggaacatgctctcagaagatatcctaatggtgaagaaagatgcatagcgtgtaagctttgtgaggctgtatgtccagcccaagctattacaattgagtcgaaggaaagagatgatggtagtagaaaaactataagatatgacattgatatgcttaagtgtatatactgtggactttgtgaggaatcttgtcctgtagatgcaattgttcaaggtcctaattttgaatttgcaacagagacgagagaagagctttattatacaaaggaaagactcctggaaaatggagacaggtgggaaaatattttagctgccaatataaaggctgatagttctcacaggtaat

SEQ ID NO: 200769 - DNA, 184 bp, Unknown
  Bacterial polypeptide expressing nucleotide sequence isolated from the Sargasso Sea
atgggaagctgtgcaaatggaggtggatattatcattattcctactctgtagttagaggatgtgatcgaatagttccagttgatgtatacgttcccggttgtcctccttctgcagaggcacttctttatggaatattgcaattacaaaaaaaaattagaaataaaggttctatagaaagataga

SEQ ID NO: 200770 - DNA, 814 bp, Unknown
  Bacterial polypeptide expressing nucleotide sequence isolated from the Sargasso Sea
atgtcaattaacactcaacccgtaacaattaatcttggaccacaacatccctcaacgcatggagtttttaggttaagagtgacatttgacggagagcaagtagttgatgttgaaccagtatttggctatctacatagagggactgaaaaattagctgaagaacgtaattatgtgcagatagtcacacttaccgaccgtcttgattatgttgcagcaatgactaataatctagcatacgttcgcgcagtggaatcactggcgggtataaacgtgcctgacagaggcatgtatcttcgtgtaataagtgcagaattacagagaattgctagccatctaatagcaacgggctttttacttgatgagcttggagcatttcatactcctttgatttattgtttcagagaacgcgaacgtattcttgagttatttgagatgctatgtggcgctaggattacagttagctatatgaggccagggggagtatttcaggatgcacccacagatttttggccgcgtctcgatgatttcttgaactcaatgcccgggtacttagatgagctcgaaggacttattactgaaaacgaagtagtgttagcgcgtacaagggatatgggtatattatcagctcaagatgcaatagatgcttcaataactggacctgttttgcgggctactggagtccagtgggatttacgtaaagcggaacctcatgaggtgtatgacaggttggattttgatgttcccatagggtctgttggggacacttatgatagatattatgttcgtgttcaagaaatgcgacaaagtttgcgga

SEQ ID NO: 200771 - DNA, 772 bp, Unknown
  Bacterial polypeptide expressing nucleotide sequence isolated from the Sargasso Sea
gatgttgcaacatacggtattaagttggttgatttggttgcctgtatttggttcgttttttttgatgtttactgcaaagtctacgtcagtgtctttttctcgttggttttcattggcaatatcattgctatcactattgctctgtgtttatttgatatctcattttgatacgaatacatcaaagatgcaattttccgataatcatttgtggatacccgatttgcgaatttactacaatctgggtgttgacggtatttcaatgcctttggttgtattaacgtgcttcactactcttattgtagtggttgcttcgtggaaaatggttacagaacaggtgccccaatatttagccgcatttttgatgatgcagggtatggttattggcgtgttttgctcacttgatgccattttattttatttcttttgggaagctatgcttattccaatgtatttgagtataggtatttggggtgggggaaatcgctcctatgctgctattaagttttttatctatactttttttggctctgctctgatgctgattgcgttgctttatctcagaatgcatacaggcacgtttaatatactgagctggtaccattatcctttgagtatgtttcagcaaaaattgattttttgggctttttttgtggcatttgcaatcaaaatacccatgtggccgttacatacatggttgccagatgcgcacactgaagcgccaaccggtgggtcagttatattggctgcactcatgctaaagttaggtggctac

SEQ ID NO: 200772 - DNA, 907 bp, Unknown
  Bacterial polypeptide expressing nucleotide sequence isolated from the Sargasso Sea
atcttcaggtttacttttatacggatgttctttaatttatggtttttcaggatctacaaacttttacttaatttccgaaaatattcattcctcagaatatggaaacatttttggtatagtttttattttggttgggttagcatttaaaatatcagctgttccgtttcatatgtgggctcctgatgtttatgaagggtcacctacatcagtaactttattttttgcagtagttccaaaagtggcggctttaactgtgtttattagattcttatatgttccttttgttgatttaatagatcaatggcaaatgataataatttttttatcactagcatcaatgatattcggtgctgtttctgcaattggacaaaaaaatttaaaaaggcttatagcttacagttccattggacacatgggttatgctttagctggattaacagttgggacaaattctggaatacaaagttcaattatttatatctgcatttatttaataatgaatttaggatttttttgctgtttatttatgatgaaaagaaaagatgaattttttgacaatctagaagatttgtcagggttatcaaaaaatcacccaatagtatctttgtctatgttgattttattgttttctttagcagggattccaccaatggcaggtttttttgctaaattttatatatttatgtcagtgattgaacaatcgatgtattttttagcaattgtaggacttgtaactacggtagtttcagcattttactatcttaaaattataaaaattatttattttgattcaccaaaagaaaaatatgatcaagatcaccattttggattaaaaatttcactaacagtaactacattattaatactattatattttatttatccaaatgggttagttaatttggta

SEQ ID NO: 200773 - DNA, 753 bp, Unknown
  Bacterial polypeptide expressing nucleotide sequence isolated from the Sargasso Sea
ctttagcactgactggatttccttttctatctggcttttactcaaaagatgcaattattgaatttgcgtatcttaaaaattcctctatgggaaattatgcagctacaataggtataacaactgcatttttaacatcaatttattcttggagattattttttaaaaccttccatggaccttacaataataaaaaaattctttttaatgaaactcatgaatccccactagtaatgctgattcctctttttttacttggcattggagcaatattttctgggtacttttttaaaggtatttttattggccatcatagtaatgaattttggcaaggatcaatcttttttttaaacgaaattaaacatgacaccatacctttatggttcttattaactacaccagtattagttttaatagcaattcctatctctttttatttatatattataagtccaaaaattttagaagatttcaaaaataccaatatgcctttatacaaattcttattaaacaaatggtatatagatgaattttatgaaaaaatttttgttaatccaacaaagaaaataggttcatttttctggaaaaaaggagatataggtataatagataaatttggtcctgatggtatttcaaaactaatcaagattatttcttataaaactggacgtcttcaaacaggatttatttatgattacgcttttgtaatgttattgggtttatcaattttattaacttatttgattttaaagtaaa

SEQ ID NO: 200774 - DNA, 224 bp, Unknown
  Bacterial polypeptide expressing nucleotide sequence isolated from the Sargasso Sea
tatggctgagatgcagattaaacctatcacgatgaattttggtccgcagcatccggcggcccacggagtgttgcgcttggttctggaaatggacggcgaggttattgaacgtgccgacccgcatattgggttgttgcaccgcggcactgaaaaacttattgagcataaaacctacttgcaggccctaccgtattttgaccgactcgattacgtttcgccaatga

SEQ ID NO: 200775 - DNA, 379 bp, Unknown
  Bacterial polypeptide expressing nucleotide sequence isolated from the Sargasso Sea
gtttgaaaaaggtaaaattagcccaagatttagaggcgaacatgctttaagaagatacccaaatggagaggagagatgtatcgcatgtaaactttgtgaggccgtttgtcctgcacaagcaattacaattgagtcagaagaaagagctgatggaagcagaaaaactaccagatatgatattgatatgctcaaatgtatctattgtggtttgtgcgaagaatcttgccctgttgatgcaatagtccagggtccaaactttgagtttgccacagaaacaagagaagaactatattataataaagaaaaactcttagacaacggcgatagatgggaatctgttctggcacaaaatataaaattggataaaccatacagataa

SEQ ID NO: 200776 - DNA, 787 bp, Unknown
  Bacterial polypeptide expressing nucleotide sequence isolated from the Sargasso Sea
accttacacttactctttgatgataataggaactttagcgttaacaggctttcctttgttatcaggtttttattctaaggatgcgatcatagaatttgcatatttaagtggcacaactactggctactatgcagctggaataggaatatttacagcttttttaacctcaatttattcttggagactgatgtttaaaacttttcacggacaatataacaacaaggaaattaaaattgaggagacacatgagtcaccactaattatgttaatacctttgataatattatctatcggagcaatttttgctggatttatttttaaagatttatttgtaggttatgaaggaattaataatttttggaatgagtcaattttcttcttagaacctttaagcactgatcatccaccattatggtttttaattttaactccaacgcttgtaactttatcgataccattcacttattatttatttgtaaaaaataaaaattttccaactcaactagtaaatataaataaaccattatatgaatttttgtttaataaatggtatttcgatgaaatttacgacattttgtttgttaaatcttcgaaaagatttgggttatttctgtggaaattttttgatattaaagttatcgatggttttggacctgatggaatctcagggttaattaaaaaattttctatcaaagccaataaatttcaaagtggttatatttatcaatatgcatttgtaatgcttcttggtttttctgctttcttaaccttctttattgttaaataa

SEQ ID NO: 200777 - DNA, 253 bp, Unknown
  Bacterial polypeptide expressing nucleotide sequence isolated from the Sargasso Sea
atgaaaatttcaaggattttaaaaactgttttaatgatagattttttaacaggactatttatagcaataaaagaaacttttaagcaaaaaaaaactataaattatccttttgaaaaaggatctgttagtgctagagccagaggcgaacatgcacttagaagatatccaaatggggaagagagatgtattgcttgtaaattatgtgaagcagtctgtccagctcaagcaataacaatcgagtcaaaagaaagaa

SEQ ID NO: 200778 - DNA, 767 bp, Unknown
  Bacterial polypeptide expressing nucleotide sequence isolated from the Sargasso Sea
tatgtttttacttattttaggtgtttttaaaaatgacagttctaaaattacttttaatttatctttgtttgtaattttaattacaacagtaataacattcaatgaaaccctctctgtaactagagaaagtttgtttaatgggagcgttgtgattgacagtatgtcctcgttaatgaaaattataactttaattggaggttttttagttttagttatttcgtcaacttatttaaaaacatttaaaatatataatatagaatacccagttcttattttgagttcaattcttggaatgatggtaatgatcagttcaaatgatttaattgttttttatatgggcttagaattacagtcattagctctatatgttttagctacatataacagagatcaattaaaatcttcagaagcgggtttgaaatattttgttttgagtgcactatcttcaggacttttattatatggatgttctttagtttatggtttttcaggttctaccaattttgatataatatcaaatcaactaaattctgaggaatatgttttaacctttgggattgtctttatattagttggtttagcatttaaaatttctgcagttccattccatatgtgggcacctgatgtatatgaaggatctccaacaactgtaactttgtttttcacaatagtaccaaagatagctgctttgactgtatttattagatttttatatgttccatttttaaatttaactgatcaatggcaaatgataatagttttcttat

SEQ ID NO: 200779 - DNA, 934 bp, Unknown
  Bacterial polypeptide expressing nucleotide sequence isolated from the Sargasso Sea
ttcgattagccagtccgacttccagttccagtcaatccaatcttggattcccagtttgggcatcaactggcacgtgggcgtagatggcatttcactctggctagtcgtacttactggacttattacgcctctagtcctggtagcagtagaccctcatcacgatccgaaaccatataccgcttggcttctactacttcaggctggatcttttggcgcctttatggcgctcgaccttttcttgttcttcgtgatgttcgaaatcgtgttggtgccgatgtacatgctcattggcgggtggggttacgacgatcgccgatacgcagcgacgaaattctttctctacacaatggcgggctccgctctcatgcttgttgcgattgtcagcgtggcaacgttgagcgcaggtgaccaaggaattactttcagcgttattgaattggcggaacgtcaagcactttcgaccaatacagcgcgtctctgtttcttggcttttgcattggcgttcgtaattaaagttcctatcttcccggttcatacttggcttccggatgctcacacccaggcgcccacggcaggctcggtagtgctggcagcagtgatgttgaagctaggaacctacggtttgatgcgctttggcctctaccttttcccggaagcatcggtttgggcggctcccaccctcgcaacgcttggtgtagtgggcgttatttacggggcaatcgtcgccacgatgcaaaaagacttgaagagactcgttgcatattcctcggtggcgcatatgggatttattgtcctgggcatttttgccttcaccactcaaagtttggaaggcggtgtgttgcaaatggtcaaccacggcatttccaccggcgccttatttctcctcgtggggatgctctatgagagaagaaagactcgcgctatagatgaaatg

SEQ ID NO: 200780 - DNA, 204 bp, Unknown
  Bacterial polypeptide expressing nucleotide sequence isolated from the Sargasso Sea
aatgaaaatttcacgattattaaaaactatattcatgatcgattttgtgactggtttattaattgcaataaaagagacctttaaggcaaaaaaaacaatcaattatccttttgaaaaggggtctttaggaacaaggtctagaggggagcacgccctaagaagatatcctaacggtgaagaaagatgcatagcgtgtaagctttg

SEQ ID NO: 200781 - DNA, 834 bp, Unknown
  Bacterial polypeptide expressing nucleotide sequence isolated from the Sargasso Sea
aatgaaaacttttttaatagcaaaatcaagaaggcttagaggtacaccgtacacctctagaattgaaaaacagggtgtaagtgcttatactatatataatcatatgttgctgccagcagcatttggttctgtagaagatgcttatcatcacttaaaagagcatgttcagatttgggatgttgccgctgaaagacaagttgaaattactggtaaagactcagctaaattagttcaattgatgacttgcagagatttatcaaaatccaaagatggaagatgttattattgtcctatgattgatgataatgcaggtttaattaatgatcctgtagttctaagattaaatgaaaataggtggtgggtctctttagctgactcagatgtaattctatttgccaaaggattagcgattggaaataaatttgatgtaaaaatttctgaacctgatgttgatataatggcagtgcaagggccaaaatcatttaaattaatggaaaaagtttttggagaaaaaattgtaaatttaaaattttttggttttgattattttgaatttggtggagataaacatcttattgcaaagtctggatggtctaaacaaggtggctatgaaatttatatggaacacaacgagtcaggtttaaaactatatgatcatctttttgaaattggtaaggaattcaatattaggccaggtggaccaaaccttatcgaacgtattgagagtggtttactttcccatggtaatgatatggacaatggagataatccatatgaatgtggttttgataagtatgtaaatatagatagtgatgttgattttttaggtaaaga

SEQ ID NO: 200782 - DNA, 716 bp, Unknown
  Bacterial polypeptide expressing nucleotide sequence isolated from the Sargasso Sea
aatgaattttccaattctctcatctttaattttacttccaactattggtgctttatttatattttttactagaagcagtgaaaaaaataataatacagttaagtacgttgctttatttacttccatcgtaaacttctttttatctatatatttatgggccttatttgatcaaacaacttccgagtttcagtttgttgaagatcgagtctggattaaaaactttatcaattataaagttggtattgacggaatttcaattctatttattttattgacaacatttattacacctctctgtattttatcaattaacaattccattaaaaatagattaagtgagtttcttatagctgtactaataatggaatcattcatgattggtgttttttgttctttagatcttgttatattttatttattttttgaagctggtttaattccaatgtttttaattataggtatttggggtggaacaagaagagtatactctgcatttaaattctttttatataccttattaggatcagttttgatgttagttgctataatttcaatatactggataacaggaacaacagatgtagttgagctttataaaataggaatagatgttaaatatcaaaatcttttatggctagctttttttagttcatttgcagtaaaaaccccgatgtggccagttcatacatggttacctgatgctcatgttgaggcac

SEQ ID NO: 200783 - DNA, 804 bp, Unknown
  Bacterial polypeptide expressing nucleotide sequence isolated from the Sargasso Sea
gggaacttgagttaattccagtgtatttattattggctatttggggtggtaaaaataggcaatatgcagcaactaaatttattatttatacagctggtagctctatatttattctccttgcagcacttgctatgggtttctatggcactgaaattcctaactttgagttttctcacttggcagctcaagagtttagccaaaaatttcaaattctttgctatatagggctcttaatcgcgtttggagtcaaactacccattgtaccccttcatacttggcttcctgacgctcatggagaggctacagcgccagttcatatgctcttagctggcattttattgaagatgggggggtatgctcttttaagatttaatgcccaattattacctgttgctcatgctcaatttgctccattactaatagttcttggagtagtaaatataatttatgctgcattaacttcttttgcgcaaagaaatctcaaaagaaaaattgcttatagttctataagtcatatgggctttgtccttattggaataggaagttttagtagcctaggaacaagcggggcgatgctacaaatggttagtcatggattgattggtgctagtttattttttcttgttggagctacctatgacagaacaaagactcttaagcttgatgaaatgagtggtgtaggacaaaaaatgagaatcatgtttgctttatggactgcatgctcgcttgcttcacttgctttgccaggtatgagtggatttgtttccggaattaatggtatatacgggatttgttaccgatgaa

SEQ ID NO: 200784 - DNA, 875 bp, Unknown
  Bacterial polypeptide expressing nucleotide sequence isolated from the Sargasso Sea
ctctttagtttatggatttactggatcaacaaattttcaagtaatttcagataatttagataattccaatacaggtgcaatttttggaatagtttttattttagtagcgttagctttcaaagtttcagcagttccttttcacatgtggacgccagatgtttatgaaggttcccctacatctgtcacaactttttttgcacttattccaaaaattgccgcattatctgtttttattagatttatgtatgttccttttgtaaatgtagtcgatcagtggcaagttataatagtttttttatcaatcgcttcgatgattttaggagccgttggtgccattggtcaaaataatataaagagattaatggcctatagttcaattggacatatgggttatgctttagccggaatttcaacaggttcacaagagggagtacaaagcacaataatttacttaaccatataccttgtaatgaatctaggagcatttgggtgcattttaatgatgaaaagagaaaataatttttatgaaaatattaatgatttatcaggaatgtcaaaaaatcatccattactttctttagtatttttagttattcttttttcattagcaggaataccacctttagcaggattctttgcaaaattttacgtttttatggctgttataaaatcagaaatgtatgctcttgcgattattgggcttgtaacaactgtaatttctgctttttattacttaaggattataaaaataatttattttgataaaccaaagaaagcatttgatgttagttatgattgggggctaaaaatttcattaatattatcaagtattttagttttaatatactttatatatccttcaatactacttgatg

SEQ ID NO: 200785 - DNA, 262 bp, Unknown
  Bacterial polypeptide expressing nucleotide sequence isolated from the Sargasso Sea
aatgggagtaaattttggaggatttgcacaaaaacagaaagaaatccctgaagaatttaaagaattagctaaaaattttgcagaaaaaggttttattacaacttcttctgaaaatttaattaattgggcaagaacaggatcattgcattggatgacttttggtcttgcttgttgtgcagttgaaatgatgcaaacttcaatgcctagatatgatcttgaaagatttggtgctgcacctcgtgcatcacccgaggcagtcaga

SEQ ID NO: 200786 - DNA, 469 bp, Unknown
  Bacterial polypeptide expressing nucleotide sequence isolated from the Sargasso Sea
aatgaaaaaagaaaaaaaaacattaaatcttaattttggacctcagcatcctgcggcacatggagtattaagactcattcttgaacttgacggcgaagttgtggaaaaagcagatcctcatataggtttacttcatagaggaacagaaaaacttattgaaaataaaacatacatgcaagcagtcccatatttcgataggcttgattatgtggcaccaatgaatcaagaacatgcttttgctttagctatagaaaaaattcttaatataaaggttccaattagggctcaatacataagagttatgttttgtgagataggcagaatactcagtcatattttaaatgtaacaactcaagcaatggatgttggtgctctaactccaacattgtggggttttgaagaaagagaaactttaatgggtttttatgaaagagcttctggttctcgacttcatgctaattattttaga

SEQ ID NO: 200787 - DNA, 190 bp, Unknown
  Bacterial polypeptide expressing nucleotide sequence isolated from the Sargasso Sea
atgaaaaataatctagatcaagttccagaagaatttaaaaaattagctgaagattttagtaaaaatggatttattacaacttcaattgataatttaattaattggtcacgctccggctctttacactggatgacttttggtctcgcgtgttgcgctgttgaaatgatgcagactgctatgccaagatacg

SEQ ID NO: 200788 - DNA, 451 bp, Unknown
  Bacterial polypeptide expressing nucleotide sequence isolated from the Sargasso Sea
atggctgaaatgcaaattaaaccgatcactatgaattttggcccacagcacccggcggcgcatggcgtgttgcggctggtgctggaaatggatggtgaggtgattgagcgggctgacccgcatattgggcttttgcaccgtggcaccgaaaagctgatcgaacataaaacctatttacaggcactgccctattttgaccggcttgactatgtgtcgccgatgaatcaggaacatgcatgggcgctgtctgtcgaaaaagcgcttggtattgaggtgccgcgccgtgcccaatatatccgtgtgttgtattgcgaaatcgggcgtattttgaatcatcttctcaatctgacaacattcgccattgatgttggcgcaatgacaccattgttgtggggatttgaagagcgcgaacatcttatggggttttatgaacgtgcctgggggcgcggct

SEQ ID NO: 200789 - DNA, 487 bp, Unknown
  Bacterial polypeptide expressing nucleotide sequence isolated from the Sargasso Sea
aatgaaaattacaagattttttaaaacaatatttatggtcgactttgtaaccgggttatttattggtttaaaagaaatttttaaatcaaaaaaaactataaattatccatttgaaaaagggaagattagcccaagatacaggggagaacatgcactgagaagatatcctaatggtgaagaaagatgtatagcttgtaagttatgtgaagctgtatgtccggcgcaggcaataacgatagagtctgctgaaagatcagatggtagcagaaaaactactcgctatgatattgatatgatgaaatgtatatactgtggtttatgtgaggagtcttgtccagttgatgcaattgtgcagggcccaaattttgaattttctacagagacacgggaggaactttattatactaaagataaattacttgataacggagatagatgggaaaatattttagcagcaaatattaaatcagataacccttataggtga

SEQ ID NO: 200790 - DNA, 487 bp, Unknown
  Bacterial polypeptide expressing nucleotide sequence isolated from the Sargasso Sea
atgaattttagcaggctattaaagactatatttcttgtcgagtttatctctgggttgtatgtggcagtgagagaattatttagaaaatctaaaacaataaattatccttttgaaaaaggacgaataagtcctagaatgaggggtgaacatgccttaagaagatatcctaatggagaggagagatgtattgcctgtaaattatgcgaagcagtctgtccagctcaagctatcacgattgagtcttcagagagatcagatggcagtagaaaaactacacgttatgacattgacatgctaaaatgtatatactgtgggctatgtcaagagtcatgtccagtggatgctatagtgcaaggaccaaactttgaatttgctacagaaactagagaagagctttattacaataaagaaaaacttttagataatggagatagatgggagtcggttatagcaaaaaatatcaagctggataaaccttacagataaa

SEQ ID NO: 200791 - DNA, 238 bp, Unknown
  Bacterial polypeptide expressing nucleotide sequence isolated from the Sargasso Sea
atgaaaaataaaatagatcaagttccagaggaatttaaacaacttgctgatgattttagtaagaatggatttataactacatcacttgacaatttaataaattggtccagatctggatcacttcactggatgacatttggtcttgcatgttgcgctgttgagatgatgcagacatcaatgccaagatatgatcttgaaagatttggtgcggcaccaagagcttcaccaagacaatctg

SEQ ID NO: 200792 - DNA, 673 bp, Unknown
  Bacterial polypeptide expressing nucleotide sequence isolated from the Sargasso Sea
atgaactttccaattctttcatctttgatattactccctacaataggtgctttttttttatttttcacaagaagtaaaaaagaaaataattttacagtcaagtatgttgctttatttacttcattagttaatttttttttatctatttatttatggatattattcgatcaatccacatcagattttcaatttattgaaaacagaatatggattaaaggccttataaattataaagtaggcgtagatggtatatcaatattattcattattttaacaacgttcataactcctctctgtataatttcagtaaataattcaattaaaaaaagacttagtgaatttttaattgcagttttgattatggagtctttcatgattggagttttttgctctttagatttagtagttttttatttattttttgaagctggtttaattccaatgtttttgattataggaatttggggtggttccagaagagtttattcagcatttaaatttttcctttatactcttttaggatctgttttgatgttggttgcaataatttctatttattggattactggaacaacagatgtgacacaactttatgaagttggtattgataaaaaatatcaaaatcttttatggttagctttctttagctcatttgcggttaaaactcctatgt

SEQ ID NO: 200793 - DNA, 981 bp, Unknown
  Bacterial polypeptide expressing nucleotide sequence isolated from the Sargasso Sea
  misc_feature (11)..(11): n is a, c, g, or t
tagaagatgcntatcatcacttaaaagagcatgttcagatttgggatgttgccgctgaaagacaagttgaaatttctggtaaagattcagctaaattagttcaattgatgacttgcagagatttatcaaaatctaaagacggaagatgttattattgccctatcattgatgataatgcaggtttaattaatgatcctgtagttctaagattaaatgaaaataggtggtgggtctctttagctgactcagatgtaattctatttgccaaaggattagcgattggaaataaatttgatgtaaagatttctgaacctgatgttgatataatggcagtgcaaggaccaaaatcatttaaattaatggaaaaagtttttggagaaaaaattgtaaatttaaaattttttggttttgattattttgaatttggtggagataaacatcttattgcaaagtctggatggtctaaacaaggtggctatgaaatttatatggaacacaacgattcaggtttaaaactatatgatcatctttttgaaattggtaaggaattcaatattagaccaggtggaccaaaccttatcgaacgtattgagagtggtttactttcccatggtaatgatatggacaatggagataatccatacgaatgtggttttgataagtatgtaaatatagatagtgatgttgattttttaggtaaagaaaaactgaaaaaaattaaagctgaaggaattaaaaaaaaacttatgggagtaaaaattgatgccaaggaaataagtgttaatggctcaatggatctagtagatgaagataataatgtaattggagaattgagatctggttgttataatccaacttttaaacaagtcattgggattgcaatgattaacaaaccatactttgagacttcgaaatcctttaaaatcaatataaatggcactgattttgatggaaaagtttgtgatttacctttcatttagt

SEQ ID NO: 200794 - DNA, 868 bp, Unknown
  Bacterial polypeptide expressing nucleotide sequence isolated from the Sargasso Sea
atggaaaatattgactttatacttcctgaaatttttatttctataggaataatgtttttattaatagttggtgtgtttaaaaaaaatagctctcatttaatttattctatgtccattttatttttattaataactttagggttaataattaatttcccttttgaaatggagacttatttatttaataatagttataaaattgaccctttgtctacttttatgaaaatagtcactatattatcagggatttttgttttggttagttcatacaagtatgtaagcttagaaaatatttttaacatagaatatccagttttaattttatcttccattttaggaatgctagtgatgattagttcatatgacttaatagttttttatattggattggagcttcagtcattagcattatatgttttagctgcttttagtagagaaaaaactaaatcttcagaagcaggattgaaatattttgtactaagtgctttatcttcaggtctgcttttatacgggtgttctctaatttatggtttttctggatctacaaatttttatttaatatctgaaaatatacactcttcagaatatggaaatatatttggtatagtttttattttggtaggcttagcctttaaaatatctgctgtaccttttcatatgtgggctcctgatgtatatgaaggatcaccaacatctgtaaccttattttttgctgtagttccaaaagttgctgctttgactgttttcattcgttttttatatgttccatttgttagtttaatggatcaatggcaaatgattataatttttttatcagtagcatccatgatttttggagcaattgctgcaatcggtcaaaaaaattaaa

SEQ ID NO: 200795 - DNA, 248 bp, Unknown
  Bacterial polypeptide expressing nucleotide sequence isolated from the Sargasso Sea
aatgaaaaaaactaaaacacttaaccttaatttcggacctcagcatcccgcagcacacggagttttgagactaattttaaaacttgatggtgaggtagtcgaagaagcagatccgcacataggattacttcatagagggacagaaaaacttatagagcataaaacatatacacaagctttaccttattttgacagactagattatgttgctccaatgaatcaagaacatgcttttgctttagccacag

SEQ ID NO: 200796 - DNA, 487 bp, Unknown
  Bacterial polypeptide expressing nucleotide sequence isolated from the Sargasso Sea
tatgaaaatttctagattttttaaaacaatatttatgacagattttcttggaggcttattcatggctatcaaagaattttttaaaccaaaaaaaacaataaattatccttttgaaaagggtaaaataagtccaagatttagaggcgagcatgctttaagaagatatccaaatggtgaagaaagatgcatcgcatgcaagttatgcgaagctgtatgtcctgcacaagctataacaatcgagtctgcacagagagaagatgggagtagaaaaacaactagatatgatatagacatgatgaaatgtatttactgtggattatgtgaagagtcttgtccagtggatgcaattgttcaaggtccaaattttgaattctctacagaaactagagaagaactatattacacaaaagaaaaattattagataatggagatagatgggagaatattctggacgcaaatattaaagccgacaatattcacagataa

SEQ ID NO: 200797 - DNA, 487 bp, Unknown
  Bacterial polypeptide expressing nucleotide sequence isolated from the Sargasso Sea
atgaatttttctagattttttaaaacaatattaatgactgactttataggcggtttgtttattgccattaaagaattatttaaatcaaaaaaaacaattaattacccttttgaaaagggtaaaattagccctcgttttagaggtgagcatgctttgagaagatatccaaacggagaagaaagatgtatagcttgtaaattatgtgaagcagtatgtcctgctcaggcaataacgattgagtcttctgaaagagaagatggaagtagaaaaacaacacgttacgatattgatatgatgaagtgtatttattgtggattatgtgaagagtcttgcccagtagatgcaatagtacagggtccaaattttgaattttcaacagaaacaagagaagaactttattatacaaaagaaaaattattagataatggagatagatgggagaatgttttggaggctaatattaaagctgacaatatccatagataaa

SEQ ID NO: 200798 - DNA, 302 bp, Unknown
  Bacterial polypeptide expressing nucleotide sequence isolated from the Sargasso Sea
tatgtataaattaattaaatcttttactttatttgaattaattcagggtctatttttaactttcaaatatatatttaagtctaaagttacaataaactatcctcatgaaaaaggtccattaagtccacgttttagaggtgagcatgcactaagaaggtatcctagtggagaagagagatgtatcgcctgtaagctttgtgaagcagtatgtcctgctcaggcaattacaatcgaggctgagccaagagaggatggaagcagaagaacaacaagatatgatatagatatgaccaaatgtattt

SEQ ID NO: 200799 - DNA, 511 bp, Unknown
  Bacterial polypeptide expressing nucleotide sequence isolated from the Sargasso Sea
aatgagtttgaattttggcccacaacatcccgccgcacacggagtattaagattaattttagaacttgatggtgaagttgttgaaaaaattgatccccatattggtttgctacatagaggaacagaaaaattaatagaacataagacttatacgcaggctgtaccttattttgatagacttgattatgttgccccaatgaatcaggaacatgcttttgctttagcaattgaaaaacttcttaaaatagaagttcctattagaggacaatatattagagttttattttgtgaaattggaagaattttaagtcatcttttaaatattacaactcaggcattggacgtaggtgcattgacaccctctttatggggttttgaagaaagagagacgttaatgacattttatgaaagagtttcaggttcaagactgcatgcaaattattttagacctggcggtgttcacaaagatttaccaatgggacttacagaagatattactacattttgtgaa

SEQ ID NO: 200800 - DNA, 895 bp, Unknown
  Bacterial polypeptide expressing nucleotide sequence isolated from the Sargasso Sea
ttggagggttttttagttttagttatttcttcaacctatttaaaaacatttaaaatatataatatagaatacccggttcttattttgagttctattcttggtatgatggtaatgattagctcaaatgatttaattgttttttatatgggcttagaattacagtcattagcactttacgtgttagcaacgtataacagagatcaattaaaatcatctgaagctggtttaaaatattttgttttaagtgcattatcatcaggactgttattatatggatgttctttagtttatggtttttcaggttcaaccaattttgatataatatcaaatcaactaaattccgaggaatattttttaacatttggtattgtgtttatattagttggtttagcattcaaaatttctgcagttccttttcatatgtgggcacctgatgtgtatgaggggtctccaacaactgtaactttattttttacaatagtaccaaagatagctgccttgactgtatttataagatttttatatgttccttttttaaatttagttgatcaatggcaaatgataatagttttcttatctatagcttctatggtttttggtgcagttgctgctatagtgcaaactaatattaaaagactggtagcctacagttctattgggcacataggctatacattagctggcttagccacagcatcaaatgagggaattcaaagttcaataatctacatatccatatatgttattatgaacttagctcttttttcatgtctattaatgttaagaagaaaagatcaatattatgaggatatcgatgatctttctggtttatcaaaaaatcatccattgttatccttatgttttttgttaatactattttctttagcaggcatac

SEQ ID NO: 200801 - DNA, 136 bp, Unknown
  Bacterial polypeptide expressing nucleotide sequence isolated from the Sargasso Sea
tgcatttttatttccttgggctgtaagtctaagcaatattggtgccctaggtttttattcaatgatgtttttcttatttatccttacagttggatttatttatgaatggagaaatggagcattagattgggagtaa

SEQ ID NO: 200802 - DNA, 487 bp, Unknown
  Bacterial polypeptide expressing nucleotide sequence isolated from the Sargasso Sea
atgaaaattataagattttttaaaacaatatttatggtggattttataactggcttattaattgccataagagaaatctttaagtcaaaaaaaacaataaattatccttttgaaaaaggaaaaattagtccaagatttagaggagagcatgcacttagaagatatcccaatggagaagaaagatgtattgcatgtaagttatgtgaagctgtgtgtccagcacaagcaattacaatcgaatcagctgaaagatttgatggaagcagaaaaactactcgttacgatattgatatgatgaaatgtatttattgtggcttatgtgaggagtcttgccctgtagatgcaattgtacaaggtccaaattttgaattttcaacagagacaagagaagaactttactacactaaagaaaaattactagacaatggtgatagatgggaaaatattttagcggcaaatataaaatcagataatccatatagataaa

SEQ ID NO: 200803 - DNA, 122 bp, Unknown
  Bacterial polypeptide expressing nucleotide sequence isolated from the Sargasso Sea
aagatacagatatgatcaattaatgcgattaggttggaaaatatttcttccattatctttaacctatgttgttttaactgcgagttttttattttatttcaacctattacctacaaattaaa

SEQ ID NO: 200804 - DNA, 643 bp, Unknown
  Bacterial polypeptide expressing nucleotide sequence isolated from the Sargasso Sea
ataagattttctttaggcatgtttcctgttgcatcagagtattttatgcctttagtttttatattaagcgtaatagcaataatttacacttctctagtagctttaatgcaagaagatatgaaaaaattagttgcttactcatcaatagcacatatgggttttgttacactaggaatattcacttttaacaaacaaggaattgaaggaagcatgttacaaatgcttagtcatggtttaatatcagcagcattatttttatgcgttggtgttctttatgacaggaataaatctagacttataagttcatatggtggactagttaatattttgccaaaatattcctttattcttatggtatttgtattagcagctttaggtttgcctgggacaagtggctttattggtgaatttttagttttgattggagctttcaaaataaactacatggtaggtgttctagctactaccggagtcgtattatccgcagcatatatgttgtggttatacaaaagggttatttttggcaagttagaaaaagaagacctaaaaaaaatggaagatataaacttatctgaatttgcattgttatctttacttagtttttttataatattttttggtttttaccccgaacctcttttag

SEQ ID NO: 200805 - DNA, 175 bp, Unknown
  Bacterial polypeptide expressing nucleotide sequence isolated from the Sargasso Sea
gatgatttataattttttatcagaatatttatcaataattttatttctttttattgctctagctttgagcgttggctttatagtcattaatcttctagcctcacctagtaatccagaccctgaaaaactatctgcttacgaatgtggatttgaagcttttgatgattcaagaatg

SEQ ID NO: 200806 - DNA, 274 bp, Unknown
  Bacterial polypeptide expressing nucleotide sequence isolated from the Sargasso Sea
atgaatacagtatttaaatttattaaaagtttcttgttgctcgaattatcaaaggggctttctttaacgttgaaatacctttttaaaaaaaaggttactataaattacccttatgaaaaaaatcccataagctcaaggttcagaggtgaacatgctttacgcagataccctaatggtgaagaaagatgtatagcatgtaaattatgtgaagccgtatgtcctgctcaagcaatagttatagaagccgaacctagacctgatggtagcagaagaa

SEQ ID NO: 200807 - DNA, 413 bp, Unknown
  Bacterial polypeptide expressing nucleotide sequence isolated from the Sargasso Sea
atcttttaaatctaaaaaaactttaaactatccatttgaaaaaggtaaaattagcccaagattccgtggcgaacatgctttaagaagatatcctaatggagaagagaggtgcatagcttgtaaattgtgtgaagcagtttgcccagctcaagcaattacaatcgagtctactgaaagagaagatggaagtagaaaaaccacaagatacgatattgatatgcttaaatgtatatattgtgggctatgtgaagagtcttgtccagtagatgcaattgttcaaggtcctaattttgaattttcgacagagactagagaagaactttattataataaagaaaaattattagataatggtgatagatgggaaagtttattagcagcaaatattaaagcagacaatccttacagataaa

SEQ ID NO: 200808 - DNA, 315 bp, Unknown
  Bacterial polypeptide expressing nucleotide sequence isolated from the Sargasso Sea
aatgaaaatttcaagattattaaaaactatattcatgattgattttgtgactggtttattaattgcaataaaagagacttttaaggcaaaaaagacaatcaattatccttttgaaaaaggatctttaggaacaaggtctagaggggagcacgctcttagaagatatcctaacggtgaagaaagatgcatagcgtgtaagctttgtgaagctgtatgtccagcccaagctattacaattgagtcaaaggaaagagatgatggtagtagaaaaactataagatatgatattgatatgcttaaatgtatatattgtgg

SEQ ID NO: 200809 - DNA, 754 bp, Unknown
  Bacterial polypeptide expressing nucleotide sequence isolated from the Sargasso Sea
atgcaaaacttaatatacatattacctgaaatatttttatttatagttgcaacagtgttattaataacaggcttatttttgaaaaatattaagctaattaactcgctttctatattttcacttttagtcacagttatcttaattttcaatcaaccctttcaatcagcgtttctaaatagttttgttgtagatgaattttcactagtactaaaagttatgatagtagtcggttctattgcttcattgattatgtttgtatcaagtaaagatgacctaaatataaatatttacgaatttccaattttaataattttctcaactattggtatgatggtgatggtttcagcaaatgatttacttgctatgtttataggattagagcttcaatcattaagtctctatgtgcttgcggctttaaatagaaacagcttactgtcatcagaagcaggcattaaatattttattcttggagctctttcttcaggcttattgctttttggaatttcatatatttatggattttcaggaaatacaaactttaatctaatcgctgtaaatattaacccagaaagtctcggtttaattattggtatagtttttgtattggcaggactagcttttaaagtgtcagcagttccttttcatatgtggacgcccgacgtttatcaaggagcaccaactccgattacaggattctttgcccttgctccaaaaattgaagcaatgggtttacttgttagattcttattcaatt

SEQ ID NO: 200810 - DNA, 703 bp, Unknown
  Bacterial polypeptide expressing nucleotide sequence isolated from the Sargasso Sea
aatgaagctttctttaaaatatgttatttatggcgcattttcatcggggataatgttatatggtttaagtattatttttggcctcacaggaacaactaaattttttgcaattcgcgatgcaattgctactttggactcatcatcaaatcttgccttaaccttatcaaccatatttgttttagctggattcggttacaaaatatcggctgttccatttcatttttggacacctgatgtatatgaaggttcacccactcctattactgcatatttatctgttgcgccaaaagcagcaggctttgcattaatgatacgattctttaatcaagttttagttgaaagcgattctataagtacgataggatggtatgcggatgttagttttgcctggccaggattattaggtgttatttctgttgtaacaatgactatgggtaatttagttgctattcaacaaaacagtgtaaaaagaatgcttgcctattcaagtattgctcatgctggttatatgttgatggtgtttcctaccatttcttccgaaggcgtttttgcagtaatgatttatttagtcatgtatttattcatgaatttaggagcattttttgtcctgatatatgtagtccaaaaagaaggtggggaaaactttgaagactttagtggattaggctggcgaatgccaattgtaggtattgtaatgacagta

SEQ ID NO: 200811 - DNA, 151 bp, Unknown
  Bacterial polypeptide expressing nucleotide sequence isolated from the Sargasso Sea
cactattcatattctgtagtaagaggttgtgatagaattgttccagtagatatatatgttcctgggtgcccaccttctgctgaggccttactatatggaattctacaattacaaaaaaaaataagaaacaaaggttctctagaaagataga

SEQ ID NO: 200812 - DNA, 214 bp, Unknown
  Bacterial polypeptide expressing nucleotide sequence isolated from the Sargasso Sea
aatgaattccaaagaaaatcaaatacctgatgaatttaaaaaacttgcaaaagattttagtgaaaatggttttataaccacttcattagataatttagcaaactgggcaagaactggttcattacattggatgacttttggattagcttgttgtgccgttgaaatgatgcaaacttctatgccacgctatgatcttgaaaggtttggagcagca

SEQ ID NO: 200813 - DNA, 151 bp, Unknown
  Bacterial polypeptide expressing nucleotide sequence isolated from the Sargasso Sea
tcattattcttattcagtcgtaagaggttgcgatcgaatagttcctgtagatgtttatgtaccaggatgtcctccttcagcagagtctttattgtatggaattttgcaattgcaaaaaaaaattagaaataaaggatcattaaaaagataa

SEQ ID NO: 200814 - DNA, 487 bp, Unknown
  Bacterial polypeptide expressing nucleotide sequence isolated from the Sargasso Sea
atgaaaattagtagatttttaaaaacaatttttttgcttgattttttaactgcattattaattgcacttaaagagttatttaaagcaaaaaaaacaataaattatccttttgaaaaaggaaaattaagtccaagatctcgtggtgaacacgcgcttagaagatatccgaatggtgaggaacgatgtatagcatgtaaattatgtgaagctgtatgtccagctcaagcaataacaatagagtcagcagaaagatctgacggtagcaggaaaacaactagatacgatattgatatgttaaaatgtatatattgtggattatgtgaagagtcttgtcctgttgatgcaatagttcaaggcccaaactttgaatttgcaacagaaactagagaagaactttattataacaaagaaaagttactagcaaatggggatagatgggaaagtgtcttggcagcaaatataaaagctgacagtccatatagataat

SEQ ID NO: 200815 - DNA, 637 bp, Unknown
  Bacterial polypeptide expressing nucleotide sequence isolated from the Sargasso Sea
aatgaaaaaaactaaatcattaaatttaaattttggaccacaacatccagcagcacatggtgttttgagattaattttagaacttgacggagaaattattgaaaaagcagatccacacattggtttattgcatcgtggaacagaaaagttaattgaaaacaaaacttatacacaagcactgccatattttgatagacttgattacgttgctccaatgaatcaagagcatgcttttgctttagctgtagaaaaaattttaaacatagaagttcctactagagctcagtacttaagagtaatattttgtgaaattggaagaatattaagtcatcttttaaatgttacaacgcaagctatggatgttggagcattaactccaactttatgggggtttgaggaaagagaaaaattaatgggattttatgaaaaagtttctggttctcgacttcatgctaattattttagaccaggtggagttcatcaagatattccaagaggcatggataaagaaatttctgaattctgtgtaaattttccaaaaatagttgataatttgggaacattaataactgacaatagaatatttaaacaaagaaatgtagatataggggattgtctcaagaccagatgctcttga

SEQ ID NO: 200816 - DNA, 216 bp, Unknown
  Bacterial polypeptide expressing nucleotide sequence isolated from the Sargasso Sea
ccctggcgtgggtgcctgggatcatttggtttttcttgaaaaccgccatctttttgtttatgtatctctggatgcgcgccacgtttccgcgatatcggtacgaccaagtgatgcgtttgggttggaaggtgctcattcccgttacgatcgtctggatctttatattggctttggcggtccacgcacaatgccctccgtggttcagtaccacgtaat

SEQ ID NO: 200817 - DNA, 646 bp, Unknown
  Bacterial polypeptide expressing nucleotide sequence isolated from the Sargasso Sea
aatggattttccaatactatcatctttaatattacttcccacaattggagctatatttattttatttgggagatcctcttcaaattataatgccgcaaaatatatttctatatttatttctttagctaatttttttatatccttatatctttggtatctttttgatgaaaatacttctagctttcagtttgttgaagaacgaatttggcttcaagggtttataaattataaagttggaattgatggaatttctatactatttattgttttaacagcctttattacacctctttgtattatttctgtaaattctactattaaaaatagacttaaagattttctagtagctatactttttatggaaacaatgatgattggagtattttgttcacttgatcttgttgttttttatttgttttttgaagccggtttaataccaatgtttttaattattggaatatggggaggtgagagaagggtttattctgcttttaaatttttcttatacactttgttaggttcagttttaatgcttgtagcaataattactatatactggatgacaggaactacagatgttattgaattgtacaacattggcattgatgcaaaatatcaaaacttattatggttagctttttttagt

SEQ ID NO: 200818 - DNA, 838 bp, Unknown
  Bacterial polypeptide expressing nucleotide sequence isolated from the Sargasso Sea
ggtagttctatctttattcttttggcagccttagcaatgggtttctatggtacagaaattcctaactttgagttttctcacttggcagctcaagattttagtcaaaaattccaaatattatgttacatcgggcttttaattgcatttggagtgaaactaccaatagtacctcttcatacttggcttccagatgcgcatggagaggctacagctcctgtccatatgcttttagcaggaattttattaaagatgggaggatatgctcttttaagatttaatgcacaattattgcccgttgctcatgctcaatttgccccattattaatagttctaggggtagtcaatataatttatgctgcattaacttcttttgctcaaagaaatcttaaaagaaaaattgcatacagttcgataagtcatatgggttttgttcttattggtatagggagttttagtagccttggaacaagcggagctatgctgcaaatggttagtcatggattaataggcgcaagtttattttttcttgtaggtgccacctatgacagaacaaagactcttaaacttgatgaaatgagtggtgtaggacaaaaaatgagaattatgtttgccctatggactgcttgctctttagcttcacttgctttgcccggcatgagtggatttgtttccgaattgatggtatttacaggatttgttactgatgaagtgtatacacttccgtttagggtagtgatggcctctttagctgctatcggtgtaatacttactcctatttatctactttcaatggtacgagaaatttttctttggcaaagaaaaaatccaattaattgaa

SEQ ID NO: 200819 - DNA, 823 bp, Unknown
  Bacterial polypeptide expressing nucleotide sequence isolated from the Sargasso Sea
aatgacaaatttaactttagtttttccagaaatttttctttctttatctataatgtttcttcttattttaggtgtcttcaagaaaaatagttccaaattgattcaaaatatttcattaattattttacttgttacttgtgtaattacttttaatgaaactttagttattcaagaaatactattattcaactctagtgtcattattgattatttatcatcttttatgaaaattgttacgttgttggctgcatttttggttttggtgatctcttcaaattatttaaagactttaaagatttttaaaattgaatatccaattctaattttaagttcagttcttggtatgatgataatgatcagttcaaatgatttaattgtattttatatgggcttagaacttcaatctctagctttatatgttttagctacttttaatagagatcaacttaagtcttcagaagctggtttgaaatattttgttttgagtgcattatcttcaggtttattactttatggatgttcactaatatacgggtttacaggctcaaccaattttaacattattgctaatcaattaaattcaaatgaatatgcaatcacttttggtatagtctttatactagttggtctagcatttaagatttctgctgtgccatttcatatgtgggctcctgatgtttatgaagggtcaccaacatccgtaacattattttttacaatggttcccaaaatagcagcagtgactgtatttattagatttttatatgttccttttttaaatttgatagatcagtggcaaatgattttgatttttttatcaata

SEQ ID NO: 200820 - DNA, 487 bp, Unknown
  Bacterial polypeptide expressing nucleotide sequence isolated from the Sargasso Sea
tatgaaattaaatagaatttttaaaataatatttttatcagaatttattaaagcaatttttattgcaataaaagaaatattaaaaaagaaaaaaacaatcaattatcctttcgaaaaaggaggtatcagtgcgagatttaggggcgaacacgcattaagaagatatccaaatggcgaagaaagatgtatcgcatgcaaactttgtgaagctgtctgtccagcacaagcaataactattgaaaatgaagaaagacctgatggtagcagaaaaacaattagatacgacatagatatgcttaaatgtatttactgtgggttatgtgaagaatcttgccccgtcgatgcaatagttcagggaccaaattttgaattttctactgagacaagagaagaattatactacaacaaagaaaaactattagaaaatggcgatagatgggagtctgtattgtcagagaatattaaaatagataaaccctacaggtaa

SEQ ID NO: 200821 - DNA, 961 bp, Unknown
  Bacterial polypeptide expressing nucleotide sequence isolated from the Sargasso Sea
atgttttttatggtgagcgccaatgatctaatacttttttatcttggtttagaactacaatctttagcactttatattttagctgccatagatagagacaatattagatctacagaatcaggggttaagtatttcgtattaagttctctttcgtcaggattgttgctttatggatgttctttactttatggttttactggatcaacgaactttgaagttattaaaagtgaattaaacccggaaaatattggttcaatttttgcaatggtatttattctcgtaggtctagcttttaaagtttcagctgttccttttcacatgtggacacctgatgtttatgaaggttcaccaacctctataacaagtttcttttctgtggctccaaaagtggcaggtttagcagcaataataagatttatgcaaattccttttgccaatgtattagttgaatggcaagcaataataatttttatatccatagcttcaatgatattaggtgcagtcgctgcaatagggcaaaaaaatatcaaaagactaatggcttacagctccataggacatatgggatacgcacttgcaggagtagctactggaacaacctcaggctatatgagctcattaatttacataacaatatatgtagttatgaacattggtgccttcgcatgcatatttctaatgaagaaggatggaaaatatacagaagagattaatgaattatcaggcatttctaaaaaacacccactaatagcattatcttttttaattattttgttttcattagcgggcataccccctctaggaggtttttttgctaagttttatgtttttatgtctgtaattgaaagtgagatgtatgttttagctattataggattatttaacactgtagtatcagctttttattatttaaggataataaagattatatattttgataaattgactaaaccatttgatc

SEQ ID NO: 200822 - DNA, 487 bp, Unknown
  Bacterial polypeptide expressing nucleotide sequence isolated from the Sargasso Sea
atgaaaatttctagattttttaaaacaatattaatgacagatttcattggtggtttgttaattgccattaaagaattatttaagtcaaaaaaaacaatcaattatccttttgaaaaaggtaaaattagtccacgttttagaggtgagcatgctttgcgaagatatccaaacggtgaagaaagatgtatagcttgcaaattatgtgaagcagtatgccctgcccaggcaataacaatcgaatctactgaaagagaagatggaagtagaaaaacaacacgttacgatattgatatgatgaaatgtatttattgtggattgtgtgaagagtcttgtccagttgacgcaatagtacaaggtccaaattttgaattttcaaccgaaacaagagaagagctttattatacaaaagaaaaattattagataatggagatagatgggagaacgttttggaggctaatattaaagccgacaatattcatagataga

SEQ ID NO: 200823 - DNA, 370 bp, Unknown
  Bacterial polypeptide expressing nucleotide sequence isolated from the Sargasso Sea
tatgaatatatcacgattttttaagacaatattaatgacagattttattggaggcctgtatatggctttaaaagaattttttaaaccaaaaaaaacaataaattacccatttgaaaaaggtaaaattagtccaagatttagaggagaacatgctttgagaagatatcctaatggtgaagaaagatgtatagcatgtaaattatgtgaagctgtttgtcctgcacaagctataacaattgagtcagctcagagagctgacggtagcagaaaaacaactcgttatgacatagacatgatgaaatgtatttattgtggcctatgtgaagagtcttgtccagttgatgctatagttcaaggtcctaattttgag

SEQ ID NO: 200824 - DNA, 913 bp, Unknown
  Bacterial polypeptide expressing nucleotide sequence isolated from the Sargasso Sea
ccttttttccctgataaaggagagggtaaagaggtaagatggttcgctttagtcgtcgctttaattacttttttagtaaccgtaggatcatatataaatggctttgatataaataatgaaaatgtccaacttcaagaaagtataaattggttaccaaaacttgggctaacttggtcagttggtgctgatggaatttcaatgccactaatattattaactagcttcataacatctttagcggtcttagctgcatggccagtgaagttcaaaccaaagttatttttctttttaatactcattatggatgggggacaaatagctgtttttgcagttcaagatatgcttcttttctttttaacttgggaactcgaattattgcctgtttatttacttctagcaatctgggggggtaaaaatagacagtatgcagctacaaaatttattatttacacagctggaagttcaatatttattcttttagctggattagcaatggggttttatggaaccgaaataccaaactttcaattttctcatttagctaatcaagattttagccaaaacttccaaatactttgttacgtaggcttattaattgcatttggtgtaaaacttccgattgtacctttacatacttggctgccagatgcccatggagaggccacagcccctgtacatatgctattggcaggcattttattaaaaatgggtggatacgctcttttaagatttaatgcacaattattacctgttgcgcatgcgcaatttgctccattattaatagttcttggagtagtaaatataatttatgctgcattaacttcatttgcccaaagaaatcttaaaagaaaaattgcatatagttcaataagtcatatgggattcgtgttgattggtataggaaggttttagc

SEQ ID NO: 200825 - DNA, 901 bp, Unknown
  Bacterial polypeptide expressing nucleotide sequence isolated from the Sargasso Sea
tctcacttggcagctcaagattttagtcaaaaattccaaatactatgttatgtggggcttttaattgcatttggagtaaaactcccaatagtgccccttcatacttggcttccagacgctcatggagaggctactgctcctgttcatatgcttctagctggaattttattgaagatgggaggatatgctcttttaagatttaatgcacaattattacccgttgctcatgctcaatttgccccattattaatagtgcttggagtagtaaatataatttatgctgcattaacttcttttgctcaaagaaatctcaaaagaaaaattgcatacagttctataagtcatatgggtttcgttcttattggaatagggagttttagtagcctcggaacaagcggggcaatgctacaaatggttagccatggattaattggggctagtttattttttcttgttggggctacctatgatagaacaaagacccttaaacttgatgaaatgagtggtgtaggacaaaaaatgagaatcatgtttgccctatggactgcttgctcccttgcttcacttgctttgccaggtatgagtggatttgtgtccgaattaatggtatttacaggatttgttaccgatgaagtttatacactcccttttaggatagttatggcctctttagctgcgataggtgtaatacttactcctatttatttactttcaatgttaagagaaattttcttcggtaaagaaaatcctaaattaaccgaagaacgaaaacttatcgatgcagagcctcgggaagtttatattattgcctgtttacttttgccgataattggaataggtttatatccaagactcgtcactgaaagttatattgcatctattaataatttagtagatagag

SEQ ID NO: 200826 - DNA, 502 bp, Unknown
  Bacterial polypeptide expressing nucleotide sequence isolated from the Sargasso Sea
atgctcgtgaccgagatgatccgcggcatgcagctgacgatgtcgatgttctggaagcagaagctcacgctcaactaccccaacgagaagggcgcgctctcgccccgcttccgcggcgagcacgtgctccggcgctacccgaccggcgaggagcgctgcatcgcctgcaagctctgcgaggccatctgcccggcgcaggcgatcacgatcgaggccgaggtgcgcgaggacggctcgcgcaagacgacgcgctacgacatcgacatgacgaagtgcatcttctgcgggtgcgccggcgcgacgttttttgctctcgcgatccgctctccccccttgcaaccagagggatgtgtgcccctgccgcgcgtcggcggcacgcgcgcgcggctccgcctcccgctgacgcgacgcatcgtgttccctcccgcgcgctcgcctttgtcgcagcttctgccaggaggcgtgccccgtcgacgccatcgtcgaggggcccaactttgag

SEQ ID NO: 200827 - DNA, 392 bp, Unknown
  Bacterial polypeptide expressing nucleotide sequence isolated from the Sargasso Sea
tataaattacccttttgaaaaaggtaaaataagtccaagatttagaggagagcacgctttacgtcgttatccaaacggagaagagagatgtattgcttgtaagttgtgcgaagctgtttgtccagcacaagctataacgattgaatcatcagagcgagaggatggtagtagaaaaactacaagatatgatattgatatgatgaaatgtatttattgtggtttatgtgaagaatcatgtccagtagatgcaattgtgcaaggaccaaattttgaattttctactgaaacaagagaagaactgtattacaccaaggaaaaattattagataatggagatcgttgggagaatatattagctgctaatataaaatctgataatccttatagatagc

SEQ ID NO: 200828 - DNA, 782 bp, Unknown
  Bacterial polypeptide expressing nucleotide sequence isolated from the Sargasso Sea
aatttcagcagtgccatttcatatgtgggctcccgatgtttatcaaggttcaccaacatctataactttattttttgcaatattaccaaaaattgccgcattaactgtttttataagaattttatatgttccatttataaatttaatggatcaatggcagatgataattgtttttttatctatagcatcaatgatctttggctcaatagccgccataggacaaaaaaatttaaaaagacttattgcatacagttctataagccatatgggatatacactcgccggtttgacgactgggacaaatgaaggaatacaaagttcaattatttatatttccatatacttagtaatgaatttaggatttttttgctgtttatttatgcttagaagaaatgataactactttgaaaaaattgatgacttatcaggattatctaaaaatcacccagcattatcatttgctcttttaattattttattttcactagcaggaataccaccattagccggtttttttgcgaagttttatatatttatgtctgtaatagaacagcaaatgtattttttagcaattattggattattatctactgtaatagcagctttttattatttaagaataattaaaataatttattttgatcccgaaaaagaaaaatatgacactgatcataatttaggattaaaaatatctttaataatatctacattattaattttactttactttacatatccaagtccattaataaaaattataactaatataaatataatataaa

SEQ ID NO: 200829 - DNA, 889 bp, Unknown
  Bacterial polypeptide expressing nucleotide sequence isolated from the Sargasso Sea
tttatatttaatgatagttataaaatagattatctatcgatttttataaaaatattaattcttgtttcaactttatttgttttattaacttcatcacaatatctcaaatcgattaaaatatataatgtagagtatccaattttaatacttagctctattcttggtatgatggtaatggttagctcaaatgatctaatagtattttatataggattagaattacaatcaatggctttatatgtattagcttcttttaatagagataatgaactatcctcagagtcaggtttgaaatattttgttcttagcgcattatcgtccggtttacttttatatggctgttctttagtttatggattttcctcttcaacaaatttttcagaaatttcatttaattatgatcaatcaaatcaaggaataatatttggaatggtatttattttagcaggtctagctttcaagatctccgcagtgccatttcatatgtgggctcctgatgtttatcaaggatcaccaacatcggttacattattttttgcgattttacctaaaattgctgcattaactgtatttattagatttttatataccccatttgttaatctaattgatcaatggcaaacaataattattttcatatccattgcctctatgctttttggagcagtagcagcaataggacaaaaaaacctaaaaagacttatagcttacagctctataagccacatggggtatgcattggctggtttaacagctggcacaaaccaaggtatacaaagttctgtgtcctacatatcaatatacttagttatgaatttggcatttttcagctgtatctttatgttgaaacgagacgataaatattatgaaaatattgaagatttatcag

SEQ ID NO: 200830 - DNA, 886 bp, Unknown
  Bacterial polypeptide expressing nucleotide sequence isolated from the Sargasso Sea
ctcgcaatgggttgcggagcaccagttgcaggaatttttcatttagtaactcatgcttgctttaaagcaatgctatttttgggatctggttcagtaatacatgctatggaagaagtagttggccatcagcctgtattggctcaagatatgagattgatgggcggtttaagaaaaaaaatgccatatacatcaacaacatttttaataggatgtgtagcaattagtggaattcccccattggcaggtttttggagtaaagacgagatactgggaaatgcttttatatcatttcccgctttttggttcgtaggacttctaacagctggtatgactgctttttatatgtttaggctttatttcttgacatttgaaggagatttcagaggggagaataaagaattgcaaaaacagcttctaatagcctctcaaacaaccctagatgaagaaaatgaagaagagcatgaagaacatggctctatccatgagtcaccctggtcaatgacatttcctttggtatttctagctgtaccatctgtaataattggttttatgggatttccatgggatagcaaaattgcaaatttactagatcctgaagaagcagagactgctgcaaaagccttcgaattaaaagaatttttgcctttagcacttgcttcagtagttattgcatcagctggaatcattattgcttatcaagcatattttgtgaaaaaaattaatttatcagttttatttgccgaaaagtttcctagcatcaaccgatttttatcaaataaatggtaccttgatgatattaatgaaaaactttttgttaagggtagtagaaaacttgctaaagaagttttagaggttgattctaaggttgttgatggcgttgtaaatc

SEQ ID NO: 200831 - DNA, 415 bp, Unknown
  Bacterial polypeptide expressing nucleotide sequence isolated from the Sargasso Sea
tgtaccaaaccttatcgaacgtattgagagtggtttactttcccatggtaatgatatggacaatggagataatccatacgaatgtggttttgataagtatgtaaatataaatagtgatgttgattttttaggtaaagaaaaactgaaaaaaattaaagctgaaggaattaaaaaaaaacttatgggagtaaaaattgatgtcaaggaaataagtgttaatggctcaatggatctagtagatgaagataataatgtaattggagaattgagatctggttgttataatccaacttttaaacaagtcattgggattgcaatgattaacaaaccatactttgagacttcgaaatcctttaaaatcaatataaatggctctgattttgatggaaaagtttgtgatttacctttcatttag

SEQ ID NO: 200832 - DNA, 514 bp, Unknown
  Bacterial polypeptide expressing nucleotide sequence isolated from the Sargasso Sea
atgacaaaaaaaattaaaaatttaaatttaaacttcggaccacaacatccagctgcgcatggagttttaagattaattttagaattagatggtgaaattgttgaaaaagctgacccacatattggtttgttacatagaggcaccgagaaattaattgaaaacaaaacttacatgcaagcagtaccttattttgatcgattagattatgtggctccaatgaaccaagagcatgcattcgcgttagcaattgagaaaattctcaaaattgatgttccaattagagctcaatatataagagtaatattttgtgagattggaagaattttaagtcatattttaaatgttacaacacaagcaatggatgttggagctctaaccccgactttatggggatttgaagaaagagagaaattaatgggtttctatgagagagtatctggttccagacttcatgcaaattattttagagcaggtggagtccatcaagatttaccacaaggacttgagcaagata

SEQ ID NO: 200833 - DNA, 388 bp, Unknown
  Bacterial polypeptide expressing nucleotide sequence isolated from the Sargasso Sea
atgaagctaaaccgtattttaaaaatcatttttttatcagaatttataaaatctatagcaattgcttttaaggagatttttaagaataagaaaacaataaactatcccttcgaaaaaggagcaataagtccaagatttagaggagaacatgctttaagaagatatccaaatggagaggaaagatgtattgcctgcaaattatgcgaagccgtatgtcctgctcaagctataaccattgagtctgaagaaaggtcagacgggagcaggaaaacaactcgttatgatattgatatgcttaaatgtatttattgtgggttatgcgaagaatcttgtccggtagatgccatcgtgcaaggaccgaactttgaatttgcaacagagacaagag

SEQ ID NO: 200834 - DNA, 670 bp, Unknown
  Bacterial polypeptide expressing nucleotide sequence isolated from the Sargasso Sea
tatgaaagaaatagaacttaatacaacaacaattaattttgggcctcagcatcccgcagctcatggtgtattaagattagttgtggagcttgagggagaagtagttcaaagagctgagcctcatattggcttacttcatagaggcactgaaaagttaattgaatataaaacataccttcaagccgttccctattttgatagacttgattatgtttctccaatgtgtcaagaacatgcttttgctttagctactgaaaaacttttaggcatagagatccctttaagagcaaagtttattagagttatatttgcagaagttacaagaatattaaatcatttactaaacattcctgcatatgcagctgacataggagcagttactccttttttatggtgttttgaggaaagagaaaagcttttggaatttcatgaggctgtatcaggagcaagatttcatgcagcttattttagacctgggggcgtgcaccaagacatgcctgaaggaatggaagataggctctacgagcattttaaaaatcttccaaaatttattgatgatcttgagagcttattaactaacaatagaatacttaggcaaagatcagttgatataggggtaatttcaaaatctgaagctattgaggtggggttgttccggcccagttcttag

SEQ ID NO: 200835 - DNA, 773 bp, Unknown
  Bacterial polypeptide expressing nucleotide sequence isolated from the Sargasso Sea
aatgatggtgatgattagctctaatgatcttatcgtattttatatagggctagaacttcagtctctctctttatatgtattggcatcatttaatagagatcaaatgaaatcctcagaggctggtttaaaatattttgttttaagtgcactatcttctggattattactttatggctgttcattgatatatggattttctggttcaacaaattttgttataatatctgaaaatgtatctaatgacagttttggactaatatttggtttagtatttattttagttggtcttgcatttaaaatttcggctgttccttttcatatgtgggcaccagatgtatacgaaggctctccaacttcagttactttattttttgctgtagttccaaaagttgctgcactaactatttttattagaattttatatcttcctttctttaatatgattgatcaatggcagataataataatatttttagcaattgcctcaatgatttttggtgctgtagcagcaataggacaaaaaaatattaagaggcttattgcatatagctcaatagggcatatgggttatgttttggcaggtttatcagttggtactaatcctggaattcaaagttctattatctatatttcaatttactttgttatgaatttagctctgttttgctgtctatttatgatgagaagaaatggaaaatattatgaagaaattgaagatttatcaggattgtcaaaaaatcatccaattatatctttatcaatgttaattattt

SEQ ID NO: 200836 - DNA, 314 bp, Unknown
  Bacterial polypeptide expressing nucleotide sequence isolated from the Sargasso Sea
gtatgcaatgttttggttaggggaatatgctaacattttacttatgtgtgcaatgggatctattttatttcttggtggctggttatctcccatagatttatttccatttaacattattccggctccaatatggttaatcttaaaaatactctttttatttatcttatttgctttgataaaagcaatagtacctagatacaggtatgatcaattaatgaaacttggatggaaaatttttctaccattttcattgatttatgtagtattaactgcaagttttttaatgtattttgatttattaccggggaattaga

SEQ ID NO: 200837 - DNA, 301 bp, Unknown
  Bacterial polypeptide expressing nucleotide sequence isolated from the Sargasso Sea
atgaaaatatatagaataattaaaacaatttttatgcttgattttgctaaaggcttaacaattgcaataaaagaagctttcaaatcaaaaaaaacaattaattatccttttgaaaaaggaagaattagtccaagatttagaggtgagcatgctttaagaagatatcccaatggagaagaaagatgcatagcatgtaaattatgcgaagcagtttgtccagctcaagccataactatagaatctaaagagagagatgatggaagtagaaaaactacaaggtatgacattgatatgctctaaa

SEQ ID NO: 200838 - DNA, 570 bp, Unknown
  Bacterial polypeptide expressing nucleotide sequence isolated from the Sargasso Sea
attattttgaatttggtggagataaacatcttattgcaaagtctggatggtctaaacaaggtggctatgaaatttatatggaacacaacgactcaggtttaaaactatacgatcatctttttgaaattggaaaggaattcaatattagaccaggtggaccaaaccttatcgaacgtattgagagtggtttactttcccatggtaacgatatggacaatggagataatccttatgagtgcggttttgataagtatgtaaatatagatagtgatgttgatttcttaggtaaagaaaaactgaaaaaaattaaagctgagggaattaaaaaaaaacttatgggagtgaaaattgatgccaaggaaataagtgttaatggctcaatggatctagtagatgaagataataatgtaattggagaattaagatctggttgttacaatccaacttttaaacaagtcattgggattgcaatgattaacaaaccacactttgagacttcgaaatcctttaaaatcaatataaatggctctgattttgatggaaaagtttgtgatttacctttcatttagt

SEQ ID NO: 200839 - DNA, 487 bp, Unknown
  Bacterial polypeptide expressing nucleotide sequence isolated from the Sargasso Sea
aatgaatttaaatagaattttaaaaacagtttttttgactgagtttatttcagctattattaaggcaattaaagaaatttttaagccaaagaaaacaataaattacccatttgaaaaaggtcacattagcccaagatatagaggcgagcatgcactaagaaggtatcctaacggtgaagaaagatgtatagcctgtaagctttgtgaagctgtttgccctgcacaagcgataacaatcgagtcagaagaaagaaatgatggaagtagaaaaactacaagatatgacattgatatgttgaaatgtatttattgtggattatgccaagaatcttgtcctgttgatgccattgttcaaggtccaaattttgagtttgcaacagaaacaagagaggaactttattacaataaagaaaaattacttgataatggagatagatgggagtccgtattagcaaaaaatttaaaaacggataaaatttataagtag

SEQ ID NO: 200840 - DNA, 181 bp, Unknown
  Bacterial polypeptide expressing nucleotide sequence isolated from the Sargasso Sea
atgcttacggaatttttaaaagattatctaccaataatattatttttgataatagctttaggcttgagtcttgcttttgtagcaattaattatattgctgctccaagcaaacctgatcctgagaaactttcagcctatgaatgtgggtttgaacctttcaatgactcaaggatggaatttg

SEQ ID NO: 200841 - DNA, 284 bp, Unknown
  Bacterial polypeptide expressing nucleotide sequence isolated from the Sargasso Sea
aatgaaattaaatagattttttaaaattatttttttatcagaatttatcaaaggtatttttattgccataaaagagatttttagtaaaaagaaaacaattaattatccttttgaaaaagggaaaataagtcctagatttagaggcgaacatgctctcagaagatacccaaatggagaagaaagatgtattgcatgtaagttgtgcgaggctgtctgtccagctcaagcaattaccattgaaaatgaagagcgaagtgatggaagcagaaaaacaacaagatatg

SEQ ID NO: 200842 - DNA, 379 bp, Unknown
  Bacterial polypeptide expressing nucleotide sequence isolated from the Sargasso Sea
tttgaaaaaggatcaataagtccaagatttaggggagaacatgctcttagaagatatccaaatggagaggaaaggtgtatagcttgtaagttatgcgaggcagtatgtcctgctcaggcaattactattgagtcagaggagaaggaagacggaagtcgtaaaacaacaagatacgatatagatatgcttaaatgtatatattgtggattatgtcaagagtcttgtccagtagatgcaatagttcaaggaccaaattttgaatttgctaccgaaaccagagaagaactttattataataaaaaaaaattacttgataatggcgataggtgggaagaagttttaagtaaaaatatcaaattagataaaatttacagataaa

SEQ ID NO: 200843 - DNA, 487 bp, Unknown
  Bacterial polypeptide expressing nucleotide sequence isolated from the Sargasso Sea
tatgaaaatatcaagaatacttaaaacaattttattaatggattttttaagtggcttacttatcgcaattaaagaatcttttaaagcaaaaaaaactttaaattatccatttgaaaaaggaaaaattagtccaagattccgtggcgaacatgctttaagaagatatcctaatggcgaagagagatgtatagcttgtaaactatgtgaagctgtttgtcctgcccaggcaataacaatcgattcatacgaaagagaagatggcagtagaaaaacctcaagatacgatattgatatgcttaaatgtatttattgtggactttgcgaagagtcttgtcctgtagatgcaattgtccaagggcctaattttgaatttgcaaccgaaacaagagaagagctttattataataaacagaaattattagacaatggtgatagatgggaaagtttattagcagcaaatattaaagctgacggcccttacagataa

SEQ ID NO: 200844 - DNA, 214 bp, Unknown
  Bacterial polypeptide expressing nucleotide sequence isolated from the Sargasso Sea
ttatcctttttcacttatacctggacccttatggctaatatttaaaatattattattatttattcttttctcactagttaaagccattgtgcctagatatagatatgatcaattaatgaaattgggttggaaaatatttctacctctgtcgttaatatgggtagttttaacagcaagttatttattttattttaacctattaccaacaaattaa

SEQ ID NO: 200845 - DNA, 871 bp, Unknown
  Bacterial polypeptide expressing nucleotide sequence isolated from the Sargasso Sea
ttaattgcaaaatcaagaagacttagaggcactccatatacttctcgaattgaggaacagggtgttacagcttatacaatttataaccatatgttacttccagctgcctttggttcaattgaagaatcttatcatcatttaaaagagcatgttcagatctgggatgtagcagctgaaagacaggtagaaatttcaggaaaagattctgcaaaactagttcagttgatgacttgtagagatttatcaaaatctaaagatggaagatgttattattgtccgattatagatgacaatgctggattaattaatgatccagttgttttaagaattaatgaaaataaatggtggatttctattgcagatacggacgtaatattatttgcaaaaggattagcaattggaaataaatttgatgttgaaatcatagagccaaaagttgatatcatggctgtacaaggtccaaaatcatttaaattgatggaaaaagtatttggagaacagattacaaaattaaaattttttggttttgattattttgaatttggaggtgcaaaacaccttatcgcacaatctggatggtccaaacaaggaggctatgaagtatatgttcaaaatacagaagcaggcttaaaactgtatgatcatttatttgaaattggaaaagaatttaatgttaaaccaggatgtcctaatttgattgaacgaatagaaagtggactgttatctcatggtaatgatatggataatggagataatccttatgaatgtggttttgataaatatattaacatagatagtgatgttatctttttaggaaaaaaagaactgaagacaattaaatctgaaggaataaataaaaaattaatgggag

SEQ ID NO: 200846 - DNA, 908 bp, Unknown
  Bacterial polypeptide expressing nucleotide sequence isolated from the Sargasso Sea
tttggcttttaatgggttaattagtgcaacagttttcatacctacattaggtgctttagttattgctgttttattaaaaaagaatagtcatgtttttttatttgctagatttgtggcactattaaacttaatattatcagcacttgttttgttctcttatcagattagtgaatctactgacaagtttaaactagttgacaaatatgaacattggataccatttgattcttttaaggtgcaatattatttaggtgtagatggttttagtgctcctttaattttattaaccggtttattaactgcagttgcaattttttcttcaaaaaatataactcataaaataaaacaatattttatatgtttattattacttgagactgctgttatgggtgttttttcatcattagatttattcttattttttatattttgggaacttgaattaatacctatgtttttcttaataatggtttggggaagtggtaggaaaaattattctgcgatgaagtttttgatatttactctaattagtggagcattaatattatttggaatattaatgctatttgcatctactaagactttcgatataacattgcttccttctttaattaaagaggaatctttattaatacccatgagtatcatgttttttgtgtttttcattgcgttttctattaaattacctgtatggcctttgcatacatggctaccagatgcacatacagatgctcctacagcaggtagtgtaatgcttgcaggagtactgataaagatggcaggatatggtttgataagaatatgtattggcttgtttcctgaatctgtatctgaatattccctttatatagttatattagctgtaattaatgttatatatggtgctgtaatcactatgaggcaaactg

SEQ ID NO: 200847 - DNA, 628 bp, Unknown
  Bacterial polypeptide expressing nucleotide sequence isolated from the Sargasso Sea
atgaattttccaattttatcttctttaattttattaccaactattggtgctttatttttattctttactaaagataaagaagggaacaactcaacagcaaaatatgtttctctttttactacatctgttaattttttaatttctatttatttatggatttcttttgatcaatctacatctaattttcaatttattgaggatagaacttggattgaaggatttattaattacaaggtaggtgttgatggtatttcaattttattcatcatattaactacgtttattacaccactttgtattatctcagtaaacaactcagttaaaaaaagattaagagattttctaatagcaatattgatattggaaagtttcatgataggagttttttgtgctcttgatttagtagtcttttacttattcttcgaagcaggtttaattcctatgtttttaataattggtatatggggtggacctagaagggtttattcagcatttaaattctttttatatactttgctaggttcagttttaatgttagttgcaattatttcaatttattggatctcaggtaaaacagatgtcattaagttatacgaattgggaattgatgcaaaatatcaaaacctat

SEQ ID NO: 200848 - DNA, 160 bp, Unknown
  Bacterial polypeptide expressing nucleotide sequence isolated from the Sargasso Sea
catgttcgcggaatttttaaaagattatttaccaataatattgttcctaattattgcattaggattgagttgcgcgtttgtaataattaattttattttatctccaaaaaatccagatccagagaagttatcggcttatgaatgtggatttgaaccattt

SEQ ID NO: 200849 - DNA, 178 bp, Unknown
  Bacterial polypeptide expressing nucleotide sequence isolated from the Sargasso Sea
atggaacatctcttaagcgagtatctgccgatcgcgatttttatcggtctgtcgaccgtcatatctgttgctttattgatggtcccatttgtgatcgccccttcgaacccggaccccgaaaaactctctgcatatgagtgtgggtttgaagccttcagcgatagccgcatgcgcttga

SEQ ID NO: 200850 - DNA, 371 bp, Unknown
  Bacterial polypeptide expressing nucleotide sequence isolated from the Sargasso Sea
aggatctgttagtccaagatcaagaggtgaacatgcgctaagaagatatccaaatgtgagggaaagatgtatagcttgtaaattgtgcgaagcagtatgtccggctcaagcaattactattgaatcttctgaaagagaggatggaagtcgaaaaactacaagatacgacatagatatgttaaaatgtatttattgtggtttatgtgaagagtcttgtcctgttgacgctatagttcaaggacctaattttgaattttctacagaaacaagagatgagctttattataataaagaaaaactactagaaaatggagatagatgggaaagcgtcttagcagccaatattaatgctgacagctctcatagataat

SEQ ID NO: 200851 - DNA, 777 bp, Unknown
  Bacterial polypeptide expressing nucleotide sequence isolated from the Sargasso Sea
aatggactcttatttttcaatattatttactgaagtttataaaatactctttcttttggttcctgttttggtctctgtagcaatgatagtttggcttgatagaagagtttgggcctttgtacaaaaaaggagaggacccaatgttgttggtccatttggtttatttcaatcattagctgatgcattaaaatatatctttaaagaaataataatacctgcaagctcaaacaagcttgtatttgtgctagctccagtcgtgaccatgacattagcattaatatcatgggctgtaataccatttggtgaagattttgttctagctgacatcaatgttggtattctatatctttttgcagtttcatcattaggtgtatatggaataattatgggaggatgggcctcaaattctaaatacccttttttaggtgcaatcagatctgctgcacaaatggtatcatatgaagtttccataggagtcataataatcaatgttctattatgtgttggatctttaaacttaagcgacatagttatggcacaacaaaatttatggtttgtaattcctttgtttcctatgtttgtaattttttttatttctgcattagcagaaacaaatcgtcctccatttgatttgcctgaagcagaagcagaattagtagctggatatcaaacagaatattcaggaatgatgtatgcaatgttttggctaggagagtatgcaaatattttgttaatgtgtgcaatgggagcagttttatttttggggtggctggttat

SEQ ID NO: 200852 - DNA, 499 bp, Unknown
  Bacterial polypeptide expressing nucleotide sequence isolated from the Sargasso Sea
atgtctaggtttaaacgctttatatttataataaaagaatttcttctaattgaggtgatttctggacttttattgacccttaaatattttttcaaacctaaagtaacaatcaattatccttttgaaaaaggttttataagttcaagattcagaggcgaacatgttctgaggagatatgaatctggtgaagaaagatgcattgcatgcaaactatgcgaagcagtttgtcctgctcaggcaattacaatagaagctgaaccaagagaagatggttcaagaagaacaacaagatacgatatagacatgaccaaatgtatatattgtggatattgtcaagaatcatgtcctgttgacgcaatagtagaaggtccaaattatgaatttgctacagaaaccagagaagaattaatttataacaaagaaaagttacttgaaaatggtgatagatgggaatttgagatttccaaaaatttagaaaaagagtctaaatacttatgac

SEQ ID NO: 200853 - DNA, 214 bp, Unknown
  Bacterial polypeptide expressing nucleotide sequence isolated from the Sargasso Sea
atggcaaaaaaaattaaaaatttaaatttaaactttggaccacaacatcctgctgcacatggagttttaaggttaattttagaattagatggtgaaattgttgaaaaagctgatcctcatattggtttattgcatagaggtaccgagaaattaattgaaaacaaaacttacatgcaggcagtaccttattttgacagattagattatgtggctc

SEQ ID NO: 200854 - DNA, 496 bp, Unknown
  Bacterial polypeptide expressing nucleotide sequence isolated from the Sargasso Sea
aggtattaaatatttcgttttaagcgctctttcgtcaggtctacttttatacggatgctctcttgtgtatggttttactggctcaactaattttgatcaaattgcactaatgactgttgatttcaacactggaataatttttggtatggttttcattattgttggtttagcctttaaaatttccgctgttccttttcatatgtggtctcctgatgtttacgaaggctcaccaacctctgttactaatttcttttctgttgttcctaaaatagcgggtgtatctatatttataaaatttatgtatttgccatttagagaaattttaactgagtggcaatacatactaatctttatgtcaattgcttcaatgatcttaagcgctgttgctgcaatcggacaaaaaaatataaaaaggctaatggcctacagctcgatcggacatataagatatgcaattgcaggaattgctgctggatcggaaaatggatttaaaagt

SEQ ID NO: 200855 - DNA, 775 bp, Unknown
  Bacterial polypeptide expressing nucleotide sequence isolated from the Sargasso Sea
cctgctgcatttggttctttagaagactcatatcatcatttaaaagagcatgttcaagtttgggatgtggctgctgaaagacaagtagagattactggaaaagatgctgcaaaattggttcaacttatgacttgtagagatctttcgaaatcaaaagatggaagatgttattattgtcctatcatagatgataatgctggattaattaatgatccagttgttctaagatttaatgagaataaatggtgggtttctattgcagatacggatgtaattttatttgcaaaaggattggcaattggaaataaatttgatgtaaatattatcgaacccgaagttgacattatggctgtgcaagggcctaaatcttttaaattgatggaaaaagtttttggagaaaaaataacaaaattaaaattttttggttttgattattttgattttgcaggagccaaacatttaattgctcaatcaggatggtctaaacaaggtggatatgaaatttatgtagagaataatgaggcgggtttaaaactatacgatcatttatttgaaattggagatgagtttaatattagagcaggatgtcctaatttaattgaacgtatcgaaagtggattactttctcaaggaaacgatatggataatggagacaacccatacgaatgtggctttgataaatatattaatattgatagtgatgttgaatttttaggaaaagagcaattaaaaaaaataaagtctgaaggaattaaaagaaaactaatgggcgtta

SEQ ID NO: 200856 - DNA, 816 bp, Unknown
  Bacterial polypeptide expressing nucleotide sequence isolated from the Sargasso Sea
tatggaatggttttatcagcatatacttagcttgatgatttttaccccactttttgcttctttttttgttttttttagccagacaaaaaaactagctctcaagatcacacttttttcttcttgtcttagttttctaataagctgtctgatctggctaaagtttgatgcaagcagtccttcacttcagtttgttgaagcctattcttggattccctctcttggtattcaatatattgtgggtatagatggactaagtcttcttcttgttcttttaacaaccttgcttagccctcttgttcttttgagcttaagtgacaagattaaagcatataaagaatttcttgttcttcttctactacttgaaacagcaatgcttggagcccttcttgcttttgacatagtttttttctatgtcttctgggaagctatgctgatccctctatattttatcatcggtgtgtggggaggggagaacaaagtttatgcgagcacaaaatttgtgctctacacagtatctgcttctctactcatgctgattgcagctctttatttatatttagaacactggcatagctttggcatcccttcaacaagcttgcttgatctttataaactgtcgaagctacctcttccggcacaaaatcttttgttttttgcctttagccttgcttttgtggttaaaatgccactttggccatttcatagctggttgcctcatgctcagactgaagctccgacagcaggatctgtcatcctcgctgctctctttgtgaagatgggagcctatggtttcatccgtttttctatccctctgtt

SEQ ID NO: 200857 - DNA, 187 bp, Unknown
  Bacterial polypeptide expressing nucleotide sequence isolated from the Sargasso Sea
tatgactgcagattttttaaaagattatttaccgattattttgttcctgattatagctttaggtttaagttgtgcatttgtaataattaattttatattatctccaaaaaatccagatccagaaaaattatctgcttatgagtgcggatttgaaccatttcaagactcaagaatggaatttgatgta

SEQ ID NO: 200858 - DNA, 381 bp, Unknown
  Bacterial polypeptide expressing nucleotide sequence isolated from the Sargasso Sea
tatgaaaatatcaagatttattaaaacaattttattagcagattttattagcggtttaattattgctattaaagaatcttttaaatctaaaaaaactttaaactatccatttgaaaaaggtaaaattagtccaagattccgtggagagcatgcactaagaagatatccaaatggtgaagaaagatgcatagcatgcaaattgtgtgaagctgtttgtccagctcaagctattacaattgagtcaactgaaagagaagatggtagtagaaaaaccacaaggtatgatatcgatatgcttaaatgtatatattgcggtttatgtgaagagtcttgtcccgttgatgcaattgtacaagggcctaattttgaattttcaacaga

SEQ ID NO: 200859 - DNA, 739 bp, Unknown
  Bacterial polypeptide expressing nucleotide sequence isolated from the Sargasso Sea
aatggaatatttaattgtattatataatgaagtttataaaattttatttttattaattcctattctagtctctgtagcgataatagtttggtttgatagaagagtttggggatttgttcaaaagcgtaaaggaccaaacgttgtcggtcctttcggtttgtttcaaactttagcagatgcactaaaatatatatttaaagaaataattattcctgcaagttctaataaagtcatttttattttagcacctatagtcacaatgacactggccttatccgcttgggctgtaatacctttaagtgaaaagatggttattgctgatataaatgttggtatactttatatttttgcaatttcttccttaggtgtttatggaattttgatgggaggctgggcatcaaattctaaatacccttttcttggtgcagtaagatctgcagcgcagatggtttcttacgaggtatcaattggaataataattattaatgttctgttgtgtacaggctcattaaatttaaaagaaatcgttttagctcaacagaatttgtggtttgtagtccctttatttcctatgttcgttattttttttatatctgcactagcagagactaatcgacctccatttgatttaccagaagcagaagcagaattggttgctggatatcaaacagaatactccgggatgatgtatgcaatgttttggcttggagaatacgcaaacattctcttgatgtgtgca

SEQ ID NO: 200860 - DNA, 730 bp, Unknown
  Bacterial polypeptide expressing nucleotide sequence isolated from the Sargasso Sea
aatgacaaaaaaaattaaaaatctaaacctaaattttggaccacaacatccagcagcacatggtgttttaagattgatattggaattagacggagaagtggtggaaaaagctgacccacatataggtttgcttcatagaggtactgagaaattaattgaaaacaaaacctatatgcaggctgtgccttattttgatagattagattatgttgccccaatgaatcaagaacatgcttttgccttagcaatagaaaaaatattaaaaatagaagttccttcaagagctcaatacattcgtgttatattttgtgaaattggtagaattttaagtcatattttaaatgttactacacaagcacttgacgttggtgctctgacaccgtctttatggggttttgaagaacgagagacattaatgactttttatgaaagagcctcaggatcaagactgcatgcaaattattttagagctggaggagttcatcaagacttaccagctggacttgaagatgatatagcaaaattctgtgaatcttttccaaaaatcataaatgatttagaaaatttgttgaccgataatagaattttcaaacaaaggaatgttgatataggagttgtaacaaaagaagatgccttagattattcatttacaggcgtgatgatcaggggctcaggtgttccctgggatttgagaaaatctcagccttatgattgttatgaacaaattaga

SEQ ID NO: 200861 - DNA, 487 bp, Unknown
  Bacterial polypeptide expressing nucleotide sequence isolated from the Sargasso Sea
aatgaatatttcaagattttttaaaacaatatttatgactgacttcatcggtggtttatttattgctattaaagaattatttaaatcaaaaaaaacaattaattacccttttgaaaaaggtaaaataagtcctcgttttagaggtgagcatgctttaagaagatatccaaatggagaagaaagatgtattgcttgtaaattatgtgaagcagtatgtcctgcacaagcaataacaatagaatctactgaaagagaagacggaagtagaaaaacaacacgttacgatattgatatgatgaaatgtatttattgtggattatgtgaagagtcttgtccagtagatgcaatagtacaaggtccaaattttgaattttcaacagaaacacgagaagaactttattatacaaaagaaaagttattagataatggtgatagatgggagaatgttttagaggctaatattaaagctgacaatatccacagataa

SEQ ID NO: 200862 - DNA, 487 bp, Unknown
  Bacterial polypeptide expressing nucleotide sequence isolated from the Sargasso Sea
atgaaacttaatagattttttaaaattatttttttatctgaatttattaaagcaataataattgctattagtgaaatttttaaaaaaaagaaaacaatcaattatccttttgaaaaagggagtataagccccagatttaggggagaacatgctcttagacgttatccaaacggtgaggaaagatgtatagcttgtaaactgtgtgaagcagtctgccccgcacaagcaataacaattgagtcagaagaaaaaccagatggaagtagaaaaacaactaaatatgatattgatatgcttaaatgtatttattgtggtttatgtgaagagtcttgccctgtagacgctattgttcaaggacctaattttgagtttgcaacagaaacacgtgaagaactttattacaacaaagaaaaactactagataacggcgatagatgggagtctgtcttggctcaaaatataaaactggataaaccatacagataat

SEQ ID NO: 200863 - DNA, 784 bp, Unknown
  Bacterial polypeptide expressing nucleotide sequence isolated from the Sargasso Sea
tattcacatataaaagaaaattttttttcttgtgaaatttcctgtttgtatcttctcactatcataggactcctcattataccagcaagctatgattttgtgagtttatttgtcggtcttgaaatatcatcaataggatcttatgtccttattgggtacttaaatccaaatcgacttagcctagaaggttctattaaatatctgattctaggagctttttcaacaggagtgtttctatttggaataggactgctctacactgaaactggatcccttaatattaatgaaatcgtttcaaattcatcgaacatacaactaacctatttaagtcgccttggaggagtttttattctttgtggtctatgctttaaaatttcacttgttccttttcatatgtgggctcctgatgcttatcaagctgcatcatccggaatcactgcattcatggcaatttgtataaaactttctatatttgtactatctcttcgactatctccattaggaatgcttttactcccaaaagattgggtaacatgccttgttatcttatctattctttcaatgactttaggaaatatatttgccctcgttcaaacaagtttgaaaagaatgctcgcatactcttctattgctcacagcggttatatggcaattgctttatgctccatggatactcagaacatattgccatatcaaaccattttattttatttgatcagttatggcctaagttctcttgctatatttggatgccttatgctctttgagtccaaagacaaagaag

SEQ ID NO: 200864 - DNA, 866 bp, Unknown
  Bacterial polypeptide expressing nucleotide sequence isolated from the Sargasso Sea
aatgctggtgatcttcattggtttggaaatcatgtccatttcgagctacatccttgtgggcatgaaacgccgtgtcgcgttgtctaatgaagcagcactgaagtatttgttgctaggggcattttcaacaggatttctgctttatggaatctccctgctctatggcgcgacgggaacgacctaccttcccggaatcattgagtctcttcagcagggaccttttttcagcaacccccttgcggtagctggagtcggactggtcatcatttcgatgagtttcaagatcgcgattgtgccctttcacatgtggactccggatgtctataccggtgccccgacacctgtgacggggtttctctctgctgctgccaaagcagcaggttttgcagtattcctcagggtcctgttgacaggaattcctcttgaatccgaaaactggaagaacctgctttggatcctagctgtgcttacaatgacggttgggaacctgatggccttacgtcaaaacagcgtcaagcggatgcttgcatattcttcgattgcccatgccggttacgtcatggttgctgcagtggcaggatcagcggaagcactcagtggaattttcttttattcctgtgcctatgcgttgatggggaccggagctttcggaatcctcacgattcgtgatctgggtaaagttccccagacttatgatgatcttgccggttacggcaaacgatttccgcttcctgcttttatgatgaccctcttcatgctgtctctggtcggactccccctaaccggagggttcatcgccaagcttcagatcttcagtgctgccctggatgagggatggatatggcttacggtgatcggagttttaa

SEQ ID NO: 200865 - DNA, 433 bp, Unknown
  Bacterial polypeptide expressing nucleotide sequence isolated from the Sargasso Sea
atgaaaatttcacgattattaaaaactatattcatgattgattttgtgactggtttattaattgcaataaaagagacttttaaggcaaaaaagacaatcaattatccttttgaaaaggggtctttaggaacaaggtcaagaggtgagcatgctcttagaagatatcctaacggtgaagaaagatgcatagcatgtaagctttgtgaagccgtatgtccagcccaagctattacaattgagtctaaggaaagagatgatggtagtagaaaaacagtaagatacgatattgatatgcttaagtgtatatactgtggtctttgtgaagagtcttgccctgtagatgcgattgttcaaggtccaaattttgaatttgcaacagagtctagagaagaactttattatacaaaagaaaaacttttggaaaatggtgaca

SEQ ID NO: 200866 - DNA, 724 bp, Unknown
  Bacterial polypeptide expressing nucleotide sequence isolated from the Sargasso Sea
gatggtaaaaaaaactaaatcactaagcctaaactttggacctcaacatcctgctgcacacggtgttttaaggttaatattagagttggatggagaaatagtagaaaaagctgatccacatatagggttactgcataggggaacagaaaaattaattgagcaaaaaacttacacccaagctttaccttacttcgatagactagattatgttgccccgatgaatcaagaacacgccttcgctttagctgcagaaaaattactcaaagtagaagtacctatcagagctaaatacataagagtaatattttgcgagataggaagaattctaagtcatattttgaatgtcactactcaggccttagatgttggagctttgaccccttcattatggggttttgaagaaagagaaactttgatgactttttacgagagagcgtctggatcaagattacatgcaaattattttagaactggaggtgtgcacaaagatattccaatgaaactggtggaagatattgaaaaattttgtaagtcgttcccaaaaattattgatgatttagagggtctacttacagataatcgtatttttaaacaacgtaacgttgaaatagggattgtttcaaaacaagaggctctagatcacagcttctctggtgttatgttaagaggttcaggtgtcccttgggacctaagaagatctcaaccttatgaaatttataaagat

SEQ ID NO: 200867 - DNA, 763 bp, Unknown
  Bacterial polypeptide expressing nucleotide sequence isolated from the Sargasso Sea
aattggcacacttgctttgactggttttccattgttgtctggtttttattctaaagacgcaattattgaatttgcttatttaaaagatagttcgctaggatattgtgcagcttcaattggaatatttacagccttgttgacgtctatttactcatggagactgtttttcaagacttttcatggaaactttaataatcagttaataaagattgataaaattcatgaatcaccaatgataatgataattcctcttatagttttggctgttggttcaattttctcaggttatttttttaaagacttatttattggtattgaaaaaagttatcaattttggagttcttcaattttttttctagatcctttgagcaatgatcatccacccaaatggtttttgtatttaacccctaccttagttacaatttcaataccagtagcatactatttatttgtcaaacgaaaagatctattacttcttattgttgatggtaatagaccattttataattttttaaaaaacaaatggtactttgatgaaatttatgagattatttttgtgaaaagctcaaaaaaaattggtatatatttttggaaaaagattgatggtcttataattgatagatttggtccagacggcatatctaatataataaagatactttcaaacaaagcagttaagttccagagtggatacatttatcaatatgcatttataatgttagttggtttttcagctttgttaacttatttaatagttaaataa

SEQ ID NO: 200868 - DNA, 722 bp, Unknown
  Bacterial polypeptide expressing nucleotide sequence isolated from the Sargasso Sea
tttgcaagaagtttataaaattttatttttactaattcctgttctcgtttcagtagcaatgatagtttggcttgatagaagggtttgggcttttgttcaaaaaagacaaggacctaacgttgttggtccgtttggcttattacaatctttagctgacgctttaaaatatatatttaaagagatcattattccatccagctcaaacaaagtaatttttatattagccccaatagtcacgatgactttagctttaatcgcttgggctgtaatcccatttagtgcaactcaggttttagccgatattaatgttggaattctttacttatttgctgtttcttcactaggagtctatggaataatcatgggtgggtgggcatcaaactccaaatatccttttcttggagcaattcgttctgctgcgcaaatggtatcttatgaagtttcaattggggtaataataataaatgttttactttgtgtcggttcattgaatttaaacgacattgttattgctcaacaaaatatgtggtttgtaattccattatttccaatgtttgtaatcttctttatttcagctttagctgaaactaacagaccaccttttgatttaccagaagcagaggcagaattggtagctggatatcaaacagaatattcaggaatgatgtatgctatgttttggttaggtgagtatgcaaatattttattaatgtgtgcaatgg

SEQ ID NO: 200869 - DNA, 706 bp, Unknown
  Bacterial polypeptide expressing nucleotide sequence isolated from the Sargasso Sea
aatgagtaaacaaacaaaaacactaaatcttaactttggaccacaacacccagctgcgcatggagttttaagattgatattggagttagatggggagattgtagaaaaagctgacccccatattggtttgcttcatagaggcacagaaaaattgattgagaataaaacgtattctcaagcgataccttattttgatagacttgattatgtggcaccaatgaatcaagaacatgctttcgctttagctatagaaaaaattttagacattgaagttccaattagaggtcaatacataagagttattttttgtgaaattgggagaattttaagccacatacttaacattactactcaagctttagatgtaggtgccttaactccttcattatggggttttgaggagcgagaaaaacttatggaattttatgagagagtttcaggatcgagattgcatgcaaattattttagaccaggtggcgttcatcaggatttaccaagaggacttgatactgatattttaaaattttgtaatgaatttccaaagataattgatgatttagaaactttactcactgataacagaatttttaaacaaagaaatgtagatattggaatagtttcaaaagatgatgcattagactattcattctcaggtgtaatgatgagaggttcaggcgtaccttgggatttaagaaagtctcaacct

SEQ ID NO: 200870 - DNA, 172 bp, Unknown
  Bacterial polypeptide expressing nucleotide sequence isolated from the Sargasso Sea
atggacatagcgatagctgattatttgccaatactaatttttatgtttgttgcgttagcgattagctgtctatttgttttggcaaatttcttagttgcagtaaataaccctgatcctgaaaagaattctgcctatgagtgcggatttgaacagttggagactctagaatgaa

SEQ ID NO: 200871 - DNA, 445 bp, Unknown
  Bacterial polypeptide expressing nucleotide sequence isolated from the Sargasso Sea
atgaaaatattaagattattaaaaactatatttatggtggactttattacaggtctattgattgcaattagagaggtttttaaatcaaagaaaacgattaattatccatttgaaaagggacaagttagcccacgcgcaagaggtgaacatgctttaagaagatatccaaatggtgaagaaagatgtatcgcatgtaaactatgtgaagcagtttgtccagctcaagcaattacaatcgagtcaaccgaaagggaagatgggagcagaaaaacaactagatacgatattgatatgctaaaatgtatttattgtggcttgtgtgaagagtcttgtccagtagacgctattgttcaaggacctaattttgaatttgcaacagagactagggaagagctttattacaataaagaaaaacttttagaaaatggggataggtgggaaaata

SEQ ID NO: 200872 - DNA, 259 bp, Unknown
  Bacterial polypeptide expressing nucleotide sequence isolated from the Sargasso Sea
ctgtactattttttaggaggttggctcccaccaattgatatcaatgcactttcatttatcccagcacctttttggttgatttttaaaatattatttttgtttatattatttgctttggttaaggcaatagtacctagatatagatatgatcaactgatgaaattaggttggaaagtatttttaccattatcattaatttgggttgttataactgcagcctatttgctttattttgatttattaccgactcaaatatgaa

SEQ ID NO: 200873 - DNA, 277 bp, Unknown
  Bacterial polypeptide expressing nucleotide sequence isolated from the Sargasso Sea
atgagcttaataagatttttcaaaacaatttttatgattgattttttaacaggattaatcatggcaataaaagagatatttaaaccaaaaaaaacaattaattatccatttgaaaaaggttcaattagtcctagagcaagaggagaacatgcgctaagaagatatccaaatggtgaggagagatgtattgcttgtaaactatgtgaagctgtttgtcctgctcaggctataacaatagagtctagcgaaagagaagatggaagtagaaaaactactc

SEQ ID NO: 200874 - DNA, 774 bp, Unknown
  Bacterial polypeptide expressing nucleotide sequence isolated from the Sargasso Sea
aatgactgaaagcaatctgacactaaacttcggtccacagcacccagcagcgcatggtgttttacggttaattatggagatggacggtgaggtcattacaaatctcgacccacacatcggccttttgcacagaggcacagaaaaacttgctgaaatcaaaccgtttaatcattcgatcggatatatggatagaatggactatgtttcgatgatgtgttgtgagcatccatatgttctagcaatcgagagtctattggagattgaacctcccaaaagggcgcaatatatcagagtcatgtatgatgaaatcacaagaatcatgaatcatttattgtggttgggttgtcatggtcttgatattggggcaatggctttattcctctattgctttcgggaacgagaggacctatatgatgcatatgaagctgtatcaggtgcaaggatgcatgcaacatactatagaccaggtggagtttatcgtgacttacctgatgagatgccaaaatacaaagctaacaagtttatttctgaaaaaaaggtcaaaaaattaaactataacagagcaggctcactgcttgatttcattgaagactttaccaaccgatttccatctcttgtagatgaatacgaaactcttctaacagataacaggatatggaagcaacgtaccgtagatatcggtgtcgtgactcctgaaagagccatgcaactcggttttactggtccaatgctcagaggttcaggcatcgaatgggatctcagaagaaatcaaag

SEQ ID NO: 200875 - DNA, 898 bp, Unknown
  Bacterial polypeptide expressing nucleotide sequence isolated from the Sargasso Sea
ataacaatgacaaaaaaaattaaaaatttaaatctaaattttggaccccaacacccagcagcccatggagtattaaggcttattcttgaacttgatggtgaagttgtcgaaaaagctgatcctcatattggactgttacatcgaggtactgaaaaactaattgaaaacaaaacttacatgcaagcagttccatattttgatcgtcttgattatgttgcaccaatgaatcaagaacatgctttcgcattagctattgaaaaaattttaaatattgaagttccaataagagcacaatttattagagttatgttttgtgaaattggtagaatattaagtcatattttgaatgttactactcaagccttagatgttggagccttaactccatctttatggggatttgaagaaagggaaacattaatgacgttttatgaaagagcatcaggttcaagattacatgcaaattattttagagcaggcggtgttcatcaagatttaccagctggtcttgaaattgatattgcaaaattttgtgaaagttttccaaaaattctagatgatttagagaacttattaactgataacagaatatttaaacaaagaaacgtagatattggaattgttacaaaagaagatgctttagattattcttttagtggagtgatgattagaggatctggagtaccttgggatattagaaagtcacaaccctatgactgttatgaacaactagaattcaaagtgcctgttggaaaaaatggtgactgttatgatcgatatttatgtagaattgaagaaatgaaggaaagtgtttccataattaagcaatgtttaggaaaaatggaaaaaggaccaataaaaacttttgatggaaaaatatctcctccatccaaaaaag

SEQ ID NO: 200876 - DNA, 599 bp, Unknown
  Bacterial polypeptide expressing nucleotide sequence isolated from the Sargasso Sea
aatgaattttcctattctttcatctttaatattattaccaatagttggtgctttatttctattttttaccaaagataaagaaggaaataatttaactgctaaatatgttgctttatttacaactgtagttaattttttaatttcgatttatctttggatttcttttgaccaatcaacgtctagttttcaatttgtagaagatagaacatggattgaaggatttattaattataaagttggaattgatggtatctcaattttatttataatattaacaacatttataactcccctttgtataatatctgtaaataattctgttaaaaatagattaagagattttttaattgcaattctaatcatggaaagtttcatgattggtgttttttgtgcactcgatttagttgtattctatttattttttgaagctggattaataccaatgtttttaattatcggtatttggggaggcgcaagaagagtttattctgcattcaaattctttttatacacattgttaggttctgttttgatgttagttgcaataatttcaatttattggattacaggaacaactgacgtggttcaactatatgaaa

SEQ ID NO: 200877 - DNA, 692 bp, Unknown
  Bacterial polypeptide expressing nucleotide sequence isolated from the Sargasso Sea
aatgggtttttacggtacagaaattcctatctttgagttttcgcatttggcagctcaagactttagtcaaaaattccaaatactctgttacgttggccttttaattgcatttggagtaaaactcccaatagttccccttcatacttggcttccagatgctcatggagaggccacagctcctgtacatatgcttctagcaggaattttattgaagatgggaggatatgctcttttaagatttaatgcgcaattattacccgttgctcatgctcaatttgccccattattaatagttttaggagtagtaaatataatttatgctgcactaacttcttttgctcaaagaaatctcaaaagaaaaattgcatacagttctataagtcatatgggtttcgttcttattggaataggtagttttagtagcctcggaacaagcggagctatgcttcaaatggttagtcatggattaattggggctagtttgttttttcttgtaggggcaacctatgatagaacaaagactctgaaacttgatgaaatgagtggtgtgggacaaaaaatgagaataatgtttgccttatggactgcttgctcacttgcttcacttgctttacctggtatgagtggatttgtttccgaattaatggtattcacaggatttgttactgatgaagtttacactctcccgttta

SEQ ID NO: 200878 - DNA, 196 bp, Unknown
  Bacterial polypeptide expressing nucleotide sequence isolated from the Sargasso Sea
aatgaatttagaagataaaacaaaaaagattccagatgagttcaagcagctagcgaaagattttagtgataatggctttataactacatcattagataatttagtcaattggtctagaactggctctttgcattggatgacttttggattggcatgttgtgcagttgaaatgatgcaaacttcaatgccaagataa

SEQ ID NO: 200879 - DNA, 220 bp, Unknown
  Bacterial polypeptide expressing nucleotide sequence isolated from the Sargasso Sea
atgatcaaatgccccgaacctagatatgtgatatcatgggggagttgtgcaaatggaggaggttattatcattattcatattcagttgttagaggatgtgatcgaattgttcctgtagatatttatgtaccaggatgtccaccctcagctgaagctttgttatacggaataatgcaattacaaaaaaaaattagaaacaaaggttcaataaatagatgat

SEQ ID NO: 200880 - DNA, 253 bp, Unknown
  Bacterial polypeptide expressing nucleotide sequence isolated from the Sargasso Sea
aatgaaattaaatagattttttaaaataatatttttatctgaatttatcaaaggattagctattgctataagagaaattcttaaaagaaaaaaaacaataaattatccatttgaaaaaggaaaaataagcccgaggtttagaggggaacatgctttaagaagataccctaatggagaagaaagatgtattgcctgtaagttatgcgaagcagtatgccctgcccaagcaataactatagaaaatgaggaaagg

SEQ ID NO: 200881 - DNA, 382 bp, Unknown
  Bacterial polypeptide expressing nucleotide sequence isolated from the Sargasso Sea
aatggctaaagagaaaaaaacattaaatctaaattttggtccgcaacatcctgctgcacatggtgtgctgaggcttattttagaattagatggtgaaatagtagaacatgctgatcctcatattggactacttcatagaggtacagaaaaattaattgaaaataaaacttatctccaagcattaccttatttcgatagacttgattatgttgccccaatgaatcaagaacatgcatttgcacttgccgtagaaaaaattttaaatattgatgttcctattagagctcaatttataagagtaatgttttgcgaaattggaagaatattaagtcatattttaaacataactactcaggcacttgacgtaggagctttaacacct

SEQ ID NO: 200882 - DNA, 718 bp, Unknown
  Bacterial polypeptide expressing nucleotide sequence isolated from the Sargasso Sea
atgtcgcaaatctggctgattcccgcatttccgctgttgggctttttgctcaatggatttctggggaaattctttggtacccgatttgttagctttgtcgggcctatgtcaattggattggctttccttcagtctattgtgcttttctttgagatgctcaagaccgaggggcaccgcatcatcgaaaacctctatacctggatggccgcaggctctttccaggtcaatatcagtttccaggtcgatgaactttcagggctttacctattgatcatcactggagtgggttttctgatccatgtttattccatcggctacatgaagggggagtcgggctactatcgttattttgcctacctaaacctttttgtcttcttcatgctcattttggttctcggtgacagcttcctgctaatgtttgtcggttgggaaggggtgggcctctgttcttatctcctgatcggttattactttgagaaacattccgccgcagaagcctgcaaaaaagcctttttgtttaatcgtgtaggagattttggagtgctttccgcagtgctcttgattttcctcagtatcggcagtcttgaattcaacacggtcaatgcccaggctgcagcccaatttgaatacggaggtgttttggtgacggtgatcaccttgctgctttttcttggagcaactgggaagtcggcgcagattccgctctatgtatggcttc

SEQ ID NO: 200883 - DNA, 487 bp, Unknown
  Bacterial polypeptide expressing nucleotide sequence isolated from the Sargasso Sea
atgaaaatttctagattttttaaaacaatatttatgacagattttcttagaggcttattcatggctatcaaagaattttttaaaccaaaaaaaacaataaattatccttttgaaaaaggaaaaataagtccaagatttagaggcgagcatgcattaagaagatatccaaatggtgaagaaagatgcatcgcatgcaagttatgcgaagctgtatgtcctgcacaagctataacaattgagtccgcacagagagaagacggaagtagaaaaacaactagatatgatatagatatgatgaaatgtatttattgtggattatgcgaagagtcttgtccagtggatgcaattgttcaaggtccaaattttgaattctctacagaaacaagagaagaactatattacacaaaagaaaaattattagataatggagatagatgggagaatattttagacgccaatattaaagctgacaatattcacagataaa

SEQ ID NO: 200884 - DNA, 415 bp, Unknown
  Bacterial polypeptide expressing nucleotide sequence isolated from the Sargasso Sea
aatgactgacaaagacataaagcccattacaatgaattttggtccccagcatccagctgctcatggtgtattaaggttaatcatggaaatggatggtgaaattattgaaagagcagatccccacattggattacttcataggggcacagaaaaattaatcgaaaataaaacttatattcaggcattaccatattttgatagattagattatgtttctccaatgaatcaggaacatgcttatgcactcgccgttgaaaaattagtaaatattgatgttccaaaaagagcaaaatatatcagggttttgttttgtgagattggaagaatacttaatcatattttgaatataactacttttgctattgatgttggtgctatgaccccacttttgtggggttttgaagaacgcgaaaaa

SEQ ID NO: 200885 - DNA, 418 bp, Unknown
  Bacterial polypeptide expressing nucleotide sequence isolated from the Sargasso Sea
aaagaaagttttaaaccaaaaaaaactattaattatccttttgaaaaagggaaaataagcccgagatttagaggagaacatgcattaagaaggtacccaaatggagaagaaagatgtattgcatgtaaactatgtgaagctgtctgtcctgctcaagcgataacaattgaatccactgaaagatctgatggtagcagaaaaacaacaagatacgatatcgatatgctcaagtgtatttattgtggattatgtgaagagtcttgcccagttgatgctattgttcaagggccaaattttgagtttgctactgaaacaagagaagaactctattacaacaaagaaaaacttatggaaaatggagatcgatgggagagtattttgtcagcaaatattaaagccgataatccctatagataat

SEQ ID NO: 200886 - DNA, 478 bp, Unknown
  Bacterial polypeptide expressing nucleotide sequence isolated from the Sargasso Sea
atgaaatatattaaatcatttacactttttgagttgctacaaggaatgtttttaactttgaaatatatgttcaaagcaaaggtaacaatcaattatcctcatgaaaaaggccctctaagtccaaggtttagaggtgaacacgctttgagaagatatccaagtggtgaagagagatgtattgcatgtaaattgtgtgaagcggtttgtcctgcacaagctatcacaattgaagcagaaccaagggaggatggtagtagaagaactactagatacgatattgatatgagtaaatgtatttattgtgggttgtgtcaagagtcatgtcctgtcgatgcaattgtagaaggtccaaattttgaatttgctacagaaacaagggaagaattaatgtacaccaaagaaaaacttcttgaaaatggagataggtgggaacaagagatcgcgcaaaagatatatttggataggaaatatcgttaat

SEQ ID NO: 200887 - DNA, 770 bp, Unknown
  Bacterial polypeptide expressing nucleotide sequence isolated from the Sargasso Sea
ccccgagatcgtgatctcggtctatgccctcgcggcgcttttgctggtggcctacaccggcaaggaccgcatggcgggaattctggtgtggctgactgcggcgctgatggcggtgatggccttgtggatcgggtccacggggcagggcacgcgtaccgcctttgggggcatgttcaacgatgatggttttgcccgcttcgccaaggtgacgatccttctgtcggcggccgccgttctggtgctggggcaggaatatatggcgcgccgcaagatcctgcggttcgaatacccgctgctgatcgccctgtcggcggtcggtatgatggtgatggtcagtgccggggacctcatggcgctttacatggggctggaactgcaatcgctggcgctttatgtcgtggcctcgctgcgccgggacagcgccaaatcgaccgaagcgggccttaagtacttcgtgcttggcgcactcagttccggcctgctgctttatggcgcgtcgctcacctatgggtatgcgggcacgacgcttttctcgggcatcattgccgccgccgaggggcaggcgcccattggccttctgctggggctggtctttgtcatctcgggtctggccttcaaggtatccgccgtgcccttccacatgtggacaccggatgtttacgaaggatcgccgacgccgatcaccgccttttttgccaccgcacccaaggttgcggccatggggcttttcgcccgcgtggtgcatgatgccttcggcggcgtcgtgggcg

SEQ ID NO: 200888 - DNA, 779 bp, Unknown
  Bacterial polypeptide expressing nucleotide sequence isolated from the Sargasso Sea
actgctctgctacgcgggacttctgattgctttcggcgtcaaactcccgatcgtgccactgcacacctggctacctgatgcccacggagaagcgacggcgcctgtccacatgctgcttgcaggcattctcttgaagatgggtgggtatgccttgctgcggttcaactgtgagctgctgccggccgcgcactctcagttcgcgccccttctgatcgcccttggggtcgtgaacatcatttatgccgcactcacctcattcgcccagcgcaacctcaaacgcaagattgcttacagctcgatcagccacatgggcttcgttctgatcggtgtgggcagcttcagtgcacttggcaccagcggcgccatgctgcagatgatcagccacggcttgatcggcgccagcctgtttttcttggtgggcgcgacctacgaccgcacccatacgctgcaacttgacgaaatgggcggtgtcggacaaaagatgcgcatcatgtttgccctctggaccgtctgtgccctggcgtccttggccttacctggcatgagcggatttgtaagcgaactgatggtgttcgccggatttgccaccgacgaggcctacaccctgccattccgggttgtgatttgcgccttagcagccgtaggcgtggtcctaaccccgatctacctgctttcgatgctacgagagatcttcttcggcaaggaaaaggaggagctggtctcccacagcaacctggttgatgcagagccccgcgaggtttacatcattggctgcctac

SEQ ID NO: 200889 - DNA, 487 bp, Unknown
  Bacterial polypeptide expressing nucleotide sequence isolated from the Sargasso Sea
aatgagtttaataagaatattaaaaacaatttttttgatagaatttatttctggattatatatggctataaaagagctatttagaaagtcaaaaactatcaattatccatttgaaaaaggatctataagtcctcgaatgagaggagagcacgcattaagaagatatcctaatggtgaggaaagatgtatagcttgtaaattatgtgaagcagtttgtcctgcacaagcaattactattgagtcaactgaaaggtcagacggcagtaggaaaactacaagatacgacattgatatgttgaaatgtatatactgtgggctatgccaagagtcgtgtccggttgatgctattgttcaagggccaaactttgagtttgccactgagactagagaggagctttattacaataaagaaaaactattagacaacggtgacagatgggaaacagttttagccaaaaatataaaactcgataaaccttatagataa

SEQ ID NO: 200890 - DNA, 391 bp, Unknown
  Bacterial polypeptide expressing nucleotide sequence isolated from the Sargasso Sea
atgagcttaataagatttttcaaaacaatttttatgattgattttttaacgggattaatcatggcaataaaagaaatatttaaaccaaaaaaaacaattaattatccatttgaaaaaggttcaattagtcctagagcaagaggagaacatgcgctaagaagatatccaaatggtgaggagagatgtattgcttgcaaactatgtgaagctgtttgccctgctcaggcaataacaatagagtctagcgagagagaagatggaagtagaaaaactactcgttatgatattgatatgttaaaatgtatttattgtggtttgtgcgaacaatcttgtccagttgacgcgattgtgcaaggaccaaattttgaatttgctacagaaacaagagaag

SEQ ID NO: 200891 - DNA, 487 bp, Unknown
  Bacterial polypeptide expressing nucleotide sequence isolated from the Sargasso Sea
atgaaaattataagatttttaaaaacaatattcatggtcgattttataattggcttgctaattagttttagagaaatttttaaatcaaaaaagacaataaattatccttttgaaaaaggaaaaattagcccaagatttagaggagagcatgcacttagaagatatccaaatggtgaagaaagatgtatcgcttgtaagttatgtgaagctgtgtgtccagcacaagcaataacaattgaatctgctgaaagatctgatggaagtagaaaaactactcgttacgatattgatatgatgaaatgtatttattgtggtttgtgtgaagagtcatgtccagtggatgcaatagtgcaaggtccaaattttgaattttcgacagaaacaagagaagaactttattatactaaagaaaaactattggataatggtgatagatgggaaaatattttagcggcgaatataaaatcagataatccttatagataaa

SEQ ID NO: 200892 - DNA, 187 bp, Unknown
  Bacterial polypeptide expressing nucleotide sequence isolated from the Sargasso Sea
atgaataataaaatagatcaggtacctgatgaatttaaacaacttgctgacgactttagcaagaatggttttattacaacttctctagataatttaattaattggtctagatcaggatcattacattggatgacatttggacttgcatgctgtgcagttgaaatgatgcaaacagctatgccaagat

SEQ ID NO: 200893 - DNA, 529 bp, Unknown
  Bacterial polypeptide expressing nucleotide sequence isolated from the Sargasso Sea
ctggttggtctaaacaaggtggtttatgaaatttatgttgagcataatgattctggattaaaattatatgatcatctttttgaaattggaaaagaattaaatattaagccaggttgtccaaatttaatagaacgtattgaaagtggattattatcgtatgggaatgatatcgataatagagataatccttatgaatgtggatttgataaatatattaacatagacagcgaagtcaattttataggtaaagagaaattaaaaaaaattaaatctgatggaattaaaaaaaaattaatgggagtaatgcttgatatagacaaaataagtattacaggatcattagaattaagtgatcaaaacaataatataattggagacttgagatcagcttgctattcaccacattttaaaaaagttattggtattgccatgatgaaaaaacctcactggaacgttgatcaggatataaaagctaagataaatggtgaaatttgtgtgggtaaagtttgcgatttaccttttatttagt

SEQ ID NO: 200894 - DNA, 147 bp, Unknown
  Bacterial polypeptide expressing nucleotide sequence isolated from the Sargasso Sea
attcatattcggtagtaagaggttgtgatagaatagtacctgtagatgtatacgttcctggctgccctccttctgctgaagcacttttgtatggtataatgcagttacaaaaaaaaattagaaataaaggctctctagaaagataaa

SEQ ID NO: 200895 - DNA, 254 bp, Unknown
  Bacterial polypeptide expressing nucleotide sequence isolated from the Sargasso Sea
aatgaaaatttcaagattattaaaaactatattcatgattgattttgtgactggtttgttaatcgcaataaaagagacttttaaggcaaaaaaaacaatcaattatccatttgaaaagggatctttaggaacaaggtctagaggtgagcacgctcttagaagatatcctaacggtgaagaaagatgtatagcgtgtaaactttgtgaagctgtatgtccagcccaagctattacaatagagtcaaaggaaagag

SEQ ID NO: 200896 - DNA, 811 bp, Unknown
  Bacterial polypeptide expressing nucleotide sequence isolated from the Sargasso Sea
attatcgtcaggacttttattatatggttgctctctattatatggtttcactggatcaacaaactttgagcttattaaaaatgaattaacagttgaaaatattggtgctatcttcgcaatggtttttattttagttggtttatctttcaaagtatcagccgtaccatttcatatgtggacaccagatgtttatgagggatctccaacctctattacaaatttttttgctgttgtacccaaagtagtaggtttggcagtgataatcagatttatggatgttccttttgaaaatatcttatctgattggcaaacaataataatatttatctctgttgcctcgatgatacttggagcagttgcagcaataagacaaactaatatcaaaaggctaatggcatatagttccattggccacataggttatatcttagctggtgtagccactggaacaacttacggatattctagctctctattgtacatgactatttacgtaattatgaatataggagcattttcatgtatttacttaatgaggaaagacggcgtatacactgaaaaaatttccgacctttcaggcctttcaaaaaaaagaccactattagctgtctcatttttaataatatttttctcactagcaggaataccgccacttggcggattttttgcaaaattttacgtatttttgtctgtggttgaaagcaaaatgtatatacttgcaattgttggtctaatgacaactgtaatatctgctttttattatctcaaggtagtaaaaataatttattttgacgaagccaagactacattt

SEQ ID NO: 200897 - DNA, 952 bp, Unknown
  Bacterial polypeptide expressing nucleotide sequence isolated from the Sargasso Sea
aggatttacaagaaaaatccatcatcaaacgaggcagcaatcaagtacttcttgtttggagcattatcttctggtatcataatttacggtatctcacttgcatacggaattactggttctacaaacatcggtgatgtcatttacggatttgcaaacctatctccagacatgctaccacttggattacttgcaattggtatgttcattgctggatttggattcaagatgggacttgtcccattccacatgtggcttccagatacctacgaaggttcgccaccaaccatcaccgccttactagcagcaggtacaaagaaagcaggatttgctgctgcattaagaattgtaattatgggtgctgcggcactaaacttagactggacattggcacttggcgtaattgccataatgacaatgacaattggtaacgttgcagcaatcatgcaaaagaatctcacaagaatgcttgcgtactctagtattggtcatgcaggatacatcctgattggtatctcacttgcaccatatacgggaatgggattgcaagcatcactattccatatactaaaccacgctgtaatgaagggtgctgcatttatcgcagttgccggaatcgttacaacacttgcagttacacatctagacaaattgaaaggacttggcagaaagatgccaatcacgtcacttggtcttgtcatatcattacttgcattagctggtgttccaccgcttaacggattctggagtaagcttatgctgtttggttctgccattgatgcaacaagtgcagtatggtgggctccatggcttgcagtagcaggagtgttaaacagtgcactatctctagcatactatggttggattatgagaaagatgtactttgaaggtgagacagaaaaacgtgtcaaagaaccagcatcaattgtaggtgtaatgatattctcaatcatct

SEQ ID NO: 200898 - DNA, 130 bp, Unknown
  Bacterial polypeptide expressing nucleotide sequence isolated from the Sargasso Sea
ctatttccatgggcaatatcattaggaaatatttttttattaggtttttcatcaatgatgatttttctattcatactaacagttggttttatttatgaatggaaaaaaggtgctttagattgggaataaa

SEQ ID NO: 200899 - DNA, 867 bp, Unknown
  Bacterial polypeptide expressing nucleotide sequence isolated from the Sargasso Sea
taaattaattttccaagcaactgttattatttttttaatttctgcactaattttatattttactccttttgaaattcaaacaaatgttagtggtatatttataagagatactttttctaaattttttcaaatactaattttattaagtgtgtcatgtcttttatttatgagtaagcaatacttacaaaaaaacaatttatttaaaccagaatacccaattcttataatattttctacattaggcatgatgattatgatatcttctaataattttttattgttatacttagggttggaaattcaatctttatctttatatgtggtttcttcttttcgaagagataactacaaatcaacagaggcaggtttaaaatattttattttagggtctttatcatctggactaatgttatttggaattagtttaatatatggatcaactggttctataaactttgaaattatatcttcaatgattaattttgagggattttttccaggaattgttgcaggtttagtttttttaatttgtggttttgcatttaaggcttctgcggttccatttcacatgtggacaccagatgtttatgaaggatctccaactccagttactgcattttttgcaactgttcctaaattagcagctgtgggggttttgttaagggtcctctttgattgttttggtcaaatagtagaaagttggcagcaagttattattataatatctgtattatccatgtttttaggttctgtagcagcaataggtcaaaataatattaaaaggttgatggcttactcttctattggccatataggttttgttctcatgggagtagcaagtggtacagataaaggggtttcagcagt

SEQ ID NO: 200900 - DNA, 676 bp, Unknown
  Bacterial polypeptide expressing nucleotide sequence isolated from the Sargasso Sea
aatgtctgaagctagaatagaaagattattaagcgatctatctgaattacgtagttatatctttattaatgttgataaactccaatcagctgttcagcagtcagagttaagcactaaaggtgcactaaattcattagagtttcgtttagaagcaattcttcaagctaatttagatacgttttggcttctaatgtgttcaatattagtttttttaatgcaagctggatttatgtgtttggaatctggtttaacgagaagaaaaagcagtattaatgttgccttaaaaaatttagcagattttggaatagccgttgttacattttgggcatttggttttggtttaatgtatggtgctagttactcaggtttagtcggtaccaaatattttctattctttactaatgtagctggttatcaaacttattttgtatttcaagcaatgttcgttgcaacagcagcaacaatcatttcaggtgccgttgcagaaaggttaaaattttttagttacgttataataactttttttacctctggaattatttatcctttagttggtcattggatatgggcgtttgatttttcaaatcctgcgaaaaaatttggttggttaggaaaattaggttttattgattttgctggagcctcagtggttcattctgttggtggctgggtagct

SEQ ID NO: 200901 - DNA, 487 bp, Unknown
  Bacterial polypeptide expressing nucleotide sequence isolated from the Sargasso Sea
aatgagcttaataagatttttcaaaacaatttttatgattgattttttaacaggattaatcatggcaataaaagaaatatttaaaccaaaaaaaacaattaattatccatttgaaaaaggttcaattagtccgagagcaaggggagaacatgcgctaagaagatatccaaatggtgaggaaagatgtattgcttgtaaactatgtgaagctgtttgtcctgctcaggctataacaatagagtctagcgagagagaagatggaagtagaaaaacgactcgttatgatattgatatgttgaaatgtatttattgtggtttgtgcgaacaatcttgtccagtggatgctattgtgcaaggtccaaactttgaatttgctacagaaacaagagaagaactttactataacaaagaaaagttgttagagaatggagatagatgggagaatattttagcagcaaatattaatgctgatagctcccacagataa

SEQ ID NO: 200902 - DNA, 331 bp, Unknown
  Bacterial polypeptide expressing nucleotide sequence isolated from the Sargasso Sea
gaaatactctggaatgatgtatgcaatgttttggttgggggagtatgctaacattttacttatgtgtgcgatgggatccattttatttcttggtggctggttatctcctatagatttatttccatttaacattattccagctccaatatggttaatcttaaaaatactctttttatttatcttatttgctttgataaaagcaatagtacctagatacaggtatgatcaattaatgaaacttggatggaaaatttttctaccattttcattaatttatgtagtattaactgcaagttttttaatgtattttgatttattaccggggaattaa

SEQ ID NO: 200903 - DNA, 721 bp, Unknown
  Bacterial polypeptide expressing nucleotide sequence isolated from the Sargasso Sea
ttttagattttcagttggcatgtttccattagcttcagaatattttacaccactagttttcacgttaagtgtgatagcaataatttatacttcactggtggcacttatgcaggatgatatgaaaaagttaattgcttactcatctgttgcacacatggggtatgtcacacttggaatttttactttcaataaacaaggaattgaaggtggtattattcagatgtttagccacggtttaatttctgcagcattatttttatgcgtaggtgttctttatgatagagcacattcaagactaataaataattatggtggggtagtaaatattttaccaaaatattcctttattttaatgatatttgtattggggactctaggcttacctggaacaagtggttttgttggtgagttcctagttctagttggggcatttaaagttaattttttagtcgcgattttggccagtattggagtggttttagctgctgcatatattctttggttatacaaaagagttatttttggaaaactagaaaacaaccaaataaaagaaatgaaagatttaaataaatctgaaatgggagttttgatatcaattggaatattagtaatattttttggtttttatccagagcccttgtttaatacagtaaatgtatcagtagataacttgattaataattacaatatggagataaacaaacttactgttttaaaataa

SEQ ID NO: 200904 - DNA, 659 bp, Unknown
  Bacterial polypeptide expressing nucleotide sequence isolated from the Sargasso Sea
attgattcctgttcttgtttctgttgcaatgattgtttggttggacagaagagtttgggctttcgttcaaaaaagacagggacctaatgttgttggaccttttggattacttcaatcaattgcggatgcattaaaatatatctttaaagaaattattatacctgcaagttcaaacaaggttatctttatacttgccccaataataactatgacactagctttaatagcctgggcagttattccttttgatgaaggtcaagtcttagcaaatattaatgttggaattttgtatatatttgcagtctcatctttaggtgtttatggaattattatgggtggatgggcttcaaattcaaaatatccatttctaggagccataagatctgcagcacaaatggtatcgtatgaagtttcaatagggattattattattaatgtattgctttgtgttgggtctttaaacttaagtgatattgtattggcacaaaaagaaatgtggtttgtagtaccattatttccaatgtttgtaattttttttatttcatctttagcagaaacaaatagacctccatttgaccttcctgaggcagaagctgaattagttgcggggtatcaaacagaatattctggcatgatgtacgcgatgttttggttaggag

SEQ ID NO: 200905 - DNA, 766 bp, Unknown
  Bacterial polypeptide expressing nucleotide sequence isolated from the Sargasso Sea
gattttagtcaaaaattccaaatactttgttatgtagggcttttaattgcatttggagtcaagctcccaatagtacctcttcatacttggctcccagacgctcatggagaggcaacagcaccggttcatatgcttttggctggaattttattgaagatgggaggatatgctcttttaagatttaatgctcaattattaccagttgctcatgctcaatttgccccattattaatagtgttgggagtagtaaatataatttatgctgcgctaacatcttttgctcaaagaaatcttaaaagaaaaattgcatacagttctataagtcatatgggttttgttctcattggaatagggagttttagtagcctcggaacaagtggagctatgttacaaatggttagtcatggattaatcggtgcaagtttattttttcttgttggtgccacctatgacagaacaaagactcttaaacttgatgaaatgagtggtgtaggacaaaaaatgagaatcatgtttgccctatggactgcttgttccctggcttcccttgctttgcctggtatgagcggatttgtttccgaattgatggtatttacaggatttgttactgatgaagtttatacacttccttttagggtagtgatggcctctttagctgctatcggtgtaatactcactcctatttacctactttccatgttacgagagattttctttggtaaagaaaatcctaaattaatcgaagaacgaaaattgatagatgcag

SEQ ID NO: 200906 - DNA, 427 bp, Unknown
  Bacterial polypeptide expressing nucleotide sequence isolated from the Sargasso Sea
ctaacttttaaatatatttttaaatctaaagtaactattaattatcctcatgaaaaaggaccattaagccctcgttttagaggagagcatgcattaagaagatatcccagtggagaagaaagatgtattgcttgcaaactttgtgaagcggtttgcccagcgcaagctattacaatagaagctgaaccaagagaagatgggagcaggagaacaactagatatgacattgatatggttaaatgtatttattgtggactttgtcaagaatcttgccccgttgatgctattgttgaagggccaaattttgaatttgcaactgaaacaagagaagagcttatgtataataaagaaaaacttttagaaaatggcgataggtgggagcaagaaatttcacaaaatatcaaattggacagtgagtatcgttaaa

SEQ ID NO: 200907 - DNA, 705 bp, Unknown
  Bacterial polypeptide expressing nucleotide sequence isolated from the Sargasso Sea
ttcaaatgatttaatagttttttacatgggccttgtacttcagtcattagctttgtatgttcttgcttcttttaatagagacaatttgctttccacagagtccggactaaaatattttgttcttagcgcattgtcttctggtttacttttatatgggtgctcattaacttatggattttctgaaagcacaaattttgaccaaatacttataaactcaactgaatttaattatggtaccacgtttggtatagtctttattttagttggtctagcatttaaaatatcagctgtgccatttcacatgtgggcgcctgatgtttaccaagggtccccaacatctgtaacattattttttgctatacttccaaaaatagccgcactttctgtattcattaagtttttgtacacaccttttgctaatatgaatgatcagtggcaaactattattgtatttatttcaatagcctcaatgatatttggcgctgtagcggccataggtcaaaaaaatttaaaaagattaattgcttatagttcaattagtcatatgggttatgctttggctggattagcaacagttagcaaccaaggaatacaaagttcaattacttatatatctatttatttggtaatgaatttagccttttttagctgcttatttatgctaaagagaaatgataaatattatgaaaatatagaggatttatc

SEQ ID NO: 200908 - DNA, 414 bp, Unknown
  Bacterial polypeptide expressing nucleotide sequence isolated from the Sargasso Sea
gatggcaacctcaattatatttttacctctacttggttttcttttttgttttttattcggtaaacagtttaactataaggtttatcaaatatcaacaacttcaatcctttttctttgtactttattttcttggataatattcattcagtttgttaataataaggaaactgaaataatttttattcttaactggatcacttctggaaattttattgttgattggtcaattagattagacactttaactgctgtgatgttcattgtggttacaactgtttctgcttgtgttcatttatattcaataggctatatggaagaagatccatcaaaaataagatttatgggttatctaagcttatttactttttttatgcttgttcttgtatcaagtaataacttgctgcaaatgttctt

SEQ ID NO: 200909 - DNA, 167 bp, Unknown
  Bacterial polypeptide expressing nucleotide sequence isolated from the Sargasso Sea
catgttatctgattttttaaaagattacttaccaataataatatttttagtattagctctcgggctgagttgcgcttttgtggttgtaaactttattttatcaccaaaaaaacctgatcctgaaaaactttcagcttatgagtgtggttttgaacctttcgaggatt

SEQ ID NO: 200910 - DNA, 806 bp, Unknown
  Bacterial polypeptide expressing nucleotide sequence isolated from the Sargasso Sea
gagtaaagaaaaaaaaacattaaacctaaattttggaccacaacaccctgctgctcatggtgtgttaagattaatattagaacttgatggtgaagtagttgaacatgctgacccacatattggtttattgcacagaggcacagagaaattaattgaaaataaaacctaccttcaagctttaccatattttgacagacttgattatgtagctccaatgaatcaagagcatgcatttgcacttgcagttgaaaaaattttaaacattgaagttcctattagagctcaatttataagagttatgttttgtgaaattggaagaatattgagtcatattttaaatataaccactcaagctcttgacgttggtgcattaacgccttcactatggggctttgaagaaagagaaactttaatgactttttatgaaagggtttctggttcaaggcttcatgcaaattattttagaaccggtggagttcatcaagatttgccaagaggattaaatgaagatattgcaaaattttgccaaaattttccaaaggttataaatgatttagaaactcttttgactgataatagaatatttaaacaaagaaatgtagatattggcattgtaacaaaacaagatgcactggattattcattctcaggggtaatgttaagaggatcgggagtaccatgggacttaagaaaatctcaaccgtatgaatgctacgatcaattagattttaaaattccaattggaaaaaatggtgactgctacgatagatacttatgtagaatcgaagaaatgaaagaaagtgtaa

SEQ ID NO: 200911 - DNA, 844 bp, Unknown
  Bacterial polypeptide expressing nucleotide sequence isolated from the Sargasso Sea
tgattatttatcatcatttatgaaaatattaacattgattgctgctttcttagtgctaatagtttcatcaaattatttaaaatcattaaaaatctttaaaatagaatatccaatattaatactcagctctgttttaggaatgatgattatgattagctcaaatgatttgattgtcttttatatgggtctggagcttcaatccttatcattatatgtattagcaacatttaatagagatcaaattaaatcttcagaagctggattaaaatattttgttttgagcgcactatcttcaggcttattattgtatggttgttcattaatttacggttttaccggttcaacaaattttgatgtaattgctaatcaattaaactcgaacgaatatactataacatttggaatagtttttatccttgttggattagcatttaaaatttcagcagtgccatttcatatgtgggctccagatgtttatgaaggttctccaacttcagtgactttattttttacaatggttccaaaaatagctgctttaacagtattcataagatttttatttgttccttttttaaatttgattgatcaatggcaaacaattttaattttcttatcaatagcatcaatggtgtttggtgctgttgcagctattggtcaaaaaaatttaaaaaggcttatagcttacagttcaattggacatgttggatatgctttagcaggtttggttactggatcgaatgaaggtattcaaagttcagtaatatatataactatatatattttaatgaatttaggattattttcatgtttgttaatgatgaaaagaaaaaaatgtttattatga

SEQ ID NO: 200912 - DNA, 616 bp, Unknown
  Bacterial polypeptide expressing nucleotide sequence isolated from the Sargasso Sea
gctgaatctcggccctcagcatcctgcggcgcatggtgttttgcgtttgatcctggagatggatggcgaggttgttgaacgggcagatccgcatataggattgttgcatagaggtaccgagaaattaattgagcataagacatatcttcaggctgtgccgtatttcgatcgtttggattatgtttcgccaatgtgccaggagcatgcatttgctctggctgtggaagggttgctgaaatgtgaggtccctatcagggcgcaatatatccgtgtattattctctgagttaacaagaattttgaaccattgtctaaatattgctacgaatgcaatagatgtgggcgcgactacgcctttgttatggctgttcgaggaaagggagaagattatgggtttctatgaggcagtatctggctctagaatgcattccaactatttccagcctgggggtgtggcgcaagatatgcctgatgggatgctagaagatatcagaaaatttgcaaatgattttgtacctacattgaaggatgtggagaagcttctgacaaataaccgtatctggaagcagagaatggtagatattggcgtggtgactgcaaaagaggcgatggatcta

SEQ ID NO: 200913 - DNA, 835 bp, Unknown
  Bacterial polypeptide expressing nucleotide sequence isolated from the Sargasso Sea
acaattggtattatttttgcgatggtatttatacttgttggattagcgtttaaagtttcagccgttccatttcatatgtggacaccagatgtttacgaaggctcgcccacatcagtaaccagttttttttctgttgtccccaaagttgctggtatcgtaatatttataagatttatgtatttaccttttcaagaaattttagatcagtggaaatatatcttggtatttatatcgattgcctctatgattttaggagctgttgctgccatcggacaaaataacataaaaagacttatcgcctacagctctatcggccacataggttatgctattgcaggcatgacttcaggtacagaaaatggattcaaaagtactttaatttatatttcaatttatgccgtcatgaacataggagcttttgcttgtatttttttaatgaagagaaatggaaaatatattgaagatatccaagagctttctggaacttcaagaaatcatccattaatgtctttgtcattattaataatactattttctttagcgggcatcccacctatggcaggtttctttgcaaaattttatgtttttatggctgtagttgaaagcggaatgtttactttagcagcaattggtttggttaccacagttgtgtctgctttttattatattagaattataaagattatgtactttgatgatcctaaaaaaccatttgaacaattaaaagattttggaatttacggatccttaatagttagctgtatctttttaatttcattctttttatatccgtctattttaaatgaaattatttcaaatattagtattttttaat

SEQ ID NO: 200914 - DNA, 520 bp, Unknown
  Bacterial polypeptide expressing nucleotide sequence isolated from the Sargasso Sea
aagttaccatacacctatgctttaatgattataggaacacttgctttaacaggttttccatttttatcagggttttattctaaagatgcaattatagagtttgcttatttaaaaggtaatactactggttattatgcagctgggattggaataattacagcatttttaacatctatttattcatggagattaatctttaaaactttccatggagattataagaataaagaggttaagatagaagaaacacacgagtctccattagtaatgcttgttcctttatttatcctctcaataggagcggtatttgctggttttctatttaaaggactatttattggtcatggtgataatttattctggtcagagtctattaagtttttagagcctttaagtactgaacatccacctttatggtttttacttttaacaccttgtttagttttattatctattccaattgcttattacttatttgtaaaaaacaaagaattatctaattcaatagtttcctattaac

SEQ ID NO: 200915 - DNA, 226 bp, Unknown
  Bacterial polypeptide expressing nucleotide sequence isolated from the Sargasso Sea
gatgaatttagaagatagaaaaaaaaatattcctgaggagtttaaacaattagctcaagattttagtgataatggttttataacaacatcattagataatcttgtcaattgggcaagaactggttcattacattggatgacatttggattagcatgttgtgctgttgaaatgatgcaaacatctatgccaagatatgatcttgaaagatttggtgcagcaccaaga

SEQ ID NO: 200916 - DNA, 485 bp, Unknown
  Bacterial polypeptide expressing nucleotide sequence isolated from the Sargasso Sea
aacgaatcaggttttaaaattatacgaccatctttttgaaattggtaaagaatttaatattaaaccaggtggaccaaatttaattgaacgtattgagagtggtttactttcacacggtaatgacatggacaatggagacaatccatatgaatgtggatttgataaatatatcaatattgacagtgatgtagatttcttaggtaaagaaaaattaaagaaaataaaatcagatggaattagaaaaaaattgatgggagttaaaattgatactaaggaaataagtgttactggttcaatggatttaattgatgaaaataataaagtaattggagaattaagatctggatgttataacccaactttcggccaagttattggaattgcaatgataaataaacctcactttgaggagtcgaaatccttcaaaatcaatataaatggtactcattttgatggaaaagtttgtgatttacctttcatttagt

SEQ ID NO: 200917 - DNA, 481 bp, Unknown
  Bacterial polypeptide expressing nucleotide sequence isolated from the Sargasso Sea
tatgataaaatatattaaatcttttactctttttgagcttttacagggaatgttcttaactttgaaatatatgttcaaagctaaggtaacaataaattatcctcatgaaaaaggtccgttgagtccaagattcagaggagagcatgccttaagaagatatccaagcggtgaagaaagatgcattgcatgtaaattatgtgaagcggtatgccctgcgcaagctattacaatcgaggctgaaccaagagaagatggaagtagaagaactactcgatacgacattgatatgagtaaatgtatatattgtggtttatgccaagagtcttgccctgtcgatgcaattgttgaaggtccaaattttgaatttgcaactgaaacaagagaagaattgatgtacacaaaagaaaaacttcttgagaatggagatcgatgggaacaagagattgctcaaaacatttatttggataggaaatatcgctaa

SEQ ID NO: 200918 - DNA, 232 bp, Unknown
  Bacterial polypeptide expressing nucleotide sequence isolated from the Sargasso Sea
atgaacttgcaagatagaaaaaaagatattcctgaggagtttaagcaattagctcaagactttagcgataacggtttcataacaacttcactagacaatctcgttaattgggcaagaactggttcgttgcattggatgacatttgggttagcatgttgtgctgttgaaatgatgcaaacatctatgcccagatatgatcttgaaagatttggtgcagcaccaagagcatcac

SEQ ID NO: 200919 - DNA, 196 bp, Unknown
  Bacterial polypeptide expressing nucleotide sequence isolated from the Sargasso Sea
atgactgagagcaatcttacccttaattttggaccacagcatccggcggcacacggcgttttaagattaatcatggaattggatggcgaggtcgttaacaatcttgacccacatataggtctattgcatagaggcactgaaaaactcgctgaaattaagccttttaatcattcaattggctacatggacagaatgg

SEQ ID NO: 200920 - DNA, 763 bp, Unknown
  Bacterial polypeptide expressing nucleotide sequence isolated from the Sargasso Sea
atggaaaatttacaactagtcttacctgaaatatttctttcattatcgataatgtttttattaatatttggtgtttttaaaaaaaatagctcaagattagttcagagtctttctctggctgttttgattgtaactgctgttattacattcaatgaaactattggaattaatgaaacaaaattatttaataacagtattataattgattatttatcttcattaatgaagataattactttgctggctgcctttttagttctaattatatcatcaaactatcttaaaacttttaaaatttttaaaattgaatatccaattttaattttaagctctgtattaggaatgatggtaatgatcaattctaatgacttaattgtattttacatgggactagaacttcagtcattagctttatatgtattagcaacattcaatagagatcaaattaaatcctctgaagctggattaaaatattttgttttaagtgccttatcttctggtttattgctttatggttgttctttaatttatggatttactggttctactaattttgatgtaatagccagtcaactaaattcagatgtttatgctttgacatttggtatagtgtttgttttggtggggttagcgtttaaaatttctgctgttccgtttcatatgtgggcaccagatgtgtatgagggttcaccaacttctgtaacattattttttacaatggttccaaaaatagcagcactaacggtgtttataagatttttat

SEQ ID NO: 200921 - DNA, 957 bp, Unknown
  Bacterial polypeptide expressing nucleotide sequence isolated from the Sargasso Sea
agccttgcatcaaaagactaatggaaaattttcaatatatattacctgaaatcttcatatcggtatctataacgatgtttttactatttggagttttcaaaaaaaatagcgcaagtttagtttataatttatcaattatatcgctagttattttattggcactaataataaatctcagctcattagatacaatttacctattcaatgaatcatatttaatagacaatttatctaattatatgaagatcatacttgttggatctggaatttttgtaatgctaaccggatccaaatatatccaagttatcaatttaaataaaattgaatacccaatcctcattctaagcagcattttgggaatgatgataatgataagttcaaatgatttaattgttttttatatgggtcttgaactacaatcattagctttgtatgttcttgcgtcatttaatagagacaatttactttctacagagtctggactaaaatattttgtccttagtgcattatcgtctggtttattattgtatgggtgctcattaacttatggattttctgaaagtacaaattttgaccaaattcttataaactctactgaatttaattatggcaccacgtttggtatagtttttattttggttggtcttgcatttaaaatatcagctgtaccttttcatatgtgggctccagatgtttatcaaggctcaccaacatctgtaacattgttctttgctatacttccaaaaatagctgcgctctctgtattcattaagtttttgtacacaccttttgctaatatgaatgatcagtggcaaactattattgtatttatttcgatagcttcaatgatatttggtgctgtggcggccataggtcaaaaaaatttaaaaagactaattgcttacagctcaattagtcacatgggttatgctttagctggattaacaaccagttagc

SEQ ID NO: 200922 - DNA, 175 bp, Unknown
  Bacterial polypeptide expressing nucleotide sequence isolated from the Sargasso Sea
catgatttataattatttaacagattacttatcaataataatttttttatttattgctttatttttaagcattggttttattgcggctaactttttggcttctccatctaatccagacccagaaaaattatctgcctatgaatgtggttttgaggcatttgatgactctagaatg

SEQ ID NO: 200923 - DNA, 469 bp, Unknown
  Bacterial polypeptide expressing nucleotide sequence isolated from the Sargasso Sea
aatgaaaatatcaagatttttaaaaataatatttctaattgattttatttctggattatcaattgcaattaaagaaatttttaaatctaaaaagacaatcaattatccatttgaaaaaggaaaaataagtccaagatttagaggcgagcacgctttaagaagatacccaaatggtgaggaaagatgcattgcttgcaagttatgtgaagcagtttgtccagcacaagccataactattgagtctactcaaagagaagatggaagcagaaaaacaactagatacgatattgatatgctaaaatgtatttattgtggtctttgcgaagagtcatgcccagttgatgcgatagttcaaggaccaaactttgaatttgcaaccgaaacaagagaagagctttattataacaagcaaaaacttcttgataatggcgacagatgggaaaatgttttaacagccaatattaaagct

SEQ ID NO: 200924 - DNA, 589 bp, Unknown
  Bacterial polypeptide expressing nucleotide sequence isolated from the Sargasso Sea
aatgactagaagagaaaattattcccttaattttggacctcaacatcctgcagcacacggtgtcttgaggttagtgcttgagttagatggcgaagttgttgaaagagctgatcctcatataggtcttcttcatagaggcacagaaaaattaatcgagaataaaacatacattcaagctctaccatattttgataggttggattatgtttctccaatgtgtcaagaacatgcattttcacttgcagttgaaaagctattagatattgatgttccgataagaggtcaatttattagggttatgttctccgagatcacaagaatccttaatcacattctaaatttaacaacattcgctttggatgtaggtgctatgactccatttttatggttgtttgaagaaagagaagttctaatggaattctacgagagggtttccggatcaagacttcattcggcttactttcgacctggtggagttcatagggatcttccagatggcctagttgatgatatttcaaatttttgtcaaagattcccaaaaaaaataaatgatttagaaaagttattagagacaaacagaatttttaga

SEQ ID NO: 200925 - DNA, 487 bp, Unknown
  Bacterial polypeptide expressing nucleotide sequence isolated from the Sargasso Sea
atgaaattaagtagattaataaaaactgtattaatggtagattttgcaaaaggattattaattgcaataaaagaggtatttaaggccaaaaaaacaataaactacccatttgaaaaaggacaagttagcacaagagctagaggggaacatgccttacgaagatatcctaatggtgaagaaagatgtatagcttgtaaactttgtgaggcggtctgtccagctcaagcaattactattgagtcttcagaaagagaagatggtagcagaaaaacaacaagatacgatattgatatgttaaaatgtatttattgtggattgtgtgaagaatcttgtccagtagatgcaattgttcaaggacctaattttgagtttgccactgaaacaagagaagaactttattacaataaggaaaaacttttagaaaatggtgatagatgggaaaatattcttgcggcaaatataaaagcagacaacccttataggtgat

SEQ ID NO: 200926 - DNA, 326 bp, Unknown
  Bacterial polypeptide expressing nucleotide sequence isolated from the Sargasso Sea
caggaatgatgtatgcaatgtttggttaggcgagtatgcaaatattttattaatgtgtgctatgggttcaattttatttttaggtggatggctttctccagtggataatgaagtcttttcttctataccagctccactctggcttattttcaaaattttatttttatttatattatttgctttagttaaagctattgtaccaagatatagatatgatcaattaatgaaattgggttggaaagtatttttacctttttcattaatatgggttgtattaactgctggttatttactttattttaacttattaccagggcaaacatgaa

SEQ ID NO: 200927 - DNA, 214 bp, Unknown
  Bacterial polypeptide expressing nucleotide sequence isolated from the Sargasso Sea
atgtcaaaacaaagaaaaaaactaaatttaaattttggacctcaacatccagcagctcatggggtacttagattaattttagaattagacggtgaagttgttgaaaaagcagatccacatatcggattacttcatcgtggtactgaaaagttaattgaaaataaaacatatgttcaagcgataccttattttgatagattagattacgtgcacc

SEQ ID NO: 200928 - DNA, 235 bp, Unknown
  Bacterial polypeptide expressing nucleotide sequence isolated from the Sargasso Sea
aatgaacaataaattagatcaagtacctgaagagtttaaacaacttgctaaagattttagcaagaatgggtttattactacctcattaaataatttaattaattggtcaagatcaggatcattacattggatgacttttggtcttgcatgttgtgctgttgaaatgatgcaaacagcaatgccaagatatgatctagaaagatttggtgctgcccctagaggatctcccagacaa

SEQ ID NO: 200929 - DNA, 724 bp, Unknown
  Bacterial polypeptide expressing nucleotide sequence isolated from the Sargasso Sea
aatggattattttattactttaataaatgaaatttataaaattttatttttagtcatccctatattagtttcagttgcaatgattgtatggttagatagaagagtttggggattagttcaaaaaagaagaggaccaaacgttgttggtccatttggtttgtttcaaacattagcagatgctttaaaatatatatttaaagaaataattattccagccagcgctaataaaactatttttattttggctccaataattacaatgaccttggctttagttgcttgggctgtaatacccttaagtgaaacattggtattatctgatattaatgttggaatactatatctttttgcaatttcttctttaggggtttatggaattataatgggtggatgggcctctaattctaaatacccatttttaggcgcaataaggtctgctgctcagatggtatcgtacgaagtttcaattggcattattattataaatgtattgttatgtgttggatctctaaatctaaatgatatcgtgttggcccagaaaaatctttggtatgtaattccgcttttcccaatgtttgttgtattttttatatctgcattagctgaaactaatagaccaccttttgatttaccagaagctgaagcagaattagttgctggatatcaaacagaatattctggaatgatgtatgcaatgttttggttaggagaatacgcaaatatt

SEQ ID NO: 200930 - DNA, 610 bp, Unknown
  Bacterial polypeptide expressing nucleotide sequence isolated from the Sargasso Sea
aatgtctaaagagaaaaaaactttaaatttaaactttggcccacaacatccagctgcacacggtgttctaagattaattctaaaattagatggtgaaatagttgagcatgctgatccacatattggtttgctacatagaggaacagaaaaacttatagaacacaaaacatatgctcaagctatcccatattttgatcgtttagactatgtggcaccaatgaatcaagaacatgcttttgctctagcaatcgaaaagttaataaaattagaagtgcctattagggcacaatatataagggttttattttgtgaaatcggaaggattttaagtcatatacttaatgtcactactcaagcattagatgtaggagctttaactccatctctatggggatttgaggaaagagaaacattaatgactttttatgaaagagtatctggttctagacttcatgcaaattactttagacctggaggggttcatcaagatttgccagctggtttagaagaagatatatttaaattttgtgaaagtttcccaaaagttattgatgatttagaaaatcttcttacagataatagaatttttaaacaaagaaatgtcgacata

SEQ ID NO: 200931 - DNA, 937 bp, Unknown
  Bacterial polypeptide expressing nucleotide sequence isolated from the Sargasso Sea
ggtggttttttagttttaattatttcatcaactattttaaaatcattagaaatatataatatagaatacccagttcttattttgagttctattctcggtatgatggtaatgattagctcaaatgatttaattgttttctatatgggcttggaattacagtcattagctctttatgttttagcgacatataatagagatcaattaacatcatctgaagctggtttgaaatattttgtcttaagcgcattgtcatcgggacttctattatatggatgttctttggtttatggtttttcaggttctactaattttgatataatatcaaatcaactaaattctgaggaatatgttttaacatttggaattgttttcatattagttggtttagcatttaaaatttctgcagttccatttcatatgtgggcacctgatgtttatgagggatctccaacaactgtaactttatttttttcaatagtaccaaagatagctgctttgactgtatttattagatttttatatgttccatttttaaatttgattgatcaatggcaaatgataatagttttcttatctatagcttctatgatttttggagcagttgccgctatagggcaaactaatattaaaagactaattgcttatagttctataggacacattggttacacattggctggtttagctacagtatcaaatgagggaatccaaagctcaataatttatatttctatttatgttgttatgaatttagctcttttttcatgtctgttaatgttaagaagaaaaaatcaatattatgaggatattgatgatctctcaggattatcaaaaaatcatccattattgtctttatgtttattgttaattctattttctttagcaggcatacctcctttagctggtttctttgcaaaattttatgtttttaaagctg

SEQ ID NO: 200932 - DNA, 487 bp, Unknown
  Bacterial polypeptide expressing nucleotide sequence isolated from the Sargasso Sea
aatgaatttaaatagatttttgaaaactatatttttaactgaattttttttagctataattaaagcgattagagaaatatttagacctaaaaaaacaattaactacccatttgaaaagggtcaaattagccctcggtatagaggagagcatgcgttgagaagatatcctaatggtgaagaaagatgtatagcctgcaagctttgcgaagcagtgtgtcctgctcaagctattactatcgagtcagaggagaggaaagatggaagcagaaaaacaactagatacgatatcgacatgttgaagtgtatatattgcgggctttgccaagaatcttgccctgttgatgcaatagtacaaggaccaaactttgaatttgccacagaaactagagaggaactttactacaataaagataaactattagacaacggagatagatgggagtctgtattagccaaaaatttaaaaacagacaaaatttataaataa

SEQ ID NO: 200933 - DNA, 805 bp, Unknown
  Bacterial polypeptide expressing nucleotide sequence isolated from the Sargasso Sea
atggaatatttaaatattatctttcaagaggtttataaaattttatttttacttattccagttttagtatcagttgcgatgattgtttggttagatagaagagtctgggcatttgtgcaaaaaagacaaggaccaaatgtagttggaccatttggactattacaatcattggcagatgctttgaaatatatttttaaagaaattataatcccagcaagttcaaataaagtaatatttatacttgcaccaattataacaatgacactagctatgatagcatgggcggtaatcccatttggtgaagatcaggttttagcaaatattaatgttggtattttatatatatttgctgtctcttcattaggggtgtatggaattataatgggtggatgggcttcaaattcaaaatatccatttttaggatcaataagatctgcagcacaaatggtttcttacgaggtttcaattggtatcataattataaatgtgttgttatgtgttgggtctttaaatttaagtgatattgttgtcgctcagaaaaatatgtggtttattattccattgtttccaatgtttgtgattttttttatctcagctctagccgagacgaatagaccaccatttgatttaccggaggcagaagctgaattagttgctggatatcagactgagtattctggaatgatgtatgcaatgttttggttaggtgagtatgcaaatattttattaatgtgtgctttaggttcgattttatttttaggtggatggttatctcctattgacttatatccgtttaatttaattc

SEQ ID NO: 200934 - DNA, 487 bp, Unknown
  Bacterial polypeptide expressing nucleotide sequence isolated from the Sargasso Sea
tatgaaattatcaagattttttaaaacaatttttatgactgactttgttggtggtttacttattgcaactaaagaattgtttagatctaaaaaaactatcaattatccttttgaaaaaggtaaaattagcccacgttttagaggtgaacacgcattaagaagatatcccaatggagaagaaaggtgcattgcatgtaaattatgtgaagcagtttgtccagcacaagcgattacaattgagtcagcagcaagagaagatggaagtagaaaaactactagatatgacattgacatgatgaaatgtatttattgtggattgtgtgaagaagcctgtcctgtagatgccattgttcagggtccaaattttgaattttcaacagagacaagagaagaattatattacacaaaagaaaaattattagataatggcgatagatgggagaatgttttagcagcaaatattaaagctgataatccatacagataa

SEQ ID NO: 200935 - DNA, 652 bp, Unknown
  Bacterial polypeptide expressing nucleotide sequence isolated from the Sargasso Sea
atgacaaaaaagattaaaaatttaaatttaaactttggaccacaacatcctgcagctcatggagtattaagattaattcttgaactagatggtgaagttgttgagaaagctgatccacatattggattattacatcgtggtactgaaaaattgattgaaaataaaacttatatgcaagcagttccttattttgatcgccttgattatgtagcccctatgaatcaagaacatgcttttgcattagctatcgaaaaaatattaaatattgaagttccaataagagcacaatttataagagttatgttctgtgaaattggaagaatcttaagtcacattttgaatgttactactcaagctttagatgttggggctttaactccatcattatgggggtttgaagagagggaaactttaatgactttttatgagagagcctcaggttcaagattgcatgcaaattattttagagcaggtggtgttcatcaggatttaccagctggtcttgaaaatgatattgcaagtttttgtgagagtttcccaaaaattttagatgacctagaaaatctattaacagataatagaatatttaaacaaagaaatgttgatattggaatagtaactaaagaagatgccttggactattcttttagtg

SEQ ID NO: 200936 - DNA, 601 bp, Unknown
  Bacterial polypeptide expressing nucleotide sequence isolated from the Sargasso Sea
aatgaaagaagttgaaattaattctacaacgcttaattttggtccacaacacccagcagctcatggtgttttaagattagttgttgagcttgatggtgaagttgtagaaagagccgaacctcacataggcttacttcatagaggaacagaaaagcttatagagtataaaacttatcttcaagcaatcccgtattttgatagactagattacgtctctcctatgtgtcaagagcatgcttttgctctttctacagaaaaactattaaatatagatgttcctttaagagcacaatatatcagggtaatgtttgctgaaattacaagaatattaaatcatcttttaaatatacctgcttatgcagcagacataggagctgtcactcctttcttgtggtgttttgagcaaagagaaagattattagaatttcacgaagctgtttctggcgctagatttcatgctgcttactttcgtccaggaggagttcatcaggatctaccaaaagggttagaagaaaatttatataaatatataaatacacttccaaaatttgttgatgatttagaagaattattaactaacaatagaatattacgtcaaaga

SEQ ID NO: 200937 - DNA, 487 bp, Unknown
  Bacterial polypeptide expressing nucleotide sequence isolated from the Sargasso Sea
atgaaaattagcagaataattaaaacggtatttatggcagattttgttgctggattattaattggcataaaggaaatctttaagtcaaaaaaaactataaactacccttttgaaaaaggaaaaatcagtccacgatttagaggagaacatgctttaagaagatatccaaacggcgaggaaagatgtatagcatgtaaattgtgtgaggctgtttgtccagcccaagcaataacaatagaatcagaacttagaaatgacgggagcagaaaaacaactagatacgacatagatatgctcaaatgtatttattgtggcttatgcgaagagtcttgtcctgtagatgcaattgttcaaggtccaaattttgaatttggaacagagactagagaagaactttattacaacaaaaagaaacttttagaaaatggagataaatgggaaactgttttagctgaaaatataaaagcagattcaccttttagataaa

SEQ ID NO: 200938 - DNA, 829 bp, Unknown
  Bacterial polypeptide expressing nucleotide sequence isolated from the Sargasso Sea
ttaaaagagcatgttcagatttgggatgttgctgctgaaagacaagttgaaatttctggtaaagactcagctaaattagttcaattgatgacttgcagagatttatcaaaatccaaagatggaagatgttattattgccctatcattgatgataatgcaggtttaattaatgatcctgtagttctaagattaaatgaaaataggtggtgggtctctttagctgactcagatgtaattctatttgccaaaggattagcgattggaaataaatttgatgtaaaaatttctgaacctgatgttgatataatggcagtgcaaggaccaaaatcatttaaattaatggaaaaagtttttggagaaaaaattgtaaatttaaaattttttggttttgattattttgaatttggtggagataaacatcttattgcaaagtctggttggtctaaacaaggtggctatgaaatttatatggaacacaacgagtcaggtttaaaactatatgatcatctttttgaaattggtaaggaattcaatattagaccaggtggaccaaaccttatcgaacgtattgagagtggtttgctttcccatggtaatgatatggacaatggagataatccatatgaatgtggttttgataagtatgtaaatatagatagtgatgttgattttttaggtaaagaaaaactgaaaaaaattaaagctgaaggagttaaaaaaaaacttatgggagtaaaaattgatgccaaggaaataagtgttaatggctcaatggatctagtagacgaagataataatgtaattggagaattgagatctggttgttata

SEQ ID NO: 200939 - DNA, 469 bp, Unknown
  Bacterial polypeptide expressing nucleotide sequence isolated from the Sargasso Sea
atggtaaaaaaaactaaatcattaagtcttaattttggacctcaacaccctgctgctcatggtgttttaagattaatactcgaattagacggagaggttgtagaaaaagcggatccacatataggtttgcttcatagaggtaccgaaaaattaattgaacaaaaaacttacacgcaagccctaccttattttgatagactggattacgtagctccaatgaatcaagaacatgcttttgctttagctgcagagaaactactcaatgttgaagtgcctattagagctaaatacatcagagttattttttgcgaaattggaagaatattaagtcatattttaaatgttacgactcaagccttagatgttggagctttaactccctcactatggggtttcgaagaaagagaaactttaatgacattttacgaaagagcatctgggtctagattacatgctaattacttagaac

SEQ ID NO: 200940 - DNA, 385 bp, Unknown
  Bacterial polypeptide expressing nucleotide sequence isolated from the Sargasso Sea
tttgttatcaatttttcttccactgctaagttattttagttgcatttttctaaacggttttcttaaagaaagagttctgaatggagtttcatgtacattaatgattttttcgactcttttttctattgtctcattgataatttttaaattaaatggagatcaaaattatattttaacgaactggattgcatccggaagcttaaatattgattggtctttaaatctaaacttactgactgtttccatggtcataatggtaaattttatttcaacgataattcacatttactcaattggatatatgtctaaagatccaaggaaagtagtttttatgggttatttaagtttatttactttttttatgttattcttagttcttcttcta

SEQ ID NO: 200941 - DNA, 185 bp, Unknown
  Bacterial polypeptide expressing nucleotide sequence isolated from the Sargasso Sea
tatgacaaaaaaaactaaatctttaaatttaaattttggacctcagcatcctgcggcccacggtgttcttagactgatattagaacttgatggagaaatagttgaaaaagcagatccacatataggcctacttcatagaggaactgaaaaacttattgaacaaaaaacttatactcaagcattac

SEQ ID NO: 200942 - DNA, 487 bp, Unknown
  Bacterial polypeptide expressing nucleotide sequence isolated from the Sargasso Sea
atgagcttaataagatttttcaaaacaatttttatgattgattttttaacaggattaatcatggcagtaaaagaaatatttaaaccaaaaaaaacaattaattatccatttgaaaaaggttcagttagtccgagagctaggggagagcatgcgctaagaagatatccaaatggtgaggagagatgtattgcttgtaaactatgtgaagctgtatgtcctgctcaggctataacaatagaatctagtgagagagaagatggcagtagaaaaactactcgctatgatattgatatgttaaaatgtatttattgtggtttgtgtgaacaatcctgcccagtggacgcgattgtacaaggcccaaactttgaatttgctacagaaacaagagaagaactttactataacaaagaaaagttgttagagaatggagatagatgggagaatattttagcagcaaatattaatgctgatagctcccacagataat

SEQ ID NO: 200943 - DNA, 257 bp, Unknown
  Bacterial polypeptide expressing nucleotide sequence isolated from the Sargasso Sea
atcaattttatttcttggtggctggttatctcctttagatttatttccatttaacgttattccggctccaatatggttaattttaaaaatactctttttatttatcttatttgctctaataaaagcaatagtacctagatacaggtatgatcaattaatgaaacttggttggaaaatttttctaccattttcactaatttatgtagtattaactgcaagttttttaatgtattttgatttattaccagggaattaga

SEQ ID NO: 200944 - DNA, 781 bp, Unknown
  Bacterial polypeptide expressing nucleotide sequence isolated from the Sargasso Sea
aatatttcattattagtttatttaattacagcagtcattacatttaatgaaactttaagtattaatccgacaactctatttaatgagagtattatcattgattatttgtcatcattaatgaagattataactttattgggtgcttttgtagttttgctaatttcatcaaattatttaagaacctttaaaattttcaaaattgaatatccaattttaattctaagttctgtattgggcatgatgattatgatcagctctaatgatctaattgttttctatatgggtttagagcttcagtcattagccttgtatgttttggcaacatttaatagagatcaattaaaatcatctgaagcaggattaaaatattttgttttaagtgcattatcctcaggtttattattgtacggttgctctttgatttatggttttacaggttcaacaaattttaatgttatttcaacccaatttaatacaaatgaatatgctattacttttggaatagtttttattttggtgggtttatcgtttaagatttctgctgtaccttttcatatgtgggccccagacgtttatgaagggtcgccaacatcagtaacattatttttcacaatggttcctaaaatagcagcgttaactgtgtttataagatttttatatgttccttttttaaatcttattgatcagtggcaaatgattttagtttttttatcaatcgcatccatgctttttggtgcgatagcagcaataggacaaaaaaatcttaaaagacttatagctt

SEQ ID NO: 200945 - DNA, 721 bp, Unknown
  Bacterial polypeptide expressing nucleotide sequence isolated from the Sargasso Sea
atgttattaccagttttaactgctgtagcattgatggtctggcttgatagaagagtatgggcttttgttcaaaaaaggcgtgggccaaatgtagtaggtccatttggattatttcaatcattagctgatgcactaaaatatttattcaaagaaataataataccagctagctcaaataaaattatttttatattagcaccaatagttacaatgacacttgcattagttgcttgggcagttattccttttaatgaaagtttagtaatagctgatatcaatgttgggatactatatttgtttgctgtttcctcactgggtgtttatggaataattatgggtggatgggcatcaaactcaaagtatccatttttaggctcaattagatctgctgcgcaaatggtttcttatgaagtatcaataggtgtaataattataaatgttttattatgtgtgggctctcttaatttaacagatattgttttagcacaagaaaatctttggtttataattccattatttccaatgtttgttattttttttatctcagctttagcagaaacaaatagaccaccttttgatctacctgaggcagaggcagaattggttgctggataccaaacagaatattctggaatgatgtatgcaatgttttggcttggagaatatgcaaatatattgttaatgtgttccttaggttcaattttgtttttaggaggttagg

SEQ ID NO: 200946 - DNA, 799 bp, Unknown
  Bacterial polypeptide expressing nucleotide sequence isolated from the Sargasso Sea
tttctcgccctgtcgtcgatcgctgtgtacggcgtgatgttggctggttggtcgtcaggttcgaagtacccgctgttgggttccgtcagggcgtcagcccagatgatcagctacgaggcggccctcggcctggcgatcgccacggtcttcctgacctccggttcgttgtccacccacgacatcgtggccagccaggtggcgggaaactggaatgtgctggccaccggggtcgtgcccttcctggtgttcttggtggccgggacggctgagttgaaccgaccgccgtttgacttggtggaggcagaacaggaactagtcggtgggttccacaccgagtacagctcgctgcgcttcgccctgttcttcctggctgagttcatgaacgtgatcaccatgtcggccaccgccgtcaccctgttcctgggtggtccggccggtccgatcctgaccgacactctgggttgggtgtggccggtgttctggttcagcctgaaggtctttgccttcctgttctgtttcgtgtggctgcgggccaccctgcccaggctgcgctacgaccaactcatggatctgggctggaaggtacttatcccagtggccatgggatggttcctgctgatcggggcgatgggcgtggccgataaccggggttggccggtggtgccggtggtgctggtcggtatagccgtgatggctgggggcgcggcgctcctgatcggtgcggtttccaaggccagggctgagcgcttggccgacgcgttccccgagcatgacgacgcgccaaccccgggagggctgc

SEQ ID NO: 200947 - DNA, 673 bp, Unknown
  Bacterial polypeptide expressing nucleotide sequence isolated from the Sargasso Sea
gatggtaaaaaaaactaaatcattaagcttaaactttggcccacaacatcctgctgcacatggtgttttaagactaattttagaattggatggggaaatagttgagaaagctgatccacatataggattattgcacagaggaacagaaaaattaattgaacaaaaaacttatacccaagctttaccttattttgatagattagactatgttgcgccaatgaatcaagaacatgcttttgcattagcggctgaaaaacttcttaatgtagaagttcctataagagcaaaatatataagagtaattttttgtgaaataggaagaattttaagccatatattaaatgttacaactcaggcattggacgtaggtgcacttactccttctttatggggttttgaagaaagagaaactctgatgactttctatgaaagagcatccggttcaagactacacgcaaattactttagaactggaggtgttcataaagatattccattgaaactagttgaggatatagaaaaattttgcaaatcatttcccaaaataattgatgatttagagggattgcttacagataatcgtatttttaaacagcgtaatgttgaaataggaattgtttcaaaacaagaggcattagaccatagtttttctggcgtaatgcttagaggctca

SEQ ID NO: 200948 - DNA, 478 bp, Unknown
  Bacterial polypeptide expressing nucleotide sequence isolated from the Sargasso Sea
aaaagatttttaaaaacaatttttatgaccgagtttataatcggattatctgttgcgattaaagaggtctttaaaaagaaaaaaacaattaattatccatttgaaaaaggtaaaatcagtccaagggctagaggtgagcatgcgttaagaagatatccaaatggagaggaaagatgtattgcatgtaaactttgtgaagccgtatgtcctgctcaagcaattaccatagaatctaaagagagatctgatggaagtcgtaaaacaacaagatatgatattgatatgttaaaatgtatttattgtggtctatgtgaggaatcatgcccagttgatgcaattgttcagggtccaaattttgaatttgcaacagaaactcgagaagagttgttttataataaagaaaaacttttagaaaatggtgacagatgggaaaatatattagctgctaatattaaagctgataatgctcatcgatgat

SEQ ID NO: 200949 - DNA, 487 bp, Unknown
  Bacterial polypeptide expressing nucleotide sequence isolated from the Sargasso Sea
atgaaaattacaagattttttaaaaccattttaatgacggattttgtaggaggtttattcattgcagttaaagaaatttttaaatcaaaaaaaaccatcaattatccatttgaaaaaggtaaaattagtccaagatttagaggagagcatgctttaagaagatatccaaatggagaagagagatgtattgcgtgtaaattatgtgaagcagtatgtcctgcacaagcgataacaatagaatcttctgaaagagctgatggtagtagaaaaactacaagatatgatatcgatatgatgaaatgtatttattgtggtctatgcgaagagtcctgtccagttgatgcaattgtccaaggtccaaattttgaattttcaacagaaacaagagaagaactttattatactaaagaaaaacttttggataacggtgatagatgggaaaatgttttagctgctaatattaaaagtgataatccatatagataaa

SEQ ID NO: 200950 - DNA, 646 bp, Unknown
  Bacterial polypeptide expressing nucleotide sequence isolated from the Sargasso Sea
atgagtaaagaaaaaaaaacaataaacttaaactttggaccacaacacccagcagcacatggtgtgttaagattaatattggagttagacggtgaagttgttgaacatgccgatccacatattggtttattacacaggggcactgagaaattaattgaaaataaaacctatcttcaagcattaccttattttgatagactcgactatgttgctcctatgaatcaagaacatgcttttgcactagcagtcgaaaaaattttagacattgaagttcctatgagagctcaatttataagagtaatgttttgtgaaattggaagaatattgagccatattttaaacattaccactcaggcacttgatgtaggggcattaactccttcgttatggggttttgaagaaagagaaacattaatgactttttacgagagggtttctggttcaaggcttcatgcaaattattttagaaccggcggtgtacatcaagatttgcctagaggattaactgatgatatttcaaaattttgtcaaaattttccaaaagtcataaatgatttagaaactcttttaactgacaatagaatattcaaacaaagaaatgttgacattggtgttgtttcaaaacaggacgcactagattattctt

SEQ ID NO: 200951 - DNA, 487 bp, Unknown
  Bacterial polypeptide expressing nucleotide sequence isolated from the Sargasso Sea
atgaaaattaacagagtactcaaaataatttttctatctgaatttatttctggattaattattgctgttaaggaaatgtttagaccttctaaaactatcaattatccacatgaaaaaggatcaattagtccaagaatgagaggagaacacgcgctacgtagatacccgagtggtgaagagagatgtatagcgtgtaagttatgcgaagctgtttgtcctgctcaagcaataacaatagagtcaacagagagacctgacggaagtagaaagacaacacgatatgacatagatatgctaaaatgcatctattgtggactttgtgaagaatcatgtccggttgatgctattgtgcaaggtccaaattttgagtttgcaacagaaactagagaagagctttattataacaaggaaaaattactagacaatggagacagatgggagtctgttttagctaaaaatattaaattagataaaccttatagataga

SEQ ID NO: 200952 - DNA, 873 bp, Unknown
  Bacterial polypeptide expressing nucleotide sequence isolated from the Sargasso Sea
ggtgtcgatggtattaacatcctacttattattttatcaacctttctaacacctcttgttattgttagtataattagtggtgaaagcaaaaagaaacaagaactttgctctcttctcatgatcctagaatgcggaatgctaggggctttggtggcttttgatatgcttttcttttatgttttttgggagatcatgctcatacctatgtattttatcattggaatatggggtggacaaaacaaaatttatgcaacaacaaaatttgtaatatatacagtactaggttctttatttatgatagcagctgcaatcatgctatatctactacattatagtcagttcggattttattcaacaagcctccttgatttatacaaagtaaaaataattgaccaaaattatcaaaacctcctctttgctgcctttgctatagcttttgctattaaagtaccaatttggccttttcacacctggcttccacacgctcacacagaagcacctacctcaggatctgtcatactagcaagcgttatgctgaaaatgggaacatatggtattttacgttttgctatacctttgtttccggaagcaagcatcctcttttcaccttatattctatcactaggaattgtgggaatcatatttggagccttagttgcttgggtgcaaaaagacgcaaagaaaatgattgcatactcttctgtttcccacctagggtacgtaatcattggttctgtcgcattttacgcaggcaaaataaatgaagaagctcttctaggagcatcataccaaatgatcaatcacggaatcagtacaggcgctctctttcttctaataggaatgatatacgaacgacgccacacccgaatgata

SEQ ID NO: 200953 - DNA, 429 bp, Unknown
  Bacterial polypeptide expressing nucleotide sequence isolated from the Sargasso Sea
aatgaaagaagtagagctaaatacaactacaattaactttggccctcaacatccagctgcgcatggtgttttacgtttagtagttgagcttgaaggtgaagtagttcaaagagcagaaccacacattggattgttacataggggcacagaaaaattaattgaatataaaacttatcttcaggcagttccttattttgatagacttgattatgtttcgccaatgtgtcaagaacatgcttttgcattggcaactgaaaatctcctaggtatcaatgttcctgaaagagctaaatatattcgagttatttttgctgaaattactagaatactaaatcatttattaaatatacctgcctatgctgctgacattggtgcagtgacaccttttttatggtgttttgaagaaagggaaaagcttttggagtttca

SEQ ID NO: 200954 - DNA, 349 bp, Unknown
  Bacterial polypeptide expressing nucleotide sequence isolated from the Sargasso Sea
aatggcaggaattagaacagaaccagtaacagtaaacttaggcccacagcatcctagtacacatggtgtatttagattgcgggtcacttttgacggtgaagaaataatagattcagagcctatatttggatacctgcataggggaacagaaaaattagctgaaagcagaaattatgtacagattgttacattaacagacagactagactatgtgtctagtatgtctaataacctagcatatgttagcgctgtagagaagttagctgatatacaagtaccagaacgtgcccaatatattagggttatcagtgctgaattacaacgtatagcaagccatctaatggcaact

SEQ ID NO: 200955 - DNA, 1177 bp, Unknown
  Bacterial polypeptide expressing nucleotide sequence isolated from the Sargasso Sea
aatgacaaaaaaaattaaaaatctgaatttaaattttggtccacaacatcctgctgcgcatggagttctaagactaatattagagcttgatggtgaagtagtagaaaaagcagatcctcatattggcttattacatagaggaacggaaaaattaattgaaaacaaaacatatatgcaagctgtaccatatttcgatcgacttgattatgttgcacctatgaaccaagaacatgcatttgctttagctattgaaaaaattttaaatatcgatgttccaatcagagctcaatatataagagtcatgttttgtgaaattggaagaattttaagtcacatattaaatgttactactcaagctttagatgtgggcgctttaactccatcgttgtggggatttgaggaaagagagactttgatgactttttatgaaagagcatcaggatcaagattacatgctaattatttcagggccggtggtgttcatcaagatttaccagctggcctagaaaatgacatagcaaggttttgtgaaagtttcccaaaaataataaatgatcttgagaacctactaacagataacagaatatttaaacaaagaaacgttgatataggcgtggtaaccaaagatgatgcattagattactctttcagtggtgttatgatcagaggttctggtataccatgggatcttagaaaatctcaaccttacgattgttatagtcagttagaatttaaaatccctataggaaaaaatggtgattgttatgatagatatttatgtagaattgaggaaatgaaagaaagtgtttctattattaaacaatgtttatcaaaaatggagaaaggaccaataaaaacgtttgatggaaaaatatccccaccatcaaaaaaagaaatcaaacaatcaatggaagcattaatacatcattttaaattattcactgaaggatatcgtgtacccaaggatgaaatttatactgctgttgaggcacctaaaggtgagtttggagtatatttgatttcagatggttctagtaaaccatataagtgtaaaattcgagcgccaggattctcacatttacaatcaatggattatttaattaagggtcacatgttagcagacgttccggctgtacttggttctcttgatattgtttttggggaggttgatagatga

SEQ ID NO: 200956 - DNA, 1177 bp, Unknown
  Bacterial polypeptide expressing nucleotide sequence isolated from the Sargasso Sea
aatggcaaaacaacaaaaaactctaaatttaaattttgggccccaacacccagcagcgcatggtgttcttaggctgatactagaattagatggtgaagtcgttgaaaaagctgaccctcatatcggtctattacatagaggtacagaaaaattaattgaacacaagacttacactcaagcagttccatattttgacagacttgattatgttgcaccgatgaatcaagagcacgcatttgcattggcaatcgaaaaaattttaaaaattgaagtacctataagagctcaatatataagagttttattttgtgagataggaagaatattaagccatattttaaatatcacgactcaagccttagatgttggtgctcttactccatcgttatggggatttgaagagagagaaactttaatgacattttatgaaagagcatctggttctagattacatgcaaactattttagagcgggaggtgttcataaagatttaccaagaggtttagagaatgatattgcagattttattaaaaagtttccaaaaataattgatgatttagaatcattactcacagataatagaatatttaaacaaagaaatgtagatattggaattgtaactaaacaagacgcacttgattattctttttccggagtaatgttaagaggttcaaatgtggcctgggatttaagaaaatcacagccatatgattgctatgagcaaatggattttaacattcctgttggtaaaaatggagattgttatgacaggtatctttgcagagtagaggaaatgcgagaaagtataagaataattgatcaatgtctaaaaaatatgccaaagggtcccattaaatctttggatggaaaaataactcctccatcaaaaaaagagcttaaagagtcaatggaagcattaatacatcacttcaaactttttaccgaaggatacagagttgataaggatgagatttacacggccgtcgaagcgccaaagggtgaatttggtgtatacttaatttcagatggatcaagtaagccttacaagtgcaaaattagagcaccaggattttcacatctgcaagcaatggattacttaatcaaaggtcatatgttagctgatgttcctgctgtattaggatctttagatattgtatttggagaaatagatagatga

SEQ ID NO: 200957 - DNA, 487 bp, Unknown
  Bacterial polypeptide expressing nucleotide sequence isolated from the Sargasso Sea
atgaaaatttctagaattttaaaaactgttttaatgattgattttttaacaggtttaaaaatagctattaaagaaacttttaaacaaaaaaaaacaattaattatcctttcgaaaaaggctcagttagcccaagagctagaggcgaacatgctcttagaagatatcctaatggtgaagaaagatgtatagcttgtaaattatgtgaagctgtctgtccggcacaagcaattactatagagtcaaaagaaagagaagatggtagcagaaaaactacaaggtatgatattgacatgttgaagtgtatatattgtggattatgtgaagagtcttgtccagttgatgcaattgtccaaggtccgaactttgaatttgcaacagaaaatagagaggaactttattataacaaagaaaaactattagaaaatggagatagatgggaaagtgtcttggccgcaaatattaaggcagataattctcatagataaa

SEQ ID NO: 200958 - DNA, 1051 bp, Unknown
  Bacterial polypeptide expressing nucleotide sequence isolated from the Sargasso Sea
atgaaaaaagaaaaaaaaaccttaaatcttaattttggacctcaacatcctgctgcacatggcgtattgaggctaatccttgagcttgatggtgaagttgtagaaaaagcagaccctcatataggattacttcatagaggaacagaaaaacttattgaaaacaagacctatattcaagcagttccatattttgatagacttgattatgtggcaccaatgaaccaagagcacgcttttgcattagctatagaaaaaattctaaatataaaagttccaataagagctcaatacataagagttgtattttgcgaaataggcagaatactcagccacattttaaatgtaacaactcaagcgatggatgttggtgcgctaactccaacattatggggatttgaagaaagagaaactttaatgggtttctatgaaagagtttccggctctcgactacatgctaattattttagagctggaggcgtccataaagatttaccaaccggtcttgataatgatatactagaattctgtgataaatttccaagaatcatcaatgaccttgaaactttattgactgataacagaatatttaaacaaagaaatgtagatatcggaattgtatctaaacaagatgcacttgattattctttttcaggagtaatgttaagaggatctggtgttgcttgggatcttagaaaaagtcaaccatatgattgttatgaagaactggattttaaaataccagttggaaaaaatggagattgctatgatagatatttatgtagaattgaagaaatgaaagaaagtgtaaatttaattaaacaatgtttaaataatttacctaaaggaccaataaagacagatgatggtaaaatatcaccacctcctaaaaaagaaatcaaacagtcaatggaggcattaatacatcattttaaactttttaccgaaggttacagagtagataaagacgagatttataccgcagttgaggcaccaaaaggtgaatttggtgtatacttgatatcagatggatcaagtaaccttacaaatgtaa

SEQ ID NO: 200959 - DNA, 636 bp, Unknown
  Bacterial polypeptide expressing nucleotide sequence isolated from the Sargasso Sea
actggtgcgcatcctggtggtggccgtcgtgatcctgctgtgcgtggcttacctgattctctgggaacgtaagctgatcggctggatgcacgtgcgtctcggcccgaaccgcgtcggccccgcaggcttgctgcagccgatcgccgacgtgctgaagctgttgctgaaagaagtgattcagccggcccaggcgagccgctggatttacatgatcgcgccgatcatggtggtggtgccggccttcgcggtctgggcggtgattccgttccaggccggtgcggttctcggcgacatcaacgccggtctgctttacgcaatggcgatctcgtccatcggcgtgtacggcgtgattctggcgggctgggcgtcgaactcgaagtacgcattcctcggcgccatgcgcgcggccgctcaaatggtttcgtacgaaatttcgatgggcttcgccctcgtcgtcgtgctgatgacgtcgggcagtctgaatctgtcggacatcgtcggttcgcaggaacgcggcattttcgccggttacggcctgaacttcctgtcgtggaactggctgccgctcctgccgatgttcgtcgtgtacttcatctcgggcatcgccgaaacgaaccgtcacccgttcgacgtggt

SEQ ID NO: 200960 - DNA, 487 bp, Unknown
  Bacterial polypeptide expressing nucleotide sequence isolated from the Sargasso Sea
tatgaaattatcaagaattttaaaaactattttattaattgatttcttaagtggcttaattattgctattaaagaatcttttaaatctaaaaaaactttaaactatccatttgaaaaaggtaaaatcagtcctagattccgtggagagcatgctctaagaagatatcctaatggcgaagaaagatgtatagcatgtaaactgtgtgaagcagtttgtccagcccaagctattacaattgaatcaactgaaagagaagatggtagtagaaaaaccacaaggtatgatattgatatgattaaatgtatatattgtggtttatgtgaagagtcctgtcctgttgatgcaattgttcaaggacctaattttgaattttctacagagactcgagaagaactttattataataaggaaaaattattggataatggtgatagatgggaaagtttattagcagcaaatattaaagcagacaatccttacagataa

SEQ ID NO: 200961 - DNA, 603 bp, Unknown
  Bacterial polypeptide expressing nucleotide sequence isolated from the Sargasso Sea
actgttactagttccaatcttggtatctgtcgcgataatagtctggtttgatagaagagtttggggttttgttcaaaaaagaaaaggcccaaatgttgttggaccatttggtttgttacagacattagcagatgctttaaaatatatttttaaagagattattataccagctagcgcaaacaaaatagtttttatacttgctccaatagtaacaatgacgctagctttatctgcatgggctgtaataccttttagcgataaactatttatttcagatattaatgtaggaatactttacatctttgcaatttcttcccttggtgtctacgggataatcatgggtggttgggcttcaaattcaaaatacccttttttaggggctattagatcagctgctcaaatggtttcttatgaagtttcaattggaataataattataaatgttttgctatgcgtcgggtctttgaatttaagagatatagttttagctcagaaagatttatggtttatcgttcctctatttcccatgtttgtaattttttttatatccgctttggctgaaacaaacagacctcctttcgatttaccagaagcagaagcaga

SEQ ID NO: 200962 - DNA, 490 bp, Unknown
  Bacterial polypeptide expressing nucleotide sequence isolated from the Sargasso Sea
atgaattttattataaaaaatattaaatcttttgttctttatgaactttttttaggtatgtttttaactttaaaatatatgtttaaatcaaaggtaacaataaactaccctcatgaaaaaggacctttaagtccaagatttagaggagaacatgctcttagaagatatcctaatggagaagaaagatgtatagcttgtaagctttgtgaagcagtttgcccagcacaggccattactattgatgctgaaccaagagaagatggaagtagaagaactactagatatgatattgatatgagcaaatgtatttattgtggtttatgtcaggaatcttgtcctgtagatgcaatagttgagggtcctaattttgaatttgcaacagagactagagaagagttaatgtataataaagaaaaacttctttctaatggtgataaatgggaatatgagatttctcaaaatttagaattagattcaccttatcgataaa

SEQ ID NO: 200963 - DNA, 1114 bp, Unknown
  Bacterial polypeptide expressing nucleotide sequence isolated from the Sargasso Sea
cttgaaaaatgatctatttaaatttgaatatccaatcttaattttattttctactttaggcatgatgataatgatatcatcaaaaaattttttattattatatcttggattagaaattcaatcattatctctatatgttatctcctcatttagaagagaaaacttaaagtcaacagaggctggattaaaatattttatactgggatctttgtcttcaggattgatgttatttggtataagtttaatatatggttctaccggttcaataaattttgaactaatatcttcattaataacttctaaaggtttttaccctggaataatagcaggtttagttttcttgatttctggttttgcatttaaggcttctgcagtcccatttcatatgtggacaccagatgtttatgaaggatctccaaccccagttacagctttctttgctacagtgcctaagatagcagctgttgctgttttattaagagtgctttttgattgttttggtccattgttagaaagttggcaacaagttattattttaatttctgtattatctatgcttttgggttctatagcagctataggtcaagataatattaaaagattaatggcgtattcatcaattggacatataggttttgtacttataggtattgctagtggaaccgacaaagggctttcggcagtattaatttatatggttttgtatgttataatgaatatcggagtttttgtatttattttaaatatggagcgtaatggagtagcagttacctcaattaatagccttaatatgtataatgaagtttctaaaggtcaaacattattcttaacaattttattattttctctagctggaataccacctttagctggattttttggaaaattttttatttttaatgcagcaattaatgcgggactttcatggcttgcaattattggtggtatttcttctgttattgcagctttttattacttgagaattgtttatttgatgtactttggaatggtttctgatcctttaaatggaaatatgccaacatctcactggttaattttatcaggatcagcctatattaatgttgattggaattataaacctttatggtcttga

SEQ ID NO: 200964 - DNA, 553 bp, Unknown
  Bacterial polypeptide expressing nucleotide sequence isolated from the Sargasso Sea
atgccaaaagaaaaaaaaacacttaatttaaactttggacctcaacatccagcagctcatggagttttgagattaattttggaactagatggagaggtagttgaaaaagcagatcctcatattggattactccatagaggcacagaaaaattaattgaaaataaaacttatatgcaagcagtcccatattttgatcgtcttgattatgtagctcctatgaaccaagagcatgcgtttgctcttgcgatagaaaaaattatggagatagatgttccaattagagctcaatatattagggttattttttgtgaaataggcagaattcttagccatatcctaaatatcactacacaagctcttgatgtaggagctttaacaccttctttatggggttttgaagagagagaaaagttgatggaattttacgagagagtatcaggatcaagattacatgctaattattttagagcaggaggtgtacatcaggatctaccaagagggttagaaaatgatatttctgaattctgtaaatcctttccaaaaaattattgat

SEQ ID NO: 200965 - DNA, 487 bp, Unknown
  Bacterial polypeptide expressing nucleotide sequence isolated from the Sargasso Sea
tatgaaaatttcaagattatttaaaactatattcatgttagattttttaatagcaatgtatgttgctattaaagaaatatttaaacctaaaaaaacgataaattatccatttgaaaaaggaaaaattagcgcaagagctagaggagaacatgctcttcgaagatatccaaatggggaagaaagatgcattgcttgtaagttatgtgaagctgtctgtcccgcacaagctattacgatagagtcaacagaaagagatgatggtagtcgtaaaactactagatacgatattgatatgatgaaatgtatttattgtggtttatgtgaagagtcttgtcctgtggacgcaatcgttcaaggtcctaattttgaatttgcgaccgaaactcgagaagagctttattataataaagaaaaacttttagaaaatggagatagatgggaaaatatcttagctgcgaacattagagcagataaaccgtatagataa

SEQ ID NO: 200966 - DNA, 427 bp, Unknown
  Bacterial polypeptide expressing nucleotide sequence isolated from the Sargasso Sea
catggcaataaaagaacttttcagaaagtcgaaaactataaattatccttttgaaaaaggaccgatcagccctcgtatgagaggtgagcatgctctaagaagatatcccaatggtgaagagagatgtatagcatgcaaactttgcgaagcggtatgtccagcccaagcaatcactattgagtcatctgaaagatcagatggtagtaggaaaacaacgcgatatgacattgatatgcttaaatgcatttattgtggtctttgccaagagtcttgtccagtagacgcaatcgtgcaaggaccaaactttgagtttgccactgagactagagaagagctttattataacaaagaaaaactcttacagaatggtgataggtgggagtcagttttggctaaaaacataaagatggataaaccatatagatag

SEQ ID NO: 200967 - DNA, 755 bp, Unknown
  Bacterial polypeptide expressing nucleotide sequence isolated from the Sargasso Sea
tttagctttaacaggatttcctttcttatcaggtttttattctaaagatgcaataattgaatttgcttatataagtgaaacaaaatttggaatttatgctgctggcataggtgtattaactgctgtaatgacttctatatactcatggagattaatatttaaaacttttcatggagattacaaaaataaagatcttagtattgatacaatgcacgaatctccattaagcatgatgttgcctttagtattattagccgttggtgcaattttttcaggctttttatttaaagaattatttatcggtcatgatacaatgtataatttttggggagagtctataaagtttctagaacctttaagaaaagaacatcctccaacttggtttttgtttttaactcctacgttagtagtactagcaattccattgtcatattatctatttgttaaaaatactaaaatcgtagatgaaatagtttccataaacatgccggtttatatttttctccaaaaaaaatggtattttgacgaattgtatgatcaaatttttattaaaccttcaaaatattttggaatatttctttggaaaaaaattgatggattaataatcgataaatttggaccagatggaatctctaatttggtaaaacttttttcttttaaagctgtaaagtttcaatcaggttatatttatcagtatgcctttataatgcttcttggtttttcaattctactaactttattaatagtaaaataat

SEQ ID NO: 200968 - DNA, 906 bp, Unknown
  Bacterial polypeptide expressing nucleotide sequence isolated from the Sargasso Sea
aatgacaaaaaaaattaaaaatttaaacttaaattttggacctcaacatccagcagctcatggtgttcttagattaattttagaacttgatggagagattgtagaaaaagctgatccacacataggcctcttgcatcgtggaactgagaagttaattgaaaacaaaacttatatgcaagcagttccatactttgatagattagattatgtagctccaatgaaccaagagcatgcttttgcactagccattgaaaagattttaaaaattgatgtaccaataagagctcaatttataagggttgttttttgtgaaattggaagaattttaagtcatattttaaatgtaacaacacaagctcttgatgttggagcattaaccccttctttatggggatttgaagagcgagagacacttatgactttttatgaaagagtttctggttcaagattacatgcaaattatttcagaactggaggtgtgcatcaagatttaccaaatggtttagaagaagatattttaaaattttgtgataatttcccgaaaattattgatgatctggaaaacttactaactgataatcgaattttcaaacaaagaaatgttgatataggcatagttagcaaagaagatgcgttagattattctttctcaggtgttatgattagaggatctggtataccttgggatttaagaaaatcacagccatatgattgttacaatcaacttaattttaaaattcctgttggcaaaaatggagattgttacgatcgctatttatgtagaattgaggaaatgaaagaaagtgtttcaataattaagcaatgtttttcaaaaatggaaaaaggacctgttaaatcttcggatggaaaaataaccccacctccaaaaaaagaaatcaaagaatc

SEQ ID NO: 200969 - DNA, 487 bp, Unknown
  Bacterial polypeptide expressing nucleotide sequence isolated from the Sargasso Sea
tatgaaaattttaagaatactaaaaacaatattgatgcttgactttttaagtggattatttattgcgattagagaagcaataaaaccaaagaaaactttaaattatccattcgaaaaaggtaaaataagcccaagagcaagaggagaacatgcattacgcagatatccaaatggtgaagagagatgtattgcatgtaaattgtgcgaagctgtatgtccagctcaagctatcacaattgagtctaaacaaagagaagacggtagtagaaaaactactagatatgatatcgacatgttaaagtgtatttattgtggtctatgtgaagagtcatgtcctgttgatgcgattgtacaagggcctaattttgaatttgctacagagacaagagaagaattatattacaataaggaaaaattattagagaatggtgatagatgggagtcagtcctagctgctaatattaaagcagacagtccttatagataa

SEQ ID NO: 200970 - DNA, 367 bp, Unknown
  Bacterial polypeptide expressing nucleotide sequence isolated from the Sargasso Sea
aaagataagtccgagattcagaggagagcatgcgcttagaaggtatccaaatggagaggaaaggtgtattgcttgtaaactatgtgaagctgtatgtccggctcaagcgataactattgagtcagctgaaagagctgatggcagtagaaaaactactcgttatgatatcgatatgatgaaatgtatttattgtggattgtgtgaagagtcatgtccagtcgatgcaatagttcaaggtcctaattttgaattttctacagaaaccagagaagaactttactacactaaagaaaaacttttagacaatggagatagatgggaaaatgttttagcagctaacattaaaaccgataacccatatagataa

SEQ ID NO: 200971 - DNA, 454 bp, Unknown
  Bacterial polypeptide expressing nucleotide sequence isolated from the Sargasso Sea
tttggttgattttttaactggattattaattgcgcttaaagaattatttaaaacaaaaaaaacaataaattatccttttgaaaaaggaaaaattagcccgagagctcgtggagaacacgctcttagaagataccccaatggagaagaacgatgtatagcatgtaaattatgcgaagctgtttgtcctgcgcaagctataactatagactcagtagagagacccgacgggagtagaaaaacaactagatatgatattgacatgttaaaatgcatatattgtggattgtgtgaagagtcttgtcctgttgatgcaatagttcaaggaccaaactttgaatttgccactgagactagagaagaactttattataacaaagaaaaattattagaaaacggtgatagatgggaaagtgtattggcagcaaatataaaagctgacagtccatatagataa

SEQ ID NO: 200972 - DNA, 745 bp, Unknown
  Bacterial polypeptide expressing nucleotide sequence isolated from the Sargasso Sea
gatggaatatctacaaattttaggaaatgaagtttataaaatcttatttttagtcattccagttcttgtttctgtagctttaatagtttggttagatagaagagtttggggattagttcaaaaaagaagaggcccaaatgttgttggtccttttggactttttcaaactttagcagatgctttaaaatacatctttaaagaaattataataccagcaagcgcaaataaagtagtcttcattttggctcctatagtaaccatgaccctagcactagttgcatgggcagttatacctatgagtgaagatctcgttctagccgatattaatgttggtgtactatatttatttgccgtttcatcacttggtgtatatggaataattatgggtgggtgggcttcaaactcaaaatacccttttttaggagcgattagatctgctgctcaaatggtttcttatgaagtatcaataggaattattataataaatgttcttttatgcgttggttcacttaatttaacagatattgttttagcgcaaaaagatttatggtacgtcattccattatttccaatgttcgtaattttttttatttctgctttagcagaaacaaatcgaccaccttttgatttaccagaagcagaggccgaactagtcgcaggatatcaaacagaatattctggcatgatgtatgctatgttttggcttgaagagtatgcaaaatattctacttatgtgtgcaatggg

SEQ ID NO: 200973 - DNA, 487 bp, Unknown
  Bacterial polypeptide expressing nucleotide sequence isolated from the Sargasso Sea
atgaaaataattagattattaaaaacaatttttttaattgattttatttctgcttttttcttagcaattaaacaaatttttattagaaaaaaaactattaattatccttttgaaaaagggaaaattagcccaagatttagaggagaacatgctttaagaagatatccgaatggagaagaaaggtgtattgcttgtaaattatgtgaagctgtgtgtccagcgcaagccattacaatagagtctgaaattagattagacggcagtagaaaaacaacaaaatatgacattgatatggttaaatgtatttattgcggactttgcgaagaatcatgcccagttgatgcaatagttcagggccctaattttgaatttggaactgaaacacgagaagaactttactacgataaagaaaaacttttagaaaacggcgatagatgggaaagagtactaaaagaaaatattaaaattgattcacctcatagataac

SEQ ID NO: 200974 - DNA, 1007 bp, Unknown
  Bacterial polypeptide expressing nucleotide sequence isolated from the Sargasso Sea
tcttacttggtctcttggtgctgatggcatgtctatgccgttaatattattgactagttttataactgctttagcagttcttgctgcatggccagtcaagttcaaaccaaagttatttttctttttgatattggttatggatggcgggcaaatcgctgtgtttgccgtacaagatatgcttttattctttctaacttgggaacttgagttaattcccgtttatttattacttgctatatggggtggcaaaaatcgacaatatgcagcaacaaaatttattatttacacagctggcagttctatattcattcttctggcagcgttagcaatgggtttctatggtacagaagttcctaattttgagttttctcacttggcagcacaagattttagtcaaaaattccaaatattatgttatgtaggacttttaattgcatttggtgtgaaattaccaatagtacctcttcatacttggcttccagatgctcatggagaggctacagctcctgttcatatgctcctagcaggaatcttattaaagatgggaggatatgctcttttgagatttaatgcacaattattaccggttgctcatgctcaatttgccccattattaatagttctaggggtggttaatataatttatgctgcattaacttcttttgctcaaagaaatctcaaaagaaaaattgcatacagttcgataagtcatatgggtttcgttcttattggtatagggagttttagtagtcttggaacaagcggcgctatgcttcaaatggttagtcatggattaatcggtgcaagtttattttttctggttggtgccacctatgacagaacgaagactcttaaacttgatgaaatgagtggtgtaggacaaaaaatgagaatcatgtttgccctatggaccgcctgctccctggcttcccttgctttgccaggtatgagtggttttgtttccgaattgatggtatttacaggatttgttactgatgaagtttata

SEQ ID NO: 200975 - DNA, 487 bp, Unknown
  Bacterial polypeptide expressing nucleotide sequence isolated from the Sargasso Sea
atgaagattacaagattttttaaaacaatattaatgacagatttcattggcggtttgttaattgctattaaagaattatttaaaccaaaaaaaacaattaattacccttttgaaaaaggtaaaataagtcctcgttttagaggtgagcatgctttgagaagatatccaaacggagaagaaagatgtattgcttgcaaattatgtgaagcagtatgtcctgctcaagcaataactatcgagtcagctgcgagagaagacggaagtagaaagactacacgttacgatattgacatgatgaaatgtatttactgtggtctatgtgaagaatcgtgccctgtagatgcaatcgtacaaggtccaaattttgaattttcaacagaaacaagagaagaactttattacactaaagaaaagttattagataatggcgacagatgggagaatgttttggaggctaatattaaagctgataatatccatagataaa

SEQ ID NO: 200976 - DNA, 1405 bp, Unknown
  Bacterial polypeptide expressing nucleotide sequence isolated from the Sargasso Sea
atgattagttttattcctgaaatattcacattattcgcttcaatgagtattttgatgcttggtcttataaaaaaagcggcaaccaagattcatctctttagtattacattttctataatattatttgctttaacaataatcattcaaaatactgaagtaatttatatttttgacaagacgttaaagtttgacacaggcacagcattttttaaacaaatatgtatttcacttttcataataattattttagtatcaaatcaatttttaattgataagaaaatacaaagagcagaattttattcattattatttctttcattattaggaactcttcttttaatatcttctgaaaatctaattatgatctttttaggcattgaacttactgctttatgtctatactcaatgatagcattaagtaaaaataatattttatcgtatgaagctgctataaaatattttgttcttagtattattgcatcagggcttcttttatttgggtttagttttctatatggaatatcctctagtttaaatttatcagatatacttaacgaccaactttattttgaaaatctttcaatttactttttttcttatattttgatttttgttggtattgcttttaaatttgccgcagctccttttcatatgtggttacctgatatctatgaaggttctccatatattgttacaacctttatttcatctattcctaagataggaatattttatatagctttcagatttttagataacaacctaataatgcttaatgacttatttctatatttcttaatgtctattggtttactttcaatagcattgggtaatatatttgcactgtctcaaacaaaggttatgagacttttagcatactctggaattgcaaatgctggttttatatttctaggtattttcgtctctagtaactcttctttttatgttcccgctttttatataattatttattcaatatcaagtgttggtattatatctatattatctgttctatcatctaagggttttaatattgtatacattaacgatttgaaaggtttcgtgaacaattcagcatttttatctttatcttttctgattattttattatctcttgcaggaattcctttcacagcaggattttatgcaaaatatatcatttttaatgaacttattagtagagaattttttgtaatcgctctaatagctataatttttactgccataggcttgtattattatttacgaattatatggtttatatattttgaggacggttttagcactctttataacgttaaaaaccccattagtaattttgtaatttttcttattcctataattattattatactattcttagtccctgacttattattagatagactaatatcaatactttaac

SEQ ID NO: 200977 - DNA, 1417 bp, Unknown
  Bacterial polypeptide expressing nucleotide sequence isolated from the Sargasso Sea
aatgattaatttaaattttatttattcagaaatatttatttgtttagcaattatgattttgttaattattggagtatttaaaaaaaatagtgcatatttaatttacaatttaagtattttatctttatttgtttgtttagctctaattttaaattttccgatcgatgcaaatgtagaattatttaataatagttacaaaattgattatttgtcatcttttatgaaaattttattaattttgtctggaatttttgtgttactttcatctagtaaatacatccaaatagtaaagataaataaaattgaatatccaatcttagtcttgtcatcaatgacaggaatgatagtgatgattagttctaatgatttaattttgttttatattggattagaattacagtctctggccttatatgtattggcgtcatttaatagagataatatattatcttcagagtccggattaaaatattttgttttaagtgcactatcatccggtcttcttctatatggttgttcattaatttatggtttttcgggttcaacaaattttcatttaattgcagaaaacataagtaaagatagttatggactaacatttggaataatttttataataactggtttagcatttaaaatatcagctgttccatttcatatgtgggccccagatgtttatgaaggttcaccaacatcagtaacaattttttttgcaatattaccaaaaattgcagcattaactgtatttataaggattttatatgttccgtttttcaatattatagatcaatggcaaattataattgttttcctttcaatagcttccatgttgtttggatctgttgctgcaattggtcaaaaaaatcttaaaagactaattgcatatagctctataggtcatatgggttatgctttagctggtatatcaaccgggaccaatcaaggaatacaaagctcgataacttatatttcaatttacttgtttatgaatttagcattttttgcttgcctttttatgctaagaagagatgaaaaatattttgaaaatattgaagatttgtcaggtttatctaaaaatcatccaatattatcattttcatttttgattgtattattttctttagcaggcatacctccattagtcggtttttttgctaaattttatatttttactgctgtaattgagcaatcgatgtactctttagccataattggtttgctttcaactgttatagctgcattttattatttaagactaataaaggtaatttattttgacccagaaaaagaaaaatttgaaaaaaatcataatattggattaaaaatatcattagctttttcaacaatatttattcttttttatttcatttatcccagtccattaattgaaataatagaaaaaattaacattatttaa

SEQ ID NO: 200978 - DNA, 682 bp, Unknown
  Bacterial polypeptide expressing nucleotide sequence isolated from the Sargasso Sea
atgccaaaacaaaacaaaactttaaatcttaattttggacctcaacatcctgctgctcatggtgttttaagattaatactagagcttgatggtgaagttgtagaaaaagctgatcctcatattggactacttcacaggggaactgaaaaattaattgaaaacaaaacttatatgcaggccgtgccttattttgataggttggattatgttgcgccaatgaatcaagagcatgcatttgctttagcaatagaaaaaatacttaaaattgaagttcccgcaagagcacaatttataagagttatgttttgtgaaataggcagaattttaagtcatatcttaaacattactactcatgcactggatgttggagctttaactccttcattatggggatttgaagaaagagaaactctaatgactttttatgagcgtgcttctgggtcaagattacatgctaattattttagagccggtggagttcatcaagatttaccaagaggactagataacgatattgctaaattttgtgaaacttttcctaaaattataaatgatcttgaaactttgcttactgataatagaatatttaagcaaagaaatgttgatattggaatagtatcaaaagaagatgcattagattattctttttccggtgttatgataagaggttcaggcattcctt

SEQ ID NO: 200979 - DNA, 370 bp, Unknown
  Bacterial polypeptide expressing nucleotide sequence isolated from the Sargasso Sea
atgactctgagcagaatttttaaaactatttttttagttgaatttatcaaaggtttgttaatggccgttaaagaaatgtttaaaaaatctaaaaccgtaaattacccatttgaaaaaggtccaataagcccacgcatgagaggtgagcacgctttaagaagatacccgaatggcgaagagagatgtattgcttgtaaattatgtgaagctgtttgtcctgctcaagctataacaatcgagtcaactgaaaggtcagatggcagtagaaagacaacaaaatacgatatagatatgcttaaatgtatctattgtggattatgccaagaatcctgtcctgtagatgctatagtgcaaggtcctaactttgaat

SEQ ID NO: 200980 - DNA, 1255 bp, Unknown
  Bacterial polypeptide expressing nucleotide sequence isolated from the Sargasso Sea
gatggctgaaattcaaaattatacaatgaactttggtccccagcatccagctgcacatggagtattgaggttggttttggagatgaatggtgaagttattcagagcgctgatccccatatcggtcttttacacagagggactgaaaagctggctgaaacaaaaccctataatcagagtatcggatacatggatcgactggattatgtttctatggtttgtaatgagcacggatatgttctggcgattgagaagttacttaaattaacacccccaaaaagagctcaatatattcgtgctatgttcgatgaaatcaccagaattctaaatcatctaatgtggcttggaacacatggccttgatgttggtgcaatgactatgtttctttattgttttcgcgagcgtgaagatctgatggattgttatgaggcagtatcgggtacacggatgcatgccacatactacaggcctggaggtgtttatcgagatttacccgatgtcatgccaaaatttgaaacatccgataagaggaaaaaaaagcaagtcgatcagttaaattataatcgtgaaggctcgctactggattttattgaatcctttactgaccgcttcccatcttgcatcgatgaatatgaaactttattgacagacaatagaatatggaaacagcgaacagtaaatattgccgtcattccccctgagcgagcaataaatcttggctttacaggagcaatgttaagaggctccggggttgaatgggacttgagaaaaaaacaaccttactcagtctacagcgaactggattttgatattcctgtgggtgttaatggagattgttacgatcgttatctcgttcgcgttgaagaaatgcgacaatcaaataaaataattcaacagtgcattaagtggctacgagaaaatcctggtcctgtgatgactgatgacaaaaagatatcgccaccacaaaggattggaatgaaagatgacatggagtcacttattcatcactttaaattgtttacagagggctattgtgtacctgaaggtgaggcttatgctgctgttgaagcaccgaaaggtgaatttggtgtctatcttgtttcagatggggcaaataagccataccgtgtaaaaatcagggcaccaggcttttcacatttgtcagccatgtcagaaatggttgtcggacatatgttggccgatgtagtagccgtaatggggaccatggacgttgtttttggtgagatcgatagatga

SEQ ID NO: 200981 - DNA, 487 bp, Unknown
  Bacterial polypeptide expressing nucleotide sequence isolated from the Sargasso Sea
tatgaaaattagtagattattaaaaacaatatttatgattgatttcatttcagggttcattattgcaattaaacaaacttataaacctaaaaaaacaataaattatccttttgaaaaaggaaaaatcagcccaagagcaagaggagaacatgcattaagaagatatcccaatggagaagaaagatgtatcgcttgtaaactttgtgaggccgtttgtccagcccaagctataacaatagagtcaactgaaagagatgatggaagtagaaagacaaccagatacgacatagacatgttgaaatgtatttattgtggattgtgtgaagaatcatgtcctgttgatgccattgtacaaggcccaaactttgaattctcaacagaaacaagagaagaactttattataataaagaaaaattattagagaatggtgatagatgggaaagcgtattagctgcaaatattaggtcagataaagcttatagatga

SEQ ID NO: 200982 - DNA, 1360 bp, Unknown
  Bacterial polypeptide expressing nucleotide sequence isolated from the Sargasso Sea
attgatattaggtgtttttaaaaaaaatagttcactattaatttttaatctatctttagtcacaatttcggtttcaataattcttacttttaacgaaactttttcacttaatagaattactttatttaataacagtattgttattgatcatatggcttcattaatgaaaataataacattgataggtgcttttttagttttaggtatttcatctacttatctcaaatcatttaaaatttttaaaattgagtatccaattttaatattgagctctgtattaggaatgatgataatgatcagctctaatgatcttatggttttttatatgggattagaattacaatctctagctctttatgttttagcaacttttaataaagaccaattaaagtcttctgaagctggattaaaatattttgttttaagtgcactatcatctggtttattattgtatggttgttcattaatttatggtttttcaggatcaacaaattttgatataattgcaaatcaacttacatcagatgagtatgctttaacttttggaatcgtttttatattagttggtttagcatttaaaatttctgcagttccatttcatatgtgggcgccagatgtttatgaggggtccccaacaacagtaacactcttctttacaatggtacccaaaattgcagctcttacagtgtttataagatttttatatgttccatttttaaatttaattgatcaatggcagatgattattgtttttttatctatagcttctatgatttttggtgcaattgcagcaataggccaaactaatattaaaagacttgttgcttatagttcaatcggacacgttggatatactttagcaggtctggccactggctctaatgacggaattcaaagttcaataatatacatttctatttacgtggtaatgaatttagctctattttcatgtttattgatgttaaaaagaaatgaccaatattttgaggatatagatgatctttcaggcctttcaaaaaaccacccattgttgtcattatctttattaataatattattctcgcttgctggaataccacccttggctggtttctttgcaaaattctacgtatttaaagctgtaattgaacaatcgatgtacttcttagcaatagttggattgctatcaactgtaattgcagcattttattatcttagaattattaaaattatttattttgataaagaaaaagaacaatacgactcagatcatggattttggttaaagttttcacttacattttcaacaatattaattctattatacttcatatttcctagtcaattaattgaggttgtttcaagaattattattatttaa

SEQ ID NO: 200983 - DNA, 1177 bp, Unknown
  Bacterial polypeptide expressing nucleotide sequence isolated from the Sargasso Sea
atgacaaaaaaaattaaaaatttaaaccttaactttggaccacaacaccctgctgcacatggtgttcttagattaatcttagaattagatggagaagtagttgaaaaagccgatccacacattggattgctacatagaggaacagaaaaattgattgaaaacaaaacttatatgcaggcagtaccttattttgatcgacttgattatgttgctccaatgaatcaagagcatgcttttgcacttgcaatagaaaaaatattagaaattgatgttccaattagagctcaatatataagagttattttttgtgagataggaagaattttaagccatattttaaatgttactactcaagcacttgatgttggtgcattaacaccatcattgtggggctttgaggaaagagaaacgttaatgactttttatgaaagagcttcaggttcaagattacatgcaaattattttagagcaggtggcgttcatcaagatttacctcatgggttagaaaatgacattggaaaattttgtcaaactttcccaaaaataattaatgatcttgaaagtttgttaactgataatagaatttttaaacaaagaaatgttgatataggtattgtaactaaagaagatgctcttgattattcattttcaggagtgatgataaggggctcaggtgtaccttgggatctaagaaaatcacaaccctacgattgctatgatcaattagattttaaaattccagttggaaaaaatggagattgttacgatagatatttgtgtagaattgaagaaatgaaggaaagtgtttctattataaaacaatgtttatctaaaatggaaaagggtccaattaaatcgttagatggaaaaattagtccacctgctaaaaaagatattaaaaaatctatggaagctttaattcatcattttaaactttttacagaaggatacagagtacctaaagacgagatttatactgcagttgaggcaccaaaaggagaatttggtgtttacttaatatctgatggatcaagcaaaccttacaaatgtaaaataagagcacctggattttcacacttacaatcaatggattatctaattaaaggacatatgttggctgatgtaccagcagtattgggttcattagatatagtttttggtgaggttgacagatgag

SEQ ID NO: 200984 - DNA, 433 bp, Unknown
  Bacterial polypeptide expressing nucleotide sequence isolated from the Sargasso Sea
aatgtttttaactttaaagtatatgtttaaagctaaagtaacaataaattatcctcatgaaaaaggtcctttgagtcctagatttagaggggagcatgcacttagaagatatccaagcggtgaagagagatgtattgcatgtaaattgtgtgaagcggtttgtcctgctcaagcaataacaattgaagctgaaccaagagaagatggaagtagaagaactactcgatatgatattgatatgagcaaatgtatatattgcggtctttgcgaagaatcatgtccagttgatgcaattgttgaaggtcctaattttgaatttgcaacagaaactagagaagaattaatgtatacaaaagaaaaacttttggagaatggagaacggtgggagcaagaaatagctcaaaatatttatttagataggaaatatcgttaa

SEQ ID NO: 200985 - DNA, 957 bp, Unknown
  Bacterial polypeptide expressing nucleotide sequence isolated from the Sargasso Sea
aatggttatactaggcgttgctggaatgattattcctgtaatcaacgttgtacgaagagaacgtggaagttctacattctatggcgcaattgcatttggtggattactacttgcacttggatttgtaatattccagttttatacagataatgtagcacctgcagcaatcttctctgaagatgtattggtggatgacggatttggttccttctttgcaattgcaatgctcattgtttcaataatgactgtagcaggttccttcaattacatgcgaaagaagtcaaaccctgcgatttacttctcactaatcttactatctacaattggtatggtcttgattgcatttgcaactgacctagttatgctgtttgtagcatgggaattgatgagtattcctacatacatccttgcaggatttaacaaaaaaagttcagcatcaaacgaggctgccatcaagtactttttgttcggagcactatcctctggaattatcatttatggtatctcacttgcatacggaatcaccggttctacaaacattggtgatgtcatttacggatttgcaaatctatctccagacatgctaccacttggcttactcgcaattggtatgtttattgctggatttggattcaagatgggacttgtcccattccacatgtggctaccagacacatacgaaggctcgccaccaacaatcaccgcattactagctgcaggaaccaagaaagcaggatttgcagcagcgctaagaatcataattatgggtgcagcagcactaaacctcgattggacacttgcattaggtgtaattgccataatgacgatgacaattggtaacgttgcagcaatcatgcaaaagaacctcacaagaatgcttgcgtattccagtattggtcatgcaggttacatactgattggtatttcccttgcaccgtttaccggatgggatacagg

SEQ ID NO: 200986 - DNA, 487 bp, Unknown
  Bacterial polypeptide expressing nucleotide sequence isolated from the Sargasso Sea
atgaaaatttctagaattttaaaaactttatttatgacagattttttaagaggtttaatgattgcaattaaacagttattcaagactaaaaaaactcttaattatccgtttgaaaaaggaaagattagccctagagctagaggtgaacatgcgttacgaagatacccaaatggagaagaaagatgtatagcatgtaaattatgcgaggctgtatgtcctgcgcaagcaattactattgagtcagaacaaagagatgatggtagtagaaaaacaaccagatatgatattgatatgctaaaatgtatatattgtggattatgtgaagaatcatgtccagtagatgcaattgttcagggtccaaattttgaattcgcaacagaaactagagaagaattatattacaataaggaaaaattactcgaaaatggtgacagatgggagaacgttttagctgcaaatattaaagcagataatccttatagataat

SEQ ID NO: 200987 - DNA, 1258 bp, Unknown
  Bacterial polypeptide expressing nucleotide sequence isolated from the Sargasso Sea
tgcattcggaggaatgtttattaatgatgccttttctcggttctcgaaaataataatattactctcaggagccgttgttctaattatgggacaagattatatgagtagaagaggatttcttagatttgaatacccactaattatagcactttcggttgttggcatgatggttatggtgtcagcaggtgatttaatggcactctatatgggtttggaattacaatcgttggccctttatgtaatagcggcatttaaaagagacagtctaaagtcaactgaggcaggactaaaatattttgtgcttggagcgctgtcatcaggtttattactttatggttctgcccttacatatggttattcaggaacaacacttttcaacggtatactagagaacgtaaatgctaattctccctccttaggcttactttttggtctggcactagttattgctgggctggcatttaaggtttctgctgtgccttttcatatgtggacaccggatgtctatgaaggtgcaccaaccccagtaaccgcctttttggctactgttcccaaaatggctgcgatttgtttatttattagggtaatgtttgacgcctttgggaatattttggatgattggcaacaaataattgttcttatttctatcctatcaatgtttttaggcgcctttgccgcaataggtcaaaatgattttaaacgtttgttggcctactcttcaatagcacatatgggctatgcacttatcggtttggctgcaggtaccgaatttggggttcaatcagttttagagtatatgactatttatatcactatgaatattggtgttttcgctatcttgatgtcaatgcagagagatgggcaatctgtcacagaaatcgcttctttaagaatgatttctgaaacggaccctggaaaagcagtagcactattaattctattatttagcttggctggggttccgcctatgttaggtttttttgcaaagttcgaggttttgagggcagccataaatgcggatttaatttatttggcaattatgggagtgctggcctcggttattggtgctttttactacttgaaaatagtttacttgatttattttggagaaatgcccgaaacccctctagataattcaaaaacccctattttgaaaacgatatggacagcttctgctgcaataatggtttttggtgttgtaagtttatttggcttagaagaaatggcaaaggcggctgcatcttcattgttaaattaa

SEQ ID NO: 200988 - DNA, 1177 bp, Unknown
  Bacterial polypeptide expressing nucleotide sequence isolated from the Sargasso Sea
atgacaaaaaaaattaaaaatctaaatttgaattttggtccacaacatcctgctgcccatggtgtattaagactaattcttgagctggatggtgaggttgtagaaaaagcagacccgcatattggtttgttacatcgaggaacagaaaaattaattgaaaataaaacatatatgcaagctgtcccatattttgatcgacttgattatgttgctcccatgaaccaagaacatgcttttgccttagctatagaaaaaatcctagatatcgatgttccaataagagcacaatatataagagttatgttttgtgaaatcggaagaatattaagtcatatattaaatgttactactcaagctttagatgtgggtgcattgacaccatcattatggggatttgaggaaagagagacattaatgactttttacgaacgagcatctggatcaagattacacgccaattattttagagctggtggagttcatcaagatttaccagctggtttagaaaacgatatagcgaaattttgtgaaactttcccaaaaataataaatgatctcgagaatcttttaactgataatagaatatttaagcaaagaaatgtagatattggagtggtaaccaaagatgacgcgttagattactcttttagtggtgtaatgattaggggttcagggatcccttgggatttaagaaaatctcaaccttatgattgttatgatcaattagattttaaaattccagttggtaaaaatggtgactgttacgatcgatacttatgtagaattgaggaaatgaaagaaagtgtatcaatcataaaacaatgtttagcgaggatggaaaaaggtccaattaaaacttttgatggtaaaatatctccaccgcctaaagcagaaataaaacaatctatggaagcattgatacatcactttaaattatttactgagggatatcgtgtaccaaaagatgaaatttatactgctgttgaagcacctaaaggtgaatttggtgtttatttaatttcagatggatcaagtaaaccttataaatgcaagattagagcgccaggattttcacatttacagtcaatggattatttaattaagggtcacatgttagcagatgtgcctgctgttcttggttcacttgatatagtttttggggaggtagatagatgag

SEQ ID NO: 200989 - DNA, 1414 bp, Unknown
  Bacterial polypeptide expressing nucleotide sequence isolated from the Sargasso Sea
atgaacttagatttaatttttcctgaaatttttttatctttagcaataatgtccttattaatggtaggtgtgtttaagcaaaatagtacaagattggtatacaatttatctacaattactcttgtaatattgttatccttagtaattaatttgatttcaattaatgaatatttagttttcaatgaaagttataaaattgacattttatctacattaatgaaaactttaacaatcattgcagcaatttttgttatgatatcatcatataattatcttaaatcattgaatattttaaaaattgaatatccaatattaatcttaagttcaatacttggaatgatgctaatgattagttctaatgatttaattgtattttatttaggcttagaacttcagtcattagctttatatgtgcttgcttcatttaacagagataatattttatcatctgagtctggtttaaaatattttgtattaagcgcactatcatctggtcttttattatatggttgctcactagtatatggattttcgggttctactaatttcaatattatttcaaactcttcatcaaatattgataatggtcttatatttggactagtatttataattgtaggattagcatttaagatatcagctgttccttttcatatgtgggcaccggatgtatatcaaggatctccaacatcagttacattttttttcgcagccttacctaaagttgcagcattaactgtatttatcagatttttatatactccatttataaatttaattgaccagtggcaaacaatactaatatttatatcaattgcatcaatggtattcggcgcagttgcagcgataggacaatcaaacttaaaaaggcttattgcttatagctcaataggtcatatgggatatgcgttagcaggtttagcatcaggtaccaaccaaggaattcaaagctcagtaatttatatttttatatatgtggttatgacattagcatttttctcttgtttattaatgttaagaaaaaaaaatatattttatgaaaatattgatgatttatcaggattatcatcaaaccatccgatactctctatctgtttacttatagttttattttcattagctggaataccaccgttagcaggtttttttgcaaaattttatgtttttatggctgttatagaacaatcaatgtattttttagctattgtaggtcttatgtctacagtcattgctgcattttattatttaagactaattaaaataatttattttgacaaaccaaaagacacatacgaaaaagatcacaatattggtttaagggttactctagcaatctcaacaggatttttaatactatactttatatacccaggcatatttaatgaactagtttctagaataaatctaatttaat

SEQ ID NO: 200990 - DNA, 1420 bp, Unknown
  Bacterial polypeptide expressing nucleotide sequence isolated from the Sargasso Sea
atggaaaatttaaatttaatattacctgaaatttttatttctttatcaattatgtttttacttattttaggggtgtttaaaaatgacagttctaaaattacttttaatttatctttgtttgcaattttaattacaacaataataacattcaatgaaactttttctgtaactagagaaactttgtttaatgaaagcgttgtgattgacagtatgtcctcgctaatgaaaattataactttaattggaggttttttagttttagttatttcgtcaacttatttaaaaacatataaaatatataatatagaatacccagttcttattttgagttcaattcttggaatgatggtaatgatcagttcaaatgatttaattgttttttatatgggcttagaattacagtcattagctctatatgttttagcaacatataatagagatcaactaaaatcatccgaagctggtttaaaatactttgttttaagtgcactatcttcaggattattgttatacggatgctcattagtatacggtttttctggttcaactaattttgatataatatcaaatcaattaaattctaatgaatatgttttaacatttggtattgtatttatcttagttggtttagcatttaaaatttctgcagttccatttcatatgtgggcacctgatgtttacgaagggtcaccaacaactgtgactttattttttacaatagtgccaaagattgctgctttaactgtattcataagatttttatatgttcctttcttaaatttaattgatcaatggcaaatgataataattttcttatcaatagcttccatggtctttggagccgttgctgcaataggtcaaaccaatatcaaaagactaattgcttatagttccattggacatattggttacacattggcaggactagccacagcttcaaatgaaggaattcaaagttcaataatttatatttcaatatacgtagttatgaatttagcgcttttttcttgtctattgatgttaagaagaaaggatcaatattatgaggatattgaggatctctcaggattatcaaaaaaccatccacttttatctttatgcttgcttgtaatactgttttctttagcaggtataccgcctctagcaggtttctttgctaagttttatgtttttaaagctgtattagaacaatcaatgtttttcttagctatagtaggattgttatctaccgtagttgcagctttttattatttaagaattataaaaataatttactttgataaagaaaaagataaatacgatacggaccatagcttatggttaaaattttcacttacagtttcaacgatattaattcttttatacttcatattcccaagtcagttaatagaagtcgtttcaagaattaatattatttaat

SEQ ID NO: 200991 - DNA, 487 bp, Unknown
  Bacterial polypeptide expressing nucleotide sequence isolated from the Sargasso Sea
atgaatattttaagattttttaaaacaatatttatgacagacttcatcggtggtttgtttattgctattaaagaattatttaaatcaaaaaaaacgatcaattacccttttgagaaaggtaaaataagccctcgttttagaggtgaacatgctttacgaagatatccaaatggagaagagagatgcatagcttgtaaattatgtgaagcagtttgtcctgcacaagcaataactatcgagtcagctgaaagagaagacggaagtagaaaaactacacgttacgatattgatatgatgaaatgtatttattgtggtttgtgtgaagagtcttgtcctgtagatgcaatagtacaaggtccaaattttgaattttcaacagaaacgagagaagaactttattatacaaaagaaaagttattagataatggtgatagatgggagaatgttttagaggctaatattaaagctgacaatatccatagataaa

SEQ ID NO: 200992 - DNA, 1177 bp, Unknown
  Bacterial polypeptide expressing nucleotide sequence isolated from the Sargasso Sea
atgacaaaaaaaattaaaaatttaaatctaaactttggtcctcaacatccagcagctcacggcgtattacgattaatattagaattagatggtgaggttgttgaaaaagcagacccacatataggtttactccacagaggcacagaaaaattaattgaaaacaaaacatacatgcaagcagttccttattttgatcgtttagattatgtagctccaatgaatcaagaacatgcctttgctcttgctgtagaaaaaattcttaagatagatgtaccaattagagctcagtatataagggttattttttgtgagataggaagaatattaagtcatattcttaacgttacaacccaagcgcttgatgttggtgctttaactccatcactttggggttttgaagaacgagaaacattaatgactttttacgaaagagcttctggatcaagattacatgctaactactttagagcaggaggtgttcaccaagacttaccaaaaggtttagaggaagatatttcaaacttttgtgagacatttccaaaagtgattaatgatttagaaagtcttttaacggacaatagaattttcaaacaaagaaatgttgatattggaattgtaagtaaagaggacgctttagattattctttttcaggtgtaatgatcagaggatcaggagtgccttgggatttaagaaaatctcaaccttatgattgttatgaagatttagattttaaaataccagttggaaaaaatggtgattgctacgatagatacttatgtagaattgaagaaatgaaagagagtgtttctattatcaaacagtgtctatccaaaatggaaaaaggaccagttaaatcactggatggaaaaattagtccaccatcaaaaaaagatattaagcaatcaatggaagcgttaatacatcattttaaattatttactgagggttacagagtaccaaaggatgagatttatactgctgttgaagctcccaagggagaatttggagtttatttaatttctgatggttcaagcaaaccttataaatgcaagataagagccccaggcttttcacatttacaatcaatggattatttaattaaaggacacatgctagcagatgtacctgcagttctaggttcgttagatattgtttttggtgaggtggatagatgag

SEQ ID NO: 200993 - DNA, 1177 bp, Unknown
  Bacterial polypeptide expressing nucleotide sequence isolated from the Sargasso Sea
aatgactaaagaaaaaaaaacacttaatttaaattttggtccccaacaccccgctgcacacggtgtattaagattaatattagaattagatggtgagatagttgaaaaagcagatccacacataggtttactacacagaggtactgaaaaattaattgaaaacaagacttatacacaagctataccttattttgatcgactagattatgttgcacctatgaatcaagagcatgcatttgctcttgcgatcgaaagaattatggatgttgaagttccaattagaggtcaatatataagagtaatattttgtgaaatcggtagaattttaagtcatattttaaacattacaacacaagcactggatgttggagctttaacaccttctctttggggatttgaagaaagagaaaaattgatgggtttttatgaaagagtatctggttcaagattacatgctaattattttaggccgggtggcgtacataaagatttaccaagaggattagaaaaagacatattagacttttgtaaaacattcccaaaaataattgatgatttagaaacattattgacagataacagaatattcaaacaaagaaatgttgatatcggaattgtcactaaagaagatgcattaaattattctttttcaggagtaatgcttagaggctcaggaataccctgggatttaagaaaatcccaaccttatgattgttatgaacaaatagattttaaaataccaattggcaaaaatggagattgttacgatagatatttgtgtagaattgaagaaatgagggaaagtgtgaaaattattgaacaatgtttaaagaaccttccaaaaggtcctgttaaatcaatggataataaacttacacctccaccaaaaaaagaaattaaacaatcaatggaggctctcatccaccattttaagttattcactgagggatatagggttaaaaaagatgaaatttatactgcagttgaggctccaaaaggtgaatttggagtttatttaatttctgacggaagtaatagaccatacaaatgtaaaatcagagccccggggttttcgcatctacaagctatggattatctaatcaagggacacatgctagctgatgttccagctgttttaggctctttagacatagtttttggggagattgatcgatga

SEQ ID NO: 200994 - DNA, 442 bp, Unknown
  Bacterial polypeptide expressing nucleotide sequence isolated from the Sargasso Sea
tatgactgggttattaatcgccttaagagaaatgtttaaaacaaaaaaaacaattaattatccttttgagaaaggaaaaattagtccaagatttagaggagagcatgcacttagaagatatccaaacggcgaagaacgatgtatcgcatgtaaactatgtgaagctgtatgtccagcgcaagcaattacgattgagtcagccgaaagatctgatggaagtagaaaaactactcgttacgatatagatatgatgaaatgtatttattgtggtctatgtgaggagtcatgccctgtagatgcaatagttcaaggtccaaattttgagttttctacagaaacaagagaagaactttattacactaaagaaaaattattagataatggtgatagatgggaaaatgttttagcggcaaatattaaatcagataatccttatagataa

SEQ ID NO: 200995 - DNA, 1177 bp, Unknown
  Bacterial polypeptide expressing nucleotide sequence isolated from the Sargasso Sea
aatgacaaaaaaaattaaaaatttaaatttaaattttggtcctcagcatcctgcagctcatggtgttcttagactaattctagagcttgatggagaggttgtagagaaggcggaccctcacatcggtttacttcatagaggaacagaaaaactgatagaaaacaaaacttatatgcaggcagttccttattttgatcgtttagattatgtcgctccaatgaatcaagaacatgctttcgcactagctgttgaaaaaatacttaaaatagatgtaccaattagagcgcaatatataagagttatattttgcgagattgggagaattttaagtcatattttaaatgttacaactcaagctcttgatgtaggagcattaacaccttctctttggggttttgaggaaagggaaactttaatgacattttatgagagagcttcaggatcaagacttcatgcaaattattttagagcaggaggtgttcatcaagatttgccaaaaggtttagaagaagatattgcaaaattttgtgaaacgtttccaaaaataatcaatgatttagaaagtttgttaactgataatagaatttttaaacaaagaaatgtagatataggagtagttacaaaagaagatgccttagattattctttttcaggagttatgattagaggcacaggtgttccatgggatttaagaaaatctcaaccttatgactgctatgaaagtttagattttaaaattccagttggaaaaaatggagattgttacgacagatatttatgcagaattgaagaaatgaaagaaagtgtttcaattatcaaacaatgtctagctaaaatggaaaagggtccaattaaatcattagacggtaagattagccctccacctaaggcagaaatcaaacaatcaatggaagctttaattcatcattttaaacttttcacagagggatacagagttccaaaagatgaaatttatactgctgttgaggcaccaaaaggagaatttggtgtttacttaatatctgatggatcaagcaaaccttacaaatgtaaaataagagcaccaggattttcacatttacaatcgatggattatttaattaaaggtcatatgctagctgatgttcctgcggtattaggttctttagatattgtttttggtgaggtagacagatga

SEQ ID NO: 200996 - DNA, 711 bp, Unknown
  Bacterial polypeptide expressing nucleotide sequence isolated from the Sargasso Sea
cttgagtatagtttttcaagaagtttataagattttatttttactagttcctgttcttgtttcagtagcaatgatagtttggcttgatagaagggtttgggcttttgttcaaaaaagacaaggacctaacgtcgttggtccgtttggcttattacaatctttagcagatgctttaaaatatatattcaaagaaatcatcattccatctagttcaaataaagtaatttttatattggctcctatagttactatgactttagccttaatcgcttgggctgtaatcccatttagtgcaactcaagttttggctgatatcaatgttggaattctttacttatttgccgtttcttcactaggtgtttacggaataataatgggtggatgggcatcaaattccaagtatccttttcttggagcaattcgttctgctgctcaaatggtgtcttatgaggtttcaattggcgtgataattatcaatgttttactttgtgttggttcactgaatttaaacgacatcgttattgctcaacaaaatatgtggtttgttattccattatttccaatgtttgtaatattctttatttccgctttagctgaaacgaatagacctccttttgacttaccggaggcagaagcagagttagttgctggttatcaaacagaatattcaggaatgatgtatgcaatgttttggttaggagagtatgcaaa

SEQ ID NO: 200997 - DNA, 1450 bp, Unknown
  Bacterial polypeptide expressing nucleotide sequence isolated from the Sargasso Sea
aatggttatactaggcgttgctggcatgattattcctgtcattaacgttctaagaagagaacgcggaagttctacattctatggcgcaattgcatttggtgcattactacttgcacttggatttgtaatattccagttctatgatgacaatctagcacctgctgctgtcttctctgaagatgtattggcagatgatggatttggttcattctttgcaattgcaatgcttattgtttcaataatgactgtagcaggttccttcaactacatgagaaagaggtcaaaccctgcaatctacttctcactaatcttactatccagtataggtatggtcttgattgcatttgcaaccgacctagttatgctctttgtagcatgggagttgatgagtattccaacatacatcttagcaggatttaacaagaaaaatccatcatcaaacgaggctgcaatcaagtactttttgttcggagcactatcctctggaattatcatttatggtatctcacttgcatacggaattaccggttctacaaacatcggtgatgtcatttacggatttgcaaatctatctccagacatgctaccacttggcttacttgcaattggtatgttcattgctggatttggtttcaagatgggacttgttccattccacatgtggctaccagatacatacgaaggctcgccaccaacaatcactgcattactagctgcaggaaccaagaaagcaggatttgcagccgcactaagaatcataattatgggtgctgcggcactaaacctcgattggacactggcattaggtgtaattgccataatgactatgactattggtaacgttgcagcaatcatgcaaaagaatctcacaagaatgcttgcgtattccagtattggtcatgcaggttacatactgattggtatttcccttgcaccgtttaccggaatgggattacaggcatcattattccatattctaaaccatgctgtaatgaaaggtgcagcattcattgcagttgcaggaattgttacaactcttgcagttactcacatggataaaatcaagggacttggtagaaagatgccaatcaccgcgtttggtcttgtcatatcattacttgcattagctggtgttccaccgcttaacggattctggagtaagctcatgctgtttggttctgctattgatgcaacaagtgttgtatggtgggctccatggcttgcaattgctggagttctaaacagtgcattgtctctagcatactatggttggattatacgaaagatgtactttgaaggtgaaacagaaaaacgtatcaaagaacctgcatcaattgtcggtgtaatgatattctctgtaatctttatggtaacaattggtgtttatccagaaccaatcatacaatttgtagaaatgattacgccttcaataagcacagttatgccttaa

SEQ ID NO: 200998 - DNA, 1432 bp, Unknown
  Bacterial polypeptide expressing nucleotide sequence isolated from the Sargasso Sea
ttcatatataaatggctttgatattagtaatgaaaatgttcaactgaaagaaaatattagctggctccctgatttaggtcttacttggtctgttggcgctgatggcatgtctatgccgttaatactattgactagttttataactgctttagcagttcttgctgcatggccagtcaagttcaaaccaaagttatttttctttttgatattggttatggatggtgggcaaatcgccgtttttgcagttcaagatatgcttttattctttctaacttgggaacttgagttaattcccgtttatttattactggctatatggggtggcaaaaatcgtcaatatgcagcaacaaaattcattatttatacagctggtagttctatctttattcttttggcagccttagcaatgggtttctatggtacagaaattcctaactttgagttttctcacttggcagctcaagattttagtcaaaaattccaaatattatgttacatcgggcttttaattgcatttggagtgaaactaccaatagtacctcttcatacttggcttccagatgcgcatggagaggctacagctcctgtccatatgcttttagcaggaattttattaaagatgggaggatatgctcttttaagatttaatgcacaattattgcccgttgctcatgctcaatttgccccattattaatagttctaggggtagtcaatataatttatgctgcattaacttcttttgctcaaagaaatcttaaaagaaaaattgcatacagttcgataagtcatatgggttttgttcttattggtatagggagttttagtagccttggaacaagcggagctatgctgcaaatggttagtcatggattaataggtgcaagtttattttttcttgttggtgccacctatgacaggacaaagactcttaaacttgatgaaatgagtggtgtaggacaaaaaatgaggattatgtttgccctatggacagcttgttctctggcttccttagctttgcctggtatgagtggatttgtttccgaattgatggtatttacaggatttgttactgatgaagtatatacactgccttttagggtggtgatggcctctttagctgctatcggtgtaatacttactcctatttatctactttccatgttacgagaaattttctttggtaaagaaaatcctaaattagtcgaagaacgaaaacttatagatgcagagccaagggaagtttatattattgcttgtttacttttgccgattattggaataggtttgtacccaagattagttactgaaagttacattgcatctatcaataatttggtcgatcgagatttaactgcagttaaaggtgctgtgaaaacaaatattttttcaggaactaaaacaaatgaaatcctaaaagctccaacaatataa

SEQ ID NO: 200999 - DNA, 673 bp, Unknown
  Bacterial polypeptide expressing nucleotide sequence isolated from the Sargasso Sea
atggacggttctaaggggtttgaagatgttcttacaggtgagcagaaaatccgtaattttaacatcaattttggtccccaacatcccgcagctcacggcgtattaaggcttgtattagagttggatggggagatagttgatcgttgcgatccacatataggattactacaccgcggcaccgaaaaattgatggaaagccgcacttatctgcaaaatcttccttattttgatcggttggactacgtagccccaatgaaccaggaacacgcctggtgtcttgccattgaaagactaactggcacagaaattcccagaagagcatcactcattcgtgtcttattttctgaaataggacgtgtgctaaatcaccttctcaatgtcaccactcaagctatggatgttggggctctcactcctccattatggggatctgaggaaagagaaacgctaatgattttttacgagcgagcttgtggcgctcgcctccacgcagcttactttagcccaggtggtgtgcatcaggatttaacaaaagagctgttggcagatattgatagttgggcagtagaatttcttaaagttcttgctgacatagacgcgcttcttactgaaaatagaatttttaagcagagaaatgtagatataggcattgtatcagaagacagatattcag

SEQ ID NO: 201000 - DNA, 1918 bp, Unknown
  Bacterial polypeptide expressing nucleotide sequence isolated from the Sargasso Sea
atgtctgaagctagaatagaaagattattaagtgatctatctgaattacgtagttatatctttattaatgttgataaactccaatcagctgttcagcagtcagagttaagcactaaaggtgcactaaattctttagagtttcgtttagaagcaattcttcaagcaaatttagatacattttggcttctaatgtgttcaatattagtttttttaatgcaagctggatttatgtgtttggaatctggtttaacgagaagaaaaagcagtattaatgttgccttaaaaaatttagcagattttgggatagctgttgttaccttttgggcatttggttttggtttaatgtatggtgctagttactcaggattagtcggtaccaaatattttctattctttactaatgtagctggttatcaaacttattttgtatttcaagcaatgttcgttgcaacagcagcaacaatcatttcaggtgccgttgcagaaaggttaaaattttttagttacgttataataactttttttacctctggaattatttatcctttagttggtcattggatatgggcgtttgatttttcaaatcctgcgaaaaaatttggttggttaggaaaattaggttttgttgattttgctggagcctcagtggttcattctgttggtggctgggtagctttatcggttttgcttattgtaggtcctagaacaggaagatttagaaaaggggaagcaggtaaaaaaacttttcaaggtagcaatactccaatggcagcgttaggagctttaattttatggtttggttggtttggttttaatggtggagcaaatttagctatggatttgagaattcctctaattttaataaatacattcatggcagcatctgctggattaatttcatctagcataatgggaataattgttatgaaaaaacctgagccaatgtttatgataacaggaccaattgctggattggtttcaattaccgcatcttgtgctttcgtatctcctgcaaatgcaattattattggagctattgctggaatattgtctggaagttttttagttattttagaaaaactaaaaattgatgatgtagttaatgctatcccagttcatttaatttgtggaatatggggaacattagcaattgcaatatttggagacatggaaaaaatgggtattgaaatttcaagatctcaacaattatatgttcagttaattggtattgtaagtatcggtgctttttgttttatttcatcttacataatattttatattgtaaattatttttatcctttaagagtaagtaaaattaatgaagagctaggtttaaatattgcagagcacaatgcatcaacagatacacatgaattgttaaatattttaggtaaacaagtagaaacgcaagattataccttaagagcgccccaagactcttttacagaaacaggtctcattggcactcaatacaatcgaatgatgtataagcttgaagaggctgaaaaacaaaaaaatatgtggaaaaatagagtttctaatgaaattaaattagctatgcaggttcaaaaaaaattaatgcccgatagagatatggataattatccagtatttggcttaaacattccagctagggaaatttcaggtgatttttatgatttttatccactcgatgaccaaatttattttaatttatcagacgtttccggaaaaggagtaaacgcaggaatggtaatggcaaaggctattacattatttaaaatatttgcaaggcaacaatataaacctaatgaaattctttttgaaatgaataatgatttacaccaaacaaatccaagtgggacttttgttacctcgataattggtcgttacaatttaaaaactgatgaagttgagttagcaaacgcaaggacatcaa

SEQ ID NO: 201001 - DNA, 1177 bp, Unknown
  Bacterial polypeptide expressing nucleotide sequence isolated from the Sargasso Sea
aatgacaaaaaaaattaaaaacttaaacttaaattttgggcctcaacatccagcagctcatggagttcttagacttatattagaattagatggtgaagttgttgaaaaagcagatccacatattggcttattacatcgtggcactgaaaaattaatagaaaataaaacttatatgcaagcagttccatattttgatcgattagattatgtagctccgatgaaccaggaacatgcttttgctttggctgttgaaaaaattttagatattgatgttccaattagagcccaatttataagagtgatgttttgtgaaattggaagaattttaagtcatattttaaatgttacaacacaagcattagatgttggagctttaacaccatctttatggggttttgaagaaagagagactttaatgactttttatgaaagagcatccggatcaagattacatgcaaattattttagagcaggtggtgtgcatcaagatttaccagcaggtttagagacagatattgcaaaattctgcgaaacttttccaaaaataattaatgatttagaaaacttattgactgacaatagaatattcaagcaaagaaatgttgatattggtgttgttacaaaagaagacgccctcgattattcttttagtggtgttatgattagaggttctggtgttccatgggatttaaggaaatcacaaccatatgattgttataaccaactagaatttaaaattcctgtaggaaaaaatggagattgttacgatagatatttatgcaggattgaagaaatgaaagaaagtgtcaaaataattaaacagtgtttatcaaaaatggaaaaagggccaatcaaaacttttgacggaaaaataacacctccatcaaaaaaagatatcaaacaatcgatggaagctttgatacatcactttaaattatttactgaaggatatcgtgtgcctgaggatgaaatttatacagcggttgaagctcctaaaggagaatttggagtttatttaatttcagatggatcaagtagaccttataagtgtaaaattcgagcacctggattttcacatttacaatcaatggattatttaattaaaggacatatgttggctgatgttcctgcagtactcggttctttagatatagtttttggtgaggtcgatagatga

SEQ ID NO: 201002 - DNA, 820 bp, Unknown
  Bacterial polypeptide expressing nucleotide sequence isolated from the Sargasso Sea
cctgtttcttcttgtcccagttttagtttctgttgccatgattgtttggttagatagaagagtttgggcttttgttcaaaaaagacaaggtcctaatgttgtaggtccttttggtttattacaatcattagctgatgcattaaaatatatttttaaagaaattataattccagcaagttctaataagattatttttattttagctccaattattacaatgactttagctttaatagcatgggcagttataccttttggagaagatcaggttttagctaatataaatgttggaattctttatatctttgctgtttcctctcttggagtttatggaattattatggggggttgggcatccaattccaaatatccttttttaggctcaataagatctgccgctcaaatggtttcttatgaagtttcaattggcataatcattattaatgtcctcttgtgtgtgggatcattaaatttaagtgatatcgttttagctcaacaaaaaatttggttcataattcctttatttccaatgtttgtaatattttttatttcagctttagcagaaacaaatcgacctccttttgatttacctgaggctgaagcagaattagtcgccggttatcaaactgaatattctggtatgatgtatgcaatgttctggttgggagagtacgcaaatattttattaatgtgtgctttaggatcgattttatttttgggaggctggctctcacctattgaattatatccatttaatttgattccaggagctatttggttaattctaaaatattacttttatttattttatttgcattag

SEQ ID NO: 201003 - DNA, 487 bp, Unknown
  Bacterial polypeptide expressing nucleotide sequence isolated from the Sargasso Sea
atgaaaatttcaagatttttaaaaacaatattgatgacagactttgttggtggtttgtttattgctataaaagaattatttaaaccaaaaaaaacaattaattatccatttgaaaaaggtaaaattagtccacgttttagaggtgaacatgctttgagaagatacccaaacggagaggaaagatgtattgcttgtaaattatgtgaagcagtgtgtcctgctcaagcaataaccatagagtcagctgcaagggaggatggaagtagaaaaaccacacgttatgatattgatatgatgaagtgtatttattgtggtttgtgtgaggaatcttgtcctgtagatgcaatagtacaaggtccaaattttgaattttcaacagaaacaagagaagaactttattacacgaaagaaaagttattagataatggcgacagatgggagaatgttttggaggctaatattaaagctgacaatatccatagataaa

SEQ ID NO: 201004 - DNA, 1030 bp, Unknown
  Bacterial polypeptide expressing nucleotide sequence isolated from the Sargasso Sea
atggttgatttatataagagtttaacaataatcgctccagagttaattttagctttggtagctatgactctattaatgataggttcgttctatcagaaaaagtcaataaatttgatcattactctatctttcattactttgataattttatctattaatgaattgatacctgatgaaaatcagacttttgcatttaatgctttttttatagaagataaactttcaagttttgcaaaatttgttattttttttacgtcttctctatcaattataatgtcagcaaattggttaaggaattatgacaaatcggcttttgagtttccagtattaatcctattttcaacgctcggaatggcattaatggtatctgcgaatgatttggtatctttatatcttgctattgaattacaaagtcttccattatatgtccttgcaacctttaatagaaacgactctttctcatcagaaagtggcgttaagtattttatattaggagcattatcatctggactacttttatatggatcttccttaatttatgggtttaccggctcaattttcttaaatgagatttctcaattaattgtaccatctaatcaattgggaattacattcggcttagcttttttacttgcgggtataatttttaaaatttctgctgttccttttcatatgtgggcgcctgatgtttatcaaggcgctgcaacacctgttacatcattttttgcatcggttcctaagatggcggctatgataatactaataagaattctttatgtcccatttgataactttataacaagttggtcccaaattattatctttgtatctttttcatccattttgcttggttcagttgttgctatctggcaaagcaatattaaaagactgattgcctacagttcaattgctcatatggggttcgcaacactagctttatcaacaggaaataaaagtgatatagaaagtattttgatttatatgattatttatatagtagctaatattggattcttttctttgtgtgata

SEQ ID NO: 201005 - DNA, 1177 bp, Unknown
  Bacterial polypeptide expressing nucleotide sequence isolated from the Sargasso Sea
atgactaaagaaaatgaaaaatttagaataaactttggaccgcaacacccagctgctcatggcgtgttaagattgattcttgatttagacggagaggttgttgaaagggtagagccccatataggcttattacatagaggtactgaaaaattaattgaaaacaaaacctatctccaagctttaccttattttgatagattagattatgttgctccaatgaatcaagaacatgcttttgctcttgctacagaacaactactaaatataaatgtaccaattagagcacagcatattagagttttgttttcagaaattggtagaattcttaatcatatgattaatgttcctgcccaagccatggatgttggagctttaacaccaacattatggggttgggaggaaagagaaaaactaatgaccttttatgaaagggcatgcggatctcgacttcatgctgcttacttcaggactggaggggtccatcaggatatcgatgatagcttgataaatgatatatatgacttctgtgatccttttttaaaggtagtagatgatcttgagagcttacttactgaaaatagaattttcaaacaaaggaatgttgatattggtgttgttagcaaaaaggatgttttagattggggtcttactggtgtaatggctaggggctcaggttataactgggaccttagaaagacacagccatatgagtcctattctgaatatgattttaaaatacctgtcggaaaaaacggtgacaactatgatagatatttaataagggtagaagagtgcaggcaatcaatattaataatgaaacaagcaattgaaaaacttaaacccggaccaattgtaactgatgatagaaaggtagcgcctccaaaaagagccgaaatgaaggtttcaatggaagctctaattcatcactttaaactatatactgaaggatacgatgtagggccaggtgaggtatatgcctctattgaggctccaaaaggagagtttggtgtttatcttatagctgatggtacaaataaaccctatagatgtaaaattagagcacctggctttgcccatcttcaggctctggattatttaacaaggggtcatcttcttcctgatttgtcagcagtattaggttcattagatcttgtctttggtgaggtggatagatgac

SEQ ID NO: 201006 - DNA, 487 bp, Unknown
  Bacterial polypeptide expressing nucleotide sequence isolated from the Sargasso Sea
atgaaattaagtagaatattaaaaactatatttatggtagactttgctactggtctattaatagcaattaaagaagtttttaaatctaaaaaaacaataaattatccatttgaaaaaggaaagctaagcccgagagctagaggtgaacacgctttaagaagatatcctaatggagaagaaagatgtatagcatgtaaattgtgtgaagccgtatgtcctgctcaagcaattacaattgaatccactgaaagagaagatggtagtcgaaaaacaacaagatacgatattgatatgctaaagtgtatttattgtggtttgtgtgaagagtcatgtccagttgatgcgattgtacaaggacctaattttgaattcgccacagaaactagagaagaactttattataataaagaaaaacttttagaaaatggtgataggtgggaaaatatacttgctgccaatataaaagcagataacccttataggtaat

SEQ ID NO: 201007 - DNA, 1177 bp, Unknown
  Bacterial polypeptide expressing nucleotide sequence isolated from the Sargasso Sea
atgtcaaaagaaaaaaaaacattaaatctaaattttggcccccagcacccggctgcacatggtgtattaagattaattttagaattagatggtgaagtagttgagcacgctgatcctcacattggattgttacacagaggaacagaaaaattaatagaaaataaaacctatattcaggcactaccttactttgatcgacttgattatgtagctccaatgaaccaagagcacgcatttgcacttgcgatagaaaaaattttaaatattgaagttccaatcagggcaaaatttataagagtaatgttttgtgaaattggtagaatattaagtcacattttaaatataactacacaagctttagatgtaggagcgcttacaccatcgctttggggttttgaagaaagagaaactttaatgactttctatgagagagtttcaggatctagacttcatgcaaattattttagagctggtggtgtccatcaagatttaccaagaggacttaatgaagatattgcaaaattttgtataaaatttccaaaagtaattgatgacctagaaaccttattaactgacaatagaatctttaaacagagaaacgttgatataggcgttgtttctaaacaagatgcacttgattattcattttctggagtgatgctgagaggttcaggtataccatgggatttaagaaaatctcaaccatatgaatgttatgatcaaatggattttaaaataccagtaggtaaaaatggagattgctatgatagatacttatgcagaattgaagaaatgagagagagcgtaaaaattataaatcaatgtttagcacaaatgccaagtggtccagtaaaaactttggatggaaaaattagccctcctccaaaaaaagaaataaaagaatctatggaagctttaattcaccactttaaattatttaccgaaggatacagggtaaaaaaggatgaaatttatgttgctgttgaagctccaaagggtgaatttggagtttatttaatatcagatggctccagtaaaccatacaaatgtaaaattagggcccctggattttcgcatcttcaagcaatggattatttaataaaaggtcatatgctagctgacgtaccagcagttttaggatcaatggatgttgtttttggagaaattgacagatgag

SEQ ID NO: 201008 - DNA, 1180 bp, Unknown
  Bacterial polypeptide expressing nucleotide sequence isolated from the Sargasso Sea
tatgcagaaagtagaacttaatacaacaacaattaattttggccctcaacatccggcagctcatggcgtattaagattagttgttgaacttgagggagaagttgtacaaagagcagagcctcatataggtttacttcatagaggtactgaaaaattaattgaatacaaaacctatcttcaagctgttccttattttgatagattagattatgtctcaccaatgtgtcaagagcatgcttttgctcttgctactgaaaaactactaggtattgaaatacctgaaagagcaaagtttattagagttatttttgctgaagtcacacgaatactgaatcaccttctaaatataccagcatatgctgcagacattggtgctgttacaccctttttatggtgttttgaagaaagagaaaaacttttagaattccatgaagctgtatcgggtgcaagatttcatgcagcttattttagaccaggtggtgtacatcaagatatgccagaaggtatggaagaaaaattattcaatcattttaaaaatcttcctaaatttattgatgaattagagagcctattaacgaataatagaattttaagacaaagatcagttgatataggagtgatttcaaaatctgaagctattgaatggggttgctcaggaccagttcttagaagtgctggtgtagcatgggacttaagaaggtcacaaccttatgatgcttatgatcaagtagattttgatataccagtgggaaaaaaaggtgattgttttgatcgttatttagtcagaatagaggaaatgagacaaagtataaatatcattaatcaatgcttaaataagattaaacctggaccaattgcaatagaggacaataaaattacaccaccaaaaagaaatcaaatgaaaaaatctatggaagctttaatacaccatttcaaactttttaccgaaggttatcgagtgcctaatgggcatgtttatactgcagttgaagcgccaaaaggtgagtttggagtttatcttgtatccgatggatcaagcaaaccttatagatgtaaaataagagcccctggttttgcacatttacaaatacttaacgcattatctaaaggccatttgatggcggatattgcagctatacttggaagtttagatattgtttttggagaaattgatagataa

SEQ ID NO: 201009 - DNA, 1177 bp, Unknown
  Bacterial polypeptide expressing nucleotide sequence isolated from the Sargasso Sea
aatgacaaaaaaaattaaaaatttaaacttaaattttggtcctcagcatccggcagctcatggtgttttgaggctaattttagagctggatggagaagttgtagaaaaagcagatccacacattggtttacttcatcgtggtacagaaaaattaattgaaaacaaaacatatatgcaagctgttccttattttgatagactagactatgttgctccaatgaatcaagagcatgcttttgctcttgccatagagaaaatcttaaagatagacgtccctataagagctcaatacatcagggttattttttgtgaaattgggagaatattaagtcatattttaaatgtaacaactcaagcactcgacgttggagcacttactccatctctttggggatttgaagaacgagaaacattaatgactttctatgaaagagcttcaggttcaagattacatgctaattatttcagagcagggggagttcatcaagatttacctgctggtcttgaagaagatatagggaagttttgtgaaacttttccgaaaattattaatgatttagaaaatctattaactgataatagaatttttaaacaaaggaatgttgacataggtattgtgactaaaagtgatgcacttgattattcatttactggagttatgatgagaggatcgggtgttccatgggatttaagaaaggcgcaaccttatgattgttatgatcaattagaatttaagattcctgtaggtaaaaatggagattgttacgatcgatacttatgtagaatcgaagaaatgaaagaaagtgtttcaatcattaaacaatgtttattaaaaattgaaaagggacccatcaaatcacaagatggaaaaataagccctccccctaaaaaagaattaaaacaatctatggaagcattaattcatcattttaaactatttaccgaaggatacagggttcctaaggatgaaatatacacttcagtagaggctccaaaaggtgagtttggtgtttatttaatatctgatggatcaaataaaccatataaatgtaaaattagggcaccaggattttcacacttacagtcaatggattatttaataaaggggcatatgttggctgatgttcctgcagtattaggatctttagatatagtttttggagaagtagatagatga

SEQ ID NO: 201010 - DNA, 433 bp, Unknown
  Bacterial polypeptide expressing nucleotide sequence isolated from the Sargasso Sea
cttggttattgctataaaagaatcttttaaatctaaaaaaactttaaattatccatttgaaaaaggaaaaattagtccaagattccgaggtgagcatgctttaagaagatatcccaatggtgaagaaagatgtatagcatgtaaattgtgtgaagctgtttgcccagctcaagctattacaattgaatcaaccgaaaaagaagatggtagcagaaaaaccacaaggtatgacattgatatgttgaaatgcatatattgtggattatgtgaggaatcttgccctgttgatgcaattgttcaaggacctaattttgaattttcaacagaaacacgtgaagagctttattataataagcaaaaattattagataatggtgatagatgggaaagtttattagctgcaaatatcaaagcagataatccttacagataa

SEQ ID NO: 201011 - DNA, 802 bp, Unknown
  Bacterial polypeptide expressing nucleotide sequence isolated from the Sargasso Sea
aatggattttaaaaataaagttgttgtaattaccggcgcatccagtggaattggtgaggcagcagctgaacaatttgcaaaaagaggcgcaaatctagtcttagttgcacgaagaaaagagaaattagaacaagttgcgcaaaaactttcaaaatattcaatcaaaactttgattcaggtttgtgatgtatctgacaaacaacaagttaaacaaatgtctgaaaaagtaattgagacattttccagaattgatattttagtaaataatgcaggatttgttatctatggaaaagtagaagaattgtccattgaagatattgaatctcaaatgcaaacaaactattttggtacaattaactgcaccaaatattttcttccgcactttcttaagcaaaattctggtcatatggttaatgtggcatccgttggtgggagctttggggtacctggtattgcatcttattgtgcaacaaaatttgcaatgttggggttttctgagggcttacaccatgaactgcatggaactaatgtcggagtaactgttgttagtccaataatggttagaacaagcctgtttgatcatccttctttcaaaaatttcacaaaatttgcaaccggaatctcgttaagtgctgataccgttgcaaacgcaataatcaaagcctcagattcatctagattagaaattgttgttccatcttttgtaagaattggaatatggttcaaacaaacattcccattcttgattaatcctattattggaaatagatttagaaaacagcttgataaaagagactcttag

SEQ ID NO: 201012 - DNA, 454 bp, Unknown
  Bacterial polypeptide expressing nucleotide sequence isolated from the Sargasso Sea
aatgaccgattttatcagtgggctttttattgctattaaggaacttttcaaatcaaaaaaaacaataaattatccatttgaaaaaggcaaaattagtccaagatatagaggtgaacacgcgttgagaagatatcctaatggagaagaaagatgtatagcttgcaaattgtgtgaagctgtgtgtccagctcaagcaattacaattgaatctgccgaaagagctgatggaagcagaaaaactactcgctatgatattgatatgatgaaatgtatttattgtggattatgtgaagagtcttgtcctgtagatgcgattgttcaaggaccaaattttgaattttcaaccgaaactcgtgaggaactttattatacaaaagaaaaactcctagataatggagatagatgggaaaatgttttagcggcaaatattaaatcagacaatccatacagataa

SEQ ID NO: 201013 - DNA, 487 bp, Unknown
  Bacterial polypeptide expressing nucleotide sequence isolated from the Sargasso Sea
aatgagcttaataagatttttcaaaacaatttttatgattgattttttaacaggattaatcatggcaataaaagaaatatttaaaccaaaaaaaacaattaattatccatttgaaaaaggttcaattagtccaagagcaagaggagaacatgcgctaagaagatatccaaatggtgaggagagatgtattgcttgtaaactatgtgaagctgtttgtcctgctcaggctataacaatagagtctagcgagagagaagatggaagtagaaaaactactcgttatgatattgatatgttaaaatgtatttattgtggtttgtgcgaacaatcttgtccagttgacgcgattgtgcaaggtccaaattttgaatttgctacagaaacaagagaagaactttactataacaaagaaaagttgttagagaatggagatagatgggagaatattttagcagcaaatattaatgctgatagctcccacagataa

SEQ ID NO: 201014 - DNA, 964 bp, Unknown
  Bacterial polypeptide expressing nucleotide sequence isolated from the Sargasso Sea
tatgtttttattaatatttggggtatttaagaaaaatagttctcaactagtttataatttaacaacagtaagtttagttgctgctttagcattaataattaatttagacacacaaattcaatcatcattattcaataatagttacaatatagatagtttagctagatttatgaaaattcttttaattttgtctgggatttttgtaatgctgtcatcatcaaaatatattcagattagtaaaattagcaaaattgaatatccaattcttattttatgctcaatcttaggcatgatggtgatgattagttcaaatgatcttattgttttttacatgggattagaattgcaatcattagcattatatgtgttggcatcatttaatagagataatttactatcaacagaatctggattaaaatattttgttttaagtgctctttcatctggacttttattatatgggtgttcacttatttatggtttttcagaaacgactaattttaatcaaattatggttaatacaaaagaaatagaatatggattaacttttggaatagtatttattttagttggattagcttttaaaatttctgctgttcctttccatatgtgggcacctgatgtttatcaaggttcaccaacatctgtaacggtctttttcgcattacttccaaaaattgctgcattgaccgtatttattagatttctatacattcctttttatgaattaggtgatcagtggcaaatgataattatatttttgtctattgcatcaatggtatttggagcggtagcagcaattggtcaaaataatttaaaaagactaatagcctacagctcaattagtcatatgggatacgctcttgcaggtttatctactggtacaacgcaaggtgtgcagagctctattacatatataacaatttatcttgtcatgaatttagcattttttagttgtttgttt

SEQ ID NO: 201015 - DNA, 1210 bp, Unknown
  Bacterial polypeptide expressing nucleotide sequence isolated from the Sargasso Sea
tatgtcctcgctaatgaaaattataactttaattggaggttttttagttttagttatttcgtcaacttatttaaaaacatttaaaatatataatatagaatacccggttcttattttgagttcaattcttggaatgatggtaatgatcagttcaaatgatttaattgttttttatatgggcttagaattacagtcattagctctttatgttttagctacatataacagagatcaattaaaatcatcagaagctggtttgaaatattttgttttaagtgcattatcatcaggattattattatatggatgttctttagtttatggtttttcaggttctaccaattttgatataatatcaaatcaacttaattctgaggaatatgttttaacttttgggattgtattcatattagttggtttagcatttaaaatttctgcagttccattccatatgtgggcacctgatgtttatgaaggatctccaacaactgtaactttgtttttcacaatagtaccaaaggtagctgctttgactgtatttattagatttttatatgttccttttttaaatttaattgaacaatggcaaatgataatagttttcttatctatagcttctatggtttttggagcagttgctgctatagggcaaactaatattaaaagactaattgcttatagctctattggacatattggttacacattagcaggactagctacagcttcgaatgaaggaattcaaagttcaataatctatatttcaatatacgtagttatgaatttagctcttttctcatgtctattgatgttaagaagaaaggatcaatattatgaggatattgaggatctctcagggttgtcaaaaaaccatccactattatctttatgcttgcttgtaatactgttttctttagctggtataccgcctctagcaggtttctttgctaagttttatatttttaaagctgtattagaacaatcaatgtttttcttagctatagtaggattgttatctactgtagttgcagcattttattatttaagaattataaaaataatttattttgataaagagaaagacaaatacgatacagaccacagcttatggttaaaattttcacttacggtttcaacgatattaattcttttatacttcatatttccaagtcagttaatagaagttgtttcaagaattaatgtcatttga

SEQ ID NO: 201016 - DNA, 1642 bp, Unknown
  Bacterial polypeptide expressing nucleotide sequence isolated from the Sargasso Sea
ttgagtacttatttttatacacatttttcgacactaattttgggaactttgggagctggattgtctaattttccttggttatctgcttcaattttattcccaattggtagtgcatttgtgatacctttttttcctgataaaggggatggcaaagaggtgagatggtttgcgttgtctattgcattaattacttttttaataactgtaggttcatatataaatggttttgatattagtaatgaaaatgttcaacttaaagaaaatattagttggctccctgatttaggacttacttggtctgttggcgctgatggcatgtctatgcctttaatattattgactagttttataactgctttagcagttcttgctgcatggccagtcaagtttaaaccaaagttatttttctttttgatattggttatggatggtgggcaaatcgctgtgtttgctgttcaagatatgcttttattctttctaacttgggaacttgagttaattccggtttatttattactggctatatggggtggcaaaaatcgacaatatgcagcaacaaaattcattatttatacagctggcagttctatcttcattcttcttgcagcgttagcgatgggtttctatggtacagaaattccaaactttgagttttctcacttggcagctcaagattttagtcaaaaattccaaatattatgttatgtagggcttttaattgcatttggtgtgaaacttccaatagtaccccttcatacttggcttccagatgctcatggagaggctacagctcccgttcatatgcttctagcaggaattttattaaagatgggaggatatgctcttttaagatttaatgcacaattattacctgttgctcatgctcaatttgccccattattaatagttcttggggtagtcaatataatttacgctgcattaacttcttttgctcaaagaaatcttaaaagaaaaattgcatacagttcgataagtcatatgggtttcgttcttattggaatagggagttttagtagccttggaacaagcggagctatgctgcaaatggttagtcatggattaatcggtgcaagtttattttttcttgttggtgcaacctatgacagaacaaagactcttaaacttgatgaaatgagtggtgtaggacaaaaaatgagaatcatgtttgctctatggaccgcttgctccctggcttccttagctttacctggtatgagtggatttgtttccgaattgatggtatttacaggatttgttactgatgaagtctatacactgccgtttagggtagtgatggcctctttagcagctatcggtgtaatacttactcctatttatctactttcaatgttaagagaaattttctttggtaaagaaaatcttaaattaatcgaagaacgaaaacttatagatgcagagccaagggaagtttatattattgcctgtttacttttacctattattggaataggtttatacccgagattaattactgaaagttacattgcatctatcaataatttggtcgatagagatttaaatgcagttaaaggtgctgttaaaacaaatattttttcaggaactaaaacaaatgacatcctaaaagctccaacaatataat

SEQ ID NO: 201017 - DNA, 481 bp, Unknown
  Bacterial polypeptide expressing nucleotide sequence isolated from the Sargasso Sea
tatgataaaatatattaaatcatttacactttttgaattgctccaaggaatgtttttaacgttgaaatatatgttcaaagcaaaggtaactataaactatcctcatgaaaaaggccctctcagtcccaggttcagaggtgaacacgcattaagaagatatccaagcggtgaagagagatgtattgcatgtaaattatgtgaagcggtttgtcctgcgcaagctataacaatcgaggctgagccaagagaggatggcagtagaagaactactagatacgacattgatatgagtaaatgtatttattgtgggttatgtcaggagtcatgccctgtcgatgcaattgttgaaggtccaaattttgaatttgcgacagaaacaagagaagagctgatgtacaccaaagaaaaacttcttgaaaatggagataggtgggaacaagagatagctcaaaatatttatttagataggaaatatcgttaa

SEQ ID NO: 201018 - DNA, 1119 bp, Unknown
  Bacterial polypeptide expressing nucleotide sequence isolated from the Sargasso Sea
tatgaaagaaatagaaataaatacaactacaataaactttggacctcaacatccagctgcacacggggttttgagattagttgtggaattagatggtgaggttgtagaaagagctgagccgcacataggtttgcttcacaggggaacagaaaaattaattgaatataagacttatctgcaagctgttccttattttgatagattagattatgtttctccaatgtgtcaagaacatgcttttgcactagcaactgaaaaactacttggtatagaagtgcctcaaagagcacaatacatcagagtaatttttgcagaaataacaagacttctaaatcatttattaaacatacctgcttatgctgctgatattggcgctgtaactcctttcctatggtgctttgaagaaagagaaaaacttcttcaatttcatgaagcagtctcaggtgctagatttcatgctgcatattttagaccaggcggtgttcatcaagatatgcctgaaggcatggaagaaaaattaggaaaacattttgaaacattgcctaaatttattgatgatcttgagagtcttttaacaaacaacagaattttaagacaaaggtctgttgatattggtgtaatctctaaggacgaagcaatagaatggggatgcacaggacctgttctaagaagtgcgggagtaccttgggacttaagacgctctcagccttatgatgcttatgataaagttgaatttgaaatcgcagttggtaaaaaaggtgattgttttgatagatatcttgttcgtattgaggaaatgagacaaagcatttctataattcaacaatgtttaaagaaaattaaatcaggtgaaatttctgtaattgataacaaaattacacctcctaaaagaagtgaaatgaaacactctatggagtcactaattcatcatttcaaattatttactgaaggttatagagtccctgaaggtgaaacctataatgctgttgaggcacctaaaggtgagtttggagtttttttagtatctgatggttcaagtaaaccatatagatgcaaaataagagcccctggttttgcgcatttacaaactcttgattttttatcacaaggtcatttaat

SEQ ID NO: 201019 - DNA, 364 bp, Unknown
  Bacterial polypeptide expressing nucleotide sequence isolated from the Sargasso Sea
aattagtccaagatttagaggtgaacatgctttgagaaggtatccaaatggagaagaaagatgtattgcttgtaaattatgtgaagctgtatgcccagctcaggcaataacaatcgagtcagcccaaagagaagatggaagcagaaaaacaactcgttacgacattgatatgatgaagtgtatttattgtggtttatgtgaagaatcttgtccggtagacgcaatagtacaaggaccaaattttgaattttcaacagaaacaagagaggaactttattatacaaaagaaaaattattagataatggtgatagatgggagaatgttttagaggctaatatcaaagccgacaatatccacagataa

SEQ ID NO: 201020 - DNA, 210 bp, Unknown
  Bacterial polypeptide expressing nucleotide sequence isolated from the Sargasso Sea
aatggctaaagaaaaaaaaacattaaatcttaattttggaccacaacaccctgcggcacatggagttttaagattaattcttgaacttgatggagaagtagttgaaaaagtagatccccatataggcttacttcacagaggtacagaaaaactaatagaaaataaaacttatattcaagccgttccttatttcgatagacttgattatgt

SEQ ID NO: 201021 - DNA, 487 bp, Unknown
  Bacterial polypeptide expressing nucleotide sequence isolated from the Sargasso Sea
atgaaaatttcaagattattaaaaactatattcatgattgattttgtgactggtttattaattgcaataaaagagacttttaaggcaaaaaagacaattaattatccttttgaaaagggatctttaggaacaaggtctagaggggagcacgctcttagaagatatcctaatggtgaagaaagatgtatagcatgtaagctttgtgaagctgtatgtcctgctcaagctattacaattgaatcaaaagaaagagatgatggtagtagaaaaacagtaagatatgatattgatatgcttaagtgcatatactgcggtctttgtgaagagtcatgtcctgtagatgcaattgtccaaggtcctaattttgaatttgcaacagagtcgagagaagaactttattatacaaaagaaaaactcttggaaaatggagacaggtgggaaaacattttagccgctaatataaaggctgacagttctcacaggtaat

SEQ ID NO: 201022 - DNA, 799 bp, Unknown
  Bacterial polypeptide expressing nucleotide sequence isolated from the Sargasso Sea
atggaaaatttaaatttaatattaccagagatttttatttctctatcaattatgtttctacttattttgggtgtgtttaaaaatgatagttctaaaatcacttttaatttgtctctatttgctattttaattacagcgataataacaataaatgaaactttctctgtcagtagggaaactttatttaatgaaagtgttgtgattgaccatatgtcatctctgatgaaaattataactttaattggaggttttttagttttagttatttcatcaacttatttaaaaacatttaaaatatttaatatagaatacccagtactaattttgagctctattcttggaatgatggtaatgattagctcaaatgatttaattgttttttatatgggcttggaattacagtcattagctctttacgttttagcaacgtataatagagatcaaataaaatcatctgaagctggtttgaaatattttgttttaagtgcactatcatcaggactattattatatggatgttctttagtttatggtttttcaggctcaaccaatttcgatataatatcaaatcaactcaattctaaagaatacgttttaacttttgggattgtgttcatattagttggtctagcattcaaaatttctgcagttccatttcatatgtgggcacctgatgtttacgagggatcaccaacaactgtaactttgttttttacaatagtgccaaagatagctgctttaactgtatttattagatttttatatgttccttttttaaatttaattgatcaatggcaaa

SEQ ID NO: 201023 - DNA, 1180 bp, Unknown
  Bacterial polypeptide expressing nucleotide sequence isolated from the Sargasso Sea
atgactgaaaaagaaaatgaaaaatttagaataaattttggccctcaacatccagctgctcacggtgtattaagactaattcttgatttagatggagaagttgttgaaagggttgagcctcacatagggttactacatagaggaactgaaaaactaattgagagcaaaacatatctacaagcattaccttattttgatagattggattatgttgccccgatgaatcaagaacatgcctttgctcttgctaccgaacagttgcttaacataaatatacctataagagctcaacatattagagttttattttcagaaattggaagaattcttaatcatatgattaatgtgcctgcacaagctatggatgttggagcattaacgccaacattatggggttgggaagaaagagaaaaattaatgaccttttatgagagagcatgtggatcccgacttcatgctgcttattttagaaccggcggcgtccatcaagatatagatgaaagcttgataaatgatatttatgaattctgcgatccatttttaaaggtagttgatgatcttgaaagtttactaacagaaaataggatatttaaacaaagaaatgttgatattggagttgtcactaagaaagatgtattagattggggtttaactggcgtgatggctagaggatcgggttataattgggaccttagaaagactcagccatatgaatcttatgatgagtatgattttaaaatacccgtaggaaaaaacggtgataattacgataggtatttaataagagtagaagagtgcaggcaatcagtattaataatgaaacaagcgattgaaaagcttaagccaggaccgattgtcaccgatgatagaaaagtagcaccgccaaaaagagctgaaatgaaaatatctatggaagctctaatacaccattttaaattatatactgaaggatatgatgtagggcctggtgaagtatatgcttctattgaagctccaaaaggagagtttggtgtttatctaatagctgatggaacaaataagccttataggtgtaaaattagagctcctggctttgctcatcttcaagccttagattatttaacaagaggacatcttcttccagatttatcagctgttttaggatctttagatcttgtttttggcgaggtagatagatgac

SEQ ID NO: 201024 - DNA, 430 bp, Unknown
  Bacterial polypeptide expressing nucleotide sequence isolated from the Sargasso Sea
aatggttaaaaaaacaaaatcattaaatttaaattttggacctcagcatcctgctgcccatggagttttaaggttaattttagaattagatggagaagtagttgaaaaagctgatccacatatcggtctattacatagaggaacagaaaagttaattgaaaataaaacttatgttcaagcagtaccgtattttgataggcttgattatgttgctccaatgaatcaggaacacgcttttgcacttgcaattgaaaaaattctaaaaattgatgttcctataagagctcaatatctgagagtaatgttttgtgaaattggtagaatattaagtcatattttaaatataacaactcaagcaatggatgtaggggcattaacaccaactctttggggttttgaggaaagagaaactttaatgggtttctatgaa

SEQ ID NO: 201025 - DNA, 1450 bp, Unknown
  Bacterial polypeptide expressing nucleotide sequence isolated from the Sargasso Sea
atggtcatcttaggcgttgctggaatgattattcctgtaatcaacgttgtaagaaaagaacgtggtagttctacattctatggtgcaattgcatttggtgcattactacttgcacttggatttgtaatattccaattctatgacgataatctagctcctgcagcaatcttctctgaagatgtacttgtcgatgatggctttggttcattctttgcaattgcaatgcttattgtctcaataatgacagtagctggctctttcaactacatgcgaaagaagtcaaacccagcaatttacttctcactaatcttactatccagcataggtatggtcttgattgcatttgcaactgaccttgtaatgctatttgttgcatgggaattgatgagtatcccaacatacatcctagcaggatttaacaagaaaaatccatcatcaaacgaggcagcaatcaaatatttcttgtttggagcattatcttctggtatcataatttacggcatctcccttgcatacggaatcaccggctctacaaacatcggtgatgtcatttacggatttgcaaacctatctccagacatgctaccacttggattacttgcaattggtatgttcattgctggatttggattcaagatgggacttgttccattccacatgtggcttccagatacttacgaaggctcgccaccaaccatcaccgccttactagcagcaggtacaaagaaagcaggatttgctgctgcattaagaattgtaattatgggtgctgcggcactaaacttagactggacgttggcacttggtgtaattgccataatgacaatgacaattggtaacgttgcagcaatcatgcaaaagaatctcacaagaatgcttgcgtactctagtattggtcatgcaggatacatactgattggtatctcacttgcgccatatacgggaatgggattgcaggcatcactattccatatactaaaccacgctgtaatgaagggtgctgcatttatcgcagttgccggaattgttacaacacttgcagttacacatctagacaaattgaaaggacttggcagaaagatgccaatcacgtcacttggtcttgtcatatcattacttgcattagctggtgttccgccgcttaacggattctggagtaagcttatgctgtttggttctgccattgatgcaacaagtgcagtatggtgggctccatggcttgcagtagcaggagttctcaacagtgcactatctctagcatactatggttggattatgagaaagatgtactttgaaggtgagacagaaaaacgtgtcaaagaaccagcatcaattgtaggtgtaatgatattctcaattatcttcatggtaacaatcggtgtatatccagaaccaatcatacaatttgtagagatggttacaccatcaatgagttcagttatgccttaaa

SEQ ID NO: 201026 - DNA, 208 bp, Unknown
  Bacterial polypeptide expressing nucleotide sequence isolated from the Sargasso Sea
atgaaagaaattgaagttaatagtacaacaattaattttggtccacagcatccagcagcccatggtgtgcttagacttgttgttgaattggatggtgaagttgtagaaagagctgaacctcatataggcctactgcatagaggaacagaaaaattaatagagtacaaaacttatttacaagccagtaccaatattttgatcgtttaga

SEQ ID NO: 201027 - DNA, 1495 bp, Unknown
  Bacterial polypeptide expressing nucleotide sequence isolated from the Sargasso Sea
aatgaataacctccaaagtctatcctttttctatccagaattactgctaacgttagttattttgtttgctattatttatgacctattaatcgattcctcagaatctggaaaggttggatgggtattagtttttggattagttctggtagccatagccatatggtttcaagatagcagcaaagtaacgaccctgtttacagatgctgtggtcttagaccctttttcgaccttctttaaactgcttatcattcttgcaacgatttttgtatcagtggtaagcctatattctaatgagctaagggactataggaagggtgaatatttttatttgctagggataatcacatttggactttttatgatggtctcttctattgaccttattatggtctatgtttcaatagagattgtttcaatcatgtcttttgttctggcagggtatctaaaaaagaatacacgttcaaatgaggctgcgttaaaatatgttgtatatggtgccttttcttctggtatcatgctatttggtctgagttatatctatggtcttacaggcagtacaaacttcttccaaattcaacagatattagctgctagtggtagtgaatcaaattctgcaattttgatggcagttgtaatgattttagccggttttggatataaggtctctgcagttccttttcatttctggaccccagatgtatatgaagggtcaccaacaacaatcacggcatatttatctatcgcaccaaaggctggagcatttgcaatgatgattcggttcttcaatcaagtattagctgatggcggtgcgatgagtggattaggctctatttctagaacagatttgccttgggcaagtttaataagtttactggctgtccttacaatgaccgtaggtaatgttgttgctattcaacaagataatataaagcgaatgcttgcttattccagcatagcacatgcaggatatatgttactcgctatgccagttatgtctggtgatagtatatatgcgatcatggtctacctggtcatgtatctatttatgaatcttggagcattctttgtagttataacaataaagaacaagaccgatggtgaaacctttgatgattacaaggggcttggatgggaaatgcctatagttggcataactatgacactttttatggtctcactcacaggactcccacctactgctggttttattggcaagttctatatttttgcttctttaattcagggaggcggctctttctactggcttgttgtcattggcggagttaacagcgttgtttctttatattattatctcagagtagtaaaagtaatgtattttgatggtgatagaaaggactcactagtctctccacccaaagttcttacaggaatgctcttggcaactgcagttccaacaatggttcttggcatatattgggtacctatagcaaaatggattaaagagtctttagtgttttttattcaaactatttaa

SEQ ID NO: 201028 - DNA, 487 bp, Unknown
  Bacterial polypeptide expressing nucleotide sequence isolated from the Sargasso Sea
aatgaaaattaacagaatatttaaaataatttttctatcagaatttgtttcagcacttttaaaaggagttaaagaaatttttaaaagtaaaaaaactattaattacccctatgaaaagggcccaataagccctagattcaggggcgaacatgctttgagaagataccccaacggcgaagaaagatgtattgcttgtaaattgtgtgaagctgtatgtcctgcgcaagctataaccattgagtcggaggaaaagggagacggaagtagaaaaacaacaagatacgacattgatatgttgaagtgtatatattgtggactttgtcaagagtcctgtccagtagacgcaatagttcaaggaccaaactttgaattttcaacagaaactagagaggaactttactataataaggaaaaattgttagataatggagacaggtgggagtcagttatatctaaaaatcttaaattagataaagtttataaataa

SEQ ID NO: 201029 - DNA, 173 bp, Unknown
  Bacterial polypeptide expressing nucleotide sequence isolated from the Sargasso Sea
aatgataatttcagaaaaagaaaaaaaaataccagatgaatttaagaaactagctaaggattttagtgacaatggtttcataacaacatcatttgataatttagtaaattgggcaagaaccggatcattacattggatgacctttggtcttgcatgctgtgctgttgagatga

SEQ ID NO: 201030 - DNA, 487 bp, Unknown
  Bacterial polypeptide expressing nucleotide sequence isolated from the Sargasso Sea
tatgaaattacgaagaatatttaaaacagtatttatggtagacttcatcactggtctatcaatggctgttaaagaattatttaaagaaaaaaaaacaattaattacccttttgaaaaaggaaaaatcagcccaaggtttcggggggagcatgctttaagaaggtatcctaatggtgaggaaagatgtattgcttgcaaattatgcgaagcagtttgcccagctcaagccataactatcgaatcaaccgaaagagctgacggcagtagaaaaactaccaggtatgatattgacatgttaaaatgtatttattgcggtttatgtgaagagtcatgccctgtggatgcaattgttcaaggaccaaattttgaatttgctacagaaacaagagaggaactatattataataaggaaaaattgttagaaaacggagatcgttgggagagtgtattagcggcaaacattaaagctgataatccctatagataa

SEQ ID NO: 201031 - DNA, 481 bp, Unknown
  Bacterial polypeptide expressing nucleotide sequence isolated from the Sargasso Sea
atgttacaaattattaaatcatttgcactttatgaattattaaaaggactaatattgacttttaaatatattttcaaatcaaaggtaacaataaattaccctcatgaaaaaggtcctctaagcccaaggtttagaggtgagcatgcattaagaagatacccaaatggtgaagaaaggtgcatagcttgcaaactttgtgaagctgtttgtccagcgcaagctattaccattgaagctgagcctaggactgatgggagtagaagaactactaaatatgatattgatatgagtaagtgcatttattgtggtttatgtgaagagtcatgtcctgttgatgcaattgttgaaggaccgaactatgaatttgcaacagaaactagagaggagttaatgtataataaagaaaaacttctttcaaatggagatatgtgggaacaagaaattgcacaaaatttacaattagatagcaaatatagataag

SEQ ID NO: 201032 - DNA, 979 bp, Unknown
  Bacterial polypeptide expressing nucleotide sequence isolated from the Sargasso Sea
gaggattcataccatcacctaaaacagtatgttcaaatttgggatgtagctgctgaaagacaggtggaaatttctggtaaagactcagcgaaattagttcagttgatgacatgtagagatttatctaaatcgaaagatggaagatgttattattgtccaataattgatgataacgcaggtctgattaatgatccagttgtacttagattgaatgaaaataaatggtgggtttctctcgctgactcagatgtaatattatttgcaaaaggattagctattggaaataaatttgacgtaaagatttttgaacctgatgtcgatataatggctatacaaggtccaaagtcatttgaattaatggaaaaagtttttggagataagatagttaatttaaaattctttggttttgattattttgaatttggtggtgataaacatttaattgcaagatctggttggtctaaacaaggtggttacgaaatttatgttgagcataatgtttctggattaaaattatatgatcatctttttgaaattggaaaagaatttaatatcaaaccaggttgtccaaatttaatagaacgtattgaaagtggattattatcgtatggaaatgatatcgataatggagacaatccatatgaatgtggatttgataaatatattaacatagacagcgaagttaattttttaggcaaagagaaattaaaaaaaattaaatctgaaggaattaaaaaaaaattaatgggagtaatgcttgatatagataaaataagtattacaggatcattagacttaagtgatcaagacaataatataattggagaattgagatcagcttgctattcaccacattttaaaaaagtaattggtattgctatgatgaaaaaatcacattggaatatcgaccaggatgtaaaagcaagcataaatggtgatatttgtgtgggtaaagtttgcgatttaccttttatttagt

SEQ ID NO: 201033 - DNA, 866 bp, Unknown
  Bacterial polypeptide expressing nucleotide sequence isolated from the Sargasso Sea
tatgtttgaatatattcaaattttaagtcaagaaatctataaaattttatttttacttgtgccgattttagtttcagtggcaatgatagtttggctcgacagacgagtatggggattagtacaaaaaagaaggggccctaatgtcgtaggtccttttggtctttttcaaactctagcagacgcattaaaatatgtttttaaagaaattattattcctgctagtgccaataaaacagtttttatattagctccaatagtaactatgactcttgctctagttgcttgggcggtaatacctataagtgagcaacttgtattatcagacataaatgtaggaatattatacttatttgcagtctcttccctcggagtatatggaataattatgggaggttgggcatctaactctaaatatccttttttaggggctataagatctgcagcccaaatggtttcttatgaagtttctataggtataattataataaacgtgcttttgtgcgtaggatctttaaatttaaaagatatagtcttggcccaaaaagatttatggtacgtaatacctttatttccaatgtttgtaattttttttatatctgctttagcagaaacaaacaggccaccattcgacttacccgaagcagaagcagaattagttgcaggataccaaactgaatattcaggcatgatgtacgcaatgttttggctaggagaatacgccaatattttattgatgtgcgcgatgggagctattttgtttttaggaggttggctaccaataattgacatctatccaataaattatattcctgcacctatttggatgatcttaaaaattttatttttattttttttattcgctttaa

SEQ ID NO: 201034 - DNA, 487 bp, Unknown
  Bacterial polypeptide expressing nucleotide sequence isolated from the Sargasso Sea
atgaatttaaatagatttttaaaaactatatttttaactgaatttttcttagcaataattaaagcaataagagaaatatttagacctaaaaaaacaattaattacccatttgaaaaaggtaaaataagcccacggtatagaggagaacatgcgttaagaagatatccaaatggtgaagaaagatgtatagcttgcaagctttgtgaagcagtgtgtcctgctcaggctattactatcgagtcagaggagaggaaagatggtagcagaaaaacaactagatatgatatcgacatgttgaagtgtatatattgcggcctgtgccaagagtcttgccctgttgatgcaatagtacaaggcccaaactttgaatttgctacagaaactagagaagagctttactacaataaaaaaaaattattagacaacggagatagatgggagtctgtactagcaaaaaatttaaaaacagacaaaatttataaataaa

SEQ ID NO: 201035 - DNA, 949 bp, Unknown
  Bacterial polypeptide expressing nucleotide sequence isolated from the Sargasso Sea
attgattggtgtatttaaaaaaaacagtgaatcatttatttacaatttttcttgtataattttacttgtgggacttgcgataaatatcaatttaaatcctcaattcccaatagatctatttaataacagttataaaatcgattatttcacgactttaatcaagtcagtaatattaatttctgcattccttgtaatgctatgttcattaaattacgtcaaacaaaatgatattttaaaaattgagtatccaattttaattttatcttcaattcttggtatgctcgtaatggtaagttctaacgatttaatagttttttatgttggtctggaactacaatctctagcattatatgtgctcgcagccttcaaaagagataatattctttcttctgagtcaggcttaaaatattttatattaagcgcactgtcatcaggattattactgtatggatgctctttaatatatggtttttcaagctctacaaactttgatttaatttatcaaaacagcgagtcaattgaatacggtataatttttggaatagtatttgttttagttgggttagcatttaagattactgctgtaccttttcacatgtgggccccagatgtttatgatggatcacctacatctgtcacagtaatatttgcaattcttccaaagatcgctgcattaacagtgtttattaattttttatacggacctttccttgaaatgtttgaccaatggcaagcagttataatttttttatcaattggttcaatggtgtttggggccgtagctgcgattggacaaaaaaaattgaaaagactaattgcttatagctcaataagccacatggggtttgcactcgctggtttgagtgttggaacaaacgagggtattcaaaattcaataatatacttaattatatatctaataatgaatatagcattcttctgttgtcta

SEQ ID NO: 201036 - DNA, 487 bp, Unknown
  Bacterial polypeptide expressing nucleotide sequence isolated from the Sargasso Sea
atgaatataattcgaatttttaaaacagtatttttaatagattttttgataggtttgttgatagctataaaggagacatttaaaccaaaaaaaacacttaattatccttttgaaaaaggtaagatttcaccacgttataggggggagcacgccttaagaagatatccaaacggcgaggaaagatgtatagcatgtaaactttgcgaagctgtttgtcctgctcaagcaattacaatagaatctacagcaagagaagacggaagtagaaaaacaactagatacgatattgatatgcttaaatgtatctattgtggtttatgtgaagagtcgtgtccagttgatgctatagttcaaggtcctaactttgaatttgctacacacactagggaagaactttattataataaagaaaagcttttagaaaatggagatagatgggagaatgttttagctgcaaatataaaagctgataacccttatagataat

SEQ ID NO: 201037 - DNA, 1138 bp, Unknown
  Bacterial polypeptide expressing nucleotide sequence isolated from the Sargasso Sea
atgacaaaaaaaattaaaaatttaaatttaaattttggtcctcagcatcctgcagctcatggtgttctaagactaatcttagagctagatggcgaagtagttgaaaaggcagatcctcacattggtttacttcatagaggaacagaaaaacttatagaaaacaaaacttatatgcaggcagttccttattttgatcgtttagattatgtagctccaatgaatcaggaacatgctttcgctctagctgttgaaaaaatactcaatgtagatgtaccaatcagagcgcaatatataagagttatattttgtgagattggaagaatcttaagtcatattttaaatgtcacaactcaagcacttgatgtaggagcattaactccatctctatggggttttgaggaaagagagacattaatgacattttatgagagagcctcaggatcaaggcttcatgcaaattactttagagcaggtggtgttcatcaagacctaccaaaaggtttagaagaagatattgcaaaattttgtgaaacttttccaaaaataataaacgatttagaaagtttactaactgataatagaatttttaaacaaagaaatgttgatattggagtagtcacaaaagaagatgcattagattattctttttcaggagtgatgattagaggctcgggtgttccatgggatttaagaaaatctcaaccttatgactgttataaaagtttagactttaaaattccagttggaaaaaatggagattgttacgacagatatttatgtagaattgaagaaatgaaagaaagtgtttcaattattaaacaatgtctatctaaaatggaaaaaggtccaattaaatcattagatggtaaaattagtcccccacctaaagcacaaatcaagcaatcaatggaagctttaatacatcattttaaacttttcacagagggatacagagttccaaaagatgagatttatacagcagttgaggcaccaaaaggagaatttggagtttacttaatatcagatggatcaagtaaaccttacaaatgcaaaataagagcaccaggattttcacatttacaatcaatggattatttaattaaaggtcatatgttagctgatgtgcctgcggtattgg

SEQ ID NO: 201038 - DNA, 1206 bp, Unknown
  Bacterial polypeptide expressing nucleotide sequence isolated from the Sargasso Sea
ttgctggagtgacggtattcatttcccttcattatattgcagagcaggaaatgaattatggagagtactatgttctgcttctaagtgcgttgatgggaatgatggtgatgacttccagccttgaaatgctggtaatcttcattggtttggaaatcatgtccatttcgagctacatcctggtgggtatgaaacgccgtgtcgcattgtccaatgaagcagcactgaaatatttattgctaggggcattttcaacaggatttctgctttatgggatctccctgctttatggcgcgacgggcacgacttacctgcccggaatcattaagtctcttcagcagggaccttttttcagcaacccccttgcggttgctggagtgggattggtcatcatttcaatgagtttcaaaatcgcgattgtgccctttcacatgtggactccggatgtctataccggtgccccgacacctgtgacgggatttctgtctgctgctgccaaagcagcaggttttgcagtattcctcagggtcttgttgacgggaattcctcttgaatccgaaaactggaaaaacctgctttggatcctagctgtgcttacaatgacggttgggaacttgatggcatttcgtcaaaacagcgtcaaacggatgcttgcatattcttccatcgcccatgccggttatgtcatggttgccgcagtggcaggatcagcggaagctctcagtggaattttcttttattcctgcgcctatgccttgatggggaccggagctttcggaattcttacgattcgtgatctgggtaaagttcctcagacctatgatgatcttgccggttatggcaaacgatttccgcttcctgcttttatgatgaccctcttcatgctttctctggtcggactccccctcaccggagggttcatcgccaagcttcagatcttcagtgctgccctagatgagggatggatctggctcacggtgatcggagttttaaacagtgcactatcggtttattactatctgagagtcgtggttttcatgtacatgcgtgagggcgccataccggaaggtgtttcggaggaagacaaccaacttccaggatttgccgtggcaggattagccggaactgcagttgcagtgctctatcttggaattttccccgaaacgctcctcaacctggcgacggattcgatcagtgcattactttaaa

SEQ ID NO: 201039 - DNA, 487 bp, Unknown
  Bacterial polypeptide expressing nucleotide sequence isolated from the Sargasso Sea
atgaatatttctagattttttaaaacaatatttatggctgatttcctcggaggtttatatatggctattaaagaattttttaaaccaaaaaaaacaataaattatccttttgaaaaaggtaaaataagtccaagattcagaggtgagcatgctttaagaagatatccaaacggcgaagaaagatgtattgcatgcaagttatgtgaagctgtgtgtcccgcacaagctattacaattgagtctgcacaaagagaagacggtagtagaaaaacaacccgatatgacatagacatgatgaaatgtatatattgtggcctttgtgaagagtcttgtccagtagacgcaattgttcaaggtcctaattttgaattttctacagaaacaagagaagagctatattacacaaaagaaaaattgttagataatggagatagatgggagaatattttagacgctaatattaaagctgacaatattcatagataaa

SEQ ID NO: 201040 - DNA, 836 bp, Unknown
  Bacterial polypeptide expressing nucleotide sequence isolated from the Sargasso Sea
aatgaaaacttttttaatagcaaaatcaagaaggcttagaggtacaccgtacacctctagaattgaaaaacaaggtgtaactgcttatactatatataatcatatgttgctgccagcagcatttggttctgtagaagatgcttatcatcacttgaaagagcatgttcagatttgggatgttgccgctgaaagacaagttgaaatttctggtaaagactcagcaaaattggttcaattgatgacttgcagagatttatcaaaatccaaagatggaagatgttattactgcccaatcattgatgacaatgcaggtttaattaatgatcctgtagttctaagattaaatgaaaataggtggtgggtctctttagctgactcagatgtaattctatttgccaaaggattagcgattggaaacaaatttgatgtaaaaatttctgaacctgatgttgatataatggcagttcaaggaccaaaatcatttcaattaatggaaaaagtttttggagaaaaaattgtaaatttaaaattttttggttttgattattttgaatttggtggcgataaacaccttattgcaaagtctggatggtctaaacaaggtggctatgaaatttatatggaacacaacgagtcaggtttaaaactatacgatcatctttttgaaattggaaaggaattcaatattagaccaggtggaccaaaccttatcgaacgtattgagagtggtttactttcccatggtaacgatatggacaatggagataatccatatgagtgcggttttgataagtatgtaaatatagatagtgatgctgattttttaggtaaagaaa

SEQ ID NO: 201041 - DNA, 487 bp, Unknown
  Bacterial polypeptide expressing nucleotide sequence isolated from the Sargasso Sea
atgaaaatttcaagatttttaaaaactattttaatgctagattttattggtggattgatcatagccataaaagaactttttaaatcaaaaaaaactattaattatccatttgagaaaggaaagataagcccaagatatagaggagaacatgcgcttagaagatatcctaatggggaagaaaggtgtattgcatgtaaattgtgtgaagcagtatgtccggcccaagcaataacaatagagtctgctgaaagagctgatggtagcagaaaaactactagatatgatattgatatgatgaaatgtatttattgtggcctttgtgaagagtcttgtccagttgatgcaattgttcaaggtccaaattttgaattttctactgaaacaagggaagaattatattataccaaagaaaaacttttagataatggagatagatgggaaaatgttctagcggcaaacatcaaggctgataatccgtatagataat

SEQ ID NO: 201042 - DNA, 865 bp, Unknown
  Bacterial polypeptide expressing nucleotide sequence isolated from the Sargasso Sea
atgaatttaaattttggacctcagcatcctgcagcgcatggagttcttagacttatattagagcttgacggtgaggttgttgaaaaagttgatcctcatatcggtttattacacaggggtacagaaaaattaattgaacataaaacctatacacaggctttaccatattttgacagattagactacgttgctcctatgaatcaagaacatgcatttgcgttggctacggaaaaattattaaaaattgatgttcctattagagctcaatacctaagagttattttttgcgaaattggaagaatattaagccatttgttaaatataaccacccaggcactggacgttggagcgctcactccgtctttatggggatttgaggaaagagaaactttaatgactttttatgaaagagcttctggatctagactacatgctaattactttagaacaggaggagtccatcaagatgtgccgaataatcttcttaaggatataggaatattttcagaaaaattccctaaaattatagatgatctggaaaatcttttaactgacaacagaatctttaaacaaagaaatgttcagattggtgtagtaacaaaagaggaagctttatcacatagtttttcaggtgtgatgttgagaggttcaggagttgcttgggacctaagaaagtcgcagccttacgagtgttataaaaatttagattttaagattcctgtaggaaaaaacggcgattgttacgacagatacttatgtagagttgatgaaatgagggagagtgtaaaaattataaaacaatgtttaaaaaaaataccaacgggtccaataaaaactattgatggtaaaatatctcctccaaaaa

SEQ ID NO: 201043 - DNA, 1180 bp, Unknown
  Bacterial polypeptide expressing nucleotide sequence isolated from the Sargasso Sea
gatgaaagaagtagaacttaacacaactacaattaattttggccctcaacatccagctgcgcatggtgttttacgtttagtagttgagctggaaggtgaagtagttcaaagagcagaaccacacataggattgttacataggggaacagaaaaattaattgaatataaaacttatcttcaggcagttccttattttgatagacttgattatgtttcgccaatgtgtcaagaacatgcttttgcattagcaactgaaaatctcctaggtattaatattcctgaaagagccaaatatattcgtgttatttttgctgaaattactagaatacttaatcatttattaaatatacctgcctatgctgctgacattggtgcagtgacaccattcttatggtgttttgaagaaagggaaaaactcttagaatttcatgaagccgtatctggggcaagatttcatgcagcctattttagacctggtggcgttcatcaggatatgccagaaggaatggaagaaaaattatttgagcattttaaaactcttccaaaatttattgatgatcttgaaagcttgttgactaataacagaatattaagacagagatcagttgatataggaataatttcaaagacggaagcaattgaatggggatgctcaggccctgttttaagaagtgccggtgttgcatgggatttaagaagatcacaaccttatgatgcctatgatcaagtagattttgaagttcctgttgggaaaaaaggcgactgttttgatagatatttggttcgaatagaagaaatgagacaaagtattagtattattaaccaatgtttgaataaaataaaacaagggccaatatcaattgaggataataaaattacaccgcctaaaagaaatcaaatgaaaaaatcaatggaagcattaattcatcattttaaacttttcactgaaggttatcgtgttccagctggtcaagtttatagtgcagttgaagctccaaaaggcgaatttggcgtttaccttgtttctgatggatctagtaaaccatatagatgtaaaataagagcaccaggttttgcacaccttcaaacattggatcatttatctaaaggccacttaatggctgacatagccgctatactaggtagcttagatattgtttttggagagatagatagataa

SEQ ID NO: 201044 - DNA, 487 bp, Unknown
  Bacterial polypeptide expressing nucleotide sequence isolated from the Sargasso Sea
atgaaaattagtagaattttaaaaacaatttttttggttgattttttaactggattattgattgcacttaaagagttatttaaaagaaaaaaaacaataaattacccttttgaaaaaggaaaaattagcccaagagctcgtggagaacacgctcttagaagatatcctaatggagaagaacgatgtatagcatgcaaattgtgtgaagctgtttgtccagctcaagcaataactatagaatcagcagaaagatctgacggtagtagaaaaacaactagatatgatattgatatgttaaaatgcatatattgtggattatgcgaagagtcttgtcctgttgatgcaatagttcaaggaccaaactttgaatttgcaacagagactagagaagaactttattataacaaagaaaaattactagcaaacggcgatagatgggaaagtgtattggcagcaaatataaaagctgacagtccatatagataat

SEQ ID NO: 201045 - DNA, 1177 bp, Unknown
  Bacterial polypeptide expressing nucleotide sequence isolated from the Sargasso Sea
atgagtaaacaaacaaagacacttaatcttaattttggaccacaacacccggctgcgcatggagttttaagattgatattagagttagatggagaggttgtagaaaaagccgacccccatattggtttgcttcatagaggtacagaaaaattgattgagaataaaacgtattctcaagcaataccttattttgatagacttgattacgtggcaccaatgaatcaagagcatgcttttgctttagctatagaaaaaattttagatattgaagttccaattagaggtcaatacattagagttatattttgtgagattggtcgaatattaagccacatactaaacatcactactcaagctttagatgtaggcgccttaactccttcattatggggttttgaggagcgagaaaaacttatggaattttatgagagagtctcaggatcgagattacatgcaaattattttagaccaggcggcgttcatcaggatttaccgagggggctcgatacagatattttgaaattttgtaatgagtttccaaagataatcgacgatttagaaactttactcactgataacagaatttttaaacaaagaaatgttgatattggcatagtttcaaaagatgatacattaaactattcattctcaggtgtaatgatgagaggatcaggtgtaccttgggatttaagaaaatctcaaccttacgattgttacgaacagttatcatttaaagtgccaatttggaaaaatggagattgttatgacagatatctttgtagagttgaagaaatgagagaaagtgtaaaaataattaaacaatgtttagaacaattaccaaaaggacctgtaaaatctcaagataataagattactcctccacccaagaaagaaattaaagagtcaatggaagcattaattcaccatttcaaattatttacagaaggctacagagtaaaaaaagatgagatttatactgcagtagaagcaccaaagggtgaatttggtgtttacttaatttctgatggttcaagcaaaccatataaatgtaaaatcagagctcctggattttctcatcttcaagcaatggattatttaatcaaaggacatatgttagctgatgtaccagctgtattaggttcattagatatagttttcggagaaatagacagatgag

SEQ ID NO: 201046 - DNA, 872 bp, Unknown
  Bacterial polypeptide expressing nucleotide sequence isolated from the Sargasso Sea
aatgaaaagtttttcaattgcaaaatcaagaaggctgagaggcactccttatacctctagaatagaaaaacaaggggttacggcttatacaatatataatcatatgttgcttcccgcagcgtttggttcaattgaggactcataccatcacttaaaacagtatgttcaaatttgggatgtagctgctgaaagacaggtggaaatttctggtaaagactcagcgaaattagttcagttgatgacttgtagagatttatctaaatctaaagatggaagatgttattattgtccaataattgatgataacgcaggtctgattaatgatccagttgtacttagattgaatgaaaataaatggtgggtttctcttgctgactcagatgtaatattatttgcaaaaggattagctattggaaataaatttgacgtaaagatttttgaacctgatgttgatataatggctatacaaggtccaaagtcatttgaattaatggaaaaagtttttggagataagatagttaatttaaaattctttggttttgattattttgaatttggtggtgataaacatttaattgcaagatctggttggtctaaacaaggtggttacgaaatttatgttgagcataatgtttctggattaaaattatatgatcatctttttgaaattggaaaagaatttaatatcaaaccaggttgtccaaatttaatagaacgtattgaaagtggattattatcgtatggaaatgatatcgataatggagacaatccatatgaatgtggatttgataaatatattaacatagacagcgaagttaattttttaggcaaagagaaattaaaaaaaattaaatctgaaggaataaaaaaaa

SEQ ID NO: 201047 - DNA, 241 bp, Unknown
  Bacterial polypeptide expressing nucleotide sequence isolated from the Sargasso Sea
atgaatttagaagaaagaaaaaaaaatattccagaagaatttaaacaattagcgcaagattttagtgataatggttttataacaacatcactagataatctagttaactgggctagaactggatcattacattggatgacttttggtctagcatgttgtgcagtcgaaatgatgcaaacttcaatgccaagatatgatttagaaagatttggcgctgcacctagagcttcacctagacaat

SEQ ID NO: 201048 - DNA, 1417 bp, Unknown
  Bacterial polypeptide expressing nucleotide sequence isolated from the Sargasso Sea
aatggaaaatctacaacttataattccagagttatttatatcaataatgattatgtttttattaatatttggggtatttaagaaaaatagttctcaactagtttataatttaacaacagtaagtttagttgctgctttagcattaataattaatttagacacgcaaattcaatcatcattattcaataatagttacaatatagatagtttagctagatttatgaaaattcttttaattttgtctgggatttttgtaatgctgtcatcatcaaaatatattcagattagtaaaattagcaaaattgaatatccaattcttatattatgctcaatcttaggcatgatggtgatgattagttcaaatgatcttattgttttttatatgggattagaattgcaatcactagcattatatgtgttagcatcatttaatagagataatttactatcaacagaatctggattaaaatattttgttttaagtgctctttcatctggacttttattatatgggtgttcacttatttatggtttttcagaaacgactaattttaatcaaattatggttaatacaaaagaaatagaatacggattaacttttggaatagtatttattttagttggattagcttttaaaatttctgctgttcctttccatatgtgggcacctgatgtttatcaaggttcaccaacatctgtaacagtctttttcgcattacttccaaaaattgctgcattaaccgtatttattagatttctatacattcctttttatgaattaggtgatcagtggcaaatgataattatatttttgtctattgcatcaatggtattcggagcagtagcagcaattggtcaaaaaaatctaaaaagactaatagcctacagctcaattagtcatatgggatacgctcttgcaggtttatctacaggtacaacgcaaggtgtgcagagctctattacatatataacaatttatcttgtcatgaatttagctttttttagttgtttgtttatgctaaagcgaaacgatgaatattatgagaacatagatgatttatcgggtctttcaaaaaatcatccgttattgtcattatcattgcttgttgtgctattctctttagcaggaataccaccactagctggtttttttgcaaaattctatatttttgtggctgtaataaacgaaaaaatgtattttttagcaatagttggactgctagcaacagtaatcgctgctttttattatctaagaataatcaaaattatatatttcgatccagaaaaagaaaaatttgaaacgaaacataatttaggtttaaaatttacactagtagcatcaacttttttcattcttgcttacttcatatatccaagtggaatagtagatataatttcacaaataaacattaattaa

SEQ ID NO: 201049 - DNA, 742 bp, Unknown
  Bacterial polypeptide expressing nucleotide sequence isolated from the Sargasso Sea
tatgattgagtaccttcaaattttaggacaagaaatttacaaaattattttcgtacttgtcccgatacttgtatccgtagcaatgatagtttggttagatagaagagtttggggcttagtacaaaaaagaagaggacctaatgttgttggtccttttgggctttttcaaacattagctgatgctttaaaatatatctttaaagaaattattattcctgctagcgcaaacaaaactgtatttatacttgctccgatagtgaccatgacattagctttagtagcttgggcagtcattccaatgagccaaaatttagttttagctgacattaatgttggaattctctatttatttgcagtttcttctctgggtgtttatggaattataatgggtggatgggcatcaaattcaaaatatccttttttaggtgccataagatcagctgcacaaatggtctcttatgaagtttcaattggaattatcatcattaatgttcttttgtgcgttggatcattaaatttaaacgatattgttcttgctcaaaaagaactatggtacgtaatacctctctttccaatgtttgtgatattttttatatcagcacttgcagaaactaacagacctccttttgatttaccagaggcagaagcagagctagtagctggttatcaaaccgagtattctggaatgatgtatgcaatgttctggcttggagaatatgcaaatatattattgatgtgtgct

SEQ ID NO: 201050 - DNA, 1198 bp, Unknown
  Bacterial polypeptide expressing nucleotide sequence isolated from the Sargasso Sea
aatgtctgaagccagaatagaaagattattaagcgatctctctgaattacgtagttatatctttattaatgttgataaactccaatcagctgttcagcagtcagagttaagcactaaaggtgcactaaattctttagagtttcgtttagaagcaattcttcaagctaatttagatacattttggcttctaatgtgttcaatattagtttttttaatgcaagctggatttatgtgtttggaatctggtttaacaagaagaaaaagcagtattaatgttgccttaaaaaatttagcagattttggaatagctgttgttaccttttgggcatttggttttggtttaatgtatggtgctagttactcaggtttagttggtaccaaatattttttattctttacaaatgtagctggttatcaaacttattttgtatttcaagcaatgttcgttgcaacagcagcaacaattatttcaggtgccgttgcagaaaggttgaaattttttagttacgttataataactttttttacctctggaattatttatcctctagttggtcattggatatgggcgtttgatttttcaaatcctgcaaaaaaatttggttggttgggaaaattaggttttattgattttgcaggagcttcagtggttcattctgttggcggttgggtagctttatcggttttgcttattgtaggtcccagaacaggaaggtttagaaaaggggaagaaggtaaaaaaacttttcaaggtagcaatactccaatggcagcattaggagctttaattttatggtttggttggtttggttttaacggtggagctaatttagctatggatttgagaattcctttaattttaataaatacatttatggcagcatctgctggattaatttcatctagcataatgggaataattgttatgaaaaaacctgagccaatgtttatgataacaggaccaattgctggattagtttcaattaccgcatcttgtgctttcgtatctcctgcaaatgcaattattattggagctattgctggaatattgtctggaagttttttagttattttagaaaaactaaaaattgacgatgtagttaatgctatcccagttcatttaatttgtggaatatggggaacattagcaattgcaatatttggggacatggaaaaaatgggtattgaaatttcaaga

SEQ ID NO: 201051 - DNA, 1420 bp, Unknown
  Bacterial polypeptide expressing nucleotide sequence isolated from the Sargasso Sea
atggaaaatcttaatttaatattacctgagatttttatatcgctatcagttatgtttctattaatactgggagtttttaagaaagatagttcacagttaatttttaatctttcattattcacaattttaattacagcaattattactataaatgaaacttattcaataagtagagttactttatttaaagatagtgttgtcattgaccctatggcttcacttatgaaagttataacgttaattggaggttttttagttttagtaatttcatctaattatcttaaagtatttaaaattttcaaaattgaatatcctatattaattttaagctctatcttgggaatgatggttatgatcagctctaatgatcttatggttttttatatggggctggaattacaatccctagctctttatgttttggcaacttttaacagagatcaattaaagtcatctgaagcaggattaaaatattttgtgttgagtgcattatcttctggtttgctactatatggttgctcactaatttatggtttttcaggatctactaattttgatgttatagcaaatcagctaaattcgaatgagtatgctcttacttttggaatagtatttattttagttggtttagcgtttaaaatttctgcagttccatttcatatgtgggctccagatgtctatgaaggatctccaacatcagtaacacttttcttcactatggttccaaaaattgctgcactgactgtcttcattagatttttatatgttccatttttaaatctaatagatcaatggcaaatgattattattttcttgtccattgcatcaatgatatttggtgcgattgcagcaataggacaaactaatattaagaggctggtagcttacagctcaataggacatatcggatatactttagcgggcttagcaacgggatctaacgacggaattcaaagttcaataatttatatttctatttacgtggtaatgaatctggctctattttcatgtttattgatgttaaaaaggaatgagcaatattatgaggatattgatgatctttcgggtctttcaaaaaatcatccactattgtcattgtgtttactgataatactattttcacttgctggaattccacccttggctggtttcttcgctaagttttatgtatttaaggctgtaattgaacaatcaatgtatttcttggcaatagttggtttactatcgactgtaattgcagctttttattacctaagaataattaaaataatttattttgataaagaaaaagaaaaatacgacacagatcatggaatatggttaaaattttcacttactttttccacaatattaattcttttgtactttatattcccaagtcaattgattgaggtagtttcaagaattaatattatttaat

SEQ ID NO: 201052 - DNA, 1111 bp, Unknown
  Bacterial polypeptide expressing nucleotide sequence isolated from the Sargasso Sea
atgaaaaactttttaatagcaaaatcaagaagactaaggggaacaccgtatacctctagaattgagaaacaaggtgtgactgcttacaccatttataatcatatgttgttgccagcagcatttggttctgtagaagatgcttatcatcacttgaaagagcatgttcaaatttgggatgttgctgctgaaagacaagttgaaatttctggtaaagattctgcaaaattagttcaattaatgacatgtagagatttatcaaaatctaaagatggaagatgttactactgcccaataattgatgataatgctggtttaataaatgatcctgtagtcttaagactaaatgaaaatagatggtggatttctttagctgactcagatgtaattctatttgccaaaggattagcgattggaaacaaatttgatgtaaaaatttctgaacctgatgttgacataatggcagtgcaaggaccaaaatcatttcaattaatggaaaaagtttttggagaaaaaattgtaaatttaaaattttttggctttgattattttgaatttggtggagataaacatcttattgcaaaatctggatggtctaaacaaggtggctatgaaatttatatggaacacaacgagtcaggtttaaaattatacgatcatctttttgaaattggtaaagaatttaatattaaaccaggtggaccaaatttaattgaacgtattgagagtggtttactttcacacggtaatgacatggacaatggagacaatccatatgaatgtggatttgataaatatatcaatattgacagtgatgtagattttttaggtaaagaaaaattaaggaaaataaaatcagaaggaattaaaaaaaaattgatgggagtgaaaattgatactaaggaaataagtgtcactggttcaatggatttaattgatgaaaacaacaaagtaattggagaattaagatctggatgttataacccaactttcggccaagttattggaattgcaatgataaataaacctcactttgaggagtcgaaatccttcaaaatcaatataaatggtagtcattttgatggaaaagtttgtgatttacctttcatttagt

SEQ ID NO: 201053 - DNA, 1063 bp, Unknown
  Bacterial polypeptide expressing nucleotide sequence isolated from the Sargasso Sea
tatacctcaagagtagagaaacaaggtgttactcattacacagtctataatcatatgttactaccagctgcgtttggaccactcgatgaattatatcatcatcttaaagagcatgttcaagtttgggatgcagcggtacaaagacagcttgaaatttcaggaaaagactcatctaaacttgtacaattaatgacttgtagagatttatcaaaatcaaaagtcggcaggtgttattattgcccaataattgatgacaacgctggattaattaatgatcccgtagttttaaaactttcggatacacgttggtggatatcattatcagactcagatgttggactatttgcaaaaggacttgcaataggaagaaattttgatgttaaaatctcagagcctgatgtagatatattttcagttcagggaccaaaatcatttaaactaatggaaaaagttttaggtcctaaaattactcaattgaaatttttcggttttgattactttgaatttggtggagcaaaacatcttatcgctagatcaggatggtctaaacaaggtggctacgaagtatatatggagcatactgaggctggattagctttgtatgataaactatttgaggttggtgatgaatttaatttaaaaccagggtgcccaaacttaattgaaaggatagaaagttcgttgttatcttatggaaatgatatggatttaggcgataacccatatgaatgtggatttgataattatataaatcttgataacgatattgaatttttaggaaaagaagcactaaagcgaataaggtctgagggtgttaagaaaaaactaatgggagtaaaacttgatatcgataatatctccgttactggatcaatgaatttgtatgatagtaaaaatgaaataattggtgaacttaggtcaggatcatataatccaatgtttaaacaagcaattggtatagctatgatcaaaaaaccttattttaaaccatctcaagaatttaaggttaatataaacggcaaaaatgtaagcggaaaagtttgcgatttacctttcatttagt

SEQ ID NO: 201054 - DNA, 487 bp, Unknown
  Bacterial polypeptide expressing nucleotide sequence isolated from the Sargasso Sea
atgaaaatttcaagattttttaaaacaatatttttgacagacttcattggtggtttgttaattgctataaaagaattatttaaatcaaaaaaaacaattaattacccttttgaaaaaggtaaaataagtccccgatttagaggtgagcatgctttgagaaggtatccaaatggagaagaaagatgtattgcttgtaaattatgcgaagcagtttgcccagcacaggcaataacaatcgagtcagctgaaagagaagatggaagtagaaaaacaacacgttacgatattgatatgatgaagtgtatttattgcggtttatgtgaagaatcttgcccagtagatgcaatagtacaaggtccaaattttgaattttcaacggaaacaagagaagaactttattatacaaaggaaaaattattagataatggagatagatgggagaatgttttggaggcaaatattaaagctgacaatatccatcgataaa

SEQ ID NO: 201055 - DNA, 726 bp, Unknown
  Bacterial polypeptide expressing nucleotide sequence isolated from the Sargasso Sea
tttgattttattaattccagtattaactgcagttgcaatgattgtttggcttgatagaagagtttgggcatttgttcaaaaaagaagaggacctaatgttgttggtccatttggtctatttcaatctttagccgatgctttaaaatatatgtttaaagaaataataattccagcaagctcaaataaaattatatttattttagccccaattgttactatgactttagccctagtagcttgggctgtaatacctttcagtgaaacatttgttattgctgatattaacgttggtatactttatttatttgctgtttcttcattaggtgtttacggaattataatggggggctgggcatcaaattcaaaatatccatttttaggatcaataagatctgcggctcaaatggtatcatatgaagtttcaataggtataatagttataaatgttttactttgcgtaggttcattaaatttaagcgatattgtaaaagcccaacaaaatctttggtttattattcctttatttccaatgttcattattttttttatttctgcattagcagagactaacagaccacctttcgatcttcctgaagctgaagctgaattggtagctggataccaaactgaatattcaggaatgatgtatgcaatgttttggcttggtgaatatgcaaatattttactgatgtgtgctatgggatcaatattattcttaggaggttg

SEQ ID NO: 201056 - DNA, 454 bp, Unknown
  Bacterial polypeptide expressing nucleotide sequence isolated from the Sargasso Sea
tatgattgacttcttgagagggttaatcattgcgataaaggaaatgtttaaaccaaaaaaaacaattaactatccatttgagaaaggtaaaataagcccgagatttagaggagagcacgcactaagaagatatcccaacggagaggaaaggtgtatcgcatgtaagttatgtgaagctgtttgccctgctcaagcaattactatagagtccagtgaaagagaagatggcagcagaaagaccacaagatatgatattgatatgttaaaatgtatatactgtggtttatgtgaagagtcttgtcctgttgatgcaattgtacaaggtccaaattttgaattcgcaacagaaacaagagaagagttatattacacaaaagaaaaacttcttgaaaatggagataggtgggaaagcgtactagccgcaaatattaaagcagataatccgcacagataa

SEQ ID NO: 201057 - DNA, 487 bp, Unknown
  Bacterial polypeptide expressing nucleotide sequence isolated from the Sargasso Sea
atgaaattatcaagattttttaaaacaatattaatggtagattttttaggtgggttagtaattgccataaaagagctattcaaatccaaaaaaacgataaattatccatttgaaaagggaaaaataagcccgaggtttagaggtgaacatgctttacgaagataccctaatggtgaagaaagatgtatagcatgtaaattatgtgaagccgtttgtccagctcaagcaatcacaattgagtcagcagaaagagaagatggtagtagaaaaactacacgttatgatattgatatgatgaaatgtatttattgtggtttgtgtgaggaatcatgccctgttgatgcaatagttcaggggccaaattttgaattttctacagaaacgagagaagaactttattacactaaagagaaactgctagataatggtgatagatgggaaaatgttttagctgctaatataagagctgacaatccatacagataat

SEQ ID NO: 201058 - DNA, 1252 bp, Unknown
  Bacterial polypeptide expressing nucleotide sequence isolated from the Sargasso Sea
aatgactgaaagcaatctgacgcttaacttcggtccacaacacccagcagcgcatggtgttttacggttaattatggagatggacggtgaggtcattacaaatctcgacccacacatcggccttttgcacagaggcacagaaaaacttgctgaaatcaaaccgttcaatcattcgatcggatatatggatagaatggactatgtttcgatgatgtgttgtgagcatccatatgttctagcaatcgagagtctattggagattgaacctcccaaaagggcacaatatatcagagtcatgtatgatgaaatcacaagaatcatgaatcatttattgtggttgggttgtcatggtcttgatattggggcaatggccttattcctctattgctttcgggaacgagaggacctatatgatgcatatgaagctgtatcaggtgcaaggatgcatgcaacatactatagaccaggtggagtttatcgtgacttacctgatgagatgccaaaatacaaagctaacaagtttatttctgaaaaaaaggtcaaaaaattaaactataacagagcaggctcattgcttgatttcattgaagactttaccaaccgatttccatctcttgtagatgaatacgaaactcttctaacagataacaggatatggaagcaacgtaccgtagatatcggagtcgtgactcctgaaagagccatgcaactcggttttactggtccgatgctcagaggttcaggcattgaatgggatctcagaagaaatcaaagctacgaggtatatgacgaactcgactttttaatccctgttggtgtcaatggtgattgttatgatcgttatctcgtcagagttgaagaaatgagacaatctaatcttatcattcaacaatgcatcaaatggctcagagcaaatccaggtccagtcatgattgaagatcataaatatagagcgccaaaaagagactcaatgaaacatgatatggaatcgttgatatatcattttaaacacttcactgaaggttattctgtgcctgaaggcaacacatacaaagccattgagcatccaaaaggggagtttggcgtgtttttactttctgatggggcaaacaaaccctaccgactaaaagtcagagcaccgagttttgcacatctagcagccattgatgaaatgtcaaaaggacacatgttggcagatgtagtatcgatcatcggtacattagatattgtatttggtgagattgataggtag

SEQ ID NO: 201059 - DNA, 590 bp, Unknown
  Bacterial polypeptide expressing nucleotide sequence isolated from the Sargasso Sea
aatgaatttaaattttggaccccagcacccggctgcgcatggagttctaagattaatattagagttggacggagaagtcgttgaaagagcagatccccatattggtttacttcacagaggtacggaaaaattaatagaaacaaaaacttacactcaagcaataccttattttgatagactcgattacgtagccccgatgaaccaagagcatgcttttgcattggctgtagaaaagcttttaaaaattgatgttccaaggcgagctcagtatatcagagttatattttgcgagattggcagaattcttagtcatttattgaatgtaactactcaagctcttgatgtaggcgcacttacaccgtcattatggggtttcgaagaaagagaaaagttgatggtattttatgagcgcgtttctggctcacgacttcatgcaaattactttagaccaggaggtgtacatattgatatgccaactggtttagctgaagatatagataaattttgtgatgattttcctaaagtaataaataatttagaggatctactaacagataatagaatatttaaacaaagaaatgttgatattg

SEQ ID NO: 201060 - DNA, 481 bp, Unknown
  Bacterial polypeptide expressing nucleotide sequence isolated from the Sargasso Sea
tatgataaaatatattaaatcatttacactttttgagctgttgcaaggaatgtttttaactttgaaatatatgctcaaagcaaaggtaacaataaattaccctcatgaaaaaggccctctaagtcctaggttcagaggtgaacacgctttaagaagatatcccagcggtgaagagagatgtattgcatgtaaattatgtgaagccgtttgtcctgcgcaagctattacaattgaagctgagccaagagaggatggtagtagaagaactactagatacgacattgatatgagtaaatgtatttattgtgggttgtgtcaggagtcatgtcctgtcgatgcaattgttgaaggtccaaattttgaatttgcaacagaaacaagagaagaattgatgtacacaaaagaaaaacttcttgaaaatggagatagatgggaacaagagattgctcaaaacatttatttagataggaaatatcgttaa

SEQ ID NO: 201061 - DNA, 551 bp, Unknown
  Bacterial polypeptide expressing nucleotide sequence isolated from the Sargasso Sea
attggcttttaaaatttcagctgttccttttcatatgtgggcacctgatgtatatgaaggttctcccacatctgttacattgttttttgctgttgctccgaaaatagctgcattaacagtcattataagatttttatatgttccttttgttaatgtaattgaccaatggcaattaataatagtttttttatctttagcgtctatgatttttggtgctgttgcagcaataggtcaaaaaaatctcaagagacttatagcttatagttcaattggacacatgggatacgctttggcaggtttgtgcgttgggacaaatcaaggaattcaaagctcaattttatacatttcaatatatcttgtaatgaacctaggattttttagctgtttatttatgttaaaaagaaacaatacatattttgaaaatattgatgattttgtcgggattatcaaaaaatcatccactaatttcactttcactgatggtagtattattttctttggcagggattccaccattagctggtttttttgcaaagttttatatatttaaa

SEQ ID NO: 201062 - DNA, 518 bp, Unknown
  Bacterial polypeptide expressing nucleotide sequence isolated from the Sargasso Sea
gattgctgccactgctgagttgaaccgcccaccgttcgacttagttgaggcggaacaagaactcgtgggtggtttccacaccgaatactcatcgattcgattcgcattgtttttcctggctgaattcatgaatgtcataaccatgtcagcaatcatggtcactctcttcttcggcggcccggctggcccaattttctttggtatgacttggttctggccgacaatatggttcttgcttaaagtccttgcgttccttttcgtatttgtgtggttcagagcaactcttccgcgacttcgatacgaccaactaatgcacttgggatggaaagtgttgattccgctgattctcttttggcttatgtttataagcctcaaggagcttcgcgctgcttacgactggaactgggtggctacatacggtgctgctcttatcgctcttcttgctggcacagcgctgctggttgcaggtcttcgcgccggcgatcgagcatatgaagacgaaatggaggacgtctaat

SEQ ID NO: 201063 - DNA, 295 bp, Unknown
  Bacterial polypeptide expressing nucleotide sequence isolated from the Sargasso Sea
aatggcaaaagaaaacaaaacgttaaatctcaattttggaccacagcatcctgcagcgcatggcgttttaaggttaatattagaattagatggtgaagtagtagaaaaagctgatccacacattggactattacatagaggcactgaaaagctgattgaaaacaaaacctatatgcaggctgttccctattttgatagattggactatgtagcaccaatgaatcaagaacatgctttcgctctagcagtagaaagaattttaaaaattgaagttccagcaagagctcaatattaa

SEQ ID NO: 201064 - DNA, 1348 bp, Unknown
  Bacterial polypeptide expressing nucleotide sequence isolated from the Sargasso Sea
atgagtcttatcgccgcgcagagcgcatcgtcttttccggtattgaatgccctcatcctcgtcccgatcatcggcgccctagtagtcgttctgcttcccaatagccgcccggagctaatgcgaccaatcggggcgctcttttcttcaatagcggcagcgctgtcactctacgtaatggcccaattttcgattcaccaacccggtttccagtttgagtcaattcaatcgtggatccccagtttgggtatcaactggcatgtaggtgtcgatggaatttccttatggttggtagtgctaacgggtctgatcacaccaatcgttcttgtagcagttgacccgcaccacgaccccaagccctacacggcctggttattgctgctgcaggctggctcatttggagcattccttgcattagaccttttccttttcttcgtcatgtttgaaattgtcttggtgcccatgtacatgctcattgggggttggggttacgacgacagaagatacgcggcaacaaaattcttcctttacacgatggcgggttcggcgctgatgctcgtagcgatcgtgagtgttgcgacattgagcgcaggcgaccagagtgtcactttcaacgtcgttgaactcgctgaacgacaggcgctttcgaccaacacagcgagattatgtttcctagccttcgcgctcgctttcgtgatcaaagtcccggtcttcccagtccacacatggcttccagatgctcacacccaagcgccgacagcaggttcagtggttctggccgcagtcatgttgaaactggggacttatggactgctgcgcttcgggttgtacctctttcccgaagcctcggtctgggcggcacccacgttggccacattgggcgtcgttggagtcatatacggagcgattgttgcaactatgcaaaaagaccttaagcgtctagtcgcatactcctctgtggctcacatgggcttcattgttctaggcatctttgctttcacaacgcaaagtctggaaggtggagtgctacagatgattaaccacggtttgtcaactggtgccctattccttctcgtgggaatgctctacgaaagacggaagaccagagcgattgaagaactaagcggtattcaatcagcagcgccaatttttgcgggcttcttcaccgtagtcatgctttcgtcaatcggagtgcctgggctcaacggtttcgttggcgaattcttgatcctgatcggttcctatgacacccggcgctggtggaccatcgtcgccgcaaccggggtcatacttgcggcgctctacttactttgggcttaccaacgagtttttcacggcgaaccgactactc

SEQ ID NO: 201065 - DNA, 610 bp, Unknown
  Bacterial polypeptide expressing nucleotide sequence isolated from the Sargasso Sea
tttgctagttcctgttttagtatcagttgctatggttgtatggctggatagaagggtatgggcttttgttcaaaaaagacaaggacctaacgttgtaggcccctttggtttacttcaatctcttgctgatgcgttaaaatacatatttaaagaaattattatcccttctagttccaacaaggtaatttttattcttgcaccaatcgttacaatgacacttgcattaatttcttgggcagtaattccatttagtgcaactcaggtgttagctgatattaatgttggaattctttatttatttgctgtttcatcacttggagtttatggaataataatggggggatgggcatctaattcaaaatatccatttcttggagcaatccggtcagccgctcaaatggtctcttacgaagtatcaattggcgtaattattattaatgttttattgtgtgtaggctcacttaatttaaacgatatagttatagcacaacaaaatttatggtttgttattcctttatttccaatgtttgtgattttttttatttcagcattagctgaaacaaatagacctccatttgatttaccagaggcagaagctgaattagttgct

SEQ ID NO: 201066 - DNA, 871 bp, Unknown
  Bacterial polypeptide expressing nucleotide sequence isolated from the Sargasso Sea
aatgacaaagaaaaataaaacactaaatttgaattttggtcctcaacaccctgcagcacatggtgtgttaagattgattcttgagttagacggagaaattgttgagaaggcggacccgcatattggattattgcatagaggtacagaaaaacttattgaacacaaaacatacactcaggccttaccttattttgatagattagattatgttgctccaatgaaccaagagcatgcttttgctttagctacagaaaaattattaaatatcgaaatacctatcagagcaaaatacataagagttattttttgtgaaataggcaggattttaagtcatattttaaatgttacaacccaagctcttgatgtgggagctttaacgccatctttatggggttttgaagaaagagaaactctgatgactttttatgaaagagcatcaggatcaaggttgcatgcaaacttttttagaacgggaggtgttcatcaggatcttccaacaaaacttttagaagacataggtgtcttttgtgaaacatttccaaaaacaatagatgatctcgaaagtcttttgacagataacagaatttttaaacaacgtaatgtggaaataggaattgtaacaaaacaagaagcgttaagccacagtttttcaggagttatgctaagaggttcaggtgttgcctgggatctaagaaaatcacaaccttatgaatgctacaaagatttaaattttaaaattccagttggaaaaaatggagattgttatgaccgttatctttgtagaattgaggaaatgagggaaagtgttaaaataataaaccaatgtctcaaaaacttacccaaaggcccagtaaagacaatagacggtaaa

SEQ ID NO: 201067 - DNA, 818 bp, Unknown
  Bacterial polypeptide expressing nucleotide sequence isolated from the Sargasso Sea
tggtgccgggatgcccatgtggaagcaccgactagcgggatctgtcatattagcctctgttcttcttaaagttggtggatatggaatgattagatttttattgccgatcacaactgaggctggaatttatctgagtgattacatgatatatctgtcgcttattgcaataatctacataagctttgttgcatttgctcaagaagacatgaaaaaacttattgcctactcttctgttgcacatatgggctttgtaacaatgggaatatttctagtttttaatcttatgggtaataatccaactgcagcagcaattggacttgagggagcaatggttcaaatgatatctcacggcctaatttctgcagcattatttttttgtataggtattatgtacaagcattcacattcaagattgataaaagataatttcggggtggcacagtttatgccaatattctcttttatgatggtctttttcttgatggctaattcaggcttgccgggtacctcagggttcgttggggaatttctagttattacatcctctcttggctcaagctttctttttggcttccttgcagcactttcattaatattgtctgcatcgtattcacttaaattaggaaaaaatgttttatttggggataaccagaaaaattctcaaggctatttagagtgtaaaagtaatgagaaaatagttttaggcactttagtcatctttgtactctatttgggaataagtccagatttattatttaatcttttggataaatcagtcagcgatattatctcgtcaatatctttaggaaaggcctgat

SEQ ID NO: 201068 - DNA, 559 bp, Unknown
  Bacterial polypeptide expressing nucleotide sequence isolated from the Sargasso Sea
aatgaaagaagttgaaataaattctactactttaaattttggacctcaacaccccgctgctcatggagtgcttcgtttagttgttgaccttgatggagaagttgtcaaaagagcagagcctcatattggtctacttcatcgtggtactgaaaaacttattgaatataaaacatatcttcaagcagtaccatattttgatagacttgattatgtatctccgatgtgtcaagagcatgcttttgctctttctactgaaaaattattaaatttagaagtacctatgagagctcaatatataagagttatatttgctgaaatcactagaattttaaaccatcttctaaatattcctgcttatgccgcagatattggggcagtgacaccttttttatggtgttttgaaaaaagagagaagttgttagagtttcatgaagctgtatcaggggcaagatttcatgcagcttattttcgcccaggtggagttcatcaagatatgcctaaaggaatggaagaaaaattatatgattatattaacactcttccaaaatttatagatgat

SEQ ID NO: 201069 - DNA, 655 bp, Unknown
  Bacterial polypeptide expressing nucleotide sequence isolated from the Sargasso Sea
aatgattgaatatttaattattgtattatctgaaatatataaaatttcaattttattaattccagtattaactgcagttgcaatgatagtttggcttgatagaagagtttgggcatttgttcaaaaaagaagaggacccaacgttgttggtccatttggtctatttcaatcattagccgatgctttaaaatatgtgtttaaagaaataataattccggcaagctcaaataaatttatatttattctagctccaattgtcacaatgactttagctctagtagcttgggcggtaataccattcagtgaaacatttgttattgctgatattaatgttggtatactttatttattcgcagtttcttcattaggtgtttatggaattataatgggcggctgggcatcgaattctaaatacccatttttaggatctataagatctgcagctcaaatggtatcatatgaagtctctataggtattataattataaatgttttactttgtgtaggttcattaaatttaagcgatattgtaaaagcccaacaaaatctttggtttgttatacctttatttccaatgtttgtaatattttttatttctgcattagcagaaacaaatagacctccattcgatctacctgaagcagagctgaattag

SEQ ID NO: 201070 - DNA, 847 bp, Unknown
  Bacterial polypeptide expressing nucleotide sequence isolated from the Sargasso Sea
ctatgatcagtcgactcaaggcatatattttgaaatggtattatttagtaggggtttagctttaaaaatctctgcagtgccatttcatatgtggctccccgacgtatatcaaggtcaccaaacatctgttacattattttttgcaattttacctaaaattgctgcattaacagtatttataagatttttatatactccatttattaatctaattgatcaatggcaaacaattattattttcctcgctatagcttcaatgctttttggcgctgtggcagcgataggacaaaaaaacttaaaaagacttatagcttatagttcaattagccatatgggctatgcattagctggtttaacaactggtacgaaccaaggtatacaaagttctgtatcctacatatcaatatatttagtaatgaatcttgcatttttcagctgtatttttatgttaaaaagagaagagaaatactatgaaaatatagaagatttatcgggattatcaaaaaatcatccgatgttatctttttcattgttgataacacttttttcattggcaggaataccaccgttagcaggtttttttgctaaattttatgtttttatggcagtaatagaacaatccatgtttttcttagcaattgttggtttgttagcaactgttattgcggctttttattacttaaggattattaaagtaatttattttgataatgaacttgataaatacgacacaaaccacagtataggattaaaattatctttgataataactacaattctaattttaacttattttatttacccaaatagcctcattgattttgtatcaaatattaatttagtttaa

SEQ ID NO: 201071 - DNA, 895 bp, Unknown
  Bacterial polypeptide expressing nucleotide sequence isolated from the Sargasso Sea
aacttatggattttctgaaagtacaaattttgatcaaatacttataaactcaactgaatttaattatggtacaacttttgggatagtctttattttagttggtcttgcatttaaaatatcagctgtaccttttcatatgtgggcaccagatgtttatcaaggctctccaacatctgtaacattattctttgctatacttccaaaaatagctgctctcagtgtattcattaagtttttgtacacaccttttgctaatatgaatgatcagtggcaaactattattgtatttatttcaatagcttcaatgatatttggtgctgtggcagctataggtcaaaaaaacttaaaaagattaattgcttatagttcaatcagtcatatgggctatgcgttggctggattagcaacagttagcaaccaaggaatacaaagttcaattacttatatatctatttatttggtaatgaatttagccttttttagctgcttatttatgcttaagagaaatgataaatattatgaaaacatagatgatttatctgggctttctaaaaaacatccaattttgtctttctcattgttgatagttttattttctttagcaggaatacccccgcttgcaggtttttttgcgaaattttatgtattcttggctgttatagagcagtcaatgtattttttagcaattgttggattactagcaactgtcgtagccgctttttattatctaagaattataaaaattatatattttgatccagaaaaagaagaatacgaaacatcacataatctaggattaaaaattactttagctatttcaactatatttattttagcatactttatatatccgagcagcataacagaaatagtatctaaaattacaatgatctaa

SEQ ID NO: 201072 - DNA, 307 bp, Unknown
  Bacterial polypeptide expressing nucleotide sequence isolated from the Sargasso Sea
tatgaaagaaatagaagtaaacacaactacaataaactttggacctcagcatccagctgcgcacggtgttttgagattagttgtggaattagatggtgaggttgtagaaagagctgagccacatataggtttgcttcacagaggaacagaaaaattaattgaatataagacttacctgcaagctgttccttattttgatagattggattatgtttctccaatgtgtcaagaacatgcttttgcaatagcaactgaaaagttacttggcatcgaagtgccagaaagggcgcaaatatatcagagttat

SEQ ID NO: 201073 - DNA, 496 bp, Unknown
  Bacterial polypeptide expressing nucleotide sequence isolated from the Sargasso Sea
aatgacaaaaaaaattaaaaacctaaatttaaactttggtcctcaacaccccgctgctcacggtgtgttaagattaattttagaactagatggtgaagtagttgaaagggctgatcctcatattggattattgcacagaggcacagaaaaactaattgaaaacaaaacttatatgcaagcagttccttactttgatagattagattatgttgctccgatgaaccaagaacatgcctttgctttagcaactgaaaaaatacttgaaatagatgttccaataagagctcaatatataagagtaatattttgtgagataggaagaattttaagccatatattaaacgtgactacacaagctatggacgttggtgctctaactccaactctatggggatttgaggaaagagaaaagttaatgggtttttacgagagagtttctggttcaagactacatgcaaattattttagagcaggtggagttcatcaagatttacct

SEQ ID NO: 201074 - DNA, 1237 bp, Unknown
  Bacterial polypeptide expressing nucleotide sequence isolated from the Sargasso Sea
aatgaacagcataaaaatacgcttgtgcagcatgatgtttttacagttttttatctggggtggctggtttgtcactttaggtacttttttaagccagaacctgcaggccactggtccacaaacgggcatggccttttcgactcaatcctggggggccattattgcgccctttatcgtaggtttaattgccgaccgtttttttaacgctgaacgtttattgggtattttgcacctggtaggcgctgtgctgatgtacctgatgtatcaggccgctgattttacaaccttttatccactggttttaggctacatgctggcctatatgccaacgttggcactggtgaactcagtctcttttggtcagttgaaacagcctgaactggagtttggtcagatccgggtttggggcactattggctggatagctgctggtttggtgatcagttatgcctttggctgggatgctcagcaggctatagctgatggcgcgctgaaaaataccttcctgatgtgtgctgtggcgtccttggtgttgggtgtatatagctttactttacctgcaacaccacctgccggtcgtggccaacaattaaaattaggtgagttgctggggctggatgcgttagcgttgctgaaagaccgtaacttcgccttgttctttttagcctcagtgctgatttgtattccgctggccttttattaccagaatgccaaccctttcctgaccggaattggtgttgaaaatgccacaggtaaaatgaccttagggcaagtgtctgaagtgttgtttatgctggctttacctgtctttctgaatcgttttggtattcgctggaccttattattaggcatggcggcctgggttttacgttatgtgctgtttgcctatggtgatgcaggtcaaggagtgtggttgctggtggttggtatagcactgcacggtatttgttatgacttcttttttgtctcgggccagatttataccaacagcaaagcgggcgttaaaattcgcagtgctgcacagggtctgatcactttagccacttacggtataggcatgctgataggctttagcgtggcaggtcaaatcactcaggcttacaccagtgctgaagccacagactggacctccatctggttattccctgctgtgtttgcagctgtggtgctggtgctgtttgccgttatctttaaaaacgagccgctgcaacaacaagcagaggacaaacagccatga

SEQ ID NO: 201075 - DNA, 484 bp, Unknown
  Bacterial polypeptide expressing nucleotide sequence isolated from the Sargasso Sea
gatggtaaaaaaaactaaatcattaaatctaaatttcggacctcaacaccctgctgctcacggtgttctaaggttaatactagaattagatggagaggttgtagaaaaagccgacccccatattggattgcttcatagaggaacagaaaaacttatagaacacaaaacatacactcaagctttaccttattttgacagactagattatgtagctcctatgaatcaagaacatgctttcgctttagccgcagaaaaattgttaaatgttgaagtcccaattcgggctaaatatataagagtaattttttgtgaaattggaagaattttaagtcatattcttaatgttactacccaagcattagatgttggagctttaacaccatctttatggggatttgaagaaagagaaaccttaatgactttttatgaaagagcttcaggatcaaggttgcatgcaaattattttagaatcaggtggtgttaa

SEQ ID NO: 201076 - DNA, 487 bp, Unknown
  Bacterial polypeptide expressing nucleotide sequence isolated from the Sargasso Sea
atgaaatttaataggtttttaaaaattatatttttatcagagtttataaatgcaataataattgcaattaaggaaatttttaaaaaaaagaaaaccattaattatccttttgaaaaaggaagtattagcccaagattcagaggtgaacacgcattgagaagataccctaatggtgaagaaagatgtatagcatgcaaattgtgtgaagctgtttgtcctgcgcaagcaataactattgaatccgaagaaaggccagatggtagtagaaaaaccacaagatacgatattgatatgctcaaatgtatatattgtggtttatgtgaggagtcatgcccagttgatgcaattgttcaaggccctaattttgaattcgcgaccgaaacaagagaagaactttattataacaaagacaagcttcttgataatggcgatagatgggaatctgttttatctgaaaatataaaacttgataaaccttataggtaaa

SEQ ID NO: 201077 - DNA, 487 bp, Unknown
  Bacterial polypeptide expressing nucleotide sequence isolated from the Sargasso Sea
atgaatttaacaagaatttttaaaacaatatttctgattgaatttctacgaggtctcttaatggcaatcaaagagatatttaaaaagtctaaaactataaattatccttttgagaagggttcaattagtcctcgaatgagaggtgagcatgcactaagaagatatcctaatggagaggaaagatgtatagcttgtaaattatgcgaagcagtctgtccggctcaagccattacgatagagtcttctgaaagacctgatggaagcagaaaaacaactagatatgatattgacatgttaaaatgtatttattgtggcttatgccaagagtcttgccctgtcgatgcgatagtacaaggtccaaattttgaatttgcgacagaaactagagaagaactttattataacaaacaaaagctactagataatggagacagatgggagtcagttttatcaaaaaatataaaactagataaaccatacaaataaa

SEQ ID NO: 201078 - DNA, 124 bp, Unknown
  Bacterial polypeptide expressing nucleotide sequence isolated from the Sargasso Sea
cgatatgatcaattaatgagattaggatggaaaatatttttgcctttttcattaatttatttagtcttaactgcaagttttttgttttatttcgataaattacctaatggaaacatttcatgaa

SEQ ID NO: 201079 - DNA, 1417 bp, Unknown
  Bacterial polypeptide expressing nucleotide sequence isolated from the Sargasso Sea
aatggataaaataaatttagtttacccagaattgttagtttctttatcaataatgtttttattgatgtatggagtatttgcaaaaaagagtgctagcactgtttataatttaagttctatttcaatttttgtgtctttaattttgttgttaagttttcctataaatacacaatggtcacttttcaatgatagttatcaaattgactatttatctacttttatgaaagtacttattttaatatttggtatttttgtattaggaatttcaaagaaatatgttttttcaattaatatcttaaaaattgagtatccaatattaatattagcttcaatccttgggatgatggtgatgattagttcaaatgatttaattattttctatattggtttagagctacaatcacttgctttatatgtgttggcttcatttaacagagacaatatcttgtcttcggagtctggaataaaatattttatattaagcgctttatcatcaggacttcttttatacggttgttctcttatttatggattttcaggatcaactaatttccagatcatttcagaacaaataatctctaattcttatggtcttacttttggaattgtttttattttagtcggtttggcattcaaaatttcagcagtaccttttcatatgtgggctccagatgtatatcaaggttcaccgacttctgttacagctttttttgcattattaccaaaagtagctgctttaaccgttttaatcagaattttatatgttccttttgttaatatgttagatcaatggcaattaattgtagtttttttatctattgcatctatgattttaggttccattgcagctattggtcaaaaaaatctcaaaagactaatagcatacagttcaatcagtcatatgggttatgctttagccggtatatcaactggcaccaatgaaggaatacaaagctcaattacatatatgttaatatacttaatcatgaatttagctttttttagctgtgtttttatgatgaaaaaaaatgataaatattatgaaaatttagatgatttatcaggtatttcaaagaaccatccaattttgtcattttgttttttgataattttattttctctagctggaataccacctttagcaggtttttttgcaaaattttatatttttactgcagtaatagaacagtccatgttttttttagcaatagttggattattatcaactgttatagcagcattctattatcttcgaattattaaaattatttactttgatacagaaagagaaaattttgataaagatcatagtatcagcctaaagttatcactttttatatcaactacagttattatactttattttacatatccaagtaaaatatctgagattgttgaaaaaataacaattatttaa

SEQ ID NO: 201080 - DNA, 487 bp, Unknown
  Bacterial polypeptide expressing nucleotide sequence isolated from the Sargasso Sea
aatgaattttagcagaattttgaaaactatatttcttgtagagtttatttctggattgtatttggcaattagagaattattcagaaaatctaagactattaattatcctttcgaaaaaggatctataagcccccgcatgagaggtgaacacgctttaagaaggtaccctagtggagaagaaagatgtattgcttgtaaactatgtgaagcagtttgccccgctcaagcaattacaattgagtctactgaaagggccgatggcagtagaaaaactacaaggtatgatattgacatgcttaaatgtatttattgcggattatgccaagagtcttgtcctgtcgacgcaatagttcaaggaccaaattttgagttcgcgaccgaaactagagaggaactttactataataaagaaaaacttttagcaaacggcgatagatgggagtcagttttagcaaaaaatattaaactagataaaccgtatagataa

SEQ ID NO: 201081 - DNA, 697 bp, Unknown
  Bacterial polypeptide expressing nucleotide sequence isolated from the Sargasso Sea
atgagtaaacaaagtaaaactttaaatttaaattttggccctcaacatcctgcagctcatggagttttaagattaattttagagttagatggagaagttgttgaaaaagccgaccctcacattggtttgcttcatagaggtactgaaaaattaatagaaaataaaacttatactcaagctgtcccttatttcgacagacttgattatgttgcaccgatgaaccaagaacatgcttttgcattagctatagaaaaaattttaaaaattgaggtaccaattagagctaaatttataagagtaattttttgtgaaattggtagaatattgagtcatttactaaatattacaacacaagctttggatgtgggcgcacttacaccatctttatggggatttgaagaaagagaaactttaatgactttttatgaaagagtttctggttctagattgcatgcaaattattttagagctggaggagttcatcaagatttacctagaggtttagataaagatatttcaaatttttgtggaaattttcctaaagctattaatgaactagaggcattgctcactgataatagaatatttaaacagaggaatgtagatattgggatagtatcaaaagaagatgcattagaatattcattttctggagtaatgttgagaggatctggggttccttgggatttaagaaaat

SEQ ID NO: 201082 - DNA, 1282 bp, Unknown
  Bacterial polypeptide expressing nucleotide sequence isolated from the Sargasso Sea
attggcattaattataaatctcagctcattcaataaaatttatttattcaatagttcgtatttaatagataacttatcaaattacatgaagataatactcgtaggttctggaatttttgtaatgttaactggatcaagatatatccaagtgattaatttaaataaaattgaatatcccattcttattttgagtagtattttgggaatgatgataatgataagttcaaatgatttaattgttttttacatgggacttgaacttcaatctttagctctgtatgttcttgcatcgttcaatagagacaacttgctctccacagagtccggacttaaatattttgttcttagcgcattatcatcgggtttgctcttatatggatgttcattaacttatggattttctgaaagtacgaattttgatcaaatactaataaattctaccgaatttaactatggtaccacctttgggatagtctttattttagtcggtcttgcttttaaaatatcagctgtaccattccatatgtgggcaccagatgtttatcagggctctccaacatctgtaactctattttttgctatacttccaaaaatagctgcgctctctgtattcattaagtttttatacacaccttttgctaatatgaatgatcagtggcaaactattattgtgtttatttcaatagcttcaatgatacttggtgctgtggcagccataggtcaaaaaaacttaaaaagattaattgcttatagttcaatcagtcatatgggttatgcgttggctggattagcaacagttagtaaccaaggaatacaaagttctattacttatatatctatttatttggtaatgaatttagccttttttagctgcttatttatgcttaagagaaatgataaatattatgaaaatatagaggatttatctgggctttctaaaaaacatccaattttatctttctcattattaatagttttattttctttagctggaatacccccactagcaggcttctttgcaaaattttatgtttttttagcagttatagaacagtcaatgtattttttagcaattgttggattattagcaactgtagttgcagctttttattatctaagaattataaaaattatatattttgatccagaaaaagaagaattcgaaacatctcataatctaggattaaaaattaccctggctatttcaacaatatttattttagcatactttatatatccaagcggcataacagaagtagtatctaaaattattatgatctaa

SEQ ID NO: 201083 - DNA, 1489 bp, Unknown
  Bacterial polypeptide expressing nucleotide sequence isolated from the Sargasso Sea
atgaataacctattaagcatatcgttattttggcccgaacttttattaaccgccacaatattaattgcaatagttgttgatattttttcacaatcaccaaaatcaaataaagtaagtaattatgtaattattggattattagcgacattagttgcagtttttattacaagccattcgccaaccacattatttatggattcattggcttttgatccctttgctagtttttttaaatcgattgtgatcgttgctaccttatttgttatagttataagtcgttacagtaacgaattcgaaggatatcatactggagaatactatgctttattatgcattatggtatttggaatgtttttaatggctagcgctattgatttgattacagtttatttatcaatcgaagttgtatcattaatgtcatttattttagctggttatctaaagaataatcccagatcaaatgaagcttcattaaagtatgttatctatggtgccttttcttccggtattatgctatatggattaagtattatttttggtttaacaggtacaacaaaattttttgctatacgtgatgcaattgcaactctggattcgacatcaaatctttccttaacattatcaaccgtatttgttttagcagggtttggatacaaaatatcagctgttccttttcatttctggactcctgatgtatacgaaggatctcctactccaattactgcctatttgtctgttgcaccaaaagcagctggttttgctttaatgattcgattctttaatcaggtttttgtcgatggtgattctttaagtggcttaggatggtattccgatgtgagttttgcctggcctgaattattaggtattatttctgttgcaacaatgtcattaggtaatttggtcgctattcaacagaatagcgttaaaagaatgttggcttattcaagtattgcgcatgcagggtatatgttaatggtatttccaactatttcatctgaaggtgtttttgcagtaatgatttatttagttatgtatctatttatgaatttgggtgctttttttgttcttatatatgtaatccaaaaagaaggcggtgaaagcttcgaacattttagtgggctaggttggcggatgccgattgttggtattgtaatgacagtatttatgttctcacttactggtttaccacctacggttggatttataggaaaattctatttatttgtcgctgttattaatgctggctcatccttttattggatagcatttttcggggcgataaatactgttatatctctctattattatatgcgtgttgtaaaaacaatgtatttagatggaaaaccaagtgatgaaattcaagtaccacccttttcaataactgcaattttattgatattggcagttccatctatattttttggaatttattggacccccatacttaattgggtaaaggatagcttattattttttgtacaaatctaat

SEQ ID NO: 201084 - DNA, 457 bp, Unknown
  Bacterial polypeptide expressing nucleotide sequence isolated from the Sargasso Sea
atctttttgaaattggtaaagaatttaatattaaacccaggtggaccaaatttaattgaacgtattgagagtggtttactttcacatggaaatgatatggataatggagacaatccatacgaatgtggatttgataaatatatcaatattgacagcgatgtagattttttaggtaaagaaaaattaaagaaaataaaatcagaaggagttaaaaaaaaattgatgggagttaaaattgatactaaggaaataagtgttactggttcaatggatttaattgatgaaaataataaagtaattggagaattaagatctggatgttataatccaactttcggccaagttattggaattgcaatgataaataaacctcactttgaggagtctaaatccttcaaaatcaatataaatggtactcattttgatggaaaagtttgtgatttacctttcatttagt

SEQ ID NO: 201085 - DNA, 798 bp, Unknown
  Bacterial polypeptide expressing nucleotide sequence isolated from the Sargasso Sea
aatgattgatttaaattatatatattctgaaatatttatttcactctcaataatgtttttgcttttattgggtgtatttaaaaaagaaggcacggctttagttcacaattttgcaattttttctttgctaataactttattactaatatttaatcatccgttgagtatcgaagttaacttgtttaatggaagttataaaatagattatctatcttcatttatgaaaattttaacaatagtttctggaatatttgttcttattatttcatcttcatatttaaaatttcttaagattttacagatggagtatccaatattaattttgtcttctattttgggtatgctagttatgattagttctaatgatttaatggttttttatataggtcttgaacttcaatctctctctttgtatgtattggcttcatttaatagggatcaaattaaatcctcagaagctggattaaaatattttattttaagtgcattatcatcaggattattattgtatggatgttcgttaatatatgggttttcaggcacaacaaactttacaattatatctgaaatcattgtaaatgaccaagaaggtttagtatttggtattgtatttattttagttggtttagcttttaaaatatcagcagttccttttcatatgtgggcaccagatgtatatgaaggatccccgacttctgttaccttgttttttgcaatagttcctaaaattgctgctttaactgtttttattcgaattttgtatttacctttctttaatatgtttgatcaatggcaaaa

SEQ ID NO: 201086 - DNA, 345 bp, Unknown
  Bacterial polypeptide expressing nucleotide sequence isolated from the Sargasso Sea
tatgaatttttctagatttttaaaaacaatatttatgacagactttattggaggtttatttattgcaattaaagagatatttaagccaaaaaaaacaattaattacccttttgaaaaaggtaaaattagtccacgttttagaggcgaacacgctttaagaagatatcccaatggtgaagagagatgtatagcttgcaagttatgtgaagctgtttgtccagcccaagctataactattgagtcatttcaaagagaagatggtagtagaaaaacaactagatatgacattgatatgatgaaatgtatttattgtggattatgtgaagagtcttgtcctgttgatgc

SEQ ID NO: 201087 - DNA, 487 bp, Unknown
  Bacterial polypeptide expressing nucleotide sequence isolated from the Sargasso Sea
tatgaatatatttcgaatatttaaaacagtatttttaatagattttttgacaggcttgttgatagctataaaggagttatttaaaccaaaaaaaacgcttaattatccttttgaaaaaggcaagatttcaccacgatataggggagagcacgccttaagaagatatccaaacggtgaggaaagatgtatagcatgcaaactttgcgaagccgtttgtccagctcaagcaataacaatagagtctacagctagagaagacgggagtagaaaaacaacaagatacgatattgatatgctaaaatgtatctattgtggtttgtgtgaagagtcgtgtccggttgatgctatagtgcaaggtcctaactttgaatttgcaacacatactagggaagaactttactataataaagaaaagcttttagaaaatggagatagatgggagaatgttttagctgcaaatataaaagctgataacccgtatagataa

SEQ ID NO: 201088 - DNA, 487 bp, Unknown
  Bacterial polypeptide expressing nucleotide sequence isolated from the Sargasso Sea
atgaatatttcaagattttttaaaacaatattaatgacagatttcattagtggtttgtttattgctattaaagaattatttaaaccaaaaaaaacaattaattacccttttgaaaaaggtaaaataagccctcgttttagaggtgagcatgctttgagaagatatcctaacggagaagaaagatgtattgcttgcaaattatgtgaagcggtgtgtcctgctcaggcaataactatcgagtcagcagaaagagaagacggaagtagaaaaacaactcgttacgatattgatatgatgaaatgtatttattgtggtttatgtgaagaagcttgcccagtagatgcaatagtccaaggtccaaattttgaattttcaacagaaacaagagaagaactttattacacaaaagaaaaattattagataatggtgatagatgggagaatgttttggaggctaatattaaagctgacaatatccatagataaa

SEQ ID NO: 201089 - DNA, 1156 bp, Unknown
  Bacterial polypeptide expressing nucleotide sequence isolated from the Sargasso Sea
aatgaatttaaattttggtccacagcatcctgctgcacacggcgttcttagactaatacttgaacttgatggggaggttgttgaaaaagttgatccacatataggattgttacatagaggtacagaaaaattaatcgaacacaaaacatacactcaagcgttaccatattttgatagattagattatgtggcaccaatgaaccaagaacatgcattcgcattagcaactgaaaagttattaaaaatagaagttccgattagagctcagtatttaagagtaatattttgcgaaattggaagaattttaagtcacctactaaatattactactcaagccttagatgtaggagctctcactccatcactgtggggttttgaggaacgagaaacgcttatgactttttacgaaagagcgtcaggttctagattgcacgctaattattttagaacaggtggggttcatcaagatattacaaacgatcttttaaatgacataggcatattctctgagaaatttcctaaagtaattgatgatcttgaaaatctacttacagacaatagaatttttaaacaaagaaacgtcgatattggaattgtaacaaaagaagatgctctatctcatagtttttctggggtaatgttgagaggatctggagtagcttgggatttaagaaaatcacaaccttatgaatgttataaaaatttagattttaaagtacctataggaaaaaatggagattgttatgacagatatttatgtagaattgaagaaatgcgtgaaagcgtaaaaattattaaacaatgtttaaaacaaatacccaaaggtcctatcaaaacagtagatggaaaaatttcgccacctaaaaaagaagaattaaaagagtcaatggaagctcttattcatcattttaaattgtttaccgagggatacagggttccaaagggagaagtgtatagttctgtggaggctccaaaaggagaatttggcgtttatttaatatcagatggatcaaacaaaccttatagatgtaaaatacgagctccaggattctcacatttacaagcaatagattatttaactaaaggacatatgttggcggacgtgcctgcagttttaggatctttagatatagtttttggtgaggtagatagatga

SEQ ID NO: 201090 - DNA, 736 bp, Unknown
  Bacterial polypeptide expressing nucleotide sequence isolated from the Sargasso Sea
cccatttttgtcaggtttttattctaaagatgcaataatagaatttgcttatctaagaggaaatacagctggttattatgctgctggaattggaatttttacagctttcttaacatcaatttactcttggagattaatttttaaaacttttcatggtgaatataataataaagagataaagatagatgaaacacacgagtcaccaatcgtgatgttgttacctttggttttattatcagttggcgctttatttgcaggttttttatttaaagaactatttattggttatgagggggtgaataatttttggcgtgactcaatattttttttaaaaccattgagcactgatcatcctccattatggtttttattacttactccaattttagtcattttatctattccattagcgtattatttatttttaaagaataagaatttacctgatcaaattgccaacattaataaaccgctttacaattttttattaaataagtggtactttgatgaactttatgatgttttgtttgttaaaccatcaaaaaaacttggtttatttttatggaagttttttgatttaaaaattattgatggttttggtccagatggtatttccttactaattaaaaaattttctgtaagagctaataaatttcaaagcggatatatataccaatatgcttttgtgatgttacttggcttctctgccttattaacttttttaatcgtaaaataa

SEQ ID NO: 201091 - DNA, 349 bp, Unknown
  Bacterial polypeptide expressing nucleotide sequence isolated from the Sargasso Sea
agttgcgggttatcaaactgagtattctggaatgatgtatgcaatgttttggttaggagagtatgcaaacattctgcttatgtgtgcgatgggatcaatactttttttaggaggatggctttctccgatatcaatttatccatttgatttaataccaagtcctctttggctaatttttaaaataatatttctatttgttcttttctcattagtcaaagcaattgtgcctagatacagatacgatcaactaatgaaactaggatggaaaatatttctaccactctcattagtttgggtagtattgacttcaggctatttactttattttaatttattaccagtgaattaa

SEQ ID NO: 201092 - DNA, 1180 bp, Unknown
  Bacterial polypeptide expressing nucleotide sequence isolated from the Sargasso Sea
aatgaaagaagtagagcttaatacaactacaattaactttggccctcaacatccagctgcacatggtgttttacgtttagtagttgagcttgaaggtgaagtagttcaaagagcagaaccacacatcggattgttacatagggggacagaaaaattaattgaatataaaacttatcttcaggctgtcccttattttgatagacttgattacgtttcaccaatgtgtcaagaacatgcttttgcattggcaactgaaaatctcctaggtatcaatgttcctgaaagagctaaatatattcgagttatttttgccgaaattactagaatactaaatcatttattaaatatacctgcctatgctgctgacattggtgcagtgacaccttttttatggtgttttgaagaaagggaaaagcttttggagtttcatgaagccgtatctggagcaagatttcatgcagcctattttagacctggcggcgttcatcaggatatgccagaaggaatggaagaaaaattatttgaacattttaaaactcttccaaaatttattgatgatcttgaaagcttgcttactaataacagaattttaagacaaagatcagttgatataggaataatttcaaagtcagaagcaattgaatgggggtgttctggtcctgtattaagaagcgcaggtgtagcatgggatttaagaagatctcaaccttatgacgcctatgatcaagttgattttgaagttcctgttggaaaaaagggtgattgttttgatcgatatttggttcggatagaggaaatgagacaaagcattagtattattaaccaatgtttaaataaaatcaaaccaggtccaatatcaattgaggataataaaattacacctcctaaaagaaatcaaatgaaaaaatcaatggaagctttaattcatcattttaaacttttcactgaaggttaccgtgttcccgctggtcaagtttatagtgctgtagaagctccaaagggtgaatttggcgtttaccttgtttctgatggatctagtaaaccatatagatgtaaaataagagcaccaggttttgcacaccttcaaacattggatcatttatctaaaggccacttaatggctgacattgccgctatactaggtagcttagatatcgtttttggagaaatagatagataa

SEQ ID NO: 201093 - DNA, 1156 bp, Unknown
  Bacterial polypeptide expressing nucleotide sequence isolated from the Sargasso Sea
aatgaatttaaattttggccctcaacatcctgctgcacatggagtattaaggttaattcttgagcttgacggcgaactcgtggagaaagttgatccgcacattggcttattacatagaggtacagaaaaattaattgagcacaaaacttatactcaagctttaccttattttgacagattagattatgttgctcccatgaaccaagaacatgcttttgcgttggctactgaaaaattattaaagttagacgttccaattagggctcaatacctcagggtaatattttgcgaaataggaagaattttaagtcatttattaaatgttacaacacaagctttagacgtaggagctctaacaccttcactttggggatttgaagaaagagaaacactaatgactttctatgaaagagcatctggttcaagattacacgcaaattatttcagaactggtggtgtacatcaagatgtacctaataatcttttaaaagatataggaatattctgtgaaaaatttccaaaaataatagatgatttagaaaatcttcttacagataatagaatttttaagcaaagaaatgttgaaataggaattgtaaccaaagaggaagctcttgctcatagcttttcaggagtcatgctaagaggttctggagtatcatgggatttaagaaagtcacaaccctatgaatgctatagaaacttagattttaaaatacctgtgggaaaaaatggagactgttatgatagatatttatgtcgtgttgaggaaatgagagagagcgtgaagataataaaacaatgtcttaaacaaattcctataggaccaataaaaacaatagatggaaaaatttcacctcctaaaaaagaggaaatcaaagagtcgatggaagcattaattcaccattttaagctatttacagaaggatacagagttccaaaaggagaagtttatactgcagtcgaggcaccaaagggtgaatttggagtttatttgatatccgacggaagtaacaaaccctacagatgcaaaatacgagcgccagggttttcgcatctccaagctatgaattatttaattaaaggacatatgcttgcagatgttccagcggttttaggatctttagatattgtttttggcgaggtagatagatga

SEQ ID NO: 201094 - DNA, 367 bp, Unknown
  Bacterial polypeptide expressing nucleotide sequence isolated from the Sargasso Sea
aatgatggcatctgcagctagtaggcatgatcttgaaagaattggcatgatgccacgttcatcccctaggcaggcagatgtaatgattgtggcgggtacggtaactatgaaaatggccctcagagtgaaaaaactatacgaacaaatggccgatcctaaatacgtgatttcaatggggagttgcgctacgagtggcggtccttattggcagcatggctaccatgttttaaaaggagttgatttagttgttccggttgacgtttatgttccaggatgccctcccagaccagaagctttgatcgaaggattattaaaacttcaagaaaaaatacaaaccgaacgtcccttaacaagaaaacttgcatga

SEQ ID NO: 201095 - DNA, 1423 bp, Unknown
  Bacterial polypeptide expressing nucleotide sequence isolated from the Sargasso Sea
atgaatttatatgggatatctggtgaaatctttttagcaatctctggtatgattgctctcttaattagcgttttttcaagtaaggattcaagtttaaaaattacaacaaggttttgtaatttatcattattgatatctttaattttgattgttttatctcatcaaaattcaggttatttatttaatgaaatgtatgtttatgatggtctttcactttactcaaaaatattaattatattaggaactatattaacccttcttataggaattaaacctcaaaaaattgatgattttaatcagccagaataccctgttttaattttattttctgttttgggtatggttttgatgacttcatcaaagaatttaataagtttatacatggcacttgagctgcaatctttaccattatatgtaatagctgcaattaatagggataatttaaaaagtagtgaagctgggttaaaatattttattttaggcgctttaagttcagggcttttactttttggtatgagtttagtttatggagctgttggtgatacgtctttttcttcaatctctgaagtttcaagtcaaaatatgtcaagtatacttttggtgggtttggtttttattctatcaggcttggcctttaagatatctttagtgccatttcatatgtggacacctgatgtttatgaaggtgcacctactccagttacagctttttttgctatcgtacctaaaattgcagctattacaattttggttcgggttacattttcagcttttgataatgcagttacatcctggcaacaaataataatttttctttcacttttatcaatgatattagggtcttttgctgccattatgcagactaatttaaaaagactgatggcgtattcttctatcgcgcatatgggatatgctttggttggtgtcgcatcaggattattagagggggtttcaggcgtgcttatttatttggctatttatattattatgaatgtgggtgcgtttattattattttgtcaatgaggcgtgataatcaaatagttgaagagatttatgatttaaaaggaatttctaaaactcatccattccttgcttttggttttgtaacaattttgttttcaatggcggggattcccccactagcgggtttttttggtaagtggcttgtattttattcagctgtaaatgctaatctcgtttttcttgcaataattggtgttctaacaagtgttgttggcgcattctactatctaagaattataaaaattatgtattttgatgaaaacgatgttagcctggatgttattgagaataaaagttcaatggctattttaggattaatgttatttttaactttatcatttggtttatttttgaattggtttgttgaaactacaatgggaattgtttcattaatttaaa

SEQ ID NO: 201096 - DNA, 1420 bp, Unknown
  Bacterial polypeptide expressing nucleotide sequence isolated from the Sargasso Sea
atggaaaatttaaatttaatattacctgaaatttttatttctctgtcaattatgtttttacttattttgggtgtgtttaaaaatgacagttctaaaattacttttaatttatctttgtttgcaattctaattacaacaataataacaataaatgaaactttctctgtaactagagaaactttgtttaatgaaagtgtcgtgattgacagtatgtcttcgctaatgaaaattataactttaattggaggttttttagttttagttatttcatcaacttatttaaaaacatttaaaatatataatatagaatacccagttcttattttgagttctattcttggcatgatggtaatgattagttcaaatgatttaattgttttttatatgggcttagaattgcagtcattagctctttatgttttagcaacatataatagggatcaattaaaatcatcagaagctggtttgaaatattttgttttaagtgcattatcatcgggactattattatacggatgttctttggtttatggtttttcaggttcaaccaattttgatataatatcaaatcaactaaattctgaggaatatgttttaacttttggtattgtgttcatattagttggattagcattcaaaatttctgcagttccatttcatatgtgggcacccgatgtttatgaaggatctccaacaactgtaactttgttttttacaatagtaccaaaggtagctgctttgactgtatttattagatttttatatgttccttttttaaatttaattgatcaatggcaaatgataatagttttcttatctatagcttctatggtttttggagcagttgctgctatagggcaaactaatattaaaagactaattgcttacagttctattggacacgttggttatacattggctggtttagcaacagcatcaaatgatggaattcaaagctcaataatttatatttctatttatgttgttatgaacttagctcttttttcttgtctattaatgttaagaagaaaagatcaatattacgaggatattgatgatctttcagggttatcaaaaaatcatccattattatctttaagtttattgttaatactattttctttagcaggtatacctcctctagctggattctttgcaaaattttatgtttttaaagccgtattagaacaatcaatgtattttttagctatagtaggtttattatcaaccgtagtggcagctttttattatctaagaattataaaaattatgtattttgacaaagaaaaagacaaatacgatacagaccatagcctatggttaaaactttcacttacagtttcaacgatattaattcttttatacttcatattcccaagtcagttaatagaagttgtttcaagaattaatattatttaat

SEQ ID NO: 201097 - DNA, 487 bp, Unknown
  Bacterial polypeptide expressing nucleotide sequence isolated from the Sargasso Sea
atgaaaatttcacgattattaaaaactatattcatgattgattttgtgactagtttattaattgcaataaaagagacttttaaggcaaaaaagacaatcaattatccttttgaaaaggggtctttaggaacaaggtctagaggggagcatgctcttagaagatatcctaacggtgaagaaagatgcatagcgtgtaagctttgtgaagctgtatgtccagcccaagctattacaattgagtctaaggaaagagatgatggcagtagaaaaactgtaagatatgacattgatatgcttaagtgtatatactgtggactttgtgaggagtcatgtccagtagatgcaattgttcaaggtcctaattttgaatttgcaacagaaactagagaagagctttattatacaaaagaaaaacttttggaaaatggagacaggtgggaaaatattttagctgccaatataaaggctgatagttctcacaggtagt

SEQ ID NO: 201098 - DNA, 487 bp, Unknown
  Bacterial polypeptide expressing nucleotide sequence isolated from the Sargasso Sea
atgaaactaaatcgtattttaaagattatttttttatcagaatttatcaagtctttagcaattgcttttaaagaaatttttaagaagaagaaaacaattaactatccatttgaaaaaggagcaataagtccaagatttaggggtgaacatgctttaagaagatatccaaacggtgaggaaagatgtatcgcttgcaaattatgtgaagccgtatgtcctgctcaagctataactattgagtctgaagagcgtgcagacggtagtagaaaaacaactcgttatgatatcgatatgcttaagtgtatttattgtggtttgtgtgaggagtcttgtccagtagatgccattgtacaaggtcctaattttgaatttgcaactgaaactagagaggagctttattacaacaaagagaagttgcttaagaatggagatcaatgggagtcagttttggataaaaatttaaaactggataaaccctacagataat

SEQ ID NO: 201099 - DNA, 640 bp, Unknown
  Bacterial polypeptide expressing nucleotide sequence isolated from the Sargasso Sea
attgttacccgttttagtttcagtcgcaatgatagtttggcttgatagaagagtttgggcatttgttcaaaaaagaagaggacccaatgttgttggtccctttggtttatttcaatctttagcagatgctttaaaatatatttttaaggaagtaatcattccagcaagcgcaaataaagcagtatttatattagcaccaatagttacaatgactttggcattaatatcatgggcagtaatcccttttagtgaaaattttgttttagcagatattaatgtgggtatactttatttatttgctgtatcttccttaggtgtctacggtataattatgggaggctgggcatcaaattctaaatacccttttttgggagcgataagatctgccgctcaaatggtttcttatgaagtatcaattggtgtaataattataaatgttttactttgtgttggatctctaaatttaagcgatattgttcttgcacaaaaaaacctatggtttgtaattcctttatttccaatgtttataattttttttatttctgcacttgcggaaactaacaggcctccatttgatttgcctgaggctgaagctgaattagttgcaggttatcaaactgaatattcaggtatgatgtat

SEQ ID NO: 201100 - DNA, 487 bp, Unknown
  Bacterial polypeptide expressing nucleotide sequence isolated from the Sargasso Sea
atgaaaatatccagattttttaaaacaatatttatggctgactttgtaagtggtctagctattgctattaaagaattatttaaatcaaaaaaaacaataaattatccatttgaaaaagggaagataagtccacgttttagaggtgagcatgcattaagacgatatcctaatggagaggaaagatgtattgcctgcaaattgtgtgaagctgtctgtcctgctcaagctattacgatcgagtcatctgaaagagaagatggaagtagaaaaacaactcgttatgatattgacatgatgaaatgtatttattgtggattgtgtgaggagtcttgtcctgtagatgcaattgttcaaggaccaaattttgaattttctactgaaacaagagaagaactttattacacgaaagagaaacttttagataatggtgacagatgggaaaatattttagaggctaatattaaagctgacagttcccacagataga

SEQ ID NO: 201101 - DNA, 316 bp, Unknown
  Bacterial polypeptide expressing nucleotide sequence isolated from the Sargasso Sea
tggtgaagaaagatgtattgcctgcaaattatgtgaagctatatgtcctgctcaagccattactattgaatcagctgaaagagaagatggaagtcgtaaaacaacaagatatgacattgatatgttaaaatgtatatactgtggactttgcgaagaatcttgccctgtggatgcaatagtgcaaggtccaaattttgaatttgccacagaaactagagaagagctttattacaacaaggaaaaattacttgataacggagacagatgggaaaccatcttagctgcaaatattaaagcagataaaccatttagataa

SEQ ID NO: 201102 - DNA, 852 bp, Unknown
  Bacterial polypeptide expressing nucleotide sequence isolated from the Sargasso Sea
gatgttaagcatattaatttggttgccggtgatcggaatcatcccggtgttgtgttacaaccgccctgagcaggcgaatatagcgcgcagtatcgcgttgttggtggcgttagtgcatctattgctctgtgctgtcatgattcatcatttcgatgccagtaagggtgatctgcaatttgtggagtggacgaactggattccggtgatcaaggtgcattattacttaggcgtggatggcatttcaatgccgctggtggtgttaaccagttttacgacgttaatcattgttttggcgtcgtggaccatggtgagtgagaaggtcgctcagtatttggcggcatttttattaacacaggcgatggtgattggcgtgttttgcgcattggatgccgtgttgttttatgtgttctgggaagcaatgttaataccgatgtacatcagtattgggatttggggtggtgcgaaccgatcgtatgcagcgatcaagtttttcatgtacacgttttttggatcagcgttgatgttggtggccttattgtacatgcggatgcacacggggacatttaatattatgcaatggcacaatgcgccgctgggcttgtggccgcagcagtggttatttgtggcctttttctttggtttcgcggtcaaggtgcccatgtggcccttgcacacctggttaccggacgcacacacggaggcaccaacgggtggctcggtggtgttggcggcgttgatgttgaagctggggggatatggtttcttgcgctttagtttgccgatcgtgccggatggctgtgcgtggtttgcctgggcgatgattatcttgtcattgattgcgattgtgtatgt

SEQ ID NO: 201103 - DNA, 916 bp, Unknown
  Bacterial polypeptide expressing nucleotide sequence isolated from the Sargasso Sea
gctatttctcaattaggtccggattctaatcttgcactaattttatcaatcgtatttatcttagttggtttaggatataagatttcagcagtcccatttcatttttggacaccagatgtgtatgagggttctccaacttccattaccgcttatctttctgtagctcctaaagccgcaggtttcgcccttattataaggtttttcaatatagcttttggatcaaatagtgcgatgggatcagatgcgtggtcatcgttaaatagcttgccttggccatttctaattgcattgctttcagcagctacgatgacaattggtaatttggttgccattcaacagcaaagcgtgaaaagaatgctggcatattctagtatagctcacgctggatatatgatgatggccattccagtaatgtctcaatctggtatatatggaattatgatttatttattcatgtatatgctcatgaatcttggtgctttttttgttgtaatgtatgtccaagataaatttgatggtgaaaactttgactctttcaatggcttaggatggaagatgcctttgttaggaatttcaatgactttgttcatggttgcgcttaccggacttccaccaacatctggttttgttggtaagttttacatttttgctgccgttatcgaagctggaaatcaatattattggttagcatttgtgggtgtcattaatagcgttgtttcattgtactactacattaaagtcgtaagacacatgtattttgagggggaaagaagtgacattgtgtcgttaccggagtcaaaattaacaacatcgcttgtgcttgtccttgctctcccaacttttttcttaggttggtattttagcccactggttgagtgggctaataattcacttaatttctttttgggtatttaaa

SEQ ID NO: 201104 - DNA, 853 bp, Unknown
  Bacterial polypeptide expressing nucleotide sequence isolated from the Sargasso Sea
aaatcaaaagatggaagatgttattattgtccaattatagatgataatgctggattaattaatgacccagttgttctaagatttaatgagaataaatggtgggtttctattgcagatacagatgtaattttatttgctaaaggattggcaattgggaataaatttgatgtaaatattatcgaacctgaagttgatattatggctgtgcaaggacctaaatcatttaaattaatggaaaaagtttttggtgaaaaaataacaaatttaaaattttttggttttgattattttgattttgctggagccaaacatttaattgctcaatcaggatggtctaaacaaggtggatatgaaatttatgtagagaataatgaggcgggtttaaaactatacgatcatttatttgaaattggagatgagtttaatattagagcaggatgtcctaatttaattgaacgtatcgaaagtggattactttctcaaggaaacgatatggacaatggagacaacccatacgaatgtggctttgataaatatattaatattgatagtgatgttgaatttttaggaaaagagcaattaaaaaaaataaagtctgaaggaattaaaagaaaactaatgggcgttaaaattgatactgataaaataagcgtaactggttcaatgaatttaacagatgaaaaaaataatataatcggagaactacgatcaggttgttacaatccaacttttaaacaggtaattggtatagctatgataaaaaaaccatattttgaagcaaagcaaacattcaaaattgatataaatggtaatagttttaacggaacagtttgcgatttacctttcatttagt

SEQ ID NO: 201105 - DNA, 310 bp, Unknown
  Bacterial polypeptide expressing nucleotide sequence isolated from the Sargasso Sea
atgaacattgtcagacttctaaaaattatattccttgtcgagtttatatctggattatacatggcaattaaggagttattcagaaaatcaaaaactataaattatccttttgaaaaaggagcaattagcccgcgtatgagaggtgaacacgcacttagaagatatcctaacggtgaggaaaggtgcattgcatgtaaattatgtgaagcagtgtgtcccgctcaagctataaccattgagtcgactgagagattagacggtagtagaaaaacactcgatatgatattgatatgctttaatgtatttattg

SEQ ID NO: 201106 - DNA, 487 bp, Unknown
  Bacterial polypeptide expressing nucleotide sequence isolated from the Sargasso Sea
atgaattttagtaggctattaaaaactatatttctagttgagtttatatcgggtctctacatggcagtaaaagagttgtttagaaaatcaaaaacaattaattatccttttgaaaaaggcccaatcagtcctcgaatgagaggagaacatgctttaagaagatatccaaacggagaagagagatgtatagcttgtaaattatgtgaagctgtttgccctgctcaagctattactattgagtcttcagagagatcagatggaagcaggaaaacaactcgttacgatattgatatgcttaaatgtatttattgtggactatgtcaagaatcttgcccagttgatgcaatagtacaaggaccaaactttgaatttgcaactgaaacaagagaagagctttattataataaagaaaaacttttagaaaatggggataggtgggagtcagtcctggcaaaaaatatcaagctggataaaccttatagataaa

SEQ ID NO: 201107 - DNA, 1414 bp, Unknown
  Bacterial polypeptide expressing nucleotide sequence isolated from the Sargasso Sea
tatgactgaaattaaatatatatctcctgaaatcatcttattgatttcaatattttcattattaatgattggggtatttattaagaaaagtttcaacattgtttatagattatcaaatttagtattagcgcttactctttttgtagttttaagcggaaattatgaaacaacaaaaatcttcgacgaaagcattatcatagataatttttctacttttatgaaatcgttaatattaatttcatcttttttcattttatcaatgtcaaaaaaatacttggtagatataaaaaataataagtttgaatacccaattatagttatcctttctattttgggaatgtttataatggtaggatcaaatgatttgattgttttttatttgggattagaactccaatcattatctttatacatattagctgctatagacagagataattccagatcttcagaagcaggtgtaaaatattttgttttaagcgcattatcttctggccttttactttatggttgttctctattgtatggattttctggttcaactaattttgagattattcttttaaactctgataatgaaaatgtaggcaatatatttgccatggtatttattttggtgggtcttgcttttaaagtttctgccgtaccttttcatatgtggacacctgatgtttacgaaggttctcccacaactgttaccatgttcttttctgtagtacctaaaattgcaggattagcagtttttataaaatttatgtatgtacctttttattcagttttagacgaatggcagtatattttagtcttcatatctatagcatcaatgattttaggagcggtagcagctattggtcaaaacaacatcaaaagattaatcgcctacagctccattggtcacataggatatgctattgccggtatagcagcaggaacagaaaacggatttagaaacgcaattgtttatatgaccatttacgcagtaatgaatattggcgccttttcatttgtacttttaatgaaaagaggagaaaaatatattgaggaaataagcgaactttcgggtgcatcaaaaaatcaccctttgatgtgttttggattgctaacaatattattttcattggctggtatacctccgctggctggtttttttgcaaaattttatatttttatgtcagtcatagaaagcggaatgtttggtttagcaatagttggattagtcactactgttgtatctgctttttattatattagaattgtaaaaataatgtattttgatgagtccaaaaaacctttcgaaaacttcaaagatgtaagtatacatggttctttaattttaagttcaatgatattaattgctttttttctttatccctctgcattaaacgatgttgtatcaaaaattactattttttaa

SEQ ID NO: 201108 - DNA, 414 bp, Unknown
  Bacterial polypeptide expressing nucleotide sequence isolated from the Sargasso Sea
gatggtaaaaaaaactaaatcattgaatttaaattttggccctcaacaccccgcagctcacggtgttttgagactaattttagaactcgatggagaggttgtcgaaaaagcagaccctcacattggattgcttcatagaggaactgagaaacttatagagcagaaaacttatacccaagccctaccttattttgatagattagattacgtcgctccaatgaatcaagaacatgcttttgccttagctgcggaaaaattactaaaaattgaggttccgatacgcgcaaagtatataagagttatattttgtgagattggtagaatactaagtcatatattaaatgttactactcaggcattagatgttggagcattaaccccctcactttggggcttcgaggaaaggggaaactt

SEQ ID NO: 201109 - DNA, 220 bp, Unknown
  Bacterial polypeptide expressing nucleotide sequence isolated from the Sargasso Sea
atgaacaataaattagatcaagtccctgaagagtttaaacaattagctgatgatttcagtaaaaatggatttattactacttcattagacaatttaataaattggtcaagatctggatcattacattggatgacttttggtttagcttgttgtgcagttgaaatgatgcaaactgcaatgccaagatatgatcttgaaagatttggagcagctcccagag

SEQ ID NO: 201110 - DNA, 355 bp, Unknown
  Bacterial polypeptide expressing nucleotide sequence isolated from the Sargasso Sea
cgatttagaggcgaacatgctttacgaagatacccaaatggagaagagagatgtatagcttgtaaattatgtgaagcagtatgtcctgcacaagcaataactatcgagtcagctgaaagagaagacggaagtagaaaaactacacgttacgatattgatatgatgaaatgtatttattgtggtttgtgtgaagaatcttgccctgtagatgcaatagtacaaggtccaaattttgaattttcaacagaaacaagagaagaactttattatacaaaagaaaaattattagataatggagatagatgggagaatgttttggaggctaatattaaagctgacaatatccatagataaa

SEQ ID NO: 201111 - DNA, 1177 bp, Unknown
  Bacterial polypeptide expressing nucleotide sequence isolated from the Sargasso Sea
atgacaaaaaaaattaaaaatttaaatttaaattttggtcctcaacatcctgctgctcatggagtattaagattaattttagagcttgacggtgaagtagttgaaaaagcagatcctcatattggattattacacagaggtactgaaaaattaattgagaataagacttacatgcaggctgttccatattttgatcgattagactatgtcgctccaatgaaccaagagcatgcttttgctttagcaactgagaaggttcttaaaattgatgtcccaatcagagctcagtacataagagtaattttttgtgagataggaagaattttaagtcatattttaaatgttactacacaagctcttgatgtaggggcattaactccatctttatggggttttgaagaacgggaaacattaatgactttttatgagagagcatcaggttctagacttcatgcaaattattttagagctggtggtgttcatcaagatttacctcaaggactagaagaagatattgcaaaattttgtgaaacatttccaaaaattattaatgatttggaaagtttattaactgataatagaatttttaaacaaagaaatgtggatataggtgttgttacaaaagaggatgctttagactattctttctctggcgttatgattagaggatctggagttccatgggatttaagaaaatctcaaccatatgattgctatgaacaattagaatttaaaataccagttggtaaaaatggagattgctatgatagatacttatgcagaatagaagaaatgaaagaaagtgtttcaattataaaacaatgtctatcaaaaatggaaaaagggccaattaaatcattagatggaaaaataagtccaccatcaaaaaaagagattaaacaatcaatggaagcccttattcatcattttaaactttttactgaaggctaccgtgtccctaaagacgaaatttatactgctgttgaagctccgaaaggtgaatttggtgtttatttgatttcagatggatctaataagccgtacaaatgtaaaataagagctccaggattttcacatctccagtcaatggattatttaattaaaggtcacatgttagcagatgttccagcagttttgggttccttagatatagtatttggagaggtggatagatgag

SEQ ID NO: 201112 - DNA, 1083 bp, Unknown
  Bacterial polypeptide expressing nucleotide sequence isolated from the Sargasso Sea
gaagacttagaggtacaccatatacttctcgaattgaggaacagggtgttacagcttatacaatttataaccatatgttgcttccagctgcctttggttcaattgaagattcttattatcatttaaaagagcatgttcaaatttgggatgtagcagctgaaagacaggtagaaatttcaggaaaagattctgcaaaattagttcagctaatgacttgtagagatttatcaaaatctaaagatggaagatgttattattgtccgattatagatgataatgctggattaattaatgatccagttgttttaagaattaatgaaaataaatggtggatttctattgcagatacggacgtaatattatttgcaaaaggattagcaattggaaataaatttgatgttaaaatcatagagccaaaagttgatatcatggctgtacaaggtccaaaatcatttcaattgatggaaaaagtatttggagaacagatcacaaaattaaaattttttggttttgattattttgaatttggaggtgcaaaacaccttatcgcacaatctggatggtctaaacaaggaggttatgaagtatatgttcaaaatactgaagcaggcttaaaactatatgatcatttatttgaaattggaaaagaatttaatattaaaccagggtgtcctaatttaatagaacgaatcgaaagtggactgttatctcatggcaatgatatggataacggagataatccttatgaatgtggttttgataaatatgtcaacatagatagtgatgttatttttttaggaaaagaaaaattaaagaaaataaaatctgaaggtataaaaagaaaattaatgggtgttaagttagatttggacaaaataagtttaacaggatctttagatctggctgatgataataacaaaatcattggggaattaaggtcagcctgttattcgcctcattttaaaaaagtaattggtattgctatgatgaaaaaatcgcattggaatatagaccagaacgtaaaagcaagcataaatggtgatatttgtagtggtaaagtttgcgatttaccttttatttagt

SEQ ID NO: 201113 - DNA, 1417 bp, Unknown
  Bacterial polypeptide expressing nucleotide sequence isolated from the Sargasso Sea
atggaaaatttacaatatatattacctgaaatctttatatcggcatctataatgttattcttattagttggagtttttaaaaaaaatagtgcgagtctaatttataatttatctaatatatctttagttatcttattggcactaataataaatctcagctcattagataaagtttacttattcaataattcatatttgatagataatttatctaattatatgaagattatacttgtcggatctggaatttttgtaatgttaactggatcaaaatatattcaagtaatcaatttaaataaaattgaatatccaatcctcatattaagcagcattttgggaatgatgataatgataagttcaaatgatttaatagttttttatatgggtcttgaacttcaatcattagctttgtatgttcttgcatcatttaatagagataatttactttctacagagtctggactaaaatattttgttcttagcgcattatcatctggtttattattgtatgggtgctcattaacttatggattttctgaaagtacaaattttaatcaaatacttataaactctactgaatttaattatggtaccacgtttggaatagtctttattttggttggtcttgcatttaaaatatcagccgtgccttttcatatgtgggctccagatgtttatcaaggctccccaacatctgtaacattattctttgctatacttccaaaaatagctgcactttctgtattcattaagtttttgtacacaccttttgctaatatgaatgatcagtggcaaactattattgtatttatttcaatagcttcaatgatatttggtgctgtagcagctataggtcaaaaaaacttaaaaagattaattgcttatagttcaattagtcatatgggctatgctttggctggattagcaacagttagcaatcaaggaatacaaagctctattacatatatatcaatttatttagtaatgaatttagcgttttttagctgtttatttatgctcaaaagaaatgagaaatattatgaaaatatagaggacttgtcaggactttctaaaaaacatccaattttatctttctcattattgatagttttgttttctttagctggtatacctccacttgcaggtttttttgcaaagttttatgtgttcttagctgttatagaacaatcaatgtattttttagcaattgttggattgctagcaaccgtcgtagcagctttttattacctaagaattataaaaattatatatttcgatccagaaaaagaagaatatgaaacatcacacaatctaggattaaaaattactttggctatttcaacaatatttattttagcatactttatatatccaagcagcataacagaaatagtatctaaaattaccttgatctaat

SEQ ID NO: 201114 - DNA, 427 bp, Unknown
  Bacterial polypeptide expressing nucleotide sequence isolated from the Sargasso Sea
tctggcgatcaaagaattatttagtaaatcgaaaactataaactatccttttgaaaaaggatcgataagcccacgtatgagaggggagcatgctttaagaagatatcctagtggagaagagagatgtattgcctgcaaactatgcgaagcagtttgccctgcccaagcgattacaattgagtctactgaaagagcagacggaagcagaaaaactacaagatatgacattgacatgcttaaatgtatttattgtggactatgccaagaatcttgtccagtagacgctatagttcaaggaccaaatttcgagtttgcaactgaaacaagggaggaactttactataacaaagaaaaacttttggcaaacggtgatagatgggagtcagttttagcaaaaaatattaaactagataaaccatatagatag

SEQ ID NO: 201115 - DNA, 487 bp, Unknown
  Bacterial polypeptide expressing nucleotide sequence isolated from the Sargasso Sea
tatgaaaatttcaagattattaaaaaccatatttatgattgattttttaactggtttaataattgctattaaagaaatttttaagcaaaaaaaaacaattaattatccacatgagaaaggtgccataagcccaagaacaagaggtgagcatgccttaagaaggtatcctaatggagaagaaagatgtattgcttgcaaattatgtgaagcagtttgtccagcgcaagccatcacaatcgagtctaaagaaagagaagatggaagtagaaaaactactagatatgatattgatatgattaagtgtatttactgtggattatgtgaagagtcgtgtcctgttgatgcaatagttcaaggtccaaattttgaattttcaacagaaacaagagaagagctttattataacaaagaaaaattattagaaaatggagatagatgggaaagtatactagcagcaaacattaacgcagatagctctcacagataa

SEQ ID NO: 201116 - DNA, 739 bp, Unknown
  Bacterial polypeptide expressing nucleotide sequence isolated from the Sargasso Sea
aatgactaaagaaaaaaaaaccttaaatcttaattttggtccccaacatcctgccgcacatggagttttaagattgattttagagttagatggtgaagtcgttgagaaggctgatccacatattggattgttacacagaggaactgagaaacttatcgaatataaaacatacactcaggcggtaccttattttgatcgacttgattatgttgctccaatgaaccaagagcatgcttttgctttggctgttgaaaaaattttaaacatagatgttcctataagaggacaatatattagagttattttttgtgagataggaagaatactaagtcatatattaaatgttacaactcaggcaatggatgtaggagctttaacacctacattatggggctttgaagagagagaaaaactaatgggtttctacgaaagagcgtccggatctagattacatgcaaattattttagacctggaggcgttcatcaagatctaccaagaggtttacttgaagatataacaaaattttgtgaaaattttccaaaaataattgatgatttagaaactttattaactgataacagaattttcaaacaaaggaatgtagatataggaattgtatcaaaacaagatgctctagattattctttttctggcgtcatgttaagaggatcaggtgttccatgggatttaagaaagtcccaaccttatgattgttataatcaaatagatttcaaaatt

SEQ ID NO: 201117 - DNA, 1060 bp, Unknown
  Bacterial polypeptide expressing nucleotide sequence isolated from the Sargasso Sea
atggcatggcttccaacaagtgaatcttggcctggtcttacatttatttttgttgtaatagtatgtgccgttccagtatttctttttattgcagtatatgctttagttgctatttatggtgaaaccaaaatttcttcttttatacaagacaaagttggcccaatggggcaaggtgttggtttacacgcttggagatggggtcttcttcaacctgtcgctgatgcattaaaattaattttaaaagaagatattattccttcatctgctgataaaaaattatttattttagctccttttattgtatttattggtgcatttattgctttttcagcattaccattcagtcaaacaataatcatagcagatatgaatattggtgttttctatattttagctgtcagctctctaggggtaattggtttaatattagcagggtggagttcaaataataaatggtcattatatggcgctatgcgttctgctgctcagattgttagttatgagattcctgctgccttatctatagttacagtaattatgttgacaagcacaatgagtatgcaaggaattattcattatcaaagtggcctagtatgggggtttctacctaattggttaatatttaacaacccattcacttttttagctttttttattttttttattagtggtcttgcagaatgtaatcgtactccttttgatattcctgaagcagaatcagagcttgtggcaggtgcatttactgaatattcgggaatgcgatatgcttttttctttttaagtgaatacgcaaatatgtttgttgttagtggtgtggctgcagctgcttttttaggaggatggcaaagcccaattccaggaatgtttaattcgcctggatggggtttattttggtttttgagtaagagtatgtttttgatatttgttatgatttgggtgcgctggacttttccaagattgcgagtggatcaattaatggatgtttgctggaaaggatttattccaatttcattggtaaatatttttggcataggtatttggtatttaattataggataaa

SEQ ID NO: 201118 - DNA, 1492 bp, Unknown
  Bacterial polypeptide expressing nucleotide sequence isolated from the Sargasso Sea
gatgaataatttaaatagtttagtattcttttggcctgaacttatattgagcgtcactatactagctgctgtaattgcggatctattttatcaaagaaaagactctcataaggttgcatattggtctattggtggattaatactagcctatattgctattcgacttcaaagcgctgcgccgatgggtctatttatggatactgttgccttagatccattttctcaattttttaaaatattgattttactctcaactattattgttatgttgattagttttatttctggagagcttaaagaatacaggttaggtgaatattttagtattatgactattatgacatttggcttgttcctaatgtcatcatctattgatatgttaatggtatatttatcaattgagattgtttcaattatgtcattctttcttgctggttatctcaaaagaaattcttcaagcaatgaagcttcattaaaatatgtcatttatggtgctttttcatccggtattatgctttatggttttagtttattgtttggcctgactggatcaacaaattttttcgaaatgcaatctgcaattgcagctttagggccagaatcaaatttagctttggtgcttgcaacagttttcattcttgtgggttttggatataaaatttcagcggttccatttcatttctggacccctgatgtatatgaaggatccccaacaacaattacagcatatctttcagtggctccaaaagctgcgggttttgcattgttaattcgtttttttaatcaaatttttggcaatatgtctgaaggcatgacaagttcttggtctgctgtgaatgaccttccgtggcccgaattgattgcaattctatctgccgctacaatgacccttggtaatcttgtagcgattcagcaaaataacgtaaagcgaatgttggcgtattccagtattgcgcacgctggctatatgatgatggcgctacccattatgtctaatacatcaattgaaggtataatgatgtatttgattatgtatttattcatgaatcttggagctttttttgtcgtgatatatgttaatgatcagataggcggtgaggagtttagtcattttgatggccttggttggaggatgccgattgttggtatcgcaatgaccttattcatggttgctcttactggattacctccaacggcaggatttgtaggaaagttctatatttttgcggctgtgatagaagctggttctaagttttactggctagcctttgttggcgtaattaatagcgttgtgtcgttgtattattatatacgcgttgtaaagcatatgtatttatcaggagagcgtagtgatgaattggttaatccctcatcaaagctcgccttggttattttgttagttctagcaatcccaagttttgtttttggctggtattttagtcctgttgctgaatggatttctaggtcaacgatcatgtttcagggtatgtaa

SEQ ID NO: 201119 - DNA, 802 bp, Unknown
  Bacterial polypeptide expressing nucleotide sequence isolated from the Sargasso Sea
atggattttaaaaataaagttgttgtaattaccggtgcatccagcggaattggtgaagcagcagctgaacaatttgcgaaaagaggcgcaaatctagtcttagttgcacgaagaaaagagaaattagaacaagttgcgcaaaaactttcaaaatattcaatcaaaactttgattcaggtttgtgatgtgtctgacaaacaacaagttaaagaaatgtctgaaaaagtaattgagacattttctagaattgatattttagtaaataatgcaggatttgttatctatggaaaagtagaagaattgtccattgaagatattgaatctcaaatgcaaacaaactattttggtacaattaactgcacaaaatattttcttccgcactttcttaagcaaaattctggtcatatggttaatgtggcatccgttggtgggagctttggggtacctggtattgcatcttactgtgcaacaaaatttgcaatgttgggattttctgagggcttacaccatgaactgcatggaactaatgtcggggtaactgttgttagtccaataatggttagaacaagcctgtttgatcatccctctttcaaaaatttcacaaaatttgcaaccggaatttcgttaagtgctgataccgttgcaaacgcaataatcaaagcctcagattcatctaaattagaaattgttgttccatcttttgtaagaattggaatatggtttaaacaaacattcccatttttgattaatcctattattggaaatagattcagaaaacagcttgagaaaagagactcttaga

SEQ ID NO: 201120 - DNA, 361 bp, Unknown
  Bacterial polypeptide expressing nucleotide sequence isolated from the Sargasso Sea
tatggacaatggagataatccatatgagtgtggttttgacaagtatgtaaatatagatagtaatgttgatttcttaggtaaagaaaaactaaaaaaaattaaagctgaaggaattaaaaaaaaacttatgggagtaaaaattgatgccaaggaaataagtgttaatggctcaatggatctagtagatgaagataataatgtaattggagaattaagatctggttgttacaatccaacttttaaacaagtcattgggattgcaatgattaacaaaccacactttgagacttcgaaatcctttaaaatcaatataaatggctctgattttcatggaaaagtttgtgatttacctttcatttag

SEQ ID NO: 201121 - DNA, 1360 bp, Unknown
  Bacterial polypeptide expressing nucleotide sequence isolated from the Sargasso Sea
aatggaaaattttcaatacatattacctgaaatcttcatatcggtatctataatgctgtttttactagttggagttttcaaaaaaaatagcgcaagtttaatttataatttatctaatatatcgttagttattttattggcactaataataaatctcagctcattagatacaatttacttattcaatgaatcatatttaatagacaatttatcaaattatatgaagattatacttgttggatctggaatttttgtaatgctaactggatccaaatatatccaagttatcaatttaaataaaattgaatacccgatcctcattctaagcagcattttgggaatgatgataatgataagttcaaatgatttaattgttttttacatgggccttgaactacaatcattagctttgtatgttcttgcatcttttaatagagacaatttactttctacagaatctggactaaaatattttgttcttagcgcattatcatctggtttgttgttatatggttgttcattaacatatggattttctgaaactacaaattttgatcaaatacttataaactctactgaatttaattatggtaccacctttgggatagtctttattttagttggtcttgcatttaaaatatcagcagtaccttttcatatgtgggctccggatgtttatcaaggttccccaacatctgtaacattattctttgctatacttccaaaaatagctgcgctatctgtattcattaagtttttgtacacaccttttgccaatatgaatgatcagtggcaaactattattgtatttatttcaatagcttcaatgatatttggtgctgtggcagccataggtcaaaaaaacttaaaaagattaattgcttatagttcaatcagtcatatgggttatgcgttggctggattagcaacagttagcaaccagggaatacaaagttcaattacttatatatctatttatttggtaatgaatttagccttttttagttgcttatttatgctgaagagaaatgataaatattatgagaatatagaggatttatctgggctttctaaaaaacatccaattttatctttctcattattaatagttttattttctttagctggaatacctccactagcaggcttctttgctaaattttatgtttttttagctgttatagaacagtcaatgtattttttagcaattgttggattattagcaactgtagttgcagctttttattatctaagaattataaaaattatatattttgatccagaaaaagaagaatacgaaacatctcataatctaggattaaaaattactttggctatttcaacaactatttattttagc

SEQ ID NO: 201122 - DNA, 1048 bp, Unknown
  Bacterial polypeptide expressing nucleotide sequence isolated from the Sargasso Sea
aatgactaaagaaaaaaaaacgcttaatttaaattttggtccccagcatcctgctgcgcatggtgttttaagattaatattagaattagatggtgaaatagttgaaaaagcagacccgcacataggtttattacataggggcactgaaaaattaattgaaaacaagacttactcccaagctataccttattttgatcgacttgattatgttgcacctatgaaccaagaacatgcatttgctcttgcgatagaaaaaattatggatgttgaggtcccaattagaggtcaatacattcgagtaatattttgtgaaattggcagaattttaagtcatattttaaatattactacgcaagcattagatgttggagctttaacaccttctctttggggctttgaagaaagagaaaaactgatgggtttttatgaaagagtatctggttcaagattacatgcaaactatttcaggccaggcggtgttcataaagatttaccaagaggattggagaacgacattttagaattttgtaaaacattcccaaaaataattgatgatttagaaacattattgacagataacagaatattcaaacaaagaaacgttgatattggaattgtgtctaaagaagatgcattgaattactctttttcaggagtaatgcttagaggttcaggaataccctgggatttaagaaaatcacaaccctatgattgttatgaacaaatagattttaaaattccgattggaaaaaatggagactgttatgataggtatttgtgtagaattgaagaaatgagagaaagtgtaaaaattatcgaacaatgcttaaaaaatctgcccaaaggtccagttaaatcaatggataacaaacttactcctccaccaaaaaaagagattaaacaatcaatggaggctttaatacaccattttaaattgtttactgagggatatagagttaaaaaagatgaaatttatactgctgttgaggcgcctaaaggtgaatttggggtttatttaatttcagatggaaccaacccagaccctata

SEQ ID NO: 201123 - DNA, 1267 bp, Unknown
  Bacterial polypeptide expressing nucleotide sequence isolated from the Sargasso Sea
tttgagtagctatttttttacgcattttgcactacatacaataggaacattgggtggaggtatatctaatttcccttggctctcagtatctattcttttccctattggatgcgcatttttgataccttttttccctgataaaggagagggtaaagaagtaagatggttcgctttaagtgttgctttaattacttttctagtaacagtaggatcttacataaacggttttgatataaataatgaagatgttcaacttaaagaaagtataaattggcttcctaatctaggacttacttggtcagtcggcgctgatggaatttcaatgcctcttatattattaactagttttataacggcactagctgtcttagctgcatggcctgtaaagtttaagccaaaattatttttctttttaatacttatcatggatggaggacaaatagctgtttttgctgttcaagatatgcttctattctttttaagttgggaactggaacttctaccagtttatttacttttggctatctggggaggaaaaaatagacaatatgcagctacaaaattcattatctatacagccgggagttctatctttattcttttagctgcgttggcaatgggtttttatggaactgaagttccaaattttgagttttctcatttagctaatcaagattttggccaaaactttcaaatcctttgttacatcggtttattaattgcttttggtgtgaaactacctattgttcctttacatacatggctacctgatgctcatggagaggctacagcacctgttcatatgttgttggctggaattttattgaagatgggcggatatgcacttttaagatttaatgcacaattattacctattgcacatgctcaattcgctccactattaatactccttggagtagtcaatataatttacgctgctttaacatcatttgcacaaagaaatcttaaaaggaaaattgcttatagttctataagtcatatgggttttgtcttaattggaataggaagttttagtagtcttgggacaagtggagcgatgttacaaatggttagtcatggactaattggagcaagtttattttttcttgttggagcaacttatgacagaacaaagactctaaaactagatgaaatgggtggagtaggccaaaaaatgcgaattatgtttgcattgtggactgcctgctctcttgcgtctcttgctttaccaggtatgagtggatttgtttctgagttaatggtattt

SEQ ID NO: 201124 - DNA, 487 bp, Unknown
  Bacterial polypeptide expressing nucleotide sequence isolated from the Sargasso Sea
tatgaaaatttcaagaataataaaaactatttttctaatcgattttttaaatggattgttaattgctattaaagaagcatttaagtcaaaaaaaacattaaattatccttttgaaaaaggaaagattagtccaaggttcagaggtgagcatgctttaagaagatatccaaatggtgaagagagatgcatagcctgtaaattatgtgaagctgtttgtcctgctcaagctataaccattgaatctactgaaagagaagatggaagcagaaaaacaacaaggtacgatattgacatgctcaaatgtatatactgtggcttgtgtgaggagtcttgtcctgttgatgcaatagttcaaggccctaattttgaattttcaaccgaaacaagagaagaactttattataataaacaaaaactactagataatggtgatagatgggaaagtgttttagctgctaatattaaagctgataatccttacaggtaa

SEQ ID NO: 201125 - DNA, 487 bp, Unknown
  Bacterial polypeptide expressing nucleotide sequence isolated from the Sargasso Sea
aatgaatttaaacagatttttaaaaactatttttttagctgaatttataaaaggactatttattgctataaaagaaatttttaaaaaaaagaaaacaataaattatccatttgaaaaaggaagtattagcccaaggtttagaggagaacatgctttaagaagatatccaaatggagaagagagatgtatagcatgcaaactttgtgaagctgtttgtccagctcaagcaataactatagaatccgaagaaaaagacgatggtagcagaaaaacaactagatacgatattgacatgcttaaatgtatttattgtggattatgcgaagagtcgtgcccagttgatgcaattgtacaaggtccaaattttgagtttgcaactgaaacaagggaagaactttattataacaaagaaaaattattagataacggagatagatgggagtctgttttggctcaaaatattaaacttgataaaccgtataggtaa

SEQ ID NO: 201126 - DNA, 487 bp, Unknown
  Bacterial polypeptide expressing nucleotide sequence isolated from the Sargasso Sea
tatgaatataattcgaatttttaaaacagtatttttaattgattttttaacaggcttattgatagctattaaagagtcatttaaaccaaaaaagactcttaattatccttttgaaaaaggcaagatttcaccacgatataggggagagcatgccttaagaagatatccaaacggtgaggaaagatgtatagcatgtaaactttgtgaagctgtttgtccagctcaagcaataacaatagagtctacagctagagaagacggaagtagaaaaacgacaagatacgatatcgatatgctaaaatgtatctattgtggtttgtgtgaagaatcgtgtccggttgatgctatagtgcaaggtcctaactttgaatttgcaacacatactagggaagaactttactacaataaagaaaagcttttagaaaatggagatagatgggagaatgttttagctgcaaatataaaagctgataacccgtatagataa

SEQ ID NO: 201127 - DNA, 259 bp, Unknown
  Bacterial polypeptide expressing nucleotide sequence isolated from the Sargasso Sea
tatgaaattatcaagaattttaaaaactgttttattaatagattttataaatggattgattattgctattaaagaatcttttaaatctaaaaaaactttaaactatccatttgaaaaaggtaaaattagcccaagattccgtggagaacatgctttaagaagatatcctaatggagaagagaggtgcatagcttgtaaattgtgtgaagcagtttgtccagctcaagcaattacaatcgagtccactgaaagagaagat

SEQ ID NO: 201128 - DNA, 1093 bp, Unknown
  Bacterial polypeptide expressing nucleotide sequence isolated from the Sargasso Sea
tcttcaattcttggtatgctcgtaatggtaagttctaacgatttaatagttttttatgttggtctggaactacaatctctagcattatatgtgctcgcagccttcaaaagagataatattctttcttctgagtcaggcttaaaatattttatattaagcgcactgtcatcaggattattactgtatggatgctctttaatatatggtttttcaagctctacaaactttgatttaatttatcaaaacagcgaatcaattgaatacggtataatttttggaatagtgtttgttttagttgggttagcatttaagattactgctgtaccttttcacatgtgggccccagatgtttatgatggatcacctacatctgtcacagtaatatttgcaattcttccaaagatcgctgcattaacagtgtttattaattttttatacggacctttccttgaaatgtttgaccaatggcaagcagttataatttttttatcaattggttcaatggtgtttggggccgtagctgcgattggacaaaaaaaattgaaaagactaattgcttatagctcaataagccacatggggtttgcactcgctggtttgagtgttggaacaaacgaaggtattcaaaattcaataatatatttaattatatatctaataatgaatatagcattcttctgttgtctatttatgcttaaaagagaaaatcaatatttcgataaagttgaagatctttcaggtttatcaaagaatcatcctttattatcactttctatgatgatcattttattctcattagcagggatacctccattagcaggtttttttgcaaagttttatatttttacggctgtaattgaacagtctatgtattttttagcaattgtaggtttgctctcaacggtaatagcagccttttattatataagattaataaaggtaatgtacttcgatgagcagagagaaaaatatgacttaaatcatagcattggtcttaaaatgatacttgtggtctcatctacaattattcttatttatttcataaacccaaacataattaataattttgtctcaaatatcactataatttaat

SEQ ID NO: 201129 - DNA, 487 bp, Unknown
  Bacterial polypeptide expressing nucleotide sequence isolated from the Sargasso Sea
atgaatatttctagattttttaaaacaatatttatgactgacttcatcggtggtttatttattgctattaaagaattatttaaatcaaaaaaaacaattaattacccttttgaaaaaggtaaaataagtcctcgttttagaggtgagcatgctttgagaagatatccaaatggagaagaaagatgtattgcttgtaagttatgtgaagcagtatgtcctgcacaagcaataacaatagaatctactgaaagagaagacggaagtagaaaaacaacacgttacgatattgatatgatgaaatgtatttattgtggattatgtgaagagtcttgtccagtagatgcaatagtacaaggtccaaattttgaattttcaacagaaacacgagaagaactttattatacaaaagaaaagttattagataatggtgatagatgggagaatgttttggaggctaatattaaagctgacaatatccatagataaa

SEQ ID NO: 201130 - DNA, 730 bp, Unknown
  Bacterial polypeptide expressing nucleotide sequence isolated from the Sargasso Sea
atgactgagagcaatcttacccttaattttgggccacagcatccggcggcacacggcgttttgagattaatcatggaattggatggcgaggtcgttaccaatcttgacccgcatataggtctcttgcatagaggaactgaaaaactcgctgaaattaagccttttaatcattcaattggctacatggatagaatggactatgtatcaatgatgtgctgtgaacatccatatgttctggccattgagagcttattagaaatcgaaccccctaaaagggcacaatacatcagagtcatgtttgatgaaatcacaagaatcatgaatcatttattatggctgggttgtcatgggcttgatatcggtgcgatggcattgttcctttattgtttcagagaaagggaggacctatatgatgcttatgaggcagtatcgggtgcaagaatgcacgcaacctattacaggccaggcggtgtgtatcgtgatttgccttcagaaatgcccaaatacaaagcaaataagttcatatccgaaaagaaagttaagaaattgaattacaaccgcgaaggttcactattagatttcatagaagactttaccaatcgattcccttcattggtggatgaatacgaaacactgcttactgacaatagaatttggaagcaacgaaccgtagatattggagttgtgactcctgaacgagccatgcaacttggatttactgggcccatgc

SEQ ID NO: 201131 - DNA, 1177 bp, Unknown
  Bacterial polypeptide expressing nucleotide sequence isolated from the Sargasso Sea
aatgacaaaaaaaattaaaaatttaaatttaaattttggaccacaacatccagcagctcatggtgttttgagattaattttagaacttgatggagaagtggttgaaaaagctgatcctcatattggcttacttcatagaggaactgaaaaactcattgagaacaaaacctatatgcaggcagtcccttattttgataggttagattatgtagcgccaatgaatcaagaacatgcttttgctttagctattgaaaaaattcttaaaattgatgtgccaattagagctcagtatataagagtgatattttgtgaaataggaagaattttaagccacattttaaatgtcactacccaagcaatggatgtcggcgcattaaccccaactttatggggatttgaagaaagagaaaaattaatgggtttttatgagagagtttctggttcaaggcttcatgcaaattactttagagcaggtggagttcatcaagatttaccacaaggacttgaagatgatattgctcagttttgtatggattttccaaaaattataaatgatttagaaagtttattaacagacaatagaatttttaaacaacgtaatgttgatattggagtagtcagcaaacaagatgctttagattactctttttcaggtgttatgataagaggttctggtgttccttgggatttaagaaaatcccaaccttatgattgttatgaaaatttagagtttaaagttccagttggaaaaaacggagattgttacgatagatatttgtgtagaattgaagaaatgaaagaaagtgtttctatcattcaacaatgtttgtcaaaaatggaagtaggaccaattaaatccttagatggaaaaatcagtcccccacctaaaaaagatttaaaacaatcaatggaagctttaattcatcacttcaagctcttcacagaaggttacagagttccaaaagatgaaatatatacagctgttgaagcgcccaaaggtgaatttggtgtttatttaatatctgatggatcaagtaaaccttataaatgcaaaattagagctccaggtttttctcacttgcaatcaatggattatttgatcaaaggccacatgctagccgatgtccctgcagttcttgggtcactagacatagtctttggggaggttgatagatga

SEQ ID NO: 201132 - DNA, 1177 bp, Unknown
  Bacterial polypeptide expressing nucleotide sequence isolated from the Sargasso Sea
aatgagtaaacaaacaaaaacactaaatcttaactttggaccacaacacccagctgcgcatggagttttaagattgatattggagttggatggagaagtcgtagaaaaagctgatccccatattggtttacttcatagaggaacagaaaaattaattgaaaacaaaacgtattcccaagcaataccttattttgatagactcgattatgtagctccaatgaatcaagaacatgctttcgccttagctatcgaaaaaattttagacattgaagttccaattaggggacaatacataagagtaattttttgtgagattggaagaattctaagccacatacttaatattactacacaggcattagacgttggtgccttaactccttcattatggggttttgaggagcgagaaaaacttatggaattttatgaaagagtctcaggatcgagattacacgcaaattattttagaccaggaggtgtacaccaagacttaccaagaggtctagatgctgatattttaaaattttgtaatgagtttccaaaaattatagatgatttagagactttacttactgataacagaatttttaaacaaagaaatgtcgatattggaatagtttcaaaagatgatgcattagattattcattctcaggtgtaatgatgagaggttcaggtgttgcttgggatttaagaaaatctcaaccttacgattgttacgaacagttatcatttaaagtgccaattggaaaaaatggagattgttatgacagatatctttgtagagttgaagaaatgagagaaagtgtaaaaataattaaacaatgtttagaacagttaccaaaaggacctgtaaaatctcaagataacaagatcactcctccacctaaaaaagaaataaaagagtcaatggaagcattaattcatcattttaaattatttacagaaggctacagagtaaaaaaagatgagatttatactgcagtagaagcacccaagggtgaatttggtgtttacttaatttctgatggttcaagcaaaccatataaatgtaaaatcagagcacctggattctctcatcttcaagcaatggattatttaattaaaggacatatgttagctgatgtaccagctgtattaggttcattagatattgttttcggggaaatagacagatga

SEQ ID NO: 201133 - DNA, 415 bp, Unknown
  Bacterial polypeptide expressing nucleotide sequence isolated from the Sargasso Sea
gatgtccgcattaattgaaaagaatgaaagcggactactgtcctatggaaatgattttgacaataatgataatccatatgaatgcggttttgacaagtttgttcacctagacacaccagtagattttcttggaaaaaaagaacttagaaagataaaaaccaatggaattaaaaaaaaattaatgggagtaaaaatcaatgctaaagaaattaatgtttttaaatctataagtcttttagacaattcggggaaaattataggagaaattagatcaggagtttattctcccaccttcaagcaagtaataggtattgcaatgattaaaaaaccttatttcaaagaatctcaatcctttaatatcgagattaatggtaaaagttttattggaaaggtttgtgatttaccattcatatag

SEQ ID NO: 201134 - DNA, 1101 bp, Unknown
  Bacterial polypeptide expressing nucleotide sequence isolated from the Sargasso Sea
tatatccagctataggatattcagaaaatttaggattaataattagttatgtaggagctttcactctaatttttgcagcatcaatggccatcgtgagcaatgatattaaaaaagttttagcttattcatcaattagccaactcggatatatgttccttgcattaggtgtagggtcatatggagctgcaatactccatctatttgctcatgcatggtttaaagcattattgttcctgggtgctggctctgttggccatgctgtccacacttttgatatgaaattgatgggtggaatgagaaataaaatgaaaaaaacctacttaactatgttggttggaacaataagtttgattggaatatttccattgtcaggtttttggagcaaagatgaaattttgattggtgttaaatctgaatctacatttttgttggttattgctttaattggtgtagttatgacagctttctacatgactagaatgatggcaatgacttttttcggtgactttaaaggtggtcatgacaatattaaatatgatgatattcacgaaagtcctaatctaatgaccatcccaatgattattttggcaattccttcagtaataattggtgtaatttttagctctcctattgatttaggatttatagaaaagcatgctatggtctcatttcttgatcacaataaattagtctttccaaattatgaatatcatgaatttaaatttgatattatgattgcttctgtttctacaattcttgctttagtaggaatttcattctcaattttaaatttcaaaaaatataaatttaatatcaatttccttaacaagttaatttcaaacaaatactatttagattatttatatgaaaccctaataactgaaaaattattttataaatatttctcaaaattatttagtgttgttgaagaaaaattaattgataattttagttataaattaacagcaagtttaagatggatgtctaataaaatttctatttctcagaatggccaacttcaacttcaaagtattacgtttgttcttggatttttaattattttaatatcctatctagtctatttaggggcagggggttaac

SEQ ID NO: 201135 - DNA, 1172 bp, Unknown
  Bacterial polypeptide expressing nucleotide sequence isolated from the Sargasso Sea
aatgacaaaaaaaattaaaaatttaaatttaaactttggacctcaacatcctgcagcacatggtgttcttagattaattttagaacttgatggagaagtagttgaaaaggccgatcctcacataggactattacatcgtggtactgaaaaattaattgaaaataagacatatatgcaagcagtaccgtattttgatcgtttagattatgttgcgccaatgaatcaagagcatgcatttgctttagctatagaaaaaattttaaaaattgatgttccgataagagcccaatatataagagttattttttgtgaaattggaagaattttaagtcatattttaaatgtaactactcaagcgcttgatgtaggtgctttaactccttcattatggggatttgaagagagagaaactcttatgactttttatgagagagtttcaggatctagattgcatgcaaattattttcgagctggaggtgtccatcaagatttacctaatgggctagaagaagatattttaaaattttgtgattcttttccaaaaattattaatgatttagaaaatttattaactgataatagaatttttaaacaacgaaatgttgatataggaatagtcagtaaagaagatgctttagattattcttttacaggagttatgatcagaggatcaggaattccttgggacctaagaaaatcccagccatatgattgttataatcaattagattttaaaattccaattggtaaaaatggtgattgctatgatcgttacttatgtaggattgaggaaatgaaagaaagtgtttcaataatcaaacaatgtatttcaaaaatggaaaaaggacctgttaaatcttcagatggaaaaataacaccaccaacaaaaaaggaaattaaacaatctatggaagcattgatacatcattttaaactatttacagaaggctatagagttccaagagatgaaatttatactgctgtagaagctcccaaaggtgagtttggtgtttatcttatttctgatggatcaagcaaaccatataaatgtaaaataagggccccaggatttactcacctacaatctatggattatttaataaaaggtcatatgctagcagatgttccggcagtattaggatctatggatatagtttttggagaggttgata

SEQ ID NO: 201136 - DNA, 1372 bp, Unknown
  Bacterial polypeptide expressing nucleotide sequence isolated from the Sargasso Sea
aatggtcgatttatttgaaagtttaataataattgctccagaattaattttagctataacagctatgagcttattaatgataggttcattttatcaaaaaaaatcaataaatttaataaacactctatcattcttaacattgttaattttatcttttaatgaattgatatttaataatattcagatttttgcttttaatggtttctttatcgaagataaactatcgagttttgctaaattcattatttttcttacttctgcactatcaattattatgtctgctaattggttaagaaattatgacaaaactgcttttgaattccctattttaattttattttcgacacttgggatggcgttaatggtgtcagcaaatgacttggtgtctctttatcttgcaattgaattacaaagtcttccattatatgttcttgcaacatttaacaggaatgactctttttcatctgaaagcggtgttaagtattttatattaggagctttgtcgtcaggccttcttttgtatggatcttctctaatttatggttttactggtacaattttcttaaatgaaatttctcaattaactttatcatcaaaccaattgggaattacatttggtttagcgtttttacttgcgggtatagtttttaaaatttctgctgtcccttttcatatgtgggctcctgatgtttaccaaggtgcggcaactcctgttacatcattttttgcatcagtcccaaaaatggcagcaataataattttaataagaatattatatgttccatttgataactttatatccagctggtcacaaataattatatttgtatctttttcttctattttgctcgggtctgtggttgctatatggcaaaaaaatataaaaagattaattgcatatagctcaattgcacatatgggatttgcaacactagctttatctactggaaacaagagcgatatagaaagtatattggtttatatgattatttatatagttgccaatatcggattcttttcatgcttaataaatattcaaaataagactgaaaaaaatattaataacatctctgatctagctggcttgtcagtaaataatcctagtttagctatttctatagctctttacatgttttcttttgctggaattccacctttggcaggtttttttgcaaaatattatgtttttatttctttaataaatgagggattaatctttttagcaacctttgctcttattgctagtgttattggagcattttattatattcgttttgttaaagtaatgttttttgatgaggttgctaatagtaaaaaaattatattttcaagatctttaggattaattaattcaatatgttttatttttata

SEQ ID NO: 201137 - DNA, 1111 bp, Unknown
  Bacterial polypeptide expressing nucleotide sequence isolated from the Sargasso Sea
aatgaaaacttttttaatagcaaaatcaagaaggcttagaagtacaccgtacacgtctagaattgaaaaacaaggtgtaactgcttatactatatataatcatatgttgctgccagcagcatttggttctgtagaagatgcttatcatcacttaaaagagcatgttcagatttgggatgttgccgctgaaagacaagttgaaatttctggtaaagattcagctaaattagttcaattgatgacttgcagagatttatcaaaatccaaagatggaagatgttattattgcccaatcattgatgataatgcaggtttaattaatgatcctgtagttctaagattaaatgaaaataggtggtggatttctttggctgactcagatgtaattctatttgccaaaggattagcgattggaaataaatttgatgtaaaaatttctgaacctgatgttgatataatggcagtgcaaggaccaaaatcatttcaattaatggaaaaagtttttggagaaaaaattgtaaatttaaaattttttggttttgattattttgaatttggtggagataaacatcttattgcaaagtctggatggtctaaacaaggtggctatgaaatttatatggaacacaacgagtcaggtttaaaactatacgatcatctttttgaaattggtaaggaattcaatattagaccaggtggaccaaaccttatcgaacgtattgagagtggtttactttcccatggtaatgatatggacaatggagataatccatatgaatgtggttttgataagtatgtaaatatagatagtgatgttgattttttaggtaaagaaaaactgaaaaaaattaaagctgaaggaattaaaaaaaaacttatgggagtaaaaattgatgccaaggaaataagtgttaatggctcaatggatctagtagatgaagataataatataatcggagaattaagatctggttgttacaatccgacctttgagcaagtcattgggattgcaatgattaacaaaccacactttgagacctcgaaatcctttaaaatcaatataaatggctctgattttgatggaaaagtttgtgatttacctttcatttag

SEQ ID NO: 201138 - DNA, 1156 bp, Unknown
  Bacterial polypeptide expressing nucleotide sequence isolated from the Sargasso Sea
aatgacacttaattttggccctcaacatcctgcggcacatggagttttgagactcatactagaactagagggtgaaatagttgaaaaagccgatccacatattggtttattacaccgtggaactgaaaagttaatagaaaataaaacctatacccaagctttaccatactttgatagattggattatgtagccccaatgaatcaagagcatgctttcgctcttgcaacagaaaaattattaaaaatagaagtacctataagagctaaatatattagagtaattttttgtgaaattggaaggattttaagtcatatattaaatgtaactacacaagctttggatgtaggagctttaacaccttctttgtggggatttgaagagagagaaactcttatgactttttatgagagggcttcaggttcaagacttcatgcaaattattttagaactggtggtgtacataaagacttaccaactaagcttatcgaagatataggaaagttttgtgaaactttcccaaaaattattgacgatttagaggaccttttaacagaaaacagaatttttaaacaaagaaatgttgatattggattggtatcaaaaaaagatgcactggatcacagtttcactggggtaatgctaagaggctctggagtgccgtgggacttaagaaaatctcaaccttatgaatgttaccaggatttaaaatttaaaatacctgtaggtaaaaatggagactgttatgacagatatctttgtagaatagaagaaatgagagagagtataaaaattataaaacagtgcatagaaagtttacctaaaggaccgattaaaactgttgatggaaaaatttccccacctaatagagatgatcttaaacagtctatggaagccctgattcatcactttaaattatttacagagggatttagagttcctgccggaaatgtttactcagcagtagaggcccctaagggagaatttggagtatatttaatatcagatggaagcaatagaccttacagatgtaaaatacgagctccaggattttctcatctacaggcaatggattatttaattaaagggcatatgttagcggatgtcccagctgttttagggtcgctcgatatagtttttggagaggttgatagatga

SEQ ID NO: 201139 - DNA, 580 bp, Unknown
  Bacterial polypeptide expressing nucleotide sequence isolated from the Sargasso Sea
aatgaatttcctaaacctactattttattttattgcatcagttgtgctagtctcatctgtattaatgataactgtaaataagacagtaaatgctgctttacttttggtatttattttttttaatatggcaatcatttggctattactaggtgcagaatttttaggtatcgtcttagttctcgtttatgtcggagctgttttagttctttttttatttgttgtaatgatgttagcaaaacaagatttagtagataactcaaaaaataaatattttattacttctgcaattatttctacaataatgtttgtagaactttatttaataataaatactttaaatgataatcaatttgtctctgataagtttattcaaattgataatactttactaataggctcatctctttttactaattacattatagcttttgaggttgcatctgtaatacttcttgtttcaataattgcagctatcgctattacttatgacactaaaagaaaagttcttagacaaaatatcagcgaccaagttgggacaaaaaaacaagaccgtatcaaaattattaaggatttaaaatga

SEQ ID NO: 201140 - DNA, 247 bp, Unknown
  Bacterial polypeptide expressing nucleotide sequence isolated from the Sargasso Sea
atgaaactaaatagaatatttaaaattatctttttatctgagtttatcaaggccatttttattgccttaaaagagattttcaaaaaaaagaaaacaataaactatcctttcgaaaaaggtgcaataagtccgcgatttagaggtgaacatgcattaagacgttatccaaacggtgaagagagatgtattgcttgtaaattatgtgaagccgtttgtcctgctcaagcaataactatcgagtcagagg

SEQ ID NO: 201141 - DNA, 727 bp, Unknown
  Bacterial polypeptide expressing nucleotide sequence isolated from the Sargasso Sea
atggactcttatttttctatattattttctgaagtttataaaattatatttttattagtacctgttttagtttctgtagcaatgatagtttggcttgatagaagagtttgggcctttgtccaaaaaaggagaggacctaatgttgttggtccatttggtttatttcaatcattagctgatgcattaaaatatatctttaaagaaataataatacctgcaagttcaaacaagcttgtatttgttttagctccagtcgtgactatgacattagcattaatatcatgggctgtaataccatttggtgaagattttgtattagcagacatcaacgttggtattttatatctttttgcagtttcatcattaggtgtatatggaataataatgggaggatgggcctccaattctaaataccctttcttaggcgcaatcagatctgctgcacaaatggtatcatatgaagtttcaataggagttataataatcaacgttctattatgtgttggatctttaaacttaagtgacattgttattgcacaacaaaatttatggtttgtaattcctttgtttcctatgtttgtaattttttttatttctgcgttagctgaaacaaatcgacctccatttgatttaccagaagcagaggcagaattagtggcaggataccaaacagaatattcagggatgatgtatgctatgttttggttaggggagtatgcaaatattt

SEQ ID NO: 201142 - DNA, 799 bp, Unknown
  Bacterial polypeptide expressing nucleotide sequence isolated from the Sargasso Sea
ctggtcggctgtttcgaggtgccggatcaggatcacctggtcacggcgcagggcatcattcccggcgccaactgccagaagccgccgctggtggcactggcctccaccgccttgccacgcgagttcggcattaccgtctggaatctctacaagggtcagcgtaaaaactggcgcgaggggctggacgagtatgccaaatcccaggatctggtactgctgcaggaatcggcgacccgccccgacatgctggaatggctgaaggccggtgatttccagtggcagcaattgcaagcctttactcagggcggagtctccttcggcgtgatgacggtggccaagacgccgcaggcgttcgtgtgcggcgtgcgctcccccgagccgctgctgcgcattcccaaatccggtctggtcagcctctaccccttgcagggggatcctgacggcgtgctggtggtgaacctgcatgcggtgaatttcgagctggggatggcgacctttcgcgagcagctcaacgatctgaccgccctcatccatcgtcatcagggctcggtcattctggccggggatttcaacacctggagcgacaagcgcgaattctggctgaacaagctggtggtcgaactggggctgcaggaggcgatcccggtgccggatctgcgccggaccgcgttcggccggccgctcgatcacctctactaccgcaacctggacctggtggaagtgagcagcccggcgaccgatgcctcggatcacaaccccatcatggcccgcttcgcggctcaggccatcaccccctgaa

SEQ ID NO: 201143 - DNA, 1180 bp, Unknown
  Bacterial polypeptide expressing nucleotide sequence isolated from the Sargasso Sea
attgagtgaaactgaaataaagccaattacaatgaattttggtcctcagcatcctgcggcacatggtgtgttaagacttgtttttgagatggatggtgaaataataaaaagagctgatccacatatcggccttttgcacaggggtactgaaaaacttatagagaataaaacatacttacaggcgcttccatattttgatagacttgattacgtctctccaatgaaccaagagcacgcttggtcattagctgttgaaaaagttttaagcataaatgtgcctgaaagagggcagtatataagagttctattttgtgagttaggcagaattttaaatcatattttgaacctaactgcattcgctattgatgtaggggcaatgacgcctcttttatggggttttgaggaaagagagatactacttagtttttatgaaagagcttcaggtgcgaggtttcacgctgcctactttaggccaggcggtgttcatcaagacatacctgaagaattgcttgatgatatacataagtggttaaaaaactttcctaattttattaatgaccttgaaactttacttacggaaaatagaattttcaaacaaagaacagtcgatataggtgttgtaagcaaagaagatgcacttaatctaggattttctggaccccctttaagagcatctggacatgcatgggatttaagaaaagatcaaccatatgatgtatactccaaaatggactttgacattcctattggtaatactggtgattgctacgcgagatatctagtaagagtggaagaaatgcgtcagtcttgtaagattatagagcagtgcattaataatatgccaaaaggcatcgtcttagctaatgacgctaaaatggcaccaccatctagaaaagagatgaaaggttctatggaagcacttatccatcattttaaattatatactgaaggtgttcacgtgcctgaagctgaaacttatactgcagttgaagcaccaaagggtgaatttggagttttcttagtttctgatgggactaacaaaccatatagagctaaactaagagctcctggtttccaatttttagccgcaactgaacatatgtgtaaaggtcatatgcttgcggactcagttgcggtaattggttctatggatcttgtatttggagaaattgatcggtga

SEQ ID NO: 201144 - DNA, 196 bp, Unknown
  Bacterial polypeptide expressing nucleotide sequence isolated from the Sargasso Sea
gatgggtcatatctatggttcttgcgcaaatggtggtggatattatcattactcgtattctgttgtacggggttgcgatagaattgtgccagtagatatatatgtgccaggttgtccgcccacagctgaagcgctagtatatggtatcttgcaattacaaaaaaaaattaaaagaaaaaataaatttgtaagataa

SEQ ID NO: 201145 - DNA, 808 bp, Unknown
  Bacterial polypeptide expressing nucleotide sequence isolated from the Sargasso Sea
ttggactcccgatgtatatgaaggttctccaacaacaattactgcttatttatctgtcgccccaaaagccgctggatttgcaatgatcattcggtttttccatcaaattttctcagatgggaatgccctaggtctgaatttaattggagcaactgatatgccctggccagagatcattggtgttcttgctgttgtgactatgacacttggaaacctcgttgctatacagcaggaaagtgtaaagagaatgcttgcttattctagtatcgctcatgcaggatatatgatgctcgcactgcctgtaatttctatcgatgcggtagaagcggtaatgatatatctctttgtttatctatttatgaaccttggtgcattttttattgttatcactatcaaaaataaaataggtggagaaacctttgaagattataggggcttaggctggaaaatgccatttgttggttctgtaatgacattatttatgttgtcattaactggtttgccacctactgctggttttgttggtaagctatatattttcaaaactcttatcggtgcaggggaaagtttttattggctggtaatagcgggaggtgtcaacagcgtaatatctctttattattattttcatgtcgttaaggtaatgtttcttgaaggggagagaagtgatgaaattattcagcctccggcacctttgtttggtttgttgatcgtaacagcagttccttctctgttacttgggctatactggaatccactcgttacttgggtaaaagactctttaattttttacacgcagactctttaa

SEQ ID NO: 201146 - DNA, 367 bp, Unknown
  Bacterial polypeptide expressing nucleotide sequence isolated from the Sargasso Sea
aaaattagcccagattttagaggagagcatgcacttagaagatatccaatggtgaaagagagatgcatagcatgtaagttgtgtgaagcagtctgtccagcgcaagcaattacaatcgagtcagctgaaagatctgatggaagcagaaaaactacgcgttatgatattgatatgatgaaatgtatttattgtggtttatgtgaagagtcgtgccctgtagatgcaatagttcaaggtccaaattttgaattttcaacagagacaagagaagagctttattatactaaagaaaaactactagataatggtgatagatgggaaaatattttagcggcgaatataaaatcagacaatccttataggtaaa

SEQ ID NO: 201147 - DNA, 881 bp, Unknown
  Bacterial polypeptide expressing nucleotide sequence isolated from the Sargasso Sea
aaaaagacaaggacctaacgttgtaggcccctttggtttacttcaatctcttgctgatgcgttaaaatacatatttaaagaaattattatcccttctagttccaacaaggtaatttttattcttgcaccaatcgttacaatgacgcttgcattaatttcttgggcggtaattccatttagtgcaactcaggtgttagctgatattaatgttggaattctctatttatttgctgtttcatcacttggagtttatggaataataatggggggatgggcatctaattcaaaatatccatttcttggagcaatccggtcagccgctcaaatggtctcttacgaagtatcaattggcgtaattattattaatgttttattgtgtgtaggttcacttaatttaaacgacatagttatagctcaacaaaatttatggtttgttattcctttatttccaatgtttgtaattttttttatttcagcattagctgaaacaaatagacctccatttgatttaccagaggcagaagctgaattagtagcgggatatcaaactgaatattctggaatgatgtatgcaatgttctggcttggtgaatatgcaaatattctcttaatgtgtgcaatgggtgcaattttatttttaggtggttggttatctccaattgaaatttatcccttcacgctagtgcctggagcagtatggctaattttaaaaatattattattatttttcttatttgccttagttaaagcaattgttccaagatatcgatatgatcaattaatgaagttgggttggaaagtatttcttccaatgtctttaatatgggttgtattaactgccagctttttattttattttaatcttttaccagtgaattaat

SEQ ID NO: 201148 - DNA, 811 bp, Unknown
  Bacterial polypeptide expressing nucleotide sequence isolated from the Sargasso Sea
aatgggtggtgtcagaaataaacttccaatcacatatattttaatgttaataggtacacttgctttaactggttttccattactctctggcttttattctaaagatgcaataattgaatttgcttatttaaagggaaatactttaggatattatgcagctagcataggaatatttactgccttattaacctctatttattcatggagacttttttttaaaacttttcatggagattttaataatcagactattagtattgataaaattcatgaatctccgatggtaatgacaattcctcttgttattctagctgttggctcaattttcgcaggttatttttttaaagatttatttataagtcataaggaaagttatgaattttggaattcttctatattttttcttgaacaattgagcaaagaccatccacctaaatggtttttatttttgacaccatcattggtggtaatttctataccctttgcttatctcttatttattaaacgaaaagatttactagtaaatattgtagagggtaatcaaccattttataattttttaaaaaataaatggtattttgatgaagtttacgaatttatatttgtaagaagcctaaaaaaaattggtgtttatttttggaaaaaaattgacggactcataattgatagatttggtcctgatggaatatcgaatataataaaaactctatcaaacaaagcagtcaaatttcaaagtggttatatttatcaatatgcatttataatgcttgttggattttctgctttattaacctatttaataattaaataa

SEQ ID NO: 201149 - DNA, 481 bp, Unknown
  Bacterial polypeptide expressing nucleotide sequence isolated from the Sargasso Sea
tatgtataaattaattaaatcttttactttatttgaattatttcaaggactatttttaactttcaaatacatatttaagtctaaagttacaataaattatcctcatgaaaaaggtccattaagcccacgttttagaggcgagcatgctttgagaagatatccaagtggagaagagaggtgtatcgcatgtaaactttgtgaagctgtatgtcctgctcaggcaattacaattgaagcagagccaagagaagatggaagcagaagaacaacgagatatgatatagatatgactaaatgtatttactgtggtttatgtcaagaatcttgcccagttgatgcaatagtcgaaggaccaaattttgaatttgccactgaaacaagagaagaattaatttataataaagataaacttttagaaaatggagatagatgggagcaagaaattgctcaaaatattcatctcgatagaaaatatagataa

SEQ ID NO: 201150 - DNA, 421 bp, Unknown
  Bacterial polypeptide expressing nucleotide sequence isolated from the Sargasso Sea
tcttattttttttatttctgcgttagctgaaacaaatagattaccttttgatcttcctgaagatgaatcaacacttgttgcaggattttttactgaatattcatctgcttcatttgtattattttttttaggtgaatacgcgagtatgattttaatgtcttctatgactgttattctttttttaggcggatggcttcctccatttgatgtatacccattaaatgttattcctggagtaatctggtttactgtgaaagtaatatttatattatttttgtttatttgggttagaggaactttcccaagatatagatatgatcagttaatgagacttggatggaaagtttttctaccgttttctttattttgggttgtggcaacttctggttttttagtatattttgacatgctgccaaattaa

SEQ ID NO: 201151 - DNA, 196 bp, Unknown
  Bacterial polypeptide expressing nucleotide sequence isolated from the Sargasso Sea
tatgtaatttccatgggaagttgtgcaaacggaggaggatattaccattactcatattcagttgttagaggttgtgatcgtattgttcctgtggatgtttacgtacctggatgcccaccatcagcagaagcattgttatatggaatacttcaattacaaaaaaaaattagaaaaaaaggatcttttattagatagt

SEQ ID NO: 201152 - DNA, 490 bp, Unknown
  Bacterial polypeptide expressing nucleotide sequence isolated from the Sargasso Sea
tatgaataaagttttaaaatttattaaaagttttttattactcgaattatcgaagggtctatctttaacgctgaaatacctttttaaaaaaaaggttactataaattatccttatgaaaaaaatcccataagttcaaggttcagaggtgaacatgctttacgcagataccctaatggtgaggaaaggtgtatagcatgtaaattatgtgaagccgtatgtcctgcgcaagcaattgtcatagaagctgaaccaagacctgatgggagcagaagaacaactcgttatgatatagatatgactaaatgtatttattgtggattttgtcaagaagcatgcccagtagatgcaattgttgaaggaccaaattttgaattctctacagagacacggcatgaacttttttacgacaaagaaagattacttgctaatggcgatagatgggaagatgaaattgcccgtaatttagagaaagaaaataattttagatag

SEQ ID NO: 201153 - DNA, 274 bp, Unknown
  Bacterial polypeptide expressing nucleotide sequence isolated from the Sargasso Sea
gatgagttccatgacagtgatattatttatgggaggttggttaccaccatttgatatatttccattaaacgcagtaccaggcgtaatatggtttgtaattaaggttatatttatcttatttttgtttatatgggttcggggaacttttccaagatatagatatgatcaattaatgagactcggttggaagatttttttaccactatcattattatgggtagttttaacggcaggttttttaattgtatttgatatggtgccaaactctttatga

SEQ ID NO: 201154 - DNA, 198 bp, Unknown
  Bacterial polypeptide expressing nucleotide sequence isolated from the Sargasso Sea
gatgggttatttcaatgggctcttgtgcaaatggaggtggatattatcattactcttactcagtagtcagaggttgcgataggatagttccagtagatatatatgtaccaggttgccccccaacagctgaagctcttgtctatggaattttgcaattgcaaaaaaaaataaaaagaaaaaatacttataaaagttaaa

SEQ ID NO: 201155 - DNA, 271 bp, Unknown
  Bacterial polypeptide expressing nucleotide sequence isolated from the Sargasso Sea
catgattgcgaattttttatcagaatacctgtctataataatatttttatttatctcattactattgagcataggttttatagtaataaattatattgcttctccaagtaaccctgatcctgaaaaattatcggcttatgaatgtggtttcgaagcctttgacaatgcaagaattgaatttgatgtaaggttttatttagtttgcatacttttcatcatatttgacttagaatttgccttttattttcctgggcaatatcacttggaaata

SEQ ID NO: 201156 - DNA, 880 bp, Unknown
  Bacterial polypeptide expressing nucleotide sequence isolated from the Sargasso Sea
atcgaatatccaattttattattaagttcaatattaggaatgatgattatggttagttcgaatgatctaatagttttttatatggggctcgaattgcaatcgcttgcattatacgtattagcttctttcgacagaaacaataaattatcatcagaatctggattaaaatattttgttttaagtgccctgtcatctggattattgttatatggatgttcattaatttatggcttctctggcacaactaattttaacgaaatttcaaaaaatattagtgaggttcagtatggtcttacattaggaattgtatttattttagttggtttatcttttaaaatttctgctgtaccttttcatatgtgggcccctgatgtttatgcaggatcaccaacttctgtaacaatgttttttgctattttaccgaaaattgctgcattaactgtttttataaaatttttatatattccttttataaatctaattgatcaatggaaaataataatcatatttttgtctatttcttcaatgatatttggagcagtggcagcgatcgggcaaagaaatttaaaaagactaatggcttatagttcaattagccatatgggttttgctttggcaggtttatctgtaggcacaaattatggaatacaaagttctatctcatatatttcaatatacctagtaatgaatgtagctttttttagttgtctatttatgcttaaaagaaataataattactttgaaagtcttgatgatttatctggattatcaaagaaccacccgttattatccgtttcacttttgataatacttttttcactagctggaattcctcctctagcaggtttttttgcgaaaattttatgtatttttatcggta

SEQ ID NO: 201157 - DNA, 547 bp, Unknown
  Bacterial polypeptide expressing nucleotide sequence isolated from the Sargasso Sea
tatgaggtatctattgggagtgataattattaatgttcttctatgtgtaggatcacttaatttaaatgatattgttatagctcaacaaaacctgtggtttgttattccgttattcccaatgtttgttattttttttatttctgcattagctgaaacgaatagaccaccatttgatcttccagaagcagaagcagaacttgtcgctggttatcaaacagaatattctggaatgatgtatgcaatgttctggcttggagaatatgcaaatattcttttaatgtgtgcgatgggtgcgattttatttttgggtggatggttatcaccaattgaaatttatcctttcactttagtgccagggccagcgtggttagtgttaaagatattactattgtttttgttgtttgctttagttaaagcaattgttccaagatacagatatgaccaactaatgaaattaggctggaaagtattcttaccattatcattaatatgggtagtattaacagctagttatctattttattttaatcttctaccggtaaattaa

SEQ ID NO: 201158 - DNA, 178 bp, Unknown
  Bacterial polypeptide expressing nucleotide sequence isolated from the Sargasso Sea
gatggtatttaaaattttattattattttttatgtttgcgattattaaagcaatagttcctagatatagatatgatcagttaatgagactaggctggaaagtatttttacctttttctttaatatatgttgttataactgcaagttttttagttttttttgatttgctaccgaaatga

SEQ ID NO: 201159 - DNA, 324 bp, Unknown
  Bacterial polypeptide expressing nucleotide sequence isolated from the Sargasso Sea
gcggtatgatgtatgcaatgttttggttgggcgaatatgcgaatattttgcttatgtgtgcacttgggtcaattctttttctgggaggttggttagcaccaatggataccccattgtttgaaatggtacctccaccggcatggctaatattaaaaattttatttttgtttgttttgtttgcactaattaaagctattgtgccaagatatcgatatgaccaacttatgaggcttggatggaaggtttttctacctttctcgttaatttgggtcgtattaacttctggttatttattatattttgacttattacctgtatattaaa

SEQ ID NO: 201160 - DNA, 448 bp, Unknown
  Bacterial polypeptide expressing nucleotide sequence isolated from the Sargasso Sea
tgtatttccattatttcctatgtttgtaattttttttatatcggcacttgctgaaacaaatagacctccatttgacttacctgaagccgaagcagaactggttgcaggatatcaaacagaatattcgggaatgatgtatgctatgttttggttaggagaatatgcaaatattttattaatgtgtgcaatgggctctattctttttttaggtggatggctttctccaattgatttatatccatttaatttaatacctagtccagtttggttaattttaaagattttgatgttatttatagtatttgctttaataaaagcaatagttccaagatacagatatgatcaacttatgaaattaggttggaaagtatttcttcctttttcattattatgggttgtattaacatcaagttatttattttactttgatttattgccaaaaaattaa

SEQ ID NO: 201161 - DNA, 769 bp, Unknown
  Bacterial polypeptide expressing nucleotide sequence isolated from the Sargasso Sea
ttagttacacatgcattttttaaggcattattatttttaggcgctggaaatgtcagccatgcagtacatagctttgaaatggaaaaaatgggtaatttaaagagtaaaatgcctgtaacctattatacttttattttaggttctttgagtttagtaggtattttccctcttgctgggttttggagcaaagacgaaatcatcaatactgcgtaccatggtgcaaatttagcttctacaattgttttaattggtagtttgattggtgtaataatgacagctttttatacctttagaatggtatttcttacctttaatgatcgtattaaatcttcaaaaagtatagaaatcgaagagtctccaaaaaccatgcttgtacctgttattatcttgtcaatttttgcagtaataaccggatttcttataaatcctccaatagatatattcatgttcgaaaaacattggtttttacattatcaacatcataaaataattaatattaatttgttgattgcaacaatttccacattgttagctattttaggtataagcgcagcatggatattttataaaaatagaaatcttaccaataggttatttacaaatgcaagtataagccacatattacataagaaatggtttttcgatgatctttatgaatttataatagttaaacaaatattttatcgttttataactcgaatgatacaaatatttgacgacataattattaatcgattctctgatttggttggtagtctggctaaaagcc

SEQ ID NO: 201162 - DNA, 778 bp, Unknown
  Bacterial polypeptide expressing nucleotide sequence isolated from the Sargasso Sea
taataaaattatatttatcttagcacctgtagttacaatgactttagctttgatatcatgggctgtaataccttttggtgaaaattttgttttagccaatataaatgttggaatcttatacttgttcgctgtctcttctttgggtgtttatggcattattatgggtgggtgggcctctaattctaaatacccttttttaggatcgataagatctgctgctcaaatgatttcttatgaagtttctataggcgtgataattattaacgtattattatgtgttggatcactcaatcttacagacatagttcttgctcaaaaaaaaatatggtttgtagttcctttgtttccaatgtttgttatattttttatttcagcgctagctgaaacaaatagaccaccttttgatttacctgaagcagaagctgaattagttgcaggttatcaaacggagtattctggaatgatgtatgcaatgttttggttaggagagtatgcaaacattctgcttatgtgtgcgatgggatcaatactttttttaggaggatggctttcaccgatatcaatttatccatttgatttaataccaagtcctatttggcttatttttaaaataatatttctgtttattcttttctcattagtcaaagcaattgtgcctagatacagatacgatcaactaatgaaactaggttggaaaatatttctaccactctcattagtttgggtagtattgacttcaagctatttactttattttaatttattaccagtgaattaa

SEQ ID NO: 201163 - DNA, 823 bp, Unknown
  Bacterial polypeptide expressing nucleotide sequence isolated from the Sargasso Sea
gaaaagaaagcagaacaataaattcatctctctctttctaatattagaaggcttattaattggtgttttttgttcttttgatagcatcttattttatattttttttgaatctatgttgattcctcttttcttaataataggaatatggggaggtgataataagatatatgcaacattaaagttttttatttatacgtttgctggatctgtattaatgctaatatctttgatatatctctcgaatcaagctgatagtttttacattgttgatttttataatcttaatttaccattggatattcagatatatattttcttagcttttttaattgcatttggtataaaaatacctatgtggcctgttcatacatggttacctgacgcacatgttcaagctccatctgctggatctgtaattttagctgctgttttattaaaagtaggaggttatggtttgattcgttttttacttcctatagcaccagaagctggctattttttaaatgatattttaatacccctgtcactaattgctataatatacatatcacttgttgctttggcacaacaagatatgaagaaattaattgcttattcatcagtagctcatatgggatttgtaacgttaggtatttttttactatttaatgtttttgatccaagcgcagataaaaatattctgttgataggacttcaaggttctgtaattcaaatgatttctcatggtttaatttctgcaggcttatttttttgtataggcatcatatacacaagaacacataaacggtcaatagatgaccaaagtggaataggacaagtaatg

SEQ ID NO: 201164 - DNA, 866 bp, Unknown
  Bacterial polypeptide expressing nucleotide sequence isolated from the Sargasso Sea
cgcctcggagagccacaggcaggttggctagctacagcaactgttagcgggtcattcctctcagcactagctgtcttctttggcctagcaacaaagccacccgaagaaagagtctatgaagtaactctctttgaatggattccgtcaggagaattatctgttggtatgggttttttagctgaccccttatctatagctatggctctatttgtaaccggagtaggagcgctcatacacatgtatgcgattggctacatgcatggagatccaaagttttcaaagttcttcctttacctcaacctcttcgttttcgcaatgcttatgcttgtgctcggagataacctccttatcacctttcttggttgggaaggtgttggggcatgttcctatttcctcatttctttctggcacgaggagcctgccaatgcaaccgcaggcaaaaaagcattcgtaactaatcgagttggcgactggggcttcatggtcgcaatgttccttcttttcttcaatatcgggtcattgaaatacagtgatatcttttcctcggtcattgaagcagatgcattaacccaaacaacggcgacaggaatagtcgtaatgcttttcataggggccgcaggtaaatcagcccaattcccgttatacctctggctacctgacgcaatggcgggacctacacccgtatcggctctaattcacgcagcaacaatggtgacgtctggtgtttacctcctaacacgaatgaatcccgtactggcagaagctgcaggatggtccaccgatctaatttggatagttggacttttcacagcactatttgccgcaaccgctgcagtcgcacaaaatgacataaagaaagtccttgc

SEQ ID NO: 201165 - DNA, 286 bp, Unknown
  Bacterial polypeptide expressing nucleotide sequence isolated from the Sargasso Sea
atgaatataaaaagtgcggacaataaaattcctgaggaatttaaacaaattgcaaaagattttagtgaaaatggctacattactacgtcatttgacaatttagtaaactgggcaagatctggatcgttacattggatgacatttggcttagcatgctgtgctgtagagatgatgcaaacctctatgccgagatatgatcttgaaagattcggtgcagctccaagaggatcacctagacaatcagatgtgatgattgttgcgggaacattgactaataaaatggcac

SEQ ID NO: 201166 - DNA, 139 bp, Unknown
  Bacterial polypeptide expressing nucleotide sequence isolated from the Sargasso Sea
aatgttattccgggggtgatctggtttaccctaaaagtaatatttatattatttttatttatatgggttagaggaacttttcctagatatagatatgatcagttaatgagacttggatggaaagtttttctaccatttt

SEQ ID NO: 201167 - DNA, 899 bp, Unknown
  Bacterial polypeptide expressing nucleotide sequence isolated from the Sargasso Sea
aatggatattctaaatataattggttatgacttattaaaaatattctcactaataacgccagtattaattacagtggcattagttgtttggatagatagaagagtatggggcttagttcaattaagacggggaccaaatgttgttggtccatttggcgtactacaaagtttagcagatgcgtttaaatttatttttaaagaggtaattattcccgctggcgcaaacaaaataatatttatccttgcaccaattgtaactatgtctcttgctttattagcttgggcagtaatcccatttagtgaaaatatatatgtcacaaacatcaatgtgggaattttatacttatttgcggtatcttctttaggtgtatatggaataataatggcaggctgggcatcaaattctaaatacccttttcttggcgccttaaggtcagctgctcaaatggtttcttatgaagtttctattggatttataattgttacagttttgttatgtgttggatccttaaatttagttgatattgtaatggctcaaaaaaaaatctggtttgcaataccactatttccaatgtttgttatttttttcatttcttctcttgcggaaactaacagaccaccttttgatttacccgaggcggaagctgaattagtagctggttatcaaactgaatattctggaatgatgtatgcacttttttggctaggcgagtatgcaaatatacttttaatgtgcgctatgggttcaatattatttttaggtggctggttgtcaccattagatatctcaccattcaatcttattcctggaccgatttggtttataatcaaaattatattcttatttttcttatttgctattattaaggcaatagtgccaagatatagatatgatcagt

SEQ ID NO: 201168 - DNA, 929 bp, Unknown
  Bacterial polypeptide expressing nucleotide sequence isolated from the Sargasso Sea
ttgctgcagtattgctattacacaaaatgacattaaacgtgtaatagcgtattcgacatgtagtcaattaggatatatgttttttgcagcaggattaggagcttataatgcttctatattccatttaatgactcatggtttttttaaagcacttttgtttttatctgctggttcagttattcatgcaatgcatcacgaacaagatatgactaaaatgggtgggttgtttaataaaataccatttacagctattatgatgtggattggttcattagctataattggatttccttatttttctggatattattctaaagaaagtattttagaaaatgcttattttgcaaatatatatttatctaattatgcatatgtagttggtattactacagctctcttaaccgctttttattcatggagacttttattccttacttttcatggagcaaatagatctgatatagaaatctataatcaagttaaagaatctccatgggtaatgcgattacctcttattgtacttgcttttggatctatagttgtcggtatgttttttgcagaattttatatcggtgatttgaaaaaagaattttggaacagttgtattgtattgattaatgaaaaaaatcattaccttccttttattcaaactctcataataaaagcatctgtatcgatagggattttaattgcagtatatctatatttttacaataaaaacgctgcttcaaaattatctagtaattttagtttactgtattctatatcctttaataagtggtacatagatgaaatttttgattattttgttgtaaaaccatacttttttatttcaaaactgttctggaaaaaaggtgatgaacaaacaattgataagtatgggccaaacgggattgcaagtttaatactttatagttcaaaatatttta

SEQ ID NO: 201169 - DNA, 310 bp, Unknown
  Bacterial polypeptide expressing nucleotide sequence isolated from the Sargasso Sea
atgggagtaacaaacaatcatttagatgacaaaactaaaaagataccagaagaatttaaacaattagcaaaagattttgctgaaaaaggttttatcacaacttcatctgataatttaattaactgggctaggacagggtctcttcattggatgacgtttggactagcatgttgtgctgtagaaatgatgcaaacttcaatgcctagatatgatcttgaaagatttggagctgcaccaagagcttccccaagacaatccgatgtaatgatagttgcaggaacattgaccaacaagatggctcccgcttaag

SEQ ID NO: 201170 - DNA, 848 bp, Unknown
  Bacterial polypeptide expressing nucleotide sequence isolated from the Sargasso Sea
aatgcctcaagcttctgaaatcgcctggttaattcctgtttttccacttattggagcagtgctttctggtttaggactaataagttttaacaagaaaattaataattctagagagattgtttctgtcggtctcatttctttcgttggcatttctgcagtaataagttataaggctctcattgaacaagttaatggttatcaatctgtagaaaaattatttgtttgggctaatgctggggattttacaatcccaatgggatttgttattgatcctttaggaagtgtaatgcttgctttagtaacgacaatcactttacttgtgatgatctattcacatggttatatgtcacatgatagagggtatgtcagattttttacatatttagccttatttagtagttcaatgatgggattaataatcagtccaaatttattagaaatatacgttttttgggaattggttggaatgtgttcttatttgttagttggtttttggtacgacagagatggtgctgctcacgctgctcaaaaagcatttgtcgttaatagagttggagactttggcttattacttggaattcttgggctattttgggcaacaaatagttttgattttaatgaaatagccactggtatttctcaatcagtttctgacaattcattaccagtttgggcagctttgctcctatgttttttagtttttttgggaccaatggcaaaatctgcacagtttcctcttcatgtgtggttgccagatgcgatggagggtccgacacctatttctgctctaatccatgcagctacaatggttgcagcaagaatatttttagtggccaggctacaacctt

SEQ ID NO: 201171 - DNA, 110 bp, Unknown
  Bacterial polypeptide expressing nucleotide sequence isolated from the Sargasso Sea
attaggaagtattggtctacttgggttttgttctatgatgatatttttgtttattttaacagttggttttatttatgaatggaagaaaggagctttagattgggaataaa

SEQ ID NO: 201172 - DNA, 816 bp, Unknown
  Bacterial polypeptide expressing nucleotide sequence isolated from the Sargasso Sea
gatggctgaattctttacaaccccgcttgggatcgcggtgatcatcgtggcgcaatgccttgccattgtgggctttgtcatgatctcgctgctgttcctggtctatggcgaccgcaagatctgggccgcggttcagatgcggcgcgggccgaacgtggtggggactttcggcctgctgcaatcggtggcggacgccctgaaatacgtgctgaaagaggttgtcgtgcccgccggggccgacaaggccgttttcatccttgcgccgatgaccagtttcgttctggcgatccttgcctgggcggtgatcccgatgaacgagggttgggtcctgtcggatatcaacgtggcggttctgttcgtcttcgcggtatcctctttggaggtatacggcgtgatcatggggggatgggcctcgaactcgaaatacccgttccttggctcgctgcgttcggcggcgcagatgatctcctatgaggtcagcatcgggttgatcatcatcggtgtcatcatctcgaccggcagcctgaacttcagttccatcgttgcggcacaggacacggcctatgggttcttcgggtggtactggctgccgcatctgccgatggtgttcctgttcttcatttcctgccttgcggaaaccaaccgcccgcccttcgacctgccggaggcggaatcggaactggtggcggggtaccaggtggaatattcggccacgcccttcctgttgttcatggcgggggaatatatcgcgatcttcctgatgtgcgcgctgacctcgctgttgttcttccggtggctggctgtcgcccatcccgg

SEQ ID NO: 201173 - DNA, 859 bp, Unknown
  Bacterial polypeptide expressing nucleotide sequence isolated from the Sargasso Sea
tttttactaattccagtattagtttctgtggcaatgattgtttggcttgatcgaagaatttgggcatttgttcaaaaaagacaaggtccaaatgtagttggtccctttgggttacttcaatctttagcagatgcttttaaatacatatttaaagaaataataattccatcaagttcaaataaggtaatttttattcttgctccaatagttactatgacattagctttagtatcatgggcagttattccatttagtgctactcaagtaatagctgacataaatgtaggtatactttacttatttgctgtatcttccctaggtgtttatggaataattatgggtggttgggcatctaattcgaaatatccttttttgggtgcaatcagatctgcggctcaaatggtatcttatgaagtttcaattggagtaattataataaacgttttgctttgtgtaggatctttaaatttaaatgatattgtgatagctcaaaaaaatatatggtttgttattcctttatttccaatgtttgtgattttttttatatcagctctagcagagacaaatcgtccaccatttgacttaccagaagctgaagctgaattagttgcaggttatcaaacagaatactctggaatgatgtacgctatgttctggctaggcgagtatgcaaatatattacttatgtgtgcaatgggttctatactttttttaggtggatggttatcaccaattgaaacttatccatttaatttaatacccggagctgtttggttaatatttaaaattttgcttctttttatattatttgctttggtaaaagctattgtgccgagatataggtacgatcagttaatga

SEQ ID NO: 201174 - DNA, 490 bp, Unknown
  Bacterial polypeptide expressing nucleotide sequence isolated from the Sargasso Sea
gatgtcatttataaaaaaatcctcacgcgcgttactcctgaccgaattgatatcgggtatggcgctgacgctgaaatatatgtttaagcccaaggtgacggttaattatccgttcgaaaagggccctctgagcccgcgttttcgtggtgaacatgcgcttcggcgatatcctaacggcgaggaacgctgcatcgcttgcaaactttgcgaggcaatctgcccggcccaggcaattaccatcgaggcgcagccgcgcgccgacggtagccgccgtaccacgcgctacgacatcgatatgacaaaatgcatctattgcgggttctgcgaagaagcctgccccgtggatgccatcgtagagggcccaaattttgaatttgcgaccgaaacccgcgaggagctgatgtacaacaaggacaagcttctcgataacggggagcggtgggaaggccacctcgcgcagcgcctgtcggcagacgcgccgtaccgctga

SEQ ID NO: 201175 - DNA, 151 bp, Unknown
  Bacterial polypeptide expressing nucleotide sequence isolated from the Sargasso Sea
ctctgggtgcgggcgacttttccgcgatatcgctatgatcagctgatgcgtcttggctggaaagtatttctcccattttcgctgctttgggtcgctcttacggcgggtgcgctgatcgcattcgactggctgccgaacccgggtgcatagg

SEQ ID NO: 201176 - DNA, 247 bp, Unknown
  Bacterial polypeptide expressing nucleotide sequence isolated from the Sargasso Sea
aatgacagcggaatttttaaaagaatatttaccaataattttatttctagttatagctctaggattaagttgtgcatttattgctataaattttatcctatcgcctaaaaatcctgaccctgaaaagttatctgcatatgaatgtggttttgaaccttttgaagattctagaatggaatttgatgtaagattctatttagatgcaatactttttataatttttgatttagagatagcttttcttttt

SEQ ID NO: 201177 - DNA, 861 bp, Unknown
  Bacterial polypeptide expressing nucleotide sequence isolated from the Sargasso Sea
gctattggagcaggagcctatgttgcagcaatatttcacctcgtaacacatgcgttttttaaagcattgctatttctcggagcaggggctgtaattcatgaaatgcatcacgaacaaaatatttataaaatgggcggtcttagaaaaaaaatgccagtaactgctgcaatgatgggaattggaactttagcaatatctggtattccaccgttggcagggttttggtcaaaggatgaaatactagcctcggtattttctagaggaggaatttattatggattctgggctttgtctcttttagctgcattaatgactgctttttacatggggaggcactggttattaatttttgtaaaagagccatccaatgaattagacagtgtaaatgaagcaccaaaaaatatgacaagacctttgattctacttggccttttttctatatttattgggtttataaacacacctttttttcatggtttagaaaaagtgttacatgaaactctttacaacgtagaagttacgcaccttccaaaaggtataactctcgcagttttggcatttctatcaattggtgcaggctttacaggccttgcacttgcatacttgatttatatctttgatatttttagctactttaaaataaaaataccttttttaaaacaattcaaaaagctttcaaaagacgttctttatttaaataaaataggaaatctaatttttgttaaaggtatgaaatcattatcaagaaaagtcgctgtaagtgttgatggtatgactattgatggatttataaacggagtagcaaggtcatttttaaaatcatcccaacaaatttccttttcacaaactggtcttgtaaga

SEQ ID NO: 201178 - DNA, 277 bp, Unknown
  Bacterial polypeptide expressing nucleotide sequence isolated from the Sargasso Sea
attgggaatagatactaatttttacagcaggaagcctataatttcttctaaagctaataataaaggctatgttctagcaaaatttaatgatttgttaagttgggccagatctggttctttatggcctatgtctttcggacttgcttgctgtgctgtggaaatgatgcaaactggtgcatctagatatgatttggatagatttggagtggtatttagacctagtcctcgacaatctgatgtaatgattgttgcaggtactttaacaaataaaatggcg

SEQ ID NO: 201179 - DNA, 853 bp, Unknown
  Bacterial polypeptide expressing nucleotide sequence isolated from the Sargasso Sea
gatgcattcggctgcagattttgcttggttaatcccacttcttccactttgtggggcagttttaattggtttgggattaattagttttaacgatctttttaatcgttcaaggaaacccgtggcaataaccttgttgacttccgtaggtgcttcggcatttattagctatgcagttttagccgagcaactctcaggtaaacctccagttgagcacttgtttatttgggctagtgcaggctcatttgagttgccaatgggttatgtgattgatcctcttgcggcaatcatgctcgctcttgtaactacaatcgctttcttggtaatgatttattcccatggttatatggcacatgatcctgggtatgttcgtttttttacttatctagccttattcagcagctcaatgcttggtctaattgttagtccaaatttgcttgaaatatatgttttttgggaattggttggtatgtgttcatatttattagttggcttttggtatgacagagacggtgctgcacatgcagctcaaaaggcttttatcgtaaatagagtgggtgactttggcttattgcttggaattttgggtcttttttgggcgacaggtagctttgattttcatggcatagctgatggtttatcagttgcagttggttctgggaatgtaccaatgtgggcggctttgactctttgcatacttgtctttatggggccaatggctaagtctgcacaatttccattgcatgtttggttgcccgatgcaatggaaggtccaactcccatatctgctcttatacatgcagcaacaatggttgcagcgggagtttttttagtagcaaggcttgatcctttgttt

SEQ ID NO: 201180 - DNA, 901 bp, Unknown
  Bacterial polypeptide expressing nucleotide sequence isolated from the Sargasso Sea
tcattgctttacgggtttactggctcaacaaattttcaagttatatctaataacgttggggacattaatataggaactatttttgcaatgatttttatattagttgggttagcattcaaagtttctgctgttcctttccatatgtggacaccagatgtttacgaaggttcaccaacatctgttactagcttttttgctattgttcccaaaattgcagggattgcagtttttataagatttatgtattcaccttttcaaaatattttagaccaatggcaatatattttagtttttatatctattgcttccatgattttaggcgctgttgcagcaataaatcaaaaaaatattaaaagattaatagcttacagttcaataagtcatatgggttatgcaatagctggcatatcaacaggtactgaaagtggttttaaaagtacaataatttatatcttgatctactctgcaatgaatattggtttttttgcgtttgtatttttaatgaagagaagtggtaaatatattgaggatataaatgaactttcggggatttcaaaaaaccatcctttagcggctttatcattgttgatagtgttattttctctcgcaggcatcccacctctagcaggtttttttgctaaattttatatttttatgtcagttatagaaagtggaatgtacgctttagctattattggtctagtaacaacagttgtgtctgctttttattatataaggattgttaaggtaatgtattttgatagtcccaaaaaaccttttgaaaatttcaaaaattatggagtttatgggtctttaatatttagctgcatatttctttcttcattttttatgtatccttctgtttttaacggcattatttcaaaaattaatattttttgat

SEQ ID NO: 201181 - DNA, 307 bp, Unknown
  Bacterial polypeptide expressing nucleotide sequence isolated from the Sargasso Sea
aatgttttggttgggggaatatgcaaatattttattaatgtgtgcactaggatcaattttatttttaggaggctggttatcacccatagatatatatccttttactttggttcctggagcagtttggttaatatttaaaattctttttttgtttattctttttgctctagttaaagcaactgtcccaagatatagatatgatcaattaatgagattaggatggaagatatttttaccgttttcattaatttatgtagtattaacagcaagttatcttttttattttaaccttttgccaacaaactaa

SEQ ID NO: 201182 - DNA, 894 bp, Unknown
  Bacterial polypeptide expressing nucleotide sequence isolated from the Sargasso Sea
gtatacggttttctggttcaactaattttgatataatatcaaatcagctaaattctaatgaatatgttttaacatttggaattgtgtttatcttagttggtttagcttttaaaatttctgcagtaccatttcatatgtgggcacctgatgtttacgaagggtcaccaacaactgtaacattattttttacaatggtacccaaaatagctgctttaactgtatttataagatttttgtatgttccttttttaaatttaattgatcagtggcaaatgataattgttttcttatcaattgcttcgatgatttttggagcagttgcagcaataggacaaactaatattaaaagactaattgcctacagttctattagtcatattggttatactttagcaggattagctacggcatctaatgaaggaattcaaagttcaataatctatatctcaatatatgttgtaatgaatttagctcttttctgttgtctattaatgttaagaagaaaggatcaatattatgaggatattagtgatctttcaggattatcaaaaaaccatcctttattatctttatgtttacttgtaatactattttctttagcaggtatcccacctctcgctggtttttttgcaaaattttatgtatttatagcagtgttagaacaatcaatgtatttcttagctatagtaggtttattatctactgtagttgcatcattctattacttaagaattataaaaatcatttactttgataaagaaaaagacaaatacgatactaaccatagcttatggttaaaattttcactcacagtttcaacgatattaattcttttatacttcatattcccaagtcagttaatagaagttgtttcaagaattaatattatttaat

SEQ ID NO: 201183 - DNA, 598 bp, Unknown
  Bacterial polypeptide expressing nucleotide sequence isolated from the Sargasso Sea
gctggaactagctgtaacgttgtgggctacattgaaaatcttaacaatctgtgtgccgttgatgctatcggttgcttacctcacttttgctgaaaggaaaatcattggttacattcaagctcgagtaggtccgaatagagttgggccgcgaggtttgttacagccgatagccgacgctttgaagctactatgtaaggagattgtgattcccaccggcgccaataaggtcttatttcttacagccccgatacttgcattagcgccctccttagctgcgtgggcagtcataccttttgactcgagcttggtcttaagtgatataaatgcagggttattgtatgttttagctctgacttcgcttggggtgtacggtatcatcatcgctggttgggcttcgaattcaaaatatgcttttttgggctctatgcgatcagctgcacaaattgtgtcttatgaaatagcaatgggtttcgcgttggtgggcgtgttaatagcggctggcagcctgaaccttggaactattgttcgggctcaagattctgaactgggattgtttggctggttttgggcgccactttttccagtattcatcatctat

SEQ ID NO: 201184 - DNA, 142 bp, Unknown
  Bacterial polypeptide expressing nucleotide sequence isolated from the Sargasso Sea
agaaatagcttttttatttccatgggccatctctttaggaaagataggtttattaggtttttgttctatgatgatatttttatttattcttactgttggttttgtttatgagtggaaaaagggcgcattagactgggaataa

SEQ ID NO: 201185 - DNA, 568 bp, Unknown
  Bacterial polypeptide expressing nucleotide sequence isolated from the Sargasso Sea
atctgctgcccagatggttcttacgaagtttcaataggtgtaatcattataaatgttttattatgtgttggatctcttaatttaacagatattgttttagctcaagagaacttatggttcattatcccattgtttccaatgttcgttattttttttatctcagccctggctgaaacaaatcgacctccttttgatttacctgaagcagaagcagaattagttgcaggatatcaaaccgaatattctggcatgatgtatgcgatgttctggttaggagaatacgctaatattttattaatgtgtgcacttggttcaattttatttttgggaggttggcttccacccatagatacatttccttttaattttgttccagactctctttggttgatatttaaaatgttgtttttgtttattttatttgcattggtaaaagctatagttccaagatatagatacgatcaattaatgaaattaggatggaagatttttcttccaatgtctcttgtatgggttgtaataactgcatcatatttattttactttgaattattgccaggaaattaat

SEQ ID NO: 201186 - DNA, 283 bp, Unknown
  Bacterial polypeptide expressing nucleotide sequence isolated from the Sargasso Sea
caatattttattgatgtgtgcaatgggagcaatattatttttaggtggttggatgtccccaattgatgtttatccatttacattagttccaggtgcaatatggttaatattaaaaattcttcttttgtttatcctttttgctttagttaaggccatagtacctagatacagatatgatcaattaatgagactaggttggaaagttttccttcctctttctttaacttgggtagtattaacagctagctatttattttattttaaccttttaccagtgaattaa

SEQ ID NO: 201187 - DNA, 214 bp, Unknown
  Bacterial polypeptide expressing nucleotide sequence isolated from the Sargasso Sea
atgcttgaaaactacctgccaatagcaatatttataatcatagctggagtacttggcttattaatgcttggattgggattcctcttcggaaaaggcgctaaaactaaagcaaaactgtctccttatgaatgtggttttgaggaatttgaagatgcccgaatcccattcgatgtgagatattatttagttgccatcttattcataattttgatct

SEQ ID NO: 201188 - DNA, 837 bp, Unknown
  Bacterial polypeptide expressing nucleotide sequence isolated from the Sargasso Sea
tcaattaaaatcatcagaagcaggattaaaatattttgttttaagtgcattatcctcaggtttattattgtatggttgttctttaatttatggttttacaggctcaacaaattttaatgttatttccactcaatttaatacaaatgaatatgtaattacctttggaatagtttttattttagtgggtttagcattcaaaatttctgctgtaccttttcatatgtgggccccagacgtttatgaagggtcgcctacatcagtaacattattttttacaatggttcctaaaatagcagcgttaactgtgtttataagatttttatatgttccttttttaaatcttattgatcagtggcaaatgattttagtttttttatcaattgcatccatgctttttggtgcgatagcagcaataggacaaaaaaatcttaaaagacttatagcttatagctctattagtcatattggatatgcattagcaggtttagcaactgggtctaatgaagggatacaaagctcagttatctatatgacaatttatattattatgaacttaggttttttttcatgtttgttaatgatgaaaagaaacaatatttattatgaacaaatagatgatttatcaggattatcaaaaaatcatcccttactttcaatttcattattgataattttattttctctagctgggataccaccactagcaggtttttttgcaaaattttatatttttaaatctgtcattgaacagtcgatgtattttttagctattgttggactattatcaacagtagtagcagcgttttattacttacgaattattaagataatgtattt

SEQ ID NO: 201189 - DNA, 311 bp, Unknown
  Bacterial polypeptide expressing nucleotide sequence isolated from the Sargasso Sea
aatgggactagagaatatacataaagatggatttgtacttgcaaagtctacaaacctttttgattgggcaagaacaggatcaatgtggccaatgacatttggcctagcatgctgtgctgttgaaatgatgcatgctggtgcgtcaagatatgacattgatagatttggaatgttgtttagacctagcccaagacaatcagatgttatgattgttgctggaacattagttaataaaatggcaccagctttgagaaaagtttatgatcaaatggctgatccaaaatgggttatttcaatgggttcgtgcgcga

SEQ ID NO: 201190 - DNA, 520 bp, Unknown
  Bacterial polypeptide expressing nucleotide sequence isolated from the Sargasso Sea
attaatgttttactttgtgttggctctttaaacctaagtgacattgttttagctcaaaaaaatttatggtttgtagtgccattatttccaatgtttattatcttttttatttctgcattagctgaaacaaacagaccaccttttgatttacctgaagcagaagctgaattggtagctggatatcaaacagagtattctggaatgatgtatgcaatgttttggttaggagaatatgcaaatatattattaatgtgttctttaggttcaattttatttcttggtggatggctctctccagttgatatttttccttttaatataattccaggacctttttggatgatttttaaaatgttattattatttatactcttttcattagttaaagcaattgttcctagatatagatatgatcaattaatgaaattaggttggaagatatttcttcctttatctttaacgtgggttgttttaactgcaagttatttattatactttgatttgttaccggtaaattaat

SEQ ID NO: 201191 - DNA, 493 bp, Unknown
  Bacterial polypeptide expressing nucleotide sequence isolated from the Sargasso Sea
ttaaatctaagtgacatcgttttagctcaaaaagatttatggtttgtaatacctctattcccaatgtttataatattttttatttcagccttagcagagactaatagaccaccttttgatttgcccgaagctgaagcagagttagttgcaggttaccagacagaatactctggaatgatgtatgcaatgttttggttaggggaatatgctaacattttacttatgtgtgcaatgggatctattttatttctcggtggctggttatctcccatagatttatttccatttaacgttattccggctccaatatggttaatcttaaaaatactctttttatttatcttatttgctctgataaaagcaatagtacctagatacaggtacgatcaattaatgaaacttggatggaaaatttttctaccattttccttgatttatgtagtattaactgcaagttttttaatgtattttgatttattaccggggaattaga

SEQ ID NO: 201192 - DNA, 226 bp, Unknown
  Bacterial polypeptide expressing nucleotide sequence isolated from the Sargasso Sea
catgatttataattttttaacagactatctttcaatagtaatttttttatttattgctttatttttaagcattggttttatcgttgctaattatttagcatctccctccaatcctgatccagaaaaattatcagcttatgaatgtggcttcgaagcttttgatgactctagaatggaatttgatgtaagattttacttagtagcaatcttattcattatatttgat

SEQ ID NO: 201193 - DNA, 229 bp, Unknown
  Bacterial polypeptide expressing nucleotide sequence isolated from the Sargasso Sea
atgatttacaattttttatcagaatatttatcaataataattttcttactaatatcattagttttaagtataggttttatagttgcaaattatttggcatctccatcaaacccagatccagaaaaattatcagcttacgaatgcggtttcgaggcatttgatgactcgagaatggaatttgatgtgcgattttatctcgtagctattttatttataatatttgatttag

SEQ ID NO: 201194 - DNA, 506 bp, Unknown
  Bacterial polypeptide expressing nucleotide sequence isolated from the Sargasso Sea
tatattaggtattattatgacaaaagtattaaaatttatcaaaagttttttattgctcgaattaacgaagggtctatctttaacgctgaaatacctttttaaaaaaaaggttactataaattacccttatgagaaaaatcccataagttcaaggtttagaggtgaacatgctttacgcagataccctaatggtgaggaaaggtgtatagcatgtaaattatgtgaagccgtatgtcctgcacaagcaatagttatagaagctgaaccaagacctgatggtagtagaagaacaactcgttatgatatagacatgactaagtgtatttattgtggattttgtcaagaggcatgcccagtagatgcaattgttgaagggccaaattttgaattctctacagagactcggcaagaacttttttacgacaaagaaagattacttgctaatggcgatagatgggaagatgaaattgcgcgtaatttagagaaagaaaataattttagatagc

SEQ ID NO: 201195 - DNA, 834 bp, Unknown
  Bacterial polypeptide expressing nucleotide sequence isolated from the Sargasso Sea
tataatgcatcaatatttcatttgatgacgcatggtttttttaaagccttactttttttatcagctggatcagtaattcatgccttgcatcacgagcaggatatgagaaaaatggggggactctttaaaaaactacctttcactggcttaatgatgtggattggttctttagcaattattggttttccatacttttctggttattattcaaaagaaagcatccttgaaaatgcatatttttcaacaagttatatggcaaattttgcatactttgtgggaatcttaacagctcttttaacagcattttattcttggagattattatttcttacatttcatggagaaaatagatctgaaatctctatttatgataatgctaatgaatcttcttgggtaatgaaatttccgctattaatactagcttttggttcagtattcgtagggatatttttctctgaattttttataggtaaattaaagtattccttttggaatgaatctataatcttattagatcaaggtaagcattatttaccttttgttcaaacatttctaataaaattttcagttgctataggcgtattaattgcggcatatttttatttttataataaaaatatagcactgaaattttcaaaatacttcaataccttatatttaatttctcttaacaaatggtatattgatgaaatttataattttataatcgttaaaaattattttagtttagcagatttattttggaaaagaggtgatcaaaatttcattgatagatatggacctaatggaattagtaaattgatatctttaagttcatctttttttagtcgatta

SEQ ID NO: 201196 - DNA, 265 bp, Unknown
  Bacterial polypeptide expressing nucleotide sequence isolated from the Sargasso Sea
tttgttagaatatctgccaatcctggtgtttttgggtatagcacttggacttgggatcattttgttgttagcggctgctgtaattgctattcgaaatcctgatcccgaaaaagtctctgcttatgagtgtgggtttaatgcgtttgatgatgctcgtatgaaattcgatgtcagattttacttagtttcgattttgtttatcattttcgatcttgaaatcgcatttctattcccttgggcagttgcatttcaagatatcagtatg

SEQ ID NO: 201197 - DNA, 805 bp, Unknown
  Bacterial polypeptide expressing nucleotide sequence isolated from the Sargasso Sea
atggggtcgggagcatacactgctggtttatttcatctttggactcatgctttttttaaagctcttttatttcttgcagcaggctccgtaatacatgctgttcatacaaacaatatgtcagaaatgggaggactaagaaaagagatgcccagaacatttatgacttttattattggaacagttgctcttgctggactacctcctttggctggtttcttttctaaagatgaaattttagcctccctgaatcatgaagggcacactttctttttctatattgctgtagccggtgcttttattaccgctttttatatgaccagagcagttttactcactttttatggtgagtatagaggtcatggtcatccccacgaatcagattccatgatgacaactcctcttctcgtcttagcctttcttgcagttgtaggaggatgggtcaatatccctggaatatatacaggatttacaacttgggtcacaaccagaaaaaatggaattattgaatatcatcctgaatcatttgattattttgcattatttagtggcctgtctgctgggttgataggtattggacttgcttattatatttatcaagtaattagtgagccccaaaatggagataataggataaaatttcaaccagtatggagaattctggaaaacaaatattacttagatgatttttattttaaatttattattgatcctataaaaataacttttgctaagactgttgataaatttaatacagaaatattggatagatttattaatagttttggaaatgctgcttcatatttag

SEQ ID NO: 201198 - DNA, 765 bp, Unknown
  Bacterial polypeptide expressing nucleotide sequence isolated from the Sargasso Sea
ttgtattagctcctgttgttacaatgacattagcattaatatcatgggctgtaattccatttggagaggattttgttctagctgacatcaatgttggtattttatatctttttgctgtttcatcattaggtgtatatggaataattatgggtggatgggcatccaattctaaatacccttttttaggtgcaatcaggtctgctgcgcaaatggtttcatacgaagtttcaataggagttataataattaatgttctcttatgtgttggatctttaaacttaagtgacatcgtcatggcacaacaaaatttatggtttgtaattcctttgtttcctatgtttgtaattttttttatttctgcattagcagaaacgaaccgtcctccatttgatttaccagaagcagaagcagaattggtggcaggatatcaaactgaatattcaggaatgatgtatgctatgttttggttaggagaatacgcaaacattctgttaatgtgtgcaatgggatcagttttatttttgggtggctggttatctccaatagatatcttcccatttaatgttattccaggtccattttggttaatctttaaaatattatttttatttattttatttgcgttagttaaagcaaccgttccaagatacagatatgaccaattaatgaagctgggttggaaaatatttcttccattttcactgttttatgttgttttaacttcgagttttttactatattttgatttactaccaggaaaataaa

SEQ ID NO: 201199 - DNA, 742 bp, Unknown
  Bacterial polypeptide expressing nucleotide sequence isolated from the Sargasso Sea
atgacattagcattaatatcatgggctgtaataccatttggcgaagattttgttctagccgacatcaatgttggtattttatatcttttcgcagtttcatcattaggtgtttatggaataattatgggaggatgggcctccaattctaaatacccttttttaggtgcaatcaggtctgctgcgcaaatggtttcatacgaagtttcaataggagttataataattaatgttctcttatgtgttggatctttaaacttaagtgacatcgttttggcacaacaaaatttatggtttgtaattcctttgtttcctatgtttgtaattttttttatttctgcactagcagaaacaaatcgtcctccatttgatttaccagaagcagaagcagaattagtggcaggatatcaaactgaatattcaggcatgatgtatgctatgttttggttaggagagtatgcaaatattttgttaatgtgtgcaatgggagcagttttatttttgggtggctggttatctccaatagatatcttcccatttaatgcgattccaggtccattttggttaatctttaaaatattatttttatttattttatttgcgttagttaaagcaactgttccaagatacagatatgatcaattaatgaagcttggatggaagatatttctcccattttcactgttttatgttgttttaacttcaagttttttactatattttgatttactaccagggaaataaa

SEQ ID NO: 201200 - DNA, 634 bp, Unknown
  Bacterial polypeptide expressing nucleotide sequence isolated from the Sargasso Sea
ttttacggaattataatgggtggatgggcttcaaactctaaatatcctttcttgggagcaattagatcggccgctcaaatggtctcttacgaagtatcaattggggtaattattataaatgttttattgtgtgtaggctcacttaacttaaacgacatagttatagctcaacaaaatttatggtttgccatccctctatttccaatgtttgttattttttttatttctgcattagccgaaacaaatagacccccatttgatcttcccgaagctgaagcggaattagtagcaggatatcaaacagaatactctggaatgatgtatgcgatgttctggcttggtgaatacgcaaacattcttctaatgtgtgcgatgggtgcaatattatttttaggtggctggttatctccaattgaaatttatccttttactttagtgccaggacctttatggttaatattaaaaatattattattatttttcttgttcgccttagttaaagcaattgttccaagatacagatatgaccaattgatgaaattgggttggaaagtattccttccattatctttagtatggcttgtgttaaccgctagcttcttattttattttaatctgttgccagtaaattaat

SEQ ID NO: 201201 - DNA, 571 bp, Unknown
  Bacterial polypeptide expressing nucleotide sequence isolated from the Sargasso Sea
aggtctgcagcacaaatggtgtcatatgaagtttcaataggagttataataatcaatgttctattgtgtgttggttctttgaatttaagcgacatagttatggcacaacaaaatttatggtttgtaattccattatttccaatgtttgtaattttttttatttctgcactggcagaaacaaatcgccctccatttgatttaccggaggcagaagcagaattagtggctggataccaaactgaatattcgggaatgatgtatgctatgttttggttaggagagtatgcaaatatcttattaatgtgtgcaatgggatcagttttgtttttgggtggctggctatctccaatagatatcttcccttttaatgctattccaggtccattttggttaatttttaaaattttatttttatttattttatttgcattggtcaaagcaactgttcctagatacagatatgaccaattaatgaaacttggttggaagatatttctaccattttcattattttatgttgttttaacttcaagttttttactatattttgatttactaccaggaaaataaa

SEQ ID NO: 201202 - DNA, 784 bp, Unknown
  Bacterial polypeptide expressing nucleotide sequence isolated from the Sargasso Sea
ctgattgggatctggggcggttccaaccggctttatgcgacgatgaagttcgtgatttacaccatggtcggttccctactgatgctggttgccttgatttacactgccatcctcttcaaagaaattaacaacggatggtccttcaatattctcgactggtatggaatgaatatcgcaccggagacccaaacctggctcttccttggttttgcagtcgcctttgcagtcaagattcctcttttcccgttccatacctggcttccagatgcccactatgaggcaccaacagcaggttccgtccaacttgccgcagtgatgctgaaattcggaccatacggatttctacgttttgccatgccggtattcccggttgcggtttatgaactgactcccttgttcatcaccctctctctgatcggtatcatttacggaggattggtggcgatggtgcagaagcaaatcaaacgcctgatcgcctattcctcagtagctcacatgggttatatcgtacttggactgttcgctctcaatacccagggggtttatggaggctggatccagatgatcaaccacgcaattgtgaccggtgctctgttccttgtggtgggaatgatttacgaaagaacccatacccaggaaattgttgattatggcggagtcatacatacgatgcccttattttctgtatttcttgtgtttttctccatggcatccgtaggattgcccggactcaacggatttgtcggtgaggtcctggcgatggtcggcgctgcccgtgtgaata

SEQ ID NO: 201203 - DNA, 367 bp, Unknown
  Bacterial polypeptide expressing nucleotide sequence isolated from the Sargasso Sea
tatgaaatttctttatgtagagtatttccctatttttgttttcctcgttgttgctattgttttagccgttgttatttttggtgcttcatacttattatctagccacgagtcagactctgaaaagctttcgacttacgagtgtggtttcgatgcttacgatgattcgcgtaacacctttgatgtacgtttctatctagtagccatcctatttatcatcttcgatttggagatcagcttcttattcccttggtcattaaccttaggtactatttctgcctttggtttctggacaatggctattttccttattattctaaccgtaggtttcgtctatgagtggaagaaaggtgctcttgattgggaataa

SEQ ID NO: 201204 - DNA, 614 bp, Unknown
  Bacterial polypeptide expressing nucleotide sequence isolated from the Sargasso Sea
ggcatcaaattcaaaataccctttcctaggaagtctcagatctgcttcgcaaatgatatcatatgaagtctcaattggctttataatcattggagtgattatctcagctggatcacttaatttaagtgaaattgtgttggctcagaaaggtgactatggaatgttaaattggttttggctcccacatttacctatggtcttcttttttcttgtgtcagctttggatgaaacgaacaggcccccatttgatttgccagaagctgaagcagaacttgttgcgggatatcaggttgaatatacctcaacaccctatctgctttttatgattggtgaactaagtgctgttttattgatgactgcgttgattacaattcttttttttggagggtggttatcacccgtatcctttttaccagatggttttttctggatgctaagcaaaatgttgttgttttttttcatcttttctttaataaagggtctcgtgccaagatacaggtatgatcaattaatgaggctaggctggaaagttatgctcccagtttcactaggatgggtggtctttgtatcgtttatggcccattttaaacttttgacttatgcaaggtggtaat

SEQ ID NO: 201205 - DNA, 820 bp, Unknown
  Bacterial polypeptide expressing nucleotide sequence isolated from the Sargasso Sea
ttaaaatatatctttaaagaaataataatacctgcaagctcaaataagtttgtatttgtattagctccagtcgtgactatgacattagcattaatatcatgggctgtaataccatttggtgaagattttgttctagctgacataaacgttggtattttatatcttttcgcagtttcatcattaggcgtatatggaataattatgggaggatgggcctccaattctaaatacccttttttaggtgcaatcagatctgcagcacaaatggtatcatatgaagtttcaataggagttataattatcaacgttctattatgtgttggatctttaaacttaagtgacattgttatggcacaacaaaatttatggtttgtaattcctttatttcctatgtttgtaattttttttatttctgcactagcagaaacaaatcgtcctccatttgatttaccagaggctgaagcagaattagtggcaggatatcaaactgaatattcaggaatgatgtatgctatgttttggttaggggagtatgcaaatattctgttaatgtgtgcaatgggatcagttttatttttgggtggctggttatctccaatagatatctttccatttaatactattccaggtcctttttggttaatctttaaaatattatttttatttattttatttgcgttagttaaagcaactgttccaagatacagatatgaccaattaatgaagcttggatggaagatatttctcccattttcactattttatgttgttttaacttcaagttttttactatattttgatttactgccagggaaataaa

SEQ ID NO: 201206 - DNA, 233 bp, Unknown
  Bacterial polypeptide expressing nucleotide sequence isolated from the Sargasso Sea
gttccgtaaggtctacgaccaaatggctgagccgcgctacgtaatttccatgggatcgtgcgctaatggtggcggatattatcattattcctattcggtagttcgcggctgcgaccgcattgtgccggttgacgtatacgtacccggatgcccgcccactgcagaagcattagtatatggaattttgcaactacaaaagaaaatcaaacgaaccggcaccttgtggcggtaac

SEQ ID NO: 201207 - DNA, 327 bp, Unknown
  Bacterial polypeptide expressing nucleotide sequence isolated from the Sargasso Sea
atctggatcgctttggcgtcatttttcgcccaagcccaaggcagtcagacgtcatgattgttgccggcacactagttaataaaatggcaccagctttgagacgggtatatgaccaaatgtcagagcctcgttgggtaatttcgatggggtcatgcgcgaatggcggcggctattatcattactcctacgccgtagtcagaggatgcgaccgtgtcgttccggttgatgtttatgttccaggctgtccaccaactgctgaggcattattatttgggattattcaattacaaaaaaaaatacgacgaacaaacactattgcaaggtaaa

SEQ ID NO: 201208 - DNA, 502 bp, Unknown
  Bacterial polypeptide expressing nucleotide sequence isolated from the Sargasso Sea
ttggctgttattgttttgtctcttgtatggctagaaaggaaagctttaggcagattgcagcttaggctagggcctactcgcactggtcccttcggacttttgcaacccattgcggatgcagtgaaactggtattaaaagaagatatagttcctaatgatgctgaaagagtcatattttgggtggctccaattatagttgtgatatcagcattcatgctttgggtaacaatacccttcactccggggattgtggtagagaatcttgaaaatatgggattgttttatataggtgctgtaggtgtgataggaattctcggccttgtattagcaggctggggatcggctaataaatatggagtcatcggtggtctgcgagctgccgctcaattaataagttatgaaataccattgataatggtattaatttctgtagctattgttacgcaaacatttaatctggttgacatagtaaatctacaatcacctgtccctttcgtactag

SEQ ID NO: 201209 - DNA, 178 bp, Unknown
  Bacterial polypeptide expressing nucleotide sequence isolated from the Sargasso Sea
ttatttagtagcaatcttatttattatttttgatttagaaattgcttttttatttccatgggcaatttctttaggcaaaattggattgtttggatttatatcaatgatgatttttttatttatcctaactgttggttttgtttatgaatggaaaaaaggagctttagattgggaataa

SEQ ID NO: 201210 - DNA, 190 bp, Unknown
  Bacterial polypeptide expressing nucleotide sequence isolated from the Sargasso Sea
tgaggcttttgatgatgcgcgcggaaggtttgatgttcgattttatcttgttgcaatattgtttattatttttgatttagaggtagcatttctttttccatgggcaattacacttgggaaaaattggcttgtttggattttggtctatgatgatatttcttgctatactaacaattggattcatttatga

SEQ ID NO: 201211 - DNA, 229 bp, Unknown
  Bacterial polypeptide expressing nucleotide sequence isolated from the Sargasso Sea
ttggctcaagattttagtgacaatggatttataactacctctttagataatcttgtaaattgggctagaacaggatcattacattggatgacatttggtttagcttgttgtgctgtggaaatgatgcaaacctcaatgccaagatatgatttagaaagatttggtgctgcaccaagagcatcacctcgccaatcagacgtaatgatagttgctgggactttaacaaata

SEQ ID NO: 201212 - DNA, 319 bp, Unknown
  Bacterial polypeptide expressing nucleotide sequence isolated from the Sargasso Sea
atgaataaagtattaaaatttattaaaagtttcttattgctcgaattatcgaagggtctatctttaacgctgaaatacctttttaaaaaaaaggttactataaattacccttatgaaaaaaatcctataagttcaaggttcagaggtgaacatgctttacgtagataccctaatggcgaagaaaggtgtatagcatgtaaattgtgtgaagccgtatgtccggcgcaagcaatagttatagaagctgaacctagacctgatggtagcagaagaacaactcgttatgatatagacatgactaagtgtatttattgtggat

SEQ ID NO: 201213 - DNA, 850 bp, Unknown
  Bacterial polypeptide expressing nucleotide sequence isolated from the Sargasso Sea
ggggtttatcttgtgccccggtcctccgtcctcttcgctctcgcaccgttctcaagtgcgatagtcgggggggttggagtgctgacggctctttttgccgcgactattgcactgaagcagaatgacatcaaaaaggtgctagcgtactccaccgtttcccaactcggatacatgttcttgggcgtcggtgtaggtgcatatgctgctggtgtattccacctgatgacccacgccttctttaaggctcttctctttcttgggtcaggtgcggttattcactcaatgcatgaggcttatcacgcgacgcacagccacgaagatgcgcaagacatgaggaacatgggcggtcttcacaggcctatgcgtatcacctgcattacaatgtggattgctaccctagcgattgcggggatttggcctttcgcgggcttcttttcgaaagacgagattatatggtatgcgggtgcttgggcgggtgctgaaggggcgccctatccgcaactgtataccgtctattggatccttgccctggtcgctgctctgctgactgcattctacatgactcgaatgatggtcatgaccttccacggtaagaaccggacaggtgagaaggaacaagggcatctgcacgaggccccgccggtgatgtggatcccgctcgcagtcctagcgttgctctcggtatttggtggctggatcaatgtgccagatgcactatcggccggctgggccggtttgggcgggttacttcctatgagtgagtggctacatcactggctcgaaccggtcactgctcaggcacaccatgttcaggaagtgaaccttgggaagtactcctactatgcgccgt

SEQ ID NO: 201214 - DNA, 514 bp, Unknown
  Bacterial polypeptide expressing nucleotide sequence isolated from the Sargasso Sea
attgttatgtgtaggatctttaaatttaaacgatattgttttagcacaaaaaaatatgtggtttgtagtgccactatttcccatgtttgtaattttttttatttctgctttagctgaaacaaatagacctccttttgatttaccagaggctgaagctgaattagttgctggataccaaactgaatattcaggaatgatgtatgcaatgttttggttaggagagtatgcaaatattttgttaatgtgtgcaatgggttctatattatttttgggtggatggcttgcaccattagaaatcgaagttctgtcatttattccagctccattttggttaatatttaaaatattatttttatttatactttttgctttagtaaaagctattgtcccacgatatagatatgaccaattaatgaaacttggatggaagatatttttacctttatcaataatttgggttgtaataactgcaggatatttactttattttaacttattaccggttcaattatga

SEQ ID NO: 201215 - DNA, 266 bp, Unknown
  Bacterial polypeptide expressing nucleotide sequence isolated from the Sargasso Sea
aatgaataataaaatagatcaagttccagatgaatttaaacaacttgcagacgattttagcaaaaatggatttataactacatcatttgataaccttataaattggtccagatctggatcacttcattggatgacctttggtcttgcttgctgtgcagtagaaatgatgcaaacatcaatgccaagatacgatcttgaaagatttggagctgcacctagagcttcaccaagacaatctgatgtaatgatagttgctggtactttga

SEQ ID NO: 201216 - DNA, 477 bp, Unknown
  Bacterial polypeptide expressing nucleotide sequence isolated from the Sargasso Sea
gatgcaaggaacgcgcgccgattattgcgtgccgacaccttgcggtgcccgaagggctgtcctaaggacccgccaacgaccgggcgccgctaacggcttcagtccggcaaatccggtaagaggccagtgtccattgactgatctgtcgcaatatctgccgatcctgatttttctggtgatcgcgatcgcgctttcatcggtaatcgtgttcctgcccctggcggttgcccgacttaccggcacgcaccgtcccaacgccgacaagctgagcgaatacgaatgcggctttcccgctttcgaagacccgcgcagccagttcgacgtgcgtttctacctcgtcgccatcctgttcatcatcttcgatcttgaagctgcgttcctgttcccctgggctgtgtcgctcgacatgaccggttgggcaggctggaccaccatgatggtattcctcggcgagcttgccatcggcctcgcctatgc

SEQ ID NO: 201217 - DNA, 676 bp, Unknown
  Bacterial polypeptide expressing nucleotide sequence isolated from the Sargasso Sea
taatgttggaattctttatttattcgctgtttcatcacttggtgtttatggaataataatgggaggatgggcttcaaactctaaatatccattccttggagcaatccggtcagccgctcaaatggtctcttacgaagtatcaattggggtgattattattaatgttttattgtgtgtaggttcacttaatttaaacgacatagttatagcacaacaaaatttatggtttgttattcctttatttcctatgtttgtgattttttttatttcagcactagctgaaacaaatagaccgccatttgatttaccagaagcagaagctgaactggtcgctggttatcaaacagaatattctggaatgatgtatgcaatgttctggcttggtgaatatgcaaatattcttttaatgtgtgcaatgggcgcaattttattcttaggaggttggttatccccaattgaaatttatccattcacgctagtgcctggagcagtatggttgatattaaagatattgttattatttttcttatttgccttagttaaagcaattgttccaagatatcgatatgatcaattaatgaaattgggttggaaggtatttcttccaatgtctttaacatgggttgtattaactgctagctttttattttattttaatcttttaccagtgaattaa

SEQ ID NO: 201218 - DNA, 817 bp, Unknown
  Bacterial polypeptide expressing nucleotide sequence isolated from the Sargasso Sea
gtcggcgtgctgatcgccgtcgccttcctgctgctggccgaccgcaaggtctgggccggcgtgcagatgcgcaagggtccgaacgtcgtcggtcccttcggcctgcttcaatccttcgcggacatgatcaagttcgtgctgaaggaggtcgtgatcccggccggcgccgataaggcggtcttcatcatcgccccgatcatcaccgtcatcctggccttcatggcctgggcggtcattccgttcgcgccgggctgggtggtgtcggacctgaacgtcggcatcctgtacatcttcgccgtgtcgtcgctgggcgtttacggcatcatcatgggcggttgggcttcgaactcgaagtatccgttcctgggttcgctgcgttcggcggcgcagatggtgtcctatgaagtctcgctgggcctcatcatcatcaatgtgatcctgctggccggcaccatgaacctgtcggcgatcgtcgacagccagaagggcatgttctggaactggtacggcttcggcggcggcgcagacacctggccgctggtggtgatccttttcccgatgtcgatcatcttcttcatctcggccctggccgaaaccaaccgcccgccgttcgacctgcccgaggccgagtctgaactggtcgccggttatcaggtcgaatacagctcgacgccgtatctgctgttcatgatgggcgagtacgtcaacatcgtcttcatgtcggcgatgatcagcctgctgttcttcggcggctggaaccccggcgtgccgcaggcgtggatggatgggctgccggcctggatcgcctatacgatct

SEQ ID NO: 201219 - DNA, 582 bp, Unknown
  Bacterial polypeptide expressing nucleotide sequence isolated from the Sargasso Sea
gatgttattttttcagacaacaataaaaatattagcaattgttgttcctgttatgattgccgttgcttactttacgtatgctgaacgaaaagtaattggttttattcaaggtagaataggcccaaatcgagttggtttatttggttttcgtttatggggattagggcaacccatagcggatgcggttaaattgatcgcaaaagagattataattccattaaatgcaaatcgctcactatttattatagcaccgatactttcacttgctcctgcgttagctgcatgggcggttatccctttcgatgatacaaaagttttggctaatataaacgcaggtttattatatgttttagcgctaacatctttagcagtgtatggtgtaattatcgcaggatgggcatcaaattctaaatatgcttttttaggtgcgatacgttcagcagcacaaatagttgcttatgagattgcaatgggttttgcattagttggggtgttgattgctgcaggtagtttgaatttaggagagatcgtaaatgcacaatcaggaagtgtaattcattggttttggttgccactcttacc

SEQ ID NO: 201220 - DNA, 418 bp, Unknown
  Bacterial polypeptide expressing nucleotide sequence isolated from the Sargasso Sea
taagtatatatttaaagctaaagttacaattaattatccacacgaaaaaggacctcttagtcctcgttttagaggtgagcacgcattaagaagatacccaaacggagaagagagatgtattgcatgtaaactctgcgaagcagtttgtcctgctcaagcaattactattgaggcagaaccaagggaagatgggagcagaagaacaacaagatatgacattgatatgactaaatgtatttactgtggtttgtgtcaagagtcctgccccgttgatgcaattgtcgaaggtcctaattttgaatttgctacagaaactagagaggaactaatatacaataaaaataaattattagaaaatggagatagatgggagcaagaaattgcccaaaatattcatcttgatagaaattacagataa

SEQ ID NO: 201221 - DNA, 637 bp, Unknown
  Bacterial polypeptide expressing nucleotide sequence isolated from the Sargasso Sea
atggatttaagcttaattacatcaaacagtagtctaattttaatattagagtctgtttttaagattcttatagttctaattccccttttgctttttgttgcttatcttacacttgctgaaagaagaataattggatttatgcaactgaggaaaggaccaaatgtagtcggtttatttggtttgttgcaaccatgggcggatgctttaaagttactttctaaagaaacaatacttccatccggttccagtaaagttgtttttattatagcgcctatgctaacatttattttgtccatgatcgcttggtctgtaatacctttttcagaagattttgtaattgcagatattaacgtaggaatattgtacttatttgcaatttcgtcattaggtgtttacggagtgattatggcagggtgggcttcaaactcaaaatatgcatttttaggtgctcttagatctgcagctcaaatggtttcctacgaagtttcgattggatttgttatggtatcagttttgttatgtgttggttcattaaatcttggtgacattataaatgcacagaaaaatttatggtttgttgttcctctctttccaatgtttgtagttttttttatttcaacgctagctgaaacaaata

SEQ ID NO: 201222 - DNA, 601 bp, Unknown
  Bacterial polypeptide expressing nucleotide sequence isolated from the Sargasso Sea
caactctaaatatccttttctagggtcaataagatctgcagcacaaatggtttcatacgaagtatctataggggttataattataaatgttttgctttgtgtcggctctcttaaccttagtgatattgtattagcacaacaagaactatggtttattattccattatttccaatgtttgtgattttttttatttcagcattagcagaaacaaatagaccaccttttgatttacctgaagcagaagcagaattagttgcaggctatcaaacagaatattctggaatgatgtatgctatgttttggttaggagaatacgcaaatattttattgatgtgtgcaatgggttcaatattatttttaggaggttggctttcaccgatagacttatttccttttaatgcaataccagaccccttgtggtttatatttaaaatattgtttttattcattttatttgcattggttaaggcaactgttccaagatacagatatgatcaacttatgaaaattggttggaaaatatttcttccattatcattattttgggtagttcttacagcaagttatttattgtatttcgatttattaccaaagaattga

SEQ ID NO: 201223 - DNA, 263 bp, Unknown
  Bacterial polypeptide expressing nucleotide sequence isolated from the Sargasso Sea
ttctatactttttcttggcggatggttgccattaatggatatttatccacttaatgtaattcctgctccaatatggatgatattaaaaattttgtttttgtttttattatttgctctgattaaggcaattgttccaagatatagatatgatcaactaatgagattgggctggaaaatatttttaccgttctcacttatttatctcgtgctaactgcaagttttttattttattttgacaaattaccaaaggtaaatatttaat

SEQ ID NO: 201224 - DNA, 535 bp, Unknown
  Bacterial polypeptide expressing nucleotide sequence isolated from the Sargasso Sea
attggtgtaataattattaatgttcttttatgtgcaggatctctaaatttaaatgatattgtaatggcccaaaaaaaaatttggtttgtaattcctttgtttcctatgtttgttatattttttatctcagctttagctgaaactaataggccaccctttgatttgccagaggcagaagcagaattagttgctggttatcaaacagagtattccgggatgatgtatgcaatgttttggcttggagaatatgcaaatattttattgatgtgtgccatgggatctattttatttttaggtggatggttaccattaatagatatttatccattttcaataataccaactccaatttggttaatatttaagattttatttttatttatactttttgctttagttaaagctatagtccctagatacagatatgatcaacttatgaaattgggatggaaagtttttttacctttgtctttgatttgggtagtatttacagctagttatttattttattttgacttgttaccggtttattaat

SEQ ID NO: 201225 - DNA, 358 bp, Unknown
  Bacterial polypeptide expressing nucleotide sequence isolated from the Sargasso Sea
ttcaaggttcagaggtgaacatgctttacgcagataccctaatggtgaggaaaggtgtatagcatgtaaattatgtgaagccgtatgtcctgcgcaagcaatagttatagaagctgaaccaagacctgatggaagcagaagaacaactcgttatgatatagatatgactaaatgtatttattgtggattttgtcaagaggcatgcccagtagatgcaattgttgaaggaccaaattttgaattctctacagagacacggcatgaacttttttacgacaaagaaagattacttgctaatggcgatagatgggaagatgaaattgcgcgtaatttagagaaagaaaataattttagatag

SEQ ID NO: 201226 - DNA, 352 bp, Unknown
  Bacterial polypeptide expressing nucleotide sequence isolated from the Sargasso Sea
gcaggctaccaaacagaatattctgggatgatgtatgcaatgttttggctaggagaatatgcaaatattcttttaatgtgtgcaatggggtcaattctttttcttggaggttggttaccaataatggatatttatccattaaacataattccagctccagtttggatgatattaaaaattttatttctatttttactttttgctttaattaaagctatagttccaaggtatcgatatgatcaattaatgaggttaggctggaaagtgttcttaccattttcattaatttatttagtattaacatcaagttttttattttatttcgataaattacctaaggtaaacttttaat

SEQ ID NO: 201227 - DNA, 769 bp, Unknown
  Bacterial polypeptide expressing nucleotide sequence isolated from the Sargasso Sea
aatgatttatttaaatatattttttagtgaaatttataaaatagcttttttattaataccagttttagtagcagtagctttaatcgtttggcttgatagaagggtatgggcatttgttcaaaaaagaaaaggaccaaatgttgtaggaccttttgggcttttgcaaactttagcagatgcgttaaaatttatttttaaagaaataatcatacctgcgagcgctaataaagttatatttattttagctccaatagtcacactaacattagcattaattgcttgggcggttattcctttcagtgaggaaatggttttggcaaatattaatgtaggaatattatatttatttgctgtttcttcattgagtgtttacggaattatcatgggtggatgggcatctaattcaaaatatccttttttgggcgctattagatctgctgcacaaatgatatcttacgaagtatcaataggaataataattgtaaatgtattgctttgtgttggctcgcttaatttaaataaaatagttttagctcaagaaaatgtttggtttatctttcctctttttcctatgtttgttgtattttttatttctgctttggccgaaacaaacagacctccttttgacttaccagaggctgaatctgaattagtagcaggttatcaaaccgaatattcagggatgatgtacgcaatgttttggttaggtgaatatgcaaatattttacttttgtgtgctatgggttctattcttttttttggaggatgg

SEQ ID NO: 201228 - DNA, 388 bp, Unknown
  Bacterial polypeptide expressing nucleotide sequence isolated from the Sargasso Sea
aattatccctttgaaaaaggccctcttagtccgaggtttcggggggagcatgcattacgtcggtaccccagcggcgaggagcgatgtatcgcctgcaaactctgcgaggcggtttgtccagcgcaagctattactattgaagcggaacctcgtgccgatggaagccgtagaacgacccgttacgacattgatatgactaaatgcatctattgtggttactgtgaggaggcatgcccggttgatgctattgttgagggcccaaatttcgaattcgcgacggagacacgggaagagcttctgtataacaaagataaattattagagaacggcgaccgttgggaaaccgaattggcgggccggcttaaggctgacgccccatacagataag

SEQ ID NO: 201229 - DNA, 928 bp, Unknown
  Bacterial polypeptide expressing nucleotide sequence isolated from the Sargasso Sea
tggagcatacgtcgcagcaatttttcatcttgttacccacgcattttttaaagcacttttatttctaggagcaggggcagtaattcatgaaatgcatcatgagcaaaatatatacaaaatggggggattaagaaagaaaatgccagtcacagctgcaatgatgggaatagggacactagctatatccggaattcctcctttggcaggattttggtcaaaagatgaaatacttgcatcagttttttctagaggtggcatttactatggattttgggctttatccctattagctgcatttatgacagccttttatatgggaagacattggttattaatatttgtgaaagaaccaactagtgatattgaaaatatacatgaagctccaaaaaatatgacaagaccattaattttgcttggaatattttctatatttatagggtttattaatacacctttttttcatggattagaaaaagttttagatgagacacttaaaagtgtagaagtaactcatcttcccgaaggtatcactttggcaatattggctgtgttgtcaattggtgctggtttttctggtcttgggcttgcctacttaatttatatatttgatattttttcttattttaaaattaagctcccatttttaagtgagattaaacttttatcaaaagaagttcttttcttagacaaagttggtaatgcaatatttgtcaggagcttaaaaactctatcaaggaaagtagccgttacagttgataacatgactatcgatggaattgtaaacggagtcgcaaagtcatttttaaggtcttcccaacagatttctttagctcaaacaggattagttagaaactatgttgtttacttcggtctttttatgttggtactcatagttatatatctatttttcacaggagtattaatttga

SEQ ID NO: 201230 - DNA, 568 bp, Unknown
  Bacterial polypeptide expressing nucleotide sequence isolated from the Sargasso Sea
gtcaaattcaaaatatccttttttaggtgcaataagatctgcggctcaaatggtatcatatgaagtttctataggagtaataataataaatgttttattgtgcgttggttctttgaatctaacagatattgtcttagcccaagaaaatttatggtttatagttcctctttttccaatgtttgtcgttttttttatctctgcacttgcggaaactaatagacctccatttgatttacctgaagcagaagctgagttggtagcaggttatcaaacagaatattctggaatgatgtacgcaatgttttggttaggtgaatatgcaaatattttattaatgtgtagtttaggatctattttatttttaggaggatggttatcaccaatagatatttatcctttcacagttatacccgcgccactttggttgatatttaaaatattattattgtttattctattctctttagttaaagcaattgttccaagatatagatatgatcaattaatgaaattaggttggaaaatttttcttccactgtcattatcgtgggtagttttaacagcgagt

SEQ ID NO: 201231 - DNA, 823 bp, Unknown
  Bacterial polypeptide expressing nucleotide sequence isolated from the Sargasso Sea
ccagtgctccccctcgcgggagccgtgatcaccggccttggcctgatcagtttcaaccgcaccatcaaccggttgcgcaagccggtggcgctgttgctgatcagctgcgtcggcgcagcagcggtgctgagctacgccatcctcgccgggcaactggccggtgctccccccgtcgagagcctgttcgtctgggccagtgccggaagtttcgtgttgccgatgggtttcgtggtggaccccctggccgccgtgatgctctccctggtgaccaccatcgctctgctggtgatggtgtattcccatggctacatggcccatgacaagggctacgtccgctttttcacttacctggccctgttcagcagctcgatgctggggctgatcatcagcccgaatctcctcgagatctacgtgttctgggagctggtgggcatgtgttcctacctgctggtgggcttctggtacgaccgcgatggagcagctcacgctgcccagaaagcttttgtggtgaaccgcgtgggcgacttcggtttgttgctgggcatcctcggattgttctgggccaccggcagcttcgatttccagggcattgccgatggtttgcgtgatggcctgagctcaggcgccattgcaccgtgggccgcactcctgctctgcctgctggtgttcctcggccccatggccaagtcggcccagttcccccttcacgtgtggctgccggatgcgatggagggccccaccccgatttccgcgctgattcacgccgccacgatggtcgccgccggggtgttcctggtggcccgtctcgaccctctctacagcc

SEQ ID NO: 201232 - DNA, 105 bp, Unknown
  Bacterial polypeptide expressing nucleotide sequence isolated from the Sargasso Sea
gaaaaattggtttattgggtttcgtttctaggatgatatttctatttattttaactgtaggatttatctatgaatggaaaaaaggagcacttgattgggagtaaa

SEQ ID NO: 201233 - DNA, 375 bp, Unknown
  Bacterial polypeptide expressing nucleotide sequence isolated from the Sargasso Sea
cagaagccgaagccgaactagttgctggttatcaaaccgaatattcaggaatgatgtatgcaatgttttggcttggagaatatgcaaacatacttttaatgtgtgctatggggtctatactttttcttggtgggtggttaccaattattgatatttacccgcttaatatgattccttctccaatatggatgattataaaaattttatttctatttctcttgttcgcattaattaaagctatcgttccaagatacagatatgatcaacttatgagattagggtggaaggtttttttacctttttcacttttatatctagtcttaacagcaagtttcttattttatttcgacaaactacctaaaggaaatttttaat

SEQ ID NO: 201234 - DNA, 872 bp, Unknown
  Bacterial polypeptide expressing nucleotide sequence isolated from the Sargasso Sea
cattgactcagtcagacataaagcgcattcttgctttttcactgttagccagatcggctacatgtttttaggtctcggggtaggtgcctggtctgctgcaatcttccacctcatgacacatgcgttctttaaagctcttctgtttcttgcttcgggaactgtcatactctcggttcaccatgagcaaagcatttttaagatgggtggcttaagaaaggctctgccagtttcatttgcctcatttctcattggatcattagctctcacggctttcccttatacatcaggttattttagcaaggacgaaatcttactggcggcattcgaattggagggcgtgggcacctacctttggttgggtggtgtgattggtgctttctttacgggaatttacacatttcgtttgttttttatcgtgttctttggagagaacaagggccacttacctgaaaaggaagttggagggtggcatatgaatggtcctctgattttgttaatgattttatcgctagtgggaggatttataaccgtcccagtagaggcggttttcagtcatggtgccgcgcatgaggagcatcatgtgtcagcattagtgcacggcttcatgattgcgatgccattagttgggatttttattagctatatgtttttctatgcaaagaaatggtcgattgaagatctaatgtcccgaccaatagctcaaaagcttcacaggttgtggcatagcggctgggggatggattggttatatgatcggatttttgtgtttccgttcgtttggttatcgcgaattaataaagacgacctgattgacaaactgtacacatttatcgcgatggtctctcgtctcgctaacagttatgttgtacgaa

SEQ ID NO: 201235 - DNA, 490 bp, Unknown
  Bacterial polypeptide expressing nucleotide sequence isolated from the Sargasso Sea
gatgtcttttataactaaatatattaaatcttttaccttatttgagttaatgaaaggtttagcattaacattaagatactttttcaaacctaaagtgactattaattatcctaatcaaaaaggtccattgagtccgagatttcgaggtgaacacgctcttcgaagatatcctaacggagaagagaggtgtatcgcttgtaaactttgtgaagctgtttgtcctgcgcaagcaatcactattgaagctgaacctaagcctgatggaagtcgaagaacaactcgatatgacattgacatgactaagtgtatttattgtggtctttgtcaagaagcatgtccggttgatgctattgtagaaggtccaaactttgaatacgcaactgaaacaagagaagaacttttatacgataaagaaaagttattacgtaacggtgatatatgggaaaagcaaataagtgaaaatattcgaagggacagtaagtttcgataa

SEQ ID NO: 201236 - DNA, 862 bp, Unknown
  Bacterial polypeptide expressing nucleotide sequence isolated from the Sargasso Sea
tttgatttacaaggcaactattatcataataccgatcataatttttctaatattaaataataattttgaaaatataaaaatatttaataatagttttgtgttagatgaattttcatcttttatgaagatcttaatcttagtctcctcgttttttgttttaataatgtcaaaaaaatatattcaagatattaaaaatgataaatttgagtatccagttattatgttaattgccattttaggtatgttttttatggttagttcaaatgacttaatacttttttatcttggcttagaacttcagtcactgtcattatatatactcgcatctatagatagagataatttgagatcatctgaagcaggtataaaatattttgtactaagtgctctctcctctggattattattatatggatgttctttactttacgggtttactggctcaacaaattttcaaattatatctaataatgttggagacattaatataggaactatttttgcaatgatttttatattagttgggttagcatttaaagtttctgctgttccttttcatatgtggacaccagatgtttacgaaggttcaccaacatctgttactagcttttttgctattgttcccaaaattgcagggatagcagtttttataagatttatgtattcaccttttcaaaatattttagaccaatggcaatatattttggtttttatatctatcgcttctatgattttaggagctgttgcagcaataaatcaaaaaaatattaaaagattaatagcttacagctcaataagtcatatgggttatgcaatagctggcatatcaacaggtaccgaaagtggtttaaaagttcaataa

SEQ ID NO: 201237 - DNA, 916 bp, Unknown
  Bacterial polypeptide expressing nucleotide sequence isolated from the Sargasso Sea
tatatcttcagaatccggtttaaaatattttgttttaagtgcattatcttcagggcttttactttatggttgttcattaatatatggattttcaggttcaacaaatttttttataatagccgacaatttgactgaaagttcttacggattaacatttggtatagtatttattcttgttggtttagcattcaaaatatcagctgttccttttcatatgtgggcacctgatgtttatgagggatcaccaacttcagttactgctttttttgcaattttaccaaaaatagctgcattgactatattcgtaagagttctttatgttccattttttaatcttataaatgattggcaaatgatagttatatttctttcaattgcctcaatgctttttggatcaattgctgcaataggacaatcaaatttaaaaagacttatagcatatagttccatcagtcatatgggctatgccctagctggtttgtcaactggtaccaatcaaggaattcaaagctcaattacatatataactatctacttatttatgaatctagctttttttggatgtattttgatgcttagaagagatgacaaatattttgaaaatattgaagatttgtcaggtttatccaaacaccatccagtgctctctttttcttttttaatcgttttattttcactagctggaattccaccgctagcaggattttttgctaaattttatatatttacggcggtaatagaggagtcgatgtactttttggctatagttggtttactatcaactgtaattgcagcctattattatttaagattaataaaaataatctattttgacagtgaaaaagaaaaatatgaaaccaaccataatattggattaaaaatatcacttctaatttcatcaaatatttattctttt

SEQ ID NO: 201238 - DNA, 493 bp, Unknown
  Bacterial polypeptide expressing nucleotide sequence isolated from the Sargasso Sea
atgataaagaatataattttagatgttaaaaaattttttcttatagaaattttaaagggtttagggttgaccttaaaatatttttttaaaaggaaagtaactataaattacccatatgaaaaaggtccaatatcaccaagatttagaggagaacatgctttaagaagatatccaaatggtgaggaaagatgtattgcttgtaagctttgcgaggcaatatgcccagctcaagcaattaagatcgaagcagaaccaagacctgatggtagtagaagaacaaccagatatgacattgacatgacaaagtgtatttattgtggcttttgtgctgaagcctgtcctgtagatgcaatagtagaaggtcctaattttgagtttgctaccgaaacgcgtgaagaattgttttatgataagaaaaaattgttagaaaacggtgacaggtgggaagaacaaattgcagcagctcaaaaattagattcaccatatagataat

SEQ ID NO: 201239 - DNA, 430 bp, Unknown
  Bacterial polypeptide expressing nucleotide sequence isolated from the Sargasso Sea
atgtataaattaattaaatcttttactttatttgaattatttcaagggctatttttaactttcaaatacatatttaaatctaaagttacaataaattatcctcacgaaaaaggtccattaagcccacgttttagaggcgagcatgctttgagaagatatccaagtggggaagagagatgtatcgcatgtaaactttgtgaagcagtatgtcctgctcaggcaattacaattgaagcagagccaagagaggatggaagcagaagaacaacaagatatgatatagatatgactaaatgtatttactgtggtttatgtcaagaatcttgcccagttgatgcgatagtagaaggaccaaattttgaatttgccactgaaacaagagaagaattaatttataataaagataaacttttagaaaatgggagataga

SEQ ID NO: 201240 - DNA, 346 bp, Unknown
  Bacterial polypeptide expressing nucleotide sequence isolated from the Sargasso Sea
gttgcaggattttttactgaatattcatctgcttcatttgtattattttttttaggtgaatacgcgagtatgattttaatgtcttctatgactgtcattctttttttaggcggatggcttcctccatttgatgtatacccattaaatgttgttcctggagtaatctggtttactgtgaaagtaatatttatattatttttatttatttgggttagaggaactttcccaagatatagatatgatcagttaatgagacttggatggaaagtttttctaccgttttctttgttttgggttgtggcaacttctggttttttagtatattttgacatgctgccaaattaat

SEQ ID NO: 201241 - DNA, 870 bp, Unknown
  Bacterial polypeptide expressing nucleotide sequence isolated from the Sargasso Sea
aatgacagagatattttcacaattattttttacgattgggggtgtgctctcggatctgacgtcttctaattttggttttgtacttattttgataggccagggccttcttatggctgtgtttttgcttctttccgcatactttttaatttatgcagatcggaaggtttgggcagctgttcaattacggcggggtccaaatgttgtgggagcattcggacttttgcagtctggtgcagacatgttaaaattagtgttcaaagaaattgttgttccagctggatcagataaatttgttttctttttagctccagtggtttcctttgtgatggctattttagcctgggcggtagttccattaaatgaaggttggcaactctcgaatattaatgtcgccatactttatgtttttgcgatatcgtcacttgaagtttacggtgttatcatgggtggttgggcatctaattccaaatatccatttttgggttcgcttcgttctgctgctcagatgatttcctatgaagtgtcaataggactggttattataggtgttatcatttcaacgggatctatgaattttggcgcaattgttgctgcgcaagataccgattatggaatttttggttggtattggttgccccatttgccaatgttatttttattttttatctctgctttggccgaaacaaataggccaccatttgaccttcccgaggctgaatcggaactggtggcaggtttccaggttgagtacagctccacgccttttttattatttatggctggtgagttgatagcagtttttttgatgtgtgcacttactagccttttgttttttggcggttggttgtctccaattcctgctttacccga

SEQ ID NO: 201242 - DNA, 728 bp, Unknown
  Bacterial polypeptide expressing nucleotide sequence isolated from the Sargasso Sea
gcttcttctgcagataggcatgcttggctgttttgcagcaatggatgtagtacttttttatgtattttttgagttgatgcttattcctatgtatttgttgatcggcatttggggtggggcaaacaggctttacgcaactatcaaattctttctatacacctttcttggttcactgctgatgttggttgctctgctctacacggcaagcatatacatggatttaaatggatcgtggtcgttcagcgttcttgactggtatggcatggatatcccagctgacactcagtactggctgttcataggatttgcagcagcttttgcagtgaaaatccctattttccctcttcatacatggctcccggatgcacactacgaagctcctactgcaggatcagtccagcttgctgcagttttgctaaaatttggaccatatgggtttttacgttttgccatgcctgtttttcctgcggcggtttatgagctatctacattcttcatagtactggccttaatcggaataatttatggaggaatggtggcaatggtccagccccagattaaaaggcttattgcttactcatctgtagcccacatgggctatatagtcctcggcctgttcgcacttaacttacaaggtctttatggaagctggattcagatgataaaccatgcaattgtaactggtgcccttttcctggttgttggaatgatttatgaacgtacgcaca

SEQ ID NO: 201243 - DNA, 225 bp, Unknown
  Bacterial polypeptide expressing nucleotide sequence isolated from the Sargasso Sea
catgacagcggaatttttaaaagattatttacctataattttatttctaatagttgcactgggactgagttgtgcatttgtagttgtaaattttatactatcaccaaatcatccagatccagaaaaactatcagcttatgaatgtggttttgaaccatttcaagactctagaatggaatttgatgttagattttatttagtagcaattttgtttattatctttga

SEQ ID NO: 201244 - DNA, 253 bp, Unknown
  Bacterial polypeptide expressing nucleotide sequence isolated from the Sargasso Sea
ttttcttggaggttggttaccattaatggatgtctatccgctaaatctattacccgctccagcatggatgatattaaaaattttgtttttatttctattatttgctttaattaaagcgattgttccaagatacagatatgatcaactaatgagattaggttggaagatttttctaccattttcattagtttatcttgtactaactgcaagttttttattttattttgaaaaattacctaaggtaaacatttaa

SEQ ID NO: 201245 - DNA, 467 bp, Unknown
  Bacterial polypeptide expressing nucleotide sequence isolated from the Sargasso Sea
gatggctgagttctgggacggatatctctggcccggcattatcatcgtcgggcagatcctgctgattatcgtgccgatcatgggcgcagttgcttatctaacacttgccgaacgcaaggtcatcgccgcgatgcagcttcgcaaggggcccaatgttgtcgggcctttcggattattccagccggttgccgatggattgaagctgctggtcaaggaaacggttgttccatccggggcaaaccgggtggtgttcatcctggcacctatgctgaccttcatcctggcgctggttgcttgggcggtgataccgttcgacgcgggttgggtgctcgccgacatcaatgtcggtattttgtaccttttcgcaatctcgtctttgggggtctacggcatcattatggcgggatgggcgagcaattcgaaatacgcattcttaggtgcactccggtcggcggcgcagatggttt

SEQ ID NO: 201246 - DNA, 252 bp, Unknown
  Bacterial polypeptide expressing nucleotide sequence isolated from the Sargasso Sea
aatgaatgataaaatagaacaagtacctgatgaatttaagcaacttgctgatgattttagcaagaatggttttataacaacttctttaaacaatttaatcaattggtctagatcaggatcacttcattggatgacatttggattggcttgttgtgctgttgaaatgatgcaaactgctatgccaagatatgatgtagaaagatttggtgcagcacctagaggttcaccaagacaatcagatgttatgattgt

SEQ ID NO: 201247 - DNA, 877 bp, Unknown
  Bacterial polypeptide expressing nucleotide sequence isolated from the Sargasso Sea
tatttttgttttattatcatcaaataagtatgttcaaattataaatataaataaaattgaatatccaatattaattttatcttcaatacttggaatgattgttatgattagttctaatgatttaattttattttatgttggtttagaattacaatcacttgctttatatgttttggcatcttttaatagagataatttactatcatcagaatcaggtttaaaatattttgtgttgagcgccttatcatctggacttcttctttatggatgttcattaatatatggtttttcaggatcgacaaatttttttataattcgtgatgcattactacaagatagctacggtcttacatttggtatagtttttatacttgttggtctagctttcaaaatttctgcagttccatttcatatgtgggctccagatgtttatgaaggatcaccgacatcagttacaacattttttgctatattacctaaaattgctgcattaacagtatttattagatttttatatgtcccgtttttaaaccttatcgaacagtggcagttaataattatatttttatcaattgcctctatgttatttggatctattgctgcaattggtcaaaaaaaattaaaaagattaatagcatatagttcgattgcacatatgggttatgccttagctggtctagcaaccggaactaatgcaggaatacaaagttcaatttcttatataacaatttatttatttatgaatttaggattttttagttgtatgtttatgttaaggagagaagataaatattttgaaaatatcgaagatttgtctggattatctaaaaatcatcctttgctatcattttcacttttacttgttctattttcctta

SEQ ID NO: 201248 - DNA, 856 bp, Unknown
  Bacterial polypeptide expressing nucleotide sequence isolated from the Sargasso Sea
gttgttggcccgttcggtttatttcaatcactagcagatgcattaaaatatatatttaaagaaataataatacctgcaagttcaaacaaacttgtgtttgtattagctcctgttgttacaatgacattagcattaatatcatgggctgtaataccatttggcgaagattttgttctagccgacatcaatgttggtattttatatcttttcgcagtttcatcattaggtgtatatggaataattatgggaggatgggcctccaattctaaatacccttttttaggtgcaatcaggtctgctgcgcaaatggtttcatacgaagtttcaataggagttataataattaatgttctcttatgtgttggatctttaaacttaagtgacatcgttttggcacaacaaaatttatggtttgtaattcctttgtttcctatgtttgtaattttttttatttctgcattagcagaaacaaaccgtcctccatttgatttaccagaagcagaagcagaattggtggcaggatatcaaactgaatattcaggaatgatgtatgctatgttttggttaggagaatacgcaaacattctgttaatgtgtgcaatgggagcagttttatttttgggtggctggttatctccaatagatatcttcccatttaatgttattccaggtccattttggttaatctttaaaatattatttttatttattttatttgcgttagttaaagcaaccgttccaagatacagatatgaccaattaatgaagctgggttggaaaatatttcttccattttcactgttttatgttgttttaacttcgagttttttactatattttgatttattaccaggca

SEQ ID NO: 201249 - DNA, 742 bp, Unknown
  Bacterial polypeptide expressing nucleotide sequence isolated from the Sargasso Sea
tgcaagttcaaataagcttgtatttgtattagcccctgtcgtgactatgacattagcattaatatcatgggctgtaataccatttggcaaagatcttgttctagctgacatcaacgttggtattttatatctttttgcagtttcatcattaggcgtatatggaataattatgggaggatgggcctccaattctaaatacccttttttaggtgcaatcagatctgctgcacaaatggtatcatatgaagtttcaataggagttataattatcaacgttctattatgtgttggatctttaaacttaagtgacattgttatggcacaacaaaatttatggtttgtaattcctttgtttcctatgtttgtaattttttttatttctgcactagcagaaacaaatcgtcctccatttgatttaccagaggcagaggcagaattagtggcaggatatcaaactgaatattcaggtatgatgtatgctatgttttggttaggggaatatgcaaatattttgttaatgtgtgcaatgggatcagttttatttttgggtggctggttatctccaatagatatctttccatttaatgctattccagggcctttttggttaatcattaaaatattatttttatttattttatttgcgttagttaaagcaactgttccaagatacagatatgaccaattaatgaagcttggatggaagatatttctcccattttcactattttatgttgtttta

SEQ ID NO: 201250 - DNA, 701 bp, Unknown
  Bacterial polypeptide expressing nucleotide sequence isolated from the Sargasso Sea
aatgacctacataaacatattttttgcagaattttataaaataatttttttacttttaccagttttggtatccgtagctttaattgtatggttagatcgaagagtttgggcttttgttcaaaagagaagaggccctaatgttgttggtccatttggactttttcaaactttagctgatgcactaaaatatatttttaaagaaataattattcctgctagcgcaaataaaataatttttgttttggctcctgttattacacttacactagctttaatagcttgggcagtaataccatttagcaatgaaatggttttagcagatataaatgttggtatattatatttatttgctatttcatcattaagtgtctacggaattataatgggaggatgggcctcaaattctaaatatccctttttgggtgctataagatcagcagcacaaatggtatcttacgaagtatcaattggaattattattattaatgtattactttgtgtaggttcgcttaatttaaataaaatagtattagctcaagaaagtgtatggtttatttttccacttttccctatgttcgttattttttttatatcagctttagcagaaacaaacagacctccatttgatttaccagaagcagaatcagaattagtagctggatatcaaactgaatattcaggaatgatgtacgcaatgtttt

SEQ ID NO: 201251 - DNA, 418 bp, Unknown
  Bacterial polypeptide expressing nucleotide sequence isolated from the Sargasso Sea
atgtttaggtatttgaataaaataagatcgtttgttttaattgaactttttagaggtatgtatttaactttcaaatatatgtttaagtctaaggtaactctaaattatcctcatgaaaaaggacctcttagtccaagattcagaggtgagcatgctttaagaagatatcctaatggcgaagaaagatgtatagcatgtaaattatgtgaagctgtttgtcctgcccaagcaataacaattgagtctgagccgagagaagatggaagtcgtcgaactacaagatatgatatagatatgactaaatgcatatattgtggattgtgccaagaatcctgcccagtagatgcaattgttgaaggacccaattttgaatttgcaacagaaactagagaagaattaatgtacaataaagaaaaat

SEQ ID NO: 201252 - DNA, 646 bp, Unknown
  Bacterial polypeptide expressing nucleotide sequence isolated from the Sargasso Sea
tcatcattaggtgtatatggaataattatgggaggatgggcctccaattctaagtacccttttttaggtgcaatcagatctgctgcacaaatggtatcatatgaagtttcaataggagttataattattaacgttctattatgtgttggatctttaaacttaagtgacatagttatggcacaacaaaatttatggtttgtaattcctttgtttcctatgtttgtaattttttttatttctgcactagcagaaacaaatcgtcctccatttgatttaccagaagcagaagcagaattagttgcaggatatcaaacagaatattcaggaatgatgtatgctatgttttggttaggggagtatgcaaatattttgttaatgtgtgcaatgggggcagttttatttttgggtggctggttatctccaatagatatctttccatttaatgctattgcaggtcctttttggttaatctttaaaatattatttttatttatattatttgcgttagttaaagcaactgttccaagatacagatatgaccagttaatgaagcttggttggaaaatatttctaccattttcactgttttatgttgttttaacttcaagttttttactatattttgatttactaccaggaaaataaa

SEQ ID NO: 201253 - DNA, 319 bp, Unknown
  Bacterial polypeptide expressing nucleotide sequence isolated from the Sargasso Sea
catttcttcttttttttctttggtgaatatataaacatcttactgatgtgcgcaatgatgaccatcatgttttttggaggatggtatcctccaattgatattgctccatttaaccttgtaccaggatttatatggttcctcataaagatgatggcaattttttatatgatatcaatggtaaaggcttttgttcctcgttatcgatatgatcaattaatgagacttggctggaaagtatttttgccgctttcattattagctgttgtagtaacttctagtgttttatttttctttaatctggctcctgtattttcatgaa

SEQ ID NO: 201254 - DNA, 299 bp, Unknown
  Bacterial polypeptide expressing nucleotide sequence isolated from the Sargasso Sea
aatgggagtaaataattttctaggaaaaaaacttaatgagattcctgaccaacctgagcaggataaaattttaactgcagttgctgatgaaatgtcaaataaaggctttgttattggtcaagcagataagttgtttaactgggcaaagtctggttcattgtggccaatgacatttggtctcgcttgttgtgcagttgaaatgatgcatagtgcagcttctcgttatgacatggatcgttatggtatgttgtttagacctagtccaaggcaatctgatgttatgatagtagcaggaactt

SEQ ID NO: 201255 - DNA, 220 bp, Unknown
  Bacterial polypeptide expressing nucleotide sequence isolated from the Sargasso Sea
tgatttatatccattcaatttaattccaggagttttttggttaatttttaagatattatttttatttattttatttgctttagttaaagctgtagtgcctagatatcgatatgatcaacttatgagattagggtggaaaatatttcttccattatctttaacttatgtcattttaactgcgagttatttattctattttaacctcttaccgacaatttaa

SEQ ID NO: 201256 - DNA, 205 bp, Unknown
  Bacterial polypeptide expressing nucleotide sequence isolated from the Sargasso Sea
gataccgggagcaatatggttaattttgaaaatcttactgttattttttttatttgctttagttaaagcaattgttccaagatatagatatgatcaacttatgagactaggttggaaggtatttcttccattttccttaatttgggtagtcattactgcaagctatttatttttttttaatcttttaccagtgaacaaattatga

SEQ ID NO: 201257 - DNA, 143 bp, Unknown
  Bacterial polypeptide expressing nucleotide sequence isolated from the Sargasso Sea
tttagttaaggcaattgtccctagatatagatatgaccaattaatgagattgggttggaaggtttttcttcccttatcattaatttgggtagtattaactgcaagctatttgttttattttaaccttttacctggaaattaat

SEQ ID NO: 201258 - DNA, 553 bp, Unknown
  Bacterial polypeptide expressing nucleotide sequence isolated from the Sargasso Sea
aatggtttcatatgaagtatctataggttttgtaataattacagtattattatgtgtaggttctttaaatttatcaaagatagttttagctcagcagactgtatggtttgcaattccattattacctatgttcattattttttttatttctgctttagctgaaacaaatagattaccttttgatcttcctgaagatgaatcaacacttgttgcaggattttttactgaatattcatctgcttcatttgtattattttttttaggtgaatatgcgagtatgattttgatgtcttctatgactgtcattctttttttaggcggatggcttcctccatttgatgtatacccattaaatgttgttcctggagtaatctggtttactttgaaagtaatatttatattatttttatttatctgggttagaggaacttttccaagatatagatatgatcagttaatgagacttggatggaaagtttttctacctttttctttgttttgggttgtagtaacttctggttttttagtatattttgacatgctgccaaattaa

SEQ ID NO: 201259 - DNA, 490 bp, Unknown
  Bacterial polypeptide expressing nucleotide sequence isolated from the Sargasso Sea
atggcgtttatcgacagaactgcccgtgcattcctacttgcggaattggtccaagggctctcgttaacacttcgtgcaatgtttaagccgaaggttacgatcaattatccgtacgaaaaaggaccgttgtcaccaaggttccgcggagagcatgcactcaggcgttaccctaacggggaggaacgatgcattgcctgtaaactctgcgaggcggtctgtccggcgctcgccattactattgaagcggagccgcgcgaagacggcagccgacggacgacgcgttacgacatcgacatgacgaaatgcatctattgcggatattgccaagaggcctgtccggtggacgcgatcgtcgaaggtccgaactttgagttcgcaaccgagacgcgcgaagaacttttttacaataaagacaaactgctttcgaacggtgaccgttgggagcacgaaattgcggcaaacctggagttggatgcgccgtatcgttaat

SEQ ID NO: 201260 - DNA, 580 bp, Unknown
  Bacterial polypeptide expressing nucleotide sequence isolated from the Sargasso Sea
atgaattttataaacgattttgggattagtgtttttggatatagtgacttttcgtcttttattattattatattaaaaatacttgccatcgttttgcctttgttaatcagtgttgcttatttgacacttgctgaaagaagagtcatcggattaatgcaattgagaaaaggccctaatgtagttggtccgtttggtttatttcaaccttttgctgatgcccttaaattaatgtccaaagaaactattataccaaaagaggctaataaatttttatttttattagcaccaatgattacatttattttagctctaattgcatgggcagttatcccttttgatgaaaataacgtattagcagatattaatgttggaatactttatttatttgctgtttcatcattagctgtttatggaattattattgccggttgggctagtaattctaaatacgcttttttaggtgctttaagatctgctgcgcaaatggtttcatatgaagtgtcaattggtttaattattataacagttttattatgcgttggatctttaaacttaaccgaatattgtcaacgcacaaaaa

SEQ ID NO: 201261 - DNA, 511 bp, Unknown
  Bacterial polypeptide expressing nucleotide sequence isolated from the Sargasso Sea
tctattatgtgttggatctttaaacttaagtgacatcgttatggcacaacaaaatttatggtttgtaattcctttgtttcctatgtttgtgattttttttatttctgcactagcagaaacaaatcgtcctccatttgatttaccagaagcagaagcagaattagtggcaggatatcaaactgaatattcaggaatgatgtatgctatgttttggttaggggagtatgcaaatattttgttaatgtgtgcaatgggatcagttttatttttgggaggctggttatctccaatagatatcttcccatttaatgctatttcaggtcctttttggttaatttttaaaatattatttttatttatcttatttgcgttagttaaggcaactgttccaagatatagatatgatcaattaatgaagcttggttggaagatatttctcccattttcactgttttatgttgttttaacttcaagttttttattatattttgatttactaccagggaaataa

SEQ ID NO: 201262 - DNA, 772 bp, Unknown
  Bacterial polypeptide expressing nucleotide sequence isolated from the Sargasso Sea
ttggaattaatttttttactcccaatttttcttccatttttaacagcaatattcctttttctaaataaaaaattatttagtgaattagttactaacttttttactttaaacagcgcactattatcatttgcaatcgctgcttattcatttattgctttatcgctcaataaatttaaaccagtgaatgttgaactattccagtggatttctaatcctgatataagcattggctttacacttgatgggctatctggaattatgctgatcttagtgacaggactatcttttataattcaacttttttctacttcttatatggaaaaagacgaaaaacattgtaattattttgtgtattttaacttttttgttttttcaatgttgctactagttatgtcatcaaacttcttagtaatgtttcttggatgggaattagttggtttaagttcatatcttttaatttcattctggtcaaaaaaaccagctgctgcaaaagcaggaaataaagcatttgtcataaatagagttggtgattttggatttttaattggattaatgattattttggatacttataatacttttgatttttatcaaattttacaaaatactgatggagttaatgaatcaacaattacagccatatcactctttttattgcttggtgcttttggtaaatctgctcagtttcctctttttagctggcttccagatgccatggaaggcccaactcctgcaagcgctcttattcatgcagccacaataggtaccgcgg

SEQ ID NO: 201263 - DNA, 304 bp, Unknown
  Bacterial polypeptide expressing nucleotide sequence isolated from the Sargasso Sea
atgaaattaatagatacagatgaaaaattaaaaaaagtacctgatgaatttaaacagattgctaaagacttcgctgaaaaaggatttattaccacttcaactaataatttaataaactgggctagaaccgggtctttgcattggatgacttttggtcttgcatgttgtgccgttgaaatgatgcatacttcaatgccaagatatgatctggaaagatttggagcagcacctagggcgtcaccgagacaatcagatgtgatgatagttgcaggcactttaaccaacaagatggctccagcttaag

SEQ ID NO: 201264 - DNA, 304 bp, Unknown
  Bacterial polypeptide expressing nucleotide sequence isolated from the Sargasso Sea
aatgttttggttgggtgaatatgcaaacattttacttttatgtgcgttaggttcaattctttttctcggcggctggttgtcaccaatagatgtatatccattaaatattatacctggagttttttggatgacatttaaaattttattactattttttttatttgcaataataaaagcaatagttccaagatatagatatgatcaattgatgagacttggttggaaagtatttttaccattttcattaatctacgtagttcttacagcaagttttttagtttactttgatttattaccaaaatga

SEQ ID NO: 201265 - DNA, 775 bp, Unknown
  Bacterial polypeptide expressing nucleotide sequence isolated from the Sargasso Sea
aagtttgtatttgtattagctccagtggttacaatgacatttttattaatatcatgggctgtaataccctttgatgaagattttgttctagctgacatcaatgttggtattctatatcttttcgcagtttcatcattgggtgtatatggaataattatgggaggctgggcatccaactctaaatacccttttttaggtgctatcagatctgctgcacaaatggtatcatatgaagtttcaataggagttataattatcaacgttctattatgtgttggatctttaaacttaagtgacatcgttatggcacaacaaaatttatggtttgtaattcctttgtttcctatgtttgtaattttttttatttctgcattagcagaaacaaaccgtcctccatttgatttaccagaagcagaagcagaattggtggcaggatatcaaactgaatattcaggaatgatgtatgctatgttttggttaggagaatacgcaaacattctgttaatgtgtgcaatgggagcagttttatttttgggtggctggttatctccaatagatatcttcccatttaatgttattccaggtccattttggttaatctttaaaatattatttttatttattttatttgcgttagttaaagcaaccgttccaagatacagatatgaccaattaatgaagctgggttggaaaatatttcttccattttcactgttttatgttgttttaacttcgagttttttactatattttgatttattaccaggaaaataaa

SEQ ID NO: 201266 - DNA, 844 bp, Unknown
  Bacterial polypeptide expressing nucleotide sequence isolated from the Sargasso Sea
tcatattctggactggtatggaatgaacatcgtgccggagactcaaacctggctcttccttggttttgcagtagcctttgctgtcaagattccacttttcccgttccatacctggcttccagatgctcactatgaggcaccaacagcaggttccgtccaacttgcggcagtgatgctgaaattcggaccctacggatttcttcgttttgccatgccggttttcccggccgcggtttatgaactgactccattgttcataaccctctctctgatcggcatcgtttacggaggattggtggcgatggtgcaaaagcaaatcaaacgcctgatcgcttattcctcagtagctcacatgggttatatcgtacttggactgttcgctctcaatacccagggggtttatggaggctggatccagatgatcaaccacgcaattgtgaccggtgctcttttccttgtggtgggaatgatttacgaacgaacccacacccaggaaattgttgattacggcggagtcattcacacgatgcccttattttccgtatttctcgtgtttttctccatggcatccgtaggtttgcccggactcaacggattcgtcggtgaggtcctggcgatggtcggcgctgcccgtgtgaatatctggtatggaatcattgctgccgcaggagtgatcattgccgcaatctacatgctctggatggtccagcgggttcttttcggacccctcgtcaaagacatggtcaaaggactgaatgacctttcactccgcgaggtagtggttctggttccgcttgcattctggacagttttcctgggagtttatccgcagcccgttttttga

SEQ ID NO: 201267 - DNA, 224 bp, Unknown
  Bacterial polypeptide expressing nucleotide sequence isolated from the Sargasso Sea
catgttatctgattttctaagtgattacttaccaatagtattatttttaatcatcgctcttgggttgagctttgcatttgtgttaatcaattttattctctcaccaaaaaaacctgaccctcaaaagttatctgcatatgaatgtggttttgaaccatttgaagactctagaatggagtttgatgtgagattttatttagttgcaatcttatttattatctttg

SEQ ID NO: 201268 - DNA, 381 bp, Unknown
  Bacterial polypeptide expressing nucleotide sequence isolated from the Sargasso Sea
atttaccagaggcagaggctgaattggtggctggatatcaaacagaatattcaggaatgatgtatgcaatgttttggctaggtgaatatgcaaatattcttttgatgtgcgcacttggttctattctttttcttggaggttggttatcacccattgatgtctatccattaaatttaattcctggtgctgtatggatgataataaaaattttaatcttattttttatgtttgcaattattaaagcaatagttccaagatatagatacgaccaacttatgagattaggctggaaagtatttttgcctttttcattaatatatgttgttttgacagctagttttttaatttattttgacttacttccaaacaaaggaatttaaa

SEQ ID NO: 201269 - DNA, 541 bp, Unknown
  Bacterial polypeptide expressing nucleotide sequence isolated from the Sargasso Sea
gtgtcaataggagtaataattattaatgttcttttatgcgtaggatcattaaatctcactgatatagttttggcacaaaaaaatatttggtttgtaataccgttgtttccaatgtttattattttttttatttctgctttagcagaaactaatagaccaccttttgatttacccgaagccgaagccgaattagtagctgggtatcaaactgaatattctggaatgatgtatgcaatgttttggttaggtgaatatgcaaatatactattaatgtgtgctttgggttcaattttatttttaggaggttggctttctccaataaatatttcaccttttaatgatataccagaaccattttggctaatatttaaaatactatttttattcatactttttgctttggtaaaagcaatagtcccaagatataggtatgatcaattaatgaagttgggatggaaaatatttttaccgttttctttaatttgggttgttttaacagctgggtatctaatttactttgatttattgccacagacgtaat

SEQ ID NO: 201270 - DNA, 490 bp, Unknown
  Bacterial polypeptide expressing nucleotide sequence isolated from the Sargasso Sea
aatgaatacagtaattaaattttttcaaaagttttttttgttagaaattattaaaggtttgtttttaacattaaaatatttatttaagaaaaaagtgactattaattatccttatgagaaaaattttatcagtagtaggtttcgtggtgaacatgcattaagaagatatcctaatggtgaagagaggtgtatagcatgcaagctttgtgaagctgtttgtcctgcgcaagctattgttattgaagcagaacctcgtccagatggtagcagaagaactacaaggtatgacatagacatgaccaaatgtatttattgtggtttttgtcaagaagcttgtcccgttgatgcgattgttgaaggtcctaattttgaattttctacagaaactagagaagagcttttttacgataaagaacgcttgcttgctaatggagatcgttgggaaacagaaattgcaaaaaatttaaaaatagatagtccttataggtaa

SEQ ID NO: 201271 - DNA, 148 bp, Unknown
  Bacterial polypeptide expressing nucleotide sequence isolated from the Sargasso Sea
ctttgggttagagctactacacctcgatatagatatgaccagcttatgcgtttgggatggaaagtatttttgcctttttcattgttatggctggtattaactgctgggtttttagtatttactggtagcactccaaatatttattaat

SEQ ID NO: 201272 - DNA, 247 bp, Unknown
  Bacterial polypeptide expressing nucleotide sequence isolated from the Sargasso Sea
aatgggcaccaagctttaagaaaagtttatgatcaaatgccagaaccaatatatgttatttcaatgggtagctgtgcaaatggaggaggatattatcattattcatattcagttgtaagaggatgtgatcgtattgtacctgtagatgtttacgttccaggatgtccaccttcagcagaggctttgttgtatgggatacttcaattacaaaaaaagattagaaaaaaaggatcttttattagatagt

SEQ ID NO: 201273 - DNA, 937 bp, Unknown
  Bacterial polypeptide expressing nucleotide sequence isolated from the Sargasso Sea
gctggctggcattgttctggcggcgttggccttgctctccatgacatctgcacaatccacagcatttggcggtatgttccgtgcagatgccttcgccgattacatgaaattgctggttctaatgggtagcttcgcagctgtgttcatgtcggtgaggccgcttgaatatgatgacattaacaaaccggaatttttcctgcttgtgatattggcacttgttggcatgatgctgatgatttcggcgaatgatttgatgtcattatatatggcggttgagttgcaatcattaccgctttatgtggtagccgcgatgcggacaaactcgcttcgctcttcagaagccggcctcaaatatttcctgcttggcgcgttgtcttcgggcatgttgttatatggggcttcattggtttatggatttgctggcacaacaagctttgcaggtattgcggctgccgtttccgaggcagatttgccagccgggtttatcattggcatggtgtttatgatcaccggtatagcgtttaaagtgtcggcggcgccgtttcatatgtggacaccagatgtctatgaaggctcgcctagcccagtaaccgcgctttttgcgatcgcaccaaaggtagcggcgatcgcattaatgttgcggctaacatttggcgcctttggcaatatcgcgcatgagtggtcacaggtgatcatggcgctatctgtcgcctctatggtggttggcgctttgggggcgatcatgcaaagcgacattaagcgtatgatggcctattcatctatcgcgcacatggggtatgcgcttgccgggcttgctgctggcacgcatgaaggtgcctttggtgtcatgatttacatgaccagctatgtatttatgggggctggcacctttgcaattattttattgatgcgtcgtgatggtcaatcggcaacacgc

SEQ ID NO: 201274 - DNA, 813 bp, Unknown
  Bacterial polypeptide expressing nucleotide sequence isolated from the Sargasso Sea
tcttgcagacgcattaaagtatatatttaaagagataattattccttcaagttctaataaaataatttttatattagcaccgattgtcactatgactttagctttgatatcttgggctgtcattccatttagcaataattttgttttagctgacataaatgtaggtattttgtatctatttgccgtttcctcattaggtgtttatggaattattatgggtgggtgggcttcaaattccaaatatccatttttaggagcgatacgatctgcagcacaaatggtgtcatatgaagtatctattggtgtcataattattaatgttctgttgtgtgttggatcgttaaatctttcagatatagtattagcacaaaaaggtatgtggtttattttaccattatttccaatgtttgttattttttttatttctgcattggctgaaacaaatagaccgccgtttgatttacctgaagctgaagccgaactagttgcgggctatcaaacagaatattcaggaatgatgtatgcaatgttttggttaggagagtacgctaatattttgttgatgtgcgcaatgggatcaatattatttctaggtggctggttatccccactaaatttttatccctttgatttgatcccgcctgctttgtggatgattttaaaaattttgcttcttttcatactttttgcattagtgaaagctattgttccacgatataggtatgatcagctaatgaagcttggatggaaaatatttttacctttttcattgatttatgtcgtattgacggcaagttttttaatttattttga

SEQ ID NO: 201275 - DNA, 351 bp, Unknown
  Bacterial polypeptide expressing nucleotide sequence isolated from the Sargasso Sea
gatgcttgcggattttttaaaagattatttttctataatagtattcctaataattgccttaggattaagctttttatttattataatcaattttgctttatcacccaaaaatccagatcctgaaaaactttcttcttatgaatgtggatttgaaccatttaacgactcaagaatggaattcgatgtaaggttttatttagtagcgattttatttattatatttgacttagaaatagctttcttatttccttgggcaatttcattaggcagtattggatttttaggttttatatcaatgatgatatttctttttattttaactgttggttttgtttatgaatggaaaaaagg

SEQ ID NO: 201276 - DNA, 430 bp, Unknown
  Bacterial polypeptide expressing nucleotide sequence isolated from the Sargasso Sea
gatgtttgtaattttctttatctctgctcttgcagaaacaaatagacctccgtttgatttacctgaggcagaagccgaattggtagcaggatatcaaactgaatattcaggaatgatgtacgcaatgttttggctaggagaatacgcaaatattttattaatgtgtagtttgggatctattttgtttttaggtggatggttatcaccaatagatatttatcctttcacaattgtaccagcaccactctggttgatgcttaaaatattattattatttatactattttctttagttaaagcaattgttccaagatatagatatgatcaattaatgaaattagggtggaaaatttttcttcctctgtcattaacctgggtagttttaacagcaagttatttattttattttaatctattaccggtaaattaa

SEQ ID NO: 201277 - DNA, 481 bp, Unknown
  Bacterial polypeptide expressing nucleotide sequence isolated from the Sargasso Sea
tatgtataaattaattaaatcttttactttatttgaattatttcaaggactatttttaacttttaaatacatatttaaatctaaagttacaataaattatcctcatgaaaaaggtccattaagcccacgttttagaggcgagcatgctttgagaagatatccaagtggggaagagagatgtatcgcatgtaagctttgtgaagcagtatgtcctgctcaggcaattacaattgaagcagagccaagagaggatggaagcagaagaacaacaagatatgatatagatatgactaaatgtatttactgtggtttatgtcaagaatcttgcccagttgatgcaatagtcgaaggaccaaattttgaatttgccactgaaacgagagaagaattaatttataataaagataaacttttagaaaatggagatagatgggagcaagaaattgctcaaaatattcatctcgatagaaaatatagataa

SEQ ID NO: 201278 - DNA, 286 bp, Unknown
  Bacterial polypeptide expressing nucleotide sequence isolated from the Sargasso Sea
atgcaatattttattaatgtgcgcaatgggagcaatattattcttaggtggctggatgtctcctattgatatttatccattcactttagtaccaggagcaatttggttaatattaaaaattcttcttttattcattctttttgctttagttaaggcaatagtgcctagatacagatatgatcaattaatgagacttggttggaaagtatttcttcctctttctttaatttgggtagtattaacatctagctatttattttattttaatcttttaccagtgaattaa

SEQ ID NO: 201279 - DNA, 260 bp, Unknown
  Bacterial polypeptide expressing nucleotide sequence isolated from the Sargasso Sea
aatactttttctcggaggctggttatctccaattgacgcctatccatttaatataattccaggggctttttggatgatattaaaaattctcattttattttttatgtttgctctcataaaagcaatagttcctagatatagatatgatcaacttatgagactaggctggaagatatttttacctttttcattaatatatgttgttttgacagcaagttttttagtttattttgatttattgcccaatagaggattttaat

SEQ ID NO: 201280 - DNA, 748 bp, Unknown
  Bacterial polypeptide expressing nucleotide sequence isolated from the Sargasso Sea
aatgactctagctctctctgcgtgggcagttataccactaagtgaaaaaataattattgcagatataaatgtaggaatactctatatttttgctatttcatcattgggtgtttatggaattataatggggggctgggcctcaaactcaaagtatccatttttaggcgccatcagatcagctgcacaaatggtatcctatgaagtttcgataggtataataataattaatgttttattatgtgttggctcacttaatttgacagacattgtcttagcccaagagaatctttggtttataatccctctttttccaatgtttgtaatttattttatatctgctttagcagagtccaatcgtcctccttttgatcttccagaagctgaagcggagttagtggccggttatcaaaccgaatattcaggcatgatgtatgctatgttttggttgggagaatatgcaaacatattattattgtgtgcattaggagcaatactttttcttgggggttggttatcaccagtagatatttatcctttaaacgcaattccaggagttttttggatgatattcaaaatattaatattattttttatgtttgcgattattaaagcaatagtaccaaggtatagatatgaccaattaatgagactaggctggaaaattttcttacctttttcgttaatatatgtagttatgacagcaagttttctagtttattttgatttattacctaacaaaagcttctaa

SEQ ID NO: 201281 - DNA, 276 bp, Unknown
  Bacterial polypeptide expressing nucleotide sequence isolated from the Sargasso Sea
gatgaacctcgatcagtacctccccgtccttttgttcatcttggtcggcatcgccgtaggcgttgtcccccttgtactcggctacatactgggccccaaccgcccagatgccgcaaagaactccccctacgaatgtggctttgaagccttcgaggatgcgcgcatgaaattcgatgtgcgctactacctcgtggccattctcttcattctgttcgacctggaaatcgcattccttttcccttgggcggtcacgctgcacgaggtgggtgttgccgg

SEQ ID NO: 201282 - DNA, 862 bp, Unknown
  Bacterial polypeptide expressing nucleotide sequence isolated from the Sargasso Sea
ttgatttacaaggcaactattatcataataccgatcataatttttctaatattaaataataattttgaaaatataaaaatatttaataatagttttgtgttagatgaattttcatcttttatgaagatcttaatcttagtctcctcgttttttgttttaataatgtcaaaaaaatatattcaagatattaaaaatgataaatttgagtatccagttattatgttaattgccattttaggtatgttttttatggttagttcaaatgacttaatacttttttatcttggcttagaacttcagtcactgtcattatatatactcgcatctatagatagagataatttgagatcatctgaagcaggtataaaatattttgtactaagtgctctctcctctggattattattatatggatgttctttactttacgggtttactggctcaacaaattttcaaattatatctaataatgttggagacattaatataggaactatttttgcaatgatttttatattagttgggttagcatttaaagtttctgctgttccttttcatatgtggacaccagatgtttacgaaggttcaccaacatctgttactagcttttttgctattgttcccaaaattgcagggatagcagtttttataagatttatgtattcaccttttcaaaatattttagaccaatggcaatatattttggtttttatatctatcgcttctatgattttaggagctgttgcagcaataaatcaaaaaaatattaaaagattaatagcttacagctcaataagtcatatgggttatgcaatagctggcatatcaacaggtaccgaaagtggtttaaaagttcaataat

SEQ ID NO: 201283 - DNA, 823 bp, Unknown
  Bacterial polypeptide expressing nucleotide sequence isolated from the Sargasso Sea
attcattcattcaaaaatgaacaagatataaataaaatgggaggggtctggagaaaattaccttacacatgggttttaatgataattggtactcttgcgcttacaggatttcctctattttcaggattttactccaaagatgctataattgaattcgcatatctaagaggaaattcagtaggatattatgctgcgagtattggagttataactgctttattaacatcaatatattcctggagactaatttttaagacttttcatggagatttccaaagctcaaatattaaaatagaggaaataaaagagtcacctttggtaatgattattcctcttattgttctatctattggttcaatatttgctggatttgtttttaaagatttatttttactgaaaggtgatttttttaatttttggaatgattctattaaattcttagaacctttaagttctagtcatccgccattatggtttattattttaacacctgttttagtaacactttctattccattatcttattacctttttttaaaagataaaaaaatattagaatcgtttgtaaatactaatagaccattgtatcaatttttacaaaaaaaatggtattttgatgaactctatgattatatttttatcaaactatttaaaaatttaggtttattcttttggaaaattatagatattaagattattgataagttcggtcccgatgggttatcttcattaataaaatatttttcgttaaaagcttcaaactttcaaagtggacatatatatcagtatgcttttgtaatgcttttaggattttcagtctttt

SEQ ID NO: 201284 - DNA, 940 bp, Unknown
  Bacterial polypeptide expressing nucleotide sequence isolated from the Sargasso Sea
tgtaataatttcagttggaaaatcgaaagaaatgttaaagagtatatgatttgttttttaatattagaaactttaatattgggtgttttttgctcattagatcttgttttattttatttattttttgaatccgggttgattccaatgtttttaataattggaatttggggtggaaataatagagtatatgcagcttttaagttttttttatatactttattaggctcaatattaatgctatttgctgttatttatatgtggaaagtatccggtacaactgacatcacaaaattaatgttttttgattttaacagtagtgattttgaattatttggctttaatattagtggaggtattcagtcaatactttggatggcattttttgcttcatttgcagtaaaattaccaatgtggccatttcacacttggcttccagatgctcatgttcaagcacctactggaggttctgtagtcttggcggcaattttgctaaaaatgggaggatatgggtttttaagatttagtcttccaatgtttcctgatgctagcctcatttttcaaaattttattttttcaatctcagtcattgctattatttacacctctttggtagctcttatgcaaaaagatattaaaaaattaattgcatattcatcagttgcacatatgggttttgttactttgggtattttttccatgaatcaacagagtattgatggagctatttttcaaatgataagtcatggaataatttcagctgctttatttttgctagttggagtgatttatgaccgtatgcacacaagagatattgatttttatggtggattagtatcgttaatgcctaaatatgcattgttttttatattctttactatggctaatgtaggattaccaggaacaagtggctttgttggagagtttttggtattacttggta

SEQ ID NO: 201285 - DNA, 781 bp, Unknown
  Bacterial polypeptide expressing nucleotide sequence isolated from the Sargasso Sea
attagctcaaatgatttaattttattttatgtaggtttagaattacaatcgctagctttatacgttttagcgtcttttaatagagataacttaaaatcatcagaatctggtctaaaatattttgttttaagtgccttatcgtcaggccttcttctttatggatgttcattaatatacggtttttctggatcaactaacttttttgtaattcgtgaaacattaactcaagacagttacggacttacatttggaatagtttttatacttgttggcttagcttttaaaatttctgctgttccttttcatatgtgggcgccagatgtgtatgagggttcgccaacatcagtcacaactttttttgctatattacccaaaatagcagcattaactgtatttattagatttttgtatgtaccttttgtaaatcttatagagcagtggcaaataataattatatttttatcaatctcttcaatgttatttggagcaattgcagcaattggacaaaaaaatttaaagaggttagtcgcttatagctcaataagtcacatgggatatgctttggcaggcctatctacaggtactaatgaaggtatacaaacttcaatcacatatataacaatttatttatttatgaatttaggattttttagttgtatgttcatgttaagaagagaagataaatattttgaaaatattgatgatttatcaggcttatctaaaaaccatccattattatcgttttcatttttaattattctattttctctagctggaattc

SEQ ID NO: 201286 - DNA, 685 bp, Unknown
  Bacterial polypeptide expressing nucleotide sequence isolated from the Sargasso Sea
gcagatatcaatgtcggtattttatatctttttgcagtttcatctttaggtgtttatggaataattatgggtggatgggcatctaattcaaagtatccttttctaggagcaattagatcagctgctcaaatggtttcttatgaagtttcaataggtgtaataattataaatgtattactttgtgtaggttcattaaatctaagcgacatcgttttagctcaaaaagatttgtggtttgtaatacctctattcccaatgtttataatattttttatttcagccttagcagaaacgaacagaccaccttttgatttgccagaagctgaagcagagttagttgcaggttaccagacagaatactctggtatgatgtatgcaatgttttggttaggggagtatgccaacattttacttatgtgtgcaatgggatctattttatttcttggtggctggttatctcctatagatttatttccatttaatgttattccggctccaatatggttaatcttaaaaatactctttttatttatcttatttgctttaataaaagcaatagtacctagatataggtatgatcaattaatgaaacttggatggaaaatttttctaccattttcattgatttatgtagtattaactgcaagttttttaatgtattttgatttattaccgggaaattaga

SEQ ID NO: 201287 - DNA, 841 bp, Unknown
  Bacterial polypeptide expressing nucleotide sequence isolated from the Sargasso Sea
tgtcgatattttaccggctctacctgaattaatcttggctgcattggctcttgttctggttcttgttgcggcttttggaggcgaggggacaaggaatactcgtagggtcacccgcatttcgctgagtggtattttgctggcattggcacttatctggtttggtgcggcaaatgacgaagcggcatttggaggtatgcatcgggcagacagttttgctgattatatgaaagtactggtacttctaggcacattcggggcactttatatgtcgatcaccccgcttgccaaggatgatattgataagccagaattctcgattcttgttttgctggcacttgttggcatgatgctaatgatttcggcaaacgatttaatgtcactatatatggctgttgaattgcagtccttgccgctttacgtggtggctgcgatgcgaacgaaatcgttgcagtcgtctgaagcggggctgaagtattttttactcggagccctatcctcgggactgctcctttatggtgcatcgcttgtttatggatttgcggggactaccacttttgctgggatcgccactgccgtttcatccgaccagctgccgagcgtcttcattgttggcatggtctttatgatttctggtatcgcttttaaggtttcggcagcgccattccacatgtggacccctgatgtgtatgaaggatcgccaagcccggtaactgctctattcgcgattgctccaaaggttgctgcgatggcgcttatgatgagattgacctatggcgcttttggttcaatttctgatcaatggtctcaagtattaatagcaatatcgatagcgtctatggtc

SEQ ID NO: 201288 - DNA, 724 bp, Unknown
  Bacterial polypeptide expressing nucleotide sequence isolated from the Sargasso Sea
gattttgctggaattgccgtgtctctttccgccggtggtttgtccgttgccttcattgtcggcatggtcttcatggtgtccggtcttgccttcaaggtatcggccgcgccgtttcatatgtggacgcccgatgtctatgagggttcgccaacgccggtgacagcgctgtttgcgattgccccgaaagtggccgccttggccttgctgatgcgcctgacctatggcgcttttgggcagattgccgatcagtggtcacaggtgcttgtggctctctcgattgcctccatggcggtgggtgcgcttggcgcgatcatgcagacagatatcaagcggatgatggcctattcgtcgatcgcccatatgggctatgcgcttgctggtctggctgctggaacgcctagtggtgcggctggtgtgatgatctatatgaccggctatgtcttcatgggtgctggcacctttgccatcattctgctgatgcgccgcgacggtcaggcggcaacgaggatcactgatctcaagggtctgtcgcagacgcatccgctgcttgccgtgggccttctcgtgatgatgttctcgatggctggcattccacctttggccgggttctttggcaaatggtatgtgttccttgcggcggtgcaggctggccttgtgccattggcggtgatcggcgtcgtgatgtcggttgttggtgccttctattatctgcggattatccgcc

SEQ ID NO: 201289 - DNA, 490 bp, Unknown
  Bacterial polypeptide expressing nucleotide sequence isolated from the Sargasso Sea
gatgtcgtttctgaaaaattcctcccgcgcgctgcttctgtcggaactgatttccgggatggcgctgaccttcaaatatatgttcaagccgaaggtgacggtgaactatccctttgaaaagggcccgcttagcccacgttttcggggcgaacacgccctgcggcgttaccccaacggggaagaacgctgcattgcctgtaaattgtgcgaggcgatctgcccggcgcaggcgatcactatcgaagccgaaccccggaccgacggcagccgccggacgacccgctacgacatagatatgaccaaatgcatctattgcggtttctgcgaagaagcctgcccggtggacgccattgtggagggacccaatttcgaattcgcgaccgaaacccgggaggagctgatgtataataaggacaagcttctcgagaatggtgaacgctgggaagggcacctaaaccagcgactgtcggcagacgcgccgtaccggtga

SEQ ID NO: 201290 - DNA, 219 bp, Unknown
  Bacterial polypeptide expressing nucleotide sequence isolated from the Sargasso Sea
atgatcagatgcctgaacctagatatgtaatttctatgggaagctgtgctaatggagggggttattaccattattcttactctgtagttagggggtgtgatagaattgtgccagttgatatttacgttccaggttgcccaccttcagcagaagcacttctttatggaataatgcaactccaaaaaaaaattagaaacaaaggttctctggaaagataaa

SEQ ID NO: 201291 - DNA, 394 bp, Unknown
  Bacterial polypeptide expressing nucleotide sequence isolated from the Sargasso Sea
atggctctaattagtaatagtgtaaggtcttggttcttaacagaacttgcatctggcatgggtattatttttaaacacatgtttcatagcaaggctactttgaattacccacatgaaaaaggtgcaattagttcgcgctttaggggtgagcatgctttaagaagatattcaaatggggaagaacgttgtattgcatgtaaattatgtgaagctgtttgtcctgccttagccatcacaatagaggctgaaccaagagatgatggcagcagacgtacaacacgctacgatatagatatgcttaaatgtatttactgtggcttttgccaagaagcatgcccagtagatgcaattgtagaaggtcctaactttgaatttgccgcagaaacacgagaag

SEQ ID NO: 201292 - DNA, 736 bp, Unknown
  Bacterial polypeptide expressing nucleotide sequence isolated from the Sargasso Sea
ttagctttgattgcatgggctgttattccatttggtgaaaatattgtattagctgacattaatgttggaattttatacctatttgcagtctcttctcttggtgtatatggtataataatgggaggatgggcttcaaattcgaaatatcctttttttggttcaataagatctgctgcacaaatggtttcctatgaggtatctataggagttataattataaatgtgctactatgtgttggatcacttaacttaactgatattgttttagcacaacaaaaactttggtttattattccattatttccaatgtttgtaattttttttatatctgctttagccgaaaccaatagacctccatttgatttaccagaagcagaggcagaattagttgctggatatcaaactgaatattcaggaatgatgtacgcaatgttctggcttggtgaatatgcaaatatcttattaatgtgcgccataggttctcttttgtttcttggtggctggttgcctcctgttgatatatacccatttaatgaattaccaagcccaatttggttaattctaaaaattttattgttgtttttattatttgcactagtaaaggctatagtgcctagatatagatatgatcaacttatgaaacttggatggaaagtttttttacctttttcattattttatgtcgttttaactgcaagctttttaatttattttaacttattgccaaataattaat

SEQ ID NO: 201293 - DNA, 301 bp, Unknown
  Bacterial polypeptide expressing nucleotide sequence isolated from the Sargasso Sea
atgggagtaaagtttaattttaattcagaaaaacaaaaacagatacctgaagagtttaaagatttagctaaagactttgcagaaaaaggttttattacaacttcatcagaaaatttagtcaattgggctagaacaggatccctacactggatgacttttggtctggcttgttgcgctgtcgaaatgatgcaaacttctatgccgagatatgatttagaaagatttggagcagctccacgtgcatcacctagacaatctgatgtaatgattgttgcaggaactttgacaaacaagatggcac

SEQ ID NO: 201294 - DNA, 319 bp, Unknown
  Bacterial polypeptide expressing nucleotide sequence isolated from the Sargasso Sea
tatggggtaatacttgctggatgggcttctaattcaaaatatgcctttctgggatcaatgagagcagccgctcaaatggttgcatatgaaattgctatgggatttgcactggttggcgttctcatggctggcgggagtttgaaacttggagaaattgttgcagcacaatcaggcggtgtactcagttggttttggattcctctttttccattgttcatcgtttattttatttctggtatagctgaaacaaatcgacatccttttgatcttgcagaaggagaagctgagattgttgctggtttccatgttgagtattctg

SEQ ID NO: 201295 - DNA, 481 bp, Unknown
  Bacterial polypeptide expressing nucleotide sequence isolated from the Sargasso Sea
atgtataaaattattaaatcttttactttatttgaattatttcaaggactatttttaactttcaaatacatttttaaatctaaagttacaataaattatcctcatgaaaaaggtccattaagcccacgttttaggggcgagcatgctttgagaagatatccaagtggtgaagagagatgtatcgcatgtaagctttgtgaagcagtatgtcctgctcaggcaattacaattgaagcagagccaagagaggatggaagcagaagaacaacaagatatgatatagatatgactaaatgtatttactgtggtttatgtcaagaatcttgcccagttgatgcaatagtcgaaggaccaaattttgaatttgccactgaaacgagagaagaattaatttataataaagataaacttttagaaaatggagatagatgggagcaagaaattgctcaaaatattcatttagatagtaaatatagataag

SEQ ID NO: 201296 - DNA, 126 bp, Unknown
  Bacterial polypeptide expressing nucleotide sequence isolated from the Sargasso Sea
ctttcccaagatatagatatgatcagttaatgagacttggatggaagttttttctaccattttctttgttttgggttgtggcaacttctggttttttagtatattttgacatgttgccaaattaat

SEQ ID NO: 201297 - DNA, 173 bp, Unknown
  Bacterial polypeptide expressing nucleotide sequence isolated from the Sargasso Sea
aaaaatcctactgttattttttttatttgctttaattaaagcaattgttccacgatatagatatgatcaacttatgagactcggttggaaggtgtttcttccattttccttaatttgggtagtcattactgcaagctatttgttttattttaatcttttaccagtgaactaat

SEQ ID NO: 201298 - DNA, 324 bp, Unknown
  Bacterial polypeptide expressing nucleotide sequence isolated from the Sargasso Sea
ctgcttcttttgtattattttttcttggtgaatatgcaagtatgattttgatgagttccatgacagtaatattatttatgggaggctggttaccaccatttgatatatttccattaaacgcagtgcctggagtaatatggtttgtaattaaaattatatttatcttatttttgtttatatgggttcgaggcacttttcctagatatagatatgatcaattaatgagactcggctggaagatttttttaccgctatcattactatgggtggttttaacagcaggttttttgattatatttgatatggtgccaaactctttatgat

SEQ ID NO: 201299 - DNA, 187 bp, Unknown
  Bacterial polypeptide expressing nucleotide sequence isolated from the Sargasso Sea
gatgatcgcaaaaattttattcttatttttattatttgctttgataaaagctattgttccaagatatagatatgatcaactaatgagattaggctggaaagtattcttgccgttctctttaatatatcttgttttaacagctagcttcttattttattttgacaaactgccaaaaggaaatttttaa

SEQ ID NO: 201300 - DNA, 515 bp, Unknown
  Bacterial polypeptide expressing nucleotide sequence isolated from the Sargasso Sea
tgtattactttgtgtaggttcattaaatctaagtgacatcgttttagctcaaaaagatttatggtttgtaatacctttattcccaatgtttataatattttttatttcagccttagcagaaactaacagaccaccttttgatttgcctgaagctgaagcagagttagtcgcaggttaccagacagaatactctggaatgatgtatgctatgttttggttaggggaatatgctaacattttacttatgtgtgcaatgggatctattttatttcttggtggctggttatctcccatagatttatttccatttaacgttattccagcacctgtatggttaattttaaaaatactctttttatttatattatttgctctgataaaagcaatagtgcctagatacaggtatgatcaattaatgaaacttggatggaaaatttttctaccattttcattgatttatgtagtattaactgcaagttttttgatgtattttgatttattaccggggaattaga

SEQ ID NO: 201301 - DNA, 222 bp, Unknown
  Bacterial polypeptide expressing nucleotide sequence isolated from the Sargasso Sea
ttgatttatatccatttaatttaattccaggagctatttggttaattttgaaaatattacttttattttttttatttgcgttagttaaagcagttgtaccgaggtatagatatgatcaattaatgcgactaggctggaaaatatttcttccattatctctcacctatgttgttttaactgctagttacttattttattttaaccttttaccctcaatttaga

SEQ ID NO: 201302 - DNA, 208 bp, Unknown
  Bacterial polypeptide expressing nucleotide sequence isolated from the Sargasso Sea
gcccgaaccaagatatgttatatccatgggaagttgtgctaatggaggaggatactatcattattcttattctgttgtaagaggttgcgatcgaatagttcctgttgatgtttatgttccagggtgcccaccatcagcagaagcattattatatggtgttcttcaacttcaaaaaaaaataagaaaaaaaggttctctaagcaggtaa

SEQ ID NO: 201303 - DNA, 235 bp, Unknown
  Bacterial polypeptide expressing nucleotide sequence isolated from the Sargasso Sea
atgactgcggaatttataaaggattatttaccaataatattgttcctaataattgcattaggattaagttgtgcatttgtagtaattaattttgttctagctccaaaaaatccagatccagaaaagttatcagcttatgaatgtggatttgaaccatttcaagactccagaatggaattcgatgttcgtttttatttagttgctatactttttataatttttgatcttgaaatag

SEQ ID NO: 201304 - DNA, 544 bp, Unknown
  Bacterial polypeptide expressing nucleotide sequence isolated from the Sargasso Sea
gaagtttccaataggagtcatcataatcaatgttctattatgtgttggatctttaaacttaagcgacatcgttatggcacaacaaaacttatggtttgtaattcctttgtttcccatgtttgtaattttttttatttctgcattagcagaaacaaaccgtcctccatttgatttaccagaagcagaagcagaattagtggcaggatatcaaactgaatactcaggaatgatgtatgctatgttttggttaggagagtatgcaaatattttgttaatgtgtgcaatgggagcagttttatttttgggtggctggttatctccaatagatatcttcccatttaatgttattccaggtccattttggttaatctttaaaatattatttttgtttattttatttgcgttagttaaagcaactgttccaagatacaggtatgaccaattaatgaagcttggttggaagatatttctcccattttcactattttatgttgttttaacttcaagttttttaatatattttgatttactaccaggaaaataa

SEQ ID NO: 201305 - DNA, 800 bp, Unknown
  Bacterial polypeptide expressing nucleotide sequence isolated from the Sargasso Sea
cctaatatggatcgttggacttttcacagcactatttgccgcaaccgccgcagttgcgcaaaatgatataaagaaagtccttgcctattcaacggtcagtcaacttggattcatgtttgtcgcagtcggatctggactgtacgttgccgctattttccatatgattacacatgctttcttcaaggctcttttgtttctcggagctggatctgtcatccatggaatgcatcatgaacaagatatgcgaaagtacggggctcttagaaaagcgatgccgatcaccgcatttactttcatcatcggatggttagcgatagcaggtatacctccgttttctggattctggtcaaaagacgaagtccttttggcagcttggaatgaaaataaaattgcatgggtgatgcttctcgcagcagctgtaatgactgctttctatatgagcagactagtgtttatgactttctttggagaaaagaggtggggaactgcagtgacagaggaagaggctcatgaaagcgaaacggagaaacacgaaattgcacctcatgaatcaccgatggtcatgtggctacctctcgtccttctctcgggcctcgcagcaattgctggacttttgaatctgcctttcagccatgacacaaaacatctcgaaaagtggcttgaaccaatccttttcgggaatgaagttcacgttaccgcctcaggtcagacgaaatggctacttgcagtaattgcaataattggtgcaagcataggagtaattgctgccatatttgtgtatttgaagaacagggtcgcca

SEQ ID NO: 201306 - DNA, 898 bp, Unknown
  Bacterial polypeptide expressing nucleotide sequence isolated from the Sargasso Sea
atgatttatctaaattctttttttatagaagtttataaagtactttttcttcttttgcctgttttggtatctgttgcattaatagtctggctggatagaagagtttgggcctttgttcaaaaaagaaaaggtccaaatgttgttggcccattcggacttttgcaaacattagctgatgctctcaaatttatttttaaagaaataataattccagcgagcgctaataaatttatatttatactagcgccaataattactcttactttagccttaatagcttgggctgttattccatttagtaatgatatggtattagctaatataaatgtaggaatattatatttatttgctgtttcgtctttaagcgtctatggaataataatgggtggttgggcatcaaattctaaatatccttttttaggtgccattagatcagcagctcaaatggtatcttatgaagtatcaataggaataataataataaatgtattactttgtgtaggatcacttaatttaaataaaatagttttagctcaagaaaatatttggtttatttttccactttttccggtttttgtaattttctttatctcagctctagcagaaacaaatagaccaccatttgacttaccagaagctgagtcagaattagtagcaggatatcaaacagaatattctggaatgatgtatgctatgttttggttaggagaatatgcaaatattttactcttatgtgctttaggatctatactttttctaggtggttggctaagtccattagatatttatccatttaatttattacctggtgtattttggatgatattaaaaattttagtgctttttattttattttctttggtaaaaaacagttgtaccaaagataccgatttgatca

SEQ ID NO: 201307 - DNA, 274 bp, Unknown
  Bacterial polypeptide expressing nucleotide sequence isolated from the Sargasso Sea
aatgagctctatgacagtaattttgtttatgggaggttggttaccacctttcgacatatttccattaaatgcaataccaggcgtaatatggttcgtaattaagattatatttattttatttttatttatatgggtaagaggaacttttcctagatacagatatgatcaattaatgagactaggttggaaggtttttttacctttatcattattatgggtggttttaacagcaggctttttaattgcttttgatatggtgccaaactctttatga

SEQ ID NO: 201308 - DNA, 829 bp, Unknown
  Bacterial polypeptide expressing nucleotide sequence isolated from the Sargasso Sea
tcaaattgaatatccaattttaattttaagttctgtattgggaatgatgattatgattagctctaatgatctaattgttttctatatgggtttagaacttcagtcattagccttatatgttttggcaacatttaatagagatcaattaaaatcatcagaagcaggattaaaatattttgttttaagtgcattatcctcaggtttattattgtacggttgttctttaatttatggttttactggctcaacaaattttaatgttatttcaactcaatttaatgcaaatgaatatgctattacttttggaatagtttttattttggtgggtttagcgtttaaaatttctgctgttccatttcatatgtgggctcctgatgtatatgaaggttcaccaacatctgtaacattattttttactatggttccaaaaatagcagcgttaactgtgtttataagatttctatatgttccttttttaaatcttattgatcagtggcaaatgattttagtatttttatcgatcgcatctatgctttttggtgcgatagcagctatagggcaaaaaaatcttaagagactaatagcttatagctctattagtcatattggatatgctctcgcaggtttggcaacagggtcaaatgatgggatacaaagctcagttatttatatgactatttatattattatgaacttaggttttttttcatgcttattaatgatgagaagaaataatatttattacgagcaaatagaagatctgtctggattatcaaaaaatcatccattgctctctatttcattattaattattttattctctttagct

SEQ ID NO: 201309 - DNA, 905 bp, Unknown
  Bacterial polypeptide expressing nucleotide sequence isolated from the Sargasso Sea
gatggtctcaatatttttaaattctatctctacattattaaatgaaagactgacaacgtttataacgataaatggtgcactcttatcatttacagtctcactttttatgtttggagctttactcttagataaatttcaaccaatttctttaaagttatatacatggtttcctgatccagaaataaagtttgaatttcttcttgatggtttatcgggaacaatgatgcttttagttactggcctaggcttggtaatacaaatattttctacctcatatatgagtggtgatcctaggtatgttaaatactttgtatattttaatttctttgttttctcaatgctcctattagttatgtcagctaactttttagttatgttctttggttgggagcttgttggcttaagttcttatctattaatctctttttggtctgagaagaaagaagcagctaaagcaggaaataaagcattcgtattaaatcgaattggagattttggttttttgattgctttaatgatgatattaaatacctatgatacgttttcatttaaaacagtttttgcaacaacattaataaatcagccacaaaatctagatcttattgttgtcttcctcatgattggtgcttttggaaaatcagcacaatttccattatttagctggttaccagacgcaatggaaggaccaactccagcaagtgctttgattcatgctgcaacaatggtgacagccggtgttttcatgctggttcgaatttctccgttattacagttttcagagttatcaagtatcttaattataagtatcggcctcttaacagctttaatctcagcttttgctgccataaatcagaatgatattaaaaaggtacttgcttactcaacatttcacagctgggatttat

SEQ ID NO: 201310 - DNA, 487 bp, Unknown
  Bacterial polypeptide expressing nucleotide sequence isolated from the Sargasso Sea
accaccgcaacccagctcctcaaatcgttcaccctgtgggaattcctgaaggcccacgcgctgaccttgaagtatttcttcaagcccaaggtgacgatcaactatcctttcgaaaaatcgccgttgagtccgcgttttcgcggcgagcacgcgctgcgccgttatccgaatggcgaagagcgctgcattgcgtgtaaattgtgcgaggctgtgtgcccggcgcaggcgatcacaattgagagcgaaccgcgtgaagacggcagccgccgcaccacgcgctacgatatcgatatgaccaagtgcatttattgcgggttctgtcaggaagcctgcccggttgatgccgtggttgaaggaccaaattttgaatatgccaccgaaacgcgcgaggaattgctttatgacaaggcaaagctgctcgcgaatggtgacaaatgggaacgggctattgcggccaatcttgaagcggacgcgccctatcgctagg

SEQ ID NO: 201311 - DNA, 760 bp, Unknown
  Bacterial polypeptide expressing nucleotide sequence isolated from the Sargasso Sea
tacaaacttttatgaaatatcaaaaaatttaaatgttgaccaatacgggttctcttttggattagtatttatacttgttggacttgcctttaaagtttcagcagttccatttcacatgtgggcaccagatgtctatgaagggtcacctactgcagtaacattattttttgctatagcgcctaaaattgccgcaataacagtctttgtaagattcttgtatgaaccatttttcatctttatggatcaatggcaaattatattaatttttatatcaatagcttcaatgctacttggcgcttttgctgccataggacaaaaaaatataaaaagacttattgcttatagctccattagtcatatggggtatgcacttgctggattatgtgcaggatctaatgaaggaattcaaagtacaattatatacattgtaatttatatgattatgaaccttggattgttttcatgtttatttatgatgagaagagctgagaaatattacgaaaatatcgaggatttatctggactttcaaaaaatcatcctgcaatttcagtatgtttgctaataatattattttcattagcaggaatacctcctatggcaggtttcttcgcaaaattttacgtattttcagcgttaatagaaaaatctatgtattcaattgtaatcataggcttaatatctgcagttatttccgcgttttattatttaagaataataaaaattatttattttgataaacctgtagagaagtttgatgca

SEQ ID NO: 201312 - DNA, 394 bp, Unknown
  Bacterial polypeptide expressing nucleotide sequence isolated from the Sargasso Sea
acaaatagacctccttttgatttaccagaggccgaagctgaattagtagcaggataccaaactgaatattcaggaatgatgtatgcaatgttttggttaggagagtatgcaaatatattgctcatgtgtgcaatgggatcaatactttttcttggtggctggttatcaccaatagaaatttatccatttgacttaattccttcacctttttggttaatttttaaaatacttttgttatttttacttttttcattagtcaaagccgttgttccaagatatcgatatgatcaattaatgaaattaggttggaaaattttcttacctttttcacttctttgggttgttttaacagcttcatatctttactattttaacttactaccaataacttaaa

SEQ ID NO: 201313 - DNA, 136 bp, Unknown
  Bacterial polypeptide expressing nucleotide sequence isolated from the Sargasso Sea
gcattcttgtttccatgggcgatttctttaggtcatattggaatctttggttttatatctatgttgatatttttatctattctaacggtaggatttatctatgaatggaaaaaaggtgcattagattgggaataaa

SEQ ID NO: 201314 - DNA, 895 bp, Unknown
  Bacterial polypeptide expressing nucleotide sequence isolated from the Sargasso Sea
agatcatcagaagcaggtataaaatattttgtactgagtgccctctcctctggattattattatatgggtgttctttactttacggatttactggttcaacaaatttccaagttatatccaataatgttggagacattaatataggaactatttttgcaatgatatttatattagttggattagcttttaaagtttctgctgttccatttcatatgtggacaccagatgtttatgaaggatcacccacatcagttactagtttttttgctattgttccaaaaattgctggtatagctgtatttataagatttatgtactcaccatttcaaaatattttagatcaatggcaatatattttagtatttatatcaatagcatcaatgattttaggagcagttgccgcaataaatcaaaaaaacataaaaagattaatagcttatagctctataagtcacatgggttatgcaattgctggtatctcaacaggaacagaaagcgggtttaaaagtacaatgatttatattttaatttactccgctatgaatattggcttttttgcttttgtatttctaatgaaaagaagtggtaaatatgttgaggagataaatgaactttcaggaatttctaaaaatcatcctttagctgccttatcgttattgatagttttattttctttagcaggtattccaccactagcaggtttctttgcaaaattttatatttttatgtcggtcatagaaagtggtatgtatacattggctattatcggtttaataacaacagtcgtatcagctttttattatataagaattgttaaagtaatgtattttgacaatccaaaaaaaccctttgaaagttttaaagattatggaatttacggttccttaattttta

SEQ ID NO: 201315 - DNA, 175 bp, Unknown
  Bacterial polypeptide expressing nucleotide sequence isolated from the Sargasso Sea
atttaaaattttattcctattttttttatttgcgattattaaggcaattgtaccaagatatcgttacgatcaattaatgagattaggatggaaagtttttttaccattttcacttatttacgttgtcttaactgcaagttttttactttattttgataaactgccgaaaggttaa

SEQ ID NO: 201316 - DNA, 370 bp, Unknown
  Bacterial polypeptide expressing nucleotide sequence isolated from the Sargasso Sea
acctgaagccgaagcagaattagttgccggatatcaaactgaatattcaggcatgatgtatgctatgttttggctaggtgaatatgcaaatattttattaatgtgtgcaatgggtgcgattttatttttaggaggctggatgtctcctgttgaaatttatcctttcactctagtaccaggagcaatttggttaatactaaaaatattattactatttattctatttgctttagtgaaagctattgttcctagatatagatacgatcaattaatgcgacttggctggaaagtatttttaccgctttctttgatatgggtggtactaacggctagttacttattttatttcaatcttttaccaactaattaa

SEQ ID NO: 201317 - DNA, 832 bp, Unknown
  Bacterial polypeptide expressing nucleotide sequence isolated from the Sargasso Sea
aataggctttatgctacttttaaatttttcctatacacgcttgcaggatctgttttaatgcttttagctattatattcattatctcgaaagttaaatcaggtaatattgaattaatctcagattttacctttgatcaacaaatagaattaattctatttttatgttttttcgcatcttttgctgtaaaagttccaatgtttccttttcatacgtggttacctgatgctcatgttcaagcgcctacgagtgggtcagtaatattagctggcgtactacttaagttaggagcatatggttttattagactatctttaccattctttgagtatgcatcaatatattttcagccaatgatttttgcactaagctgtgtagcaattgtttacacatcaattgttgctttaagacaattagatatgaaaaaaatgattgcttattcttctgtggctcacatgggttttgttacaataggtatttttactcttacacaagatggtataaatggtgcatattttcaaatgataagtcatggaatagtttcagctgctctatttttaatagttggagttgtttacgaaagacatcatacaagaatgatttcagattatagtggagtcacgaatgtaatgcctaaatattcattttttttcatgatttttatgctttcatctgtaggtttacctggaactagtggtttcgttggagagtttctagttattatgtctactataagtgtaagcgtataccttacattttttactgctattggggtaatcttaggagcatcttatatgcttttattatataaaaatgtaaattttggagacttaa

SEQ ID NO: 201318 - DNA, 166 bp, Unknown
  Bacterial polypeptide expressing nucleotide sequence isolated from the Sargasso Sea
gcgttttgcctatttatctttctttgggtgcgcgccacgttcccgcgttaccgttacgatcagctgatgagactgggttggaaagtttttctgccgatctcactggcagccgtagcgattgtcgccggcatactggtggcctttgactggctgccgaagggttaag

SEQ ID NO: 201319 - DNA, 490 bp, Unknown
  Bacterial polypeptide expressing nucleotide sequence isolated from the Sargasso Sea
catgaacgccattacgcgcagcgtaaaatccatctttcttgcggaacttgtaattgggatggcactcacgttgagaatgttctttaagcccaaggtgacagtgaactatccctatgaaaaaggtccactgagcccacgattccggggcgaacacgcgttacgcaggtatccaaatggagaagaacgttgtatcgcctgcaaactctgtgaggccatctgcccagcccaggccatcactatcgaagccgagccacgtgatgacggatcgcgacgcacaacccgctacgatatcgacatgaccaaatgcatctactgcggctattgcgaggaggcctgccctgtggacgccatagttgaggggccaaattttgaatttgccacggagacccgcgaagagctcatgtacgacaaggccaagctgctcgctaatggggaccgttgggaaacggaaatcggtgagcgcctgcgtctcgacgcaccgtatcgataa

SEQ ID NO: 201320 - DNA, 779 bp, Unknown
  Bacterial polypeptide expressing nucleotide sequence isolated from the Sargasso Sea
aaataaatttatttttatattggcaccagtcgttacgatgtctttagctttaattgcttgggcagtaattccttttagtgaagattatgttctagccgatataaatgttggtatattatatatttttgcagtgtcttcattaggtgtctatggaattataatgggtgggtgggcctcaaattcaaaatatccctttttgggagcgataagatcagctgctcaaatggtttcttacgaagtgtctattggtataattataattaatgttttgctgtgtgtaggttctttgaatttgtcggatatagtaaaagctcaaaaagatttatggtttataattccacttttccccatgtttgtaattttttttatttctgcacttgcagagactaatagaccaccgtttgatttacctgaagccgaagcggaacttgtagctggttaccaaactgaatactctggaatgatgtatgcaatgttttggttaggtgaatatgcaaacatcttgttaatgtgttctttgggatcaattttatttttaggcggctggcttcctccatctcaaaactatttatttatgtttgtaccagcacctttatggctaatatttaaaattctattactattcatacttttttctttagttaaagctattgtcccaagatatagatatgatcaactgatgaagttgggttggaaaatatttttacctttgtcactattttgggtggtactaacatctagttatttattttattttaaccttttaccagtaaattaat

SEQ ID NO: 201321 - DNA, 277 bp, Unknown
  Bacterial polypeptide expressing nucleotide sequence isolated from the Sargasso Sea
atgataatttcagaaaaagaaaaacaaatacctgatgaatttaaaaaacttgctaatgattttagtgaaaatggcttcataacaacatcatttgataatttagttaactgggcacgcactggttcattacattggatgacttttggtcttgcatgttgtgctgttgaaatgatgcatacatcaatgccaagatatgatctagaaagatttggtgcagccccaaggggatcaccaagacaatctgatgtaatgattgtagcgggaacattaacaaata

SEQ ID NO: 201322 - DNA, 361 bp, Unknown
  Bacterial polypeptide expressing nucleotide sequence isolated from the Sargasso Sea
cttgaacctcgcagcctatttccccgtcttgttgttccttattgtgggcaccggtttaggcgtagcactggtcagcattggcaagatcctcggtcccaacaagcccgataccgagaaaaacgcaccgtacgagtgcggcttcgaagcattcgaagatgcgcgcatgaagttcgatgtgcgttactacctcgtcgccattctcttcatcattttcgaccttgaaaccgcgttcctgtttccgtggggtgtggccctgcgcgacatcggctggactggcttcatggcgatgatgattttcctgctcgaattcctgctgggctttgcctatatctggaagaagggcggcctcgactgggaatga

SEQ ID NO: 201323 - DNA, 1126 bp, Unknown
  Bacterial polypeptide expressing nucleotide sequence isolated from the Sargasso Sea
atccatgctgcaacaatggttgcagcaggaatctttcttgtagcaagacttcaacctttgtattcaatatttccctctattcagttcattattgcttttgttggtaccattacttgttttttaggagcctctatagctttgacccaaatggatttaaaaaaaggtttagcatacagtacagtttctcagcttgggtatatgatgctcgcaatgggttgtggagcaccagttgcaggaatttttcatttagtaactcatgcttgctttaaagcaatgctatttttgggatctggttcagtaatacatgctatggaagaagtagttggccatcagcctgtattagctcaagatatgagattgatgggtggtttaagaaaaaaaatgccatatacatcaacaacatttttaataggttgtgtagcaattagtggaattcccccattggcaggtttttggagtaaagacgagatacttggcaatgcttttatatcatttccagctttttggtttgtaggactcctaacagctggtatgactgctttttatatgtttaggctttatttcttgacatttgaaggagatttcagaggggagaataaagaattgcaaaaacagcttctgatagccgctaaaacaaacctagatgaagaaaatgaagaagagcatgaagaacatggctatatccatgagtcaccctggtcaatgacatttcccttggtatttctagctgtaccgtctggaataatcggttttatgggacttccatgggacagcaaaattgcaagtttactagatcctgaagaagcagagactgctgcaaaagccttcgaattaaaagaatttttgcctttagcacttgcttctgtacttattgcatcagctggaatcattattgcttatcaggcatattttgtgaaaaaaattaatttatcagttttatttgccgaaaagtttcctagcatcaatcggtttttatccaataaatggtacttagatgatattaatgaaaaactttttgttaagggtagtagaaaacttgctaaagaagttttagaggttgattctaaagttgttgatggcgttgtaaatcttactggactttgtactttaggtagtggagaaagtt

SEQ ID NO: 201324 - DNA, 1003 bp, Unknown
  Bacterial polypeptide expressing nucleotide sequence isolated from the Sargasso Sea
aatgattgaaaatataaatattttaataaccgaaatttataaaatttttcttttacttattccaattttaacagctgtagcattgatagtttggcttgatagaagagtatgggcttttgttcaaaaaagaaaaggaccaaatgtagttggtccttttggtttatttcaatcattagctgatgctttaaaatatatttttaaagaaataattattcctgcaagtgcaaataaaattatatttattcttgcaccaattgtgaccatgacactagccctcgtatcatgggcagttataccttttagtgaagattttgttttagcagacataaacgttggaattttatatctttttgctgtttcatccctaggcgtatatggaataattatgggtggttgggcgtctaattcaaaatatccttttttaggtgcaattagatctgccgcacaaatggtatcatatgaagtttctataggagtaataataataaatgttttgttgtgtgttggttcattaaatttaactgatattgtcttagctcaaaaaaatttatggtttatagtccctctatttccaatgtttgtaattttttttatttctgctcttgctgaaactaatagacctccatttgatttacccgaagcagaggcagaattggtagcaggttatcaaactgaatattcaggaatgatgtacgcaatgttctggttaggagaatatgcaaatatcttactaatgtgtagcatgggatctattttgtttttaggtggatggttacctccaatagatctttatccttttacatttataccagcaccactttggttgatacttaaaatattattattgtttattctattctcattagtgaaagcaattgtcccaagatatagatatgatcaattaatgaaattaggttggaaaatttttcttccactatcattaacttgggtagttttaacagcaagttatttattttattttaatctactaccggtaaattaa

SEQ ID NO: 201325 - DNA, 823 bp, Unknown
  Bacterial polypeptide expressing nucleotide sequence isolated from the Sargasso Sea
tgctttaaagtatatttttaaagaaataatcattccagcaagtgctaataaaataatatttattcttgcaccaattgtaacaatgacattagctttaatttcttgggccgttattccatttagtgaggaaattgtcctagcaaatatcaatgtcggtatactatatctttttgctgtctcttccctaggtgtttatggaattataatgggtggttgggcttcaaattcaaaatatccttttctaggtgcaataagatctgcggcacaaatggtatcgtatgaagtttctataggagtaataataataaatgttttattgtgcgttggatcattaaatttgacagacattgtcttggctcaagaaaatttatggttcatagttcctttatttccaatgtttgtcatcttttttatttctgctcttgcagaaaccaatagacctccatttgatttacctgaggcagaggctgaattggtagctgggtatcaaacagaatattcaggaatgatgtatgcaatgttctggttaggtgaatatgcaaatattttactgatgtgcagcatgggatctattttgtttttaggtgggtggttatcaccaatagatctttatccttttacgcttgtaccagctccactttggttaatacttaaaatactattattatttattttatttgcgttagtgaaagcaattgttccaagatatagatatgatcaattaatgaaactaggatggaaaatttttcttcctctatcattaacttgggtagttttaacagcaagttatttattttattttaatcttttaccagtaaattaa

SEQ ID NO: 201326 - DNA, 984 bp, Unknown
  Bacterial polypeptide expressing nucleotide sequence isolated from the Sargasso Sea
attatttactgaagttttataaaattttatttttattagtacctgttttagtttctgtagcaatgatagtttggcttgatagaagagtttgggcctttgtgcaaaaaagaagaggacctaatgttgttggtccatttggtttatttcaatcgttagctgatgcactaaaatatatttttaaagaaataataatacctgcaagctcaaacaagcttgtgttcgtattagcaccagtagtgactatgacattagcattaatatcatgggccgtaataccatttggtgaaggttttgttttagctgacatcaatgttggtattttatatctttttgcagtttcatcattaggtgtgtatggaataattatgggaggatgggcttccaactctaagtatccttttttaggtgcaattagatctgctgcacaaatggtatcgtatgaagtttcaataggagttataattattaatgttctattatgtgttggatctttaaacttaagtgacatcgtaatggcacaacaaaatttatggtttgtaattcctttgtttcctatgtttgtaatattttttatttctgcactagcagaaacaaatcgtcctccatttgatttaccagaagcagaagcagaattagtggcaggatatcaaactgaatattcaggaatgatgtatgctatgttttggttaggagagtacgcaaatattttgttaatgtgcgcaatgggagctgttttatttttgggaggctggttatctccaatagatatcttcccatttaatgctattccaggtccattttggttaatctttaaaatattgtttttatttattttatttgcgttagttaaagcaactgttccaagatacagatatgaccaattaatgaagcttggttggaagatatttctaccattttcactgttttatgttgttttaacttcaagttttttactatattttgatttactaccgggaaaataaa

SEQ ID NO: 201327 - DNA, 702 bp, Unknown
  Bacterial polypeptide expressing nucleotide sequence isolated from the Sargasso Sea
aatggctgaatttttcgcttcctcttggggcattgcgttaattttaatttctcaaggattgatgatggcagtctttttgctgctttccgcctattttttaatttatgcagaccgtaaagtctgggcggctgttcaaatgagacgtggtcctaatgttgtaggtgcttttgggttgcttcagtcgggagctgacatgcttaagcttgtcttcaaagagattataataccggctggtgcagataagccggtattcttcttggctcctctgatttcttttgtaatggctattcttgcttgggcagttatcccattaaacgatggttgggttctatccgagatcaatgtagcccttttgttcgttttcgcgatttcctctttggaggtgtatggagtgattatggggggatgggcatctaactcaaaatatccgtttcttggatcactgaggtcggccgcacagatgatttcatacgaagtatcaattgggctcataattattggtgttattatctcaaccggatctatgaacttcggggatatagttagggctcaggagggtgaatttggaatttttaactggtactggttgccacatcttccaatggtttttctctttttcatatccgcattagccgaaacaaatagaccgccatttgacctgccagaggctgaaagtgaattggttgcaggctttcaggttga

SEQ ID NO: 201328 - DNA, 1014 bp, Unknown
  Bacterial polypeptide expressing nucleotide sequence isolated from the Sargasso Sea
ttgcattagtgcaaaatgatattaaaagaattattgcatattcaactatctcacagttaggctatatgactgctgcactaggtgcatcgttatattcattggctatttttcatttaatcactcatgctttcttcaaagcactattatttctgtgcgctggttcaataattataaaatgtcatcatgagcaagatatcaggaaaattggaggtttgagaaggtttatgcctattacgtatatggcatttttatatgcctcactatctttaattgggtttcctctcacatcaggtttttattccaaagagacaattattgatgcggtgggatattatggtcacacaattccatatataatgcttttattatccatatttaccaccacactatatacagcaaaaatattctccaaggtcttttttggtgaatctactttacatttagatagtgaattaaaaaataaagaaaatgatactgaaatgttaataccgcttgtggtattaaccataccttcagtatttttaggtatatttatttatgactctttaatgttggggacattatttggaacttcgttagcagcacaagaacttgtggtatcattctataataattatgttattaattctctaaatttttttctacattcttttttgactattaattttttaatattattatcagctataatctttggatatttttattactataaaaaatcttttgtgataaagacaccttcttttatcaaaaatatcttaacagaggaatatggttttaacactttttcatctaaatatattcctgaacttcaaaactttataactaaatatttatggagacgtgttgatatatcagctattgataatggatttgttaataatacatcatatttacttaataaaatttcacataaggttcgcaaagtacatacaggtttcatatatcattactcactaaccataatttctgctttaatattattactattaatcattgggtataagaactaaa

SEQ ID NO: 201329 - DNA, 879 bp, Unknown
  Bacterial polypeptide expressing nucleotide sequence isolated from the Sargasso Sea
cttgatatggttaatcagtattcttattgttggtggtctactggcgtgggtgtcagagcgttatgataagaattacccgcgcgtaatcgcgctaataacagttctttcagatctgcttttgatgattgccatacttcagtcggaacctgcgtcagctgagtggatttcagtactccaaatagaatggattcctcgatttggtatctctttgtatttcgctctagacggtctgagtttgttattaattctgctaactgcgttcttgggagcgatagcaatagggtcagcatgggatgaaatcaaaacaaggcctggattcttctacttcaatttactatggacattagctggagtaattggtgtttttactgcgctagatcttttcctattctttttcttttgggaagtgatgctgattcctatgtatttcatcatcgctatctggggccatgaaaataagaattatgccgcaatgaaattctttatttttactcaagttaccggaatgctaatgctagtctcgatcttagtgctagcatattctcactatactcaattcgggttgtacagtttcaagtacgaagacttactttctgtgcgtcttgctagttcggtgcagttctgggttatgctaggtttttttatatccttcacgacgaaattaccttcggtaccgttccattcttggttgccagatgcccatagtcaagcccctactgcaggtagcgttattctggctggcatactcctaaaaactggagcatatgggttaattcgattcacggtacctcttttcccagaggcatctatgagtttcgctccagttgctatgtcccttgcagcactgagtatcctttattgtgcaaaagtggcgtttgc

SEQ ID NO: 201330 - DNA, 994 bp, Unknown
  Bacterial polypeptide expressing nucleotide sequence isolated from the Sargasso Sea
atggattatgtatattcattaatttctgaaacttataaaattttatttttattgttacctttgttaaccgctgtagcaatgattgtatggttagatcgtagagtttgggcatttgttcaaaaaagaagaggtccaaatgttgtaggtccttttggtttgtttcagtcattggctgatgcattgaaatatatttttaaagagataattataccagccagctcaaataaagttgtttttatacttgctcccataaccactatgacattggcattaatctcatgggctgttatcccatttagtgaagattttgttttatccgacataaatgtaggaattttatacttatttgcaatctcatcacttggtgtttatggtattattatgggtggatgggcatctaactcaaaatatccttttttaggtgcaataagatcagccgcacaaatggtttcatatgaggtttcaattggagttattattattaatgtcttgctttgtgttggttctttaaatttgactgatattgttttagcacaagaaaaaatttggtttataattccattatttccaatgtttgttatattttttatatcagctttagccgagacaaaccgacctccctttgatttaccagaggcagaggctgaattagttgcaggctatcaaaccgaatattcaggcatgatgtatgcaatgttttggctgggtgaatatgcaaatatactattaatgtgtgcaatgggatcaatattatttttaggtggctggatttctccaatagattcttatccatttaatttaattcctccagctctttggtttatttttaaaattttattattatttatactttttgcgttggtaaaagctattgtaccacgatatagatatgaccagcttatgaaattgggatggaaaatatttttacctttttctttaatttgggttgttttaactgcaggatttttactttattttgatttattaccaaagg

SEQ ID NO: 201331 - DNA, 1246 bp, Unknown
  Bacterial polypeptide expressing nucleotide sequence isolated from the Sargasso Sea
aatgataaacgcagtatattttttaattccagaaattttcctatcactgtcaatttttacatttattatttttggggtttttaaaaaaaatagttttgatttgatttacagggcaactattatcatattacctatcgtaatttttctcatattaaataataattttgaaaatatagaaatatttaataatagttttgcattagacgagttttcatcttttatgaagatcttaattttagtttcctcattttttgttttaataatgtcgaaaaaatatattcaagatattaataataataaatttgagtatccagttattatgttaattgcaattttaggtatgttttttatggtaagttcaaatgacttaatacttttttatcttggcttagaacttcagtcactgtcattatatatacttgcatctatagatagagataatttgagatcttccgaggcaggtataaaatattttgtgctaagcgctctctcctctggattattattatatggatgttcattactttacgggttcactggctcaacaaattttcaagttatatctaacaatgttggagacattaatataggaactatttttgcaatgatttttatattagttgggttagcattcaaagtttctgctgtcccttttcatatgtggacgccagatgtttatgaaggttcaccaacatctgttacaagttttttcgctattgttcccaaaattgcagggatagcagtttttataagatttatgtattcacctttccaaaatattttagacgaatggcaatatattttagttttcatatctattgcttcaatgattttaggagcttttgcagcaataaatcaaaaaaatataaagagattaatcgcttacagttctataagccatatgggttatgcaattgctggtatatcaacaggcactgaaagtggttttaaaagtacaataatttatatcttgatttactcagcaatgaatattggtttttttgcatttgtatttttaatgaagagaagcggtaagtatattgaggacataaatgaactttcgggaatttcaaaaaaccatcctttagcagctttatcattattaatagtattattttctctcgcaggcatcccacctttagcaggtttttttgctaaattttatatttttatgtcagtaatagaaagtggaatgtacgctttagctattatcggtctagtaacaacagttgtattctgcttttta

SEQ ID NO: 201332 - DNA, 1093 bp, Unknown
  Bacterial polypeptide expressing nucleotide sequence isolated from the Sargasso Sea
atgcagtatgcggagtttccgattctttccctgattatcttctctccggttcttggaattgctctggctggagtttttcgtgacgcaagtgatgggatccctgcaaaagttgcagcgctttcaagcagcctattgactttcctcctcagcctttacctctggtttcattttgatgcttccgaggaaggacttcaactggtggagcgtaccggctggattccacaattcaatattgaatacttcctggggctggacgggctgaacctgttttttctactcatcatcacttttatcactcctctagctttacttggttcctggaacctgcagaagcgtaactggcagttccagattcagatgcttttgttggaaattggaatgctcggttgtttcgcggcatttgatgtggtcttgttctatgttttcttcgaagtgatgttggttccaatgtattttctgatcgggatctggggcggttccaaccggctttatgcgacgatgaaattcgtgatttacaccatggtcggttctctgttgatgctggttgccttgatttacactgccatcctcttcaaagaaattaacaacggatggtccttcaatattctcgactggtatggaatgaacatcgcgccggagacccaaacctggctcttccttggttttgcagtcgcctttgctgtcaagattcctcttttcccgttccatacctggcttccagatgctcactatgaggcaccaacagcaggttccgtccaacttgccgcagtgatgctgaaattcggaccctacggatttcttcgttttgccatgccggtattcccggctgcggtttatgaactgactcccttgttcatcaccctctcactgatcggcgtcatttacggaggattggtggcgatggtgcagaagcaaattaaacgcttgatcgcctattcttcagtagctcacatgggttatatcgtacttggactgttcgctctcaatacccagggggtttatggtggctggatccagatgatcaaccacgcaattgtgaccggtgctctgttccttgtggtgggaatgatttacgaacgaacccacacccaga

SEQ ID NO: 201333 - DNA, 1420 bp, Unknown
  Bacterial polypeptide expressing nucleotide sequence isolated from the Sargasso Sea
atggaaaatttaaatttagtattacctgaaatttttatctcactttcaataatgtttttacttgttttgggtgtgtttaaaaaagatagttctaaaatcacatttattttgtctttattcgcaattttaattacagcgataataacaattaatgaaactttctctgtcagcagggaaactttatttaatgaaagtgttgtgattgatagtttgtcctcactaatgaaaattataacattggttggaggttttttagttttagttatttcttcaagttatttaaaaacatttaaaatgtacaatatcgaataccctattcttattttgagctctattctgggtatgatggtaatgatcagttcaaatgatttaattgttttttatatgggtttagaattgcaatcattagctctttatgttttagccacatataatagagatcaactaaaatcatccgaagctggtttaaaatattttgttttaagtgcattatcctcaggattattgttgtatggatgctcattggtgtatggtttttctggttcaactaattttgatataatatcaaatcaactaaattctaatgaatatgttttaacatttggaatagtgtttatcttagttggtttagcttttaaaatttctgcagttccgtttcatatgtgggcacctgatgtttatgagggatctccaacaactgtaacattattttttacaatggtacccaaaatagctgctttaactgtatttataaggtttttgtatgttccttttttaaatttaatcgatcagtggcaaatgataattgttttcttatcaattgcttcaatgatttttggagcagttgcagcaataggacaaactaatattaaaagactaattgcctacagttctattagtcatattggttatactttagcaggattagctactgtatctaatgaaggaattcaaagttcaataatctatatttcaatatatgttgtaatgaatttagctcttttctgttgtctattaatgttaagaagaaaggatcaatattatgaggatattagtgatctttcgggattatcaaaaaaccatccgatgttatctttatgtttacttgtaatactgttttctttagcaggtatcccgccccttgctggtttctttgcaaaattttatgtttttatagcagtgttagaacaatcaatgtatttcttagctatagtaggtttattatctactgtagttgcagcattctattacttaagaattataaaaatcatatactttgataaagaaaaagacaaatacgatactgaccatagtttatggttaaaattttcacttacagtttcaacgatattaatccttttatacttcatattcccaagtcagttaattgaagttgtttcaagaattaatattatttgat

SEQ ID NO: 201334 - DNA, 987 bp, Unknown
  Bacterial polypeptide expressing nucleotide sequence isolated from the Sargasso Sea
taaatggagtatggtccttcagcgttctggactggtatggcatggacatttcaaatgatactcagtattggctgttcataggatttgcggcggcttttgcagtaaagattcctattttccctcttcatacctggctcccagacgcacactatgaagctcctaccgctggatcagtccagcttgctgcagttttgttaaaatttgggccatatggttttttacgttttgccatgcctatttttcctgcggcagtttacgagctttctacattatttttagtgcttgccctaatcggaattatctatggaggaatggtggcaatggtccagcctcaaataaagaggcttattgcatattcatctgtagcccacatgggctacatagtgctcggtttattcgcacttaacattcaaggtctttatgggagttggattcaaatgataaaccatgcaattgtaactggggcacttttcctagttgttggcatgatttacgaacggacacacacacaggagatttcagattatggcggggtcgcgcataccatgcccaaattttccgtattccttatcttcttttcaatggcatcaatcggcctgccggggcttaatggatttgttggtgaagtgttggcaatgattggtgccgcaaaggtcaacatatggtatggaattgttgcagcatttggggtattgattgctgcaatttacatgctttggatggttcagcgtgttgtctttggtccaatgacaaaggatatggtgaaacgccttaatgatttcacattgcgtgaagttgttgtacttgtacctcttgttttctggaccatctttctaggagtatatccacaaccattctttgaacgcatcgaagtaagcattaatcactacatccagttaatcaagtcacaggaaccccgttttgcacaagatgaagcagaaagtcctggtttgacaaaattccttgtatggaatttggaagagtaat

SEQ ID NO: 201335 - DNA, 1009 bp, Unknown
  Bacterial polypeptide expressing nucleotide sequence isolated from the Sargasso Sea
atgataattgaatatttaacaattttattttctgaaatatataaaattttatttcttttaataccagttctaactgctgttgccatgatcgtgtggttagatagaagaatctgggcttttgttcaaaaaaggagaggtccaaatgttgttggtccttttggtttatttcaatcattagctgacgcattaaaatatatgtttaaagaaatcataatacctgccagttcgaacaaaattatatttattttagctccaattgttacaatgactttagctttagttgcttgggccgttattccatttagcgaaacatttgttttagctaatattaatgttggcattctttatatattcgcagtttcttctttaggtgtttatggaataatcatgggtggatgggcatcaaattccaagtatccttttttaggctctatcagatctgcggctcaaatggtttcctatgaagtttctataggcgtgattataattaatgttttgctttgtgttggttctttaaatttgagtgatattgttttagctcaaaagaatttatggtttgttataccattatttcctatgtttattattttttttatttcagccttagccgaaacaaacagacctccatttgatttacctgaagctgaagctgaattagtcgcaggataccaaactgaatattcaggaatgatgtatgcaatgttttggctgggtgaatacgctaacattttattaatgtgtgcaatgggttctgtattatttttaggaggttggcttcctccattggatattgaagctctttcttttgttccaactccattctggatgatatttaaaattttgtttttattcatactttttgctttagttaaagcgatcgttccaagatacagatatgatcaattaatgaaattagggtggaagatatttttgcctttatcattagtctgggtcgtattgacagcaagttacttactttattttaatttattacctgtacaaatatgaa

SEQ ID NO: 201336 - DNA, 771 bp, Unknown
  Bacterial polypeptide expressing nucleotide sequence isolated from the Sargasso Sea
aatggataatattttctcaatgtatctctatcctgcggcgatcatcgccgcaaagagtgtttttttgataacagcactattaattacaatagcttttctattgttagcagatcgtaaaatatgggcagctgtgcaaatgagacgaggtccaaatgttgttggtgcattcggtcttttgcaatcttttgcagacctattaaagtttgtattaaaagaagtcattatcccttctaaagcagataaggcagtttttttacttgcgccatttattacaacagtatttgcgatttcggcttgggctgtaattccattcgatgcaggtattgttttggccgatatcaatataggcgtactgtatatccttgcaatttcatctttgggtgtttatgggattatcatgggtggatgggcatcaaactccaaatatcctttcctcggtgcccttagatctgcagcgcaaatggtgtcttacgaggtgtccattgggtttgtgataattacagttattttattgagtggttcgctcaatttaagtgatattgtaaacgcccaatcgggtgattacggaattttaaactggtacttcatcccattgtttccaatgtttgtggtgttttttatttctgccttagccgaaacgaataggcctccatttgatctacctgaagctgagtcagagctcgttgctggttttatggtggaatactcatccacgccttacctgatgttcatgctcggtgaatatgtatcgattgttttaatgtgcgcctt

SEQ ID NO: 201337 - DNA, 457 bp, Unknown
  Bacterial polypeptide expressing nucleotide sequence isolated from the Sargasso Sea
aatggatgttcttgaaaaaataaacgaatcgcaaaatggttttgtaacagcatcatctaaggatttattcaaatgggcatcaacaggttcaatgtggccaatgacatttggtctagcatgttgtgctgttgaaatgatgcatgcgggtgcatctcgatacgatttagataaatttggaatgatgtttagaccaagcccaagacaatcagacgtcatcattgttgcaggcactcttgtaaataagatggctccagctattagaaaagtttatgatcaaatggctgacccaaagtgggttatttcaatgggatcatgtgcaaatggtggaggttactaccactattcatattcagttgtaaggggttgtgacagaattattcctgtagacgtctatgtttccaggctgtcctccaaccgcagaggctctgctttatggagttttacagctaaaaaataa

SEQ ID NO: 201338 - DNA, 1003 bp, Unknown
  Bacterial polypeptide expressing nucleotide sequence isolated from the Sargasso Sea
aatgattgaatatttaaatattttaattacagaagtttataaaatttttcttctaattattcctattttaacagcagtagcaattattgtttggcttgataggagagtatgggcttttgttcaaaaaagaagaggaccaaatgtagttggcccttttggcttatttcaatctttagctgatgctttaaaatatatttttaaagaaataataatacctgcaagtgctaataaaattatatttgttcttgcaccagtcgtaacaatgacattagctttaatatcttgggctgttataccatttagcgaagaaatggttctagcaaatataaatgtgggtatactatatctttttgcagtttcgtctcttggtgtttatgggattataatgggtggatgggcgtcaaattcaaaatatccctttttaggagcaataagatctgcagcacaaatggtatcatatgaagtttctattggtgtaataataataaatgttttgctatgtgtaggctcattaaatttaaccgacattgtattagctcaagaaaatttatggtttatagttcctctatttccaatgtttatcattttttttatctctgcccttgcagaaactaataggcctccatttgatttaccagaagcagaagccgaattagttgctggatatcaaactgaatattcaggaatgatgtatgcaatgttctggttaggcgaatatgcaaatattttattaatgtgtagcatgggatctattttgtttttaggtggatggttatctccaatagatctttatccttttacaatagtacctgcaccactttggttgatacttaaaatattattattgtttattctattttctttagtaaaagcaattgtcccaagatacagatatgatcaattaatgaaattaggttggaaaatttttcttccattatcattaacctgggtggttttaacagcaacttatttattttattttaatctattacctgtaaattaa

SEQ ID NO: 201339 - DNA, 142 bp, Unknown
  Bacterial polypeptide expressing nucleotide sequence isolated from the Sargasso Sea
gttcgaggaacttttcctagatatagatatgatcaattaatgagactcggctggaagatttttttaccattatcattactatgggtagttttaacagcaggttttttaattgtatttgatatggtgccaaactctttatgat

SEQ ID NO: 201340 - DNA, 949 bp, Unknown
  Bacterial polypeptide expressing nucleotide sequence isolated from the Sargasso Sea
attgatcccagttttagtatctgttgcaatgattgtttggttagatagaagagtatgggcatttgttcaaaaaagaagaggtcctaacgttgttggtccatttggattatttcaaacattagctgacgcattaaaatatatttttaaagaaataatcattccagcaagctcaaataaagttatatttatattagccccaatagttacaatgactttggctttaattgcttgggcggtaattccttttagtgaaacatttgtactagcagatatcaatgtcggtattttatatctttttgcagtttcatctttaggtgtttatggaataattatgggtggatgggcatctaattcaaagtatccttttctaggagcaattagatcagctgctcaaatggtttcttatgaagtttccataggtgtaataattataaatgtattactttgtgtaggttcattaaatctaagtgacatcgttttagctcaaaaagatttatggtttgtaatacctctattcccaatgtttataatattttttatttcagccttagcagaaactaacagaccaccttttgatttgcccgaagctgaagcagagttagttgcaggttaccagacagaatactctggaatgatgtatgcaatgttttggttaggggagtatgctaacattttacttatgtgtgcaatgggatctattttatttcttggtggctggttatctcccatagatttatttccttttaacgttattccagctccaatatggttaatcttaaaaatactctttttatttatcttatttgctttgataaaagcaatagtacctagatacaggtatgatcaattaatgaaacttggatggaaaatttttctaccattttcattgatttatgtagtattaactgcaagttttttaatgtattttgatttattaccggggaattag

SEQ ID NO: 201341 - DNA, 283 bp, Unknown
  Bacterial polypeptide expressing nucleotide sequence isolated from the Sargasso Sea
atgtttaattttaaaaataaaaaaaatgaaattccatctgagtttaaagaaattgcaaaagattttagcgaaaaaggttttgttacaacttcatctcataatttaataaattgggctagaacaggctctctacattggatgacttttggtttggcatgttgtgctgtagaaatgatgcatacatcaatgccaagatatgatttggaaagatttggtgctgcccctagagcttcaccaagacaatcagatgtaatgatagtggctggcactttacaaataaaat

SEQ ID NO: 201342 - DNA, 674 bp, Unknown
  Bacterial polypeptide expressing nucleotide sequence isolated from the Sargasso Sea
tgttggtattttatatcttttcgcagtttcatcattaggtgtatatggaataattatgggaggatgggcctcaaattctaaatacccttttttaggtgcaatcagatctgctgcacaaatggtatcatatgaagtttcaataggagttataataatcaacgttctattatgtgttggatctttaaatttaagtgaaatcgttatggcacaacaaaatttatggtttgtaattcctttatttcctatgtttgtaattttttttatttctgcattagcagaaacaaatcgtcctccatttgatttgccagaagcagaagcagaattagtagctggatatcaaacagaatattcaggaatgatgtatgctatgttttggttaggagagtatgcaaatattttgttaatgtgtgcaatgggatcagttttatttttgggtggctggttgtctccaatagatatcttcccatttaatgctattccaggtccattttggcttatctttaaaatattatttttatttattttatttgcgttagttaaagcaactgttccaagatacaggtatgaccaattaatgaagcttggttggaagatatttctcccattttcactgttttatgttgttttaacttcaagttttttactatattttgatttactaccagggaaataaa

SEQ ID NO: 201343 - DNA, 130 bp, Unknown
  Bacterial polypeptide expressing nucleotide sequence isolated from the Sargasso Sea
gcctagatatagatatgatcagttgatgagattaggttggaaagtttttttaccgttttcacttttttatgttgtactaactgctagttttttattttattttgaactactaccaacaaaaggttattaa

SEQ ID NO: 201344 - DNA, 215 bp, Unknown
  Bacterial polypeptide expressing nucleotide sequence isolated from the Sargasso Sea
atcaatgccagagcctcgatatgttatatccatgggttcatgcgcgaatggcggcggttattatcattacagctattctgtcgtccgaggttgtgatcgaatagtgcctgttgatgtttacgtcccaggctgcccgccaacagcagaggctctgttatatggtattttggcacttcagaaaaaaatccgaagaacaggaacgatcaaaagatgac

SEQ ID NO: 201345 - DNA, 1456 bp, Unknown
  Bacterial polypeptide expressing nucleotide sequence isolated from the Sargasso Sea
atgagcttcccaatattatcactattaatcttaactcctatcataggagcattaacactatcattatcaagtagttctcaactaaaaaataaaactatttttttatctggtttatggatcactacaggtgaatttcttttaagtttacttttaccaatattttacgataaaactaaaaatggttaccaatttacagagtaccacacatggttcgataagtttgacattaattactatgttggtgtagatggtgtatctattccattaatacttttaactacttttctagttcctatttgtttgttgtgttctttaaattctatccaaaatagagctaaagaatttgtaatttattttcttttacttgaaagttttattattggagtttttgttagtattgatttggtaattttttacgttttctttgaggcagttttaattcccatgtttttaataattggaatttggggaggagaaaataggctttatgctacttttaaatttttcctatatacgcttgcaggatctgttttaatgcttttagctattatattcattatctcgaaagttaaatcaggtaatattgaattaatctcagattttacttttgatcaacaaatagaattaattctatttttatgtttcttcgcatcttttgctgtaaaagttccaatgtttccttttcatacgtggttacctgatgctcatgttcaagctcctacaagtgggtcagtgatattagctggtgtactacttaagttaggtgcatatggttttataagactatctttgcctttctttgagtatgcatcaatatattttcagccaatgatttttgcacttagctgtgtagcaattgtttacacttcaattgttgctttaagacaattagatatgaaaaaaatgattgcttattcctctgtggctcacatgggttttgttacaataggtatttttactcttacacaagatggtataaatggtgcatattttcaaatgataagtcatggaatagtatcagcggcattatttttaatagttggagttgtttacgaaagacatcatacaagaatgatttcagattatagtggagtcacgaatgtaatgcctaaatattcattttttttcatgatttttatgctttcatctgtgggtttacctggaactagtggtttcgttggagagtttctagttattatgtctactataagtgtaagcgtgtaccttacatttttcactgctattggggtaatcttaggagcatcttatatgctcttattatataaaaatgtaaattttggagacttaaagactgatataaaacaattagcagatttaacaaatattgaaattttttacttttcttgtttagcctttctcacaatgcttctaggtgtatatcctaaactattatttgaaatgattaacaagagtatttctatgagtattctttaat

SEQ ID NO: 201346 - DNA, 586 bp, Unknown
  Bacterial polypeptide expressing nucleotide sequence isolated from the Sargasso Sea
tttttaggctcaataagatcagcagctcagatggtatcttatgaggtatcgatcggtgttataataattaatgtattattatgtgttgggtctttaaatttaagcgacattgttttagctcaagaaaagatttggtttgtcatacctttatttccaatgtttgtgattttttttatatcagcacttgcagagacaaatagaccaccatttgatttacctgaggctgaggcggaacttgtagcaggttatcaaacagaatactccggaatgatgtatgcaatgttttggttaggtgaatatgcaaatatacttttaatgtgtgcattaggttctatattatttttgggtggatggttatctccaataaatatgtacccatttgatattgtgcccagtcctttatggttaattctcaaaattctctttttatttatattatttgcactagttaaagctatcgtaccaagatatagatatgatcaattaatgaagctaggttggaaaatattccttccattttctttaatttgggtggttttaactgcagggtatttaatgtattttgatttattaccgacggtttaat

SEQ ID NO: 201347 - DNA, 1300 bp, Unknown
  Bacterial polypeptide expressing nucleotide sequence isolated from the Sargasso Sea
aacgcctgtttcagcattgatgcatgctgctaccatggttgctgctggggtatatcttacagtaagactttttcctatttttacccctgatgcgttattagttattgcttacgttggtggctttaccgcaatatttgctgcgacaatcgcaattacccaaaatgatattaaaaaggttttagcgtattctacagttagtcagttgggttatatgattttagctgtgggcgttggaaattatgttgcggcctttttccatctgctaacccatgccatgtttaaagcgtgtttattctatggctcaggctcagttattcatgctatgcatcactctttgcatgagcttcacgatgaggaaaccgatccgcaagatatgagaaatatgggtggctttaaaaataaaatgccaataacaagcttaacgatgacaattgctacgctagctattgccggtgttcctttattctcaggttttttatctaaagatgctattttagcaggcacgctgtattttgtagatcgtcatccggaacatttagttttagctttatttggatttggtgctgctgcaatcacagcattttatatgtttagattaatcttcttaactttttatggcgaaccgaagatacctaaagtgtttgaaggaattcatgagtcaccaaaagttatgacttatcctttaattattttagccgcgctgagtttctttatattttatacccttccatactttaacccatttgcagactacggctggtttacaaaattaatcaaagcgactaattctgcagttcccgggaaccctaccgcaaaagaaatttatgatggagttcactatgctcattacactgcaatgactttatcgattattgttgcttctgtgggtatcggactttcatttttgatgtattataaaaagaagctttctcctgaaatttggacaaaaagatttggcattttgcacaagctctcattgaataaatattattttgatgagaattataatagatttttataccaaccttttttaaagctttgcaatgctgttgcgtacgttgactgggacttgtacgataagtattttatcaatggatttggacacattacaaaattactatcaaaaattaccggccgtcttgactatgaagggcttgatcagacactggttgatggtataggaaaaacagcaaataatgctggtaagaatttaaagacagtgcaaaccggtaagttgcaaaactacatgctttttgcacttgttggtgtcataataattttggtttttcaaataacctag

SEQ ID NO: 201348 - DNA, 218 bp, Unknown
  Bacterial polypeptide expressing nucleotide sequence isolated from the Sargasso Sea
tgatcaaatgcctgaacctcggtgggtaatatcaatgggttcgtgtgcaaatggtggaggatattatcattactcatattcagtagtaagaggctgtgatagaatagttcctgttgatgtttatgtaccaggatgtcctccaacagcagaagcattagtttacggaattctccaattacaaaaaaaaataagaagagaaaacaaatttaaaagataat

SEQ ID NO: 201349 - DNA, 256 bp, Unknown
  Bacterial polypeptide expressing nucleotide sequence isolated from the Sargasso Sea
ttgcatcctattattcggtggagcaatgggtaaatctgcacaaatgccgcttcatgtatggctgccagattcaatggaaggtccaacaccaatatcggcccttatacatgcagcaaccatggtcactgctggcgttttcttaattgcaagaatgtcaccattatttgaactttccactacggcactctcatttgttctgattattggagcaactacggcattgtttactggcatcctgaggtttgattcaaaatga

SEQ ID NO: 201350 - DNA, 357 bp, Unknown
  Bacterial polypeptide expressing nucleotide sequence isolated from the Sargasso Sea
aatggatcttaaaaaaggtttagcatatagtactgtttctcagctcgggtatatgatgcttgcgatgggttgtggtgctccagtagcaggaatttttcacttaataacacatgcttgcttcaaagcgatgttgtttttaggatccggctcagtaattcatgcgatggaagaagtggttggtcatcaacctgtacttgcacaagatatgaggttgatgggaggtttaagaaagaaaatgccctttacctctataacttttttaataggttgcgtagccataagtggtattcctccgttagcaggtttttggagtaaagatgaaatattaggaaatgcttttatctcatttccagcttt

SEQ ID NO: 201351 - DNA, 384 bp, Unknown
  Bacterial polypeptide expressing nucleotide sequence isolated from the Sargasso Sea
tcgatttaccagaagcagaagcagaattagttgcagggtatcaaacagaatattctggaatgatgtatgcaatgttttggctgggggaatacgctaatattcttctgatgtgtgcaatgggatctattttatttttaggaggatggctacccccactagacatatacccatttaatattgttccagcacctttctggatgatatttaaaattttattactgttttttttattcgcaattattaaggcaattgtaccaagatatcgttacgatcaattaatgagattaggatggaaagtttttttaccattttcacttatttacgtagtcttaactgcaagttttctactttattttgataaattaccgaaaggttcattttaat

SEQ ID NO: 201352 - DNA, 256 bp, Unknown
  Bacterial polypeptide expressing nucleotide sequence isolated from the Sargasso Sea
ttaggttctattttgtttttaggaggatggttatcacctttagatttttatccatttgatttgatacctggtgcaatttggctgattctaaaaattttattattgtttattctttttgctttagttaaggcaattgttccaagatatagatatgatcaattaatgagattaggctggaaaatatttttacctttttccctgatttatgtagtgataacatcgagttatcttttttattttaaccttctaccttaaa

SEQ ID NO: 201353 - DNA, 306 bp, Unknown
  Bacterial polypeptide expressing nucleotide sequence isolated from the Sargasso Sea
tgttctggcttggtgaatatgctaacattttattaatgtgctcattaggctctatcttgtttttaggtgggtggttatctccaataaatatttacccatttgatttaattccaagtccaatatggctaactattaaaattttattattatttatccttttttctttggttaaagctatagtgcctagatatagatacgatcaattaatgagattgggttggaaaatttttcttcctttttcattattctgggtaattttaacagcaagttatttactttattttaatttattaccggtaatttaat

SEQ ID NO: 201354 - DNA, 1006 bp, Unknown
  Bacterial polypeptide expressing nucleotide sequence isolated from the Sargasso Sea
aatgattgaatattttcaaattttaggtcaagaagtttataaaatactttttttacttattccaattttagtttctgttgctatgatagtttggttggatagacgagtttggggcttagttcaaaaaagaaaaggtcctaacgttgttggtccttttggtttatttcaaactcttgctgatgctttaaaatatatttttaaagaaataattattccagctagcgcaaataaagttgtttttattttggcccctatagtgacaatgactttagctttaatagcttgggcagttattccaatgagtgagagctttgtgctctctgatatcaatgtgggaattttatatctttttgctgtttcgtctttaggagtttatggaattataatgggaggctgggcttcaaattcaaaatatccattcttgggagctataagatcggcagcacaaatggtatcctacgaagtatcaattggaataataattataaatgttttactttgtgtaggatcactcaatttaaataagatagttttagcccaaagtgaaatatggtttatctttccattatttccaatgtttgttatattttttatatcagcgctagctgaaacaaatcgtccgccttttgatttacctgaagctgaatctgaattagttgctggataccaaacagaatattcaggaatgatgtatgcaatgttttggttaggagagtacgctaatattttacttctttgttctcttggatcaattttatttctaggaggatggttaagtccaattaatatttatccgattaatttgctaccaggagctttttggatgatattcaaaatcattagtctttttgttttgttctctttagttaaagcaatagttcctagatatcgttttgaccaattaatgagattgggctggaagatttttttaccactttctttaacgtggttaattttaacagctagttttttattctttttagatatgttgccaaaggtgaattga

SEQ ID NO: 201355 - DNA, 949 bp, Unknown
  Bacterial polypeptide expressing nucleotide sequence isolated from the Sargasso Sea
tatgttcatagctattggagcaggagcctatgttgcagcaatatttcatctcgtaacacatgcattttttaaagcattgctatttctcggagcaggggctgtaattcatgaaatgcatcacgaacaaaatatttataaaatgggcggtcttagaaaaaaaatgccagtaactgctgcaatgatgggaattggaactttagcaatatctggtattccaccgttggcaggattttggtcaaaggatgaaatactagcctcggtattttctaaaggaggaatttattatggcttctgggctttatctcttttagctgcattaatgactgctttttacatggggaggcactggttattaatttttgttaaagagccatccaatgaattagacagtgtaaatgaagcaccaaaaaatatgacaaggcctttgattctacttggccttttttctatttttattggatttataaacacacctttttttcatggtttagaaaaagtattacacgaaactctttataacgtagaagttacgcaccttccaaaaggtataactctcgctgtcttggcatttctatcaattggtgcaggttttacaggccttgcacttgcatacttgatttatatctttgatatttttggctattttaaaataaaaataccttttttaaaacaaatcaaaaagctttcaaaagacgttcttaatttaaataaaataggaaatctaatttttgtaaaaggtatgaaatcattatcaagaaaagtcgctgtaagtgttgatggtatgactattgatggatttataaatggggtagcaaggtcatttttaaaatcatcccaacaaatttcctattcacaaactggtcttgttagaagctatgttgtatattttggacttttcatgttggcactaattcttgtatttttattttcacctggagtcttattatga

SEQ ID NO: 201356 - DNA, 1035 bp, Unknown
  Bacterial polypeptide expressing nucleotide sequence isolated from the Sargasso Sea
gcgcatcccatggataaaacaatcaaacatagaatacttcctgggattggatggccttaaccttttctttctgctgattataaacttcatcacacctcttgctctgcttggctcttggaatttagagaaaagcaactggcaattccaaatccaaatgcttctactgcaaataggcatgcttggctgttttgcggcgatggatgtagtattgttctatgtattttttgagttgatgcttattcctatgtatttattgattggcatttggggaggatcaaataggctttatgcaaccatcaaattctttctatacacctttcttggttcactgctgatgctggtggctcttctatacacggcgaccctatatatggatttacatggagtatggtctttcagcgttctggactggtatggcatggacattccagttgatactcagtattggcttttcctaggattcgcagctgcttttgcagtaaaaattcctattttccctcttcatacatggcttccagacgcgcactatgaagcccctacagctggatcagtccagcttgctgcagttttgctaaaatttggaccttatggttttttacgttttgccatgcctatttttcctgctgcggtttatgagctttctacgttcttcttagtgctggccttaatcggaataatttatggaggaatggtggcaatggtccagccgcagataaaaaggcttattgcctattcatctgtagcccacatgggctatatagtgctcggtttattcgcacttaacatacaagggctttatggaagctggattcagatgataaatcatgcaattgtaactggggcacttttcctgattgtcggcatgatttacgaacggacacacacgcaggagatttcagattatggtggggtcgcacataccatgcctaaattttcaatattccttatcttcttttcaatggcttcaatcggtctgccaggacttaatggatttgttggtgaagtgctggcaatgattgtgccgcaaaggtcaac

SEQ ID NO: 201357 - DNA, 310 bp, Unknown
  Bacterial polypeptide expressing nucleotide sequence isolated from the Sargasso Sea
atgtataaattaattaaatcttttactttatttgaattatttcaaggactatttttaactttcaaatacatatttaaatctaaagttacaataaattatcctcatgaaaaaggtccattaagcccacgttttagaggcgagcatgctttgagaagatatccaagtggggaagagagatgtatcgcatgtaagctttgtgaagcagtatgtcctgctcaggcaattacaattgaagcagagccaagagaggatggaagcagaagaacaacaagatatgatatagatatgactaaatgtatttactgtggtt

SEQ ID NO: 201358 - DNA, 973 bp, Unknown
  Bacterial polypeptide expressing nucleotide sequence isolated from the Sargasso Sea
aatgataaacgcaatatattttttaattccagaaattttcttatcactgtcggtttttgtatttattatttttggagtttttaaaaaaaatagctttgatttgatttacaaggcaactattatcataataccgatcgtaatttttctaatattaaataataattttgaaaatataaaaatatttaataatagttttgcattagatgaattttcatcttttatgaagatcttaatcttagtttcctcgttttttgttttaataatgtcaaaaaaatatattcaagatattaaaaataataaatttgagtatccagttattatgttaattgccattttaggtatgttttttatggttagttcaaatgacttaatacttttttatcttggcttagaacttcagtcactgtcattatatatactcgcatctatagatagagataatttgagatcatctgaagcaggtataaaatactttgtactaagtgctctctcctctggattattattatatggatgttctttactttacgggtttactggctcaacaaattttcaagttatatctaataatgttggagacattaatataggaactatttttgcaatgatttttatattagttgggttagcatttaaagtttctgctgttccttttcatatgtggacaccagatgtttatgaaggttcaccaacatctgttactagcttttttgctatcgttcccaaaattgcggggatagcagtttttataagatttatgtattcaccttttcaaaatattttagaccagtggcaatatattttggtgtttatatctatcgcttctatgattttaggagctgttgcagcaataaatcaaaaaaatattaaaagattaatagcttacagttcaataagtcatatgggttatgcaatagctggaatatcaacaggtactgaaagtggttttaaaagtacaataatttatatcttg

SEQ ID NO: 201359 - DNA, 382 bp, Unknown
  Bacterial polypeptide expressing nucleotide sequence isolated from the Sargasso Sea
accatttgatcttccagaagcagaagcagaacttgttgcaggttatcaaactgaatattctggaatgatgtatgctatgttttggttaggtgaatatgctaacatattattaatgtgtgccatgggatctattttattcttaggtggatggctatctcctactgacacttatccattgaatttaatacctgcacctatgtggatggttttaaaaatattatttttatttatactttttgctttggtaaaagctatcgtaccaagatatcgatatgatcaattaatgaaattaggatggaaaatatttttaccactatcattaatttgggtagtgattacatcaagttatttatactattttgatttattaccaacgaactaa

SEQ ID NO: 201360 - DNA, 191 bp, Unknown
  Bacterial polypeptide expressing nucleotide sequence isolated from the Sargasso Sea
tgctttttggttaatctttaaaattattttcctatttattttatttgcattagttaaagcgattgtgccaagatatagatatgatcaattaatgagattaggctggaaaattttcttaccattttcattgacctgggttgtattaacagcgagttatttattttattttaatcttttaccaactaattaaa

SEQ ID NO: 201361 - DNA, 1003 bp, Unknown
  Bacterial polypeptide expressing nucleotide sequence isolated from the Sargasso Sea
atgtttgaaaatctaactattttatttaatgaagtttataaagttctatttttattgatacctttattaactgcagtagcaatgatcgtttggcttgaccgaagagtatgggcatttgtccaaaaaagaagaggacctaatgtggtagggccttttggtttatttcaatcattagctgatgcactaaaatatatatttaaagaaattataattcccgcaagtgctaataaaattatatttattttggcacctatagttactatgactttagcattgatttcttgggccgttattccattcagtgaagaatatgttttagctaatattaatgttggaattttatatctttttgcgatttcatctcttggtgtttatggaattattatgggaggatgggcttcaaattcaaaatatccttttttgggagcaattagatcagcagctcaaatggtttcttatgaagtttctattggtgtaatcataatcaatgtattgttatgtgtgggatcattaaatctgacggacattgtgatggcccaagaaaatttatggttcatacttccattgctaccaatgtttgtaattttttttatttctgctcttgcagaaactaatagacccccattcgatttgcctgaagctgaagcagaactagttgcaggttatcaaacagaatattcaggaatgatgtatgcaatgttttggttaggtgagtatgcaaatattttattaatgtgtgcgatgggatcaattctttttttaggaggttggttaccaccaatagatatttatccatttacacttataccatcaccattatggctgatatttaagatattattattatttattcttttttctctagttaaagctgtagttcctagatacagatatgaccagttgatgaaattggggtggaaaatcttcttacctttatcattactttgggtagttattactgcaagttatttatattattttaatctattaccggtaaactaat

SEQ ID NO: 201362 - DNA, 352 bp, Unknown
  Bacterial polypeptide expressing nucleotide sequence isolated from the Sargasso Sea
atgtttggtttaaataaaaatagtgatcaaataccttctgagtttaaaaaaatagctaaagattttagtgaaaaaggttttattacaacatcttcagaaaatttaattaattgggcaagaacaggatcgttgcattggatgacttttggattagcttgttgtgctgttgaaatgatgcaaacatcaatgccaagatacgatcttgaaagatttggagcagctccacgagcttctcctaggcaatctgatgttatgatagttgcaggcactttaacaaataaaatggctgcacctcttagaaaggtttatgatcaaaatgccagagccaagatatgttatatcaatgggtagc

SEQ ID NO: 201363 - DNA, 1000 bp, Unknown
  Bacterial polypeptide expressing nucleotide sequence isolated from the Sargasso Sea
tatggactatttttacacgctaattttagaaacatataaaattttatttttattattgcccttattaacagcagtcgcaatgattgtttggttagacagaagagtttgggcatttgttcaaaaaagaaaaggtccaaatgttgttggcccatttggcttatttcaatctttggctgatgctctcaaatatatttttaaagaaattattatacccgcaagctcaaataaaatagtttttatactagccccaataactactatgacattagctttaatttcgtgggctgttattccattcagcgaagattttgttttagcaaatataaatgttggaattttgtatttattcgcaatctcatctcttggtgtttatggtataattatgggtggctgggcatcaaattcaaaatatccatttttaggagccattagatctgctgcacagatggtttcatacgaggtatcaattggagtaataattataaatgtactactttgtgtaggatccttgaatcttactgacatagttttggcgcaagataaagtgtggtttgtaataccattatttccgatgtttgttattttttttatatctgcactagcagaaactaatcgtccaccatttgatttacctgaggctgaggctgaattagttgcgggttatcaaactgagtattcaggtatgatgtatgcaatgttttggttaggagagtatgcaaatattttacttatgtgcgctatgggatctatattatttttaggtggctggttatcaccgattagtatttatccattcaacttagtacccccagcattatggtttataattaaaatcctatttttatttatactttttgcgttggtaaaagcaattgttccaagatatagatacgatcaacttatgaaattaggatggaaaatatttttaccattttcattaatatgggtagtgttaacagcgggttttttattatattttgatctattaccaaaggtttaa

SEQ ID NO: 201364 - DNA, 1291 bp, Unknown
  Bacterial polypeptide expressing nucleotide sequence isolated from the Sargasso Sea
tgcaaaaaagccttcattatgactaggcttggagattttggttttttgttctctataatttatttattcaatctaaattcaaattatttagaaattcctatattatatgaagcaatattaaatgaagaaatatctagtggagttgctacaatattagcagcaggttttttgattggtggtattggtaagtctgctcaattcccattacataattggcttcctgacgctatggaagggcctacttcagtttctgcacttattcattctgcaacaatggttacagctggagtttttcttatagctagattatttccgttatttcaaatttctgaattaatgccactcattgcaatagttggagctttgacagctttcatttctgcaactatggcattaacaactacagatataaaaagagttcttgcttattctacaatttctcaactaggatatatgtttatggcattaggtcttggtgcatatactgcagcaattttccatctattcacacatgcttttttcaaagcaggtttgttcctaagttcaggttcagttcatcatgctgcgggaacatttaatatgaaatatatgggtggactgaagaagaatatgaagtttacatattacagcatgttaatttgttcactatcattagcaggacttttccctttgtcaggattttggtctaaagatgaaattatattatctgcatatttatatggaggattcctaggaaatatttgcttaattattggtttatttgttgcctttcttactgccttttatatgtttagagctgtgactctaaccttcatgggagaatttagaggaggaggagataaagaatctgaagatttgaaaaaaaataatttacctgttcctgcaacagtagagcatgttcatcttggtgaatctcctaaaaatatggtttatccaattttactattatcattttttgcaatatttattggatatttggtcaatcctgttttctcaaatattatatttatagacaaacatctctttggagtttttcttgaaaaaagtctagagatttttcatttccacggtcatcattcatttaatttttctattgcacttgtttcttcttttgtagctatactaggaatactttttggtataaatacttacagaaataaaatcgaaatatcaaaaaataagtttttcttatcgataaataattttttggacaagaaatattttatggatcatttatatgaaaaaattgtagttgaaaatattttttatgagataattttgttggggtagt

SEQ ID NO: 201365 - DNA, 229 bp, Unknown
  Bacterial polypeptide expressing nucleotide sequence isolated from the Sargasso Sea
tattgatatttatccacttaatgttgttccatctccaatttggatgatacttaagattttatttttatttttcttatttgcactaattaaagcaattgttcctagatatagatacgatcaacttatgagattaggctggaaaattttcttacctttttctttggtttatctggttttgacagcaagttttttattttattttgataaactacctaaaggaaatttttaa

SEQ ID NO: 201366 - DNA, 1009 bp, Unknown
  Bacterial polypeptide expressing nucleotide sequence isolated from the Sargasso Sea
aatgtatcaagaggttaaattggaattaatttttcttctcccaatctttctaccttttttaactgctgtcttcctttttataaacaaaaaactatttaatgaattaattactaacttttttactttaaacagtgcactcttgtcatttgctattgccgcctattcatttattgctttagggcttgataaatttaaacctgtgaacgttgagttgtttcaatggatctctaatcctgatataagcattggttttactcttgatggactatctggaattatgctgattttggtaactggactatcttttgtaattcaacttttttccacttcttatatggaaaaagacgaaaatcattgtaattattttgtgtattttaacttttttgttttttcaatgttacttcttgtcatgtcatcaaacttcttagtgatgttctttggttgggaattagttggtttgagttcatatctattaatttcattttggtctaaaaaaccagctgctgcaaaggccggtaataaagcattcgttataaatagagttggggactttggatttttaattggattaatgattattttagatacttttaatacgtttgatttttataaaattttacaaaatacttctggaatagccgagtctactattacggcaatatccctctttttattgctaggtgcttttggtaaatccgctcaattccctctttttagttggcttccagatgccatggaaggtccaactcctgcaagcgctcttattcacgcagccacaatggttaccgcaggagtgtttatgcttgttagaatatctcccttattacaacactcaaaaatagctagcttattgattataatttttggacttataacagcacttcttgctgcattttctgccataaatcagtttgatatcaaaaaggtattggcatattcaacaatttctcagctcggatttatgtttattgcaattggggcaggggcttatgtcgctgcaatttttcat

SEQ ID NO: 201367 - DNA, 262 bp, Unknown
  Bacterial polypeptide expressing nucleotide sequence isolated from the Sargasso Sea
aatgaataatttttttgataaagaaaaaaagatacccgaagagtttagagagattgctaaggattttagtgaaaaaggttttataaccacttcaactgacaatctaataaattgggcaagaactggatccttgcactggatgacgtttggtttggcatgctgtgcagttgaaatgatgcaaacctctatgcctagatacgatctagaaagatttggagcggcaccaagagcttcaccacgacagtcagatgtgatgattgtt

SEQ ID NO: 201368 - DNA, 895 bp, Unknown
  Bacterial polypeptide expressing nucleotide sequence isolated from the Sargasso Sea
tatgggttttacaggatcaactaattttgatgtaattgcttctcagctaaactcaaatgaatacgctttaacatttggtattgttttcatattggttggtttagcatttaaaatttcagctgttccatttcatatgtgggcacccgatgtatatgaggggtcaccaacttcagtaacattattttttactatggttcctaagatagcagctttatcggtttttataagatttttatacgttccttttttaaatttaattgaacagtggcaaatgattttaatttttttatcaattgcctcaatgctattcggggctgttgcagcgataggacaaactaatttaaaaagattagcggcatacagctccataagtcatgttggttacgctttagcaggattagcaactggaactaatgacggaatacaaagttcagtaatctatataactatttatatattgatgaatcttggacttttttcatgtttattaatgatgaaacgaaacgataaatactatgaaaatattgatgatttatctggattatctaaaaaccatccaatgttgtccttatctttattgattattcttttttctttagcaggaattcctccacttgctggtttttttgctaaattttatgtttttaaatcagttatagaacaatcaatgtattttttagctgtagttggtttattatcaactgtagttgctgcattttattacttaagattaataaaaataatgtactttgatgaagaaaaagaaaaatatgacaaagatcatagtgtttggttaaaattctctctcacagcttctacacttttaattttaatatactttatatttccgagtcaactaattgaagtagtttcaagaattaatataattcaatga

SEQ ID NO: 201369 - DNA, 487 bp, Unknown
  Bacterial polypeptide expressing nucleotide sequence isolated from the Sargasso Sea
atgaaatttagcagattactaaaaacaattttaatgttggattttattaaaggattattaattgctattaaagagatttttaaacaaaaaaaaaccataaattatccttttgagaaaggaaaaattggaacaagatttaggggtgagcacgcactaagaagatatcccaatggtgaggaaagatgtatagcatgtaaattgtgtgaagcaatatgcccagcgcaagcaattacaattgagtctactgaaagagaggatggaagtagaaaaaccacaagatatgatattgatatgcttaaatgtatttactgtggattatgcgaggagtcttgtccagttgatgccattgttcaaggaccaaattttgagtttgctaccgaaacacgagaagaactttattacaataaagaaaaattattagacaatggtgataggtgggaaagtatcctagcagccaatattaaagcaaataaaccgtacagataat

SEQ ID NO: 201370 - DNA, 225 bp, Unknown
  Bacterial polypeptide expressing nucleotide sequence isolated from the Sargasso Sea
ccatagatttatatccattcacaattattccagcacctctatggttcatatttaaaattttaattttattcattttatttgccttggttaaagcaattgtaccaagatatagatacgatcaacttatgcgactaggctggaaaatatttcttcctttttcattactatgggtagttattacagcctcatatttgttttattttgatttattaccaggaaattaat

SEQ ID NO: 201371 - DNA, 553 bp, Unknown
  Bacterial polypeptide expressing nucleotide sequence isolated from the Sargasso Sea
gtatcatacgaagtttcaataggagttataattatcaacgttctattatgtgttggatctttaaatttaagtgacatagttatggcacaacaaaatttatggtttgtaattcctttatttcctatgtttgtaattttttttatttctgcactagcagaaacaaatcgccctccatttgatttaccagaagcagaagctgaattagtggcaggatatcaaactgaatattcaggaatgatgtatgctatgttttggttaggagagtatgcaaatattttgttaatgtgtgcaatgggagcagttttatttttgggtggctggttatctccaatagacatcttcccatttaatgctattccaggtccattttggttaatctttaaaatattgtttttatttattttatttgcgttagttaaagcaactgttccaagatacagatatgaccaattaatgaagcttggttggaagatatttctcccattttcactgttttatgttgttttaacttcaagttttttactatattttgatttactaccgggaaaataaa

SEQ ID NO: 201372 - DNA, 982 bp, Unknown
  Bacterial polypeptide expressing nucleotide sequence isolated from the Sargasso Sea
tttgttcgatcaaatttataaaattctttttttattagttccagttttagtatctgttgcaatggtagtttggcttgataggagagtttgggcttttgttcaaaagagacaaggacctaatgttgtaggtccgtttggtttgctgcaaactattgcagacgcattaaagtatatttttaaagaaatcattatcccatcaagttcgaataaagtaatttttattcttgcaccaatagtaacaatgacactagcattaattgcttgggctgtaattccatttagtgcaactcaagtgttagctgatataaatgttggtattctttatttatttgcggtttcatctcttggtgtttacggaattataatgggaggatgggcctcaaattctaaatatcctttcttaggtgcaattaggtctgcagcacaaatggtatcttatgaagtgtctattggagtgataattataaatgttcttctgtgtgtaggatcactcaatttaaatgatattgtgatagctcaacaaaacttatggtttgttattccattattcccaatgtttgttattttttttatttctgcattagctgaaacgaataggccaccatttgatctaccagaagctgaagctgaattggtcgctggatatcaaacagagtattctggaatgatgtacgctatgttctggcttggtgaatatgcaaatattcttttaatgtgtgcaatgggtgcgattttatttttgggtggatggctatctccacttgaaatatatccttttactttagtacctggacctatatggctagtattaaagatattgctattatttttgttgtttgctttagttaaagctactgttccaagatatagatatgaccaactaatgaaattaggttggaaagtattccttccattatctttaatatgggttgtgttaacggcaagttatctgttttattttaatcttctacctgtaaattaa

SEQ ID NO: 201373 - DNA, 952 bp, Unknown
  Bacterial polypeptide expressing nucleotide sequence isolated from the Sargasso Sea
ttgctagttcctgttttagtatcagttgctatggttgtatggctggatagaagggtatgggcttttgttcaaaaaagacaaggacctaacgttgtaggtccctttggtttacttcaatctcttgctgatgcgttaaaatacatatttaaagaaattattatcccttctagttccaacaaggtaatttttattcttgcaccaatcgttacaatgacacttgcattaatttcttgggcagtaattccatttagtgcaactcaggtgttagctgatattaatgttggaattctctatttatttgctgtttcatcacttggagtttatggaataataatgggaggatgggcatcaaattcaaaatatccattccttggagcaatccggtcagctgctcaaatggtctcttacgaggtatccattggagtaattattattaatgttttattgtgtgtaggttcacttaatttaaacgacatagttatagctcaacaaaatttatggtttgttattcctttatttccaatgtttgtgattttttttatttcagcattagctgaaacaaatagacctccatttgatttaccagaggcagaagctgaattagtagcgggatatcaaactgaatattctggaatgatgtatgcaatgttctggcttggtgaatatgcaaatattctcttaatgtgtgcaatgggtgcaattttatttttaggtggttggttatctccaattgaaatttatcccttcacgctagtgcctggagcagtatggctaattttaaaaatattgttattatttttcttatttgccttagttaaagcaattgttccaagatatcgatatgatcaattaatgaagttgggttggaaagtatttcttccaatgtctttaatatgggttgtattaactgccagctttttattttattttaatcttttaccagtgaattaat

SEQ ID NO: 201374 - DNA, 481 bp, Unknown
  Bacterial polypeptide expressing nucleotide sequence isolated from the Sargasso Sea
atgtataaaattataaaatcatttactttatttgaattattacaaggtttatttttaacatttaaatatatttttaaatctaaagttacaattaattatcctcatgagaaaggacctcttagtcctcgttttagaggagaacatgcattaagaagataccccagtggagaagaaagatgtatcgcatgtaagctatgtgaagctgtttgcccagcacaagcaataacaattgaatcagagccaagagaggatggaagtaggagaacaacaagatatgatatagatatgactaagtgtatttattgtggtctttgtgaagaatcatgcccagttgatgcaattgtagaaggtcctaattttgaatttgctacagaaaccagagaagaattaatctataataaagataaattgctagaaaatggtgatagatgggaacaagaaatttctcaaaatatttatcttgatagaaattacagataaa

SEQ ID NO: 201375 - DNA, 223 bp, Unknown
  Bacterial polypeptide expressing nucleotide sequence isolated from the Sargasso Sea
ccttttgatatttatcctttaaatgctattccaggcgttatctggtttacagttaaaataatatttatactttttttatttatctgggttcgaggtacttttccaagatacagatatgatcaactgatgagactaggatggaaagtttttcttccattttcattattttgggttgtagtaacttctagttttttagtttattttgatatgttgtcaaattaat

SEQ ID NO: 201376 - DNA, 490 bp, Unknown
  Bacterial polypeptide expressing nucleotide sequence isolated from the Sargasso Sea
catgaacgccattacgcgcagcgtaaaatccatctttcttgcggaacttgtaattgggatggcactcacgttgagaatgttttttaagcccaaggtgacagtaaactacccctatgaaaaaggtccgctgagcccacgattccggggcgaacacgcattacgcagatatcccaatggggaagaacgttgtatcgcctgcaagctctgtgaggccatctgcccagcccaggccatcaccatcgaggctgagccacgtgatgacggatcgcgacgcacaacccgctacgatatcgacatgaccaaatgcatctactgcggctattgcgaggaggcctgccctgtggacgccatagttgaggggccaaattttgaatttgccacggagacccgtgaagagctcatgtacgacaaggccaagctgctcgctaatggggaccgttgggaaacggaaatcggtgagcgcctgcgtctcgacgcaccgtatcgataa

SEQ ID NO: 201377 - DNA, 1420 bp, Unknown
  Bacterial polypeptide expressing nucleotide sequence isolated from the Sargasso Sea
atgattaataatattaactttatattccctgaaatattaatttcaatttttttaatgatgttgttaattttaggagtttttaaaaaaaatagctcctcattaatttataatttaagcatttcatctttagttgttattttagtattagttttaacatttccccaaggcacaacagtaaaactatttagtaatggatatataattgatgacttatctatatatatgaaatcgataacaattatttctggaatttttgtaatgttaacttcttcgaaatatcttaaaattataaaaatttatcaaattgaatatccaattcttttattaagttctattttgggaatgattatcatgattagttcaaatgatttaattgtattttatatgggcttagaactacaatctttagctctgtatgttctagcatcttttaacagaaccaacattctttcttcagagtctggtttaaaatactttgttttaagcgcattgtcctcaggtattttgttatacggttgttcattaatttatggtttttcaggttcaactaatttttatttgatttctgaaaatattaagaatttagaatatagtggagtatttggaattgtgtttatattagttggattagcttttaaaatatcagcagttccctttcacatgtgggccccagatgtatatgaaggatcaccaacatcagttaccttatttttctcaatacttcctaaaattgctgctttatcagtatttattagaattctctatgtgccattttttgaactaattaatcactggcagatgataataatatttttatctgtagcctcaatgatattcggtggagtagcggccataggtcaaaaaaatttaaaaagattagtcgcgtatagttctattagtcatatgggttatgctttagctggattatctacaggtacaaattatggaatacaaagttcaataacttatatttcaatatatctagtaatgaatttagcactatttagctgtttatttatgatgaaaattcaaaataaatattttgaaaatatagaagatctttcaggtatatcaaaaaatcatccacttttatcatttgcatttttaataattcttttttcattagctggaataccgccattagcaggtttttttgcaaaattttatatttttatggcggttatcgaacagtccatgtactttttggcaataaccggacttttagcaacagtagtttcagcattttattatttacgaataataaaagtaatatattttgatcctgagaaaattaaatatgataaagatcataatttaggattaaaattgacattaatagtttcaactttttttctaatgatttattttgtatatccgagtgtacttaccgaattagtcaataatattaatttaatttgat

SEQ ID NO: 201378 - DNA, 505 bp, Unknown
  Bacterial polypeptide expressing nucleotide sequence isolated from the Sargasso Sea
tttgtgttggtctttaaatttaagtgatatagttaaagctcaagaaaatttatggtttataataccattgtttccaatgtttattatcttttttatatctgcattagcagaaactaacagaccaccttttgacttgccggaagccgaagctgagttagttgcaggatatcaaactgagtattctggcatgatgtatgcaatgttttggcttggtgaatatgcaaacatattattaatgtgttctttaggttcaattttatttcttggtggatggctatctcctattgatatgtttccctttaatacaatacccggacctttgtggatgatttctaaaatgttatttttgtttatacttttttctttggtcaaagcaacagttcccagatatagatatgatcaattaatgaaactaggatggaagatatttcttcctttatctttatcatgggttgttttaaccgcaagttatttattatattttgatttgttaccggtaaattaa

SEQ ID NO: 201379 - DNA, 1189 bp, Unknown
  Bacterial polypeptide expressing nucleotide sequence isolated from the Sargasso Sea
gtagcaaggctccaacctctatactctttattcccttcaattcaatttattattgctttagttggcactattacatgtttcttaggagcgtctatagccttaacccagatggatctcaaaaaaggtttggcatatagtacggtttctcagctcggttatatgatgcttgcgatgggttgtggtgcacccgtagcaggaatttttcacttgataacacatgcttgtttcaaagcaatgttgtttttagggtctggctcagtaattcatgctatggaagaagttgttggtcatcaacctgtacttgcgcaagatatgaggttgatgggaggtttaagaaaaaaaatgccctttacttctacgactttcttaataggttgcgtagcaataagtggtattcctccattagctggattttggagtaaagatgaaatattgggaaacgcctttatctcatttcctgctttttggtttgtgggttttttaacagctggaatgaccgccttttatatgtttagactttattttttaacttttgaaggagattttagaggtgaagataaggatttacaaaaagaacttttattagcttctaaaattaatatagaagaggaagatcatcaagaagaacatggctcactacatgagtctccttggtctatgacattcccattggtttttctagcagtaccttcagtaataattgggtttatgggatttccttgggatagtaaatttgcaaatttattagatcccgaagaagcattgattgctatagagtcctttgaattaaaagaatttttgcctctagctattgcatctgttttcattgcctcaattggtataactattgcttatcaagcttattttgctaagaaaataaacttatcaatattatttgcacaaagatttccatctgttaataagttcttatcaaataagtggtatttagacgatattaatgaaaaactttttgtaaaaggtagtagaaaacttgcaaaagaagttttagaagttgattccaaagtggtagatggagtggtaaatcttactggacttgtaacattgggaagtggagagggtttaaagtattttgaaaccggcagagctcaattttatgctctgatagtttttggaggagtgattttgttggtagcaatatttggtttccaatcgccccaagtaacttaat

SEQ ID NO: 201380 - DNA, 932 bp, Unknown
  Bacterial polypeptide expressing nucleotide sequence isolated from the Sargasso Sea
aggagttggtgcttatcatgtagcaattttccatttatttactcatgctttttttaaggcgcttttatttcttggttcaggatgtgtaattcattcatttcatgatgaacaagacattcgatcaatgggaggggtttggaaaaaaataccttatacgtacgttttaatgttgattgggacattagctttaacaggatttccatttttatcaggctattattcaaaagatgcaattatcgagtttgcttatttaaaaggcacttatattgggtattcagctgctgcagtaggaatctttactgctttattaaccgcactttattcatggagattaatttttaaaacttttcatggaaaatttaataataaagaaaacaatttaacttcaatacacgagtcacccttaacaatgttaataccatcatgccttttagcggtaggtgcaattttaacaggtgtattatttaaagaaatgtttataggacatggtagtttagagttttggagtacttcaattttatttttaaaccctgttcaacatattcatccaccgacctggcttcttgtttttacccctaccttagttgttgctgctattcctgttgcgtattatttatttatagaaaatgataaaatattaaaaaatttagtttttaaaaatcaaagtttatataattttttaataaataaatggtattttgatgaattatataatttcattttcgtggagccgttaaaaaaaattggattatttctctggaaaaaaggagatgttagcaccatcgatcgttacggaccagatggtctatctagattagtaaaaatcatatcagataaatcagtgcgttttcaaagtgggtttttatatcactatgcttttgtaatgctcatcggcttttctatattattaacttatttaatattatattaaa

SEQ ID NO: 201381 - DNA, 160 bp, Unknown
  Bacterial polypeptide expressing nucleotide sequence isolated from the Sargasso Sea
tttgtttgttttgttcgcacttataaaagctattgtgccaagatatagatacgatcaacttatgaggctcggatggaaggtttttctgcctttctctttaatttgggtggtattaacttctggttatttactatattttgacttattacctgtatattaa

SEQ ID NO: 201382 - DNA, 1381 bp, Unknown
  Bacterial polypeptide expressing nucleotide sequence isolated from the Sargasso Sea
atggattattttttactttccatagtcaccttcatacctgctatatctgcgcttattttgctagtagtagcgagagggaatgatgcagcggcagctttagttgcaaaaaggtttgctctttttgcaacaggagtaacattttttgtttccctattcattatagcgcaatttgatccggaaaatactggttttcaaatggtggaggaagctgaatggataatgggtttaaagtataagctgggtattgatggaataagtgttctttttgtaatcctgactacttttatgatgccaattgtcatgtgggccagctggggtatcgaagtacgtgttaaggaatatatgatcgcgttcttattgttggaaacactcatgctgggtgtttttatggcgttagatttagtgttgttctatctcttctttgaggctggtttaattccgatgttcttaataattggaatttggggtggagctaatagagtttacgcatcattcaagttttttctctatacccttttgggatcagttttaatgctcattgcgatggtggtgatgtatgctgaagcaggcacaactgacattgaatctctaatgcttcatcaattcgcatttgatgattttaatttgtttggttttcagattttaggcggaacgcaaacgttgctatttttagcattctttgcaagttttgcggtgaagatgcccatgtggccggtgcatacatggttaccggatgcccacgttcaggcgccaactgcagggtcagtagtacttgctgctatcttacttaagatgggcggctatggtttcttgagattcagcctgccgatgtttccggttggttcatatataatgactgattttattctttggctatcggtaatcgctattgtttatacttcattagttgcactagtccaaagcgatatgaagaagttaattgcttactcttctgtagctcacatggggtacgtaaccattgggatttttgctgccaaccaacaaggaattgatggtgctattttccaaatgctgagtcatgggtttatttcgggagcgttgtttctctgcgttggcgttatttacgacagaatgcatactcgtgagatagaggcctatggtggcttggtgaatagaatgccggcttatgcactcatctttatgttctttacgatggctaatgtaggcttgcctggcacctcaggttttgtgggggagtttcttacgctagttggaatttttaaggttaacacgtggattgctttgctggcgacatcaggtgtcgttttgtcagcggcttatgccctttggttatatcgtcgcgtaatgatgggagatttaataaaggaagcgcttcgaaagatccaggatatgtctctaa

SEQ ID NO: 201383 - DNA, 493 bp, Unknown
  Bacterial polypeptide expressing nucleotide sequence isolated from the Sargasso Sea
atgaaaataatatatatattcaaaaatcttatacagctcgattttataaaagctttttttactgccatgaagtatttcatttttagaaaaagagtaactattaattatccttcagaaaaaggaaaactatctcctcgatttagaggacaacatgctttgagacgctacccaaatggtgaggaaagatgtatagcttgtaagctttgtgaagccatctgcccagcccaagcaataactattgatgcatctccaagaaacgaagacggaattagaaaagccataagatatgatattgatatggtaaaatgtatatattgtggtttatgtcaggaagcttgtccagtagatgcgatagtcgagggacctaactttgagtttgctacagagacacgtgaagagcttttatatactaaagaaaagctgctggataatggagatagatgggaagtgtctctagttagaaacattgagagggatgcgcctttcaggtaat

SEQ ID NO: 201384 - DNA, 812 bp, Unknown
  Bacterial polypeptide expressing nucleotide sequence isolated from the Sargasso Sea
aatggaatatattctattagtagttgtttttatccctttgttggtctcaatatttttaaattctatctctacattattaaatgaaagattgacaacgtttataacgataaatggtgcactcttatcatttacagtctcactttttatgtttggagttctactcttagataaatttaaaccaatttctttaaagttatatacatggtttcctgaaccagaaataaggtttgaatttcttcttgatggtttatcgggaacaatgatgcttttagttactggcctaggcttggtaatacaaatattttctacctcatatatgagtggtgaccctaggtatgttaaatattttgtatattttaatttctttgttttctcaatgctcctattagttatgtcagctaactttttagtaatgttctttggatgggagcttgttggcttaagttcttatctattaatctctttttggtctgagaaaaaagaagcagctaaagcaggaaataaagcattcgtattaaatcgaattggagattttggttttttgattgctttaatgatgatattaaatacctatgatacgttttcatttaaaacagtttttgcaacaacattaataaatcagccacaaaatctagatcttattgttgtcttcctcatgattggtgcttttggaaaatcagcacaatttccattatttagctggttgccagacgcaatggaaggaccaactccagcaagtgctttgattcatgctgcaacaatggtcacagcgcggtgtttttatgctagttcgaatttctccgcttattaca

SEQ ID NO: 201385 - DNA, 862 bp, Unknown
  Bacterial polypeptide expressing nucleotide sequence isolated from the Sargasso Sea
tatgtttttattaattcctgttttggtaacagtcgcaatgatagtttggcttgatagaagagtctgggcttttgtgcaaaaaagaagaggacctaatgttgtaggcccttttggtttactacaatctttagctgatgcattaaaatatatttttaaggaaataattattccagcaagctcaaataaagtgatattcgttattgccccaattataacaatgactttagcacttatttcgtgggcagttataccatttagtgaaagtttagttttagcagatatcaatgttggaatattatatttatttgcagtatcgtcactaggtgtttatggtataataatgggaggatgggcctctaattctaaatatccattcttaggagctataagatcggctgcacaaatggtttcttacgaagtttcaataggagttatcatcattaatgttttgttgtgtgtaggatctttgaatttgaatgatattgttttagcccagcaaaatatgtggttcatagttccgctatttccaatgtttgtaattttttttatttctgcactagcggagactaatagaccaccttttgatttaccagaggctgaagcagagttagttgccggatatcaaacggaatattcaggcatgatgtatgcaatgttttggcttggagaatatgcaaatatcttattaatgtgtgctatgggctctattttatttttgggtggatggcttccaccactggaaattgatgctctttcatttatcccaacaccattttggttaatcttcaaaattttatttttgtttatactttttgcattaataaaggcgattgttcctagatatagatatgatcaattaatg

SEQ ID NO: 201386 - DNA, 490 bp, Unknown
  Bacterial polypeptide expressing nucleotide sequence isolated from the Sargasso Sea
aatgacaacactaattaaatacattaaatcctttacccttttcgaattaatgaaaggtttgaaattaacgataacatatttttttaagccaaaagtcactcttaattaccctaatcaaaaaggccctattagtcctcgcttcaggggagaacatgctttgagaagatatccaaatggtgaggaaagatgtattgcatgtaagttatgtgaagcagtttgccctgctcaagcaataactattgaagcagaaccaaaacctgacggaagtagaagaactacccgatatgacattgatatgactaagtgtatttattgtggtttatgcgaagaggcgtgcccagtagatgcaattgtagaaggacccaattttgaatacgcaactgaaacaagagaagaattactttatgacaaggaaaagcttttacgaaacggagatatttgggaaaaacaaattagcgaaaatttaaaaagggacagtaaatatagataa

SEQ ID NO: 201387 - DNA, 322 bp, Unknown
  Bacterial polypeptide expressing nucleotide sequence isolated from the Sargasso Sea
atgcttgaaaactacctgccaatagcagtttttataatcatagctggagtgcttggcttattgatgctctgcttgggttttctcttcggtaaaggcgctaaaacaaaagcaaaactgtctccttatgaatgtggttttgaagaatttgaagacgcacgaataccatttgatgtcagatattacttagtagctattctattcataatttttgatcttgaaattgcctttttatttccatggggcatagcccttgatgagatcggtcatgtgggtcttatatctatgattatttttctctttgtttttgttatagggtttgtat

SEQ ID NO: 201388 - DNA, 361 bp, Unknown
  Bacterial polypeptide expressing nucleotide sequence isolated from the Sargasso Sea
cttgaacctcgcagcctattaccccgtcttgttgttcctcctcgtgggcactggtttaggtatagcgctggtcagcatcggcaagctccttggtcccaacaagccggacgtcgagaagaacgcaccgtacgagtgcggcttcgaagcctttgaagacgcccggatgaaattcgacgtccggtactacctcgtcgccatcctgttcatcatcttcgatctcgaaaccgcattcctgtttccgtggggcgtcgcgctccgggatatcggctggccgggtttcatcgcaatgatgatttttctgctcgaattcctgctgggctttgcctatatctggaagaaaggcggcctcgactgggagtga

SEQ ID NO: 201389 - DNA, 274 bp, Unknown
  Bacterial polypeptide expressing nucleotide sequence isolated from the Sargasso Sea
tatgatagttgcaggtacgttaactaataaaatggctcctgcattaagaagagtttatgatcagatggcagagcctcgttgggttgtatcaatgggctcatgtgctaatggaggtggttattatcattattcttattcggttgtgagagggtgtgacagaattgtgcctgttgatgtatatgttccaggatgtccaccaactgctgaagcattaatttatggtttattacaactgcagaaaaaaattagaagaactgctactatcgcaagataa

SEQ ID NO: 201390 - DNA, 730 bp, Unknown
  Bacterial polypeptide expressing nucleotide sequence isolated from the Sargasso Sea
ttaatatcatgggcagtaataccttttagtgaaaatttcgttttggcagatattaatgttggaatactatatttatttgcagtatcttcattaggtgtctacggcataattatgggtggctgggcatcaaattctaaatacccatttctgggagctataagatctgcagctcaaatggtttcttatgaagtttcaattggtgtaataattataaatgttctgctttgtgttggatctctaaatttaagcgacatcgttcttgcacaaaaaaacctatggtttgttattcctttatttccaatgtttataattttttttatatctgcacttgcagaaactaacagacctccatttgatttaccggaagctgaggctgaattagttgcaggatatcaaactgaatattctggtatgatgtatgcaatgttttggttgggagaatatgcaaatattttactaatgtgtgcaatgggatcaatattatttttaggcggatggttatcgccgattgatatttttccattcaatataattcctggacctttgtggcttatatttaaaattttacttttatttattttatttgccttagttaaagcaattgttccaagatatagatatgatcaattaatgaaactaggatggaaaatttttctacctttttctttaatatatgtggttttaactgcgagtttcttattatattttgatttattaccaggcaattaat

SEQ ID NO: 201391 - DNA, 952 bp, Unknown
  Bacterial polypeptide expressing nucleotide sequence isolated from the Sargasso Sea
ttattagtgcccgttttagtttctgtagcaatgatagtttggcttgatagaagagtttgggcctttgtacaaaaacggagaggacccaatgttgttggtccatttggtttattccaatcattagctgatgcactaaaatatatctttaaagaaataataatacctgcaagctcaaacaaaatagtatttgtattagctccagttgtcactatgacattagcattaatatcatgggctgtaataccatttgatgaagattttgttctagctgatatcaatgttggtattttatatcttttcgcggtctcatcattaggagtatatggaataattatgggaggatgggcctcaaattctaaatacccttttttaggtgcaatcagatctgctgcacaaatggtatcatatgaagtttcaataggagttataattatcaacgttctattatgtgttggatctttaaacttaagtgacatcgttatggcacaacaaaatttatggtttgtaattcctttgtttcctatgtttgtaattttttttatttctgcactagcagaaacaaatcgtcctccatttgatttaccagaagcagaagcagaattagtggcaggatatcaaactgaatattcaggaatgatgtatgctatgttttggttaggggagtatgcaaatattttattaatgtgtgcaatgggatcagttttatttttgggtggttggttatctccagtagatatcttcccatttaatgttattccaggtcctttttggttaatctttaaaatattatttttatttattttatttgcgttagttaaagcaactgttccaagatacagatatgaccaattgatgaagcttggttggaagatatttcttccattttcactgttttatgttgttttaacttcaagttttttactatactttgatttattaccagggaaataaa

SEQ ID NO: 201392 - DNA, 982 bp, Unknown
  Bacterial polypeptide expressing nucleotide sequence isolated from the Sargasso Sea
atggattatttaagtactttaatttcagaaacttataaaattttattcttattgattccagtcctggtatcagttgctatggtagtttggttagatagaagagtctgggcatttgtacaaaaaagaaaaggaccaaatgttgttggaccttttggtcttctgcaatctttagcagacgccttaaaatatttatttaaagaaataattattcctgctagttcaaataaggttatatttattttagctccaattataactatgactcttgcattaatttcttgggcagttattccatttggagctgatcaagttttatctgacattaatgttggaattttgtatctatttgcaatttcctctttaggagtttatggaataattatgggaggatgggcttcaaattcaaaatatccatttctaggatcaataagatctgctgcacagatggtttcatacgaggtgtcaataggagtaattataattaacgttttattatgtgtcggctcacttaatttaaatgatataattattgctcaagaaaaagtttggtttataattcctctatttccaatgttcgtgattttttttatttctgcacttgctgaaacaaatagacccccttttgatttacctgaggctgaggctgaacttgttgctggttatcagacagaatattctggaatgatgtatgcaatgttttggcttggcgaatatgcaaatatcttattaatgtgcgctttaggatcaattctattcttaggtggatggctgtctcctatagaaatttttccatttaatcttttaccaagcgctttttggttaattttaaaaattttattactatttttactttttgcattagtaaaagctattgtaccaagatatagatatgatcaacttatgaagttaggatggaaaatatttttgcctttctctcttatttgggttgtgcttacagctagttatttatttttttttgata

SEQ ID NO: 201393 - DNA, 918 bp, Unknown
  Bacterial polypeptide expressing nucleotide sequence isolated from the Sargasso Sea
ccacaggcataggtggagcagcggtggatgctgctatgttgcaaactgcactactgatgctattcattggtgctgtgggtaagtccgctcagttcccattacacgtatggctaccagatgcgatggaagggccaactccggtatcggcccttatccacgctgcgaccatggttaacgctggattgtatctagtcgctcgaatggtaccattcgtcgatgttcatcatcatggtgtggcaggaatggaagacctgggtctgatcgttgcatgggtcggtggaattactgcctttatggccgcagcaatcgcctttgtgcagaatgatatcaagaaggtgttagcatattccacgatgagtcaattggcctacatatttacaggactaggagcagcactttggttcttcaataacgataagcatcacgcaggagctctaatctttggcggtgcactattccatctcttcaatcacgccatggcaaagggaatgctgttcatggcgagtggttcagtaatccacgaagttcaccatgctcacgaccatttgcatcatggaaatcatggggatcatgacttcgaccctcaagatatgcgcaatatgggtggcttggcgagtaaactacccgtaacagcaacagcgatgatgttcgggtcgatgtcaattattggaattccattaatcggtggattctggtcaaaggaaattatcgttggaaagacatggtatgcatacttcaacggagcagacgcattgcttggaccggccatactaattctagcaactgccggtatgactggcttctacatgtcacgaatgtggttcatgactttcgcgggtgagccaaagaatgaactcgtagaccacgtccatgaagagactccttgggtcaagacaccgcttgtattctctcaataat

SEQ ID NO: 201394 - DNA, 275 bp, Unknown
  Bacterial polypeptide expressing nucleotide sequence isolated from the Sargasso Sea
tgtagcacctaaaaatcctgatccagaaaaactatctgcttatgaatgtggatttgaaccttttaatgactccagaatggagtttgatgtaagattttatttagtcgcaattctatttataatattcgacttagaaatagcatttctttttccctgggcaatttcactgggaaaaattggagtatttggttttgtatcaatgatgatttttttgtttattttgactgtaggatttatttatgaatggaagaaaggagctttagattgggaatgag

SEQ ID NO: 201395 - DNA, 981 bp, Unknown
  Bacterial polypeptide expressing nucleotide sequence isolated from the Sargasso Sea
cttttgggcactggatacggttatttgcatattgctttttgtcggtgccatgggaaagtcagctcagattccgttacacgtatggttgcctgaatcaatggaggggcctacacccatttccgcattaattcatgccgcaacaatggtgactgcaggtgtttttatggtggctagaatgtctcctttgtttgagcattcaactgtggcattgagtactgtgctgacattcggtgctaccggtgctttgtttcttggtttgctcgcatttgtggaattcgatattaagcgtgtcattgcatactccacaatgtcacagttagggtacatgatggcagcaaacggagtatcagcctactcagccggaatattccatttaacaacccatgcttgtttcaaagcgttgttgtttttgtctgcaggatcggtcatcgtggccatgcatcacattcaagatatgcgaaaaatgggtggattaaaacgtcatttaccggtcacttatgtttgtttttttataggcgcatgtgccttggctgcaattcctccttttgctggtttcttttcaaaagatgtcattattgaagccgtccatcgttcagtattacctggctcacagtatgcttacgtttgcctattgatcggtgcatttgtgacagcttactatatattcagggcgtttttcatgacttttcatggagaggatcgcattcccgactcagcacgaggacacttgaaagagcgtacatccatgatcattcctttgattgttttggccataccatcagtattgctcggaggaatgttgattcgaagctttgtttttggacagccaggtattcttgccggtagtacacaagtgcttataaaacatgatgttttgaaatcgatgttagttaatttccatggcccattggccatgatattgcatggttttgttacacttcccttttggtttactgtttttggtgtgttttttgcctggtt

SEQ ID NO: 201396 - DNA, 370 bp, Unknown
  Bacterial polypeptide expressing nucleotide sequence isolated from the Sargasso Sea
catgatttataattttttaacagactatctttcaatagtaatttttttatttattgctttatttttaagcattggttttatcgttgcaaattatttagcatctccctctaatcctgatccagaaaaattatcagcttatgaatgtggcttcgaagcttttgatgactctagaatggaatttgacgtaagattttatttagtagcaattttgttcattatatttgatttagaaatagcatttctctttccttgggcaatctctttaggaagtttaggggcccttggttattggtcaatgatgattttcttagctattttaacagtaggatttatttacgaatggaaaaaaggagctttagaatgggaataa

SEQ ID NO: 201397 - DNA, 370 bp, Unknown
  Bacterial polypeptide expressing nucleotide sequence isolated from the Sargasso Sea
atgttaccagaatttttaatagaatatttgccaattatactttttttagtggttgctttgggattaagtggagcatttgtagtagtaaattttattctttctccaaaaaatccagatccagagaaattatctgcttacgaatgtggatttgaaccatttcaagactctagaatggaatttgatgttagattttatttggtcgcaattctttttataattttcgatttagaaatagcttttctttttccttgggctatttctttaggaaatattggtttacttggttttacatcaatgatgatctttttattcatacttactgttggatttatttatgagtggaaaaaaggtgctttagactgggaataaa

SEQ ID NO: 201398 - DNA, 331 bp, Unknown
  Bacterial polypeptide expressing nucleotide sequence isolated from the Sargasso Sea
atatttttatttatagctttatttttaagcataggttttatagtagttaattttctatcttctccatcaaatccagacccagaaaaattatcagcttacgaatgtggattcgacgcttttgatgactcaagaatggaatttgacgttagattttatttagtagctatattatttattatttttgatttggaaatagcttttttgtttccttgggcgatttctctaggagctattggtcacttgggtttctggtcaatgatgattttcttaggagttttgacgataggttttatctatgaatggaaaaaaggagctttagaatgggaataaa

SEQ ID NO: 201399 - DNA, 620 bp, Unknown
  Bacterial polypeptide expressing nucleotide sequence isolated from the Sargasso Sea
aatgggtggatgggcatcaaattctaagtatccttttcttggggcaattcgttctgctgctcaaatggtatcatatgaagtttcaattggagtaataattatcaatgttttactatgtgttggttcactgaatttaaacgacatcgttattgctcaacaaaatatgtggtttgttattccactatttccaatgtttgtaatattctttatttctgctttagctgaaactaatagacctccttttgatttaccggaagcagaagcagagttagttgctggttatcaaacagaatattcaggaatgatgtatgcaatgttttggttaggcgagtatgcaaatattttattgatgtgtgcgatgggggcaatattatttttaggtggttggatgtctccgattgatgtttatccatttacattagtaccaggcgcaatttggttaatattaaaaattcttcttttattcattctttttgctttagttaaggcgatagtacctagatacagatatgatcagttaatgagacttggttggaaagttttccttcctctttctttaacttgggtggtattaacagctagctatttgttttattttaaccttttaccagtaaattaat

SEQ ID NO: 201400 - DNA, 958 bp, Unknown
  Bacterial polypeptide expressing nucleotide sequence isolated from the Sargasso Sea
ccaactcctgtttccgcattaattcacgcagcaacgatggtaacagctggtgttttcttagttgtaagatgttctccaatttacgaatattcaccattaatactaaattttataactatcgttggaatgaccactgcattcttcgcagcatcggttgctttggttcaaacagatataaaaaaaattattgcttattctacatgtagccaacttggttatatgttttttgcagcaggggtaggtgcatacaatgttgctatgttccacttatttactcacgcatttttcaaagctttattatttttgggatctggttcagtaatccatgcatttaaagatgagcaaaatataaataacatgggaggtgtatggaaaaagttaccatatacttatactttaatgatactaggaacgcttgctttaacaggttttccatttttatcaggattttattctaaagatgcgattatagaatttgcgtatttaaaaggcaatactactggttattatgcagctggcattggaataattacagcatttttaacatctatttattcatggagattgatatttaaaacttttcatggagagtataataacaaagagatcaagatagaggaaacacacgagtctccattagtaatgcttgttccattatttattctttcaataggagctgtgtttgctggttttctatttaaaggactatttattggtcatggtgagaatttattctgggcagagtctattaagtttttagaacctttaagtactgagcacccacctttatggtttttacttttaacaccgtgtttggttatattatctattcctattgcctattacttatttgtaaaaaacaaagagttacctgagtcaatagtttctataaacaaacctttgtataattttttagtaaacaaatggtattttgatgagttgtacgatgtgttgttta

SEQ ID NO: 201401 - DNA, 946 bp, Unknown
  Bacterial polypeptide expressing nucleotide sequence isolated from the Sargasso Sea
gattttgtttttattttaggaattatagcgacatattctgtttttggctctttttattttgatgaaatatttagtgatgttgaaggtcttcataaactctcaattatgatacttaggtttaaaataaatgtaatcgaacttatagcaatcttgttctttattggtgctatgggaaaatcagcgcaaattggtcttcacacttggttgcctgatgcaatggagggtccaacacctgtttcagcattaatacatgcagcaactatggttacagccggtgtttttctcgtatgtagaatgtcacctcttctagagtttgctccttttgctttgaatgtaattacaattgttggagcattgacggctatttttgctgcaacaattggactaacacaatttgacatcaaaagagttattgcatattcaacttgttctcaattaggttacatgttttttgctgctggtgtttcggcttatcctgcttcaatgtttcatcttacaactcatgctttttttaaagctcttctctttttaggagctggatctgtgattcatgcaatgtctgacgagcaagacatgcgaaaaatggggggcatttggaaaaaagttccatacacttattcattgatgtggattggttcattagcattagctggaattccgttttttgcaggttactattctaaagatttgatattagaagcagcgtgggctgctagctctaattcaggatattttgcattttggttaggttgcttggcagcgtttttaacagcattttattcttggagattattattattgacttttcatggagattttaattcttcaaaagaggttttaaaacatgttcatgagtcaccaattgttatgttaatacctttatttgttttagctgtaggtgctattttttctggttggtatttttataatgattttgttggttacc

SEQ ID NO: 201402 - DNA, 556 bp, Unknown
  Bacterial polypeptide expressing nucleotide sequence isolated from the Sargasso Sea
aatggaaaaagggcgccttggaatgggagtagatataaatgaaaacatcctatcatctgatcaagatactttattgaatgctgcagcaagcgatataagaaataaaggctttattattgcaagtgccgataaaatatttaattgggcaagaagtgggtctttgtggcctatgagttttggattagcgtgttgcgcagttgaaatgatgcatgcggcagcatcaagatatgatatggatcgttacggaatgttattcaggcctagccctcgtcaggctgatgtcatgatagttgcaggtacgttaactaataaaatggctcctgcattgagaagagtttatgatcagatggcagagcctcgttgggttgtgtcaatgggctcatgtgctaatggaggtggttattatcattattcttattcggttgtaagagggtgtgacaggattgtgcctgttgatgtatatgttccaggatgtccaccaactgctgaagcattaatttatggtttattacaactccagaaaaaaattagaagaactgctactatcgcaagataa

SEQ ID NO: 201403 - DNA, 304 bp, Unknown
  Bacterial polypeptide expressing nucleotide sequence isolated from the Sargasso Sea
ggcttctttaattatgattgcctcttggattgtagccaaacaaaatccagatgatgaaaagttgtcaccttatgaatgtggctttgacgcttttgaagataccaggtcacaattcgatgttagattttatttagttgctatattatttataatatttgatttggaggtagcatttctgtttccttgggcggtgtctttaggatcaattggattattaggcttttggtcaatgatggtttttcttggagtattaactattggttttatttatgaatggaaaaagggcgccttggaatgggagtag

SEQ ID NO: 201404 - DNA, 358 bp, Unknown
  Bacterial polypeptide expressing nucleotide sequence isolated from the Sargasso Sea
gatgcttgaaaactacctgccaatagcagtttttataatcatagctggagtgcttggcttattgatgctcggcttgggttttctcttcggtaaaggcgctaaaacaaaagcaaaactgtctccttatgaatgtggttttgaagaatttgaagacgcacgaataccatttgatgtcagatattacttagtagctattctattcataatttttgatcttgaaattgcctttttatttccatgggcaatagcccttgatgagatcggtcatgtgggtcttatatctatgattatttttctctttgttttggttatagggtttgtatacgagtggaataaaggagcattggattgggattag

SEQ ID NO: 201405 - DNA, 1045 bp, Unknown
  Bacterial polypeptide expressing nucleotide sequence isolated from the Sargasso Sea
cacaaagcagcaataaaagcttttgttgttaatagagtaggtgattttggttttgccttaggaatttttttaattttttatatttttggaacagtaaattatgatgaggtattttcccaagttccaagtattctaaaagatgaattattctttctaggaattaattttaatgcagtagacttaatttgcttgctattatttattggtgcaatgggaaaatctgcacaatttttgttgcatacatggttgcccgatgccatggaaggaccaactccagtatctgcattaattcatgcggctacaatggtgacagcaggagtttttttagttgttaggtgctctccaatttatgaatattcagaacttgctctatttgtaattacacttgttggaatgattacagctttttttgcagctactgttgcgttagttcaaacagatattaaaaaaattatagcctattctacttgtagtcaattaggttatatgttttttgcagcaggtgtaggagcgtacaatgtagctatttttcatttatttacacatgctttttttaaagctttattatttctgggatcaggggcggttattcattcatttaatgatgaacaaaatattaataaaatgggcggtgtaagaaataaattgccttacacgtatgcgttaatgataataggcactttggctttaactggatttccatttctttcaggtttttattctaaggatgcaattattgaatttgcttatttaaaaggaagcacatcaggtattttagctgcatatgttggtgtttttacagctttgctaacttcaatttattcttggcgcctgatttttaaaacgtttcatggaaactacaataactctgacatagcacttgataaaatgcacgagtcaccgttaattatgattataccattaatcattttagctacaggtgctatttttgctggattattattcaaagatctatttattggacatgaaatatcatatgaattttggggtagttcaataaaatttttggaacctttaagtaaaa

SEQ ID NO: 201406 - DNA, 499 bp, Unknown
  Bacterial polypeptide expressing nucleotide sequence isolated from the Sargasso Sea
attgggattagaaactgataataatttaatcgatcaacagggtccagggttcatcatcacttcagttgataagcttgtaaattgggctagaaccggatcgatgtggcctgtaacttttggtttagcttgttgtgctgttgaaatgatgcatgctggagcttcaagatatgatacagatcgttttggtgtattctttaggccgagcccaagacaatctgatgtaatgattgtcgctggtacattggttaataaaatggcgcctgcactcagaaaggtttatgaccaaatggcagaacccaaatgggtcatctctatgggatcatgtgccaatggaggtggttactatcatcactcatattctgtggtcagaggttgtgatcaaatcataccagttgatatctatgtacctggttgtcctcccacttcagaggcactaatcaacggaatcatagaacttcaagaaaaaatcaaaaaagaagaatcaatagcaaatggatag

SEQ ID NO: 201407 - DNA, 702 bp, Unknown
  Bacterial polypeptide expressing nucleotide sequence isolated from the Sargasso Sea
aattatgatgaagtttttcttaaaatacctgaaataatagatcaaaaaataaatttcctatcttttaaatttaatacaatagatttaatttgtttattactttttattggagcaatgggaaagtcagctcaatttttgcttcatacatggttaccagatgctatggaaggtccaacaccagtatccgcattaattcatgcagccacaatggtaacagcaggagtttttttggtagttagatgttctccaatttatgagtactcagaattagctttgtctgtaatcacattagttggaatgaccacagcttttttcgcagctacagttgcattagtgcaaacagatataaaaaaaatcatcgcttattcaacatgtagtcaattgggatacatgttttttgcagcaggtgtaggtgcatataatgttgcaatgtttcatttatttacacatgctttttttaaagccctacttttcttaggctctggatcagtaattcattcatttaaagatgaacaagatgttactaagatgggaggagtgtttagaaaattaccttatacttatgcattaatggttgtaggtactttagctttaacaggatttcctttcttatcaggtttttattctaaagatgcaataattgaatttgcttatataagcgacacaaaatttggaatttatgctgctggtataggagtatta

SEQ ID NO: 201408 - DNA, 900 bp, Unknown
  Bacterial polypeptide expressing nucleotide sequence isolated from the Sargasso Sea
actactgcattttttgcagcaactgtcgctctagttcaaacagatataaaaaaaattattgcttattctacttgtagtcaacttggttatatgttttttgcagctggagtaggtgcatacaatgttgctatgtttcacttatttactcatgcatttttcaaagctttattatttttaggatctggttcagtaatccacgcatttaaagatgagcaaaatataaataacatgggaggtgtgtggaaaaagttaccatatacctatgctttaatgataataggaacgcttgctttaacaggttttccgtttttatcaggattttattctaaagacgcaattatagaatttgcttatttaaaaggtaataccactggttattatgcagctggaattggaataattacagcatttttaacatctatttattcatggagattgatattcaaaactttccatggagattacaataataaagagatcaagatagaggaaacacatgagtctccattaataatgcttgtccctttatttatcctctcaataggagcagtatttgctggttttctatttaaaggactctttattggttacggtgataatttattctgggcagagtccataaagtttttggagcctttaagcactgaacatccacctttatggtttttacttttaacaccttgtttagttttattgtctattccaattgcttattatttatttgttaaaaacaaagagttacctaattcaatagtttctatgaataaacctttgtataattttttagtgaacaaatggtactttgatgagttatacgatgtattgtttattaaatcctcaaaaaaattaggattatttttatggaaattttgtgatggaactataatcgatggttttggt

SEQ ID NO: 201409 - DNA, 808 bp, Unknown
  Bacterial polypeptide expressing nucleotide sequence isolated from the Sargasso Sea
actgtcgcgcttgtacaaactgatataaaaaagattattgcttattcaacatgtagtcagttaggatacatgttttttgcagctggagttggtgcatacaatgtagcaatgttccatttatttactcatgcatttttcaaagctttattatttttagggtctggatcagtaatccatgcatttaaagatgagcaaaatataaacaaaatgggtgcagtttggaaaaaattaccttttacatatacgcttatgataataggaactctggcattaacaggtttccccttcttgtctggtttttattctaaagatgcaataatagaatttgcttttttaagtggtagttcgattggatattacgcagcaggaattggagttataactgcttttcttacttcagtttattcatggagattgatttttaaaacatttcatggtgaatataacaatgaaaatattaaaattgaggatacgcatgagtctcctttagtgatgttgatacctttaatttttctttctattggagcgatatttgctggttatacatttaaagaattatttataggatataatggaataaataatttttggcaggagtctattttttttctagaacctttaagtaatgatcacccccctttctggtttttaattttaactccttcgctagttattttttcaattccaatagcttactatttatttgtaaagaataaaaaattatcagaacaaatagcgaatgttaataaacctttatatcaatttttaatcaacaaatggtattttgatgagctatatgaagttttgt

SEQ ID NO: 201410 - DNA, 370 bp, Unknown
  Bacterial polypeptide expressing nucleotide sequence isolated from the Sargasso Sea
atgctatcaaactactttccgatcctgatttttggcgtaatggttctgctgatgggaacttttctcgtagcaatcggacttattctaggaaagataatggggcacgcccgtcctgataaagcaaagcagtcaccctacgaatgtggatttgaagccttcgaggatgccagaataaaatttgatgtccgttactatctagttgcgattttattcattatttttgatcttgaaattgcctttctctttccctgggcggtcgcgcttaaggagattggtatggcaggcttctgggcgatgatgatatttctgggtgtactggttataggttttatttatgaatggaaaaaaggagcacttgactgggagtagg

SEQ ID NO: 201411 - DNA, 962 bp, Unknown
  Bacterial polypeptide expressing nucleotide sequence isolated from the Sargasso Sea
tgtaagatgttcgcctatttatgaatattcagagctagcattaaatgtcattacaattgtaggcatgagtacagccttttttgcagcgacagttgcacttgtccaaacagacataaaaaaaataattgcttattcaacttgtagtcaacttggttatatgttttttgctgcaggtgtaggtgcatataatgttgcaatgtttcatttatttacacatgcattttttaaagctcttttatttttaggatctggctcagttattcacgcttttaaagacgagcaaaatataaataagatggggggagtttggaaaaaattaccttatacatatacattaatgataataggcactttagctttaaccggctttccttttttttcaggattttattctaaagatgcaattatagaatttgcgtatttaagaggaaatactactggatattatgcagcaggcattggtattattactgcatttcttacatcaatttattcatggagattaatttttaaaacttttcatggggattataataataaagatatcaagattgaggaaactcacgagtcacccctggtaatgataatacctttaatttttctttctataggagctatatttgctggatatgtttttaaagagttattccttggttatgggggaataaataatttttggcaagagtcaattttctttctagaaccgttaagtactgatcatccacctttttggtttttagtattaactcctattttagtaattttatcaattccagttgcttattacttatttgtaaaaaataaaaatttatctgatcaaattgttaatgttaataaacctttatatcaatttttaattaataaatggtattttgatgagctgtatgatgtcatatttgtaattccatcaaaaaaaataggattattcttatggaagttttttgatatcaaaaataattgat

SEQ ID NO: 201412 - DNA, 358 bp, Unknown
  Bacterial polypeptide expressing nucleotide sequence isolated from the Sargasso Sea
atgattttagagtatttacctattttaattttctctgtatttgccctgatatttgcaggggttatgcttagtgtaggctttactttcggagataataatccaaatgcggagaaaaactcaccttacgagtgtgggtttgaggcttttgaggattcaaggatgaagtttgatattagatattatctcgtcgctatattattcattatattcgacttagagattgcatttctttttccttgggcagtagttatacatgaaattggcactacaggattaatagctatggcaatatttcttacaatactgatagtaggatttatatacgaatggaagaaaggagctcttgagtgggattaga

SEQ ID NO: 201413 - DNA, 331 bp, Unknown
  Bacterial polypeptide expressing nucleotide sequence isolated from the Sargasso Sea
atgattgcggaatttttaaaagattatttttcaattattatttttttaataattgcactaggtcttagctgtttttttatcttactcaattttttggtttctcctaaaaatccggatccagaaaaactttctgcatatgagtgtggatttgaaccatttaatgactcaagaatggaatttgatgttagattttatttagtggcaattttatttattatttttgatttagaaatagcatttttatttccttgggcaattactcttggtagcattggttttttaggatttatttcaatgatgatttttttatttattcttacagtaggcttgt

SEQ ID NO: 201414 - DNA, 562 bp, Unknown
  Bacterial polypeptide expressing nucleotide sequence isolated from the Sargasso Sea
tgctcaatggtatcttatgaagtttcaattgggggtaataattatcaatgttttactttgtgttggctcattaaacttaaacgatatcgttatcgctcaacaaaatatgtggtttgtaatcccattatttccaatgtttgtaatattctttatttccgctttagctgaaacgaatagaccaccttttgatttaccagaagcagaagcagagttggttgcaggttatcaaacagaatattcaggaatgatgtatgcaatgttttggttaggtgagtatgcaaatattttattaatgtgtgcaatgggagcaatattatttttaggtggttggatgtccccaattgatgtttatccatttacattagttccaggagcaatatggttaatattaaaaattcttcttttattcatcctttttgctttagttaaggcgatagtaccaagatatagatatgaccaattaatgagattaggttggaaagttttccttcctctttctttaatttgggtggtatttacggcaagctatttattttattttaaccttttgccagtgaattaa

SEQ ID NO: 201415 - DNA, 370 bp, Unknown
  Bacterial polypeptide expressing nucleotide sequence isolated from the Sargasso Sea
atgatttataattttttaacagactatctttcaatagtaatttttttatttattgctttatttttaagcattggttttatcattgcaaattatttagcatctccctctaatcctgatccagaaaaattatcagcttatgaatgtggcttcgaagcttttgatgactctagaatggaatttgacgtaagattttatttagtagcaattttattcattatatttgatttagaaatagcatttctctttccttgggcaatatctttaggaagtttaggggcccttggtttttggtcaatgatgattttcctagctattttaacagttggatttatttacgaatggaaaaaaggagctttagaatgggaataaa

SEQ ID NO: 201416 - DNA, 943 bp, Unknown
  Bacterial polypeptide expressing nucleotide sequence isolated from the Sargasso Sea
taggagcgatgggaaaatctgcaaaatatttttacatacgtggttgcctgacgctatggaaggaccaacgccagtatcagctttaatacatgctgcaacaatggttactgcaggtgtttttttattagtgagatgttccccgatatacgaatattcagaattggcgttaaatgtaattactattattggtatgaccacagctatatttgctgcaacaattgccttagttcaaactgatataaaaaaaattattgcttattcaacatgcagccaactaggttatatgttttttgctgcaggtgttggcgcttataatgttgcaatgtttcatttatttactcatgcattttttaaagcattgttatttcttggttctggttctgttattcatgcttttaaaaatgagcaagatataaatcaaatgggaggagtatggaaaaatttaccatacacatatgttttaatgattataggaacgcttgctttgactggttttcccttattgtctggattttattctaaagatgcaattattgaatttgcatatttaaagggtaatactctaggatactatgctgcaggcattggtatttttacagcatttcttacatctatttattcttggagattaatattcaaaacttttcatggaaactataataataaaaatattaaaattgaagaaacacatgagtctcctctcataatgttgatacctttaatattactatcaattggagcaatattttcaggttttatttttaaagatttattcataggatctcatggagcaaatgaattttggtctaagtcaattttttttctaaaacctttaagctctgaacatcctccatattgggttatttacttaacgcctttgctagtaattttttcaataccaatttcttactatttatttgttaaaataaaaatttacaaatga

SEQ ID NO: 201417 - DNA, 316 bp, Unknown
  Bacterial polypeptide expressing nucleotide sequence isolated from the Sargasso Sea
tatgttaaataactattttccaattttattattcattattgtcagtattatcataggtgcattacctataatcgcttcaagaataataaataaaggtgaaaaaaataaagccaagagctcagcttatgaatgtggctttgaaaactttagtgatgctcgtatgaaatttgatattaggttttatctagtagcaattctatttattatttttgatttagaaattgcattcttatttccgtgggcagttgctttagatagtctaggatttaacggtttaatagcaatgagtatttttttgatagttttagttataggt

SEQ ID NO: 201418 - DNA, 311 bp, Unknown
  Bacterial polypeptide expressing nucleotide sequence isolated from the Sargasso Sea
aatgatttataattttttatcagaatatttatctataataatatttttattcatagctctatttttaagcataggttttattgtagccaattttttagcagctccatcaaatcctgatacagaaaaactgtcagcttacgaatgtggattcgaggcatttgatgattcaagaatggaatttgacgtacgtttttacttagtagcaatcttatttataatatttgaccttgaaattgcttttcttttcccatgggcaatatctctgggtagcataggtgccttaggtttttggtcaatgatggttttcttat

SEQ ID NO: 201419 - DNA, 326 bp, Unknown
  Bacterial polypeptide expressing nucleotide sequence isolated from the Sargasso Sea
aatgttgaccgattttttaagggattatttgtcgattgtaatttttctttttgttgctctaggattgagtataggttttattgttctaaattttttgctatccccaaaaaaaccagacccagaaaaactttccgcttatgaatgtggatttgaagcttttagcgactcaagaatggaatttgatgtaagattttatttagtagcaattttatttattatttttgatttagaaattgcgtttttatttccttgggctgtaactttaggaagcataggtgctttaggtttttggtcgatgatgattttcctttttatattaaccatag

SEQ ID NO: 201420 - DNA, 705 bp, Unknown
  Bacterial polypeptide expressing nucleotide sequence isolated from the Sargasso Sea
aatgctcctattagttatgtcagctaactttttagttatgttctttggttgggagcttgttggcttaagttcttatctattaatctctttttggtctgagaagaaagaagcagctaaagcaggaaataaagcattcgtattaaatcgaattggagattttggttttttgattgctttaatgatgatattaaatacctatgatacgttttcatttaaaacagtttttgcaacaacattaataaatcagccacaaaatctagatcttattgttgtcttcctcatgattggtgcttttggaaaatcagcacaatttccattatttagctggttaccagacgcaatggaaggaccaactccagcaagtgctttgattcatgctgcaacaatggtgacagccggtgttttcatgctggttcgaatttctccgttattacagttttcagagttatcaagtatcttaattataagtatcggcctcttaacagctttaatctcagcttttgctgcaataaatcagaatgatattaaaaaggtacttgcttactcaacaatttcacagctgggatttatgtttatagcaattggggctggagcatatgttgcagcaatttttcacttagttacacacgcatttttcaaagcattacttttcctaggtgctggtgctgtaatacatgaaatgcatcacgaacaaaatattcaaaa

SEQ ID NO: 201421 - DNA, 822 bp, Unknown
  Bacterial polypeptide expressing nucleotide sequence isolated from the Sargasso Sea
actggctggtgtatttttattagctcgtatgagtccattatttgaatatgctacatatacaaacatttttattatttttataggtgctacaacagctattttcgctgcaactattgctttaactcaaaatgacatcaaaagagttattgcgtattccacatgtagtcaattgggatacatgttttttgcagcaggtttaggcgcatataatgcttctatttttcatttaatgacgcatggtttttttaaagctcttttgtttttgtcagcaggttcagttattcatgctatgcatcatgaacaagatatgagaaaaatgggaggtttattctctaaaattccatttacaggaagtatgatgtggattggatctttagctataattggatttccatatttttctggatattattcaaaagaaagtattctagaaaatgcatattttagttctcaagggatggctcagtatgcatatattgtaggcattttaacagctttgcttacagctttttattcatggcgattattattcatgacatttcatggatcatcagtgcatgtagatgatactaatcatcaaataaaagaatctcctttcgttatgactttgcctttagctattttggcgattggttcaattttttcaggattatttttatcagagtattttataggttcatataaagaaatgttttggaattcttcaattgtattaactcaagaaaaaaatcattatatgccatttgttcaagtttttattattaaaagttctgtagcaataggtattatattagccgcattaatttattattattataaaaa

SEQ ID NO: 201422 - DNA, 370 bp, Unknown
  Bacterial polypeptide expressing nucleotide sequence isolated from the Sargasso Sea
atgttattagaatttttaaaagactatttttctattattttgtttttagtaatatcattatctttaagcgttggttttattttaatgaactttttactatctccaagaaaacctgatcctgaaaaattatcagcatatgaatgtggatttgaaccatttgaagattctagaatggaatttgatgtaagattttatttagttgctattttatttataatttttgatttagaaattgcgtttttatttccttgggctatttcattaggcaatattggtattataggtttttcttcaatgatgatttttcttttcattttaacagtaggttttgtttatgaatggaaaaaaggagcattagattgggaataaa

SEQ ID NO: 201423 - DNA, 735 bp, Unknown
  Bacterial polypeptide expressing nucleotide sequence isolated from the Sargasso Sea
atttttaaagaaataattattccagcaagtgcaaataagacaatttttattctagctccaataataacaatgactttagctttagtagcttgggctgtaatacctttaagcgaaacattagtattatcagatattaatgttggaatactttatctttttgcaatctcctctttaggagtttatggaatcataatgggaggatgggcctctaattctaagtatccttttttgggtgctataaggtctgccgctcaaatggtatcatatgaagtttcaataggcataataatcataaatgtattattatgtgttggttctttaaatctgaacgatattgtattggctcagaaaaatctttggtatgttattccgcttttcccaatgtttgttgttttttttatatctgcattagcagaaactaacaggccacctttcgatttaccagaagcagaagcagaattagttgcaggatatcaaacagaatattctggaatgatgtatgcaatgttttggttgggggaatacgcaaatattcttttgatgtgtgcaatgggatctattttatttttaggaggatggctgcccccactagacatatacccatttaatgttgttccagcacctttctggatgatatttaaaattttattcctattttttttattcgcaatcataaaggcaattgtaccaagatatcgttatgatcaattaatgagattaggatggaaagttttt

SEQ ID NO: 201424 - DNA, 370 bp, Unknown
  Bacterial polypeptide expressing nucleotide sequence isolated from the Sargasso Sea
aatgatttataactttttaacagactacttatctattataatatttttatttatagcattgcttattagcattggctttatcttaataaatttcatttcatctccatctaatcctgatcctgagaagctttcagcttatgagtgcggatttgatgcgtttgacgactctaggatggagtttgatgttcgattttatcttgtagcaatattatttatcatttttgatttagaaatagctttcctatttccctgggctattacactaggagaaattggagtatttggattttggtctatgatgatatttttagcagttctaaccattggttttatctacgaatggaaaaagggagctttggagtgggaatga

SEQ ID NO: 201425 - DNA, 871 bp, Unknown
  Bacterial polypeptide expressing nucleotide sequence isolated from the Sargasso Sea
gccaaatgtagtaggacctttaggattactccaaacaatagcagatgctttaaaatatatttttaaagaaataattattcccgctagtgctaataaaattatgtttatattagcaccaataattacactcacattatcactcatagcttgggcagttataccttttggtaaagaaatggttttatctaatataaatgttgggatactatatatatttgctgtttcttctttaggggtttatggaataattataggaggatgggcatcaaattcaaagtatccttttctgggagctatcagatctgctgcacaaatggtgtcatacgaagtttctattggaataataattattaacgttttgttgtgtgttggttcattaaatttaaataaaattgttctagcacaacaaaacgtttggttcatatttcctttatttccaatgtttgttattttttttatatcagcattggctgaaactaatcgaccaccatttgatttaccggaggcagaatctgagcttgtggcaggatatcaaacagaatattcaggcatgatgtatgctatgttttggcttggagaatatgcaaatattttacttttgtgtgctttaggctcaattctttttttaggaggctggttgagtcctattgatatttatccttttactataattccaacacccttatggatgatatttaaaatattaattctatttattttgttttctttagttaaggctatagttccaagatacagatttgatcaactaatgagattgggatggaaaatctttcttccattgtcattaatatgggtagtcttaactgctagttttttattttttactaacacgcttccaaacgttcaataa

SEQ ID NO: 201426 - DNA, 190 bp, Unknown
  Bacterial polypeptide expressing nucleotide sequence isolated from the Sargasso Sea
tgatgttagattttatttggttgcaattttatttattatttttgatttagaaattgcttttcttttcccttgggcagtttcgttaggcagcataggtctattaggctttatttcaatgatgatttttttatttattctaactgtaggttttatctatgaatggaaaaagggtgcattagattgggaataa

SEQ ID NO: 201427 - DNA, 367 bp, Unknown
  Bacterial polypeptide expressing nucleotide sequence isolated from the Sargasso Sea
atgcttgcggaatttttaaaagattacctgccaattatactttttttagtaatagctttaggattaagcttggcttttgttgccataaattatttagcatccccaaaaaatcctgatcctgaaaaattatctccttacgagtgtggctttgaaccttttaatgattctagaatggaatttgatgttagattttaccttgtcgctatactatttattatttttgatcttgagatagcctttttatttccttgggcaatatcattaggaaagatcggcatatttggttttgtttcaatgatgatttttttatttatgttgactgttgggtttatttatgaatggaaaaaaaggagccacttgattggga

SEQ ID NO: 201428 - DNA, 355 bp, Unknown
  Bacterial polypeptide expressing nucleotide sequence isolated from the Sargasso Sea
atgttagagtatttacctatattaatttttttggtttttgcattgatttttgcatgcataatgcttggtattgggtttacttttggcccaaataaccctgatactgaaaaaaattcaccatatgaatgcggattcgaagcatttgaagattctaggatgaaatttgatattaggtattatttagtagctattttattcataatttttgacctagaaatcgcattcctatttccatgggcaattgtaattcatgagataggtttgactggtcttatagcaatggcaatatttttaactatattaattgtagggtttatatatgagtggaaaaagggtgcgttggagtgggattaga

SEQ ID NO: 201429 - DNA, 370 bp, Unknown
  Bacterial polypeptide expressing nucleotide sequence isolated from the Sargasso Sea
aatgatttttgattttttatcagaatacctgtctataattatatttttatttataactctttttttgagtataggttttatagctataaattatttagcgtcccctaaaaatcctgatccagaaaaactatcagcatacgaatgtggattcgaggcttttgataatgcaagaatagagtttgatgttagattttatttagtggcaattctctttataatctttgatttggaaatagccttcttatttccgtgggcaatatcattaggaagtataggtcttctgggtttttactcaatgatggctttcttatttattttaacagtagggtttgtttatgaatggaaaaaaggagccttggaatgggaatag

SEQ ID NO: 201430 - DNA, 370 bp, Unknown
  Bacterial polypeptide expressing nucleotide sequence isolated from the Sargasso Sea
atggcttcagattttttaaaagactatctgccaattatattgtttttaataatcgctttaggattaagtgtaggttttgtagttttaaattttattttatcacctaaaaaaccagatccagaaaaactttcagcatatgaatgtggttttgaaccttttgatgattcaagaatggagtttgatataagattttatttagtagcaatattattcatcatttttgatttagaaatagcttttttatttccttgggccatatcattaggtaaaattggtctatttggatttgtttcaatgatgatctttctattcattttaacagtaggatttatatatgaatggaaaaaaggtgctttagattgggagtaag

SEQ ID NO: 201431 - DNA, 322 bp, Unknown
  Bacterial polypeptide expressing nucleotide sequence isolated from the Sargasso Sea
gatgactttagtagataaaaaacaaaaaaaaataccagatgaatttaaaaaattagcaaaagattttgccgaaaaaggttttattactacttcttttgataatttagtaaattgggcaaggacaggatctttgcactggatgacatttggattagcttgttgtgcagttgaaatgatgcaaacttcaatgccgagatatgaccttgaaagatttggtgccgcaccaagagcttctcctagacaatctgatgttatgattgtagctggtacattaacaaacaaaatggctcccgctcttagaaaagtttatgatcaaatgcct

SEQ ID NO: 201432 - DNA, 370 bp, Unknown
  Bacterial polypeptide expressing nucleotide sequence isolated from the Sargasso Sea
tatgctttctgattttttaaaagattatttgtcaataattatattctttataatttctttaggaataagcgtggtatttatagtattaaattatgcgctatcaccaaaaaaaccagatccagaaaagctatcagcatatgaatgtggatttgaggcattcaatgactcaagaatggaatttgatgtaagattttatttagtggctattttatttattatatttgatttagaaatcgcctttctttttccttgggctatttcattaggtaatattggtatcttaggttttatttcgatgatgatttttttgtttatattaacagtcggttttatttatgagtggaaaaaaggagccttagattgggaataa

SEQ ID NO: 201433 - DNA, 643 bp, Unknown
  Bacterial polypeptide expressing nucleotide sequence isolated from the Sargasso Sea
ttaccagatgctatggaaggtccaacaccagtatccgcattaattcatgcagccacaatggtaactgcaggagtttttttagtagttagatgttctccaatttatgagtactcagaattagctttatctgtgatcacattagttggaatgaccacagctttttttgcagctacagttgcattagtgcaaacagatataaaaaaaattatcgcttattcaacatgtagtcaattgggatacatgttttttgcagcaggtgtaggagcatataatgttgcaatgtttcatttatttacacatgctttttttaaagctctacttttcttaggctctggatcggtaattcattcatttaaagatgaacaagatgttactaagatggggggagtatttaaaaaattaccttacacttatgcattaatggttgttggtactttagctttaacaggatttcctttcttatcaggtttttattctaaagatgcaataattgaatttgcttatataagtgacacaaaatttggaatttatgctgctggtataggtgtattaaccgctgtaatgacttctatatattcatggagattaatatttaaaacttttcatggagattacaaaaataaagatcttagtattgatacaa

SEQ ID NO: 201434 - DNA, 577 bp, Unknown
  Bacterial polypeptide expressing nucleotide sequence isolated from the Sargasso Sea
aagatctgcagcgcagatggtttcttacgaagtatcaattggaataataattattaatgttctgttgtgtacaggctcattaaatttaaaagaaatcgtcttagctcaacagaatttgtggtttgtagtacctttgtttcctatgtttgttattttttttatatctgcactagcagagactaatcgacctccatttgatttaccagaagcagaagcagaattggttgctggatatcaaacagaatattctgggatgatgtatgcaatgttttggcttggagaatacgcaaatattctcttgatgtgtgcacttggttcaatactttttctcggtggctggttatcacctattgatgtttatccattaaatttaattccaggtgctgtctggatgataataaaaatattaatcttatttttcatgtttgcaattataaaagcaatagttccacgatatagatatgaccaacttatgagattaggatggaaagtatttttacctttctccttaatatacgttgtactaacggcaagttttttaatttattttgacttactcccaaatacaggaaattaa

SEQ ID NO: 201435 - DNA, 589 bp, Unknown
  Bacterial polypeptide expressing nucleotide sequence isolated from the Sargasso Sea
tccttttttaggtgccttaaggtcagcagcacaaatggtttcttatgaagtttcaataggatttgttattgtaactgtattattgtgtgtaggttcattaaatttaattgatattgttgtagcccaaaaacaaatttggtttgcaattccgctttttccaatgtttgtaattttttttatttcagctcttgctgaaactaatagaccaccatttgatttacctgaagctgaggcggaattagtggcgggttatcaaacagaatattcgggtatgatgtatgctcttttttggttaggagagtacgcaaacatattattaatgtgcgcaatgggttcggtgttatttttaggtggctggttacctccaatcgacatatatcctttaaatgctatcccagcccctatttggttaataattaaaatttttttactatttttcacttttgcattaattaaggcaatagttccaagatatagatacgaccaacttatgagacttggatggaaagtatttttaccgatttctctagtttgggtggttatcgtctctggatttttagtatattttaaaatggtaccaataaattaa

SEQ ID NO: 201436 - DNA, 889 bp, Unknown
  Bacterial polypeptide expressing nucleotide sequence isolated from the Sargasso Sea
ttactaggaattcttggtctattttgggcaacaaatagttttgattttaatgaaatagcgactggaatttcacaatcaatagctgacaattcgatacccatttgggctgctttactactttgttttttagtttttttaggaccaatggcaaaatctgctcaatttcctcttcatgtatggttgcctgatgcgatggaaggcccgacacctatatcggcacttatccatgctgcaacaatggttgcagcaggaatatttctcgtagcaagacttcaacctttgtattcaatattcccgtctattcagttcattatcgctttagttggaaccattacttgttttttaggagcctctatagctttgacccaaatggatttaaaaaaaggtttagcgtatagcacagtttctcaacttggttatatgatgcttgcaatgggttgtggagcaccagtagcaggaatttttcatttagtgactcatgcttgctttaaagcaatgctatttttgggatctggttcagtaatacatgctatggaagaagtagttggccatcagcctgtattagctcaagatatgagattgatgggcggtttacgaaaaaaaatgccatatacagcaacaacatttttaataggttgtgtagcaattagtggaattcctccattggcaggtttttggagtaaagatgagatactcggaaatgcttttatatcatttccagctttttggtttgtaggacttctaacagcaggtatgactgctttttatatgtttaggctttatttcttgacatttgaaggagatttcagaggggagaataaagaattgcaaaaagagcttctaatagcctccaaaacaaacctagatgagaaaaagaagaagagcagaa

SEQ ID NO: 201437 - DNA, 334 bp, Unknown
  Bacterial polypeptide expressing nucleotide sequence isolated from the Sargasso Sea
tatgatattagattttttaaaagattatttctcgattattttatttcttggtatagctattatacttagttttggctttatattaataaactatattttttcaccaaaaaacccggacccagaaaaactttcagcatacgagtgtggctttttacctttcagcgattcacgaatggaatttgatattagattttatttggtagcaatactattcattatttttgatttagaaattgcatttttatttccatgggcaattactcttggaaaaattggattcttaggttttgtttctatgattatttttttgtttattttaaccagttggttttat

SEQ ID NO: 201438 - DNA, 683 bp, Unknown
  Bacterial polypeptide expressing nucleotide sequence isolated from the Sargasso Sea
atataaatgttggaaattctttacttatttgcagtgtcctcttttaggtgtttacggaataataatgggaggatgggcatcaaactctaaatatccttttctaggagcaattcgctctgcagcacaaatggtatcttacgaagtgtccatcggagtaataataataaatgtattattgtgtgtaggctcattaaatttaaatgatattgtaattgcacagcaaaatctatggtttgtaattcctttatttccaatgtttgtaattttttttatttcagctttagctgaaacaaatagaccaccttttgatcttccagaagcagaagcagaattagttgctgggtatcaaaccgaatattctggaatgatgtacgcaatgttttggttaggtgaatacgcaaatattttattgatgtgtgcaattggagcaatattatttttaggtggttggttatctcctatagaaatttatccatttacattagtccctggagccttatggttaatattaaaaattttgctattatttttcttatttgcattagtaaaagcaatagttccaagatataggtatgatcaacttatgagattaggatggaaagtatttcttcctttttctttaatttgggttgtacttactgcaagttatttattttattttaatcttttgccagtcaattaat

SEQ ID NO: 201439 - DNA, 370 bp, Unknown
  Bacterial polypeptide expressing nucleotide sequence isolated from the Sargasso Sea
tatgtacggagattttttaaataactatctaacaattataatattttttggagtcgcactccttttgagtattgggtttatttttctaaattttgtgtttgcgcctaaaaatcctgatccagaaaaattatctgcttacgagtgtggttttgaaccttttagtgattctagaatggagtttgacgttagattttacttagtagcaattttattcataatatttgatttagaaatagcatttctttttccctgggcaatatctttaggaaaaattggaatatttggttttatatcaatgatgatatttttgtttattttaactgtaggatttatttatgagtggaagaaaggggctttagactgggaatga

SEQ ID NO: 201440 - DNA, 370 bp, Unknown
  Bacterial polypeptide expressing nucleotide sequence isolated from the Sargasso Sea
atgcttgcggaatttttaaaagattatctaccgataatattatttttgataatagctttaggcttaagtcttgcttttgtagcaattaattatatcgctgctccaagcaaacctgatcctgagaaactttcagcctatgagtgtgggtttgaacctttcaatgactcaaggatggaatttgatgtcaggttttatttggttgcaatattgtttataatatttgatctagaaattgcatttttattcccgtgggcgatttcacttggtgaaattggtttatatggtttctgctctatgatgttatttttatttattctaactgttggatttatttatgagtggaaaaagggtgctttagactgggaataat

SEQ ID NO: 201441 - DNA, 934 bp, Unknown
  Bacterial polypeptide expressing nucleotide sequence isolated from the Sargasso Sea
aggattctgggtttgtttttgggcaacaaaaagttttgactttcaagaaattgcaataggtgtatctcaatcaatatcagataattcattaccaatttgggcggctcttttactttgttttttggtatttttgggaccaatggcgaaatctgctcaattccctctacatgtatggcttccagatgctatggaaggtcctacaccaatatctgcattaattcatgcagcaactatggtagctgctggaatatttctagtagcaagacttgatcctctttactcgttattcccagcaattcaattcattattgctctagttggtactattacttgttttttgggtgcttctatagctttaactcaaatggatctgaaaaaaggtctagcatatagcactgtttctcaattaggttacatgatgctagcgatgggttgtggtgcaccggttgcaggcatttttcacttgattacccatgcttgttttaaagcaatgttgtttttgggatctggatcagttattcatgctatggaggaagttgtgggacatcaacctgtacttgcccaagatatgagattgatgggaggtttacggaaaaaaatgccctacacctccacaacttttctgataggttgctttgcaataagtggtattcctcccttagctggtttttggagtaaagatgaaatattgggtaatgccttcatatcatttccagctttttggtttgttggatttttaacagccggaatgacagctttctatatgtttagactttattttttaacttttgagggagagtttagaggtgaaaataaggatcttcaagcaaagctactctccgaatctaatattattttagatgaagaacatgaagaagagcatggttcattacacgagtctccatggtcaatgacattcccattgattttcttg

SEQ ID NO: 201442 - DNA, 808 bp, Unknown
  Bacterial polypeptide expressing nucleotide sequence isolated from the Sargasso Sea
tttacaaatttatttattgtttttataggagcttccactgctatttttgctgcaagtattgcacttactcaaaatgatataaaaagagtgattgcgtattcaacatgtagtcaacttggctatatgttttttgcagcaggtttaggagcttataatgcttcaatttttcatttgatgactcatggattttttaaagcactgctgtttttatcagctggatcagtaattcatgcaatgcatcatgagcaagatatgagaaaaatgggtggattgtttaaaaaaattcctttcactggcacaatgatgtggattggatcacttgctattataggttttccatatttctctggttattattctaaggaaagcattttagaaaatgcttactattcaagttcatcaatggctacatttgcttatacaattggaattttaacagctcttttaactgctttttattcatggagattattgtttatgacatttcatggccaaacaagatctgataaaaaaacttttgaccatgctcatgaatccccgctagtaatgaccttgcctttattattacttgcttttggttcaatttttgccggattacttttttcaaatttttatattggtaaaatgcaatacagtttctggggtaattctataattctccatgaaggtaagcatctctatttaccttttatacaaaccttaatcgtaaagagttctgtagcaataggtgttatgctagctgctctaatttatttttataaaaataacttatataaaaatttagctcataatttagatcctctttatt

SEQ ID NO: 201443 - DNA, 361 bp, Unknown
  Bacterial polypeptide expressing nucleotide sequence isolated from the Sargasso Sea
atgaactactcagaatatttgccaatttttatcttcgtattgattgcgctttctatgtcgcttggatttgcagctttatctggtatagtagggcctaacaatcctgacaaagaaaaactttcagcttacgaatgtggttttgcaccctttgaagatgctagagtaagatttgacgttagattttatttggtagctatactttttattatttttgatttagaagtagcatttctatttccttgggcaataacgttatcgagtattggtctagcaggatatttttcaatgatgttttttttgtttatacttactgtaggttttgtatatgagtggaaaaaaggagctttagattgggaataga

SEQ ID NO: 201444 - DNA, 865 bp, Unknown
  Bacterial polypeptide expressing nucleotide sequence isolated from the Sargasso Sea
aggtgttttcttaatcttttattattttggaactgtaaactttgatgttgtatttgaacaaattccacaaattgacaaaacgagtattaattttttaggagtaaattttaatgcagtagatttgatatgtttgttacttttcattggagcaatgggtaaatctgcacaaattttcttacatacttggttacccgatgccatggaaggcccgacacccgtatctgcacttatacatgcagctacaatggtaacagctggtgtatttttagttgttagatgttcaccaatttatgaatattcagaattaattttggcatttataactataatcggtatgacaactgcaatttttgctgcaagcattgctttagttcaagatgatattaaaaaaataattgcttattcgacctgtagtcaattaggttatatgttctttgctgctggtgttggtgcatataatgttgctatgtttcacctatttacacatgctttttttaaagctttattatttctaggatcaggttcagttattcattcttttaaagatgaacaaaatataaacttaatgggaggagtctggaaaaagctacctgtaacatattctttaatgatcgttggtacattagcattaacaggatttccttttttatcaggattttattcaaaagatgcaattattgagtttgcttatctaagtgggagtaacgttggatattatgcagcatcaattggaatacttacagctttattaacatctatttactcttggcgattgatatttaaaacatttcacggaaattatgaaaataaagatataaaaatagatgagatgcatgagtcgcctttagtgatgatagtgccttta

SEQ ID NO: 201445 - DNA, 370 bp, Unknown
  Bacterial polypeptide expressing nucleotide sequence isolated from the Sargasso Sea
tatgcttgtggaatttttaaaagattatctaccgataatattatttttgataatagctttaggcttaagtctagcctttgttgcaattaactatattgctgctccaagcaagcctgatccagagaaactttcagcttatgaatgtgggtttgaacctttcaatgactcaaggatggaatttgatgtcaggttttatttggttgcaatattatttataatttttgatttagaaattgcatttttattcccgtgggcgatctcacttggtgaaattggtttatacggtttctactctatgatgttatttttatttattttaactgttggatttatttatgagtggaaaaaaggagctttagattgggaataa

SEQ ID NO: 201446 - DNA, 556 bp, Unknown
  Bacterial polypeptide expressing nucleotide sequence isolated from the Sargasso Sea
aatggaaaaagggtgccttggaatgggagtagatataaatgaaaacatcctgtcatctgatcaagatactttattgaatgctgcagcaagcgatataagaaataaaggctttattattgccagtgccgataaaatatttaattgggcaagaagtgggtctctgtggcctatgagttttggattagcgtgttgcgcagttgaaatgatgcacgcggcagcatcaagatatgatatggatcgttacggaatgttattcaggccaagccctcgtcaggctgatgtcatgatagttgcaggtacgttaactaataaaatggctcctgcattaagaagagtttatgatcagatggctgagcctcgttgggttgtgtcaatgggttcatgtgctaatggaggtggttattatcattattcttattcagttgtgagaggatgtgacagaattgtgcctgttgatgtatatgttccaggatgtccaccaactgctgaagcattaatttatggtttattacaattgcagaaaaaaattagaagaactgctactatcgcaagataa

SEQ ID NO: 201447 - DNA, 190 bp, Unknown
  Bacterial polypeptide expressing nucleotide sequence isolated from the Sargasso Sea
gatgtttagattttatttagtggctatactatttataatatttgatttggaggtggcatttctctttccttgggcggtgtctttaggatcaattggattattgggcttttggtcaatgatgatttttcttggagtattaactattggttttatttatgaatggaaaaagggtgccttggaatgggagtag

SEQ ID NO: 201448 - DNA, 370 bp, Unknown
  Bacterial polypeptide expressing nucleotide sequence isolated from the Sargasso Sea
atgttgactgattttttaaaagattattttccaataatattgtttttaataatatcatttggattgagcctaggttttataatgatgaattttttattttctccaaaaaatcctgaccctgaaaaactatctgcatatgaatgcggttttgaaccttttaatgattcaagaatggaatttgatgtgagattttatttggtcgctatattgttcattatttttgatctagaaatagcttttctatttccttgggcgatctctttaggaaatattggattgttaggatttacctcaatgatgatttttctatttatcttaactgtaggatttatttacgaatggaaaaaaggtgcacttgattgggaataga

SEQ ID NO: 201449 - DNA, 334 bp, Unknown
  Bacterial polypeptide expressing nucleotide sequence isolated from the Sargasso Sea
aatgcttgcggaatttttaaaagattatctaccgataatattatttttgataatagctttaggcttaagtcttgcttttgttgcaattaattatattgctgctccaaacaatcctgatcctgagaaactttcagcttatgaatgtgggtttgaaccttttaatgactctagaatggaatttgatgtcaggttttatttagttgcaatattatttattatttttgatttagaaattgcatttttattcccatgggcgatctcacttggtgaaatcggtttgtatggtttctgctctatgatgttatttttatttattttaactgttggatttatt

SEQ ID NO: 201450 - DNA, 578 bp, Unknown
  Bacterial polypeptide expressing nucleotide sequence isolated from the Sargasso Sea
tggatgggaaggtgtagggctatgttcgtattttttaataggtttttggtttaaaaaagaaagtgctaatgcagctgctattaaggcatttgttgttaatcgtgtaggagattttggatttgcattaggaatttttttaatattttatttatttggaacagttaattatgcagaagtatttgaattaattcctcagtcattagatataaatttatcgttcttaggaataaattttaatgcaattaatttaatttgtattcttttattcataggtgcaatgggtaaatctgcacaaatatttttgcatacttggttacctgatgcaatggaagggcctactcctgtatctgcactcatccatgccgcaactatggttacagctggtgtgtttttagttgttagatgttcaccaatatatgaatattcaccacttgcattaaatattattaccattgttggtatgtccacagccttttttgctgcaacagttgctttagctcaagatgatatcaaaaaaataatagcttattcaacatgtagtcaattaggatatatgttttttgcagctggcgttggtg

SEQ ID NO: 201451 - DNA, 937 bp, Unknown
  Bacterial polypeptide expressing nucleotide sequence isolated from the Sargasso Sea
tatggcttatttgtctttgtttacttttgcaatgttgatgttggtaacttctgataattttattcaattattctttggttgggaaggtgtaggtttatgttcatattttttaattggattttggtttaaaaaagatactgctaattcagctgctattaaagcctttttagttaatagggtaggagatttcggttttgctttgggaatttttttaattttttatttgtttggtactgtaaattattcagaagtttttgagttaattccaactattgctgataagaatttattattcctaggctttaatattaatgctattgatttgatttgtttgcttttatttgttggagcgatgggtaagtcagctcagatttttctccacacatggctaccagatgccatggaaggtccaacacctgtttcagcacttattcatgctgcaactatggttacagcaggtgtttttttagttgttagatgttcacctatttatgaatattctgagttagcattaaatgtcattacaattgtaggcatgagtacagccttctttgcagcgactgttgcacttgtccaaacagatattaaaaaaataattgcttattcaacttgtagtcaacttggttatatgttttttgctgcaggtgtgggcgcatataatgttgcgatgtttcatttattcacacatgcatttttcaaagctcttttatttttaggatctggttcagttattcatgcttttaaggatgagcaaaatataaataaaatggggggagtttggaaaaaattaccttatacctatacattaatgataatcggaactttagctttaactggcttccctttcttatcaggattttattctaaggatgcaattatagaatttgcgtatttaagaggaaataccactggatattacgcagcagggattggtatt

SEQ ID NO: 201452 - DNA, 370 bp, Unknown
  Bacterial polypeptide expressing nucleotide sequence isolated from the Sargasso Sea
aatgattgcggaatttttaaaagattattttccaataattatttttttaataattgctttaggcttaagttgtgtttttattatattgaattttttattatcccctaaaaatcctgatccagaaaaactatcagcttatgaatgtggctttgagccttttaacgactccagaatggagtttgatgttagattttacttagttgcaattttatttattatttttgatttagagatagcatttttgttcccctgggcaatatctttagggaatattgggttattaggatttatatctatgatgatttttttatttattcttactgttggcttcgtatatgaatggaaaaaaggtgctttagattgggaatag

SEQ ID NO: 201453 - DNA, 370 bp, Unknown
  Bacterial polypeptide expressing nucleotide sequence isolated from the Sargasso Sea
atgcttgcggaatttttaaaagattatctaccaataatactatttttgataatagctttaggcttaagttttgcttttgttgcaattaattatattgctgctccaagcaaacctgatcctgaaaaactttcagcttatgaatgtgggtttgaacctttcaatgactcaagaatggaatttgatgtcaggttttatttggttgcaatattatttattatttttgatttagaaatagcatttttattcccatgggcgatctcacttggtgaaattggtttatatggtttctgctctatgatgttatttttatttatattaactgttggatttatttacgagtggaaaaaaggagctttagattgggaataaa

SEQ ID NO: 201454 - DNA, 361 bp, Unknown
  Bacterial polypeptide expressing nucleotide sequence isolated from the Sargasso Sea
tttgtttcttagtgagtatttgccgatcgcagtgttttttgccatcgccattggtctctctttggcgtttgttgtgtctgccttcatttttggtaatcaacgcccggatagcgaaaaaatggctgcatacgaatgtgggttcgacgcgtttgatgactcgcgtcggcagttcgacgtgcggttctatttggttgcgatcttattcattatttttgatctcgagatagcatttttgttcccgtgggcggtcgcattgggtggaattggattatatggattttggtccatgatgctgtttctagccgttttgaccatcggatttatctatgaatggaaaaaaggagctctggaatgggagtaa

SEQ ID NO: 201455 - DNA, 283 bp, Unknown
  Bacterial polypeptide expressing nucleotide sequence isolated from the Sargasso Sea
catgcttgcggaatttttaaaagattatttgccaataattgtatttttacttgttgctcttgtattaagtgtagcgtttgtggcagtcaattatttagcatctccaaaaaaccctgatccagaaaaattatctgcatatgagtgtggttttgaaccatttaatgactctagaatggaatttgatgtaaggttttatcttgtagctatattatttattatatttgatttagaaattgcttttctatttccatgggcaatatctttaggcaaaaattggtatatt

SEQ ID NO: 201456 - DNA, 820 bp, Unknown
  Bacterial polypeptide expressing nucleotide sequence isolated from the Sargasso Sea
tattttttaggttttaatttttctacaattaatcttctatgctttttattattcattggtgccatgggtaaatctgcccagttaggcttacatacatggttaccagatgcaatggaaggtccaacgcctgtatcagctttgatacatgcagctacaatggttacagcaggggtttttatggtagcaagacttagccctttatttactttggctgatacagttaatatatttataacttttattggtgctagcacagcagtttttgcagcaactattgcattaactcaaaatgatatcaaaagagttattgcttattctacttgcagtcaattaggttacatgtttttcgctgctggactaggtgcatacaatgcttctatttttcacctaacaacacatggattttttaaagctttgctatttctttctgcaggttcagtaattcacgcaatgcatcacgagcaagatatgaggaaaatgggaggtttattttacaaggttcctttaacagctacaatgatgtggataggatctttagcaataattggctttccttatctttcaggatattattcaaaagacattattttagaaacagccttcttttcttctagcaacataggttcttatgcttattttataggaattttcactgctctattaactgctttttattcttggagacttctttttttaacttttcatggagaaacaagagtttcaaaagaaaactttgtcaagattcatgaatcacctttagtaatgttaattcctttatttttattatcaataggctctatcttttctggagtttttttgt

SEQ ID NO: 201457 - DNA, 358 bp, Unknown
  Bacterial polypeptide expressing nucleotide sequence isolated from the Sargasso Sea
tatgcttttggaatatttgccaatatttatttttttagtctttgcggtcatttttgccagtattatgcttggcattggtttcacatttggatctagtaatcctgatcctgaaaagaattctccatatgagtgtgggtttgaagcatttgaggattctagaatgaaatttgatattagatactatttagtagcaattttgtttataatttttgatcttgaaatagcttttctatttccatgggctatagtcatccatgaagttggcttgattggactattctccatggctatatttctactaatattagttgttggatttatttatgaatggaagaaaggtgctttggaatgggactag

SEQ ID NO: 201458 - DNA, 858 bp, Unknown
  Bacterial polypeptide expressing nucleotide sequence isolated from the Sargasso Sea
atgaatattcagagttagcactatcaataataactataataggcatggttacagcattatttgctgcaagtgtagcgctagtacaaacagacataaaaaaaattatagcttattcaacatgtagccaacttggatatatgttttttgctgctggtgttggagcttatagtgttgctatatttcatttatttacacatgctttttttaaagcattattatttttaggatcaggttctgtaatacattcttttaaagatgagcaagatattaaccaaatgggtggagtgtggaaaaaactaccatatacttatgttttaatgatcattgggacattggcattaactggattcccatttctttccggtttttactcaaaagatgcaataatagaatttgcatttttaagaggaaatagtttaggattttatgcttcaagcataggtgtctttacagctttattaacttctatttattcatggagacttatatttaagacttttcatggaagctataataattcaaaactgaaaataaattccatgcatgaagcaccgataactatgcttgccccattaataatattagctttaggtgcaatttttgctggtatcttatttaaagatttatttattggccatgaaacatcctatcaattttggtcaagttcaattaaatttttagaaccactaagcaaggatcatcctccaatttggtttatttatttaacaccaatattagttattatatctattcctctagcttattatttatttataaaaaacaaaaaaattgttgattcaattgtaaaatcaaacaaacctttttatttatttttaaaaaacaaaatggtactttgat

SEQ ID NO: 201459 - DNA, 799 bp, Unknown
  Bacterial polypeptide expressing nucleotide sequence isolated from the Sargasso Sea
tatgttgctaaaactaacttgtttggtacccctgtttccgttgatcggatctatcatcaacggtttttttggtctgcgtattggcaaaaatgctgttggtataattgcagctggaagcatggctctgtcttttctgacttccattttagtttatgtaggctaccttatgttgccagaaggccagcatgtcttcgaacaagttgtctgggcgtggttcggtgcaggtgacttttctgtagattttggctttcaagttgaccctctaactttggttatgatgtttgtcgttaccggagtcgggttcatcatccatgtgtacgctattggctatatgcatgaagaatatagcttctaccgtttctttgcatacttcaacttatttgccagcgccatgctgcttctcatcatgggtaataactttttgctcatgtttattggctgggagggagtaggttgctgctcttatttcctaattggttattatttcgagaaaaaatctgcctgcgatgcgggcaccaaggccttcatcgtcaaccgagtgggagactttgctttcttactcgccgtcatgtacatctttaatatctttggaaccatcgacttttcagaagtaatgcatgcggcgcctgaaaaactgatttatgccggggaagccgtcaccatcatcacattattgctttttattggagccaccggtaagtcagcacaaattcctttatacacatggttgcctgatgcgatggaaggcccaactcctgttagtgcattgatccatgccgcaactatggtcactgctggg

SEQ ID NO: 201460 - DNA, 523 bp, Unknown
  Bacterial polypeptide expressing nucleotide sequence isolated from the Sargasso Sea
atgaatttagaagaaagaaaaaaaaatattccagatgaatttaaacaattagctcaagattttagtgataatggttttataacaacatcattagataatcttgttaattgggctagaactggatcattacattggatgacatttggtcttgcatgttgtgctgttgaaatgatgcagacttcaatgccaagatatgatttagaaaggtttggtgctgcacctagagcctcaccaagacaatcagatgtaatgattgttgctggaacacttacaaataaaatggctcctgcactaagaaaagtttatgatcagatgccagatccaagatacgtaatttctatgggaagttgcgctaatggtggaggatattatcattactcttattccgtagtaagaggatgtgatcgaattgtaccagttgatgtgtatgttcctggatgccctccctctgctgaagcacttttatatggaataatgcaacttcaaaaaaaaatcagaaataaaggttctctggaaagataaa

SEQ ID NO: 201461 - DNA, 814 bp, Unknown
  Bacterial polypeptide expressing nucleotide sequence isolated from the Sargasso Sea
ttagctgatgctttaaaatatatttttaaagaaattataattccagcaagcgctaataaaataatatttattttagctcctattgtaacaatgactttagcactagttgcttgggctgtaataccaatgagtgaaagcttaatattggcagacattaatgttggaattctatatttatttgctgtctcctctttaggtgtttacggtataattatgggtggatgggcttctaattcaaaatatccttttttaggtgcaattagatctgctgcgcaaatggtttcttacgaagtttctataggcatcataattattaatgttttactttgcgtgggctcccttaatctaaaagatatagttttagctcaaaaagatttatggtatgtcgtcccactatttccaatgtttgtaattttttttatttctgctttggcagaaacgaacagacctccttttgatttgcctgaagctgaagcagagttagtggcaggttatcaaacagaatattcaggtatgatgtacgcaatgttttggctaggggaatatgcaaatattttattaatgtgtgccatgggatcaattttgtttttaggaggctggcttccactaattgatatttacccattaaatataataccagcacctatatggatggtactaaagatcttgtttttgttttttctattttctctaattaaagcaatagtaccaagatacagatatgatcaactgatgagattaggttggaaaatatttctacctttttcattgatctacgattgtattaacagcaagctttttattttattttgac

SEQ ID NO: 201462 - DNA, 989 bp, Unknown
  Bacterial polypeptide expressing nucleotide sequence isolated from the Sargasso Sea
attactattgtcggtgctttaaccgcaatatttgcagctactattggtctaactcaattcgatattaaaagagtaattgcttattctacttgttctcaattaggatatatgttttttgcagcaggtgtttctgcttatcccgcttcaatgtttcatttaactacacatgctttttttaaagcacttttgtttttaggtgctggttctgttatacatgcaatgtctaatgagcaagatatgagaaaaatgggtggaatttggaaaaaaattccaatcacgtatgctttaatgtggataggctcattagctctggctggtattccatttttttcaggttattattcaaaagaccttattttagaggctgcatgggctgcaagtactaattcgggatattttgcattttggttgggtgttttagctgcttttttaacagctttttactcttggagagtcataattatgacttttcacggtgtttcaaatgctgataaagatgttttatctcatgttcatgaatctccactagtaatgcttataccgttaattgttcttgcttttggtgctattttatccggatggttcttttatgaaaattttgttggccatcattggcacgacttttggggccattctatttttattgcagatacaaacaaagcaatgaaattagctcattatgtacctaaatgggtaaaatatttgccagttttattagctgttcttggtattgtttgtgcgtatattttttatttattaataccttcattgcctaaaaaaatttctattacgtttaagcctatatataaattattttttaacaaatggtattttgatgaaatttacgatcacttatttgttaaatcctttattaaaattggcaatattttttggaaaaaaggagacgaaaacacaatcgatagatacggtccaaatggtatttcaaagttagttaaaaatatttcttcaaaaagtaatataattcagtc

SEQ ID NO: 201463 - DNA, 265 bp, Unknown
  Bacterial polypeptide expressing nucleotide sequence isolated from the Sargasso Sea
cctcaacccagatccagaaaaactatcagcatatgaatgtggttttgaaccatttgatgactctagaatggagtttgatgttaggttttatcttgtagcaattctttttattatttttgatttagaaatagcttttctttttccttgggcaatatctttggggggtataggcgcgctaggtttctggtcaatgatgttttttttaggagttttaactattggatttatttatgagtggaaaaaaggagccttagaatgggaataa

SEQ ID NO: 201464 - DNA, 244 bp, Unknown
  Bacterial polypeptide expressing nucleotide sequence isolated from the Sargasso Sea
actttcagcatacgaatgtggattcgaaccttttaatgattctaggatggaatttgatgtaagattttatctagttgctattttatttattatttttgatttagaaatcgcttttttatttccatgggcaatatcattaggaagtattggatttctgggattcatatctatgatgatttttttatttattcttacggtgggttttatttatgaatggaaaaaaggcgccttagattgggaataa

SEQ ID NO: 201465 - DNA, 897 bp, Unknown
  Bacterial polypeptide expressing nucleotide sequence isolated from the Sargasso Sea
agaaattgtttctgtaggtctcatctctttcgtaggcatttctgcggtaataagttataaagctctgattgaacaggttaatggttatcccccagtagaaaaattatttgtgtgggctaacgctggggatttcacaattccaatgggctttgttcttgatcctttggggagtgtgatgcttgctttagtaactacaataactttgctggtaatgatttactctcatggttatatgtcgcatgacaagggttatgtcagattttttacatatttagcactatttagtagttctatgatgggactaatagttagtccaaatttattggaaatttacgttttttgggaattagttggaatgtgttcttacttattggttggattttggtacgacagagatggagctgcacacgccgcacaaaaagcatttgttgttaatagagtaggagatttcggattattactaggcattcttggtctattttgggcaacaaatagttttgattttaatgaaatagctactggaatttctcaatcaatatctgacaattcaatacccatttgggctgctttactactttgttttttggtttttttaggaccaatggcaaaatctgctcagtttcctcttcatgtatggttgcctgatgcgatggagggtccgacacctatttctgcacttatccatgctgcaacaatggttgctgcaggaatatttcttgtggcaaggctacaacctttgtattcaatattcccttctattcaattcattattgctttagttggtaccattacttgttttttaggcgcctccatagctttgacccaaatggatttaaaaaaaggtttagcgtacagcacagtttctcagcttggttatatgatgctcgcaatgggttg

SEQ ID NO: 201466 - DNA, 952 bp, Unknown
  Bacterial polypeptide expressing nucleotide sequence isolated from the Sargasso Sea
attggcgcgatggaaaagtcggctcaaatttttttgcatacatggttgcccgatgcaatggaaggtcctacaccagtttcggcgcttatccatgcagctaccatggtcactgcgggagtctttttaacctgtagattttctcctctgttcgaagcagcacctcaagtatcgactttggttttaatagtgggtgtcttaactgctttttttgcagccacaacagctttagttcaaaatgatataaaaagaataattgcatattcaacttgttctcagctcggttacatgtttgctgctgttggggctggcttttaccaagcagcaatgtttcatctttttacccacgcatttttcaaggctttattgtttcttggagcgggatcagtgatacattctatgcaccatgagcaggatatcagacggttaggaggattgcgcacaaagttgccaattacatttttcacaatgaccattggtaccttagccataacgggcgttggcattcctctaagttactacgttttaggctttaacttcggactgtctggctttgtatccaaagatatcgttatagaaggcgtctttgcttcaaaaagtagctatgcttttcatgcttttgtacttttaacattttctgctcttttaaccagtttctatagctggaggttggtatttctaacattttttggttcatttagaggaaagatagatgactttaatcattgtcatgaaccagaaaggacaatgctgataccattggtccttttgtctttaggcgcagttttttttggttcattgtttgaatttgactttacaagcgcaaagtaccaaatgttttcagaatctatccttttgtcaaaagaaaacactatcctaaaagactttcactatgttccggtaatggtgaaattagcacctttttttgcgatgcttattggtctttcaatagcta

SEQ ID NO: 201467 - DNA, 855 bp, Unknown
  Bacterial polypeptide expressing nucleotide sequence isolated from the Sargasso Sea
ttttttgggaaaattattggagataaaagttctcaaattatcacaagtttgtttatttcaatctcagcaattttatcatttatagttttgtataaagttattagtcaaggttatgaaaataatttaattatagcaacttggataaattctggatctttaaatgttaactggtcaataaaaattgatgcattatcttcgttaatgttagtaattgtaaatctagtgtcagctttagttcatgtttactctataggttatatgtctgacgacccccacaagccaagatttatgtcttatctgtctttatttacatttgcaatgttaacattagtgagttctgataattttatacaattattttttggttgggaagctgttggattgtgttcatattttttaatcggtttttggttcaaaaaagaaagtgctaatgcagcagcaataaaagcttttgttgttaatagagttggagattttggatttgctctaggtatttttttaattttttatatttttggtacagtcaattacgatgaagtttttgaacaaatcccgactgttattgacaaaaaacttgtttttttaggattgagcacaaatacaattgatctaatttgtatattattatttattggagcaatgggtaagtcagctcaatttttgttacatacatggctacctgacgccatggaggggcctacgccagtttctgcattaattcatgcggcaacaatggttacagctggagtttttcttgttgtaagatgttctccaatctatgaatattctcagttagcacttacaattataacaattgttggaatggttactgctttttttgctgccacaattgca

SEQ ID NO: 201468 - DNA, 568 bp, Unknown
  Bacterial polypeptide expressing nucleotide sequence isolated from the Sargasso Sea
aaagggagctttggaatgggagtagaaaaactaccttcagacagtccgcgcgctatagctcctggagccgatcaggattctattctcatggctgtaggagatgaaataagggaaaaagggtttatagttgctaaagcagataaactatttaactgggcgcgcacgggctcgctgtggccgatgacttttgggctagcctgttgtgctgttgaaatgatgcactcagccgctagtaggtatgatcttgatagatttggtatggtgtttagacctagtccgcgtcagtcagatgttatgattgttgctggtaccttgacaaacaaaatggctccagctctacgcaaagtttacgatcaaatggctgagcctcgttgggtggtttctatgggatcgtgtgcaaatgggggtggatactatcattattcctattcagtcgtaagaggatgcgacagaatagtaccggtggatgtttacgtgcctggttgtcctcctacggctgaggcactcatttatggtttaatgcagttgcaacggaaaattcgacgtacagggtcaatctcacgttaga

SEQ ID NO: 201469 - DNA, 759 bp, Unknown
  Bacterial polypeptide expressing nucleotide sequence isolated from the Sargasso Sea
aattccgctgcagaagcctgcaaaaaagcgtttttgtttaatcgtgtaggagattttggagtgctttccgcagtgctcttgattttcctcagtatcggcagtcttgaattcaacactgtcaatgtccaggctgcagcacaatttgaatacggaggcgttttggtgacggtgatcaccttgcttctttttcttggagcaactgggaaatcggcgcagattccgctctatgtatggcttcccgatgcgatggaaggtccgacaccagtttccgccctgatccatgcggccacgatggttactgccgggctctacatggttgcccgactcagccacttgtttatgctggcccctgtaacaatgaatgttatcgctgtagtcggaacggtgactgctctgctggctgccaccattgccatcacccaaaccgacatcaaacgagttctggcctattccaccgtgagtcagttggggtatatgtttcttgccatgggtgtgggcgccttcacagcgggtatttttcacgtcatgactcatgccttcttcaaggctctgcttttcctggggtcaggatctgtgattcacgcgatgcatcatgaacaggatatgatgaggatgggggctttaagaaagaaactccccattacttacctcaccatgatggctgggaccctggcgattgcaggaattcccttcttttcaggtttttttagtaaggatgaaatcctttggaaagccttcagttctcccctcggtggaggt

SEQ ID NO: 201470 - DNA, 932 bp, Unknown
  Bacterial polypeptide expressing nucleotide sequence isolated from the Sargasso Sea
atcagcctactctgtcgcgatctttcatcttgctactcatgccttttttaaggcgctgctgttcctcgcggccggttcggtcatcattgcgatgcaccacgagcaggatatgcggcgcatgggcggattgcgcaaggccatgcccttaacgtacgtgacctgtgttatcggaagtctcgcactggccgggattcctcccttcgcgggcttcttttcaaaggatgccattatcgaagcggtccattactccacgacgcccggcgcagaatttgcctatgcggccgtgttgatcggggtagtgttgacggccttttattccttccgactggtgttcatggcgtttcatggcgagggacgtatggattcaaagactcgggagcacctgcatgagtcgcccaaggtggtaacgatcccgttgattgcgttggctgtgccttcggtgctggcaggcctgctgctggttaacgctacgatggatggcagcctcttcggcagcagcgtggtccccggtggggttcctgaagaactggatatgacagctagcggcatgcttgcccacgttccgtttgccgttcctttttggctggcggtcgcgggcatcgctggcgcctgggtctgctatttgtggaagcctgacctgcctgacaagtttgccaaacggtggagtggcatctaccgtgttctcgataagaagtacggattcgacgagttttatcagcgagtgttcgcggatggggcgcgtgggctgggtcacgcgctttcggagtggggcgatcggcgcgtcattgatggctggctggtgaacggcgctgccagggtagttgcgcgcaccgccgggctggtgcggcatgtccagagcggactggtgtatcactacgctttcgcgatgattatcggcttggtggcgctgatgtcttggtttctgtttcgct

SEQ ID NO: 201471 - DNA, 169 bp, Unknown
  Bacterial polypeptide expressing nucleotide sequence isolated from the Sargasso Sea
ttaaatataattgatactctttgttttttattatttataggagctatgggaaagtctgcccaattaggattacatacttggttacctgatgcaaaggaaggtcccactcctgtttcagctttaattcatgctgcaactatggttaatgcaggagtatttatggtagcga

SEQ ID NO: 201472 - DNA, 577 bp, Unknown
  Bacterial polypeptide expressing nucleotide sequence isolated from the Sargasso Sea
atggaggaaaggagcactggagtgggagtagcgaaaaaagtcctggaagaagaccgcagtcctctgagccctggaaaaacccaagatctgatcctagaaactgttacggaaacgcttgtcgataaaggcttcgtagtcgcgaatatggataagcttgtcaattgggcacgaacaggatctctctggccaatgacgtttggccttgcctgctgtgcggttgaaatgatgcacgcctatgttagccgctacgaccttgatagatttggagttgttccacgcccaagccctcggcaatcggacgtaattatcgtagccggaactctgacgaataagatggctccagcatttcgtaaggtttacgaccaaatggcagagccgcgttatgtcatttcaatgggttcctgtgcaaatggcggtggctattatcactactcatattcggtcgtacggggatgtgacagggtggttcccgtcgatatttatgttcctggctgtcctccaactgcagaagcccttgtttatggcatattacaattacaaaagaaaattcgccggaccgggactttgatgcggtagg

SEQ ID NO: 201473 - DNA, 918 bp, Unknown
  Bacterial polypeptide expressing nucleotide sequence isolated from the Sargasso Sea
caattaggctacatgttttttgcagcaggagttggggcttataatgttgctatttttcatttatttactcacgcattctttaaagcacttttatttcttggttctggttgtgtaatacattcatttaacgaagaacaagatatccgctctatgggaggtgtatggaaaaaaataccatacacttatgcacttatgataattggaactttagctttaacaggatttccttttttatctggtttttattcaaaagatgcgataatagaatttgcctatttaaaaggtagtaccgtaggatacttcgcagctgcaattggaataattacagcattattaacgtcaatttattcttggagattaatttttaaaacatttcatggaaaatataataataaaaataataagttgagtgcaatacaagaatcccccttaagcatgctgataccatcgtgtttattagccataggagcgatttttactggaattttatttaaagaaatttttataggggaaaatagttctacattttggggcagttcaatattatttttgaaatcgatcagtaatgaacatgctccactctggttaattattgcaacaccaatactggttactttatcaattcctcttgtttactattttataataaaaaatgagaatattttaaaaaatttagtatcaaaaaattatcgcatatataattttttattaaacaaatggtactttgatgaattgtataatgttgtttttgttgaacctttaaaaaaaattggtttatttttgtggaaaaaaggtgacataaatataatagataagtatggaccagatggattatcaagactaataaaaattatatctaataaagcagtaaattttcaaagtggatatttatatcattatgcttttgtcatgctttat

SEQ ID NO: 201474 - DNA, 361 bp, Unknown
  Bacterial polypeptide expressing nucleotide sequence isolated from the Sargasso Sea
aatggactattctgaatatttacccattttcgtattttctgtaatagctttaggtatgtctttaggatttgcgtttttatctggtatagttgggcctagtaaacctgacaaagaaaaactttctgcttacgaatgtggatttacaccatttgaagatgctagagttcaatttgatgttagattttatttagtcgcaatattatttataatatttgatctagaagtagctttcttatttccttgggcaatttcattgcctttaataggattatatggatatttatctatgatggtttttcttcttattttaacagttggtttcatttatgaatggaaaaaaggagcacttgaatgggaataa

SEQ ID NO: 201475 - DNA, 784 bp, Unknown
  Bacterial polypeptide expressing nucleotide sequence isolated from the Sargasso Sea
attgactttgcttgtttatttttattttttggtgcaatggcaaaatctgcacaaattcccctacatgtttggctcccagactcaatggaaggcccaactcccatatcagcattaatacacgcagctacaatggtaacagcgggaatatttatggttgctagattatctccattatacgaacttgctttatttaccaatgattttatcttgttaataggtgcttccacagcattatttattggagttatagcaatatttgaaaatgatattaagaaagttatagctttttcaacaatatcacagttaggctatatggtcgccgctttggggattaatgcttacagcacatctttttttcatttgtatacccatgccttttttaaggctttattatttttatgtgctggatctgtaattatgtctcttcatcataatcaagacataagaaaaatgggtggtttaaaatcaaagctaccaataacttatatcagtttcttaataggcactttatgtattataggatttccatttacatcaggatttttctctaaagatttaatattagaagtaatgctttataaagataatacgatctcatttattgcttatctaatgttattatttggcgctttggtaactactatttactcattaagacttttattttttgttttttataatgaatatagaggaaatgatttgcataatatcaaggaacaatcaaagattattacttttcccattaatagtactttctattctatctattttatctggctattta

SEQ ID NO: 201476 - DNA, 853 bp, Unknown
  Bacterial polypeptide expressing nucleotide sequence isolated from the Sargasso Sea
aacacaatttgacataaaaagggttattgcttattcaacttgttcgcaattaggttatatgttttttgctgccggggtttctgcttatcctgctgcaatgtttcaccttaccactcatgctttctttaaagctcttctcttcttaggggccggatctgtaattcatgcaatgtctgacgaacaagacatgagaaaaatgggagggatttggaagaaaattccagtcacttatgcattgatgtgggttggctcattagcgttagctggaataccattttttgcaggttattattctaaagacttaatattagaagcagcgtgggctgctagctctaattcaggatattttgcattttggttgggttgcttggcagcgttttttacggcattttattcctggaggttattattattgacttttcatggagattttaattcttcaaaagaggttttagattatgtccatgagtcacctattgtgatgttaatacctttgtttgtattggccatcggagctattttttcaggttggtatttttataatgattttgttggttacaattggaaagaattttggggagactcaatattaatttcagaaaaaaataaagcttttaaattggctcattacgtacctttatgggtcaaatatctacctatatttttagcaattttaggtatattttgtgcctatttattttataaattaaatccaaatttgccaaaaattttgtcaaagaaacttactccaatttacaatctgttttacaataaatggtattttgatgagttgtatgattatttttttgtaaaaagttttattaagtttggaaatttctttggaaaaaggtga

SEQ ID NO: 201477 - DNA, 820 bp, Unknown
  Bacterial polypeptide expressing nucleotide sequence isolated from the Sargasso Sea
gccggtgtttttctcgtttgtagaatgtcacctttaatggagtatgcaccaacagccctcagttttattacgatcctaggagcttttacagcctttattgctgcaaccattggtttggtgcaaaacgatataaagcgcgtaatcgcttattcaacaatgtcccagttaggatatatgtttgttgccgctggtgttggtgcctattcggtagctatgtatcacctatttactcatgcctttttcaaagcgatgttgtttcttggtgccggttcagttattcacgcaatgcatcatgagcaagatatgcgtaattatggcgggcttagaaaaaaaattccatatactttttgggccatgatgataggtacacttgcaataactggcgttggggtgccgttaacgcattttggttttgctgggttcctgtcgaaggatgcggtcatagaaagtgcctgggctggaaccaatgctggttttcctttctggactttggttgtagcagctctgcttaccagtttttacagctggcgtttgatgctattgacattttttggggaacccaaaggggatagccacgcgtattcacatgccaaagaaagccctatggtgatgttgataccgctaggaattcttggaataggtgcgattttgtctggaatgatttggtactcaagttttttcggaaaagattatcaagttgcaaaattttttgggatggaaagcgaatatcatcaaaagagcccagaagggtctgatgataatgccaacaaaaacaatatcgttgggaatgaagaaaagataccccctgcaggcgctattt

SEQ ID NO: 201478 - DNA, 838 bp, Unknown
  Bacterial polypeptide expressing nucleotide sequence isolated from the Sargasso Sea
aaagcttttgttgtgaatagaataggagactttggttttgcattaggaattgttggaatatttttaatatttggctcaatcaattttgattctatttttagcagtttagataattcaaattactatcaagaaagaattaattttgttggatttaattttcctgcaattgatattttgtgttttttattatttataggtgcaatgggaaaatctgcccaattaggattacatacatggctaccagatgcaatggaaggaccaaccccagtttcagctttaattcatgctgctacaatggtgactgcaggtgtgtttatggtagcaagaatgagtccattatttgaatttgctaattatactaatgtatttatgacttttataggggcctcaacggcaatatttgccgctagcatagcacttactcaaaatgatattaaaagagttattgcttattccacttgtagccaattagggtatatgttttttgcagcgggattaggcgcttataatgcatcaatatttcatttgatgacgcatggtttttttaaagccttactttttttatcagctggatcagtaattcatgccttgcatcacgagcaggatatgagaaaaatggggggactctttaaaaaactacctttcactggcttaatgatgtggattggttctttagcaattattggttttccatacttttctggttattattcaaaagaaagcatccttgaaaatgcatatttttcaacaagttatatggcaaattttgcatactttgtgggaatcttaacagctcttttaacagcattttattcttggagattattatttcttacat

SEQ ID NO: 201479 - DNA, 330 bp, Unknown
  Bacterial polypeptide expressing nucleotide sequence isolated from the Sargasso Sea
aatgataacagatattttaaaagattatttacctataattttattcttattgatagcactaggtttaagctgtgcgtttatagtagttaattttattttatcacctaaacacccagacccagaaaagttgtcagcttatgaatgtggctttgagccatttcaagattcaagaatggaatttgatgtgaggttttatctggtagctatactatttattatctttgatcttgaaattgcttttctatttccttgggcaatatctttaggtaacattggaatacttggttttacatcaatgatgatttttctgttcatactcacgattggatt

SEQ ID NO: 201480 - DNA, 256 bp, Unknown
  Bacterial polypeptide expressing nucleotide sequence isolated from the Sargasso Sea
aatgattgcggaatttttaaaagattattttccaataattatttttttaataattgcactaggcttaagctgtgtatttattattttgaattttttattatcaccaaaaaatcctgatccagaaaaactatcagcttatgaatgtggtttcgaaccctttaacgactcaagaatggagtttgatgttagattttatttggttgcaattttatttattatttttgatttagaaatagcatttttgtttccctgggca

SEQ ID NO: 201481 - DNA, 907 bp, Unknown
  Bacterial polypeptide expressing nucleotide sequence isolated from the Sargasso Sea
ttttttgctgctggggtaggtgcttataatgttgcgatgtttcatctatttacacatgctttttttaaagctttactatttttgggagctggtgctgtaattcattcatttcatgatgaacaagatataaataaaatgggtggagttatcaagaaacttccatacacatatgtattaatgctcataggaactcttgctttaacaggttttccttttttatcaggtttctattctaaagatgcaataatagaatttgcgtacttaagagggaatggagttggaatgctcgcagcttttgtgggtattgttacagctttactaacatcaatttactcttggagacttatatttaaaacattccatggtaattttaataataaagaacttagtattgataaagtacacgagtctccttttgttatgattgctcctttaattatcttagcaataggagctatttttgcaggtatggcctttaaaggtttgtttataggtcatgagatagcatatgaattttgggctcaatctataaaatttttagaaccactaagtacagatcatccaccaacgtggtttttgtttttaacgcctatacttgttacctctgcaattccattttcttattatttatatctaaaaaacacaaaaatagtaaatggactgaaagaaatgaatgagccaatttatcaatttttagttaagaaatggtactttgatgaaatgtatgattatttattcgtcaatccttcaaaaaaaattggaaagtttttatggaaaaaagttgatggatcaataatagataaatttggtcctgatgggatttcaagtgtaataaaaaatttatcaattaaagcagtcaaatttcaatctggatttatttatcaatatgcatttgttatgttgattg

SEQ ID NO: 201482 - DNA, 490 bp, Unknown
  Bacterial polypeptide expressing nucleotide sequence isolated from the Sargasso Sea
gactgatatagtattagctcaaaaagatgtttggtttgtaattcctctttttccaatgtttgtaatattttttatatctgctctagctgaaacaaatagaccaccatttgatttaccagaggctgaggctgagttggttgcaggttatcaaaccgaatattcagggatgatgtatgccatgttttggttgggagaatatgcaaacatattattaatgtgtgctatgggttcaatactatttttgggaggttggctttcacctttagaaatttatccattaaatatcattccagctcctttttggatgatactaaaaatattatttttattttttttattttcaatcgtaaaggcgattgttccaagatatagatatgaccagctaatgagactcggatggaaaatctttctgcctttctcattaatatacgttattttaacagctagttttttattttattttgacatgttgccaaaaaaggatttttaa

SEQ ID NO: 201483 - DNA, 994 bp, Unknown
  Bacterial polypeptide expressing nucleotide sequence isolated from the Sargasso Sea
tatgagcaccgctttttttgcggcgactgtacctttagttcaaacagatataaaaaagatcatagcttattccacatgtagtcaattaggttatatgttttttgctactggtgtaggtgcatataatgttgcaatgtttcatctatttactcacgcattttttaaagcattactatttctaggatcaggatctgttattcatgcatttaaagatgagcaaaatataaacaatatgggaggagtatggagaaaactgccttacacttatgctttaatgataattggaactttggcattaacaggctttcctttactatccggtttttattctaaggatgcaattatagaatttgcatatttaagtggcactacaacagggtactatgcagctggtatcggaatatttacggcttttttaacatcaatctattcgtggagactgatgtttaaaacttttcatggtcaatataacaacaaggaactcaatattgaggagacacatgagtctcctctagttatgttaatacctctgataatattatctattggagcaatttttgctggatttatttttaaagatttatttataggtaatgagggaattaataatttttggaataaatcgattttctttttagaaccattaagcaatgatcacccgccattgtggtttttagtattaaccccaacattagtaactttatctataccacttgcttattatttattcgtaaaaaataagaatttttcagctcaactagtcagcattaatgagccactatataaatttttgttaaacaaatggtattttgatgaaatttacgaaacattatttgtaaaatcttcgaaaaaatttggtttatttttatggaaattttttgatgttaaagttatcgatggctttggacctgatggtatttctggcataattaaaaattttctatcaaagctaataaattccagagtggttatatttatcaatatgcatttataa

SEQ ID NO: 201484 - DNA, 577 bp, Unknown
  Bacterial polypeptide expressing nucleotide sequence isolated from the Sargasso Sea
ttgtttacttcagataattttttacaacttttttttggttgggaaggtgtaggactatgttcttattttttaataggattttggtttaaaaaagaaagtgctaatgcagctgctataaaggcatttgttgttaatcgtgtaggagattttggatttgcacttggaatatttttaatattttatttatttggaacagttaattatgtagaagtatttgaattagtaccaaagtctttagacgtaaatcttaacttcttagggttaaattttaatgcaattaatttaatttgtattcttttatttattggtgcaatgggtaagtctgcgcaaatatttttacatacctggttacctgacgcaatggaaggacccactcctgtttctgcgctgatccatgccgcaactatggttacagccggtgtatttttggttgtgagatgttcgccaatatatgaatattctccacttgcattaaacattattaccattgttggtatgtccacagccttctttgcagcaacgatagctttagctcaagatgatatcaaaaaaataatagcttattcaacgtgtagtc

SEQ ID NO: 201485 - DNA, 361 bp, Unknown
  Bacterial polypeptide expressing nucleotide sequence isolated from the Sargasso Sea
aatgcataacttagattatattttcatattgatattcattgttattggtgcaggtatggcaatcgctatgtatttgctctcaaaaatattgtcacctagctcacctgatactgaaaaactatctgcatatgaatgtggttttgaggcatttgacgacgctcgatcaaaatttgatgttaagttttatttagtatcaatactatttattatatttgatttagaaattgcgtttttatttccttgggccgtgagtcttagcaatattggagctcttggtttttattcaatgatgttttttttatttattctcacagtaggatttatatatgaatggaaaaatggagcactagattgggagtag

SEQ ID NO: 201486 - DNA, 364 bp, Unknown
  Bacterial polypeptide expressing nucleotide sequence isolated from the Sargasso Sea
gctgagcccgcgtttccgcggtgagcacgccctgcgtcgctaccccacaggcgaggagcgctgcattgcgtgcaagctttgcgaggccatctgccccgcgcaggccatcaccattgaggcggaggagcgcgaggacggcagtaggcgcaccacgaggtacgacatcgacatgaccaagtgcatctactgcggtttctgccaggaggcgtgccccgtggacgctatcgtcgagggtcccaactttgagtacgcgacgtacacgcacgaggagctgctgtacgacaaggagaagttgttggccaacggagataagtgggaattagagattcaaaagaacctggcgtccgagtccttgtaccggtga

SEQ ID NO: 201487 - DNA, 852 bp, Unknown
  Bacterial polypeptide expressing nucleotide sequence isolated from the Sargasso Sea
taatactaaattttataactattgttggaatgactactgcattttttgcagcaactgttgctctagttcaaacagatataaaaaaaattattgcttattctacgtgtagtcaacttggttacatgttttttgcagctggagttggtgcatacaatgttgctatgtttcatttatttactcatgcattttttaaagctttattatttttaggatctggctcagtaatccacgcatttaaagatgagcaaaatattaataacatgggaggtgtatggaaaaagttaccatatacttatgctttaatgatcataggaacgcttgctttaactggttttccatttctatcagggttttattcaaaagatgcaattatagaatttgcatatttaaaaggtaatactactggttattatgcagctggcattggaataattacagcatttttaacatctatttattcatggagattgatatttaaaactttccatggacagtacaataacaatgagatcaagatagaagaaacacacgagtccccattagttatgcttgttccattatttattctttcaataggagctgtgtttgctggttttctatttaaaggactatttattggtcatggtgagaatttattctgggcagagtctattaaatttttagagcctctgagtactgagcacccacctttatggtttttacttttaacgccgtgtttagttttattatctattccagttgcttattacttgtttgttaagaacaaagaattacctaattcaatagctttaatgaacaaacctttatataattttttagtaaataaatggtactttgacgcaattatatgat

SEQ ID NO: 201488 - DNA, 781 bp, Unknown
  Bacterial polypeptide expressing nucleotide sequence isolated from the Sargasso Sea
tcaaataaagtaattttcatactggcccctatagtgactatgactttagctttaatcgcttgggctgtaatcccatttagtgcaactcaggttttggctgatattaatgttggaattttatacttatttgctgtctcatcactaggtgtttacggaataataatgggaggttgggcatcaaattccaaatatccctttttaggagcaattcgctctgctgctcaaatggtatcttatgaagtttcaattggggtaataattataaacgttttactttgtgttggttcactgaatttgaacgacatcgttattgctcaacaaaatatgtggtttgtaatcccattatttccaatgtttgtaatattctttatttccgctttggctgaaaccaacaggcctccttttgacttaccagaggcagaagcggagttggttgctggttaccaaacagaatattcaggaatgatgtatgcaatgttttggttaggagagtatgcaaatattttattaatgtgtgcaatgggagcaatattatttttaggtggttggatgtctccaattgatgtttatccatttaccttagttccaagtgcaatatggttaatattaaaaattcttcttttatttatcctttttgctctagttaaagcgatagtacctagatacagatatgaccaattaatgagactaggatggaaagtgtttcttcctctttctctaatttgggtagtattaacagctagctacttattttattttaaccttttaccagtaaattaat

SEQ ID NO: 201489 - DNA, 370 bp, Unknown
  Bacterial polypeptide expressing nucleotide sequence isolated from the Sargasso Sea
atgataattgaatttttaaaagaatattttccaattttgctttttctatttatcgcactaggtttgagcttagcttttattgtattaaattttttactatctccaaataatcctgatcctgaaaaactttctgcatatgagtgtggctttgaaccatttgaagattctagaatggaatttgatgttagattttatttagtagcaattttatttattatttttgatttagaaattgctttcttattcccatgggcaatttccttaggaaaaattggattattaggttttgtttcaatgatgatatttctatttattttaacggtaggtttcatttatgaatggaaaaaaggtgctctagattgggaataaa

SEQ ID NO: 201490 - DNA, 370 bp, Unknown
  Bacterial polypeptide expressing nucleotide sequence isolated from the Sargasso Sea
atgatatataactttttaacagattacttatcaataataattttcttatttatcgctcttttaataagttcagggtttatattaatcaattttatatcttctccaagcaatcctgatccggaaaaactttcagcttatgaatgcggatttgatgcattcgacgactccaggatggagtttgatgttcgtttttatttggttgcgattttatttattatatttgatttagaaatagcctttctatttccttgggcaattactttaggaaaaattggaatattcggtttttggtcaatgatgttttttttagcagttttaactattggttttatttatgaatggaaaaaaggagcattagaatgggaataaa

SEQ ID NO: 201491 - DNA, 352 bp, Unknown
  Bacterial polypeptide expressing nucleotide sequence isolated from the Sargasso Sea
ttgaaactacctaccatagcagtttttataatcatagctggagtgcttggcgtattaatgctcggcttgggttttctcttcggtaaaggcgccaaaacaaaagcaaaactgtctccttatgaatgtggttttgaagaattcgaagacgcacgaataccatttgatgtcagatattacttagtagctattctattcatcatttttgatcttgagattgcctttttatttccatgggcaatagctcttgatgagataggtcacgtgggtcttatatctatgattatttttctctttgttttggttataggttttgtatacgagtggaataaaggagcattggattgggattaga

SEQ ID NO: 201492 - DNA, 563 bp, Unknown
  Bacterial polypeptide expressing nucleotide sequence isolated from the Sargasso Sea
tgcacagatggtatcttatgaagtttctattggaattatcattattaatgttttggtttgcgttggtagtttaaatttgagtgatatagttttagctcaagataaaatttggtttgttgtgccattgttcccaatgtttgtgattttttttatatcatcattagcagaaacaaataggccaccttttgatttgcctgaagctgaagctgaattagttgctggttatcaaacagagtattcaggaatgatgtatgcaatgttttggttgggagaatatgcaaatatattattgatgtgcgctatgggatctatactttttcttggtggctggctttccccaatagaaacttatccatttgatttaattccaggagctttatggttaatttttaaaattctctttttatttattatttttgctttagtaaaagctattgttccaagatatagatatgatcaactaatgagattagggtggaaaatttttttaccattttcattattttggttagttttaacttctagttatttatactattttaacttgttgccaggaaattaaa

SEQ ID NO: 201493 - DNA, 827 bp, Unknown
  Bacterial polypeptide expressing nucleotide sequence isolated from the Sargasso Sea
ttagttgcaagatgttctcctatttatgaatattcagaattagcactcaatataattactgttattggaatgagtacagctttttttgctgctacaattgcattagtacaaaccgatataaaaaagataattgcttattcaacatgtagccagcttggatatatgttttttgctactggtgtaggcgcatacaacgttgcaatgtttcatctatttacgcatgctttttttaaggctttactttttttaggagctggttctgtaatacactctttcaaagatgaacaggacatcgaaaaaatgggtggggtatataaaaagatcccttacacttatgtcttaatgctggtaggtacattagctttgactggcttcccttttttatctggtttttattctaaagatgcaattattgaatttgcgtatttaagaggaaacgtaactggtatttatgcagctgttattggagttgttactgctatgttaacagcaatttactcatggagattattttttaaaacttttcatggaaattataacaatcaagaagtcaaatacgaaaaaattcatgagtcaccggcagtgatgattttgccactaatagttcttggtttagggtcaatttttgccggtttctttttcaaagatctattaataggcaatcaaagtagttttaatttttggggagagtctattaaatttttagagccattaagtgaagatcatccaccgctgtggtttattttgttgaccccgactatagttactttaagcataccgatttcttactacttatttttgaaggataagagtgtattaaaaaattt

SEQ ID NO: 201494 - DNA, 364 bp, Unknown
  Bacterial polypeptide expressing nucleotide sequence isolated from the Sargasso Sea
gatggtatttttagaggattatttatcaattttaatttttctgtttatagcacttggtttaagtgtggggtttgtcttattaaattatttattttcacccaaaaaccctgatccagaaaagctatctgcttatgagtgtggttttgaagctttcacagattcaagaatgaagtttgatgttagattttatttagtagcaatattatttattatttttgacttagaaattgcttttttatttccttgggccatatctttaggaaatataggatccctaggcttctggtctatgatgatttttttagcggttttaacaataggtttcatttacgagtggaagaaaggagctttggattgggattga

SEQ ID NO: 201495 - DNA, 739 bp, Unknown
  Bacterial polypeptide expressing nucleotide sequence isolated from the Sargasso Sea
cacgttcgtactcagcctaattgcctgggcagttatcccatttggtgaggggctcgtggtgtcggacataaatgttggcatcatgtatatctttgccatctcatctcttggtgtatacggcatcgtcatggccggttgggcttcgaattcacgatacgcgtttctaggtgctctgcgatcggcggctcaaatggtttcgtacgaagtttcgatgggcttcatcattattacagtcctgctttgcgttggttctttgaacatgagtgaaattgtccaagcgcaggagaaggtctggtacttcattccattgttcccgatgttcgttatcttcttcgtgtctgctcttgcggaaactaatcgtcatcccttcgacttgccggaagctgaagctgaactcgtcgccggatatcaggttgaatattcatctatgacattcgctctatttttccttggtgaatacgccaatatgatcctaatgagtgcgctgacagctatcctgttcctgggtggctggcttccgccattcgacatcgcgccgtttaactgggtgcccggacccatctggttcgcgctcaaaatcacactgttgctatttgtttttgtatgggtgcgtgcgaccttcccacgctaccgttatgaccaactgatgcgactaggctggaaggtgtttttacccctttccctgttttgggtggtgctaacagcaggggttctgctggttttcgactggctaccctag

SEQ ID NO: 201496 - DNA, 825 bp, Unknown
  Bacterial polypeptide expressing nucleotide sequence isolated from the Sargasso Sea
gggtttattaggtttggtccagaatgacatcaaaagagttgtggcttactcgacactctcgcagttagggtacatgacggtagctctaggagtgtccgcttattcagcagcgattttccatctgttcactcatgcattttttaaagccctgctgtttctggcagctggttcagtaatcatgggtatgcaccatgagcaggatatgagaaaaatgggaggcttgaaaaatcgcatgcccgtcacatattggaccttacttttgggctctctcgcgctgataggttttcctggcttttccggctttttttctaaagatgcgattattgaggcagtgcatttgtcttctcttcctggcgcaggcgttgcgtatgtagcaattattggtggcgtgttcgttaccgccctttattctttcagacttgtttttatggtttttcatggagagccgaggatggactccaagactttggggcatattgaggagtctccaaaagtcgtgactgttcctcttatagtgcttgccgttccatcagtgatgataggagctctatttgtcagctccatgttatttggggagttttttggtgacagcatcgtcgtggcaatagagcacgatgtattgaaggaactcggtcagtcttacaatggcgcctttgcaatggtgcttcatggcctgctaatgcctccgttttggctggcgaccggcggagtattggttgcgtggtatctatacttaaagagaccggatcttccaaaagtttgtgccgataaactttccatcgttcgaaaagttctcgaggaaaaatacggttttgatagatttaa

SEQ ID NO: 201497 - DNA, 370 bp, Unknown
  Bacterial polypeptide expressing nucleotide sequence isolated from the Sargasso Sea
atgctacacgattttttaaaagattacctgccaattattttattcctaataattgctttgactttaagtttagcttttataatgattaattttattttatctcctaaaaatcctgatcctgaaaaactttcagcttacgagtgtggctttgaaccatttgaagactcaagaatggaatttgatgtcagattttacttggtagcaatattatttataatatttgatttagagattgcttttctatttccttgggcaatttctctaggcaatattggtttgtttgggttttgttcaatgatgatttttttatttattcttactgttggatttgtctatgaatggaagaagggtgctttagattgggagtaaa

SEQ ID NO: 201498 - DNA, 832 bp, Unknown
  Bacterial polypeptide expressing nucleotide sequence isolated from the Sargasso Sea
aatgttaactgcattttttgcagcatcagttgctgttgttcaaaatgatataaaaagaataatcgcatattcgacctgtagtcagttaggatatatgttttttgcagctggagttggagcgtatcacgttgctatatttcatttatttacgcacgctttttttaaagcactattatttttaggatcaggctcagttattcattcacttaaagatgaacaggacattagaaatatggggggaatatggagacaaatgcctttcacatggctttctatgatcattggaacattagctctcacaggatttcctttcttggcaggttactattcaaaagatgctattatcgaatttgcatatctaagggggacaaatattggttattttgcagcatatgtaggagtaataacagcctttctaacagcgatatactcatggagattaatttttaaaacttttcatggaaaatataataataaaattttaactaaatcagatattcatgactcaggaataattataatttctccattagttattttagtacttggttctattttttctggtttcttgtttaaaaattttttaataggagatcagtatagtgatttttggaaaaattcgatattaatacttaatatatttgatcattctaaaataccgatttggattttatttataacaccaatattagtaactttggccataccattatcgtattatttatatgttcaaaataatagcattttggaatttcttaaaaataaaaataaattaatttataattttttattaaacaaatggtattttgatgaattatacgatttaattttc

SEQ ID NO: 201499 - DNA, 859 bp, Unknown
  Bacterial polypeptide expressing nucleotide sequence isolated from the Sargasso Sea
tgtgttcttttatttataggagctatgggaaagtcggctcaaatttttttacatacttggttgccagatgcgatggaaggtccaacgcctgtatcagcattaattcatgctgcaacaatggttacagcaggggtttttttagttgtaagatgttcacctatctttgaatattctcctttagcattaagcttagtaacgataataggaatgtccacagctttttttgctgcaacaattgctttggtgcaagacgatataaaaaaaattattgcatattcaacttgtagtcaattaggatacatgttctttgcagcaggtgtaggtgcttataatgttgctatgtttcatttatttactcatgcattttttaaagcattattatttttaggttcaggatctgtaattcattcttttaaaaacgaacaaaatattaatgcaatgggtggtgtatggaaaaaactaccttacacatgggccttgatggtaataggaactcttgcattgactggttttccatttctttcaggattttattcaaaggatgcaattattgagtttgcttatttaagtggcagttctactggctattttgcagctggaattggtatttttactgcctttcttacatcaatttattcttggagacttttgtttaaaactttccatgggaattataataacaaaagtatagccataagtagcatgcatgagtcaccactcatcatgacaattccattaattattttagctattggagcaatattttcgggtattttgtttaaagatttgtttattggtgttgaggcttcagaaaatttttggaaagattctatattttttttagaacctttaagcaatg

SEQ ID NO: 201500 - DNA, 940 bp, Unknown
  Bacterial polypeptide expressing nucleotide sequence isolated from the Sargasso Sea
tattctactggtagtcaattgggctatatgttttttgctgctggagtaggcgcctataatgttgcgttgtttcatctatttacacatgctttttttaaagccttgctatttttaggagctggcgctgtaattcattcatttcatgaagaacaagatataaataaaatgggcggagttataaagaaactaccatacacatatgtattaatgctaataggaactcttgctttaacaggttttccttttttatcaggtttttattctaaagatgcaataatagaatttgcgtacctaagaggaaatggagttggaatacttgcagcttttgtgggtattgttacggctttattaacatcaatttactcttggagacttatttttaaaactttccatggtaattttaataataaagaacttagtattgataaaatacacgagtctcctttagttatgattgccccgttggtaatcttagcaataggagctatttttgcaggtatggcgtttaaaggtttatttatagggcatgaaatagcatatgaattttggggtcaatctataaaatttttagaaccactcagcacagatcatccaccaacatggtttttgtttttaacacctatacttgttactgctgcaattccattttcttattatttgtatcttaaaaataaaaatatagttacagggttgaaagaaatgaatgaaccaatttatcaatttttagttaagaaatggtactttgatgaaatatatgattacttatttgttaatccttcaaaaagaattggaaagtttttatggaaaaaagttgatggatcaataatagataaatttggtcctgatgggatttcaagtgtaattaaaaatttatcaatcaaggcagtgaaatttcaatcgggatttatatatcaatatgcatttgttatgttgataggtt

SEQ ID NO: 201501 - DNA, 370 bp, Unknown
  Bacterial polypeptide expressing nucleotide sequence isolated from the Sargasso Sea
atgcttgcggaatttttaaaagactatctaccgataatattatttttgataatagctttaggcttaagttttgcttttgtagcaattaattatattgctgctccaagcaaacctgatcctgagaaactttcagcctatgagtgtgggtttgaacctttcaatgattctaggatggaatttgatgtaaggttttatttggttgcaatattatttataatatttgacttagaaattgcatttttattcccatgggcgatttcacttggtgaaattggtatatatggtttctgctctatgatgttatttttatttattctaactgttggatttatttacgagtggaaaaaaggtgctttagactgggaataat

SEQ ID NO: 201502 - DNA, 304 bp, Unknown
  Bacterial polypeptide expressing nucleotide sequence isolated from the Sargasso Sea
tatgaatttacaagatagaaaaaaagatattccagatgagtttaaacaactagctcaagactttagtgataacggttttattacaacatcactagataatcttgttaattgggcaagaactggttcgttgcattggatgacatttggattagcatgttgtgctgttgaaatgatgcaaacatctatgccaaggtatgatcttgaaagatttggtgcagcaccgagagcatcgccacgtcaatcagatgtaatgatagtagcaggcacactaacaaataaaatggctcctgcattaagaaaagtt

SEQ ID NO: 201503 - DNA, 865 bp, Unknown
  Bacterial polypeptide expressing nucleotide sequence isolated from the Sargasso Sea
tggtacgaccgcgatggtgccgcccacgctgcccaaaaagctttcgtggtgaaccgggttggtgacttcggtttgctcctgggcatcctcggtctgttctgggccactggcacctttgatttcgaaggcatggccacaggcctgagcaccgccatggccgatggccaagtggcgggctgggctgctgtagccctttgcctttttgtgttcatgggcccgatggcgaagtcggcccagttcccactccatgtgtggctgcccgatgccatggaaggccccacaccgatttccgctctgatccacgccgccacgatggtggctgctggcgtgttcttggtggcgcggctggagccgctctacaacctcttcccgcaagtgctgacggtgattgccgtggtgggcacgatcacctgcttcctgggggcctccatcgcgctgacgcagatggatctcaaaaaagggctggcgtacagcaccgtgtcccagctcggttacatgatgctggccatgggctgcggagcccccgtggccggcatgttccacctggtcacgcatgccttcttcaaggcaatgctgttcctcgattccgggtcagtcatccacgccatggaagaggtggtgggccatgagccggtgttggcgcaagacatgcgcctgatgggggggctgcgcaaaaagatgcccatcaccgccagcaccttcttcatcggttgcgtggccatcagcggcatccctccactggctggtttttggagcaaagacgaaatcctgggccaagcctttggcagcttcccgctgctctgggccgtgggcttcctcaccgccggcatgaccgccttctacatgttccggctctactcctcac

SEQ ID NO: 201504 - DNA, 867 bp, Unknown
  Bacterial polypeptide expressing nucleotide sequence isolated from the Sargasso Sea
ctttgctgctggagtaggagcttataatgctgctatgtttcatctatttactcatgcttttttcaaagctttgctttttttaggatcgggatcagtcatacattcatttaaagatgaacaggatattagaaatatgggaggagtatggaaaaaattaccatacacttgggctcttatgatagtaggaacgctcgctctaacaggttttccttttttatcggggtactattctaaagatgcaataattgaatttgcttacatgagaggcaactccattggatattgggcatctttggttggaatatttactgcatttttgacagctatatattcatggagattaatttttaaaacttttcatggcagatatgaaaataaaaatttaaaattagaatcagttcatgagtcacattatgtaatgataatcccactaataattctaggaataggctcaatatttgcaggatttttttttaaagaattatttattggcactaatatagatagtgatttttggcaaaactcgattaaatttttaaatccattaagcaccgaacatccacctctttcgattgtttattcaacacctgtattagtagttttatctattccaatatcctattatttatttgtaaagaataaaaacattactagttggctagcacatgaaaacaaacctatctacaattttttaatcaataaatggtatttcgatgagttgtatgactatttatttgttaaaccatctaagagagttggaaatttcttttggaaaagtattgatttaaaaactattgatagattaggtccggatggaatttccaatttaattaacaaattatcaaacaatgctgttaaatttcaaaa

SEQ ID NO: 201505 - DNA, 938 bp, Unknown
  Bacterial polypeptide expressing nucleotide sequence isolated from the Sargasso Sea
ttttgctgctggcgtttgcgcataccatatagcaatgtttcatttattcactcacgcattttttaaagcacttttatttttgggtgctggatctgttattcactcgttcaaagaagaacaagatataacaaaaatgggaggggtttggaaaaaaattccatatacgatggtgcttatgcttatcggaacattggctcttaccggatttccttttttatctggcttttattcaaaagatgctattatcgaatttgcttatctgaaaggcacatcagttggttattacgcgagtgctataggtatttttacagcattcttaacagccatttattcttggagattgttttttaaaacattcttcggatcatataacaacaaatctatctcattagaaaaaactcatgagtctcccttagtgatgattgctccattaattgttttagctattggagctatttttgcaggatacttttttaaagatttatttttagggaatgacacaacttattggggggactccatattatttttgaattatattaaattagaaaatatcccgttttggttaattttaataactccgataattataacaatagctatcccaatttcttactatttatatattaaagaaaaaacaattttaaatggaattaaaaattcaaacattccattatacaactttttagtaaataagtggtacatagatgaaatttatgactttatttttataaatcccctaaaaagaattggaatgtttttctggaaaaagggagatcaagacacgatagacaggtttggtcccgatggaatatctaaagtaataaagcatgtgtctaacaaagctgttaagtttcagagtggctatatttatgattatgcctttgtaatgttaattggtctttctgcattaataacttttttaattttgaactaaa

SEQ ID NO: 201506 - DNA, 284 bp, Unknown
  Bacterial polypeptide expressing nucleotide sequence isolated from the Sargasso Sea
catgacagcggaatttttaaaagattatttacctataatattattcctaattatagcattaggacttagttgtgcctttatagtaattaattttatcttatctccaaaaaatccagatccagaaaagttatcagcttatgaatgtggatttgaaccattccaagattcaagaatggaatttgatgtgaggttttatttagttgcaattttatttattatttttgaccttgaaattgcatttttatttccgtgggcaatttctttgggcaatattggtatcttgg

SEQ ID NO: 201507 - DNA, 367 bp, Unknown
  Bacterial polypeptide expressing nucleotide sequence isolated from the Sargasso Sea
gatgcaggaaatgttgagcgaatatctcccaatcctcatttttctcgggatcgcggccgggattgcggtagccgcgctggtcgcgtcctatatcgtcgcccggcagcgtccggacccggaaaagatctccgcctatgaatgcggtttcgacgcgttcgacgacgcccgcggccagttcgacgtccggttctatctggtcgctatactgttcatcattttcgatctcgaaatcgcctttctcttcccgtgggcgatatcgctttccgaaatcggcctttttggcttctggtcgatgatggcgttcctcggtgtgctcacaatcggctttatctacgaatggaagaaaggcgcgctcgaatgggagtag

SEQ ID NO: 201508 - DNA, 370 bp, Unknown
  Bacterial polypeptide expressing nucleotide sequence isolated from the Sargasso Sea
atgcttgcggaatttttaaaagattatttaccgataatgctgtttttgattatagctctaggattgagtttagcgtttgtagcaattaattatattgcagctccgaaaaacccagatccagagaaactttcagcttacgagtgtggctttgaaccttttaatgactcaagaatggaatttgatgtcagattttatcttgtagcaattctatttataatctttgatctagaaattgcatttttatttccttgggcaatttcacttggtgaaattggattatttggttttttctccatgatgttatttttatttattcttactgttggatttatttacgaatggaaaaaaggagcattagattgggaatagt

SEQ ID NO: 201509 - DNA, 785 bp, Unknown
  Bacterial polypeptide expressing nucleotide sequence isolated from the Sargasso Sea
caaattttacttcacacttggttaccggatgctatggaaggacctactcctgtttctgcactgattcatgctgcaactatggtaacggcaggagtttttttagtggttagatgttcaccaatctatgaatattcagaactagctttaaatattgtaactattgttggtatgagcactgcattttttgctgcaacaattgctcttgttcaaacagatataaaaaaaataatagcatattctacttgtagccagttgggctatatgttttttgctgctggtgttggtgcatataatgtagctatgtttcatttgtttacccacgcattttttaaagctttattatttttaggctctggatcagtcatacatgcttttagagatgaacaaaatattaataatatgggcggagtatggaaaaaacttccttacacttattgcttaatgataattgggacccttgctttaacgggatttccatttttgtctggattttattcaaaagatgcaattattgaatttgcctatttaagaggaaatataacaggtttatacgctgcgggaattggaattattacagcttttctcacttcaatttattcatggagattaatttttaaaactttccatggggagtataataataaggacataaaaattgaagaaactcacgagtcacctcttggtatgttaattccgttaattttactttctgtaggtgcaatatttgctggatatacatttaaagaattatttattggtcagagtgcagaaaataatttttgggc

SEQ ID NO: 201510 - DNA, 468 bp, Unknown
  Bacterial polypeptide expressing nucleotide sequence isolated from the Sargasso Sea
gtgatatcagaaataaaggttttattattgcaagtgcagacaaactctttaattgggctagaagcggctcactatggccaatgagttttggtctagcgtgttgcgcggttgaaatgatgcacgctgcagcatctcgttatgatatggatagatatggaatgctttttagaccgagtccaagacaagccgatgttatgattgttgcaggtactctaacaaataaaatggctccagccttaagaagagtttatgatcagatggctgaaccaagatgggttgtgtcaatgggttcatgtgctaatggaggtggatattatcattactcatactctgttgttagaggatgtgatagagtggttccagttgatgtttatgtgccaggatgcccgccaactgctgaagctttaatttatggccttttgcaacttcaaaagaaaataagaagaactgcaactattgctcggtaat

SEQ ID NO: 201511 - DNA, 850 bp, Unknown
  Bacterial polypeptide expressing nucleotide sequence isolated from the Sargasso Sea
tgtcgttggtccttttggactttttcaactttagctgatgctttaaaatatatttttaaagaaataattattcctgcaagtgcaaataaagtagtttttattcttgcgccgattgtgacaatgactttagctttagttgcatgggcagtcattccgatgagtgaagaattagttttatctgacataaatgttggaattttatatttattcgcagtttcttctcttggtgtttatggaataattatggggggatgggcctcaaattcaaaatatccttttttaggtgctattagatctgcagcacaaatggtatcatatgaagtttcaatcgggataataataattaatgtccttctatgtgttggctcacttaacttaaacgatattgtaattgcgcaaaaaaacttatggtatgtaattccgctttttccaatgtttgtaatattttttatctctgcacttgcagaaacaaacaggccaccatttgacttacctgaagcagaagcagagttggttgcaggttatcagaccgaatactcaggcatgatgtatgctatgttctggctcggagagtacgcaaatattcttttaatgtgtgcaatgggatcgatattatttttaggaggttggttacctataatggatgtttatccacttaatataattcctgctccattctggatgatatcaaaaatattatttttatttttactatttgctttgataaaagctgttgttccaaggtatagatatgatcaattaatgagacttggttggaaaatatttcttccattttcattaatttatctagtatttacagcaagtttcttattttattttgataaattac

SEQ ID NO: 201512 - DNA, 946 bp, Unknown
  Bacterial polypeptide expressing nucleotide sequence isolated from the Sargasso Sea
gcccgacccccggtgtcgcccctcattcacgcggcaaccatggtgacggcgggggttttccttgtctgccgcatgtcgccgctgatggagtatgcgcccgaggccatggccttcgtcaccttcatcggggccaccaccgcctttttcgcggccaccgtgggtctggttcagaacgacatcaagcgcgtgattgcttattccacctgttcgcagcttggctatatgttcgtggctgccggtgtgggggtctatagcgtggcgatgttccacctcttcacgcatgccttcttcaaggcgatgctgttcctcggggccgggtctgtcatccacgggatgcaccacgagcaggacatgcggaactatggcgggttgcgtaagaaactgcccatcaccttctgggcgatgctgatcggcacgctggccatcaccggtgtgggtataccgctgacgcatttcggctttgccgggttcctgtcgaaggatgccgtgatcgaaagcgcctatgccagtacttcgggcggttatgccttctggatgctggtcatcgcggcgctgttcacgtctttctatagctggcggttgatgttcctcaccttctggggtgagccgcgtggcgacaagcacacccatgagcatgctcatgaaagccccaaggtcatgttgatcccgcttggcgttctggcgcttggcgcggtcttcgccgggatgatctggtacaacagcttcttcgggcataccgatcaggtggccaggttcttcaacgtcccctatgccgaagcgggtgcgcatgacgaggctgccgagggcgatggccacggggaagccaatgccgatgcgggccacggggacgaggccaccgcggccgaggatcaaggcgcagcggcggagcatcattacgtctttacgggccaacccggcgagggggccattcacatcgggccggaca

SEQ ID NO: 201513 - DNA, 772 bp, Unknown
  Bacterial polypeptide expressing nucleotide sequence isolated from the Sargasso Sea
catgtcgcaaatttggttggtacctgccttccccctgcttggttttattctgaacggtattctgggcaaactatttggaacaagatttgtcagcattgtaggcccgcttgcaattggactggcttttgcgcaatccgtggtgttgtttttccagatgcttaatacagatgggaatgttctctctgaacatttatacacctggataaaaagcggaaattttgaagcaggcataaattttcaggtggaccagctttcagggcttttcctgttgattattactggtgtcggttttctgatacatgtttattctataggctatatgaaaggggagcctggctattaccgatttttcgcctaccttaacttatttgtatttttcatgctgatccttgtactaggagatggttttttgctgatgttcgtcggttgggaaggagtaggattatgttcttatcttttaattggctattactttgagaaagattctgctggtgcggctgcaaaaaaagcctttctatttaaccgtattggtgattttggagtgctctctgcggtattgttgatttttttaaattttggatcaatcgatttcaacacggtaaattcggaagctgctgccagattggaacatggcggaattcttgtgaccattattacccttttgttgtttcttggggcaacgggtaaatccgctcaaattccactttttgtttggctacctgacgcaatggaagggccaacacctgtttctgctctgatccatgctgctaca

SEQ ID NO: 201514 - DNA, 196 bp, Unknown
  Bacterial polypeptide expressing nucleotide sequence isolated from the Sargasso Sea
gaatttgatattagattctatcttgttgcaattttatttataatttttgaccttgagatcgctttcctgttcccttgggcaatatcactaggaaaaattggtttatttggttttttttcaatgatgatttttttaggaattttaactgttggatttatatatgaatggaaaaaaggagcacttgattgggaatgaa

SEQ ID NO: 201515 - DNA, 951 bp, Unknown
  Bacterial polypeptide expressing nucleotide sequence isolated from the Sargasso Sea
cgattcttcgcctacctgaatttatttgtgtttttcatgctgatcctagtgctaggagacggatttttgctgatgttcgtcggttgggaaggagtagggttatgttcttatcttttaattggctattacttcgagaaagattccgctgctgctgctgctaaaaaagcatttctatttaaccgggttggagattttggagtgctttctgcggtactgctgatttttttaacttttggatcaattgatttcaatacaataaataccgaagcaacagctagattggagcatgacggaattctggtaaccattattactttgttgctgtttctaggggcgactggtaaatctgctcaaattccactttttgtttggcttccagacgcaatggaaggaccaacacctgtttctgctctgatccacgctgctacaatggttacagcaggattatacatagttgccagattaagtcacttgttcgtacttgcaccactaaccatgaacatcattgcatatataggagctttaactgctcttttagcagcaaccattgcaatcacacaaacagatattaaaagagtactggcttactccacggtcagtcaactcggctatatgtttttagccatgggagtcggggcatttactacaggggtattccatgtaatgacacatgccttctttaaggcgcttctatttcttggatcgggatcagttattcttgcagttcatcatgagcaggatatgcgaaaaatgggggcgctcaagaacaagctccccatcacatatataactatgctaattggtacaatggcaatttccggaattccattattttcaggtttttttagtaaggatgagattctttggtatgccttcagctcaccttttggaagcccatggttctggggtatcggttttctgactgcaggtctaacagcgttttatatgttc

SEQ ID NO: 201516 - DNA, 370 bp, Unknown
  Bacterial polypeptide expressing nucleotide sequence isolated from the Sargasso Sea
atgttatatgactttttaaaagattacgcgactatcttaatattcttattcatatcaattggaattggagtaggatttatatttttaaacttactattttctcccaataacccagatagtgaaaaattatcagcttatgaatgtggatttgaagcatttggagacgctagaatgaaatttgatgtaagattttatcttgtagccatattatttattatttttgacttggaagtagctttcctttttccatgggctgtctcacttggaaacataggcttactgggtttttggtctatgatgttttttttattaattttaactgttggttttgtatatgaatggaaaaaaggagctttagattgggagtaat

SEQ ID NO: 201517 - DNA, 283 bp, Unknown
  Bacterial polypeptide expressing nucleotide sequence isolated from the Sargasso Sea
catgttatctgattttcttaaagattatttaccaatcataatttttttaatcatagctctaggtttgagttgtgcattcgtggtaattaattttattctatcgccaaaaaaacctgatccagaaaaactttctgcctatgagtgtggttttgaaccatttgaagattcaaggctagagtttgatgttagattttatttagttgcaatattatttattatatttgatttggaaatagcctttctatttccgtgggcaatttctcttggcacatcggattactag

SEQ ID NO: 201518 - DNA, 906 bp, Unknown
  Bacterial polypeptide expressing nucleotide sequence isolated from the Sargasso Sea
gggctgggcggctgtagccctctgcctgtttgtgttcatgggcccgatggccaaatcagcccagttcccactgcatgtgtggctgcccgatgccatggagggccccacaccgatttccgctctgatccacgccgccacgatggtggctgcgggcgtgttcctggtggcgcggctggagccgctgtacaacctcttcccgcaagtgctcaccataattgccgtggtgggcacgatcacctgcttcctgggggcctccatcgccctgacgcagatggacctcaagaaagggctggcctacagcaccgtgtcccagctcggttacatgatgctcgcaatgggctgcggagccccagtggccggcatgttccacctggtcacccatgccttcttcaaggcaatgttgttcttggattccggttccgtgatccacgccatggaagaggtggtgggccatgagcctgtcttggcgcaagacatgcgcctgatgggggggctgcggaaaaagatgcccatcaccgccagcaccttcttcatcggttgcgtggccatcagcggaatccctccactggctggtttttggagcaaagacgaaatcctgggccaagcctttggcagcttcccgctgctctgggccgtgggcttcctcaccgccggcatgaccgccttctacatgttccggctctacttcctcacctttgaaggagagttccggggcaccgatagcgctgtgcagcagcaactgctcgccgcggccggcaaaggcgatgagaccgttcacggtcacgccagcagcccccatgaatcggcttggccgatgacggtgccattgatggtgctggcggtgccctcggttctgatcggtctgctaggtaccccctggaacaaacgttttgccggcctgctcaa

SEQ ID NO: 201519 - DNA, 256 bp, Unknown
  Bacterial polypeptide expressing nucleotide sequence isolated from the Sargasso Sea
aatgatttataactttttatcagaatatttatctattattttatttttatttattgctatagttttaagcattgggtttatagctataaattatttatccgcacctaataacccagatccagaaaaactatcagcttatgaatgtggttttgaagcatttggtgattcaagaatggaatttgatgttagattttatttagtggccatactttttattatttttgatttagaaatagcatttctttttccatgggcg

SEQ ID NO: 201520 - DNA, 790 bp, Unknown
  Bacterial polypeptide expressing nucleotide sequence isolated from the Sargasso Sea
cactggaataggagcttatcatgttgcaatgtttcatctttttactcatgctttttttaaggctttattatttttaggttctggttctgtaattcacgcatttaaagatgagcaagacataagacatatgggaggaattagaaaacaactcccttatacttatgtctttatgttaattggaacattggccttaacgggtttcccttttttatccgggttttactctaaagatgcgattattgaatttgcgtttttaagcaactcagttttgggaaattatgccgttgttattggaatctttactgcacttttaacctcaatatattcttggaggcttttctttaaaacttttcacggaccatataataacaaaacaattcaattaaaagacacccacgaatcacctttagtaatgctaataccattattattattatctataggcgcagtgctagcgggatttatttttaaagaaattttaataggtcatcatagtaataaattttggcaatcttccatttttttcttagaggaaatcaaacatgaatatattccaatttggtttttattattaacaccttttttagtagtcttagctataccgatttctttttattattttatttacaatacaaagattttagaagattttaaaaatactaatttaccattatataattttttgttgaataaatggtacatcgatgagttatatgaatttctttttgtaaaatcttcaaaaaaaattggttctttgctatggaaaaaaggcgatctaggcaccattgat

SEQ ID NO: 201521 - DNA, 514 bp, Unknown
  Bacterial polypeptide expressing nucleotide sequence isolated from the Sargasso Sea
cgttctattatgtgtcggttctttaaatttaagtgacattgtattagcacaacaaaacatgtggttcattattccattgttccctatgtttgttgtattctttatttcagctttagctgaaactaatagaccaccgtttgatcttccagaagcagaagctgaattggtcgcaggatatcaaactgaatattcaggaatgatgtatgcaatgttttggctcggcgagtatgcaaatattttattaatgtgtgctttaggatcaattttatttttgggtggctggctatctccaattgatttttatccatttaacataattcctggagcactatggttaatttttaagatattattattatttattttatttgctttagttaaagcaatagttccaagatacagatatgatcaattaatgagattaggctggaagatatttttaccactttcattaatatatgttgttcttacagcaagttatcttttttattttaatcttttacctactaattaa

SEQ ID NO: 201522 - DNA, 339 bp, Unknown
  Bacterial polypeptide expressing nucleotide sequence isolated from the Sargasso Sea
aatgaattatctagaatatcttcctatttttgtgtttattcttatagcagtaggactttctgcaggatttgcagtattatctggttttgttggccctaataaccctgataaagaaaagctttctgcatacgaatgtggttttgcaccttttgatgatgctagaggtaggtttgatgttagattttatctggttgcaatattatttattatctttgatctagaagtagctttcttatttccctgggctatatcactatctacaattggtattgctggatatatatctatgatgcttttcttatttattttaactgtaggctttatctacgagtggaaaaa

SEQ ID NO: 201523 - DNA, 370 bp, Unknown
  Bacterial polypeptide expressing nucleotide sequence isolated from the Sargasso Sea
aatgatttataattttttatcagaatacttatcaataataatttttttatttatagctatttttttaagtattggttttgtggtagctaattttttagctgctccttcaaacccagatccagaaaaattatcagcatatgaatgtggctttgaagcatttgatgattctagaatggagtttgatgttaggttttatcttgtagctattctttttatcattttcgatttagagatagcattcttgtttccttgggcaatatctttaggaggtataggagcgctcggtttctggtcgatgatgttttttttaggagtcctgaccattggatttatttatgagtggaaaaaaggagctttagaatgggagtaa

SEQ ID NO: 201524 - DNA, 865 bp, Unknown
  Bacterial polypeptide expressing nucleotide sequence isolated from the Sargasso Sea
aattaatttaatttgtattcttttattcataggagcaatgggtaaatctgcacaattatttttacatacttggttgcctgatgcaatggaaggtcctactcctgtatcagctttgatacatgctgcaacaatggttacagctggtgtatttttagttgttagatgttctccgatttacgaatattctccattagctctaaatctcatcacaattgttggtatgtccacagcattttttgcagcaacagtagctttgacgcaagatgatattaaaaaaataatagcttattcaacttgtagccaattaggatacatgttctttgccgctggtgttggtgcgtataatgttgctatgtttcatttatttacccatgctttctttaaagctttattatttttaggatctggttcagtaatccattcatttaaagatgaacaagatattaattcaatgggaggtgtttggaaaaaacttccttatacatggattttgatgattattggaactcttgcattaacaggatttccatttttgtctggtttttattccaaagatgcaatcatagagtttgcctacctaaaaggaaatactgttggttattttgctgctggtataggtgtatttacagctctactaacttcaatttattcttggagacttatatttaagacttttcatggtaactacaataacaaaaaattaaatatatcttctatgcatgagtcaccgatggtcatgataattccattaataattcttgcaattggttcaatattttctggatttttatttaaagatttgtttattggaattgagtcatctagtaatttttggaaaaattcaattttctttctggaaccattg

SEQ ID NO: 201525 - DNA, 370 bp, Unknown
  Bacterial polypeptide expressing nucleotide sequence isolated from the Sargasso Sea
atgttagctgattttttaaaagattatttgtcaataataattttcatctttatcgctttgggtttaagcgtgggattcatcgttttaaactttattttttcaccaaaaaatcctgatccagaaaagctttccgcttacgaatgcggattcgaagcttttgatgattcaaggatggagtttgatgttagattctatctggtggcaattttgttcatcatttttgatttggaaatagcatttctttttccttgggcagtatcattgggaaacataggtgctttgggtttttggtcaatgatgcttttccttttcatattgaccgttggatttgtttatgaatggaagaaaggggcactagattgggattgag

SEQ ID NO: 201526 - DNA, 347 bp, Unknown
  Bacterial polypeptide expressing nucleotide sequence isolated from the Sargasso Sea
tatgctttctgattttttaaaagattacttatcaataatcatttttttaataattgccttaggaataagcgtggcatttattgcagtaaattatgctttatctccaaaaaaacctgacccagaaaaattatcagcatatgaatgtggatttgaaccttttgatgattctagaatggaatttgatgtaagattttatttggttgctattttatttattatatttgatttagaaattgcttttctttttccttgggccatctctttaggtaatattggaattttaggttttgtatcgatgatgatttttttatttatattgacggtaggttttatttatgaatggaaaa

SEQ ID NO: 201527 - DNA, 298 bp, Unknown
  Bacterial polypeptide expressing nucleotide sequence isolated from the Sargasso Sea
atgattacgaactttttgtcagaatacctgtctataataatatttttatttatctcattactgttgagcataggttttattgtaataaattatattgcttctccaagcaatcctgatccagaaaaactatctgcttatgagtgtggttttgaagctttcgataatgccagaatagaatttgatgtaaggttctatttagttgcaatacttttcataatatttgatctagaaattgcctttctatttccttgggcaatatcacttggaaatatcggtttattaggtttttactcaaatg

SEQ ID NO: 201528 - DNA, 306 bp, Unknown
  Bacterial polypeptide expressing nucleotide sequence isolated from the Sargasso Sea
catgactgcggaatttttaaaagattatttaccaataatattgttcctaattattgcgttagggttgagtagtgcttttatagtaattaattttattctatctccaaaaaatccagatccagaaaagttatcagcttatgaatgtggatttgagccatttcaagactcaagaatggaatttgatgtccgcttttatttggtagcaatactttttataatttttgatcttgaaatagcatttttatttccgtgggcaatttctttaggaaatattggaattttaggtttttcctcaatgatgatttt

SEQ ID NO: 201529 - DNA, 370 bp, Unknown
  Bacterial polypeptide expressing nucleotide sequence isolated from the Sargasso Sea
atgttgtttgactttttaaatgaatacctatctataataatatttttagcaattgctttaatattaagcataggatttatttttataaattttgttttttcgcctaaaaaccctgatcctgaaaaattatcaacttatgaatgtggttttgaggcatttgatgattcaagaatggaatttgatgttagattttatttagtagctattctgtttatcatatttgatttagaaattgctttcttatttccttgggcaatttctttgggaactattggattatttggatttatatcaatgatgatatttttatttatacttactgttggatttatttatgaatggaaaaaaggagctttagattgggaataaa

SEQ ID NO: 201530 - DNA, 847 bp, Unknown
  Bacterial polypeptide expressing nucleotide sequence isolated from the Sargasso Sea
tatgttttttgctgccggggtaggtgcttataatgttgcaatgtttcatctatttacacatgctttttttaaagctttactatttttgggagctggtgctgtaattcattcatttcatgacgagcaagatataaataaaatgggtggagttatcaagaaacttccatacacatatgtattaatgctcataggtactcttgctttaacaggttttccttttttatcaggtttctattctaaagatgcaataatagaatttgcgtacttaagagggaatggagttggaatgcttgcagcttttgtaggtattgttacagctttactaacatcaatttattcctggagacttatatttaaaacattccatggtaattttaataataaagaacttagtattgataaagtacacgagtccccttttgttatgattgctcctttaattatcttagcaataggagctatttttgcaggtatggcctttaaaggtttgtttataggtcatgagatagcatatgaattttgggctcaatctataaaatttttagaaccactaagcacagatcatccaccaacgtggtttttgtttttaacgcctatacttgttacctctgcaattccattttcttattatttatatctaaaaaacacaaacatagtaaatggactgaaagaaatgaacgaaccattttatcaatttttagttaagaaatggtacttcgatgaaatttatgattatttattcgtcaatccttcaaaaaaaattggaaagtttttatggaaaaaagttgatggatcaataatagataaatttggtcctgatgggatttcaagtgtaattaaaaattta

SEQ ID NO: 201531 - DNA, 864 bp, Unknown
  Bacterial polypeptide expressing nucleotide sequence isolated from the Sargasso Sea
ataacaatagtaggtatgacaacagctttttttgctgtaagtgttgctttagtccaaactgatataaaaaaaattattgcttattcaacttgcagtcaacttggttacatgttttttgcagctggcgtaggagcttatagtgttgcaatgtttcacttatttactcacgccttttttaaagccttgttatttttgggatcgggagcggtaatacattcttttaaagatgagcaggatatcaacaaaatgggcggtgtatggaaaaaacttcctttcacatatactttaatgatcataggaactttggctttaactggatttccttttctttcaggtttttattccaaagatgcaataattgagtttgcttttttaagaggtaataatcttggtttttatgcatctagtgttggtgtatttacagctctgttaacttccatttattcttggagattaatatttaaaacatttcatggaaaatataataattcaagcgttaaaattgaatccatgcatgaatccccaatggtcatgcttcttccattaataattttagcaataggtgcaatttttgctggcattatatttaaagatttgtttataggtcatgaaacatcctatgaattttggtcaagttctatattatttttagaaccattaagcaaagatcatccaccaagttggtttttatttttaactccaatattagtaattatatcaattcctttatcttactatttatttttaaaaaatactaaaattgtagattcaattgcaaactctaataaatctttttatctttttttaaaaaacaaatggtattttgatgagatttatgagtatatttttgttcagccttcaaaa

SEQ ID NO: 201532 - DNA, 337 bp, Unknown
  Bacterial polypeptide expressing nucleotide sequence isolated from the Sargasso Sea
ataattgtatttttactagttgcacttgtattaagtgtagcatttgtggcagtcaattatttggcatctccaaaaaatcctgatccagaaaaattatcagcatatgagtgtggattcgaaccatttaatgactctagaatggaatttgatgttagattttatcttgttgcaatattatttattatttttgatttagaaatcgcttttctattcccttgggcaatatctctaggcaaaatcggaatattcggatttacatcaatgatgatcttcttatttattcttactgttgggtttatttatgaatggaaaaaaggagcattagactgggaataat

SEQ ID NO: 201533 - DNA, 942 bp, Unknown
  Bacterial polypeptide expressing nucleotide sequence isolated from the Sargasso Sea
ctacatgtttttgcagcaggagtgggagcgtataatgttgcgatgtttcatttgtttactcatgcttttttcaaggctttattatttttaggctcaggatcagtaattcatgcctttaacaatgaacaaaatatcaacaaaatgggatctgtttggagaaaaattccttacacttgggttatgatgattattggaactttagcattaactggttttccttttttatcaggtttttactcaaaagacgcaataatagagtttgcttatttaaaaggaaacactacaggaattttagcttcatatataggaattttaactgcttttttaacatcagtatattcttggaggttaatttttaaaacttttcatgggaaatataataacgaagaaataaaaattggcaaaatacatgagtccccagtagttatgattgtacctttggtactgctttccattgggtcaatatttgcaggttttatatttaaagatctttttattggtatagataattataatttttggaacaactcaatattttttttaaaacttttaagcaatgaccatccaccttttttcataattataataactcctattttagttattttatcaatacctattagctactatttttttattaaaaataagaaactgacagatttgataattacatcgaacaaacctctatacaattttttgcttaaaaaatggtattttgatgaattatataattttatttttgtgaatcccgctaaaaaaattggattatttttttggaagtccattgatataaaaattattgacagatttggaccagatggattttctgaaattattaaaattttatctttaaaaactaaaaaattccaaagtggatatatttatcaatatgcatttgttatgcttttaggtttttctgcaattttaacatatttaattttg

SEQ ID NO: 201534 - DNA, 307 bp, Unknown
  Bacterial polypeptide expressing nucleotide sequence isolated from the Sargasso Sea
atggaaaatttattgctccagtatttccctattttaatttttataggaattgcaattggattggctagtgtaattgtacttgcgtcgctaataattgctcgccaaaaaccggatacagccaaactatctgcttatgaatgtggttttgaaccatttgaagatgcccgtatcaagtttgatgttcggttttatttagttgcaattttgtttatcatatttgatctagaggtggcatttttgtttccttgggcggtgtcccttggagaaattggtgtgtttgggttttggtcaatgtttgttttcttaa

SEQ ID NO: 201535 - DNA, 754 bp, Unknown
  Bacterial polypeptide expressing nucleotide sequence isolated from the Sargasso Sea
aattttcctgcaattgatcttttgtgttttttattatttataggtgcaatgggaaaatctgcccagttaggactgcatacatggctgccagatgcaatggaaggacctaccccagtttcagctttaattcatgcggctacaatggtgactgcaggtgtgtttatggtagcaagaatgagcccattatttgaatttgcagattatactaatgtatttataacttttataggagcatcaacggcgatatttgctgctagcatagcacttactcaaaatgatattaaaagagtgattgcttactcgacttgtagccaattgggatatatgttttttgctgcgggtttaggcgcttataatgcatcaatatttcatttgatgacgcatggtttttttaaagccttactttttttatcagctggatcagtaattcacgcgttgcatcacgagcaggatatgagaaaaatgggtggtctatttaaaaaactacctttcactggcttaatgatgtggattggttctttagctattattggttttccatacttttctggttattattcaaaagaaagtatcctagaaaatgcctatttttcaacaagttatatggcaaattttgcatactttgtgggaatcttaacagctcttttaacagcgttttattcttggagattattatttcttacatttcatggagaaaatagatctgaaatctctatttatgaacatgctaatgaatcttcttgggtaatgaaat

SEQ ID NO: 201536 - DNA, 287 bp, Unknown
  Bacterial polypeptide expressing nucleotide sequence isolated from the Sargasso Sea
aatgcttgcggattttttaaaagattatctaccgataatattatttttgataatagctctaggcttaagttttgcttttgtagcaataaattatattgctgctccaagtagacctgatcctgagaaactttcagcttatgaatgtgggtttgaacctttcaatgactctagaatggaatttgatgtcaggttctatttggttgcaatattatttataatttttgacttagaaattgcatttttattcccgtgggcgatttcactcggtgaaattggtttatatggtt

SEQ ID NO: 201537 - DNA, 893 bp, Unknown
  Bacterial polypeptide expressing nucleotide sequence isolated from the Sargasso Sea
ttgtaatagagtaggtgattttggttttgctttaggaatttttctaatattttatttatttggaactgttaactactcagaagtatttcaacaaattccaactgttgtagataaaaatttatcatttttaggttttgaagttaaagcaatagacctagtttgtttacttttatttattggagcaatgggtaaatctgcccagatattgttacatacttggttacctgatgctatggaaggtccaactccagtttctgcattaattcatgcagcaacaatggtaacagctggagttttcttagttgtaagatgttctccaatttatgaatattcgccattaatactaaattttataactatcgttggaatgaccacagcattctttgctgcaactgttgctctagttcaaacagatattaaaaaaataattgcttactccacatgtagccaacttggttatatgttttttgctgctggagtaggcgcatacaatgttgctatgtttcacttatttactcacgcattttttaaagctttattatttttaggatcaggttcagtaattcacgcatttaaagatgagcaaaatataaataacatgggcggtgtatggaaaaaattaccttacacttatgctttaatgattataggaactcttgctttaacaggttttcctttcttatcaggtttttattcaaaggacgcaattatagaatttgcatatttaaaaggtaataccaccggttattatgcagctgggattggaataattacagcatttttaacatctatctattcatggagattgatatttaaaactttccatggagagtacaataataaagagattaaaatagaggaaactcacgagtctcctttggtaatgcttgttt

SEQ ID NO: 201538 - DNA, 754 bp, Unknown
  Bacterial polypeptide expressing nucleotide sequence isolated from the Sargasso Sea
ctggcgctggttgcttgggcggttataccgttcgacgcgggttgggtgctcgccgacatcaatgtcggcattttgtacctgttcgcgatctcgtctttgggggtctacggcatcatcatggcgggctgggcgagcaattcgaaatacgcgttcctgggcgcactccgttcggcagcgcagatggtttcttatgaggtagcaatcggctttgtgatcatcacggtactgatgtgcgtaggctcgctgaacctgaccgatatcgtgatggcgcagcagggcgaaggtttctggtcatggtactggttgcccctgttcccgatgttcatcattttctttatttccgcactggcggaaaccaaccggcatccgttcgatctgccggaagctgaagctgagttggtcgctggctataacgtcgaatattcggcgatgacctttgctctgttctttctgggtgaatacgcaaacatgatcctgatgagcgggatgaccgccattttgttcctcggtggttggcttccaccgttcgatatagaaccgttcacctgggttcccggaattatctggttcgcagccaagatagcgctatgcctgttcgtattcctttgggtgagggcgaccttcccgcgctatcgctatgatcagctcatgcgtctcggctggaaggtatttctgcctttctccctgttgtgggttgcggttacggccggtgcgcttattgcattcgactggcttccgaagacggccggatagg

SEQ ID NO: 201539 - DNA, 849 bp, Unknown
  Bacterial polypeptide expressing nucleotide sequence isolated from the Sargasso Sea
taaaaaagaaagtgcaaatgctgcagcgataaaagcatttgttgtaaatagagtaggtgattttggttttgctttaggaattttcttaatattttatttgtttggaactgttaattattcagaagtattccaacaaattccaacagttgtagataaaaacttatcttttttaggttttgaggttaaagcaatagatttagtttgtttacttttgtttattggagcaatgggtaaatctgcacagatattacttcatacatggctgcctgatgctatggaaggaccaactccagtttctgcattaattcacgcagctacaatggtaactgcgggtgttttcttagttgtaagatgttctccaatttacgagtattcaccgttgatattaaattttataacaattgttggaatgactacagcattttttgcagcaacagtggccctagttcaaacagatataaaaaaaattattgcttattctacatgtagccaacttggctatatgttttttgcagctggagtaggtgcttacaatgtagctatgtttcacttatttactcatgcatttttcaaagctttattatttttaggatctggttcagtaatccacgcatttaaagatgaacaaaatataaataatatgggcggtgtatggaaaaagttaccatatacctatgctttaatgattataggaacacttgctttgacaggttttccatttttatcaggattttattctaaagatgcaattatagaatttgcatatttaaaaggaaatactacaggttattatgctgctggaattggaataattactgcatttttaacatctatttactcttggagatt

SEQ ID NO: 201540 - DNA, 497 bp, Unknown
  Bacterial polypeptide expressing nucleotide sequence isolated from the Sargasso Sea
taatttaaacgatatagttatagctcaaaaagaattatggtacgtgataccacttttcccaatgtttgttattttttttatctctgcacttgctgaaacaaacagaccaccttttgatttacccgaagcggaggcagaactggttgctggttatcaaactgaatattcaggcatgatgtatgcaatgttttggctgggtgaatatgcaaatattcttttaatgtgcgcaatgggatcaatattatttcttggcggttggttacctttgatggatatttatccactaaatttaattcctcctccagtttggatgatatcaaaaattttatttttattcttattgtttgctttgataaaagctatagttccaagatatagatacgatcaactaatgagattaggctggaaaatatttttgccattttcattaatctatttagtttttacagcaagttttttattttattttgataaattaccaaaggttaatttttgat

SEQ ID NO: 201541 - DNA, 925 bp, Unknown
  Bacterial polypeptide expressing nucleotide sequence isolated from the Sargasso Sea
actttttataggtgcaatgggtaaatctgcacaattttttttacatacttggcttcccgatgcaatggaaggtccaactccagtctctgctttaattcatgctgctactatggtaactgctggggttttcttggtcgtaaggtgttccccgatatatgaatactcttccttggcattgtcattagttacaattattggcatgacaacagcaatttttgctgcaagtgtggcattagttcaggatgatataaaaaaaatcattgcatattcaacatgcagtcagcttggttatatgtttttcgcagcaggtgtaggcgcttacaatgttgctatgtttcatttgtttactcatgcattttttaaagctttactatttttaggtgcaggatcagttattcacgcattcaaagacgaacaaaatataaataaaatgggtggtgtcagaaataaacttccaatcacatatgttctaatgcttgtaggtacacttgctttaactggttttccattactctctggcttttattctaaagatgcaattattgaatttgcttatttaaagggaaatactttaggatattatgcagctagcattggaatatttactgccttattaacctctatttattcatggagacttttttttaaaacttttcatggagattttaataaccagactattagtattgataaaattcatgaatctccaatggtaatgacaattcctcttgttattctagcagttggctcgattttcacaggttatttttttaaagatttatttataagtcatgaggaaagttatcaattttggaaatcttctatattttttcttgaacaattgagcaaagaccatccacctaaatggtttttatttttgacaccatccattggtagtgctttctatacctgtggcttatttctt

SEQ ID NO: 201542 - DNA, 706 bp, Unknown
  Bacterial polypeptide expressing nucleotide sequence isolated from the Sargasso Sea
agaaagtgcaaatgcagcagcaataaaagcatttgtagtaaatagagtaggtgattttggatttgctttaggaatttttctagttttttatttgtttggaactgtaaattattcagaggtattccaacaaattccaacaataattgacaaaaaattattttttttaggttttgaagttaaagcaatagatttaatttgtttacttttatttgtaggtgctatgggaaaatctgcacagatattgcttcatacatggctgcctgatgctatggaaggtccaacaccagtttcagcattaattcacgctgcaacgatggtaactgctggtgttttcttagttgtaagatgttctccaatttatgagtattcaccactaatactaaattttataactattattgggatgactactgcattttttgcagcaacagtagctctagttcaaacagatataaaaaaaattattgcttattcaacatgtagccaacttggttatatgttttttgcagctggagtaggtgcatacaatgttgctatgtttcacttatttactcacgcatttttcaaagctttattatttttaggatctggatcagtaatccacgcatttaaagatgagcaaaatataaataatatgggaggagtatggaaaaagttaccatatacctatgctttaatgattataggaacacttgctttaacaggt

SEQ ID NO: 201543 - DNA, 358 bp, Unknown
  Bacterial polypeptide expressing nucleotide sequence isolated from the Sargasso Sea
atgcttttggaatatttgccaatatttatttttttagtctttgcggtcatttttgccagtattatgcttggcattggtttcacatttggatctagcaatcctgatcctgaaaagaattctccatatgagtgtgggtttgaagcatttgaggattctagaatgaaatttgatattagatactatttagtagcaattttgtttataatttttgatcttgaaatagcttttctatttccatgggctatagttatccatgaagttggcttgattggactattctccatggctatatttctactaatattagttgttggatttatttatgaatggaagaaaggtgctttggaatgggactaga

SEQ ID NO: 201544 - DNA, 851 bp, Unknown
  Bacterial polypeptide expressing nucleotide sequence isolated from the Sargasso Sea
atttggtctatttcaatcattggctgatgcattaaaatatgtatttaaagaaataataataccagcaagttcaaataaaattatatttattttagccccaattgtcactatgaccttagctctagtagcttgggcagtaataccttttagtgaaacatttgttattgcagatattaatgttggtatactttatttatttgctgtttcttcattgggtgtttatggaattataatgggtggctgggcatcaaattctaaatatccatttctaggatcaataagatctgcggctcaaatggtatcatatgaagtttctataggtataataattataaatgttttactttgtgtaggttcactaaatttaagcgatattgtaaaagcccaacaaaatctttggtttattataccgttatttccaatgtttattattttttttatttctgcattggctgaaacaaatagaccaccatttgatttacctgaagccgaagctgaattggtagcgggatatcaaactgaatattcgggaatgatgtatgcaatgttttggcttggtgaatatgcaaatattttattgatgtgtgctattggttcaatattgttcttaggaggctggttatctccaatagatctttttccttttaatttagtaccaggaccaatatggatgatatttaaaattttatttttgtttattttgtttgccttagtaaaagcaatagttccaagatatagatacgatcaacttatgagattaggatggaagatatttcttccattttcattaacttgggttgttttaacttcaggttatttattatatttcgatttattgccggtaaattaat

SEQ ID NO: 201545 - DNA, 766 bp, Unknown
  Bacterial polypeptide expressing nucleotide sequence isolated from the Sargasso Sea
ttttatactggctcctatagttacgatgactttagctttaatcgcttgggccgtaatcccatttagtgcaactcaggttttggctgatattaatgttggaattctttacttattcgctgtttcttcactaggtgtctatggaataataatgggtggatgggcatcaaattctaaatatccatttcttggagcaatccgttcagctgctcaaatggtgtcttatgaagtttcaatcggggtaataattatcaatgttttactttgtgttggctcattgaatttaaacgatatcgttatcgctcaacaaaatatgtggtttgtaattccattgtttccaatgtttgtaatattctttatttctgctttagcagagactaacagacctccttttgatttaccagaagcagaagctgagttggtggctggttatcaaacagaatattcaggaatgatgtatgcaatgttttggttaggtgagtatgcaaatattttattaatgtgtgcaatgggagcaatattatttttaggtggctggatgactccaattgatgtttatccatttacactagtaccaagtgcaatatggttaatattaaaaattcttcttttatttatcctttttgctttagttaaagcaatagtacctagatacagatatgatcagttaatgagacttggttggaaagtgtttcttcctctttcgctaatttgggtagtattaacagctagctatttattttattttaaccttttaccagtgaattag

SEQ ID NO: 201546 - DNA, 448 bp, Unknown
  Bacterial polypeptide expressing nucleotide sequence isolated from the Sargasso Sea
atgggactagagaatatacataaagatggatttgtacttgcaaagtctacaaacctttttgattgggcaagaacaggatcaatgtggccaatgacatttggcctagcatgctgtgctgttgaaatgatgcatgctggtgcgtcaagatatgacattgatagatttggaatgttgtttagacctagcccaagacaatcagatgttatgattgttgctggaacattagttaataaaatggcaccagctttgagaaaagtttatgatcaaatggctgatccaaaatgggttatttcaatgggttcgtgcgcgaacggaggcggttattatcattattcatatgcagtagttagagggtgcgatagaatagtgcctgttgatatttatgttccacggttgtccgcctacagcggaagctttgttatatggaattttacagttacaaaataaa

SEQ ID NO: 201547 - DNA, 202 bp, Unknown
  Bacterial polypeptide expressing nucleotide sequence isolated from the Sargasso Sea
agaatgaaatttgatattagatactatttagtagcaattttgtttataatttttgatcttgaaatagcttttctatttccatgggctatagtcatccatgaagttggcttgattggactattctccatggctatatttctactaatattagttgttggatttatttatgaatggaagaaaggtgctttggaatgggactaga

SEQ ID NO: 201548 - DNA, 425 bp, Unknown
  Bacterial polypeptide expressing nucleotide sequence isolated from the Sargasso Sea
tttttagttgtaagatgttctccaatttatgaatattcagagttagcactcaatataattactgttattggaatgagcacagctttttttgctgctacaattgcattagtccaaaccgatataaaaaaaataattgcttattcaacatgtagccagcttggatatatgttttttgcaactggtgtaggcgcatacaacgttgcaatgtttcatctatttactcatgctttttttaaggctttactttttttaggagctggttctgtaatacactctttcaaagatgaacaggatatcgaaaaaatgggtggggtatgtaaaaagatcccttacacttatgccttaatgctggtaggcacattagctttgactggcttcccttttttatctggtttttactctaaagatgcaattattgaatttgc

SEQ ID NO: 201549 - DNA, 370 bp, Unknown
  Bacterial polypeptide expressing nucleotide sequence isolated from the Sargasso Sea
gatgattgcggaatttttaaaagattatttttcaattattatttttttaataattgcactaggtcttagttgtttttttatcttactcaattttttggtttcccctaaaaatccggatccagaaaaactttctgcatatgagtgtggatttgaaccatttaatgactcaagaatggagtttgatgttagattttatttagtggcaattttatttattatttttgatttagaaatagcatttttatttccttgggcaattactcttggtagcattggttttttaggatttatttcaatgatgatttttttatttattcttacagtaggctttgtttatgaatggaaaaagggtgcccttgattgggagtaa

SEQ ID NO: 201550 - DNA, 949 bp, Unknown
  Bacterial polypeptide expressing nucleotide sequence isolated from the Sargasso Sea
gatgccatgggaggggcctacacctgtatctgcactaatacatgctgcaacaatggtaactgctggtgtatttttagttgcaagaatgagtcctctttatgagtttgcgacatttactaatttattcattacttttattggtgcagccacagctatttttgctgcctctatagccttaacgcaaaatgatattaaacgagtcattgcatattcaacatgtagtcaattaggatatatgttttttgcagcaggtgtcggagcttataatgcatcaatatttcacttaacaactcatgcattttttaaagctcttctatttctttcggcaggttctgtaattcacgcaatgcatcatgaacaggatatgagaaaaatgggaggacttttcaaaaaaataccttttactgcctcaatgatgtggattgggtctcttgcaattattggcttcccatatctatctggttactattcaaaagaaagtattttagaaaatgctttctatgcttcaaatggaatagcatactttgcatatttagtaggtattttaactgctttacttactgctttttattcatggagattattattcctcacatttcatggtgaaaatagatcaaataataaaacatatgatcacgcccatgaatcacctttagtaatgacagctccattatttattcttgcaattggttctattttttctggaatattctttgctgattattttattggatattataaaaaagaattttgggataatgctatattattaacagaaagttctcataaatatcttcctcttacacaatcattaatatcaaagtctgctgttgcagttggaattcttgtctgtgtgttgatatattcaaataatttaaacagagcaaaaaatctttcttataatttagatcctttatattctctttctaaaataaatggtatgtggatg

SEQ ID NO: 201551 - DNA, 360 bp, Unknown
  Bacterial polypeptide expressing nucleotide sequence isolated from the Sargasso Sea
cgtttctgggtgagtatttgccaattgcggtgttttttgccatcgctattgggctctctctggcgtttgttttatcggcctttatttttggtaatcaacgccccgacagcgaaaaaatgactgcatatgaatgtggctttgacgcctttgacgactcacgccggcagtttgacgtgaggttctatttggttgcgattttattcataatttttgaccttgagatcgcatttctgttcccgtgggcggtcgcattgggtgggattgggttgtttggattttggtccatgatgctgtttctagccgtgctgaccattggatttatatatgaatggaaaaagggagctctggaatgggagtgat

SEQ ID NO: 201552 - DNA, 430 bp, Unknown
  Bacterial polypeptide expressing nucleotide sequence isolated from the Sargasso Sea
aatgtttgtaatattttttatatccgctttagcagaaacaaatcgacctccttttgatttacctgaggcagaggcagaattagttgctgggtatcaaactgaatattctggcatgatgtatgcaatgttctggttaggtgagtacgcaaatattttattaatgtgtgctttaggatcaattttattcttaggaggctggctttcgcctattgatttatatccgtttaatttgattccgggagctatttggttaattttaaaaatattacttttatttgttttatttgcattagttaaagcagttgtaccaagatatagatatgatcaattaatgagattgggttggaaaatatttcttcccttgtctctaacttatgttgttttgactgcgagttatttattttattttaaccttttacccacaatctag

SEQ ID NO: 201553 - DNA, 373 bp, Unknown
  Bacterial polypeptide expressing nucleotide sequence isolated from the Sargasso Sea
tatgattgttgcggattttttaaaaaattactttcctattatattattcctaataatagcattaggtttaagttgtgcatttatttttttaaattttgtactttctcctaaaaaccctgatccagaaaaattatcagcttatgaatgtggatttgaaccatttaacgattcaagaatggaatttgacgtaagattttatcttgtagccatactatttattatatttgatttagaaatagcatttttatttccttgggctatttcattgggaactattggtgtctttggatttacttcaatgatgatatttttattaatattgactgtaggttttatttatgagtggaaaaaaggagctttagactgggagtaa

SEQ ID NO: 201554 - DNA, 325 bp, Unknown
  Bacterial polypeptide expressing nucleotide sequence isolated from the Sargasso Sea
ttttgatatagctttaggcttaagtcttgcttttgttgcaattaattatattgctgctccaagcaaacctgatcctgagaaactttcagcttatgaatgtgggtttgaacctttcaatgactctagaatggaatttgatgtcaggttttacttagttgcaatattatttataatttttgatttagagattgcatttctattcccatgggcaatttcacttagtgaaatcggtttatatggattctgctcaatgatgttatttttatttattttgactgttggatttatttatgagtggaaaaaaggtgctttagattgggagtaa

SEQ ID NO: 201555 - DNA, 375 bp, Unknown
  Bacterial polypeptide expressing nucleotide sequence isolated from the Sargasso Sea
attgggattagaaactgataataatttaatcgatcaacagggtccagggttcatcatcacttctgttgataagcttgtaaattgggctagaaccggatcgatgtggcctgtcacttttggcttggcctgctgtgctgttgaaatgatgcatgcaggagcatcaagatatgatacagatcgttttggtgtattctttaggccgagcccaagacaatctgatgtcatgattgtcgctggtacattggttaataaaatggcgccagcactcagaaaggtttatgaccaaatggcagaacccaaatgggtcatctctatgggatcatgtgcgaatggaggtggttactatcatcactcatattctgtggtcagaggttg

SEQ ID NO: 201556 - DNA, 358 bp, Unknown
  Bacterial polypeptide expressing nucleotide sequence isolated from the Sargasso Sea
gatgcttgaaaactacctgccaatagcaatttttataatcatagctggagtactaggcttattgatgcttggcttgggatttctctttggaaagggcgctaaaactaaagcaaaactctccccttatgaatgtggttttgaggaatttgaagatgcccgaatcccattcgatgtaagatattatttagttgccatcctattcataatttttgatctagaaattgccttcttatttccttgggcaatagcgcttgatgagataggtcatgtaggtcttatttcaatggtaatttttcttcttgttttggttatagggtttgtgtacgagtggaacaaaggagctttggattgggattag

SEQ ID NO: 201557 - DNA, 331 bp, Unknown
  Bacterial polypeptide expressing nucleotide sequence isolated from the Sargasso Sea
atgatttataactttttatcagattacttatctataataatatttttatttatagctttatttttaagcataggatttattttagtaaattttttagcttcacctagcaatcctgacccagaaaaactctctgcctatgaatgtggtttcgaggcttttgatgactctagaatggaatttgatgttagattttatttagtagctattttatttataattttcgatttagaaattgcatttcttttcccatgggcaatatctttaggaaatttaggtgctttaggttattggtcaatgatggtgtttctaggaacattaacaataggattta

SEQ ID NO: 201558 - DNA, 886 bp, Unknown
  Bacterial polypeptide expressing nucleotide sequence isolated from the Sargasso Sea
ttttgggaattagttggaatgtgttcttacttgttggttggtttttggtatgacagagatggtgctgcccacgctgcacaaaaagcatttgtcgttaacagagttggagactttggattattactaggcattcttggtctattttgggcaacgaatagttttgattttaatgagatagctactggaatttcccaatcagtctctgataattcattacccatttgggcagctttacttctttgttttttagtttttttagggccaatggcaaaatctgcgcagtttcctcttcatgtatggttgcctgatgctatggagggcccaacaccgatttctgcacttatccatgcagcgacaatggttgctgcaggaatatttttggtagctaggcttcaacccttatattcaatattcccttctattcagtttattatcgctttagttggaacaattacttgttttttaggtgcttctatagccttgactcaaatggatttaaaaaaggggttagcttatagcacagtttctcagcttggttacatgatgcttgcgatgggttgtggagctccaatagcaggaattttccatttagttactcatgcttgctttaaagcaatgctatttctaggatcgggttctgtaattcatgctatggaagaagttgtaggtcatcagcctgtcttagctcaagatatgagattgatgggtggtttaagaaaaaaaatgccatatacatctgcaactttcttaataggttgtgtagctataagcggtattcctccattggctggcttttggagtaaagacgagatacttggaaatgcatttatatcatttccagctttttggtttgtaggactcttaacggcaggtatgactgcttttt

SEQ ID NO: 201559 - DNA, 260 bp, Unknown
  Bacterial polypeptide expressing nucleotide sequence isolated from the Sargasso Sea
catgactgcggaatttttaaaagattatttacctataattttgtttttaataattgcatttggtttgagttgtgcatttatagtgataaattttatattatcaccaaaaaacccagatccagaaaaattatcagcttatgagtgtgggtttgaaccttttcaagattcaagaatggaatttgacgtaaggttttatttagttgctatactctttataatttttgatttagaaattgcttttctttttccatgggcaattt

SEQ ID NO: 201560 - DNA, 896 bp, Unknown
  Bacterial polypeptide expressing nucleotide sequence isolated from the Sargasso Sea
ccttttcgcagcttcagttgcattagtacaaaatgatattaaaagaattattgcatactcaacttgctctcaattaggttatatgtttgtagccgctggagtgggtttttatcaagctgcaatgtttcatttatttacgcatgccttttttaaagcgttgttgtttctttgtgctggttctgtgatacactcaatgcatcatgaacaagacattagaaagtttggcggattaagaaaaaaattacctgccacattttttgccatgctaattggcacgcttgcaattactggttttggcttgcccttaagttatgatatttttcatttttatattggtttgtcaggttttatttcaaaagacgccattattgaaggtgtatttgctgctcaacgctcctctagcatgtttgctttctggtccttagtgttgtcagctttatttaccagtttttatagttggcgattaatttttttaaccttcttcggagagtataagggggaagcagatctactgcaacatgcacatgaacctgcaaaaacgatgctaataccgttattttgcctttcgattggagcaatttttaccggaatgatattttcaggaatattcgtaggtaaagcatcgtctgagtttttcagttctgccatttttaataacgacgctaatactattctttacgattttcattttgtacccttttgggttaagttaatgccttttatttcgatgttggttggtttttttctagcatttacattttacatcagtaataaaacactatcgtctaggctatctaaccaacatttagccctttacagatttctttataacaagtggtattttgatgagtttttcaattttataattgtaaaacccgatattgagtttaggtaga

SEQ ID NO: 201561 - DNA, 370 bp, Unknown
  Bacterial polypeptide expressing nucleotide sequence isolated from the Sargasso Sea
tatgcttgcggaatttttaaaagattatttaccaataatattgtttttgataatagctttaggattgagtttagcttttgtagcgattaattacattgcagctccaaaaaacccagatccagaaaaactttcagcttatgaatgtggatttgaaccttttaatgactctaggatggaatttgacgtcagattttatttagttgcaatattattcataatatttgatttagaaattgcttttttattcccttgggcaatttcacttggtcaaattggattgtttggtttctgttctatgatgttatttttattcattcttacagtaggatttatttatgaatggaaaaaaggagctttagattgggagtaa

SEQ ID NO: 201562 - DNA, 519 bp, Unknown
  Bacterial polypeptide expressing nucleotide sequence isolated from the Sargasso Sea
taaatgttttactttgtgtgggatctcttaatttaagcgatattgttttggcacaaaaaaatttgtggttcgtaataccattatttccaatgtttgtaatattttttatatctgctttggccgaaactaatagaccaccgtttgatttaccagaagccgaagctgaattagttgctggatatcaaactgaatattctggaatgatgtatgcaatgttttggttaggagagtatgcaaatattttattaatgtgtgcaatgggatcaatattgtttttgggaggttggttgccattagttgatttttttccattcaacatcataccaggccctttgtggctgatatttaaaattttatttttatttgttttatttgctttagttaaagctacagttccaagatatagatacgatcaattaatgagattgggatggaaaatttttcttccgttttctttattgtatgttgttttgacagcaagttttttattatactttaatttattaccaacaaattaat

SEQ ID NO: 201563 - DNA, 716 bp, Unknown
  Bacterial polypeptide expressing nucleotide sequence isolated from the Sargasso Sea
tatgttttttgcagcaggtgtaggcgcttataatgcatcaatatttcacttaacaactcatgccttttttaaagctcttctatttctttctgcaggttctgtaattcacgcaatgcatcatgaacaggatatgagaaaaatggggggacttttcaaaaaaataccttttactgctacaatgatgtggattggatctcttgcaattattggtttcccatatctatctggttactattcaaaagaaagtattttagaaaatgctttctatgcttcaaatggaatagcatactttgcatatttagtaggtattttaactgctttacttactgctttttattcatggagattattattcctaacatttcatggtgaaaatagatcaaataataaaacatatgatcacgcccatgaatcacctttagtaatgacagctccattatttattcttgcaattggttctattttttctggaatattctttgctgattattttattggatattataaaaaagaattttgggataatgctatattattaacagaaagttctcataaatatcttcctcttacacaatcattaatatcaaagtctgctgttgcagttggaattcttgtctgtgtgttgatatattcaaataatttaaacagagcaaaaaatctctcctataatttagatcctttatattctctttctaaaaataaatggtatgtggatg

SEQ ID NO: 201564 - DNA, 725 bp, Unknown
  Bacterial polypeptide expressing nucleotide sequence isolated from the Sargasso Sea
ggccgtaatacctttaagtgagaagatggtaatcgctgatataaatgttgaaatactatatatttttgcaatttcctctttaggtgtttatggaattttaatgggtggttgggcatcaaattctaagtatccctttcttggcgcagtaagatctgctgcacagatggtttcttacgaagtgtcaattggaataatcattattaatgttcttttgtgtacaggttcattaaatttaagtgaaattgttttggcacaacaaaatttatggtttgtaattcctcttttcccaatgtttgttattttttttatttccgcacttgcagaaactaatcgacctccatttgatttaccagaagccgaagctgaattggtggccggatatcaaacagaatattctgggatgatgtatgcaatgttttggcttggagaatatgcaaacattctattgatgtgtgcacttggttcaattttatttcttggcggttggttatctcctattgatatttatccattaaatttaatcccaggtgctgtatggatgataataaaaatattaattttatttttcatgtttgcaattataaaagcaatagttccaagatacagatatgaccaacttatgagattaggctggaaagtatttttacccttttctttaatatatgttgtattgacagcaagttttttaatttattttgacttacttccaaacacaggaaattaaa

SEQ ID NO: 201565 - DNA, 370 bp, Unknown
  Bacterial polypeptide expressing nucleotide sequence isolated from the Sargasso Sea
atgatttataattttttatcagattacttatcaataataatttttttattcatagctttatttttaagcgttggttttattttagcaaattttttagcatctccatctaaccctgatcctgaaaagctatcagcatatgaatgtggttttgaagcattcgacgattctagaatggagttcgatgttcgattttatttagtagcaatattgtttataatttttgacttggaaattgcctttctttttccatgggcaatatccttgggtaatttaggagccttgggattttggtcaatgatgatatttttaggtgtactaacaattggatttatttatgagtggaaaaaaggagctttagaatgggagtaaa

SEQ ID NO: 201566 - DNA, 804 bp, Unknown
  Bacterial polypeptide expressing nucleotide sequence isolated from the Sargasso Sea
ggttattactttgagaaacattccgctgcagaagcctgcaaaaaagcgtttttgtttaatcgtgtaggagattttggagtgctttccgccgtgctcttgattttcctcagtatcggcagtcttgaattcaacacggttaatgcccaggctgcagaccaatttgaatacggaggagttttggtgacggtgatcaccttgctgctttttcttggagcaactgggaagtcggcgcagattccgctctacgtatggcttcctgatgcgatggaaggtccgacaccagtttccgccctgatccatgcggccacaatggtcactgccggactctacatggttgcccgactcagccacctgtttatgctggcccctgtaacaatgaatgtaatcgcagtagtcggaacggtgactgctctcatggctgccaccatcgccattactcaaacggacatcaaacgcgttctggcctattccaccgtgagtcagttggggtatatgtttcttgccatgggtgtgggcgccttcacagcgggtatttttcacgtcatgacccatgccttcttcaaagctctgcttttcctggggtcaggatcagtgattcacgcgatgcatcatgaacaggatatgatgaggatgggggctttaagaaaaaaacttcccatcacttacctcactatgatggctggaacccttgcgattgcaggaattccgttcttttcaggttttttcagtaaggatgaaatcctttggaaagctttcagttctcccctcggtggaggtgttttttgggcactcgggttcctaact

SEQ ID NO: 201567 - DNA, 367 bp, Unknown
  Bacterial polypeptide expressing nucleotide sequence isolated from the Sargasso Sea
tttgagtgacaatttaattgaatatttgccaatttttatttttataattttttctataattataagcataggctttgttttttcagcatttgttgttggaaatcagaatcctgatcccgaaaaaaactcaccatttgaatgtgggtttgatgaatttgaggatactagggtagagtttgatgtaagattttatctggttgcaattttatttataatttttgatttagaaatagcttttttatttccatgggctgtttcacttggaaatataggtctttttggcttttggtcaatgatgctttttttgctagttttaactataggatttatttatgaatggaaaaagggtgcactggaatgggagtaa

SEQ ID NO: 201568 - DNA, 382 bp, Unknown
  Bacterial polypeptide expressing nucleotide sequence isolated from the Sargasso Sea
tatgcgggagacccaattgccggaatttttatccgaatatttaccaatcgccattttttttgcgattgcggtgggtttgtccgcggcctttgtggccacagcgttcattttcggcaatcagaggccggatgaggaaaagatggccgcctacgaatgtggctttgacgcttttgaggactcgcggcggcagtttgacgtgcgtttctacctcgtagcgatcctgtttatcatttttgatctggaagttgccttcttgttcccatgggccgtctcgcttggcgggatcggggtgtttggcttctggtcgatgatggtgtttcttgccgtgctgacaattggcttcatctatgaatggaaaaaaggggctctggaatgggagtga

SEQ ID NO: 201569 - DNA, 478 bp, Unknown
  Bacterial polypeptide expressing nucleotide sequence isolated from the Sargasso Sea
ctgcacaaaaagaaattatggtatgtgataccgcttttcccaatgttcgtaattttttttatatctgcactggcagagaccaacagacctccttttgacttaccagaggcagaagctgagttagtggctggttaccaaactgaatactcgggcatgatgtacgctatgttttggttaggtgagtatgcaaatatacttttaatgtgtgctatggggtcaatacttttcctcggaggctggctaccaataatggatatctaccctctaaatttaattcctgccccactatggatgatattaaagattttatttttatttttattatttgctctaatcaaagctattgttccaagatatagatatgatcaattaatgagattaggttggaaaatatttttaccgttttctctaatttatcttgtgatgaccgcaagttttttattttattttgacaaactaccgaaggtaaatatttaat

SEQ ID NO: 201570 - DNA, 948 bp, Unknown
  Bacterial polypeptide expressing nucleotide sequence isolated from the Sargasso Sea
ttggttacttcagacaattttttacaattattctttggatgggaaggagtaggtctttgttcgtatttcttaattggtttttggtttaaaaaaaaagctgcaaatgcggccgccattaaagcttttgtagttaatagagttggagattttggttttgctcttggtatttttttaattttttattattttggaacagttaactatgatgaggtattcaatcaaattcaaactttgaatgcaaaaaatataaattttcttggttttgaattaaaatcaatagatttaatttgtatattgctatttataggtgcaatgggaaaatcagcccagatttttttacacacttggttacccgatgcaatggaaggaccaacacctgtatcagcattaatccatgccgcaacaatggttaccgcaggtgtttttttaattgtaagatgttctcctatttatgaatattcagaattagcactcaatataattactattattggaatgagtacagctttttttgctgctacaattgcattggtccaaactgatataaaaaagataattgcttattcaacatgtagccagcttggatatatgttttttgcaactggtgtaggcgcatacaacgttgcaatgtttcatctatttactcatgctttttttaaggctttgctttttttaggagctggttctgtaatacactctttcaaagatgaacaggatatcgaaaaaatgggtggggtatttaaaaagatcccttacacttataccttaatgctggtaggcacattagctttgactggcttcccttttttatctggtttttattctaaagatgcaattattgaatttgcttatttaagaggaaatgtaactggtatttatgcagctggtattggaatttgtactgctatgttaacagcaatttactcatggagattattttttaaaact

SEQ ID NO: 201571 - DNA, 832 bp, Unknown
  Bacterial polypeptide expressing nucleotide sequence isolated from the Sargasso Sea
ttagttgtaagatgttctccaatatatgaatactctcctttaattttagatttaattactatcgttggaatgaccactgcactctttgctgcaacagtagctctagttcaaacagatattaaaaagataattgcttactctacttgtagtcagcttggttatatgttttttgctgccggagtaggtgcttacaatgttgccatgtttcatttatttacgcacgcattttttaaagcacttttatttcttggatctggttcagtaatccatgcatttaaagatgaacaaaatatcaataatatgggcggcgtgtggagaaaattaccatatacatatgctttaatgattataggaacacttgcattaacagggttcccttttttatcaggtttttattctaaggatgcaataatagaatttgcatatttaaaagggaatactactggtttctatgctgctggtattggaataattacagcatttttgacttccatttattcatggaggctaatttttaaaactttccatggtgaatataataataagaaaattgatataagtgaaactcacgaatctccactagttatgttgttcccattaattattttatcaataggtgctatttttgctggttttttatttaaagatctttttattggtcatggtgataatttattttgggcagagtctattaaatttttaaaacctttgagtacagaacacccaccaacatggtttttacttttgacaccttgtttagtcatattatcaattcctatttcttattatttatttgtaaaaaataaagatttaccaaaagctatcgcatcaa

SEQ ID NO: 201572 - DNA, 892 bp, Unknown
  Bacterial polypeptide expressing nucleotide sequence isolated from the Sargasso Sea
tctgataattttatacaattattttttggatgggaaggcgttggtttatgttcatattttttaataggattttggtttaaaaaagaaactgctaattttgcagcgataaaagcttttttagtaaatagagttggagattttggttttgctttaggaatttttttaattttttatttatttggtacggttaattattctgaagtctttgagcttattccaactattgaaaataaagaactgagttttttaggttttgaagtaaatgctattgacttaatttgtttacttctctttatcggagcaatgggtaaatcagctcagattttacttcatacttggttaccggatgcgatggaaggtccgacacctgtttctgctcttatacatgcagcaacaatggtcaccgcaggtgtttttttggtagtacgatgttcgccaatttatgaatattctgatcttgcattaaatgttattaccatagttggaatgactacagctttttttgcagcctctgtagcactagttcaaacggacataaaaaaaataattgcatattcaacttgcagccagttaggatatatgttttttgctgcaggagtaggtgcatataatgttgcaatgtttcatttatttacacatgctttttttaaagctttattatttttaggttcgggatctgttattcacgcatttaaaaatgagcaaaatatcaacaaaatgggaggggtatggaaaaaactaccatatacatacgtcctaatgataattggcactttagctttaacaggttttccactattatctggattttactctaaagatgctattatagagtttgcatatttaaaaggaagtaccgcgggatattatgctgcaggaataggtattttta

SEQ ID NO: 201573 - DNA, 760 bp, Unknown
  Bacterial polypeptide expressing nucleotide sequence isolated from the Sargasso Sea
ataggtattaatgtaaatgctgttgacttaatatgtttacttttatttataggagctatgggaaaatctgctcagatttttcttcatacatggctaccagatgccatggagggacccacgccagtatctgctttaattcatgcagcaactatggtaaccgctggagtttttttggtagttagatgttcgcctatatatgaatattcagagttagcgctgtcgataataactattgttggcatggttacagcgctttttgcagcaagtgtagctttggtacaaacagacataaaaaaaattatagcgtattcaacatgtagtcaacttggatatatgttttttgcagctggagttggagcctatagtgtagctatttttcatttatttacacatgctttttttaaagcattattatttttaggatcaggttctgtaatacactctttcaaagatgaacaggatattaacgaaatgggtggtgtatggaaaaaactaccttatacctatgctttaatgatcattgggacattggcactaactggattcccatttctttcaggtttttactcaaaagatgcaataatagaatttgcatttttaagagggaatagtcttggtatttatgcatcaagcatgggtgtctttacagctttattaacttctatttattcatggagacttatatttaagacttttcacggaagatacaataattcaaaaataaaaattgatgctatgcatgaagctccaatgactatgc

SEQ ID NO: 201574 - DNA, 213 bp, Unknown
  Bacterial polypeptide expressing nucleotide sequence isolated from the Sargasso Sea
tcagcgattcaagaatggaatttgatgtaagattttatttagtggcaatattatttattatcttcgatttagagattgcttttttatttccttgggcaatttcgttaggaaaaattggtttattaggatttgtttcaatgatgatttttttatttattttaaccgtcggatttatatatgaatggaaaaaaggcgctttagattgggaataga

SEQ ID NO: 201575 - DNA, 908 bp, Unknown
  Bacterial polypeptide expressing nucleotide sequence isolated from the Sargasso Sea
tgttttttagtttttctagggccaatggctaaatccgctcagtttcctcttcatgtgtggttaccagacgcaatggaaggtcctacaccaatttctgcacttatccatgctgcaacaatggttgcagcaggaatctttcttgtagcaagacttcaacctttgtattcaatattcccctctattcagttcattattgctttagttggtaccattacttgttttttaggagcctctatagctttaactcaaatggatttaaaaaaaggtttagcatatagcacagtttctcagcttgggtatatgatgctcgcaatgggttgtggagcaccagttgcaggaatttttcatttagtaactcatgcttgctttaaagcaatgctatttttgggatctggttcagtaatacatgctatggaagaagtagttggccatcagcctgtattagctcaagatatgagattgatgggcggtttaagaaaaaaaatgccatatacgtcaacaacatttttaataggttgtgtagcaattagtggaattcccccattggcaggattttggagtaaagacgagatactcggaaatgcttttatatcatttccagctttttggtttgtaggacttttaacagcgggtatgactgctttttatatgtttaggctttatttcttgacatttgaaggagatttcagaggggagaataaagaattgcaaaaacagcttttaacagcctccgaaacaaacctagatgatgaaaatgaagaagagcatgaagaacatggctctattcatgagtcaccttggtcaatgacatttcccttggtatttctagctgtaccttctgtaataatcggttttatgggacttccatgggatagcaaaattgcaaatttactagatcctgaagaagc

SEQ ID NO: 201576 - DNA, 370 bp, Unknown
  Bacterial polypeptide expressing nucleotide sequence isolated from the Sargasso Sea
catgatttacaattttttaacagactacctatcaattataatatttttatttatagctttattcttaagcataggttttattttagcaaattatttagcttcaccctccaatcccgatcctgaaaaattatctgcatatgagtgtggatttgaggcatttgatgactcgagaatggaatttgacgtccgattttatttggtagcaattttattcataatttttgatcttgaaatagcatttctttttccctgggcaatttcgcttggaagcttaggtgcgcttggtttttggtcaatgatgatctttttaggagttcttaccattggatttatttatgagtggaaaaaaggagctttggaatgggaataa

SEQ ID NO: 201577 - DNA, 370 bp, Unknown
  Bacterial polypeptide expressing nucleotide sequence isolated from the Sargasso Sea
atgcttgcggaatttttaaaagattatctaccgataatactatttttgattatagctctaggattgagtttagcctttgttgctattaattatattgcagccccaaaaaacccagatccagaaaaactttcagcttatgaatgtggttttgagccatttaatgactccaggatggagtttgatgtaagattttatctagttgctatattatttataatattcgatttagaaattgctttcttgttcccctgggcaatttctcttggtcaaattggtttatatggtttctgctcaatgatgttatttctatttattttaacagttggattcatttatgaatggaaaaagggagctttggattgggaataat

SEQ ID NO: 201578 - DNA, 777 bp, Unknown
  Bacterial polypeptide expressing nucleotide sequence isolated from the Sargasso Sea
agataaaaatttatcatttttaggttttgaagttatagcaatagatttaatttgtttacttttatttattggagcaatgggtaaatctgctcagatattgctacatacttggctacctgatgctatggaaggtccaacaccagtttctgcattaattcatgctgcaacgatggtaacagctggtgttttcttagtagtaaggtgttcaccaatttacgaatattcaccgttaatactaaattttataactattgttggaatgactacagcattctttgcagcaaccgtagctctagttcaaacagatataaaaaaaatcattgcttactctacatgtagtcaacttggctatatgttttttgcagctggattaggtgcatacaatgttgcgatgtttcacttatttactcatgcatttttcaaagctttattatttttaggatctggttcagtaatccacgcatttaaagatgagcaaaatataaataatatgggtggtgtatggaaaaagttaccatacacctatgctttaatgattataggaaccctcgctttgacaggttttccatttttatctggattttattctaaagatgcaattatagaatttgcgtatttaaaaggcaatactactggttattatgcagctggtattggaataattacagcatttttaacatctatttactcatggagattgatatttaaaactttccatggtgagtacaataataaagaaataaagatagaggaaacacacgagtctccttcagtaat

SEQ ID NO: 201579 - DNA, 370 bp, Unknown
  Bacterial polypeptide expressing nucleotide sequence isolated from the Sargasso Sea
atgcttacggaatttttaaaagattatctaccgataatattatttttgataatagctttgggcttgagtcttgcttttgttgcaattaattacattgctgctccaagcaaacctgatcctgagaaactttcagcatatgaatgtggatttgaacctttcaacgactctagaatggaatttgatgtaaggttttatttggttgcaatattatttataatatttgacttagaaattgcatttttattcccgtgggctatctcactcggtgaaatcggattatatggtttctgctctatgatgttatttttatttattttaactgttggatttatttacgagtggaaaaaaggagctttagactgggaataaa

SEQ ID NO: 201580 - DNA, 370 bp, Unknown
  Bacterial polypeptide expressing nucleotide sequence isolated from the Sargasso Sea
aatggttgcggaatttttaaaagattattttccaataattttattcctaattatagcattaggattaagctttgcttttattatattgaattatttgttatcaccaaaaaaacctgaccctgagaaattatcatcttatgaatgtggttttgaaccattcaacgattcaagaatggagtttgatattagattttatttagttgcaatattgtttataatttttgatttagagatagcctttttatttccttgggccatatctttgggaaatattggtttgttaggatttatttcaatgatggtatttttaattattttaacagttggatttatttatgaatggaaaaaaggtgctctagattgggagtaa

SEQ ID NO: 201581 - DNA, 886 bp, Unknown
  Bacterial polypeptide expressing nucleotide sequence isolated from the Sargasso Sea
gccgggaaaaaggcattcatcgtaaaccggatcggcgatgttgggtttcttgtcgccatgttcctgctgttcaaaaattttggcagtgtcgatttcatctcgatattccaagatgctgacacgctcatttacggtggtggcttggtcaccgcgataacgctcttcttcttcatcggagccataggtaagagcgcgcaaattcctctgtacgtgtggcttcctgatgccatggccggcccgactcctgtgtcggctctgattcacgcagccactatggttacggctggggtttatctcgttgcccggtcctccgtcctcttcgctctcgcaccgttctcaagtgcgatagtcgcgggggttggagtgctgacggccctttttgccgcgactattgcactgaagcagaatgacatcaagaaggtgctagcgtactccaccgtttcccaactcggatacatgttcttgggcgtcggtgtaggtgcatatgctgctggtgtgtttcacttaatgacccacgccttctttaaggctcttctctttcttgggtcaggtgcggtgattcactcaatgcatgaggcttatcacgcgacgcacagccacgaagatgcgcaagacatgaggaacatgggcggtcttcacaggcctatgcgtatcacctgcatcacaatgtggattgctacccttgcgattgcggggatttggcctttcgcgggcttcttttcgaaagacgagattatatggtatgcgggtgcttgggcgggtgctgaaggggcgccctatccgcaactgtataccgtctattggatccttgcgctggtagctgctctgctgactgcattctacatgactcgaatgatggtcatgacatttcacggtaagaaccgga

SEQ ID NO: 201582 - DNA, 811 bp, Unknown
  Bacterial polypeptide expressing nucleotide sequence isolated from the Sargasso Sea
gcagctaaagcaggaaataaagcattcgtattaaatcgaattggagattttggttttttgattgctttaatgatgatattaaatacctatgatacgttttcatttaaaacagtttttgcaacaacattaataaatcagccacaaaatctagatcttattgttgtcttcctcatgattggtgcttttggaaaatcagcacaatttccattatttagctggttgccagacgcaatggaaggaccaactccagcaagtgctttgattcatgctgcaacaatggtgacagccggtgtttttatgctggttcgaatttctccgctattacagttttcagagttatcaagcatcttaattataggtattggtctcttaacagctttaatctcagcttttgctgcaataaatcagaacgatattaaaaaggtacttgcttactcaacaatttcacagctgggatttatgtttatagcaattggggctggagcatatgttgcagcaatttttcacttagttacacacgcatttttcaaagcattacttttcctaggtgctggtgctgtaatacatgaaatgcatcacgaacaaaatattcaaaagatgggtggtttaaagaaaaaaatgccaatgaccgcagcaatgatgggtatagggactttagcaatttcaggaatacctccacttgcaggcttttggtctaaagatgaaattcttgcatctactttcgctaatggtggaatttattatggattctggggactctccttacttgcagctattatgactgctttttatatgggaagacattggttat

SEQ ID NO: 201583 - DNA, 652 bp, Unknown
  Bacterial polypeptide expressing nucleotide sequence isolated from the Sargasso Sea
ttcttctcttggagtatatggaataattatgggcggatgggcttcgaattcaaagtatccatttcttggtgctattagatctgctgctcaaatggtttcgtatgaagtatcaattggtataattataataaatgttctcttatgtgttggatctctaaatttaaaagacattgtattagcacaaaaagaattgtggtacgtaattccattgtttccaatgtttgtaatcttttttatttcagctttagcagagactaatagaccaccattcgatttacctgaagcagaggcagaattagttgcaggttaccaaacagaatattccggaatgatgtatgcaatgttttggttaggtgaatatgctaatattcttttaatgtgtgcaatgggtgcaattctttttcttggaggatggttacctataatggatatttatcctttgaacttaattcctgcgccaatatggatgattttaaaaatattatttctctttttattatttgcattaatcaaagcgattgtaccaagatatagatacgatcaacttatgagattaggttggaaaattttcttacctttctctttaatatatttagtttttactgctagttttttattttattttgataaattgcccaaaggaaatttttaa

SEQ ID NO: 201584 - DNA, 370 bp, Unknown
  Bacterial polypeptide expressing nucleotide sequence isolated from the Sargasso Sea
atgatttacaattttttaacagactatttatctataataatttttttatttattgctttatttataagcattggttttatcttaataaactttatatcatcccctagcaatccggaccctgaaaaactttcagcatatgagtgtggctttgatgcatttgatgactctagaatggaatttgatgttcgattttatctggtagcaatactttttattatattcgatctagaaatagcgttcttgtttccatgggctattacgttaggaaaaatcggaatatttggattttggtctatgatgatatttttagcagtattaaccattggttttatctatgaatggaaaaagggagcattggagtgggaatgaa

SEQ ID NO: 201585 - DNA, 571 bp, Unknown
  Bacterial polypeptide expressing nucleotide sequence isolated from the Sargasso Sea
agatcggcggctcaaatggtgtcttacgaggtatccataggggtaataattattaacgtattattgtgcgttggatcacttaacttaaatgacattgtcctagcacaacaaagcatgtggttcgtaattcctttatttccaatgttcgtaatattttttatttcagctttagcagaaaccaatagacctccttttgatttacctgaagctgaagcagaattagttgcaggatatcaaactgaatactctggcatgatgtatgcaatgttttggttaggtgaatatgcaaatattctattgatgtgtgcgatgggtgcaattttatttttaggtggatggttatcacctttaacagtttatccatttacatttataccgggagcaatatggttaatattaaaaatactgctcttattttttttatttgctttagttaaagccattgtgcctagatatagatatgaccagcttatgagattaggttggaaagtattccttcctttttcattaatatgggtggtacttacagcaagctatctattttattttaatcttttgccagttaattaat

SEQ ID NO: 201586 - DNA, 187 bp, Unknown
  Bacterial polypeptide expressing nucleotide sequence isolated from the Sargasso Sea
tgttagattttatttagttgcaatcttgttcattatttttgatttagaaatagcatttttatttccttgggcaatttctttaggcaacatcggattacttggtttttcatcaatgatgatttttttattcatacttacagttggttttatttatgaatggaaaaaaggtgctttagattgggaataa

SEQ ID NO: 201587 - DNA, 958 bp, Unknown
  Bacterial polypeptide expressing nucleotide sequence isolated from the Sargasso Sea
catgcttatccttgtactgggggacggctttttgctgatgtttgtcggttgggaaggagtaggattatgttcttatcttttaatcggctattattttgagaaagattctgctgctgtagctgcaaaaaaagcctttctatttaacagagttggtgattttggagtactttctgcggtactgctgatttttttaatttttggatcaattgatttcaatactgtaaacaccgaggctgctgctagattggagcatggtgggtttctggtgaccgtcattaccctgctactgtttcttggggccacgggtaaatctgctcaaattcccctttttgtatggctccctgacgcaatggaaggaccaacacctgtatctgcactgatacatgctgctacaatggttactgcaggattatacatggttgccagattgagtcacttgtttgtacttgcaccgctaaccatgaacattattgctgttattggtgctttaacagctcttttagcagcaagcatagcaattacacaaactgacattaaaagagtgctggcctactccacagtcagtcaactgggttatatgtttttagccatgggtgttggagcctttactacaggggtattccatgtaatgacacatgccttctttaaggcgcttctctttctgggttcaggatcagttattcttgcagttcatcacgaacaggatatgcggaaaatgggggggcttaagagcaagctccccatcacttatataactatgctgcttggtactatggcaatttccggaattcccttctttgcgggtttttttagcaaggacgagatcctctggtatgccttcagctccccttatggaagcgcatggttctggggcgtcggtttcctgactgcaggcttgacagcattttatatgttcagaatgatctatttaacttttcacggtgaatcaagagtagat

SEQ ID NO: 201588 - DNA, 327 bp, Unknown
  Bacterial polypeptide expressing nucleotide sequence isolated from the Sargasso Sea
aatgatttataactttttaacagattacttatcaataataatatttttatttgttgctttgtttataagcataggcttcattctaattaatttcgtatcttcaccttccaaccctgatccagaaaaactttcagcttatgaatgtggatttgatgcttttgatgactctagaatggaatttgacgttcgattttatctagtggctattctttttattattttcgatttagaaatagctttcttatttccttgggcaattacattaggaaaaactggattatttggattttggtctatgatgatttttttagctgttctaacaatcgg

SEQ ID NO: 201589 - DNA, 868 bp, Unknown
  Bacterial polypeptide expressing nucleotide sequence isolated from the Sargasso Sea
tattactcaaaatgatataaaaagagttatagcttattcaacttgcagtcaattaggctatatgttttttgctgctggaattggagcatataattcttcaatttttcatttaatgacccacggtttttttaaagccttactttttttatcagcagggtcagttattcatgctatgaatcatgagcaagacatgagaaaaatgggcggactttcagctaaaatcccttttacaacaatcatgatgtggataggatcactagcaataattggcttcccatatttttctggatattattcaaaagagagtattttagaaaatacttatttttctaataatgatatggcaaattttgcttatgttgtaggtattctgactgcattattaacagctttttattcttggagattattatttttaacttttcatggagaaaatagatctgaacaaaaaatatttgcaaatgcccatgaatcacctttagtgatgcaattaccactaatttttttatcaataggtacagtattttcaggaatatttttctccaaatactacattggagatttaaaagaattgttttggaataatgcgataatactttctcatagctcacataagtatcttccattctttcaaacattattaattaaagcatcagttgcattgggattaattatttctgcttatttttatttttataataaaaatctacctaaaaaactatctacgaaatttaattttttttacttaatttcttttaacaaatggtacgtagatgaaatatataataaaataattattaagccatatttcattcttgcaaattttttttggacaagaggagatgaaaaaaacattgatgcctatggt

SEQ ID NO: 201590 - DNA, 808 bp, Unknown
  Bacterial polypeptide expressing nucleotide sequence isolated from the Sargasso Sea
atggacggttttcccatcctcaccatcatgatgctggtgccgctcgccggagcggttctatgcctgttcaccggtggcggcgcgtcgcgtggaattgcgctggctgccacactggtcacgtttgcactcggcgtgttgctgtgggccaattaccagatcggcggcgaccaatggcagttcacagaacgctatgagctgtttgcaggcttcaactatgcgctggggatcgatggtattgcactgatgctgatcatgctcagcgtattcttgatgccgatttgcgtattggcgagctgggaagccatccaaaaacgcgtcggcgaatacatggcagcattcctgtttatggaagtgctgatgatcggcacgttcgcagcgcaggatttgttcctgttttacatattcttcgaagcgggcctgatcccgatgtacctcattatcggcgtatggggcggcgataaccgcatctatgccagctacaaattcttcctttacacgctgatcggctcggttctgatgctgattgccatgttctggatggtggccattgcggggacttcggacatcccgacactgatgcaatatccattccccgccggagcgcagacgtggctgtggttggcattcttcgcgagttttgcggtgaaagtcccgatgtggccgttccacacatggctgcctgatgctcacgttcaggctccaacagcgggttcggtgatcttggcgggtgtgctgctgaaactgggcggatacggattcattcgtttcagcctgcccatgttccccgatgcgagcgccgatttcgcgt

SEQ ID NO: 201591 - DNA, 717 bp, Unknown
  Bacterial polypeptide expressing nucleotide sequence isolated from the Sargasso Sea
accagatgcaatggaagggccgacacctgtttcagcattaatccatgcagctacaatggtaacagctggtgtatttctagttgttagatgttcacctatttacgaatactcaccattgattttagatttaataactattgttggtatgactactgctttttttgcagcaactgtagctttggttcaaacagatataaaaaaaataattgcctattccacatgtagtcaattggggtatatgttttttgcagctggagttggtgcttataacgttgcaatgtttcatttatttactcatgccttctttaaagcattgttatttttaggttctggatccgtcattcacgcctttaaagatgaacaagatataaataaaatgggaggtgtttggaaaaaattgccatacacctatgcattgatgatcattggaacgcttgcattaactggctttccatttttatctggtttttactcaaaagatgcaattattgagtttgcttatctaaagggcaatacaacaggctattacgcagccggtatagggatactaacagcgtttttaacttcaatatattcttggagattaatatttaaaactttccatggagagtataagaataaagaaatcaaaatagaagaaacccacgagtctccattggtaatgctaataccattatttattctttctattggtgcaatttttgcaggggtcttatt

SEQ ID NO: 201592 - DNA, 829 bp, Unknown
  Bacterial polypeptide expressing nucleotide sequence isolated from the Sargasso Sea
aacaaggatttagcgagtgctgcttatacctattttaacctcactatagtagatgttatatgtttttttctttttttaggagctatgggcaaatctgctcaaatatttttgcatacctggttgcccgatgctatggaaggcccaactccagtttctgcactaatccacgctgcaacaatggttactgcgggagtttttctctgttgccgcttttcacccctttttgaatactcttctaatatatcaaatcttattttagtaatcgggtcggtaaccgcacttttcgcttcaacgatagctcttgttcaaaacgatataaaaagaattattgcttattcaacttgctcccagttaggctatatgtttgctgcagttggggctggcttttatcaggcagctatgttccatttattcacacatgccttttttaaagcgctactgtttctgggcgctggatcagttattcatgcaatgcatcatgaacaagatatcaggcactttggaggtttaagaaaaaaattacctgtaacatttattacaatgcttgtaggtactgtcgcaattacgggagttggaattccattaagctacgacatgtttaatataaacataggtttctcagggtttgtgtcgaaagatatagtcattgagggagtcttttctagctcaaaatcgttctcatactttggttttttgttacttgttttctctgctttgctgacaagtttttatagttggagactgatcttcttaactttttttggctcattcagaggaaatcagaagtactatgagcaatgtcatgaacctgaattttcaatgattatac

SEQ ID NO: 201593 - DNA, 460 bp, Unknown
  Bacterial polypeptide expressing nucleotide sequence isolated from the Sargasso Sea
acaaaatctttggtttgtagttccactatttcctatgtttgtagtattttttatatctgctttagctgaaactaatcgaccaccatttgatttacctgaggcggaggcagagctggtagctggttatcaaactgaatattctggaatgatgtatgcaatgttttggcttggcgagtatgcaaacatattattgttgtgtgccttaggttctattctctttttaggtggctggttatcaccagttgatatttatcctctaaatgcaataccaggtatattctggatgatatttaaaattttaatattattttttatgtttgctttaataaaagcaattgttccaagatatagatatgatcaattaatgagactaggttggaaaatatttcttccattctctttaatatacgttgttcttacatcaagttttttagtttattttgatttattacctaaataa

SEQ ID NO: 201594 - DNA, 876 bp, Unknown
  Bacterial polypeptide expressing nucleotide sequence isolated from the Sargasso Sea
atgctcgcctatatttgaatattctcaactttcattaaatattattacaattataggaagtgcaactgctttttttgctgcaacaattgctttagttcagactgatattaaaaaaataattgcttattccacgtgtagtcaattaggatatatgttttttgcagctggcgttggtgcttataatgtcgcaatgtttcatctgtttacccacgctttctttaaagcattactttttttgggctctgggtcagttattcactcttttaaagatgagcaagatataaatcaaatgggcgctgtttatagaaaattaccttatacgtggattttgatgataattggtactctcgctttaactgggtttccttttctttcgggtttttattctaaagatgcaattatagaatttgcttatctcagaggaaattctgttggatattatgctgcttggataggagttataaccgcttttttaacttcaatttattcatggaggttaatttttaaaacgtttcatggatcatttaataacaaacaaatgcaaattgaaaacattcatgagtctcctatggtaatggttataccattaattattttatcaataggagcaatttttgcaggttacctatttaaagatttatttattacacatggtgaagacagttatttttgggctgagtctataaaatttttaaaacctttgagcacagatcaccctccattgtggtttattctaacaactccaacattagttttaatttccataccattggcatattatctatttgttaaaaataaagatttatcagaggcattagttgagtcgaatagacctttgtataattttttaattaataaatggtattttgacgaatt

SEQ ID NO: 201595 - DNA, 370 bp, Unknown
  Bacterial polypeptide expressing nucleotide sequence isolated from the Sargasso Sea
atgatttataattttttattagactatttttcaataataatttttttatttattgctttatttttgagcatagggtttattgtaattaattttttagcctctcctagcaatcctgatccagaaaagctttcagcatatgaatgtggctttgaaccttttgatgactcaagaatggaatttgatgtcagattttatttagtagcaattttatttattatatttgatttagaaatagccttcctttttccttgggcaatttctttgggtagtattggcgctttgggttattggtcaatgatgttttttcttggagtattaactattggatttatttatgaatggaaaaaaggagctctagaatgggagtaaa

SEQ ID NO: 201596 - DNA, 791 bp, Unknown
  Bacterial polypeptide expressing nucleotide sequence isolated from the Sargasso Sea
ttggctacccgacgcgatggagggaccaacgcctgtatcggcgctcatacatgctgcgacaatggttacggccggcgtcttcatggtttgccgcctttcaccgatgctagaatatgcgccattcgctcttgatgtcattaccattatcggtgctttgactgcaatttttgcggcaacgattggcatgacccagtttgatattaagcgagtgattgcttattcaacctgctcccagcttgggtatatgtttttcgctgctggggtttcggcctatccggcggcgatgttccatcttacaacacatgcttttttcaaggcacttttgtttttgggtgcaggatcggtcattcacgcattatcaaatgagcaagaccttcgcaaaatgggcggcatctggaaaaaagtgcctgttacatacgttatgatttggatagggtcattagccctggctggctttccattttttgctggatattactccaaagatatgattctggaagcggcttatgcagcacatagcgttcccggtttgattgcattctggcttggatgtatcgcggcttttcttactgctttttatagctggcgtttgttgattatggcttttcatggtgaaccccgtgcaagtgctgaaacgatggcccatgtacacgagtcaccgcgcgtcatgacattacctttgctagtcctagctgctggggcagtttttgctggatggcttggctatgagttgtttgttggcactgacatgaaacgattttggggcgaatcaatttttatcctgccaacaa

SEQ ID NO: 201597 - DNA, 904 bp, Unknown
  Bacterial polypeptide expressing nucleotide sequence isolated from the Sargasso Sea
atggccgcaggctctttccaggtcaatatcagcttccaggtcgatgaactttcagggctttacctactgatcatcactggggtgggttttctgatccatgtttattccatcggttacatgaaaggggagtcgggctactatcgtttttttgcctacctcaacctttttgtcttcttcatgctcattctggttctcggtgacagcttcctgctgatgtttgtcggttgggaaggggtgggtctctgctcttatctcctgatcggttattactttgagaaacattccgctgcagaagcctgcaaaaaagcgtttttgtttaatcgtgtaggagattttggagtgctttccgccgtgctcttgattttcctcagtatcggcagtcttgaattcaacacggtcaatgcccaggctgcttcccaatttgaatacggaggcgttttggtgacggtgatcactttactgctttttcttggagcaactggaaagtcggcgcagattccgctttacgtatggcttcccgatgcgatggaaggcccgacaccagtttctgccttgatccatgcggccacgatggtcactgccggactctacatggttgcccgactcagccacctgtttatgctggccccagtaacaatgaatgtaattgcagtagttggaacggttactgctctgctggctgccactattgccatcacccaaaccgacatcaaacgagttttggcctattccacagtgagtcagttggggtatatgtttcttgccatgggtgtgggcgccttcacggcgggtatttttcacgtcatgacccatgccttcttcaaggctctgcttttcctgggctcaggatcagtgattcacgcgatgcatcatgaacaggatatgatgagaatggggcttaaga

SEQ ID NO: 201598 - DNA, 370 bp, Unknown
  Bacterial polypeptide expressing nucleotide sequence isolated from the Sargasso Sea
tatgtacggagaatttttaaataactatctgacaatcataatattttttggggttgcgctcattctgagtattgggtttatttttctaaattttgtgtttgcgcctaaaaaccctgatccagaaaaactatctgcttacgagtgtggttttgaacctttcaatgactccagaatggagtttgatattagattttatttagtggcaatactatttataatatttgatttagaaatagctttcctttttccatgggcaatttctttgggcaaaattggaatatttggctttatatcaatgatgatatttttgtttattttaactgtaggatttatttatgagtggaagaaaggggctttagactgggaatga

SEQ ID NO: 201599 - DNA, 880 bp, Unknown
  Bacterial polypeptide expressing nucleotide sequence isolated from the Sargasso Sea
gtttgaatttcttcttgatggtttatcgggaacaatgatgcttttagttactggcctaggcttggtaatacaaatattttctacctcatatatgagtggtgaccctaggtatgttaaatattttgtatattttaatttctttgttttctcaatgctcctattagttatgtcagctaactttttagtaatgttctttggatgggagcttgttggcttaagttcttatctattaatctctttttggtctgagaaaaaagaagcagctaaagcaggaaataaagcattcgtattaaatcgaattggagattttggttttttgattgctttaatgatgatattaaatacctatgatacgttttcatttaaaacagtttttgcaacaacattaataaatcagccacaaaatctagatcttattgttgtcttcctcatgattggtgcttttggaaaatcagcacaatttccattatttagctggttgccagacgcaatggaaggaccaactccagcaagtgctttgattcatgctgcaacaatggtcacagccggtgtttttatgctagttcgaatttctccgctattacagttttcagagttatcaagcatcttaattataagtattggtctcttaacagctttaatctcagcttttgctgcaataaatcagaatgatattaaaaaggtacttgcttactcaacaatctcacagcttggatttatgtttatagcaattggggctggagcatatgttgcagcaatttttcacttagttacacacgcatttttcaaagcattacttttcctaggtgctggtgctgtaatacatgaaatgcatcatgaacaaaatattcaaaagaatgggtggtttaaagaaaaaaat

SEQ ID NO: 201600 - DNA, 247 bp, Unknown
  Bacterial polypeptide expressing nucleotide sequence isolated from the Sargasso Sea
gaagttatctgcttacgaatgtggatttgaagcttttgactattcaagaatggaatttgacgtaagattttatttagttgcaattctttttatcatatttgatttggaaattgccttcttattcccttgggcaatttctttgggcggcataggcgctttaggtttctggtcaatgatgatctttttaggggtactaacaattggttttatatacgagtggaaaaaaggagctttggaatgggaataa

SEQ ID NO: 201601 - DNA, 903 bp, Unknown
  Bacterial polypeptide expressing nucleotide sequence isolated from the Sargasso Sea
tttggatctgtagaatttagtgttatttttgataacgcagaaagttttaaagatcattcaatacaatttataggtcttaactttagtacaattgatttattatgctttctgttgtttattggtgcaatgggtaagtcggcccaacttggtttgcatacatggttacccgatgcaatggaagggccaacgcctgtttcagctctaatccatgcagccacaatggtgacagccggtgtatttttagtagctagaatgagcccattatttgaatacgctttatttacaaatttatttattatttttataggagcttctactgctatttttgctgcaagtattgcacttactcaaaatgatataaaaagagtgattgcgtattcaacatgcagtcaacttggctatatgttttttgccgcaggtttaggagcttataatgcttcaatttttcatttaatgactcatggattttttaaagcactactatttttatcagctggatcagtaatccatgcaatgcatcatgagcaagatatgcgaaaaatgggtggattgtttaaaaaaattccttttactggtacaatgatgtggattggatcacttgctattataggtttcccatatttctctggttattattccaaggaaagcattttagaaaatgcttattattcaagttcatcaatggctacatttgcatatacagttggaattttaacagctcttttaactgctttttattcatggagattattgtttatgacatttcacggtcaatcaagatctgataaaaaaacttttgaccatgctcatgagtccccaatagtaatgaccttgcctctaatattacttgctttcggttcaatttttgcaggattactttttttcaatttttatattggtaaa

SEQ ID NO: 201602 - DNA, 955 bp, Unknown
  Bacterial polypeptide expressing nucleotide sequence isolated from the Sargasso Sea
ccgtgggcccgttggctggccaccggcgccgtggccgggtcgtttctggtcaccgtgggggtgttcctggacctggttgggcgcgacgcccgcgaccgaaggtcggtgaccaccctcttcgagtgggtgccggctggggatctccgggtggacgtcggcttcctagtcgatccgctatcgctgaccatgtgcctgttcatcacaggcgttggcgccctcatccacctgtactccatcgggtacatgcacggtgacggtgactttccccgcttcttcacctacctcaacctgttcgccttctcgatgctgatgctggttctgggcgacaatctcctgctgaccttcctgggctgggagggcgtgggcgcgtgctcctacctactcatctcgttctggttcaccgacgaggccaacgccacagcgggcaagaaagccttcgtgaccaaccggatcggcgactggggcttcatggttgccatattcctgacgttcttcacgttcgggtcggtcgcctacgtcgacgtgctggacaccacagcggccggcaccgtcgcccagtcaacagccacgttcgtcgccgtgatgctcttcgtaggcgccatcggtaagtcggcccaatttccgctgtacctctggctgcccgacgccatggctggcccgacgcccgtctcggcactcattcacgcggcaaccatggtgacttcaggcgtctatctgttgacccggatcaacccggtcatcgccgatgctgccgactgggtgccgaccatgatcgcctggactggcgccgggacggctctatttgcggcgaccatcgccgtagcccagcgtgatatcaagaaggtgctggcctactccacggttagccaactgggctacatgttcctggccgtgggttgcggtgcctacgtggccgccgtgttccacatggtcacccacgccttcttcaaggcac

SEQ ID NO: 201603 - DNA, 838 bp, Unknown
  Bacterial polypeptide expressing nucleotide sequence isolated from the Sargasso Sea
tttagcagatgcattaaaatttatttttaaggaaattataattccagcaagtgcgaataaggtaatttttattttggccccaatcgtcacaatgacactagcactggttgcttgggcagtaattcccatgagtgaaaattttgtcttggccgatataaatgtaggaatattatatctttttgcaatttcatccctaggagtttatggaattattatgggtggctgggcttcaaactcaaaatacccttttctaggtgcaataagatctgcagctcaaatggtttcatatgaagtttcgataggaataataattataaatgtgctgctttgtgttggttcattaaatttgaaagatatagttttagctcaaacaaatatttggtttgtttttccattatttcctatgtttgtgattttttttatttcagcgctagctgaaactaatagacctccatttgatctccctgaggcagaagctgaacttgtagcaggttatcaaacagagtactcgggaatgatgtatgcaatgttttggttgggtgagtatgctaatattcttttaatgtgtgctttaggctcaatcctttttcttggtggttggctaccgcctcttgatatttatcctttaaaccttgtgccagcaccaatttggatgatattaaaaatattgtttttattttttttatttgcagtaataaaagcaattgtaccaagatatagatatgatcaactaatgagattagggtggaaaatttttctacctttttcattattatacgtggttcttactgcaagttttttagtttattttgacttactaccaaccaaaggtatttaa

SEQ ID NO: 201604 - DNA, 343 bp, Unknown
  Bacterial polypeptide expressing nucleotide sequence isolated from the Sargasso Sea
catgctgtatgaatacctgccaatattaatatttttagctttagcgctgatatttgcgtcagtgatgctaactgctggttttatatttgggggcagtaatccagatgatgaaaaaaactccccatatgaatgtggtttcgaacccttcgaggattctcgaatgaaatttgacgtaaggttttatcttgttgcaattctatttattatttttgatttagaaattgcttttttgtttccatgggcagttgttttagaccatataggactcgaaggctatcttgcaatggcaatatttattcttatacttcttgttggatttatatatgaatggaagaaaggagct

SEQ ID NO: 201605 - DNA, 862 bp, Unknown
  Bacterial polypeptide expressing nucleotide sequence isolated from the Sargasso Sea
aatgatttactctcatggttatatggaacatgataagggttatgtgagattttttacatatttggctttatttagtagctcaatgatgggattaatagttagtccaaatttattagaaatttatgttttttgggaactagttggaatgtgttcttacttattggttggtttttggtatgacagagatggtgctgctcacgctgcacaaaaggcatttgtggttaatagagtaggagactttggattattattaggaattcttggtttattttgggcaacgaatagtttcgattttagtgaaatagctactggaatatctcaatcagtatctgataattcaatacccctttgggctgccttacttctttgttttttagtttttttaggaccaatggcaaaatctgctcagtttcctcttcatgtttggttacctgatgcgatggagggcccgacgcctatttctgcgcttatccatgcagctacgatggttgcagcaggaattttcctagtagctaggcttcaacctttatattcaatattcccttcaattcagtttactattgctttagttggaaccattacttgctttttaggtgcttctatagctttgacccaaatggatttaaaaaagggcttagcatacagtactgtttcacaacttggttatatgatgcttgctatgggatgtggagctccagtagcgggaatctttcatttggttactcatgcttgctttaaagcaatgctatttttgggatctggttctgtaattcatgcaatggaagaagtggtaggtcataagcctatactggctcaagatatgagattaatgggtggtttaagaaaaaaaatgccatataca

SEQ ID NO: 201606 - DNA, 739 bp, Unknown
  Bacterial polypeptide expressing nucleotide sequence isolated from the Sargasso Sea
ttctgggaattagttggaatgtgttcttacttattggttggtttttggtacgacagagatggcgctgcacatgctgctcaaaaagcatttgtcgttaatagagtgggagattttggattattactaggtattcttggtctattttgggcaacaaatagttttgattttaatgaaatagctactggaatttctcaatcaatatctgacaattcaatacccatttgggctgctttactactttgctttttagtttttttaggcccaatggcgaaatctgctcagttccctcttcatgtatggttacctgatgcgatggaaggccctacacctatttctgcactgatccatgctgcaacaatggttgctgcaggaatatttcttgtagcaagactacaacctttgtattcaatatttccctctattcaatttattattgctttagttggtaccattacttgttttttaggagcctctatagccttgacacaaatggatttaaaaaaaggtttagcgtacagtacagtttctcaacttggttatatgatgctcgcaatgggttgtggagcgccaatagcaggaatttttcatctagttactcatgcttgcttcaaagcaatgctatttctgggatctgggtcagtaatacatgctatggaagaagtagtcggtcatcagcctgtattagctcaagaaaaaaggttgatgggcggcctgagaaaaaaaatgccatacacatcaa

SEQ ID NO: 201607 - DNA, 754 bp, Unknown
  Bacterial polypeptide expressing nucleotide sequence isolated from the Sargasso Sea
tctgcacaattaggtttacatacatggttgccagatgcaatggaaggtcctacaccagtttcagctttaatccatgcagctacaatggtaaccgcaggcgtattcatggttgcacgaatgagtcctttatttgaatttgcaaattttactaatttttttattatttttataggatctacaacagcaatttttgcagcaacaatcgctattactcaaaatgacataaaaagagttattgcctattctacatgtagtcaattgggatatatgttttttgctgctggcgttggggcttacggagcatcaatctttcatttaatgacccacggcttttttaaagcattgttatttttatctgcaggttcagtaattcatgcaatgcatcatgaacaagacatgcgaaaaatgggaggattattttcaaaaattcccctaacaggtcttatgatgtggattggatcacttgccattattggatttccttatttttctggttattattcaaaggaaagtattttaaaaaatacttttttttcatcttctagtatttcatcttatgcttacacagtcggaattttaacagctttattaactgcattttattcgtggcgattattactaatgacttttcatggaaaatcaaaagttgaaaaagatctctataaaaatatgaaagactctccacttgtaatgactctaccactaatattattagctgttggatcaattttttcaggaatggctttaactaatt

SEQ ID NO: 201608 - DNA, 531 bp, Unknown
  Bacterial polypeptide expressing nucleotide sequence isolated from the Sargasso Sea
ttaatatgcatactcgtgatttttcatcaatagagaaattacttgctacatctgttaaagaaaaagcagaatttgttgtagagaaattagatgatgttgtaaattgggcacgtagggggtctttatggcctatgacttttggacttgcttgttgtgctgttgaaatgatgcaagctgctgcttctagatatgatcttgatcgttttggaattgtttttagagcatctccaaggcaatctgatgttatgattgttgctggtacattaacaaataaaatggcaccagctttacgacgtgtgtatgatcaaatggcagaacctagatatgtaatttctatgggttcttgtgcaaacggtggaggttattatcattattcttattcagttgttagaggatgtgatagaattgtgccagttgatatatatgtacctggatgtccaccaacggcagaagcacttctttatggatttttacaattacaaaaaaaaataagaggaaataaaggtatgcttctaaaattgagaaaataaa

SEQ ID NO: 201609 - DNA, 488 bp, Unknown
  Bacterial polypeptide expressing nucleotide sequence isolated from the Sargasso Sea
aatggaaaaagggcgccttggaatgggagtagatataaatgaaaacatcctgtcatctgatcaagatactttattgaatgctgcagcaagcgatataagaaataaaggctttattattgccagtgccgataaaatatttaattgggcaagaagtgggtctttgtggcctatgagttttggattagcgtgttgcgcagttgaaatgatgcatgcggcagcatcaagatatgatatggatcgttacggaatgttattcaggcctagccctcgtcaggctgatgtaatgatagttgcaggtacgttaactaataaaatggctcctgcattgagaagagtttatgatcagatggcagagcctcgttgggttgtgtccatgggctcatgtgctaatggaggtggttattatcattattcttattcggttgtaagaggttgtgacagaattgtgcctgttgatgtatatgttccaggatgtccaccaactgctg

SEQ ID NO: 201610 - DNA, 367 bp, Unknown
  Bacterial polypeptide expressing nucleotide sequence isolated from the Sargasso Sea
aatgaacacgtttttattagattatattccgataattatttttcttggaattgccattggtatggcttctttaattatgattgcctcttggattgtagccaaacaaaatccagatgaggaaaagttgtcaccttatgaatgtggctttgacgcttttgaagataccaggtcacaattcgatgttagattttatttagtggctatattatttataatatttgatttggaggtagcatttctgtttccttgggcggtgtctttaggatcaattggattattgggcttttggtcaatgatggtttttcttggagtattaactattggttttatttatgaatggaaaaagggcgccttggaatgggagtag

SEQ ID NO: 201611 - DNA, 250 bp, Unknown
  Bacterial polypeptide expressing nucleotide sequence isolated from the Sargasso Sea
atgtctttagattttttaaataattatttaactatattaatttttttggctattgcattattattgagcttaggttttcttatattaaattttgctttttcaccaaaaaatcctgatccagaaaaattatctgcttatgaatgtggttttgaaccatttaatgactctagaatggaatttgatataagattttatttagtagcaattttgtttattatttttgatttagaaatagcgtttttatttccat

SEQ ID NO: 201612 - DNA, 847 bp, Unknown
  Bacterial polypeptide expressing nucleotide sequence isolated from the Sargasso Sea
ggtttgcatacttggttgccccgatgcaatggaaaggtccaaccacctgtttcagcacttattcatgcagccacaatggtaacagctggtgtatttttagtagctagaatgagcccgttatttgaatatgctttagttacaaatttatttattacttttattggtgcttcaactgctatttttgctgcaagcattgcacttacacaaaacgacattaaaagagttatagcttattcaacctgtagccaattaggatatatgttttttgcagcaggactcggcgcttacaatgcttcaattttccatttaatgactcatggtttttttaaggcattactatttttatcagccggatcagttattcatgcaatgcatcatgagcaagatatgcgtaaaatgggtggtttattcaaaaaaattccttttaccggttcaatgatgtggattgggtcacttgcaattataggtttcccatatttctcaggttactactcaaaggaaagtattttagaaaatgcttactattcaagctcctcaatggcaacctttgcatatattattggaatcttaacagctcttttgacagctttttattcatggagattattatttatgacttttcatggtgagacaagatctgatttaaaaacctatgatcatgctcatgagtcaccacttgtgatgactattcctttgatattattagcttttggatcaatttttgcaggaatattattttcaaatttctatattggaaaattacaatattccttctggggagactctataattctgcatgatggcaaacatcattatttgccttttattcaaacattgattgtaaaaa

SEQ ID NO: 201613 - DNA, 478 bp, Unknown
  Bacterial polypeptide expressing nucleotide sequence isolated from the Sargasso Sea
aatggaaaaaaggagctttagagtgggattagaaaacataaaaagagatggttttgttctagctgactcggatagtttatttgactgggcaagaacaggttcgttatggcctatgacattcggtttggcatgctgctctatagaaatgatgcatgcaggcgcttcaagatatgacttagacagatttggaatgttatttagaccaagccctagacaatctgatgtaatgattgttgcaggtacacttgtcaacaagatggcaccagctttaagaaaagtttacgatcagatggccgatcctaaatgggtcatctctatgggttcttgtgctaacggaggtggatattatcattattcatattctgttgttagaggttgcgaccgaattgttccggtagatgtttatgtgcccggttgtccaccaactgcggaagcgctattatacggcatccttcaattacaaaataaaataagaaat

SEQ ID NO: 201614 - DNA, 319 bp, Unknown
  Bacterial polypeptide expressing nucleotide sequence isolated from the Sargasso Sea
atgatttataactttttatcagactatttttctatcatcctatttgtatttatcgctttaggtttaagcataggttttatagtcgttaattatttgtcatcccctaaaaatccagatcctgaaaaactttcagcttatgaatgtggttttgaagcattcgatgactctagaatgaggtttgatgtaagattttatcttgttgctattttatttatcatctttgatctagaaatagcatttttattcccttgggcgatttcattgggaaacattggtgcgcttggattttggtcaatgatgatatttattggaattttga

SEQ ID NO: 201615 - DNA, 783 bp, Unknown
  Bacterial polypeptide expressing nucleotide sequence isolated from the Sargasso Sea
gttcaaataagataatttttattttagccccaattattacaatgacacttgccttaatttcttgggccgtgataccatttagtgaagattttgttcttgcagatataaatgttggaatactgtatttatttgcagtatcttctctaggtgtttatggaattataatgggagggtgggcctcaaattcaaagtatcctttccttggtgcaataagatctgctgctcaaatggtttcctatgaagtttccattggcataatcattataaatgtacttttgtgtgtagggtcattaaacttatctgacattgtaatggcacaagaaaaaatttggtatgtaatcccactatttccaatgtttgtaatattttttatctcagcattagctgaaacaaacagacctccttttgatttaccagaggctgaggcagaacttgttgcaggttatcaaactgaatattctggaatgatgtatgcaatgttttggttaggtgaatacgctaatattctattaatgtgtgcattagggtctatcttattcttaggcggatggttgtcacccataaatatattcccatttaatgttattccttcaccaatatggttaatactaaaaattttgttattatttattttgtttgctttagtaaaagcaattgttccgagatatagatatgatcaattaatgagacttgggtggaaagtttttttacctttgtctttaacttgggtggtattaacagcaggatatttaatgtatttcgatctattaccaggaaattaag

SEQ ID NO: 201616 - DNA, 367 bp, Unknown
  Bacterial polypeptide expressing nucleotide sequence isolated from the Sargasso Sea
tatgacatcactctacatagagtatcttccaatagcgatatttatagcatttgctggaggattgtcggtaatgtttgcgctttcttcttggttaattggtaagcaacttcctgattcagaaaaactttctccatatgaatgtggttttgaaccttttgaagatgcgcgaattcaatttgatgttagattttatttagtagcaattttgtttataatttttgatttagaagttgcatttttatttccctgggcagtggcactttctgatattggtttgtttggctttttatcaatgatgatttttctatttttattaacaattggattcatctatgaatggaaaaaaggagctttagaatgggactag

SEQ ID NO: 201617 - DNA, 862 bp, Unknown
  Bacterial polypeptide expressing nucleotide sequence isolated from the Sargasso Sea
cccaacaccaatatcagctttaattcatgccgctacaatggtaactgcaggaatatttatgatagctaggttatctccattgtatgatgtttcattatatgttttagatataattctttatattggtctggccactgcattctttatgggactagtagcattagtacaaaatgatataaaaagaataattgcttattcaactatttcacaactaggatatatgacagtagccttgggcgcttcattctattcctttgcaatctttcatcttctaacacatgcattcttcaaggcgttattatttttatgtgcaggatctataatattaaagtgccatcatgaacaagatattacaaaaatgggcggattaagaaaagcaatgccatacacatattatacttttttaatatcagcattagcgctaatcgggtttccactgacatcaggattttattcaaaggatttaataattgatatttttaaatataatcccaacccttttgtatattatgttcttgtactgggtatttttataacgacattatatacagcaaaaatattttttaatgtgttttttggtgaaaataaattaaatattaaagaagataaaaaactggaacatcatgatgttatattgatacctttggtctcattggcagtaccaagtttatttatagggcttgccttatttgacggggttcttttttctggttttttctcacaacccttgacagataacttaagacttaatgatatgtacaataattttatctttcactctctgtcatttacgtggaattctatttttagttttaactttttatcccttctacttggtttgtttttttcttattttatattt

SEQ ID NO: 201618 - DNA, 901 bp, Unknown
  Bacterial polypeptide expressing nucleotide sequence isolated from the Sargasso Sea
ttcgttgcttcttcttggtggagcagtcggaaaatcggcgcagttgcctctgcagacttggttgccagacgcaatggcaggtccaacaccgataagtgcactgatacacgcggctactatggttacagccggagtctacctaattgctcgaacacatatcctgtttgagctggcaccgaccgtgcaacttcttgtcgcgtggattggtttgattaccctgttgatggctggttttacagcattaactcagtcggatataaagcgcattcttgctttttcaactgttagccagatcggctacatgtttttaggtctcggggtaggtgcctggtctgctgcaatcttccacctgatgacacatgcgttctttaaagctcttctgtttcttgcttcgggaactgtcatactctcggttcaccatgagcaaagcatttttaagatgggtggcttaagaaaggctctgccagtttcatttgcctcatttctcattggatcattagctctcacggctttcccttatacatcaggttattttagcaaggacgaaatcttactggcggcattcgaattagagggagtgggtacctacctttggttgggtggtgtgattggtgctttctttacgggaatttacacatttcgtttgttttttatcgtgttctttggagagaacaagggccacttacctgaaaaggaagttggagggtggcatatgaatggtcctctgattttgttaatgattttatcgctagtgggaggatttataaccgtcccagtagaggcggttttcagtcatggtgctgcgcatggggagcatcatgtatcagccttagtgcacggcttcatgattacgatgccattagttgggatttttattagctatatgttttctatgcaaaga

SEQ ID NO: 201619 - DNA, 934 bp, Unknown
  Bacterial polypeptide expressing nucleotide sequence isolated from the Sargasso Sea
ttattgattggattttggtatcataaaccttcagctaataatgctgctataaaagcttttcttgtaaatagagtcggtgattttggttatgctcttgggattgcaggagttttttttatttttggctcaatagaatttgatgtaatatttactaatgctgaaaattttaaagatcatagtattccatttttaggtttaagtttcagcacaatagaccttttgtgttttttattatttattggcgctatgggaaagtcagctcaattaggtttacatacatggcttccagatgccatggaggggccaacaccagtatctgctctcatccatgcggctacgatggtaactgctggagttttcttagtagcaagaatgagtcctttatttgaatacgcaacagttacaaatttatttattacttttattggagccgcaactgccatttttgcagcaactattgctcttacacaaaatgatataaaaagagttattgcttattcaacatgcagccaacttggttatatgttttttgctgcaggattaggagcttacaatgcttctatttttcatttaatgacgcatggtttttttaaagctctattatttttatctgctggctctgtaatacatgcaatgcatcacgaacaagatatgcgtaaaatgggtgggctatttaaaaaaattcctttcacaggcactatgatgtggattggttctttggcaataataggtttcccatatttttctggttattattcaaaggaaagtattttagaaaatgcatactattctgattcttcaatggctacttttgcatatacaataggaattttgacagctctattaacagctttttattcatggagattactcttcatgacctttcacggagaaacaagatctgacaagaaaacttttgatcatgcgcatgaat

SEQ ID NO: 201620 - DNA, 328 bp, Unknown
  Bacterial polypeptide expressing nucleotide sequence isolated from the Sargasso Sea
atttttaataattgcttttggtttaagtgttgcttttgtagtattaaattttttactttctccaaaaaaacctgatccagaaaaattatctgcttatgaatgtggttttgaaccatttcaagattctagaatggaatttgatgtaagattttatctagttgcaatcctatttatcatattcgatcttgaaatagccttcttatttccgtgggcaatatctttagggaatattggtttattaggtttttcatcaatgatgatttttcttttcatactaacagttggttttatttatgaatggaaaaagggtgctctagattgggaataa

SEQ ID NO: 201621 - DNA, 370 bp, Unknown
  Bacterial polypeptide expressing nucleotide sequence isolated from the Sargasso Sea
aatgcttgcggaatttttaaaagattatttgtcaataatactatttttaataatagctttaggattgagcatggcttttgttgctattaattatttggcatcaccaaaaaaacctgatccagaaaaattatctgcatatgagtgcggatttgaaccttttaatgactcaagaatggaatttgatgtaagattttatctagtagcaattttatttataatatttgatttggaaatagcatttttattcccctgggcaataagtctcggtcaaataggtttatttggatatatctctatgatgatttttcttttcatcttaaccgtaggttttatttatgaatggaaaaaaggagctttagactgggaataa

SEQ ID NO: 201622 - DNA, 323 bp, Unknown
  Bacterial polypeptide expressing nucleotide sequence isolated from the Sargasso Sea
tatgacatcactctatctagagtatcttccaatagcgatttttatagcatttgcgggaggattgtctgtattgtttgctctttcttcctggataataggcaaacaacttcctgactcagaaaaattatctccttatgaatgcggatttgaaccttttgaggatgctagaattcaatttgatgtaaggttttatttagtagcaattttatttatcatttttgacttagaagtagcttttctatttccttgggcagtagcactatctgatattggtttatttggatttatatcaatgatgattttcttatttttacttaccattg

SEQ ID NO: 201623 - DNA, 610 bp, Unknown
  Bacterial polypeptide expressing nucleotide sequence isolated from the Sargasso Sea
cggatgggcatctaattctaagtacccatttctgggatgtattagatctgccgcacagatggtgtcatacgaagtctctattggtataataatcattaatgttcttttatgtgttggatctttaaaccttaaagatattgttttagcacaagaaaaagtttggttcgtagtgcctctattccctatgtttgtaatttttttcatatctgctttggcagaaactaatagaccgccatttgatttgcccgaagctgaagcagagctagttgctggatatcaaacagaatattcaggaatgatgtatgcaatgttttggttaggagaatatgctaatattttattgttatgtgctttaggatcaattctttttctaggaggatggttatctccaatagacatttatccatttaatgaaattccaggtgtattttggatgatttttaagattttaatattattttttatgttttctattattaaagcaatagttccaagatatagatatgatcaactaatgagattgggctggaaagtgtttttacccttttcattattatacgtaattttaacagcaagttttcttgtttattttgatttattaccaaaatga

SEQ ID NO: 201624 - DNA, 287 bp, Unknown
  Bacterial polypeptide expressing nucleotide sequence isolated from the Sargasso Sea
catgttatctgattttcttaaagattacttaccaattataatttttctaataatagctctagggctaagctgtgcgtttgtggtaattaattttattctttcgccaaaaaaacctgatccagaaaaactatcagcttatgaatgtggatttgaaccctttgaggattcaaggcttgagtttgatgtaagattttatttagttgcaatcttgtttattatttttgatttggaaatagcatttttatttccatgggcaatttctctaggcaaaatcggattacttggtt

SEQ ID NO: 201625 - DNA, 370 bp, Unknown
  Bacterial polypeptide expressing nucleotide sequence isolated from the Sargasso Sea
atgcttgcggattttttaaaagattatttggctattattatatttttaatagtagctcttggtttgagcgttgcttttgtagcaataaattatttagctgctccaaaaaatcctgatccagaaaaactatcgccatatgaatgtggatttgaaccatttaatgactctagaatggaatttgatgtaagattttatttagtagcaattttgtttattatatttgatttagaaattgcatttttatttccatgggcaatttctttaggtaaaattggtttatttggttttatttctatgatgatatttttatttattttgacagttggttttatttatgaatggaaaaaaggtgctttagactgggaataaa

SEQ ID NO: 201626 - DNA, 880 bp, Unknown
  Bacterial polypeptide expressing nucleotide sequence isolated from the Sargasso Sea
accggtggctgttctcctgatgacctgcgttggagcagcagctgttctcagctacgccatccttgcgggccagctcgcgggtgaacccgcggtggaacatctgttcgtgtgggcgagcgcaggaacgttcatcctgcctatgggctacgtggtggatccgctcgcagcggtgatgctctccctggtcaccaccatcgccctgctggtgatggtgtattcccatggctacatggcccatgacaagggctacgtgcgtttcttcacctacctcgcgctgttcagcagctcgatgctggggctgatcatcagtcccaacctgctcgagatctacgtgttctgggagctggtcggcatgtgctcctacctgctggttggcttctggtacgaccgcgatggcgccgcccacgccgcccagaaggcctttgtggtcaaccgcgttggtgatttcggcctgctgcttggaattctcggattgttctgggccaccggcagtttcgacttccagggcatcgccgatggtcttcagcagggcctggccaatggcagcgtcgccccctgggccgctctgctgctctgcctgctggtgttcctgggtccaatggcgaagtccgcccagttccccctgcatgtgtggctgcccgatgccatggagggaccgacaccgatctccgcgctgattcatgccgcaacgatggtggcggcaggggtgttcctcgttgccaggctcgatccgttgttcagccagttccctgttgttcaaaccgtgatcgctgttgtcggcacgatcacctgtttcctcggagcctccatcgccctgacccagatggatctgaaaaaggggctggcttacagcacggtctcacagttgggttacatgatg

SEQ ID NO: 201627 - DNA, 909 bp, Unknown
  Bacterial polypeptide expressing nucleotide sequence isolated from the Sargasso Sea
gttgctatgtttcatttatttactcacgcggttttttaaagctttattatttttaggatctggttccgttattcacgcattcaaagacgaacaaaatattaattacatgggcggggtttggaaaaaacttccatatacttattctctgatgataataggaactttagctttgactggctttccatttttgtcaggattttattctaaagatgcaataatagaatttgcttacttaagaggaaatacaactggttattatgctgctgggataggaatttttacagcttttcttacatcaatttactcttggagattaattttcaaaacttttcatggtgaatataataataaaaagataaaaatagatgagacacacgagtctcccattgtgatgctaatacctttggttttactttcattaggtgctttatttgcaggttttttatttaaagaattatttatcggttatgatgagccaaataatttttggcgaaattcaatattttttttaaaaccattaagtgccgatcatcctccattatggtttttattgcttaccccaattttagtcatattatctattccattagcgtattatttatttttgaaaaataagaatttaacggagcaaattgccaatattaacaaaccgctctatcattttttattaaataagtggtattttgatgaactttataatgttttatttgttaaatcatcaaaaaagtttggattatttttatggaagttttttgatctaaaaattattgatggttttggtccagacggcatttcctcaatgattaaaaaattttcagtaaaagctaacaagtttcaaagtggatatatatatcaatatgcttttgtgatgttgctaggtttctctgctttattaacttttctaattgt

SEQ ID NO: 201628 - DNA, 847 bp, Unknown
  Bacterial polypeptide expressing nucleotide sequence isolated from the Sargasso Sea
gtagatttaatttgtatcttattattcattggtgctatgggtaaatcagctcaaatttttttacatacatggttgccagatgcaatggagggtccaacaccagtttcagcattgattcatgcagccactatggttacagctggagtttttcttgtcgtaagatgttcaccgatatacgagtattcagagttggctttaaacattgtcactatagtaggtatgagtaccgctttttttgcagcgagtgtagctttagttcaaacagatataaaaaaaatcatagcttattcaacgtgtagtcaattaggttatatgttttttgctgctggtgtaggtgcatataatgttgcaatgtttcatttgtttacacatgcattttttaaggcgttattatttctaggatcagggtctgttattcatgcttttaaagatgagcaaaacataaataatatgggaggagtatggagaaaattgccctacacttatgcattaatgataatcggaactttagcattaacaggatttcctttgttatctggtttttattccaaagatgcaattatagaatttgcatatttaagtggtagtaccactggattttatgcagctggaataggtattattacagcttttttaacatcaatttattcgtggagactaatgtttaaaacttttcatggtcaatataacaacagggaactcaatattgaggagacacatgagtctccattagtaatgttaatacctttgataatattatctataggtgcgatttttgctggatttatttttaaagatttatttataggttatgagggaattgataatttttggaataaatcgattt

SEQ ID NO: 201629 - DNA, 796 bp, Unknown
  Bacterial polypeptide expressing nucleotide sequence isolated from the Sargasso Sea
gatgctcccactcctggggttcctcatcttgcttataactgggcacctactcggagagccccgtgcaggttgggtcgctaccgctttcgctggagcttccttcatagcgactttgatcgtattggttggtctattaggtaaagactcccacgctggcggccggtcatatgaatttgtgcttttcgaatggctacctgctggatccctaaaagttgaagcaggatttctactcgatcccttgtccatcaccatggcgctgtttgtcactggtgtcggagcactcattcacttgtactcaattggctacatgcatggagatgagaagtactcaaagttctttttgtacctgaacctgttcctgttctcgatgctcatgctggtcttcggcaacaacttggtggtcacgtttctgggctgggaaggcgttggtgcgtgttcctatttccttatctctttctggcatcgacgagaatctgcagcgaccgctggtaagaaggcgtttgttaccaaccgcgttggcgattggggattcatgatcgcgacctttgcgatctggtccgcgcttggaacagttacctacaccgaaattgcaaactcaccggcgatgtctgcggcaacgggtacagcggtctcactgctcctcttcgtagccgctgcgggcaaatcagcccaacttccactgtatgtatggttgcccgatgctatggaagggccgaccccagtttcagcaatggtccacgcagccaccatggtgacctcgggtgtttacctcctagtgcgaatgaacaacgtgctg

SEQ ID NO: 201630 - DNA, 361 bp, Unknown
  Bacterial polypeptide expressing nucleotide sequence isolated from the Sargasso Sea
tatgtacaacttagattatatatttattttaattttcatcttaattggtgcaggcatggctattgccatgtatttgctttcaaaaattttatcaccaagttcgcctgatagcgaaaaattgtcagcatatgaatgtggttttgaagcgtttgatgatgctcgatcaaaatttgacgttaagttttatttagtatcaatactatttataatttttgatttagagattgcgtttctatttccttgggctgtaagtctaagcaatattggcgctttaggtttttattctatgatgttttttttatttatcctcacagttggatttatttatgaatggaaaaatggagcattagattgggagtaa

SEQ ID NO: 201631 - DNA, 325 bp, Unknown
  Bacterial polypeptide expressing nucleotide sequence isolated from the Sargasso Sea
ttttataattggcataggtatagccgtagcaatgacagctacatcttttattataggtccaaatagaccagataaagaaaaattatcagcttatgaatgtggatttgaagcatttgatgatgcaagaggtaggtttgatgtaagattttatctagttgctattttatttattatatttgatttagaggtggcttttctttttccctgggctatctctttaggtaagataggtatttttggttttggttctatgatttttttcttagtagtactaacaattggatttatttatgaatggaaaaaaggtgccttagaatgggaataa

SEQ ID NO: 201632 - DNA, 370 bp, Unknown
  Bacterial polypeptide expressing nucleotide sequence isolated from the Sargasso Sea
atgcttgcggaatttttaaaagattatctcccgataatattatttttgataatagctctaggcataagtcttgcctttgttgcaattaattatatagctgctccaagtaaaccagatcctgagaaactttcggcttatgagtgcgggtttgaacctttcaatgactctagaatggaatttgatgttaggttttatttagttgcaatattatttataatttttgatctagagattgcgttcttatttccatgggcaatttcacttggtgaaattggtctatatggtttctgttctatgatgttatttttatttattttgactgttggatttgtttatgagtggaaaaaaggagctttagattgggaatagg

SEQ ID NO: 201633 - DNA, 883 bp, Unknown
  Bacterial polypeptide expressing nucleotide sequence isolated from the Sargasso Sea
tccatcgaatttgatgtcatcttcaatgatgccggtctgttgtccaaaaccaacatctcgttccttggttacacgcttcccgcccttgaggtggctggtattctgctgttcattggcgcgatgggcaaatccgcccagcttggcctgcacacctggctgcccgatgcgatggaaggcccaaccccggtctcggcactgatccatgcggcaacgatggtgacagctggcgtgtttatggtctgccgtctctcgccaatgctggaatttgcgcctgtctctttggcggtgatcaccatcatcggcggaacaacggcgatttttgccgcaaccgtcggcatgacgcagtttgatatcaagcgggtaattgcctattcaacctgctcgcagcttggctatatgttttttgctgctggcgtatcggcctatccggcggcgatgttccatctgacaacacatgcctttttcaaggcattgctgttccttggggctggatcggtcatccatgcgttgtctgacgagcaggatttgcgtcgaatgggtggcatctggaagaaaattcctgtgacctatacgatgatgtggattggttcgctggcgcttgccggcttcccgttctttgccggcttctactcaaaggatatgattctcgaggcggcctatgccgcgcattcgggggttggcaactatgcgttctggatgggctgtgcagcggcatttctgactgcgttctacagttggcgcctgctgatcatggcgtttcatggcaagccccgcgcctctgccgaggcgatggcgcatatccatgagtcgccacaaggtgatgaccatcccgctgttcgttctggcgcttggcgcgattttctccggctggcttggttatgag

SEQ ID NO: 201634 - DNA, 370 bp, Unknown
  Bacterial polypeptide expressing nucleotide sequence isolated from the Sargasso Sea
atgcttgcggaatttttaaaagattatctaccgataatattatttttgataatagctttaggcttaagtcttgcttttgttgcaattaattacattgctgctccaaacaaacctgatcctgagaagctttcagcatatgaatgtgggtttgaacctttcaatgattctagaatggaatttgatgtaaggttttatttggttgcaatattatttataatttttgatttagaaattgcatttttattcccctgggcaatttcacttggtgaaatcggtttatatggtttttgctctatgatgttatttttatttattttaactgttggatttatttacgagtggaaaaaaggagctttagactgggaataac

SEQ ID NO: 201635 - DNA, 870 bp, Unknown
  Bacterial polypeptide expressing nucleotide sequence isolated from the Sargasso Sea
aaatctgcacaaatttttctgcatacttggcttcctgatgctatggaaggcccgacacctgtatcagcacttattcacgctgctactatggtgactgcaggtgtgtttcttacttgtaggttttctcctctatttgaaatggctcctttagtttcgtcttttatagtaattattggttcatttactgcattatttgcagcatcagtcgccttagttcagactgacattaaaagaataatagcttactcgacttgttcacaacttgggtacatgtttgtagcagcaggagcagggttttatcatgcagccatattccatctttttacacatgcattctttaaagcgctcttatttttgggtgctgggtcagttatacactcaatgcatcatgagcaagacataagaagatttggaggactaagatcaaagctaccgtggacgtttttgggcatgctagtcggtactctagcaataacgggagcgggcattccattaagttattacttatttggctttaattttgggctatcaggatttgtttcaaaggatattatcatagaaggtgtatttgcatcaaaaaatgctggtactatatttgctttttacgttttggtgttttcagctttcttgacaagcttttacagttggagattgatatttttaactttttttggacaatttagaggaagtaaagatgattacgaacatagtcatgagccaagttggaacatgctagttccgttggtctttctaagtttgggctcaatattttttggaagcttatttgaatactctttcactaatgaaaaatatcagattttttcagactcaataattctttccgttaataacactattatgcatgatttc

SEQ ID NO: 201636 - DNA, 731 bp, Unknown
  Bacterial polypeptide expressing nucleotide sequence isolated from the Sargasso Sea
acttggctacccgatgcaatggaaggacctactccagtttcagcattaatacatgctgccacaatggtaactgccggtgtgtttttggttgcaagaatgagccctctttatgagtttgcaacttttactaatttgtttattactttcatcggagctgctactgcaatttttgctgcatctattgcattaactcaaaatgatataaaaagagtcattgcttactcaacatgtagtcaattaggatatatgttttttgcagctggtgtaggtgcttataatgcttctatttttcatctaacaacccatgctttttttaaagcattattgtttctttctgctggttcagtaattcatgcgatgcaccatgaacaagatatgagaaaaatggggggactttttaaaaaaataccttttacagcaacaatgatgtggattggctcattggcaattataggatttccttatttatccggttattattctaaagaaagtattttagaaaatgcatactatacatccaatggtatagcttattttgcatacattgttggaattttaacagctttacttacagctttttattcttggagattattatttttaacatttcatggggaaaacagatcagaaataaaaacatttgaacatgctcatgagtcaccttatgtaatgacaattccatttattattcttgcaattgggttcagtttttctgggatattctttgctga

SEQ ID NO: 201637 - DNA, 260 bp, Unknown
  Bacterial polypeptide expressing nucleotide sequence isolated from the Sargasso Sea
tttggacgggttacttagagaatatttgccaatattaatttttcttgggcttgcaatagtcttgggcattttcttgatgctttcagctatgataattgcagtaaggaacccagactcggagaaaacatccgcctacgagtgtggttttaatgcctttgatgatgccagaatgaaatttgatgtcagattttacttggtagctattctttttatcatttttgacctagaggtcgcgtttttattcccttgggcggctggct

SEQ ID NO: 201638 - DNA, 370 bp, Unknown
  Bacterial polypeptide expressing nucleotide sequence isolated from the Sargasso Sea
aatgcttgcggaatttttaaaagattatttgtcaataatactatttctaatagtggctttaggactaagtgttatttttgtcgccataaattatttagcatcaccaaaaaaacctgatccagaaaaattatctgcatacgaatgtggatttgaaccttttaatgactcaagaatggaatttgatgtaagattttatttagtggcaattttatttataatatttgacttagaaattgcatttttattcccatgggccattagtctcggtcaaattggcttatttggatatatctctatgatgatatttcttttcattttaactgtaggttttatttatgaatggaaaaaaggagctttagactgggaataa

SEQ ID NO: 201639 - DNA, 367 bp, Unknown
  Bacterial polypeptide expressing nucleotide sequence isolated from the Sargasso Sea
atgaactacgcacttagtgaatatatgcctattttaatttttatcttcgtagcacttgcgattagctgcctgttcgtactcgccaattatttagctgctgtaagcaatcctgattctgaaaaaaattcagcgtatgaatgtggctttgaacaatttggagactcaagaatgaagtttgacgttcgtttttatctggtaacactattattcatcatttttgatcttgaagttgcattcctttttccatgggcagtaacttttggaacccttggattattcggttttatctcaatgatgatttttcttggagtccttacgattggatttatttatgaatggaagaagggcgccttagaatggcaataaa

SEQ ID NO: 201640 - DNA, 258 bp, Unknown
  Bacterial polypeptide expressing nucleotide sequence isolated from the Sargasso Sea
aatgagtgcggatttattaaaagattatttgccgataattttattccttatagttgcattagggttgagttgtgcttttattgtaatcaattttattctatcacccaaacatcctgacccagaaaaactatctgcatacgaatgtggttttgaaccttttgaagattctagaatggaatttgatgtgagattttatttagtggcaatactttttataatttttgatttagagatagctttccttttcccttgggctat

SEQ ID NO: 201641 - DNA, 370 bp, Unknown
  Bacterial polypeptide expressing nucleotide sequence isolated from the Sargasso Sea
aatgctggcagattttttaaaagattatttatcaattataatttttaccttttgtgcattaagcttaagtataggctttattgctttaaattatatttttgcaccaaaaaatcctgatcctgaaaaactttcagcatatgaatgtggttttgaagcgtttggcgattcaagaatggagttcgatgttagattttatttggtagctattctatttataatttttgatttagaaatagcttttctgtttccgtgggctatatctttaggaagtataggttctttaggtttttggtcaatgatgatttttcttttcgttctgactattggttttatatatgaatggaaaaaaggagcattagatggggactaa

SEQ ID NO: 201642 - DNA, 313 bp, Unknown
  Bacterial polypeptide expressing nucleotide sequence isolated from the Sargasso Sea
aatgaatttagaagagaaaaaaaaacaaataccagatgaatttaaacaactcgctcaagattttagtgataatggttttataacaacttcattagataacctcgttacttgggctagaacaggctcacttcattggatgacatttggtttggcatgttgtgcagttgaaatgatgcaaacttcaatgccacgttacgatcttgaaagatttggtgctgctccaagagcatcaccaagacaatctgatgttatgatagttgcaggtacattaactaataaaatggccccagctcttagaaaagtttatgatcaa

SEQ ID NO: 201643 - DNA, 370 bp, Unknown
  Bacterial polypeptide expressing nucleotide sequence isolated from the Sargasso Sea
tatgactgcggattttttaaaagattatttacctataattttattcctaatattagctttaggtttaagttgtgcttttatagtaataaattttattctttccccaaaaaatccagaccccgaaaaattgtctgcttacgaatgtggatttgaaccatttcaagattcaagaatggaatttgatgtaaggttttatttggttgcaattctttttattatttttgatttagaaatagcatttctttttccttgggcaatttctttagggaatattggttttcttggttttatatcaatgatgatttttttatttatacttacagttggatttatatatgagtggaaaaaaggtgctttagattgggagtaa

SEQ ID NO: 201644 - DNA, 370 bp, Unknown
  Bacterial polypeptide expressing nucleotide sequence isolated from the Sargasso Sea
atgcttgcggattttttaaaagattatttttcgattatcatttttttaataattgctctagggatgagttgtgtttttattttgcttaattatttattatctcccaaaaacccagatcctgagaaactctctgcttatgaatgtggttttgaaccttttaacgactctagaatggaatttgatgttagattttatttagtagctattttatttataatttttgatttagaaattgcttttttatttccgtgggcaatttcattaggtaaaattggttttttaggatttatatcaatgatgatatttcttttcattttaacagtaggttttatttatgaatggaaaaaaggagctctagactgggagtaaa

SEQ ID NO: 201645 - DNA, 358 bp, Unknown
  Bacterial polypeptide expressing nucleotide sequence isolated from the Sargasso Sea
atgcttttagagtatttaccaatatttatctttttagtctttgcactaatttttgccactatcatgttgggtattggtttcacatttggtgcgaataaccctgattcagaaaagaattcaccttatgagtgtggttttgaagcatttgaagactctagaatgaagtttgatataagatattatttagtagcaatcttgtttataatttttgatcttgaaatagcttttttatttccttgggctatagttatccatgaagttggtcacattggactcatttctatggccatatttctaataatattgattgttggtttcatttatgagtggaaaaaaggagccttagaatgggattaga

SEQ ID NO: 201646 - DNA, 337 bp, Unknown
  Bacterial polypeptide expressing nucleotide sequence isolated from the Sargasso Sea
aatgcttgcggaatttttaaaagattatctaccgataatactatttttgattatagctcttggtgtgagtttagcttttgttgcaattaattatattgcagctccaaaaaacccagatccagaaaagctttcagcatatgaatgtggatttgagcctttcaatgattctaggatggagtttgatgtaagattttatctagtagctatattatttataatttttgatttagaaattgcattcttatttccatgggcaatttcacttggacaaataggtttgtttggtttctactctatgatgttatttttatttattttaactgttggatttatttat

SEQ ID NO: 201647 - DNA, 351 bp, Unknown
  Bacterial polypeptide expressing nucleotide sequence isolated from the Sargasso Sea
tatggagggaccaacaccagtttcagcgttaatacatgcggcaacaatggttacagcaggaatattcttattaattagatgttctcctttaatagagtattcaggattaacattaacagcagtaacaatatttggatcattaacagcattctttgcagcaacagttggattagtacaaaatgatattaagaaagttattgcttattcgacttgttcacaattaggatatatgtgtttcgcatgtggaatttcaaattataacacatcattattccatttagtaaatcatggtttctttaaagcattattattcttaagtgcaggatgtgtaattcatgctatggcagatga

SEQ ID NO: 201648 - DNA, 832 bp, Unknown
  Bacterial polypeptide expressing nucleotide sequence isolated from the Sargasso Sea
tatgtctcaaatttggttagtacctgccttccctctgcttggctttttacttaacggtatcttaggcaaaagatttggaacaagatttgtcagcattgttggcccgcttgcaattgggctagcttttacacaatcagtagtactttttttccagatgctttttacagatgggaatattctttctgaacatctctacacctggataaaaagtggtaattttgaagtaggtataaattttcaggttgaccagctttcagggctttatcttttggttatcactggtgtaggttttctaattcatgtttattccttaggttatatgaagggagaaactggctattatcgattcttcgcctacttaaatttatttgtttttttcatgctgatcttagttctaggcgacggctttttgctaatgtttgtgggttgggaaggagtaggattatgttcttatcttttaattggctattattttgagaaagatacagctgctaacgctgcaaaaaaagcctttctatttaatcgggttggtgattttggagtcctttcagcggtactgctgatctttctaacttttggatcaatagatttcaatacggtaaatgttgaagctgctgagaaattggagcatggtggaattctggttaccattattaccctcttgctgtttcttggggccacagggaaatcagctcaaatcccactttttgtttggctgccggacgcaatggaaggtccaacccctgtttctgctttgattcatgctgctacaatggttactgcaggattgtacatggttgcaagattaagtcacttgtttatactagctcct

SEQ ID NO: 201649 - DNA, 481 bp, Unknown
  Bacterial polypeptide expressing nucleotide sequence isolated from the Sargasso Sea
aatgagtatcgaaggggtcttgaaggaagggtttgtcaccaccacggcagacaaactgatcaactggacgcgcaccggctcgttgtggccgatgacgttcggtctcgcgtgctgcgcggtcgagatgatgcatgcgggcgctgcccgttatgaccttgaccgtttcggcgtggtgtttcgtccgagtccgcgtcagtcggacgtgatgatcgtcgccggcacgctgtgcaacaagatggcgccggctttgcgcaaggtctacgaccagatggccgagccgcgctgggtgatttcgatgggctcgtgcgcgaacggcggcggctactaccattattcctattcggtggtgcgcggctgcgatcggatcgtgccggtcgacgtctatgtgccgggttgcccgcctacggcggaagcgctggtgtatggcgtgatccagctgcaggccaagattcgtcgcaccaacacaatcgcccgtcaataa

SEQ ID NO: 201650 - DNA, 1072 bp, Unknown
  Bacterial polypeptide expressing nucleotide sequence isolated from the Sargasso Sea
attagctttgtctgtaatcacattagttggaatgaccacagcttttttcgcagctacagttgcattagtgcaaacagatataaaaaaaattatcgcttattcaacatgtagtcaattgggatacatgttttttgcagcaggtgtaggtgcatataatgttgcaatgtttcatttatttacacatgctttttttaaagctctacttttcttaggctctggatcagtaattcattcatttaaagatgaacaagatgttactaagatggggggagtatttaaaaaattaccctatacttatgcattaatggttgttggtactttagctttaacaggatttcctttcttatcaggtttttattctaaagatgcaataattgaatttgcttatataagtgaaacaaaatttggaatttatgctgctagtataggtgtattaactgctgtaatgacttctatatattcatggagattaatatttaaaacttttcatggagattacaaaaataaagatcttagtatagatacaatgcacgagtctccattaagtatgatgttacccttggtgttattagcagtaggtgctgttttttcaggatttttatttaaagaattatttataggtcatgatacaatgtacaacttttggggagagtctattaaatttctagaaccattaggaaaagaacatcctccaacttggtttttgtttctaactcctacattagtagttttaacaattccattgtcatattatctatttgttaaaaatactaaaattgtaaatgaaatagtttccattaacatgccggtttacatttttctccaaaaaaaatggtattttgacgaattgtatgatcaaatttttattaaaccctcaaaaagttttggaatatttctttggaaaaaaattgacggattaataatcgataaatttggaccagatggaatttcaaatttaataaaacttttttcttttaaagcagtaaagtttcaatcaggttatatttatcagtatgcctttataatgcttctaggtttttcaattttattaactttattaatagtaaaataa

SEQ ID NO: 201651 - DNA, 1056 bp, Unknown
  Bacterial polypeptide expressing nucleotide sequence isolated from the Sargasso Sea
tggtttttggtatcataaaaattctgctaacaaagcagcgataaaagcatttattgtaaatagggtcggagactttggtttagcaattggtattttcataatttataaatatttggggactttaaattatgaggaagttttcgacaggttaattacattaaatgataaaactatatctattttaggtatagaaggaagcattatatcatttattgcattcttcttatttattggtgccatgggtaaatcagcacaaatttttttacatacatggttaccagatgccatggagggaccaacaccagtatctgctttgatacatgccgctactatggtaaccgcaggcgtttttttagtggttaaatgttcaccgatttttgaaaattcaatattcgtattaaatttaatactggtaattggcgccagtaccgctctatttgcagcaactatagccttagttcaaaacgatataaaaaaagttattgcttattctacctgtagtcaacttggttatatgtttgttgccactggactaggcgcatatcacatcgccatgtttcacttgtttacacacgctttttttaaagctttgctttttttaggagcaggttctgtaattcactcgatgaagaacgaacaagacatgagaagaatgggtggattatggaataaaattccaattacttatgttttcatgattatcggaaccttagcaataactgggttccctttcttatctggtttcttttctaaagatgcaattatagaagcaacctattattcccaaagtaaatttgcaggatacgcaatggttttatgtatttttacagcacttttaactgcaatgtattcttggagactaataattaaaacatttcatggaaattttaacaatatcgacttagatttaaaagatgttaaggactcgggcttgataattatattacctttgcttttactatcaataggagcagtctcgtccggttttgcttttaaagaattactaatcggcattgattttataaaattttgggacaattcaatctattttaaaga

SEQ ID NO: 201652 - DNA, 1009 bp, Unknown
  Bacterial polypeptide expressing nucleotide sequence isolated from the Sargasso Sea
aatgattgaatacttacaaattttaggacaagagatttataaaattatttttttacttgttccaatacttgtatctgttgcaatgatagtttggttagatagaagagtatggggtttagtacaaaaaagaagaggacctaatgttgttggtccctttggactttttcaaactttagctgacgcattaaagtatatttttaaagaaatcataattcctgctagtgcgaataaagtagtttttattcttgctccaattgtaactatgactttagctttagtagcatgggctgtaattccaatgagtgaaaatttagttttagcagatataaatgtaggaattttatatttatttgctgtttcgtctttaggtgtttacggtattataatgggagggtgggcatctaattcaaaatacccttttttaggagcaattagatcagctgctcaaatggtttcctatgaagtctctattggaattatcatcattaatgttttgttatgtgttggatctttaaatttaaacgaaatcgtcatcgcacaaaaagagttatggtatgtaatacctctttttccaatgtttgtaattttttttatttctgcgctcgctgaaacgaacagacccccttttgatctacctgaagctgaggcagagttagttgcgggttatcagacagaatactctggtatgatgtatgcaatgttttggcttggagagtatgcaaatattcttttaatgtgtgcgatgggctcaattctatttcttggtggatggctaccaattatggatgtctatcctcttaacgtgatcccagcaccactctggatgatattaaaaatattatttttattcttattatttgcattaataaaagctattgtaccgcgatacagatatgaccaactcatgagacttggttggaaaatatttttaccattttcattaattcatcttgtactaacagcaagttttttgtttttttttgataaattacctaaggtgagcatctaa

SEQ ID NO: 201653 - DNA, 1003 bp, Unknown
  Bacterial polypeptide expressing nucleotide sequence isolated from the Sargasso Sea
aatgcaagaatatttttatatacttttatcagaaatttacaaaattttatttttattagttcctgtgcttgtttctgtagctatgatagtatggcttgatagaagagtatgggcttttgttcaaaagagaagagggccgaatgttgtaggaccgtttggactttttcaatctttagcagatgctctaaaatatttatttaaagaaattattatacccgcaagttcaaataaaattattttcatattagctccaattgtgacaatgactttagctttagtagcttgggctgtaattccatttagtgaagattttgtattagctaatatcaatgttggaattttatatatttttgcagtttcatcactaggtgtttacggaattataatgggaggttgggcatctaattcaaaatatccttttttaggttctattagatcagctgctcaaatggtgtcatacgaagtatcaattggtatcattataattaatgttttgctttgcgtaggatcattaaacttaactgatatagttttagcgcaagaaaaaatttggtttattgtacctttatttccaatgtttattattttttttatatctgctttagcagaaactaatagaccaccttttgatttacctgaagctgaagcagaattagtcgctggttaccaaacagaatattcagggatgatgtatgcgatgttctggttaggtgaatatgctaatattttattaatgtgttcattgggatctatattatttttgggtgggtggttatctccaataaatatttatccatttgatttaataccgagtccaatatggttaatttttaaaattttattgttatttatccttttttctttggttaaagctatagtgcctagatatagatatgatcaattaatgagattgggttggaaaatttttcttcctttttcattattctgggtagttttaacagcaagttatttactttattttaatttattaccggtaatttaa

SEQ ID NO: 201654 - DNA, 1009 bp, Unknown
  Bacterial polypeptide expressing nucleotide sequence isolated from the Sargasso Sea
atgatagagtatttacaaattttggcgcaagaggtttataaaataatttttttacttgttccaattctagtttccgtagctatgattgtttggttagatagaagagtgtggggcttagttcaaaaaagaagaggacccaatgttgttggtccctttggactttttcaaactttagctgatgcattaaagtatatctttaaagaaataattattcctgccagcgccaataaagtagttttcatacttgccccaattgtaactatgacattggccttagtcgcttgggcagttattcctatgagtgaagatttagttttggcaaatataaatgttggaattttgtatttgtttgcaatttcttctcttggagtttacggcattattatgggaggatgggcatctaattcaaaatacccttttctcggagctattagatctgcagcgcagatggtttcttacgaggtttcgataggaataataattatcaatgttcttttatgtgtcggatcattaaatctaaacgacatagttattacacaaaaggaattatggtatgtgattccgctttttccaatgtttgtaattttttttatatcttcactagcagaaacaaatagacctccttttgatttaccagaagccgaagctgagttggtggcagggtatcaaactgaatactcaggtatgatgtacgcaatgttttggttgggggaatacgcaaatatattgttaatgtgtgcgatgggttctatactttttcttggcggttggttgccactaatggacatttatccacttaatataattcctgctccaatatggatgatattaaaaattttgtttttatttttattatttgctctgatcaaagcaattgttccaagatatagatatgatcaactaatgagattgggctggaaaatatttttaccgttttcactaatttatctcgtgttaactgcaagttttttattttattttgacaaattaccaaaggtaaatatttaat

SEQ ID NO: 201655 - DNA, 991 bp, Unknown
  Bacterial polypeptide expressing nucleotide sequence isolated from the Sargasso Sea
ttgagcatagtttttcaagaggtttataagattttattcttattagttcctgttcttgtttctgtagcaatgattgtttggctagatagaagagtttgggcttttgttcaaaaaagacaaggacctaacgttgttggtccgtttggcttattacaatctttagcagatgctttaaaatatatatttaaagaaatcattattccatctagctcaaacaaagtaatttttatattggctccaatagtcacgatgactttagctttaatcgcttgggctgtaatcccatttagtgcaactcaggttttggctgatattaatgttggaatactttatttatttgccgtttcttcattaggtgtctatggaataataatgggaggctgggcatccaattctaaatatccttttctaggagcaattcgttctgctgctcaaatggtatcttatgaagtttcaattggagtaataattatcaatgttttactttgtgttggttcattaaacttaaacgacatcgttattgctcaacaaaatatgtggtttgtgattccattatttccaatgtttgtaatattctttatttccgctttagcagaaactaacagaccaccttttgatttaccggaagcagaagcagagttggttgcaggttatcaaacagaatattcaggaatgatgtatgcaatgttttggttaggtgaatacgcaaatattttattgatgtgtgcaatgggagcaatattatttttaggtggttggatgtccccaattgatgtttatccatttacattagttccaggtgcaatatggttaatattaaaaattcttcttttattcatcctttttgctttagttaaggcgatagtaccaagatatagatacgaccaattaatgagacttggttggaaagtttttcttcctctttctttaatttgggtggtattaacagctagctatttattttattttaaccttttacctgtgaattaat

SEQ ID NO: 201656 - DNA, 988 bp, Unknown
  Bacterial polypeptide expressing nucleotide sequence isolated from the Sargasso Sea
ttgggcaacgaagtttataaaattttatttctattacttccaatattagtttcagtggccatgattgtttggttggatagaagggtgtggggtttagtgcaaaaaaggaaaggaccaaatgttgtaggtccatttggtttactacaaacattggctgatgcattaaaatatatttttaaagaaataattattccagctagtgctaataaaacagtatttatacttgcccctattgtaacaatgactcttgctttagtggcttgggctgttattccaatgagtgaagaattagtattgtctgatattaatgtcggcatattatatttatttgctgtttcttctttaggtgtttatggaattataatgggtggatgggcttcaaattccaaatatccatttttaggcgcaattaggtctgcagctcaaatggtttcttatgaagtttctatcggaataataattatcaatgttttattgtgcgttggatcattaaacttaaaagacattgtcttagcgcaaaaagaactatggtacgtaattccactatttccaatgttcgttattttttttatttctgcattagcagagactaatagacctccttttgatttaccagaagccgaagctgagttagtggctggatatcaaaccgaatattctgggatgatgtatgcaatgttttggcttggagaatatgcaaatattcttttaatgtgtgcaatgggctctatacttttcttaggtggctggttgccaataattgatatttatccaattaatgtaataccagctccagtctggatgattttaaaaattttattcttatttttcttatttgctttaataaaagcaatagtaccgaggtacagatatgatcaattgatgagactaggatggaaaatatttcttccgttttctttagtatatttagtattaactgcaagttttttattttattttgataaattaccaaaaggaaacttttaat

SEQ ID NO: 201657 - DNA, 808 bp, Unknown
  Bacterial polypeptide expressing nucleotide sequence isolated from the Sargasso Sea
aaagaaaatattgttccggccaattcaaataaaatagtttttttattagctccaattattactatggttctaagtttggcaggatgggcagtaataccattcgctcctaatttggtaattgctgatataaatgtagggataatgtatttatttgctgtctcatctctaggtgtatacggaataataatggctggatgggcaagcaattctcaatatccatttcttggtgcacttcgatcagctgcccaaatggtttcatatgaagtgtcaataggttttgttattataactgtactcttatgtgttggatcattaaatctaaccaagatagttgaggctcaagaaactgtttggtttgctattcctcttttaccaatgtttgttgttttttttatatctgcattagccgagacaaatagattgccttttgatttaccagaagatgaatcaactcttgttgctggtttttttactgaatattcatcagcgtcttttgtattatttttccttggagaatacgcgagtatgatcttaatgagctcaatgaccgtaatattatttatgggaggttggctacctccatttgacatatacccacttaatgcaattccaggtgtaatttggtttgttattaaaattatatttattttatttttgtttatatgggttcgtggaacttttccaagatatagatatgatcaattaatgagattaggttggaaaattttcttacctctatctctattatgggttgttttaactgcaggttttttaattgcatttgatatggtgccaaactctttatgat

SEQ ID NO: 201658 - DNA, 1000 bp, Unknown
  Bacterial polypeptide expressing nucleotide sequence isolated from the Sargasso Sea
atggaatacttaaatatagtttttcaagaagtttataaaattttatttttactagttcctgttctcgtttcagtggcaatggtagtttggcttgatagaagagtttgggcttttgttcaaaaaagacaaggacctaacgtcgttggtccgtttggcttattacaatctttagctgatgctttaaaatatatattcaaagaaataattattccagctagctcaaacaaagtgatttttatattagctccaatagtcacgatgactttagctttaatcgcttgggctgtaatcccatttagtgcaactcaggttttagctgatattaatgttggaattctttacttatttgctgtttcttcactaggtgtctatggaataatcatgggtgggtgggcatcaaactccaaatatccttttcttggagcaattcgttctgctgcacaaatggtatcttatgaagtttcaattggggtaataattataaatgttttactttgtgtcggttcattgaatttaaacgacattgttattgctcaacaaaatatgtggtttgtaattccattatttccaatgtttgtaatcttctttatttcagctttagctgaaactaacagaccaccttttgatttaccagaagcagaggcagaattggtagctggatatcaaacagaatattcaggaatgatgtatgctatgttttggttaggtgagtatgcaaatattttattaatgtgtgcaatgggggcaatattatttttaggtggctggatgtctccaattgatgtttatccatttacgttagtaccaggtgcgatatggttaatatttaaaattcttcttttatttgttctttttgctttagttaaggcgatagtacctagatacagatatgatcaattaatgagacttggatggaaagtatttcttcctctttctttaatttgggtagtattaacagctagctatttattttattttaatcttttaccagtgaattaat

SEQ ID NO: 201659 - DNA, 1252 bp, Unknown
  Bacterial polypeptide expressing nucleotide sequence isolated from the Sargasso Sea
ttggaaattttaattctaggagtattactaattccgtttcttacatcgttacttttaaaagttgcaggaaaatatatgaatgagttacttacaaattttgtaactttgaatgcttcccttttatctgttgctgtatcttttttcttatttggatatatttttttggataaatttaaaccacttaagttcgagctctttgagtggtttcctgatccacaaatagtatttgaattttatctagatggactatctggtgtgatgatggttttaatttctactttaagtcttataattcaactattttcaacctcatatatgagcaaagatgaaaaatacacaaagtactttgaatatttcaatttttttgttttttcaatgttgctacttgtgatgtctggaaattttttagtaatgttttttggatgggaactagttggattgagctcttatctcttaatatctttttggtcagaaaagaaatcagcatcaaaagcaggaaacaaagcttttattttgaataggataggagactttggattccttattggtctcatgatgattttaaattatttcgaaacctttaactttttgagtatatttgaaaacactctaaaaacacgacctgaaaatttagatctcatgattttgtttttacttttaggtgcttttggaaaatctgctcagtttcctttatttagctggttaccagatgcaatggaaggaccaacacctgcaagcgcattgattcatgccgcaacaatggttactgctggtgtatttatgctggttagaatttcaccacttttgcagttttcagaaataggaagtatcacaattattagtcttggccttttaacagctctaatttctgctttcgctgcgataaatcaagacgacataaaaaaagttttagcttactcaactatttcacaacttggatttatgttcatagctattggagcaggtgcctatgttgcagcaatatttcatctcgtaacacatgcgttttttaaagcattgctatttctcggagcaggggctgtaattcatgaaatgcatcacgaacaaaatatttataaaatgggcggtcttagaaaaaaaatgccagtaactgctgcaatgatgggaattggaactttagcaatatctggtattccaccgttggcaggattttggtcaaaggatgaaatactagcctcggtattttctagaggaggaatttattatggattatgggctttgtctcttttag

SEQ ID NO: 201660 - DNA, 1285 bp, Unknown
  Bacterial polypeptide expressing nucleotide sequence isolated from the Sargasso Sea
cagttcccactgcatgtgtggcttccagatgcgatggagggccccaccccgatttccgccctgattcatgccgcaacgatggtcgccgcgggagtcttcctggtggctcgcctagatccgctctacagccagttcccgattgtccagaccgtgatcgccgtggtgggcacgatcacctgctttctgggggcatcgatcgccctcacccagatggacctgaagaaggggctggcgtacagcaccgtctcgcagctcggatacatgatgctggccatgggctgcggagcccctgttgcaggactgttccacctggtcacccacgcctttttcaaggcgatgctgttcctgggatcgggctcagtcatccacgccatggaagaggtggtcggccacgaaccggtccttgcccaggacatgcggctcatgggtggtctgcgccagaagatgccggtgacggccatcaccttcttcattggctgtatcgcgatcagcggcatcccccccctggcagggttctggagcaaggacgaaattctcggccaggccttcaacagcttccccgttctctggctggtgggcttcctcaccgccgggatgaccgccttctacatgttccgcctgtatttcctcacctttgaaggtgagttccgcggcaacgacacggccatgcaggcccagctgcttacggcagcaggcaaggaccctggcgaccatcacgcccatggcggcagcgttcatgaatccgcctggcccatggcagcccctctggcggtgctggcagtgccttcggtcctggtgggcctgctgggcactccttggaacagccgcttcgccggccttctgaatccagaggaagccatggagatggccgagcatttcagctggaacgagttcctgcccctggccggcgcttccgtggccatctctgttgtgggcatcaccctggccgtgctggcctacgccctgcaccgcattgacctgggtgtgttggtggcaggtcgtttccccagcatcaacgccttcctgaccaacaagtggtacctcgatgccatcaacgagaagttgttcgtgcgtggcagccgcaagttggcccgggaagtgctggaggtcgacgccaaagttgtggatggcgtggtgaatctcactggcctactcacccttggcagtggagagggcctgaaatatctggaaacgggtcgagcccagttttatgccctgatcgttttcgctggagtgatcggtctggtggtgttgtttggcgtcatcggcggaccaaccgcctgac

SEQ ID NO: 201661 - DNA, 1000 bp, Unknown
  Bacterial polypeptide expressing nucleotide sequence isolated from the Sargasso Sea
aatggaatatgtaaatttagtttttgaggaagtctacaaaatcctttttcttcttgtcccagttttagtttcagttgcaatgattgtttggttagatagaagagtttgggcttttgttcaaaaaagacagggccctaatgttgttggtccttttggtttattacagtcattagctgatgcattaaaatatatttttaaagaaatcataattccagcaagttctaataagattatttttattttagctcctatcattacaatgactttagctttaatagcttgggcagtcataccttttggagaagatcaggttttagcaaatataaatgttgggattctttatatttttgctatctcatctcttggagtttatggaattataatgggaggctgggcgtccaattccaaatatccttttttaggttcaataagatctgctgcgcaaatggtttcttatgaggtctcaattggtataatcattatcaatgttcttttgtgtgtaggatcattgaatttaagtgatatcgttttagctcaacaaaacatatggttcataattccgttatttccaatgtttgtaatattttttatatccgctttagcagaaacaaatcgacctccttttgatttacctgaggcagaagcagaattagttgctgggtatcaaactgaatattctggtatgatgtatgcaatgttctggttaggtgagtacgcaaatattttattaatgtgtgctttaggatcgattttattcttaggaggctggctttcgcctattgatttatatccgtttaatttgattccaggagctatttggttaattttaaagatattacttttatttgttttatttgcattagttaaagcagttgtgccaagatatagatatgatcaattaatgagattgggttggaaaatatttcttcccttgtctctaacttatgttgttttaactgcgagttatttattttattttaaccttttacctacaatctaa

SEQ ID NO: 201662 - DNA, 496 bp, Unknown
  Bacterial polypeptide expressing nucleotide sequence isolated from the Sargasso Sea
atgagtaaaattgattacacgagagcagcaaaatacttcctactaatggatatatggactggttttaagctaggatttaagtatttcttttcacgtaaaacgacactcaattatccacatgaaaagggagaactaagtccacgttttcgtggtgagcatgcgcttcgtcgatatccgaatggtgaggaaagatgtatagcatgtaagctctgcgaagcgatctgtcctgctcaggcaattacaattgatgctgaacccagggatgacggtagcaggcgtacaaccagatatgatatcgatatgacaaagtgtatttattgcggtttttgtcaagaagcctgccctgttgatgccatcgtagaggggccaaattttgagttttccactgagactagagaagagcttttttacgacaaagagaaattattagcaaatggtgacaggtgggaatctgaaattgcgaaaaatttagaaatggatgcaccttaccgatgag

SEQ ID NO: 201663 - DNA, 1038 bp, Unknown
  Bacterial polypeptide expressing nucleotide sequence isolated from the Sargasso Sea
catgtcgcaaatttggttggtacctgccttcccgctgcttggttttattctgaacggtattctgggcaaactatttggaacaagatttgtcagcattgttggcccgcttgcaattggactggcttttgcgcaatccgtggtgttgtttttccagatgcttaatacagatgggaatgttctctctgaacatttatacacctggataaaaagtggaaattttgaagcaggcataaattttcaggtggaccagctttcaggacttttcctgttgattattactggtatcggttttctgatacatgtttattctttaggctatatgaaaggggaacctggctattaccgatttttcgcctaccttaatttatttgtgtttttcatgctgatccttgtactaggagatgggtttttgctgatgttcgttggttgggaaggagtaggattatgttcttatcttttaattggctattactttgagaaagattctgctggtgctgctgcaaaaaaagcctttctatttaaccgtattggtgattttggagtgctttctgcggtattgttgatttttttaaattttggatcaatcgatttcaatacggtaaattccgaagctactgccagattggaacatggcggaattcttgtgaccattattacccttttgttgtttcttggggcaacgggtaaatccgctcaaattccactttttgtttggctacctgacgcaatggaaggaccaacacctgtttctgctctgatccatgctgctacaatggttactgcaggattatacatggttgccagattaagtcacttgtttgtactcgcaccactaacaatgaacataattgctgttgttggagctttaacagctcttttagcagcaagtattgcaatcacacaaactgatattaaaagagtacttgcttattccactgtcagtcaactcggttacatgtttttagccatgggagtaggagcgtttactacaggagtattccacgtaatgacacatgcattctttaaggcgcttctctt

SEQ ID NO: 201664 - DNA, 958 bp, Unknown
  Bacterial polypeptide expressing nucleotide sequence isolated from the Sargasso Sea
ctgttagttccaatattagtttcagtagccatgattgtatggttagatagaagagtttggggtttagttcaaaaaagaagaggaccaaatgttgttggaccttttggactttttcaaactatagctgatgctttaaaatatatttttaaagaaataattattcctgcaagtgcaaataaagtagtttttattcttgcaccaattattacaatgactttagctttagttgcatgggcagtcattccgatgagtgaagaattagttttatctgacataaatgttggaattttatatttattcgcagtttcttctctcggtgtttatggaataattatgggggggtgggcctcaaattcaaaatatccttttttaggtgctattaggtctgcagcacaaatggtatcatatgaagtttcaatcgggataataataattaatgttcttctatgtgttggctctctcaacttaaacgatattgtaattgcgcaaaaaaacttatggtatgtaattccgctttttccaatgtttgtaatattttttatctctgcacttgcagaaacaaacagaccaccatttgacttacctgaagcagaagcagagttggttgcaggttatcagaccgaatattcaggcatgatgtatgcaatgttttggcttggagagtacgcaaatattcttttaatgtgtgcaatgggatcgatactatttttaggaggttggttacctataatggatgtttatccacttaatatgattcctgctccaatctggatgatatcaaaaatattatttttatttttactatttgctttgattaaagctattgttccaaggtatagatatgatcaattaatgagacttggttggaaaatatttcttccattttcattaatttatctagtatttacagcaagtttcttattttattttgataaattaccaaaggtaaatttttaat

SEQ ID NO: 201665 - DNA, 370 bp, Unknown
  Bacterial polypeptide expressing nucleotide sequence isolated from the Sargasso Sea
tatgcttgcggaatttttaaaagattatctaccgataatattatttttaataatagctttgggtttaagtcttgcttttgttgcaattaattatattgccgctccaagtaaacctgatccagagaaactttcagcttatgaatgtggctttgaacctttcaacgactcaagaatggaatttgatgtaaggttttatttagttgcaatattatttataatttttgacttagaaattgcatttttattcccatgggctatctcacttggtgaaatcggtttatatggtttctgctctatgatgttatttttatttattttaacagttggatttatttatgagtggaaaaaaggagctttagattgggaataa

SEQ ID NO: 201666 - DNA, 370 bp, Unknown
  Bacterial polypeptide expressing nucleotide sequence isolated from the Sargasso Sea
atgcttgcggaatttttaaaagattatctaccaataatactatttttgataatagctttaggcttgagtcttgcttttgtagcaattaattatattgctgctccaagcaaacctgatcctgagaaactttcagcctatgaatgtgggtttgaacctttcaatgactcaaggatggaatttgatgttaggttttatttagttgcaatattatttataatttttgatttagaaattgcatttttattcccatgggcgatttcactgggtgaaattggtttatatggtttctgctctatgatgttatttttatttattttaactgtcggatttatttacgagtggaaaaaaggtgctttagactgggaataat

SEQ ID NO: 201667 - DNA, 1237 bp, Unknown
  Bacterial polypeptide expressing nucleotide sequence isolated from the Sargasso Sea
atggaatacattctattagtagttgtttttatccctttgatggtctcaatatttttaaattctatttctacattattaaatgaaagattgacaacgtttataacgataaatggtgcactcttatcatttacagtctcactttttatgttcgcagttctactcttagataaatttaaaccaatttctttaaagttatatacatggtttcctcatccagaaataagatttgaatttcttcttgatggtttatcgggaacaatgatgcttttagttactggcctaggtttggtaatacaaatattttctacctcatatatgagtggcgatcctagatatgttaaatactttgtatactttaatttctttgttttctcaatgcttctattagttatgtcagctaactttttagtcatgttctttggttgggagcttgttggcttaagttcttatctactaatttctttttggtctgagaagaaagaagcagctaaagcaggaaataaagcattcgtattaaatcgaattggagattttggttttttgattgctttaatgatgatattaaatacctatgatacgttttcctttaaaacagtttttgcaacaacattaacaaatcagccacagaatctagatcttattgttgtctttctcatgattggtgcttttggaaaatcagcacagtttcctttatttagctggctgccagacgcaatggaaggaccaactccagcaagtgctttgattcatgctgcaacaatggtgacagcaggtgttttcatgctggttcgaatttcaccgctattacagttttcagaattatcaagtatcctaattataagtatcggtctcttaacggctttaatctcagcttttgcggcaataaatcagaatgatattaaaaaggtacttgcttactcaacaatctcacagttgggatttatgttcatagcaattggggctggagcatatgttgcagcaatttttcacttagttacacacgcatttttcaaagcattacttttcctaggtgctggtgctgtaatacacgaaatgcatcacgaacaaaatattcaaaagatgggtggcttaaagaaaaaaatgccactgaccgcagcaatgatgggtatagggactttagcaatttcaggaatacctccacttgcaggtttttggtctaaagatgaaattcttgcatctacttttgctaatggtggaatttattatggattctggg

SEQ ID NO: 201668 - DNA, 889 bp, Unknown
  Bacterial polypeptide expressing nucleotide sequence isolated from the Sargasso Sea
tttgttcaaaaagacaaggtccaaatgggttgttggtccatttggcttattacaatccctagcagatgccctaaaatatattttcaaggaaattataatacctgctagttcaaacaaagtaatttttattcttgctccaataataacaatgactctagctctaatagcatgggctgtaattccttttggagttgaacaagtattagcagatataaatgttggaattttatatatttttgctgtctcatcattgggtgtgtatgggataataatgggtggatgggcatcgaattcaaaatatccttttttaggagcaattagatctgctgcacaaatggtatcttatgaagtatcgattggtattattataattaatgtcttattatgcgttggatccctaaacttgaatgatattgtagttgctcaaaaagaaatgtggtttgtaataccattatttccaatgtttgtaattttttttatatcagctttagctgaaacaaatagaccaccttttgatttaccagaagctgaggctgaattagttgcgggttaccaaacagaatattctgggatgatgtatgcaatgttttggttgggagagtatgcaaatattttgttaatgtgtgcactagggtcaattttatttttaggaggctggttatctccgatcgatctttatccttttaatttaatacctggcgctctttggttaattttcaaaattttatttttatttattctttttgcgttggtcaaagcgattgttccaagatatagatatgatcaactaatgagactaggttggaaaatatttttaccattatctttaacttatgttgttttgacagcaagttatcttttttactttaatcttttacctacaatataa

SEQ ID NO: 201669 - DNA, 2023 bp, Unknown
  Bacterial polypeptide expressing nucleotide sequence isolated from the Sargasso Sea
atgccacaagcttcagaaattgcctggttaattcctgttttcccacttattggagcagtgctttctggcttaggactaataagcattaacaagaaaattaataattcaagagaaattgtttctgtaggtctgatttctttcgttgggatttctgcggtaattagttataaagctttaattgaacaagttaatggttatcaatcagtagaaaaattatttgtatgggccaatgcaggggatttcacaattccaatgggatttgtccttgatcctttagggagtgtaatgcttgcgttagtaactacaataactttgcttgtaatgatttactctcatggttacatggcgcatgacaaaggatatgtcagattttttacatatttagcattatttagtagttcaatgatgggattaatagttagtccgaatttattagaaatttatgttttttgggaattagttgggatgtgttcttatttattagttggtttttggtatgacagggatggcgctgcacacgctgctcaaaaagcatttgttgttaatagagtgggagattttggtttattactaggaattcttggcctattttgggcaacaaatagttttgattttaatgaaatagctactggaatttctcaatctatatctgaccattcgatacccatttgggctgctttattactttgttttttagtttttctagggccaatggctaaatccgctcagtttcctcttcatgtgtggttgcctgatgcgatggaaggtcctacaccaatttctgcacttatccatgctgcaacaatggttgcagcaggaatatttcttgtagcaagacttcaacctttgtattcaatatttccctctattcagttcattattgctttagttggtaccattacttgttttttaggagcctctatagctttgacccaaatggatttaaaaaaaggtttagcatatagcacagtttctcagcttgggtatatgatgctcgcaatgggttgcggagcaccagttgcaggaatttttcatttagtaactcatgcttgctttaaagcaatgctatttttgggatctggttcagtaatacatgctatggaagaagtagttggccatcagcctgtattggctcaagatatgagattgatgggcggtttaagaaaaaaaatgccatatacatcaacaacatttttaataggatgtgtagcaattagtggaattcccccattggcaggtttttggagtaaagacgagatactgggaaatgcttttatatcatttcccgctttttggttcgtaggacttctaacagctggtatgactgctttttatatgtttaggctttatttcttgacatttgaaggagatttcagaggggagaataaagaattgcaaaaacagcttctaatagcctctcaaacaaccctagatgaagaaaatgaagaagagcatgaagaacatggctctatccatgagtcaccctggtcaatgacatttcctttggtatttctagctgtaccatctgtaataattggttttatgggatttccatgggatagcaaaattgcaaatttactagatcctgaagaagcagagactgctgcaaaagccttcgaattaaaagaatttttgcctttagcacttgcttcagtagttattgcatcagctggaatcattattgcttatcaagcatattttgtgaaaaaaattaatttatcagttttatttgccgaaaagtttcctagcatcaaccgatttttatcaaataaatggtaccttgatgatattaatgaaaaactttttgttaagggtagtagaaaacttgctaaagaagttttagaggttgattctaaggttgttgatggcgttgtaaatcttactggacttgtaactttaggtagtggagagggtttaaaatattttgagaccggtagggctcaattttatgcgcttattgtttttggaggtgtaattttactagttgctatatttggttttcaatctcctcaagtttcttaat

SEQ ID NO: 201670 - DNA, 1318 bp, Unknown
  Bacterial polypeptide expressing nucleotide sequence isolated from the Sargasso Sea
aaaaataccagagatagtagataaagaattattttttataggcattaatataaatgccgtagatttaatatgtttgcttttattcataggagctatgggaaaatctgctcagatctttcttcatacatggcttccagatgctatggagggtcctacgccagtatctgctttaattcacgcagcaacaatggttactgctggagtttttttggtggttagatgttcacctatatatgaatactcagagttagcactatcaataataaccatagtaggcatggttacagcattttttgcagcaagtgtagcgcttgtacaaacagacataaaaaaaattatagcttattcaacatgtagtcaacttgggtatatgttttttgcagcaggtgtaggagcctatagtgttgctatgtttcatttatttacacatgctttttttaaagcattgttatttttaggatctggttctgtaatacattcttttaaagatgaacaagatattaaccaaatgggcggtgtgtggaaaaaactaccatatacctatgttttaatgatcattggtacattagcactaactggtttcccatttctttcaggtttttactcaaaagatgcaataatagaatttgcatttttaagagggaatagtttaggattttatgcttctagcataggtgtctttacagctttattaacttctatttattcttggagacttatatttaagacttttcatggaagctataataattcaaaactaaaaatagatacaatgcatgaatcgccgaagactatgcttgtcccattaattatattagcattaggtgcaatttttgctggtattttatttaaagatttatttattggtcatgaaacatcctatgaattttggtcaagttcaattaaatttttagaacctctaagcaaggaacatcctccaatttggtttatttatttaacaccattattagttattatatctatccctctagcctattacttatttataaaaaacaaaaaaattgttgattcaattgtaaaatcaaacaagcccttttatctatttttaataaataaatggtacttcgatgaactttatgattttatttttatcaaaccatcaaaaaaaataggacactttttatggaaaaaaattgatgtttccttaatagataaatttggtcctgatggcatatcacaattaattaaatatttttctttaaaagcggttaaatttcaaagcggatatatatatcagtatgcttttgtaatgcttataggtttttcaattctactaactttacttttggtgaaataa

SEQ ID NO: 201671 - DNA, 370 bp, Unknown
  Bacterial polypeptide expressing nucleotide sequence isolated from the Sargasso Sea
gatgcttgcggaatttttaaaagattattttacaattattttattcctaattattgcattaggtttaagctgtggattcataatattaaattattttttttctcctaataatcccgatccagaaaaattatcagcttatgaatgtggatttgatgcttttgatgactcaagaatgcaatttgatgttaggttttatttagttgcaattctttttataatttttgatttggaaatagcctttctcttcccttgggctatatctttaggaaatattggtctttatggatttgtttctatgatgatattcttaatgattttaacagtaggattcatttatgaatggaaaaaaggagctttagattgggagtaa

SEQ ID NO: 201672 - DNA, 1512 bp, Unknown
  Bacterial polypeptide expressing nucleotide sequence isolated from the Sargasso Sea
aatgctgggggattttacaattccaatgggatttgtacttgatcctctgggcagtgtaatgcttgctttagtaactaccataactttgctcgttatgatttactctcatggttatatggcgcatgacaagggttatgtcagattttttacatatttagcattatttagtagttcaatgatgggattaataattagtccaaatttgttggaaatttacgttttttgggaattggttggaatgtgttcttatttgttggttgggttttggtatgacagagatggtgctgcccatgctgcacaaaaagcatttgttgttaatagagtcggagactttggattattactaggtattcttggactattttgggccacgaatagttttgattttaatgagatagctactgttatttcacaatcagtctctgataattcattaccaatttgggctgctttaatactttgttttttagtttttttagggccaatggcaaaatctgcgcagtttcctcttcatgtatggttgcctgatgcgatggagggccctacaccgatttctgcacttatccatgcagctacaatggttgctgctggaatatttctagtggcgaggctgcaacctttgtattcaatattcccctctattcaattcattattgctttagttggtactattacttgttttttaggtgcttctatagctttgacccaaatggatttaaaaaagggattagcatatagcaccgtttctcagctcggttatatgatgctcgcgatgggttgtggagctccaatagcaggtattttccatttagtcactcatgcttgctttaaagcaatgctatttttggggtctggttctgtaatacatgctatggaagaagtagtaggtcatcagcctgtattagctcaagacatgagattaatggggggtttaagaaaaaaaatgccatatacatctgtaacattcttaataggttgtgtagcaattagtggtatacctccattggcaggtttttggagtaaagacgagatactcggaaatgcatttatatcatttccagttttttggtttgtaggacttttaacagctggcatgactgctttttatatgtttaggctctattttttgacatttgaaggagattttagaggtgataataaagaattacaaaaagagcttttaatggcttccaaagtaaatcttgatgaagaaaatgatgaagagcatgaagaacatgaagaacatggctatattcatgagtctccttggtcaatgacattcccattagtctttttagctgtaccctctgtaattatcggctttatgggacttccatgggatagtaaatttgcaaatttacttgatcctgaggaagcagatattgctgcaaaagcctttgaattaaaagaatttttgcctttagcgatagcatcagttgttattgcatcaactggaataattattgcttatcaagcatattttgtgaaaaaaattaatttgtcaattttatt

SEQ ID NO: 201673 - DNA, 367 bp, Unknown
  Bacterial polypeptide expressing nucleotide sequence isolated from the Sargasso Sea
atgcattccattttgaacgactaccttccaatattaatttttatgtcattagctgcttttgttgttatggctttgacattgcctcctatattatttgctccaaaaaaccctgataaagagaaattatctcagtatgaatgtggtttcgaaccttttgatgatgcaagaactaaatttgatattagattttacttagttgctattctttttataatttttgatctagaggtcgcgtttttatttccttgggcagtagtttttggtgatataggtatttttggttttgtatctatgatggtttttcttggagtgcttactattggtttcatttatgaatggaaaaaaggtgctttggaatgggattaat

SEQ ID NO: 201674 - DNA, 370 bp, Unknown
  Bacterial polypeptide expressing nucleotide sequence isolated from the Sargasso Sea
gatgcttgcggattttttaaaagattatttttcaattattatttttttaataatagcttttggcttaagttgtgtttttattttactgaattttttgttatctccaaaaaatccagaccctgaaaaactttcttcatacgaatgtggttttgaaccatttaatgattctagaatggagtttgatgttagattctacttagttgctatattgtttattatttttgatttagaaattgcttttttatttccttgggcaatatcactgggtaatatcggttttctaggctttatttcaatgatgatatttctgtttattttaacagtaggttttatttatgaatggaaaaaaggtgcattagattgggaataa

SEQ ID NO: 201675 - DNA, 1319 bp, Unknown
  Bacterial polypeptide expressing nucleotide sequence isolated from the Sargasso Sea
tttgcaagtcattttggataatgcatatctttataaagaaaaaagcttttattttataggttttaatttaaacataattgataccctttgttttttattatttataggagcaatgggaaagtctgcccaattaggattacatacttggttacctgatgcaatggaaggtcccactcctgtttcagctttaattcatgctgctactatggttactgctggagtatttatggtagcacgaatgagtccaatgtttgaatttgctgaatttacaaatttatttattatttttattggatcaacaacagcaatttttgctgcaagtatagcattaactcaaaatgatattaaaaaagtaattgcttattctacttgtagccagctagggtatatgttttttgctgctggattgggagcatataatgcttcaatatttcatttaatgacacatggattttttaaagctttactttttctatctgcgggatctgtgattcatgcaatgcatcatgaacaagatatgagaaaaatgggaggcttattttttaaaattccttttactggagttatgatgtggattggttcattagcaataataggctttccatttttttcaggatattattctaaagaaagtattttagaaaatgctttttttgcttcctctaacatggcaaattatgcctatatagtaggtattattactgctttacttacagctttttattcttggagattattatttatgacttttcatggagattttaagtcatcaaaaacaatattattaaatgttaaagaatctcctaaggtaatgactttacctttattcttattagcaattggttcaatattttctggaatatttttaactgatttctttattggcaagaacagtgatgttttttggtataactctattattttagctcatgaacatcatcattatatgccttttttccaaaccttattaattaaatcttctgtagctataggcatttcagctgcttctttattatatttttataataaaaacttatctttaatattatcaaaaaaattaccttttttttatttgttatctttaaacaaatggtatgttgacgaactctatagaaaaatatttgtaaaaccaattttttatttagctacttttttttggaaaaaaggtgacataaatactattgatacatatggacctaacggtgcttcaaaattaatcaatattttctcaaaaaacttaagtatatttcagtctggttatctatatcactatgcttttgcaatgctaggaggtttagtaataattttatcttggttta

SEQ ID NO: 201676 - DNA, 358 bp, Unknown
  Bacterial polypeptide expressing nucleotide sequence isolated from the Sargasso Sea
gatgcttgaaaactacctgccaatagcagtttttataatcatagctggagtgcttggcttattgatgctcggcttgggctttctcttcggtaaaggcgctaaaacaaaagcaaaactgtctccttatgaatgtggttttgaagaatttgaagacgcacgaataccatttgatgtcagatattacttagtagctattctattcataatttttgatcttgaaattgcctttttatttccatgggcaatagcccttgatgagatcggtcatgtgggtcttatatctatgattatttttctctttgttttggttatagggtttgtatacgagtggaataaaggagcattggattgggattag

SEQ ID NO: 201677 - DNA, 367 bp, Unknown
  Bacterial polypeptide expressing nucleotide sequence isolated from the Sargasso Sea
gatgaacacgtttttattagattatattccgataattatttttcttgggattgctattggtatggcttctttaattatgattgcctcttggattgtagccaaacaaaatccagatgaggaaaagttgtcaccttatgaatgtggctttgacgcttttgaagataccaggtcacaattcgatgttagattttatttagtggctatactatttataatatttgatttggaggtagcatttctttttccttgggcggtgtctttaggatcaattggattattgggcttttggtcaatgatggtttttcttggagtattaactattggttttatttatgaatggaaaaagggcgccttggaatgggagtag

SEQ ID NO: 201678 - DNA, 490 bp, Unknown
  Bacterial polypeptide expressing nucleotide sequence isolated from the Sargasso Sea
atgggattagagaacattaaaaaagatggttttgttttagcaaaatcctctaatctttttgattgggcaagaacaggatcgttgtggccaatgacttttggtttagcatgttgtgctgtagaaatgatgcatgctggtgcatcaagatatgatcttgataggtttggcatgttgtttagacctagtccaagacaatctgatgtaatgatagttgcagggactttagtaaacaagatggccccggctcttcgtaaagtttatgatcaaatggcagatccaaaatgggttatatctatgggctcttgtgctaatggcggagggtactatcattattcatattctgttgtaaggggctgtgatagaattgtccctgttgatatttatgttccaggttgtcctcctactgcagaagcattgttatatggtatattgcaattacagaacaagattagaaaatctaatacaatccatgccgaaagcataacctaga

SEQ ID NO: 201679 - DNA, 358 bp, Unknown
  Bacterial polypeptide expressing nucleotide sequence isolated from the Sargasso Sea
atgattttagagtatttacctatattaatttttacaatatttgccttgatatttgcagggataatgctcagtgtcggttttacttttggagataataatcctagtgctgaaaaaaattcaccttacgagtgtggatttgaagcttttgaggattctagaatgaaatttgatataagatattatcttgttgcaatattattcataatatttgatttagagattgcttttctttttccatgggcagttgttattcatgagataggtgttgttggattaatttctatggctattttcctaacgatcttaatagttggatttatttatgagtggaagaaaggagctcttgaatgggattaga

SEQ ID NO: 201680 - DNA, 361 bp, Unknown
  Bacterial polypeptide expressing nucleotide sequence isolated from the Sargasso Sea
aatgcttgaaggatatttttctatactagtttttcttgtcattagcactgtaatttgcacttttccaattttaatttcattaattgttaataaaagcaaaaaaattgaagaatcaaaaaaatctccttatgagtgtggttttgagcattttagtgacgcaagaatgaattttgatgtaagatattacttggttgcaatactttttatcatctttgatttagaaattgcttttctttttccttgggctgttgcaatagatcagattggtatctctggtcttttatcaatggtcttttttctatttgttttaattattggttttatatacgaatggaagaaaggcgcactcgattgggattaa

SEQ ID NO: 201681 - DNA, 991 bp, Unknown
  Bacterial polypeptide expressing nucleotide sequence isolated from the Sargasso Sea
ctgaatattgttttcgatgaagtatataaagtattatttttattagttcctgttctagtgtctgtggcaatgattgtttggcttgatagaagaatttgggcttttgtgcaaaagcgacaaggaccaaatgttgttggcccttttggattattacagtctttggctgacgctttaaaatatatctttaaagaaatgatcattccttcaagttcaaataaagtaatattcatattagctcccatagtaacaatgaccttagctcttatagcttgggcagtaattccatttagtgcaactcaagtattagcggatataaatgttggtattctttacttgtttgcagtttcatcattaggcgtatatggaattataatgggtggttgggcctcaaattccaaatatccttttttaggcgcaattcggtctgcggctcaaatggtatcttatgaggtatctattggagtaattataataaatgtattattgtgtgttggctcgctaaacttaaatgacattgttattgctcagcaaaatgtatggtttgtaatcccattatttccaatgtttgtaattttttttatttcagcattggctgaaacaaatagaccaccttttgatttaccagaggcagaagcagaattagttgctggatatcaaactgaatattctggcatgatgtatgcaatgttttggttaggtgaatatgcaaacattttattaatgtgtgcaatgggtgcgatattgtttttaggtggctggttatcacctattgaattatatccattcacattggtaccaggagctatatggttaattctaaaaatattacttttatttttcttgtttgctttagttaaagcaatcgttccaaggtatagatatgatcaacttatgagattaggttggaaggtgtttcttcctttttctttaatttgggtagtgcttactgcaagttatttgttttattttaatcttttacctgtgagctaat

SEQ ID NO: 201682 - DNA, 370 bp, Unknown
  Bacterial polypeptide expressing nucleotide sequence isolated from the Sargasso Sea
atgactgcggaatttttaaaagattacttatctataattttatttttatttgttgctttaggattaagctgtgcatttatagtaataaattttattttatctcctaaacatccagatccagaaaaattgtctgcttatgagtgtggttttgaaccttttcaagattcaagaatggaatttgatgttagattttatttagttgcaattttatttattatttttgatcttgaaattgcatttttatttccttgggcaatttctttaggcaacattggaattcttggttttacatcaatgatgatttttttgttcattcttactgtgggttttatttatgaatggaaaaaaggtgcgctagattgggaataat

SEQ ID NO: 201683 - DNA, 283 bp, Unknown
  Bacterial polypeptide expressing nucleotide sequence isolated from the Sargasso Sea
ttattttgtattttcacaaataatccagatccagaaaaattatcgtcttacgaatgtggctttgaaccttttaatgactcgagaatggagtttgatataagattttatctagttgcaattttatttataatttttgatcttgagattgcctttttatttccatgggcaatatcacttggaaaaataggaatttttggatttatttcaatgatgatttttttaggaatattaactgtaggttttatttatgaatggaaaaaaggagcacttgactgggagtaat

SEQ ID NO: 201684 - DNA, 370 bp, Unknown
  Bacterial polypeptide expressing nucleotide sequence isolated from the Sargasso Sea
atgttatatgattttttaaaagattacgcgactatcttaatattcttattcatatcaattggaattggagtgggatttatatttttaaacttactattttctcccaataatccagatagcgaaaaattatcagcttatgaatgtggatttgaagcatttggagacgctagaatgaaatttgatgtaagattttatcttgtagccatattatttattatttttgatttggaagtagctttcctttttccatgggctgtctcacttggaaacataggcttactgggtttttggtctatgatgttttttttattaattttaactgttggctttgtgtatgaatggaaaaaaggagctttagattgggagtaat

SEQ ID NO: 201685 - DNA, 367 bp, Unknown
  Bacterial polypeptide expressing nucleotide sequence isolated from the Sargasso Sea
gatgactgatatgctgcaacagtacttaccaattcttgtatttatggcggttgctactgctattggactggttcttcttgggcttggttttttgcttggtagaggtaataaggatgatgaaaaactatcaccttatgaatgtggtttcgaaccttttgaagactcaagaatgaaattcgatgttcgttattaccttgtggcaattctttttattatttttgatctagagatagcatttttatttccctgggctgtttcccttgatgttattggaggatttgggttggtggctatggccatttttctcacagtgcttgttgttgggtttatctatgaatggaaaaaaggagctttggaatgggattag

SEQ ID NO: 201686 - DNA, 265 bp, Unknown
  Bacterial polypeptide expressing nucleotide sequence isolated from the Sargasso Sea
atgcttgcggaatttttaaaagattatttgccaataattgtatttttgctagttgcacttgtattaagtgtagcatttgtggcggtcaattatttagcatctccaaaaaatcctgatccagaaaaattatcagcatatgagtgtggattcgaaccatttaatgactctagaatggaatttgatgttagattttatcttgttgcaatattatttattatttttgatttagaaatcgcttttctattcccttgggcaatatcttagg

SEQ ID NO: 201687 - DNA, 1243 bp, Unknown
  Bacterial polypeptide expressing nucleotide sequence isolated from the Sargasso Sea
gatgctctttttcgttatggcgcaaaacatcgtccagctaatagttggttgggaactagttggcgtatgttcatttgctttaataggtcactggtgggaagaaaagcccaacacggacgctgcgctcaaagcctttctaacaaaccgggttggcgacgttggtttgctcgtcgggatgatcattctgtggggaacgtttaacactttcgatattgatgcaattaatacgctgatatcgagtgatccaggagctcatcacctagcgcttttagtggcagcttgttgcttaatggcagcagtggcttcgaaatctggtcaattcccattacatacatggcttccagatgcaatggcgggccccacgcctgtctcagctctaattcacgcagcgacaatggtcgtagccggcgtctatatgatcgccaggctatatccggtattttatgaaggcttttcgatcggtactagttcgatcaacctgatggcatttataggcggttttactgccctcatcggggcgggacttgcctttgcccaatgggacataaagaaggtcttggcgtactcgactgtttctcaacttggctacatggtcatggcgttaggtgtcggcgcatggaccgcagcgatattccatctatttacccatgctttctttaaagcttgccttttcctaggggccggctcggtaagccatgcagcacaccacactttcgatatgcggaaaatgggtggcctacgaaaagacatgccgcacacatacaaaacgttcgtcatttcatcgcttgcgcttgcaggaatctttccgttcgcggggttttggtctaaagacgagattttgttgggttccctcgctggccaagaaaatggttacccactgatgcttattttcggttgcgcagttgcactgatgactgctgcctatatgactagggttatttggtacacattccatggcgagttcaggggacatggtcaccctcatgagtcgcccagagtgatgactgtgccgctttggatacttgcaggaatggctgttgccgcaggagcgtttaatcttccgacgccagtgcttgaaccgttcgggctcgaaggattggcgcaccgcatccaaacttatgcagagccgtcgatctatctccaaggaatgggcctgtcacatcctgacccctcacttaacatggccctcgtaggcctagttctcgcgctctccggtatcgccatcacctatctctactattgg

SEQ ID NO: 201688 - DNA, 991 bp, Unknown
  Bacterial polypeptide expressing nucleotide sequence isolated from the Sargasso Sea
ttgagcatagtttttcaagaagtttataagattttattcttactagttcctgttcttgtttctgtagcaatgattgtttggctagatagaagagtttgggcttttgttcaaaaaagacaaggacctaatgttgttggtccgtttggcttattacaatctttagcagatgctttaaaatatatatttaaagaaatcattattccatctagctcaaacaaagtaatttttatattggctccaatagtcaccatgactttagctttaatcgcttgggctgtaatcccattcagtgcaactcaggttttggcagatatcaatgttggaattctttatttatttgctgtttcttcactaggtgtctatggaataataatgggtggatgggcatcaaattccaaatatccttttcttggagcaattcgttctgctgcgcaaatggtttcttatgaggtttcaattggggtaataataataaatgttttactttgtgttggttcattgaatttaaacgacattgttattgctcaacaaaatatgtggtttgtaattccattatttccaatgtttgtaattttctttatttctgctttagctgaaactaacagaccaccgtttgatttaccagaggcagaagcagagttggttgctggataccaaacagaatattcaggaatgatgtatgcaatgttttggttaggtgagtatgcaaacattttattaatgtgtgcaatgggggcaatattatttttaggtggctggatgtctccaattgatgtttatccatttactttagtaccaggtgccatatggttaatattaaaaattcttcttttatttattctttttgctttagttaaggcgatagtacctagatacagatatgatcaattaatgagacttggatggaaagtatttcttcctctttctttaatttgggtagtattaacagctagctatttattttattttaatcttttaccagtgaattaat

SEQ ID NO: 201689 - DNA, 370 bp, Unknown
  Bacterial polypeptide expressing nucleotide sequence isolated from the Sargasso Sea
atgatatataattttttagcagattatttttcaataatagtttttttatttatagctttatttttaagctttggttttattttagttaatttttttgcatccccaagtaatcccgaccctgaaaaattatcagcatatgaatgtggttttgaagcttttggtgattcaaggatggaatttgacgtaagattttatctagtagcaatattatttatcatttttgacttagaaatagcttttttatttccttgggcaatctcattgggaaatattggcttattaggtttttggtccatgatgatatttttactaatattaactgttggatttatatatgagtggaagaagggtgctttggaatgggagtaaa

SEQ ID NO: 201690 - DNA, 337 bp, Unknown
  Bacterial polypeptide expressing nucleotide sequence isolated from the Sargasso Sea
atgaatacatttgaagagaaacaaaatcaaataccagacgaatttaaaaagttagcaaaagattttgctgaaaaaggttttataacaacttcaacaaataatttaataaactgggcaagaactggttctttacactggatgacttttggtttggcatgttgtgctgtagaaatgatgcaaacttctatgcctagatacgacctagaaagatttggtgctgctccaagagcttcacctagacaatcggatgtaatgatcgtagcaggaacattgacaaataaaatggctccagctttaagaaagtttatgatccaatgccggaacctcgttatgtaat

SEQ ID NO: 201691 - DNA, 499 bp, Unknown
  Bacterial polypeptide expressing nucleotide sequence isolated from the Sargasso Sea
attgggattagaaactgataataatttaatcgatcaacagggtccagggttcatcatcacttcagttgataagcttgtaaattgggctagaacaggatcgatgtggcctgtcacttttggtttagcttgttgtgctgttgaaatgatgcatgctggagcttcaagatatgatacagatcgttttggtgtattctttaggccgagcccaagacaatctgatgtcatgattgtcgctggtacattggttaataaaatggcgccagcactcagaaaggtttatgaccaaatggcagaacccaaatgggtcatctctatgggatcatgtgccaatggaggtggttactatcatcactcatattctgtggttagaggttgtgatcaaatcataccagtcgatatctatgtacctggttgtcctcccacttcagaggcactaatcaacggaatcatagaacttcaagaaaaaatcaaaaaagaagaatcaatagcaaatggatag

SEQ ID NO: 201692 - DNA, 358 bp, Unknown
  Bacterial polypeptide expressing nucleotide sequence isolated from the Sargasso Sea
gatgcttgaaaactacctgccaatagcaatttttataatcatagctggagtacttggcttattaatgcttggcttgggatttctctttggaaaaggcgttaaaactaaagcgaaactgtccccttatgaatgtggttttgaggaatttgaagatgcccgaatcccttttgatgtaagatattatttagttgctattctattcataatttttgatctagaaattgccttcttatttccttgggcaatagcacttgatgagataggtcatgtaggtcttatttcaatggtaatttttcttcttgttttggttataggatttgtgtacgagtggaacaaaggagctttggattgggattag

SEQ ID NO: 201693 - DNA, 367 bp, Unknown
  Bacterial polypeptide expressing nucleotide sequence isolated from the Sargasso Sea
cttgcggaattttttaaaagattatctaccgataatattatttttgataatagctttaggcttaagtctagcctttgttgcaattaactatattgctgctccaagcaagcctgatccagagaaactttcagcttatgaatgtgggtttgaacctttcaatgactcaaggatggaatttgacgtcaggttttatttggttgcaatattatttataatttttgatctagaaattgcatttttattcccatgggcgatctcactgggtgaaattggtttatacggtttctgctctatgatgttatttttatttattttaactgttggatttatttacgagtggaaaaaaggtgctttagattgggaataa

SEQ ID NO: 201694 - DNA, 1435 bp, Unknown
  Bacterial polypeptide expressing nucleotide sequence isolated from the Sargasso Sea
tttgggcaacccaatagttttgattttaaggagatagcttctggtatttctcaatcagtatctgacaattcaatacctatttgggctgctttactcctttgttttttagtttttttaggcccaatggcaaaatctgcgcagtttcctcttcatgtatggttacctgatgcgatggagggcccgacaccgatttcagcacttatccatgcagccacaatggttgcagcaggcatatttctagtagctagactccaacctctttattcaatattcccctccattcagtttattattgctttagttggcaccattacttgttttttaggagcctctatagccttaacccaaatggatttaaaaaaggggttagcctacagcactgtttctcagcttggttatatgatgcttgcaatgggttgtggagctccaatagcaggaattttccatttggttactcatgcttgctttaaagcaatgctatttctgggatctggttctgtaatacatgctatggaagaagtagttggtcatcagcctgtgttggctcaagatatgagattgatgggcggtttaaggaagaaaatgccatatacatctgcgacatttttaataggttgtgtagcaattagtggtattcctccattggcaggtttttggagtaaagacgaaatactcggcaatgcatttatatcatttccagctttttggtttataggacttttaacagctggtatgactgctttttacatgtttaggctttatttcttgacatttgaaggtgatttcagaggggagaataaagaattacaaaaagagcttttaatctcttccaaagtaaatctagatgaagaaattgaagaagaggatgaagaacatggctatattcatgagtctccttggtcaatgacatttcccttggtatttttagctgttccctctgtaattattggctttatgggactcccatgggatagtaaatttgcaaaattactagatcctgaagaagcagagattgctgcaaaagcctttgaattaaaagaatttttacctttagcgatagcttcagttgttattgcatcagttggaattattattgcttaccaagcttattttgtgaaaaaaattaatttggcaattttatttgcagaaaagtttgcttctattaatcaatttttatcaaataaatggtatctagatgatattaatgaaaaactttttgttaaaggcattagaaaactagctaaagaagttttagaagttgattctaaggttgttgatggtgtggtcaatcttactggacttgtaactttaggaagtggagaaggtttaaaatattttgagacaggtagagctcaattttacgctcttattgtttttggaggagtaattctattagttgctatatttggctttcaatctcctcaagtaacttaat

SEQ ID NO: 201695 - DNA, 370 bp, Unknown
  Bacterial polypeptide expressing nucleotide sequence isolated from the Sargasso Sea
atgcttgcggaatttttaaaagaatacttaccaataattctatttttaataatagctcttggtctaagctttgcctttgtggcaatgaattactttgcatcgccaaaaaaaccagatccagaaaaattatcagcttatgaatgtggttttgaaccttttaatgattctagaatggaatttgatgtaagattttatttagtagcaatattatttattatattcgacttagaaattgcatttttatttccctgggcaatatcacttggtgaaataggtgtatttggctttatatccatgatgatttttttattcattttaactgtagggtttatttatgaatggaaaaaaggagcattagactgggaataaa

SEQ ID NO: 201696 - DNA, 361 bp, Unknown
  Bacterial polypeptide expressing nucleotide sequence isolated from the Sargasso Sea
atgtacaacttggattatatatttattttaattttcatcttaattggtgcaggcatggctattgtaatgtatttgctctcaaaaattttatcaccaagttcacctgacagcgaaaaattgtcagcatatgaatgtggattcgaagcctttgatgatgctcgatcaaaatttgacgttaagttttatctagtatcaatactatttataatttttgatttagagattgcgtttttatttccgtgggctgtaagtctaagcaatattggtgccttaggtttttattcaatgatgttttttttatttatcctcacagttggatttatttatgaatggaaaaatggagcattagattgggagtaaa

SEQ ID NO: 201697 - DNA, 370 bp, Unknown
  Bacterial polypeptide expressing nucleotide sequence isolated from the Sargasso Sea
aatgctagcggaatttttaaaagattatctaccgataatattatttttgataatagctttaggcttaagtcttgcttttgttgcaattaattatattgctgctccaagcaaacctgatcctgagaaactttcagcttatgaatgtggatttgaaccctttagtgactctagaatggaatttgatgtcaggttttatttggttgcaatattatttattatttttgacttagaaattgcatttttatttccttgggctatctcacttggtgaaattggattatatggtttttgctctatgatgttatttttatttattttaactgttgggtttatttacgaatggaaaaaaggagcattagactgggaataa

SEQ ID NO: 201698 - DNA, 370 bp, Unknown
  Bacterial polypeptide expressing nucleotide sequence isolated from the Sargasso Sea
gatgttagcagattttttaaaagactattttccgataattttattcttggtcatctctttaggactcagtataggcttcgttgtattaaattttattttatcacctaaaaaacctgatcctgaaaaactttctgcttacgagtgtggatttgaagcatttgacgactcaagaatggaatttgatgtaagattttacttagtggcaatactctttattatatttgatttagaaatagcatttttatttccttggtctatatctcttggaaaaattggttttctcggatttttttcaatgatgattttcttatttattttgacagttggatttgtttatgaatggaaaaaaggagcacttgattgggaataa

SEQ ID NO: 201699 - DNA, 370 bp, Unknown
  Bacterial polypeptide expressing nucleotide sequence isolated from the Sargasso Sea
gatgcttgcggaatttttaaaagattacttatcaataatactgttccttgtaattgcactaggtttaagtatggcttttgttgcaattaattacttggcatctcctaaaaaaccagatccagagaaattatctgcatatgaatgcggttttgagcctttcaatgactcacgtatggaatttgatgttagattttatctagtggcgatactttttattatatttgatctggagatagcatttctatttccttgggccatatcgttgggaaaaataggattgtttggtttcgtttctatgatgatatttctatttattttgactgtaggatttatttacgaatggaaaaaaggagcacttgattgggagtaa

SEQ ID NO: 201700 - DNA, 370 bp, Unknown
  Bacterial polypeptide expressing nucleotide sequence isolated from the Sargasso Sea
atgctggtcgattttttaaaagactatttgtctataataattttcatttttgtggctttgtccttaagtgtgggatttatattacttaactttttgttttcacccaagaatcctgatccagaaaaactttcagcttatgaatgtggttttgaagcttttggcgattcaagaatggaatttgatgtgagattttatttggtggcaatattatttattatatttgatttagaaattgcttttctatttccctgggcaatttctcttggaagtttaggttctttaggattttggtcaatgatgttatttctgttcgtattaacagttggatttatttacgaatggaaaaaaggagctttagattgggattaat

SEQ ID NO: 201701 - DNA, 952 bp, Unknown
  Bacterial polypeptide expressing nucleotide sequence isolated from the Sargasso Sea
tttgttagtaccagtccttgtctctgttgcaatgattgtttggcttgatagaagagtttgggcttttgttcaaaaaagacaaggccctaatgtagttggtccatttggattactacaatctcttgctgatgctttaaaatatatttttaaagaaataatcatcccgtctagttcaaataaaataatttttattttagctccaattgtaacaatgacattagctttaatatcatgggccgtaataccttttagcgcaacacaagttttagcagatattaatgttggaattctttatttgtttgcagtttcatctttgggagtttatggaattattatgggtggatgggcctccaactcaaaatatccttttcttggagcaattagatctgcagcacaaatggtatcttacgaagtatcaataggagttattattatcaatgtcttactttgtgttggatcattaaatttaaacgacattgtagaggctcaaaaaaatttatggtttgtaattccattatttccaatgtttgttattttttttatttcagctttagctgaaactaatagacctccatttgatttacctgaagctgaagcagaattagttgcaggatatcaaactgagtattcaggaatgatgtacgctatgttttggttgggtgaatatgcaaatattttattaatgtgtgcaatgggtgcaattttatttttaggtggctggatgtcccctgttgaaatttatccctttacactagtaccaggggcaatttggttaatcttaaaaatattattattatttattttatttgctttagttaaagccattgttcctagatatagatacgatcaattaatgcgtcttggttggaaagttttcttgcctctgtctttaatatgggtggtactaacagctagctacttattttatttcaatcttttaccgacaaattaa

SEQ ID NO: 201702 - DNA, 1345 bp, Unknown
  Bacterial polypeptide expressing nucleotide sequence isolated from the Sargasso Sea
ttgcaggaattttttactatttttggtacgataagtttcgacagtatatttgagcaagtagatcaatttagtgagcatcaaattcaattcctttcatttagttttccaactttagattttttatgttttcttttatttataggagcaatgggtaaatctgcccaattaggtttacacacttggcttcctgatgctatggaaggacctactcctgtttctgcgcttatacatgctgcaacaatggtaacagctggcgtatttttagttgcaagaatgagtcctctttatgagtttgctgcatttactaatttatttattacctttgtaggcgcggctacagctatttttgccgcctctatagccttaacacaaaatgatattaaacgagtcattgcatattcaacatgtagtcaattaggatatatgtttttcgcagcaggtgtaggtgcttataatgcatcaatatttcacttaacaacccatgccttttttaaagctcttctatttctttctgcaggttctgtaattcacgcaatgcatcatgaacaggatatgagaaaaatgggcggacttttcaaaaaaataccttttaccgctacaatgatgtggattggatctcttgcaattattggtttcccgtatctatctggctactattcaaaagaaagtattttagaaaatgctttctatgcatcaaatggaatagcatattttgcatatttagtaggtattttaactgctctacttacagctttttattcatggagattattatttctaacatttcatggtgaaaatagatcagaaaataaaacatatgatcaagcccatgaatcacctttagttatgacagctccattatttattcttgcaattggttctattttttcaggaatattctttgcggattattttattggatattacaaaaaagaattttgggataatgcagtattattaacagagagctctcataaatatcttcctctttcacaatccttattatcaaaatcagctgttgcaattggaattcttgtctgtgtgttgatatattcaaataatttaaatagagcaaaaaatctttctcataacttagatccgctatattctctttctaaaaataaatggtatgtggatgaactatatcataaagtatttgttttaacttttttcaaattagcaaactttttttggaaaagaggagatgaaaaaactatcgatggtttaggtccaaacggagtgtcctggattatttcaaaatcttcatcttatgtaagtttatttcaatcagggtatttgtttcattatgcttttgctatgcttggcggcttagtaataattttaa

SEQ ID NO: 201703 - DNA, 370 bp, Unknown
  Bacterial polypeptide expressing nucleotide sequence isolated from the Sargasso Sea
catgttatctgaatttttaaaagattacctaccaattattctatttttaattattgctcttggtttaagtgttgcttttgtagtattaaattttttactttctccaaaaaaacctgatccagaaaaattatctgcatatgaatgtggtttcgaaccatttcaagactctagaatggagtttgatgtaagattttatttagttgcaattctatttataatatttgatcttgaaattgccttcctatttccatgggcaatatcattaggaaatattggtctattaggtttttcatcaatgatgatttttctattcatactaacagttggttttatttatgaatggaaaaaaggtgctctagattgggaataa

SEQ ID NO: 201704 - DNA, 279 bp, Unknown
  Bacterial polypeptide expressing nucleotide sequence isolated from the Sargasso Sea
catgatttataactttttaacagattacctatcaataataatttttttatttatagctctatttttgagcataggttttattataattaattttttagcatcacctaataacccagatcccgagaaactttcagcctacgagtgtgggtttgacgcttttgatgactctagaatggaatttgatgtgagattttatttagtggctatacttttcattatatttgatttggaaattgcattcttatttccatgggcaatcacattaggaataacaggaat

SEQ ID NO: 201705 - DNA, 889 bp, Unknown
  Bacterial polypeptide expressing nucleotide sequence isolated from the Sargasso Sea
caaaagaggagaggaccaaacgttgtgggcccccttggcttgttccaaactttagctgacgctcttaaatatatttttaaagaaataattattccagccagcgcaaataaaattgtatttatactagctccaataataacaatgacattggctttgtccgcctgggcagttattcctataagtgataaattatttattgcagatataaatgttggaatactctatatttttgctatttcatctttaggtgtatatggaatcattatgggtggttgggcctcaaattcaaaatatccttttttaggtgctataagatctgctgcccaaatggtttcttacgaagtatctattggaataataattataaacgttttgctatgtgttgggtctttaaatttaaaagatatagttttagctcaaaaaaatctttggtttatagttcctctattcccaatgtttgtaattttttttatatccgcattggctgaaactaatcgaccaccttttgatttaccagaggctgaagctgaattagtagctggttatcaaacagaatactcaggaatgatgtacgcaatgttttggttgggcgaatatgcaaatattttactaatgtgtgctttaggatcaatactatttcttggcggatggttatctccagttgatttatatccttttaatattattcccggatctatatggatgatatttaaaatactgcttttattttttatgtttgcaattataaaagcaatagttccgagatatagatacgaccaattaatgcgacttggatggaaaatattcctacctttttcattaatttatgttgttttaacgtcaagttttttggtttattttgatttattacccaatggaggtttttaat

SEQ ID NO: 201706 - DNA, 523 bp, Unknown
  Bacterial polypeptide expressing nucleotide sequence isolated from the Sargasso Sea
aattattctgaagtatttcaacaaataccaacagttgtcgataaaaatttactatttttaggatttgaaattaaagcaatagatttgatttgcttacttttatttattggagcgatgggtaagtcagctcaaattttattgcatacatggttgccagatgcaatggaaggcccaactccagtttcagcactaatacatgcagctactatggtaacagcaggagtttttttagtggtaagatgttcacctatttatgaatactcaccatttatcctaaatataataaccatagttggcatgacaacagcgttctttgcagcaacagtagctttagtacaaacagatataaaaaaaattattgcatattccacttgtagccaattaggttacatgttttttgcagccggggttggtgcttataatgttgcaatgttccatttgtttactcatgctttctttaaagcattactattcttggttctggctctgttattcatgcttttaaagacgagcaagatataaa

SEQ ID NO: 201707 - DNA, 1639 bp, Unknown
  Bacterial polypeptide expressing nucleotide sequence isolated from the Sargasso Sea
cctgcctggagcggagtcccggccgccgaactcgcctggctgatccctgttctgcccctgctgggggctgtgatcaccggtctcggactgatcagtttcaaccgcaccatcaacaggctgcgcaagccggtggcactgttgctgatcagctgtgtcggtgcagcggcagtcctcagctatgccgttctctccgatcagctggccggtgccgctccggtggaacatctcttcatctgggccagcgccggcagcttcagcctgccgatggggtacgtggtggattcgctcggcgccgtgatgctggccctggtgaccaccatcgctctgctggtgatggtctattcccatggctacatggcccacgacaagggctatgtccgcttcttcacctacctggccctgttcagcagctcgatgctcgggctgatcatcagcccgaacctgctcgagatctatgtgttctgggagctggtgggcatgtgttcctatctgcttgtcgggttctggtacgaccgcgacggtgcagcccacgcagcgcagaaggcctttgtggtgaaccgggttggtgacttcggtctgttgctcgggatcctcggcttgttctgggccaccggcagtttcgatttccagggcatcgccgatggtcttcaacagggactggccaacggcagcgtcgccccatgggctgctctgctgctctgcctgctggtgttcatggggccgatggccaaatcggcgcagtttccactgcacgtctggctgccggatgccatggagggacccactcccatctcggccctgatccatgcagcgacgatggtggcggcgggcgtcttccttgtggcccgacttgaacctctctacatccagttcccgagtgtccagctggtggtggcagtggtcgggacgatcacctgcttcctgggggcttcgatcgccctcacccagatggatctcaagaaagggctggcctacagcaccgtgtcccagctgggctacatgatgctggcgatgggttgcggcgcccctgtggccggcatgttccatctggtgacccacgccttcttcaaggcgatgctgttcctgggttcaggctccgtgatccacgccatggaggacgttgtcgggcacgaaccgatcctggcgcaggacatgcgactgatgggcggactgcgccgcaagatgccgatcacggcgatcacctttctgatcggctgcatcgccatcagcggcatcccgcctctggcgggcttctggagcaaggacgagatccttggtcaggccttcaacagctacccagtgctgtggctggtgggattcctgaccgctggaatgaccgccttctacatgttccggctgtacttcctcaccttcgagggggagttccgcggggaagatcagcagttgcaggctgagctgatggcggccgctggtcagtccctcgatacggaccacgctcaccatgcgggcagcctgcatgagtccccctggtcgatgacgctgcctctggccgtgctcgcggtgccctccgtgctgatcggactggtgggcactccctggaacagccgcttcgccggactgctcaatccagaggaagcggcagagatgaccgaacagttcagctgggaggagttcctgc

SEQ ID NO: 201708 - DNA, 895 bp, Unknown
  Bacterial polypeptide expressing nucleotide sequence isolated from the Sargasso Sea
tttgggcctttgttcaaaaaggcaaggtcctaatgtagttggtccatttggattatttcaatctatagcagatgctttaaaatatatatttaaagaaattattattccctcaagttcaaacaaagttatttttattttagcacctatagtgactatgacattagctttagttgcttgggcggtaataccttttagcgaaactcaagttttagcgaatataaacgtagggatactttatttatttgccgtttcttctttaggagtttacgggattataatgggtggttgggcgtctaattcaaaatatccttttttaggagcaattcgatctgcagcacaaatggtatcttatgaagtttcaataggaataataattattaatgttttattatgtgttggttctcttaatttaaatgacattgtaatagcccaacaaaacatatggtttattattccactatttccaatgtttataattttttttatttcagcattagcagaaacaaacagaccaccttttgatttacctgaagccgaagctgaattggtagctggttatcagacagaatattcaggaatgatgtatgcaatgttttggcttggtgaatatgctaatattttattaatgtgtgcaatgggcgcaatattatttttaggtggatggctgtcacctatagaaatttatccattcaatttaattccaggagcaatatggttaatattaaaaatattattattatttatcttatttgctttagttaaagctatagttccaagatatcgatatgatcaattgatgagacttggttggaaagtttttttaccactgtctttgacttgggtagtattaactgccagttatttattttattttaatcttttgccaataaattaa

SEQ ID NO: 201709 - DNA, 370 bp, Unknown
  Bacterial polypeptide expressing nucleotide sequence isolated from the Sargasso Sea
tatgcttgcggattttttaaaagattatttaccaattattttattcctaattattgctttaggattaagttgtttatttataatattaaattatatactttcacccaaaaacccagatccagaaaaattatctgcctacgaatgtggttttgaaccatttaatgattcaagaatggaattcgatgtaaggttttatttagtagcaatactttttattatatttgatcttgaaattgcctttctgtttccttgggcgatatcactcggaaaaattggtgtatttgggtttgtttcaatgatgatatttttatttattcttacagtaggatttgtttatgagtggaaaaaaggagctttagattgggaataa

SEQ ID NO: 201710 - DNA, 1000 bp, Unknown
  Bacterial polypeptide expressing nucleotide sequence isolated from the Sargasso Sea
aatggaatacataattttattattttctgaaatttacaaaatactttatgttttaattcctgttcttgtatcagtagcaatgattgtgtggcttgatagaagaatttgggcttttgttcaaaaaagaagagggccaaatgtagtaggtcctttcggtttatttcaaactttggcagatgcgcttaaatacatattcaaagaaattataatacctgcaagttcgaataaaattatatttattttagctccaatagttacaatgactttagcccttattgcatgggcagtaattcctttcagcgaagattatgttttggctgacataaatgttggtatcctttacatatttgcaatttcttctttgggtgtttatggaataataatgggtggctgggcctcaaattcaaagtatccatttttaggctcaataagatctgctgcacaaatggtctcttatgaagtttctatcggagtaataatcattaatgttttattgtgtgttggttcgttaaacttaagtgatatagttttagctcaagagaaaatttggtttgtaattcctttattcccaatgtttgtgattttctttatttcctcgcttgcagagacaaatagaccaccatttgatttacctgaagcagaggctgaattagttgcgggttatcaaacagagtacagtggcatgatgtatgcaatgttttggttgggtgaatatgcaaatattctgttgatgtgtgcgcttggatcaattctttttttaggtggctggttagcaccaatagataccccattgtttgaaatggtacctccacctgtatggctaatattaaaaattttgtttttgtttgttttgttcgcacttataaaagctattgtgccaagatatcgatatgatcaacttatgaggcttggatggaaggtttttttacctttctcgttaatttgggtggtattaacttctggttatttactatattttgacttattacctgtatattaa

SEQ ID NO: 201711 - DNA, 909 bp, Unknown
  Bacterial polypeptide expressing nucleotide sequence isolated from the Sargasso Sea
tttttcatttattcactcacgcgttttttaaagcactattatttttaggatccggttcagttattcatgcttttaaagacgaacaaaatataaataatatgggcggagtgtggaaaaaacttccatacacctattcactaatgattataggaacgctagctttaacggggtttccatttttgtcaggtttttattctaaagatgcaataattgaatttgcttatttgagaggaaatacaacaggttattatgctgctggtataggtatttttacagcatttcttacatcaatttattcttggagattaatttttaaaacttttcatggcgagtataataataaagagattaagatagatgagacgcacgagtctcctgtcgtgatgttgatacctctagttttattatcaattggtgcaatatttgcaggatttttatttaaagaattatttatcggttatgaaggtataaataatttttggcgtgactcaatattttttctaaaaccattaagtactgatcacccaccactatggtttttattacttactccaactttggtaatattatctattccactagcatattatttattccttaaaaatagaaatttacctgaacgattggctagtataaataaaccgctttatcagtttttgttaaataaatggtattttgatgaactttatgatgttttatttgttaaaccatcaaaaaaattaggtttatttttatggaagttctttgatttgaaaattatcgatgggtttggtccagatggtatttcgtcgatgatcaaaaaattttcattaaaagctaataaatttcagagcgggtatatatatcaatatgcttttgtaatgttacttggtttttctgctttattaacatttttaattgtaaaataat

SEQ ID NO: 201712 - DNA, 370 bp, Unknown
  Bacterial polypeptide expressing nucleotide sequence isolated from the Sargasso Sea
aatgcttgcggattttttaaaagattacttatcaataattctatttttaataatagcgttagggttgagtattatttttatcgcaataaattatttagcttcacctaaaaacccagatcctgaaaaattatctgcctacgaatgtggatttgaaccattcaatgattcaagaatggaatttgatgttaggttttatctagtagcaatattatttattatttttgatctagaaattgcatttttatttccatgggcaatatcactagggcaaattggtttatttggatttgtttcaatgatgatttttttatttattttaactgtaggatttatttatgaatggaaaaagggagcattagattgggaataa

SEQ ID NO: 201713 - DNA, 449 bp, Unknown
  Bacterial polypeptide expressing nucleotide sequence isolated from the Sargasso Sea
ttcctcttttccaatgtttgttattttttttatttccgcacttgcagaaactaatcgacccccatttgatttaccagaggccgaagctgaattggttgctgggtatcaaacagaatactctgggatgatgtatgcaatgttttggcttggagaatatgcaaatattctattgatgtgtgcgcttggttcaattttatttcttggtggctggttatcacctattgatatttatccatttaatttaatcccaggtgccgtgtggatgattataaaaatattaattttatttttcatgtttgcaatcataaaagcaatagttccaagatacagatatgaccaacttatgagattaggctggaaagtatttttacctttctctttaatatatgttgtatttacagcaagttttttaatttattttgacttacttccaaacacaggaaattaaa

SEQ ID NO: 201714 - DNA, 370 bp, Unknown
  Bacterial polypeptide expressing nucleotide sequence isolated from the Sargasso Sea
atgcttgcggattttttaaatgaatatttttcgataattgtttttttaataattgctttagggctaagctttttgtttattataatcaattttgcattggctcctaaaaatccagaccctgaaaagctttcttcttatgaatgtggatttgaaccatttaatgattctagaatggagtttgatgtaagattttatttagtagcaatattatttattatttttgacttagagatagcattcttatttccttgggcgatttcattaggaaaaattggtttcttaggttttgtttcaatgatgatatttttatttattttaacagtgggatttgtttatgaatggaaaaaaggagcactagattgggaataaa

SEQ ID NO: 201715 - DNA, 370 bp, Unknown
  Bacterial polypeptide expressing nucleotide sequence isolated from the Sargasso Sea
atgctaataaattacttcccgattctcatttttggcgccattgtcttactgatgggaacattcctcgtagcgttaggtctaattttaggaaaagtcatgggccatgcccgtcccgataaagaaaaacaatcgccctatgagtgcggcttcgatgcctttgaagatgccagaatgaagtttgatgtgcgttattatctcgtcgcgattttatttattatctttgaccttgaaatcgcttttctttttccctgggccgtggtactcgaagatatcggcatggcaggtttctgggcgatgatgatatttttaggtgtactagtagtcggtttcatttatgaatggaaaaaaggggcgcttgactgggagtaaa

SEQ ID NO: 201716 - DNA, 1252 bp, Unknown
  Bacterial polypeptide expressing nucleotide sequence isolated from the Sargasso Sea
tatgattttgtttttacttttaggtgctttcggaaaatctgctcattttcctttattcagctggttaccagatgcaatggaaggaccaacacctgcaagcgcattgattcatgccgcaacaatggttacagctggtgtgtttatgctggttagaatttcaccattattacaattttcagaaataggaagtatcacaattataagtcttggacttttaacagctctaatttctgctttcgctgcgataaatcaagatgacataaaaaaagttttggcttactcaactatttcacaacttggatttatgttcatagctattggagcaggagcctatgttgcagcaatatttcatctcgtaacacatgcgttttttaaagcattgctatttctcggagcaggggctgtaattcatgaaatgcatcacgaacaaaatatttataaaatgggcggacttagaaaaaaaatgccggtaactgctgcaatgatgggaattggaactttagcaatatctggtattccaccgctagcaggattttggtcaaaggatgaaatactagcctcggtatttgctagaggaggaatttattatggattctgggctttgtctcttttagctgcattaatgactgctttttatatgggaaggcactggctgttaatttttgtgaaagagccatccaatgaattagacagtataaatgaagcaccaaaaaatatgacaagacctttgattttacttggccttttttctatttttattggatttataaatacacctttttttcatggtttagaaaaagtgttacatgaaactctttacaacgtagaagttacacaccttccaaaaggtataacactagcagttttggcatttctatcaattggagcaggttttacaggccttgcactcgcgtacttgatttatatctttgatatttttagctactttaaaataaaaataccttttttaaaacaattcaaaaagctttcaaaagatgtcctttatttaaataaaattggaaatctaatttttgtaaaaggcatgaaatcattatcaagaaaagtagctgtaagtgttgatggtatgaccattgatggatttataaatggagtagcaagatcatttttaaaatcatccaaacaaatttcctattcacaaactggtcttgttagaagctatgttgtatattttggacttttcatgctggcactaattcttgtatttttattttcacctggagtcttattatga

SEQ ID NO: 201717 - DNA, 282 bp, Unknown
  Bacterial polypeptide expressing nucleotide sequence isolated from the Sargasso Sea
aatgcttgcggattttttaaaagattatttatcgataattatatttttaattatagctctaggcttaagtatggcctttatagcaataaattatttggcatcaccaaaaaatcctgatcccgaaaagttatcagcgtacgaatgtggattcgaaccatttaatgattctagaatggaatttgatgtaagattttatttagtcgcaatcttatttatcatatttgatcttgaaatagcttttttatttccatgggcaatttcattaggtcaaataggttggtt

SEQ ID NO: 201718 - DNA, 1426 bp, Unknown
  Bacterial polypeptide expressing nucleotide sequence isolated from the Sargasso Sea
tgcaataaaagcttttttagttaatagagtaggtgattttggttttgctttaggaatatttttaattttttacatttttggaactgttaattacaatgaggtttttgataaaattccattaattttaaataaagaaataatatttttaggtattacaattaatgctgtagatttaatttgtttgcttttgtttattggcgcaatgggaaaatctgctcaaatatttcttcatacttggcttccagatgcaatggaaggccctacaccagtatcagcattaatacatgctgccacgatggtaacagctggagtttttttggttgtaagatgttccccaatttatgaatattcagaattagccttaacaattgttactttagtaggattaactacggcattatttgcagcaagtgttgcgttggtacagacagatataaaaaaaataattgcatattctacatgtagtcaacttggttatatgttttttgctgcaggcgtaggagcctacaatgttgcaatgtttcacttgttcacacatgctttttttaaagcattattatttttaggatctggatcagtaatacattcttttgatgatgaacaagatattaactatatgggcggagtatggaagaagttgccttatacctatactttaatgattattggcactttagcattaacaggttttccatttctttcaggcttctattcaaaagatgcaataattgaatttgcatatttaagtggaaacaatctaggatattttgctgcttataccggtgtttttgttgcgcttttaacttcgatttattcttggcgattaatatttaaaacttttcacggaagttacaataattcaaaaattaaatttgattctatgcacgagtcaccaatggtaatgcttattcctttaataatattagcaataggggcaatttttgctggtatattatttaaaaatctttttattggtcacgaaacttcatatgaattctggtctagttcaataaagtttatagaaccattaagcaaagatcatcctccaacatggtttttatttataacaccagttttagtcactttatcaataccattagctttttatttatttgtaaagaataaaataattgttgaacagattgcaaaagccaacaaacctttttatctttttttaaagaacaaatggtactttgatgaactttatgattatatttttgtgataccatcaaaaaaaataggatattttttttggaaaagaattgatgtttctataattgataaatttgggcctgatggcatatctaaattaataaagtatttttcttttaaagcagttaaatttcaaagtggatatatatatcaatatgcatttataatgctaattggcttttctatccttttaactttacttatggtcaactaa

SEQ ID NO: 201719 - DNA, 370 bp, Unknown
  Bacterial polypeptide expressing nucleotide sequence isolated from the Sargasso Sea
atgcttgcggaatttttaaaagattatctaccgataatattgtttttgataatagctttaggcttaagtattgcttttgttgcaattaattatattgctgctccaagcaaacctgatcctgaaaaactttcagcttatgaatgtgggtttgaaccttttaatgactctagaatggaatttgatgttaggttttatttggttgcaatattatttattatttttgatttagaaatcgcatttttgttcccatgggcaatttcactgggagaaatcggtttatacggtttcttctccatgatgttatttttatttattttaactgtgggatttatttatgagtggaaaaaaggagctttagattgggaataaa

SEQ ID NO: 201720 - DNA, 502 bp, Unknown
  Bacterial polypeptide expressing nucleotide sequence isolated from the Sargasso Sea
aatggaaaaaaggggctttagagtgggattagaaaatataaaaagagacggctttgttttagctgactcagacagtttatttgactgggcaagaacaggttcattatggcctatgacattcggtttggcatgctgctctatagaaatgatgcatgcaggcgcttcaagatatgacttagacagatttggaatgttatttagaccaagccctagacaatctgatgttatgattgttgcaggcacacttgtaaataagatggctccagctttaagaaaagtttacgatcaaatggctgatcctaaatgggttatctctatgggttcttgtgctaacggaggtggatattatcactattcatattctgttgtaagaggttgcgaccgaatcgttccggtggatgtttatgtgcctggttgcccaccaactgctgaagcactgctatacggcatccttcaattacaaaataaaataagaaataaaaatagaataaaaattaaataa

SEQ ID NO: 201721 - DNA, 415 bp, Unknown
  Bacterial polypeptide expressing nucleotide sequence isolated from the Sargasso Sea
ttcttctctcccgttagcggagaccaatcggcatcccttcgatttgcctgaagcagaggctgaattggtggccggctataacgtcgaatattcggccatgacatttgccctgttcttcttgggcgagtatgcgaacatgattctaatgtcggcaatgactgcgatgctgtttcttggtggttggttgccacccattgcatcctatccgttcgacgccgtcccaggaccgatatggctggccctgaagatcgcattttgcctatttatctttctttgggtgcgcgccacgttcccgcgttaccgttacgatcagctgatgagactgggttggaaagtttttctgccgatctcactggcggccgtagcgattgtcgccggcatactggtggcctttgactggctgccaaagggttaa

SEQ ID NO: 201722 - DNA, 948 bp, Unknown
  Bacterial polypeptide expressing nucleotide sequence isolated from the Sargasso Sea
ttttttttgcagcaggtgtaggtgcatataatgttgcaatgtttcatttatttacacatgctttttttaaagctctacttttcttaggttctggatcagtaattcattcatttaaagatgaacaagatgttactaaaatggggggagtgtttagaaaattaccttacacttatgcattaatggttataggtactttagctttaacaggttttcctttcttatcaggtttttattctaaagatgcaataattgaatttgcttatataagtgacacaaaatttggaatttatgctgctggaataggtgtattaactgctgtaatgacttctatatactcatggagattaatatttaaaactttccatggagattataaaaataaagatcttagtattgatacaatgcacgaatctccattaagcatgatgttacctttagtattattatccgttggtgcaattttttcaggctttttatttaaagaattatttattggccatgaaacaatgtataatttttggggagagtctataaaatttctagaaccgttaggaaaagaacatcctccaacttggtttttgtttttaactcctacgttggtagttctaacaattccattgtcatattatctatttgttaaaaatactaaaatcgtagatgaaatagtttccataaacatgccagtttacatttttctccaaaaaaaatggtattttgacgaattatatgatcaaatttttattaaaccttcaaaaagctttggaatatttctttggaaaaaaattgatggattaataatcgataaatttggaccagatggaatttcaaatttggtaaaacttttttcgtttaaagctgtaaagtttcaatcaggatatatttatcagtatgcctttataatgcttctaggtttttcaattctgttaactttattaatagtaaaataat

SEQ ID NO: 201723 - DNA, 370 bp, Unknown
  Bacterial polypeptide expressing nucleotide sequence isolated from the Sargasso Sea
tatgtacggagattttttaaataattatctaacaatcatattattttttggagttgcactgtttcttagtattgggtttatttttctaaattttgtgtttgctcctaaaaaccctgacccagaaaaattatctgcttatgagtgtggtttcgaaccttttaatgactctagaatggagtttgatgttagattttatttagtagcaatactatttataatattcgatttagaaatagctttcctttttccatgggcaatttctttaggtaaaattggaatatttggctttgtatcaatgatgatatttttgtttattttaactgtaggatttatttatgagtggaagaaaggggctttagattgggaatga

SEQ ID NO: 201724 - DNA, 1009 bp, Unknown
  Bacterial polypeptide expressing nucleotide sequence isolated from the Sargasso Sea
aatggaatattttgatattatatttcaagaggtttataagattttatttttactagttccagttttagtttctgtagcaatgattgtttggttagatagaagagtttgggcttttgttcaaaaaagacaaggacctaatgttgttggaccttttggattacttcaatcccttgcagatgctttaaaatatatttttaaagaaataatcataccagctagttccaataaagttatttttattcttgcaccgataataactatgacattagctttaatagcttgggcagttattcctttcaatgaaggtcaagttctagcaaacattaatgttggtattttatatatatttgcagtctcctctttaggtgtttatggaattatcatgggtggatgggcttcaaactccaaatatccatttttaggagctataaggtctgcagcacagatggtatcatatgaagtttcaataggtataattataattaatgtattattatgtgtaggttcattaaatttaagtgatattgtattagctcaacaggaaatgtggtttataattccattattccctatgtttgttattttttttatttcatctttagctgaaactaatagacctccttttgaccttcctgaagcagaggcagaattagttgctggttatcaaacagaatattctggaatgatgtatgcaatgttttggcttggcgaatatgcaaatattttattaatgtgtgctttaggatccatactttttcttggcggctggttatctccagttgatatttatccacttaatataattcccggtattttttggatgatgattaaaattcttatcatgttttttatgttcgcccttataaaagcaatagttccaaggtatagatatgatcaacttatgagactcggatggaaagtttttttacctttttcattaatttacgtagttttgacagcaagttttttgatctactttgatttgttacctaaaggaggccttcaatga

SEQ ID NO: 201725 - DNA, 358 bp, Unknown
  Bacterial polypeptide expressing nucleotide sequence isolated from the Sargasso Sea
atgctatatgaatacctgccaatattaatttttttagctttagcgctgctattcgcgtcagtgatgctatctgctggttttatatttggaggtagtaaccctgatgacgaaaaaaactcgccatacgaatgcggctttgaaccctttgaggattctcgaatgaaatttgatgtaagattttatcttgttgcaattctatttattattttcgatttagaaattgcatttttgtttccatgggctgttgttttagatcatataggactcgaaggatatctggcaatggcaatatttattcttatacttctagttggatttatttatgaatggaagaaaggggctttggaatgggattaga

SEQ ID NO: 201726 - DNA, 1342 bp, Unknown
  Bacterial polypeptide expressing nucleotide sequence isolated from the Sargasso Sea
gatggcaggacctacacctgtatcagcacttattcatgcagcgaccatggttgtagctggagtctttatgatcgctcgtctttatggtgttttctttgaaggattttccataggaggaagttcgataaatttaatggctcttatcggagggtttacaacacttgtgggagcatgtttagcttttgttcaaagagacatcaaaaaagttcttgcatattcaacaatttcacaacttggctacatggtcatggcattaggtgtaggagcttggactgcagcaatgttccaccttttcacccatgctttctttaaggcttgcctatttttaggttccggatctgttgcacattcagttcatagttttgacatgaaatcagatatgggtgggctaaggaaagtaatgccgcaaacctttcgaactttcataatcggttccattgctctagcgggtcttccacctttcgctggattttggtctaaagacgaaatactcgccggaacggggggttggggaattttaggaggcacaaatggcaatggctcctatacgttcatgttgataatgggaatgattacagctgctctgacagctgcttatatgacaagatgcgtttatttaacattttttggcgaatttaggggccatggccatccacatgaatctggcccaagaattactattccgctttggattttggcggtattagcaatttttgctggattcctgaatttgcctaagggatttcaacttgttcccaaatcactgcaggaaagatttggccattatgtggaacctgtagctgggtatttcccggaaattgcgcatgctaccccgagctggtcgctagcaatagtttcgacaattgttgtaatagctgggatttcacttgcatggaattattatttcgtaaaagtagaaaaagcctcaaaagagagtggtaaaagtctgacagagttaccagatgggcttaccacacggttgaccttagcgagaatgggtcacacacttctagttaacaaatactacttagatcatttatacaccggaattattaccagagccgttaaagaaccgatagcagagttggcctatcggtctaaccaagaaatcttagatcgcactgtcgacacttttggtcgaactgcagtaaaaattggtcaacttaattatgaaaaaatagatcaaaaccttgttgatggttttgtcaatgcttctggtcgtatttcatcggatagcggtgaagaacttcgcaaaattcaatccggaaaagttcagagctatgcagccattttgtttgctgctgcgacgattctagccggtttactaatagtcattgtgtag

SEQ ID NO: 201727 - DNA, 370 bp, Unknown
  Bacterial polypeptide expressing nucleotide sequence isolated from the Sargasso Sea
atgatttacaattttttatcagactacttatcaattttaatatttttatttatagctttattcttaagcgtaggttttattttagccaattatttggcttcaccctcaaatccagatcctgaaaaattgtccgcatacgaatgtggatttgaggcatttgatgactcgaggatggaatttgatgtccgattttatttagttgcaattttattcataatttttgatcttgaaattgcatttctttttccctgggcaatttcgcttggaagcttaggcgcgcttggtttttggtcgatgatggtctttttaggagttcttacaattggatttatttatgagtggaaaaaaggagctttggaatgggaataaa

SEQ ID NO: 201728 - DNA, 370 bp, Unknown
  Bacterial polypeptide expressing nucleotide sequence isolated from the Sargasso Sea
aatgacagcggaatttttaaaagattatttgccaataattttatttctagtattagccctaggattgagttgtgcgtttattgtgataaattttatcttatcaccaaaaaatcctgatcctgaaaaattatctgcatatgaatgtggttttgaaccttttgaggactctagaatggaatttgatgttagattttatttagtagctatactttttataatctttgatttagagatagcttttctttttccgtgggctatcacgttaggaaatattggaactttaggtttcagctcaatgatgattttcttattcatacttacagtaggttttatttatgagtggaaaaaaggtgctctagactgggaataa

SEQ ID NO: 201729 - DNA, 370 bp, Unknown
  Bacterial polypeptide expressing nucleotide sequence isolated from the Sargasso Sea
atgcttgcggaatttttaaaagattatttaccaataatattatttttgataatagctttaggtttgagtcttgcctttgtagcaattaattatattgctgctccaagtaaacctgatcctgagaaactttcagcctatgaatgtgggtttgagcctttcaatgattcaagaatggaatttgatgtcaggttttatttagttgcaatattatttataatttttgatttagaaattgcatttttatttccatgggcgatctcactcggtgaaattggtttatacggtttctgctctatgatgttatttttatttattttaactgttggatttatttacgagtggaaaaaaggtgctttagactgggaataat

SEQ ID NO: 201730 - DNA, 419 bp, Unknown
  Bacterial polypeptide expressing nucleotide sequence isolated from the Sargasso Sea
tatttcatcactagcagagacaaatagacctccttttgatttacccgaagcagaagccgaattagttgctggctatcaaactgagtattctggaatgatgtatgcaatgttttggcttggagaatatgcaaatattttacttatgtgtgctatgggttcaatattattcctaggcgggtggttgcctcccgcagacgtatactttttaaatattattccaggaccaatatggatgattttaaaaatactaattttatttatagtttttgctttagtaaaagctatagtacctaggtatcgatatgatcaattgatgagattgggatggaaagtgtttttgcctttttcattaatttggcttgttttaacatcaagttttttgttttttacagataaattaccagttaagggcttataaa

SEQ ID NO: 201731 - DNA, 370 bp, Unknown
  Bacterial polypeptide expressing nucleotide sequence isolated from the Sargasso Sea
catgatttttgactttttagcagactatctttctataattatatttgtaattatttccttattcctcagtttgggatttattttacttaactatttggcgtctccgaaaaaccctgatcccgaaaaactttctgcttatgaatgtggttttgaggcctttagcgactctagagtacaatttgacgtcagattttatttggtagctattttatttattatttttgatttagagatagctttcctatttccatgggccatatcattaggaaatattggtcttttaggtttttattctatgatgttctttttatttactttaacggttggttttatttatgaatggaagaaaggtgctttagaatgggattaa

SEQ ID NO: 201732 - DNA, 1001 bp, Unknown
  Bacterial polypeptide expressing nucleotide sequence isolated from the Sargasso Sea
aatgtttgagtatatccaaattttaggacaagaagtttacaaaatattatttgtacttgtaccaatactagtctcagttgctatgatcgtttggttggatagaagagtttggggcttggtgcaaaaaagaaaaggcccgaatgttgtaggcccttttggattactacaaacacttgcagacgctctaaaatatatttttaaggaaataattattcctgcaagcgcaaataaagcagtttttgtattagcgccgattgttacaatgacattagcactagtagcttgggcagttattccaatgagtgaggaatttgttctcgcagatattaatgtaggtgttttatatttatttgctgtttcatcgcttggggtttatggaataattatgggcggctgggcatcaaattctaaatatccttttttaggagcaataagatcagcagctcaaatggtttcatatgaagtttcaatcgggataattattattaatgttttgttatgtgttggatcattaaatttaaaggaaattgttttagcacaaaaggatctttggtatgtaattccactttttccgatgtttgtaattttttttatttctgctctcgcagaaacaaacaggcctccattcgatcttccagaagcagaggcagaattggtagcaggttatcaaactgaatattcaggaatgatgtacgctatgttttggttaggagaatatgcaaatatactactgatgtgtgcgatgggttcaatattatttttaggtggatggttaccaataattgatctttatccaataaacttaattccagctccaatctggatgatcataaaaattttattcttatttttcttgtttgccttgataaaagctattgttccaagatacagatacgatcagctaatgagactagggtggaaaatatttctaccattttcattactctacttagttttaacagctagctttttattttatttcgacaaactaccgaaaggaa

SEQ ID NO: 201733 - DNA, 370 bp, Unknown
  Bacterial polypeptide expressing nucleotide sequence isolated from the Sargasso Sea
atgtacggagattttttaaataactatctaacaattataatattttttggaattgcgctccttctgagtattgggtttatttttttaaattttgtatttgcgcctaaaaaccctgatccagaaaaattatctgcttatgagtgtggctttgaaccatttaacgactccagaatggagtttgatgttagattttatctagtggcaatactatttataatatttgatttagaaatagctttcctttttccatgggcaatttctttaggtaaaattggaatatttggttttgtgtcaatgatgatatttttgtttattttaactgtaggatttatttatgagtggaagaagggagctttagattgggaatgaa

SEQ ID NO: 201734 - DNA, 367 bp, Unknown
  Bacterial polypeptide expressing nucleotide sequence isolated from the Sargasso Sea
aatgaacacatttttattagattatattccgataattatttttcttggaattgccattggtatggcttctttaattatgattgcatcttggatcgttgccaaacaaaatccagatgaggaaaagttgtcaccttatgaatgtggctttgacgcttttgaagatactaggtcacaattcgatgttagattttatttagtggctattctatttataatatttgatttggaggtagcatttctattcccctgggctgtttctttaggatcaattggattgtttggtttttggtcaatgattgtttttcttggagtattaactatcggttttatttatgaatggaaaaagggtgcattggaatgggagtag

SEQ ID NO: 201735 - DNA, 517 bp, Unknown
  Bacterial polypeptide expressing nucleotide sequence isolated from the Sargasso Sea
aatgggagtagcggtgcccgggcaggagcaaatcctcaggagggttaatgacgaaatcgccgacaagggttttgttgtggcgcagatggacaagctagttagctgggctcaatcaggttcgctgtggccgatgacttttggcttggcttgttgtgcggttgagatgatgcactccgcggctagtcgatatgaccttgaccgatttggggtgatattcaggcctagtcctaggcaatcagatgtgatgattgttgcaggaacgttgactaataaaatggcacctgcccttagaaaggtttacgaccaaatggcagagccgagatgggttatatccatgggttcctgcgcgaacggaggggggccttatcattattcttacgctgtcgttagaggttgtgatcgaatcattcccgtagatgtatatgttccaggctgtccgccgacggccgaagccctcctttacggtgtgttgcagctccagaaaaaggtgcgtcgaacaagtactatctcccgttag

SEQ ID NO: 201736 - DNA, 367 bp, Unknown
  Bacterial polypeptide expressing nucleotide sequence isolated from the Sargasso Sea
aatggatgagttgttacgtgaatatttgcctatcctcgtattcatgggtattgcggcaggtttagctgccataataattcttgcttcgttcattgtcgctcgacaaaaaccaaattcagaaaaagtttcaccatatgagtgcgggtttgcaccgttcaatgatgcacgaagacagtttgatgtcagattttatttggtggcgattctcttcattatcttcgacttggaagttgcctttttattcccttgggctatctcattggaaagcattggtttactcggtttctggtcaatgattgtcttccttggagtacttactgttggctttatttacgagtggagaaaaggggctttagaatgggagtag

SEQ ID NO: 201737 - DNA, 1006 bp, Unknown
  Bacterial polypeptide expressing nucleotide sequence isolated from the Sargasso Sea
atggaatatttagttgttctatataatgaagtttataaaattttatttttattaattccaattttagtttctgtagccatgatagtctggtttgacagaagagtttggggatttgtccaaaaacgaagaggaccaaatgttgttggtccatttgggttgtttcaaactttagccgatgcattaaaatatatatttaaggaaataattgttcctgcaagttctaataaagttatttttattttagcgccaatagtcacaatgacactcgctttatctgcatgggctgtaatacctttaagtgagaagatggtaatcgctgatataaatgtaggaatactttatatttttgcaatttcctctttaggagtttatggaattttaatgggtggttgggcatcaaattccaagtatccttttcttggtgcggtaagatctgctgcacagatggtttcttacgaagtatcaattggaataatcattattaatgttcttttgtgcacaggttctctaaatttaaaagaaatcgttttggcacaacaaaatttatggtttgtaattcctctcttcccaatgtttgttattttttttatttccgcacttgcagaaactaatcgacccccatttgatttaccagaagccgaagctgaattggtagctggatatcaaacagaatattctgggatgatgtatgcaatgttttggcttggagaatatgcaaacattctattgatgtgtgcacttggttcaattttatttcttggcggctggttatcacctatcgatatttatccattaaatttaattccaggtgctgtgtggatgataataaaaatattaattttatttttcatgtttgcaattataaaagcaatagttccaagatatagatatgaccaacttatgagattaggttggaaagtatttttacctttttcacttatatacgttgtgttaactgcaagttttttaatttattttgatttattacctaataaagccttttaat

SEQ ID NO: 201738 - DNA, 1183 bp, Unknown
  Bacterial polypeptide expressing nucleotide sequence isolated from the Sargasso Sea
tccagatgctatgagggaccaacaccagtttctgcgctaattcacgcggcaacaatggtgacggccggtgtttttttagttgttagatgctcaccaatttttgaatattctcaagttgctttaaactttgtagctattataggtatgataacagctttttttgcagcatcagtcgctgtagttcaaaatgatattaaaagaattattgcttattctacttgtagtcagcttggctatatgttttttgcaacaggagttggcgcctatcatgtagctatatttcatctgtttactcatgcattttttaaagctctattatttttaggatcaggttcagtaattcacgctttaaaagatgaacaagatataagaaatatgggaggtatatggaaaaaaatgccactcacatggatttctatgatcataggaacactagctttaactggtttcccttttttatctggatactattcaaaagacgcaataatagaatttgcctatttaaaaggtacaaatataggctattttgctgcaggaatagggataattacagcagttttaacagcaatatattcttggagattaattttcaaaacttttcatggaaattttaataataaaagtctttcaaagatagaagtacatgagtcaggaatgattataatttcccctttagctttgttagtattaggagcggttttttctggttttttatttaaagattttttaataggtcatcattatgaagatttttggaagaactcaatccttataattcaaaatattgatcattctaacgtacctatctggattcttgttaccacaccttttttagtcactgtatcgattccaatagcttattatttatatattaaaaataataatttattagaaaatattaaacttaaaaatcgacccatttataattttttattgaacaaatggtactttgatgagatttatgactttattcttgtaaaaccaacaaagtttatcggatcttttttttggaaatctggagatataaaaacaattgaccgatacggtccagacggtgtatcaaaaatagtcaaaagtatttctaacaaatcaagcaaatttcaaagcggatatatttacgactatgcttttgtaatgcttataggattatctttattattaacattctttattttttattaat

SEQ ID NO: 201739 - DNA, 1084 bp, Unknown
  Bacterial polypeptide expressing nucleotide sequence isolated from the Sargasso Sea
aatgacagagatattttcacaattattttttacgattgggggggtgctctcggatctgatgtcttctaattttggttttgtacttattttgataggccagggccttcttatggctgtgtttttgcttctttccgcatactttttaatttatgcagatcggaaggtttgggcagctgttcaattacggcggggtccaaatgttgtgggagcattcggacttttgcagtctggtgcagacatgttaaaattagtgttcaaagaaattgttgttccagctggatcagataaatttgttttcttcttagccccagtgatttcctttgtgatggctattttagcctgggcggtagttccattaaatgaaggttggcaactctcgaatattaatgtcgccatactttatgtttttgcgatatcgtcacttgaagtttacggtgttattatgggtggttgggcatctaattccaagtatccatttttgggttcgcttcgttctgctgctcagatgatttcctatgaagtgtcaataggactggttattataggtgttatcatttcaacgggatctatgaattttggcgcaattgttgctgcgcaagacaccgattatggaatttttggttggtattggttgccccatttgccaatgttatttttattttttatctctgctttggccgaaacaaataggccaccttttgaccttcccgaggctgaatcggaactggtagcaggtttccaggttgagtacagctccacgccatttttattatttatggctggtgagttgatagcagtttttttgatgtgtgcacttactagcctcttgttttttgggggttggttgtctccaattcctgctttacctgatggggtgttctggatgattttgaaaatgggccttttcttttttatttttgcgatgatcaaggcaatcacccctcgctatagatatgatcaattaatgagacttggctggaaagtgtttttgccattttccctagcttgggttgtttttgtggcttttctcgcaaaatttgaagtttttggcagcttttatgctcgctacttagttggaggctga

SEQ ID NO: 201740 - DNA, 496 bp, Unknown
  Bacterial polypeptide expressing nucleotide sequence isolated from the Sargasso Sea
tttgagtaaatttgattatactcgtgcagtaaaatatttttttcttgctgatgtttggcaagggatgaggctcgggctcaaatatttttttaaacccaaggcaaccataaattatccttatgaaaaagggccactaagtccacggttcagaggagagcatgctctacgtcgatacccaaatggtgaggaaaggtgtatagcttgcaaattatgtgaagctatatgtccagcccaagctattactatagatgctgagcctagggaagatggtagtcggcgaacgacccgatatgatattgatatgaccaaatgcatttattgtgggttttgccaagaggcttgtccagtggacgcaatcgtcgaaggtccaaactttgagtttgccacggaaactagagaagagctcttttacgataaagaaaaacttttggaaaatggcgagcgatgggaagcacaaatcgcacgtaatttagagctagatgccccatatcgataa

SEQ ID NO: 201741 - DNA, 370 bp, Unknown
  Bacterial polypeptide expressing nucleotide sequence isolated from the Sargasso Sea
atgatttataattttttaacagactatctttcaataataatttttttatttattgctttatttttaagcatagggtttattttaattaattttctagcttcaccaagcaatcctgatcccgagaaactgtctgcttatgaatgtggatttgaagcctttgatgactctaggatggaatttgatgtaagattttatctagttgcgattttattcataatttttgatttagagatagcttttttatttccttgggcaatttctttagggagtattggagctgtaggtttttggtcaatgatgatttttcttggcgtattaactattggatttatttatgaatggaaaaagggagctttagaatgggaataaa

SEQ ID NO: 201742 - DNA, 340 bp, Unknown
  Bacterial polypeptide expressing nucleotide sequence isolated from the Sargasso Sea
ccatttttaatttttttattcattgctttgatatttgcatctgtaatgatgaccgcgggtttctttttcggagggagtaatcctgattctgaaaaaaattcaccatatgagtgtggatttgaagcgtttgaagatagccgaatgaaatttgatgtaagattctatcttgtagccatactatttatcatattcgaccttgagattgcttttttgtttccttgggctgtcgttctagatcatataggtcatgaaggatttttagctatggctgtatttttatttattttactaattggttttatatatgaatggaaaaaaggggctttagagtgggattaga

SEQ ID NO: 201743 - DNA, 370 bp, Unknown
  Bacterial polypeptide expressing nucleotide sequence isolated from the Sargasso Sea
aatgatttacaactttttatcagattatttatctataataatatttttatttatagctttgtttttaagcataggttttatagttataaattttttatcttccccatcaaatccagatccagagaaactatccgcgtatgaatgtggttttgacgcttttgatgactctagaatggaatttgacgtaagattttacctagtagctatattatttataatttttgatttagaaatagcttttttatttccttgggctatttctcttggagcaattggcagcctaggtttttggtcaatgatgattttcttgggagttttaacaataggttttatttatgaatggaaaaaaggagctttggaatgggaataa

SEQ ID NO: 201744 - DNA, 367 bp, Unknown
  Bacterial polypeptide expressing nucleotide sequence isolated from the Sargasso Sea
atgggttccattttaaacgactatcttccaattttaatttttatgtccttgtcagcatttgtggtcatggctttaacattacctcctatattatttgcaccaaaacatcctgataaagagaaattatctcaatatgaatgtggttttgagccttttgatgacgcaagaacaaaatttgatataagattctatctagttgctatcctttttataatttttgatttggaggtcgcatttttatttccttgggctgtagtttttggtgatattggcctttttggttttgtttcaatgatggtatttttaggtgttctcactattggatttatctatgaatggaaaaaaggtgcattggaatgggattaat

SEQ ID NO: 201745 - DNA, 370 bp, Unknown
  Bacterial polypeptide expressing nucleotide sequence isolated from the Sargasso Sea
aatgctatttgaatttttaacagattacttatctataataatattcgtatttattgctttagctttaagcatcggctttattgctattaattacgcggcatctccaaaaaatccagatccagaaaagctatcagcttacgagtgcgggtttagtcccttcagcgactcgagaattaagtttgatgtcaggttctatttagttgcaattttgttcattatttttgacttagaaattgcttttctattcccatgggcagtttctttggggaacattggtttacttggattttattccatgatggcatttttatttatacttacagttggatttatttatgagtggaagaaaggggcattagaatgggaataa

SEQ ID NO: 201746 - DNA, 1123 bp, Unknown
  Bacterial polypeptide expressing nucleotide sequence isolated from the Sargasso Sea
cgctggggtatttttagttgttagatgttcaccaatttatgaatattctgaattagctttatcaataataacgattattggaatgctaacagcgatatttgcagcatctgtggctatagtacaaacagatattaaaaaaataattgcctattcaacttgtagtcaattgggttatatgttttttgctgcaggtgtaggagcgtataatgttgctatgtttcatttgtttacacatgccttttttaaagctctattatttttaggttctggagcggtaatacactcgtttaaaaatgaacaagatattaataagatgggaggtgtcagaaaaaaacttccttacacatatattttaatgttaattggaacattggcattaactggttttccatttctttctggtttttattcaaaagatgcaataatagagttcgcatacttaaaagggaattcagtcggaatatcggcagcatttgttggtgtaatcactgctttaataacttcaatttattcttggcgtcttatttttaaaacttttcatggaaattacaataatagaaaaataaattttgatcaaatacatgagtcccctttaattatgattatacctttatttgttttagccattggtgctatattttctggaataatctttaaagaattatttattgggcacgaaacatcttatgaattctggaataaatcaattttgtttttagaaccattaagtcaaaaacatcctccaaactggttcctatttttaacaccaatacttgttataattgctatacctttctcattttacatattcgttattaacaaaaaaattgttgataccatcgtcgatatgaacagaccaatatatcaatttttaataaataaatggtattttgatgatatttatgagtatttgtttgttaacccttctaaaatgataggtttatttttttggaaaaaaatagatggatcagtaattgataaatttggtcctgatggtatatcagcattaattaaaaacttttcaattaaagcagttaaatttcaaagtggatatatataccaatatgctttcattatgttgcttggaatttctttgttattaaccttgctaattttacaataa

SEQ ID NO: 201747 - DNA, 923 bp, Unknown
  Bacterial polypeptide expressing nucleotide sequence isolated from the Sargasso Sea
caatgctgctttactttcggttggagtatcgtttttaatgtttggctatctttttttggataaatttaaaccaatcaaatttgaattatttgaatggtatccaagcccacagataatttttgaattttatttggatggcttatctggagtaatgatgattctcatttctggtctaagtcttgtaattcaattattttctacctcttatatgagcaaggacgaaaaatatacaaaatattttgaatactttaatttctttgttttctcaatgcttttacttgtactttctggaaattttctagtaatgttttttggttgggagcttgtaggattgagctcttacttacttatttctttttggtatgaaaaaaattctgctgcaaaagcaggaaataaagctttcattttgaatcgtattggtgactttggatttctaattggcttgatgatgattttaaattattttgaaacgtttaattttgttgatatttttgattcagtattaatcaaacaaccatcaaatctagatctaataattttatttctattattaggtgcatttggaaagtctgctcagtttcctctatttagttggcttccagatgcaatggagggacccactcctgccagtgctttaattcatgcagcaacaatggttactgctggggtatttatgcttgtaagagtttctccgatgttgcaattttcagaacttgcgagtttgacaataattggatttggacttttaacagctcttatagctgcatttgctgcaattaaccaagatgatattaagaaagtgttggcttattcaacgatatctcaacttggatttatgtttattgcaattggtgctggggcatatgttgcagcaatctttcatttagtcacacacgcatttttcaaagctctcttatttcatg

SEQ ID NO: 201748 - DNA, 1186 bp, Unknown
  Bacterial polypeptide expressing nucleotide sequence isolated from the Sargasso Sea
ttcgtattaaatcgaattggagattttggttttttgattgctttaatgatgatattaaatacctatgatacgttttcatttaaaacagtttttgcaacaacattaataaatcagccacaaaatctagatcttattgttgtcttcctaatgattggtgcttttggaaaatcagcacaatttccattatttagctggttgccagacgcaatggaaggaccaactccagcaagtgctttgattcatgctgcaacaatggtcacagccggtgtttttatgctagttcgaatttctccgctattacagttttcagagttatcaagcatcttaattataagtattggtctcttaacagctttaatctcagcttttgctgcaataaatcagaatgatattaaaaaggtacttgcttactcaacaatctcacagcttggatttatgtttatagcaattggggctggagcatatgttgcagcaatttttcacttagttacacacgcatttttcaaagcattacttttcctaggtgctggtgctgtaatacatgaaatgcatcatgaacaaaatattcaaaagatgggtggtttaaagaaaaaaatgccagtgaccgcagcaatgatgggtatagggactttagcaatttcaggaatacctccacttgcaggattttggtctaaagatgaaattcttgcatctactttcgctaatggtggaatttattatggattctgggcactctccttacttgcagcttttatgacagctttttatatgggaagacattggttattaatttttcataaagaaccaacaaataatattgatgatgttcatgaggcaccaaaaatgatgacgagaccattattactgttaggaatattttctatttttataggttttataaacacaccattttttcatgggttagaaaaagtcctccattacacattaattgatgtagaagtaacccatttaccagaaggaatagctgtcgtaattcttgctttgatatcaataggagcaggatttacaggactaggtttggcatatttgatatatattgtagatatattttcctattttaaatttgagatccctttcttaaaagaagtaaagggattgtcatcaaatgttttatatttaaataaagttggacacacactttttgtacagatacctaaatcattgg

SEQ ID NO: 201749 - DNA, 328 bp, Unknown
  Bacterial polypeptide expressing nucleotide sequence isolated from the Sargasso Sea
catgagccagtggaaaaacatctgcaaaatcgatgacattctgcctgcaacaggcgtctgcgccctgttaggtaacgagcaggttgcaattttccgcccgtatcacagcgaccaggtgtttgcgatcagcaacatcgacccgttctttgagtccagcgtgctttctcgtgggcttattgctgaacatcagggcgaattgtgggttgccagcccgctgaaaaaacagcgttttcgtttaagcgacggactgtgcatggaagacgaacagttctccgtgaaacattacgaagcgcgagtgaaagacggcacggtgcaactgcgcggttaa

SEQ ID NO: 201750 - DNA, 873 bp, Unknown
  Bacterial polypeptide expressing nucleotide sequence isolated from the Sargasso Sea
gatatgttgaagaacctgatgtctatgaattaatacaaagcattgtggctattcaaagagattatggcgatagaaaatcaagaaaaaattcgagaatgaaatatcttcttcatagaaaaggtattaaatggttcaaaaagatacttattgataagtatttcaaaaaagaaattaaaaaaatcagaaaagaacctgataaggttcttattgattacctaggttggcataaacaaaataaaacttcctatttcgtaggtttacctttattatcagggagattatctggagagaagaagaatactataacaagtattgtaaaaaaatataaattagatttaagactcacacctaatcaagatattttactttgtaatatcgccaataaaaacaaaggtgaaattcaaaaatctctatcaaaaattggatacggaaatttagaaaacattaatgaaatacaaagacatgctttagcttgtcctgctttaccactttgtggtcttgcgatgactgaagctgagagaatattacctgatgtattaataaggattgaaaatttactattagatctaaatatacaaaagacaatattattcagaatgacaggatgtccgaatggatgtaccaggccttacatggccgaattagcacttgttggaagtgggcaaaacaaataccaattatggttggggggaagtaaaaatctacaaaggctagctaaaccattcttacaaagaatggaacttaacgatttagaaaaaactcttcaaccattatttgataattggaagagtaatttggatttggatttcggagattttatatatactcaagatgaaaattatatattgaatttactaaataaaaatcaataaa

SEQ ID NO: 201751 - DNA, 889 bp, Unknown
  Bacterial polypeptide expressing nucleotide sequence isolated from the Sargasso Sea
aattgcagatccacttggatatgttgaagaacctgatgtttatgaattaatacaaagcattgttgctgttcaaagagattatggtgatagaaaatcaagaaaaaattcaagaatgaaatatcttcttcatagaaaaggtattaaatggttcaaaaagatactttctgataagtatttcaaaaaagatattaaaaaaatcagaaaagaacctgataaagttcttattgattacctaggttggcataaacaaaataaaacctcatattttgtaggtttaccattattatcagggcgattatctggagagaagaagaataccatcacaagtattgttaaaaaatataatttagatttaagactcacacctaatcaagatattttactttgtaatatcgccaataaaaatcaaggtgaaattcaaaaatctctatcaaaaattggatacgaaaatttagaaaacattaatgaaatacaaagacacgctttagcttgtcctgctttaccactttgtggtcttgcaatgactgaagctgaaagaatattacctgatgtattaaaaaggattgaaaatttactattagatctagaaatacaaaagacaatattattcagaatgacaggatgtccgaatggatgtaccaggccttatatggccgaattagcacttgttggaagtggacaaaacaaataccaattatggttggggggaagtaaaaatctacaaaggcttgctaaaccatttttgcaaagaatggaacttaacgatttagaaaaaacccttcaaccattatttgataattggaagagtaatttggattcggatttcggagattttataaatactcaagatgaaaattatatattgaatttactaaataaaaatcaatag

SEQ ID NO: 201752 - DNA, 559 bp, Unknown
  Bacterial polypeptide expressing nucleotide sequence isolated from the Sargasso Sea
tgttagaaaatataatttagatttaagactcacaccaaatcaggatattttactttgtaatatcgcgaataaaaacaaaagagaaattcaaaaatctctatcaaaaattggatacgaaaatttagaaaacattaatgaaatacaaagacacgctttagcttgtcctgctttaccactttgtggtcttgcaatgactgaagctgaaagaatattacctgatgtattaaaaaggattgaaaatttactattagatctaaaaatacaaaagacaatattattcagaatgacaggatgtccgaatggatgtaccaggccttatatggctgaattagcacttgttggaagtgggcaaaacaaataccaattatggttggggggaagtaaaaatctgcaaaggcttgctaaaccatttttacaaagaatggaacttaacgatttagaaaaaactcttcaaccattatttgataattggaaaagtaatttggatttggatttcggagattttataaatactcaagatgagaattatatattgaatttactaaataaaaatcaatag

SEQ ID NO: 201753 - DNA, 544 bp, Unknown
  Bacterial polypeptide expressing nucleotide sequence isolated from the Sargasso Sea
cttgatttaagacttacgcctaatcaagatatcttactttgcaatatcgctaataaaaacaaaagtgcaattaaaaaagcactttcaaaaattggatacgacaatttagaagacattaatgaaatacaaagacatgccttagcatgtccagctttaccactttgtggtcttgcgatgactgaggcagaaagaattttacctgatgtacttaaaaggattgaaaaattactattagatctaaaaatagaaaagacaatattatttagaatgacaggctgtccgaatggatgtactaggccttacatggcagaattagcacttgtaggaagtgggcaaaacaaataccaattatggttgggaggaagtaaaaatctacagaggctggcaaaaccattcttacaaagaatggaattaaatgatttagaaaaaactctacaaccattatttgatcattggaaaagcagttccgatttggattttggagattttataaatatgcaagatgaaagttctattttgaatttactaaatgaaattcaataga

SEQ ID NO: 201754 - DNA, 580 bp, Unknown
  Bacterial polypeptide expressing nucleotide sequence isolated from the Sargasso Sea
gaagaataccattactagtatcgtaaaaaaatacaatcttgatttaagacttacacctaatcaagatattttactttgtaatatctctaataaaaacaaaagtcaaattaaaaaagctctttcaaacattggatatgaaaatttagatgacattaataaaatacaaaggcatgccttggcatgtccagctttaccactttgtggtcttgctatgactgaagcagaaagaattttacctgatgtacttaaaagaattgaaaaattactattagatttaaaaataaaaaagacaatattatttaggatgacaggctgtcctaatggatgtacgaggccttacatggcagaattagcacttataggaagtggacaaaacaaataccaattatggttaggtggaagtaaaaatctgcaaaggttggccaaaccattcttacaaagaatggaactaaaagatttagaaaaaacacttaagccactttttgattattgggaaagtagttcagatctagattttggagattttataaatacgcaagatgaaagctctattttgaatttactaaatgatacaaattag

SEQ ID NO: 201755 - DNA, 511 bp, Unknown
  Bacterial polypeptide expressing nucleotide sequence isolated from the Sargasso Sea
gctttgtaatattcctaataaaaacaaaagcaaaattaaaaaggccttaaaaaagatcggatatgacaatcttaatgatatcaatgaaattcaaagacatgctctagcttgtccagcactccctctttgtggtctagccatgaccgaagctgaaagaattttacctgaagttctaactagaatagaaaacctattaactgatatgaatatagaaaagacaatattatttagaatgacaggatgtcctaatggatgtacaagaccttatatggcagaattagctcttgttgggagtgggcagaataaatatcaactatggctggggggaagtaaaaaccttcaaagattagctaaaccatatttgcaaagaatggaacttgatgatttagaaaaaaccattcaacctttattaaaattttggaaaaaaagcagcgccgaaaaagattttggagattttattaacaatcaaaaggaatctttcattacaaagttactaagcgagataaattaa

SEQ ID NO: 201756 - DNA, 922 bp, Unknown
  Bacterial polypeptide expressing nucleotide sequence isolated from the Sargasso Sea
tcgcacacataataatgaagagacatttgccagaattgcagatccacttggatatgttgaagaacctgatgtctatgaattaatacaaagcattgtggctattcaaagagattatggcgatagaaaatcaagaaaaaattcgagaatgaaatatcttcttcatagaaaaggtattaaatggttcaaaaagatacttattgataagtatttcaaaaaagaaattaaaaaaatcagaaaagaacctgataaggttcttattgattacctaggttggcataagcaaaataaaaccacctatttcgtaggtttaccattattatcagggagattatctggagagaagaagaagaccataacaagtattgtaaaaaaatataaattagatttaagactcacacctaatcaagatattttactttgtaatatcgccaataaaaacaaaggtgaaattcaaaaatctctatcaaaaattggatacgaaaatttagaaaacattaatgaaatacaaagacatgctttagcttgtcctgctttaccactttgtggacttgcgatgactgaagctgagagaatattacctgatgtattaataaggattgaaaatttactattagatctaaatatacaaaagacaatattattcagaatgacaggatgtccgaatggatgtaccaggccttacatggccgaattagcacttgttggaagtgggcaaaacaaataccaattatggttggggggaagtaaaaatctacaaaggctagctaaaccattcttacaaagaatggaacttaacgatttagaaaaaactcttcaaccattatttgataattggaagagtaatttggatttggatttcggagattttatatatactcaagatgaaaattatatattgaatttactaaataaaaatcaataa

SEQ ID NO: 201757 - DNA, 687 bp, Unknown
  Bacterial polypeptide expressing nucleotide sequence isolated from the Sargasso Sea
aagaacctgataaggttcttattgattatctaggttggcataaacaaaataaaaccacccatttcgtaggtttaccattactatcaggaagattatctggagagaagaagaataccatcacaagtattgttaaaaaatataatttagatttaagactcacacctaatcaagatattttactttgtaatattcccaataaaaacaaaggtgaaattcaaaaatctttatcaaaaattggatacgaaaatttagaaaacattaatgaaatacaaagacatgctttagcttgtcctgctttaccactttgtggtcttgcaatgactgaagctgaaagaatattacctgatgtattaaaaaggattgaaaatttactattagatctaaaaatacaaaagacagtattattcagaatgacaggatgtccgaatggatgtaccaggccttatatggctgaattagcacttgttggaagtgggcaaaacaaataccaattatggttggggggaagtaaaaatctacaaaggcttgctaaaccttttttacaaagaatggaacttaacgatttagaaaaaactcttcaaccattatttgataattggaagagtaatttggatttggatttcggagattttataaatactcaagatgaaaattatatattaaatttactaaatgaaaatcaataga

SEQ ID NO: 201758 - DNA, 610 bp, Unknown
  Bacterial polypeptide expressing nucleotide sequence isolated from the Sargasso Sea
ctgctatcaggaagattatctggagagaagaagaataccatcacaagtattgttaaaaaatataatttagatttaagactcacacctaatcaagatattttactttgtaatatccccaataaaaacaaaggtgaaattcaaaaatctctttcaaaaattggatacgaaaatttagaaaacattaatgaaatacaaagacatgctttagcttgtcctgctttaccactttgtggtcttgcaatgactgaagctgaaagaatattacctgatgtactaaaaaggattgaaactttactattagatctaaaaatacaaaagacaatattattcagaatgacaggatgtccgaatggatgtaccaggccttatatggccgaattagcacttgttggaagtgggcaaaacaaataccaattatggttggggggaagtaaaaatctacaaaggcttgccaaaccatttttacaaagaatggaacttaacgatttagaaaaaactcttcagccattatttgataattggaagagtaatttggatttggatttcggagattttataaatactcaaaatgaaaattatatattaaatttactaaatgaaaatcaataga

SEQ ID NO: 201759 - DNA, 316 bp, Unknown
  Bacterial polypeptide expressing nucleotide sequence isolated from the Sargasso Sea
gcgtcgcctcgagatcgacaaatcggtgttgatccggatgactggttgtcccaacggttgtgcacgcccttacatggcagaactggccctggtggggagcggtgtgaatcagtaccagctgtggctcggcggcagtgccaatttgcagcggctggctcagcccttcctgcaacgcatgcccctggaagagctcgagcagaccatcgaacctctgctgatcagctggaagcaagccggcggtcgccgcagcctcggcgatcacgttgaaaaacttggcgatcaggcggtgagtgagctgctcggtgctgcggcatag

SEQ ID NO: 201760 - DNA, 894 bp, Unknown
  Bacterial polypeptide expressing nucleotide sequence isolated from the Sargasso Sea
ccagaattgcagatccacctggatatgttgaagaacctgatgtttatgaattaatacaaagcattgtggctattcaaagagattatggtgatagaaaatcaagaaaaaattcgagaatgaaatatcttcttcatagaaaagggattcaatggttcaaaaagatactttctgataagtatttcaaaaaagaaataaaaaaaatcagaaaagaacctgataaagttcttattgattacctaggttggcataaacaaaataaaacctcccatttcgtaggtttaccattattatcaggaagattatctggagagaggaagaacactataacaagtattgttaaaaaatataatttagatttaagactcacacctaatcaagatattttactttgtaatatccccaataaaaacaaaggtgaaattcaaaaatctctatcaaaaattggatacgaaaatttagaaaacattaataaaatacaaagacacgctttagcttgtcctgctttaccactttgtggtcttgcgatgacggaagctgaaagaatattacctgatgtactaaaaaggattgaaaatttactattagatctaaaaatacaaaagacaatattattcagaatgacaggatgtccgaatggatgtaccaggccttatatggccgaattagcacttgttggaagtgggcaaaataaataccaattatggttggggggaagtaaaaatctacaaaggcttgctaaaccttttttacaaagaatggaacttaacgatttagaaaaaactcttttaccattatttgataattggaagagtaatttggatttggatttcggagattttataaatactcaagatgaaaattatatattaaatttactaaatgaaaatcaataga

SEQ ID NO: 201761 - DNA, 565 bp, Unknown
  Bacterial polypeptide expressing nucleotide sequence isolated from the Sargasso Sea
aatggttcaaaaagaactttttgataagtatttcaaaaaagaaattaaaaaaattagaaaagaaccggataaggttcttattgattatctaggttggcataaacaaaataaaacttcctattttgtaggtttaccattattatcagggagattatctggagagaagaagaataccataacaagtatcgttagaaaatataatttagatttaagacttacacctaatcaagatattttactttgtaatatctccaataaaaacaaaagtgaaattcaaaaatctttatcaaaaattggatacgagaatttagaagacattaatgaaatacaaagacacgctttagcttgtcctgccttaccactttgtggtcttgcgatgactgaagctgaaagaatattacctgatgttttaaaaaggattgaaaatttacttttagatctaaaaatacaaaaaacaatattatttaggatgacaggatgtccgaatggatgtactaggccttatatggccgaattagcacttgttgggagtgggcaaaacaaataccaattatgggtggggggg

SEQ ID NO: 201762 - DNA, 1582 bp, Unknown
  Bacterial polypeptide expressing nucleotide sequence isolated from the Sargasso Sea
ttgatcaaggttgagaaagtaaaaaagaaaaaagattctgcaaaggaagagactgtttgtttagcaaatggactagaagtttctaaatttgaaaattttaaaaaaagtagccaatttcttaaggaaccacttgctacggaattagtcaatgaaagtgatcattttactaatgatgcagttcagttattaaaatttcatggtagttatcaacaagataacagggaaaatagaaggccgggcaaaagtaaagattggcaaatgatgcttaggttaagaaatccgggcggtgaagtccctgggaaattatttttagcattagatgaattatctgacaaactaggtaatggaacacttagggccactacaagacaagcctttcaaatgcatggaatcagaaaggagaacctaaaggaagtaattcaaacaatagtaaattcaatgggctccacattagctgcatgtggagacattaatagaaacgttatggcccctgcggctccatttgattcgccagactataatattgcaagagcattggcaaaaaaagttgcagatcttctcaccccaatggctggccaaggcacttttttagagctttgggctgatggagatttagagtacaccataaagcctgatgaagatattgaagcaattaggaagctccaattcaaagataatgtttttagtggaataaaagatgagcctctttatggttcaacttatttaccgagaaaattcaaatgtgccgtgacagttcctggggacaattctgttgatcttcttaccaatgacataggaatagttgcctttacttctaaagatggaaacttagaaggatgcaacttctatgttggaggtggtatgggtcgcacacataataatgaagagacctttgccagaattgcagatccacttggatatgttgaagaaccttatgtttatgaattaatacaaagcattgtggctattcaaagagattatggtgatagaaaatcaagaaaaaattcgagaatgaaatatcttcttcatagaaaaggtattaaatggttcaaaaagatactttctgataagtatttcaaaaaagaaattaaaaaaattagaaaagaacctgataaggttcttattgattatctaggttggcataaacaaaataaaaccacccatttcgtaggtttaccattattatcaggaagattatctggagagaagaagaataccatcacaagtattgttaaaaaatataatttagatttaagacttacacctaatcaagatattttactttgtaatattcccaataaaaacaaaggtgaaattcaaaaatctttatcaaaaattggatacgaaaatttagaaaacattaatgaaatacaaagacatgctttagcttgtcctgctttaccactttgtggtcttgcaatgactgaagctgaaagaatattacctgatgtattaaaaaggattgaaaatttactattagatctaaaaatacaaaagacagtattattcagaatgacaggatgtccgaatggatgtaccaggccttatatggctgaattagcacttgttggaagtgggcaaa

SEQ ID NO: 201763 - DNA, 1433 bp, Unknown
  Bacterial polypeptide expressing nucleotide sequence isolated from the Sargasso Sea
gggccactacaagacaggcctttcaatgcatggaataagaaaggagaacctaaaggaagtaattcaaacaatagtaaattcaatgggctccacattagctgcatgtggagacataaatagaaacgttatggcacccgcggctccattcgattcgccagactataatattgcaagagcattggcaaaaaaagttgcagatcttctcaccccaattgctggccaaggcacttttttggagctttgggctgatggagatttagagtacaccataaagcctgacaaagatattgaagcaattaggaagctccaattcaaagataatgtttttagtgggataaaagatgagcctctctatggttcaacttatttaccgagaaaattcaaatgtgctgttaccgttcctggtgacaattctgttgatcttcttaccaatgacataggaatagttgcctttagctctaaagatggaaagttagaagggtgcaacttctatgttggaggtggtatgggtcgcacacataataatgaagagacatttgccagaattgcagatccacttggatatgttgaagaacctgatgtttatgaattaatacaaagcattgtggctattcaaagagattatggtgatagaaaatcaagaaaaaattcgagaatgaaatatcttcttcatagaaaaggtattaaatggttcaaaaagatacttactgataagtatttcaaaaaagaaattaaaaaacttagaaaagaaccatataaagttcttattgattacctaggttggcataaacaaaataaaacctcccatttcgtaggtttaccattattatcaggtagattatctggagataagaaggataccatcacaagtattgttagaaaatataatttagatttaagactcacaccaaatcaggatattttactttgtaatatcgcgaataaaaacaaaagtgaaattcaaaaatctctatcaaaaattggatacgaaaatttagaaaacattaatgaaatacaaagacacgctttagcttgtcctgctttaccactttgtggtcttgcaatgactgaagctgaaagaatattacctgatgtattaaaaaggattgaaaatttactattagatctaaaaatacaaaagacaatattattcagaatgacaggatgtccgaatggatgtaccaggccttatatggctgaattagcacttgttggaagtgggcaaaacaaataccaattatggttgggaggaagtaaaaatctgcaaaggctcgctaaaccatttttacaaagaatggaacttaacgatttagaaaaaactcttcaaccattatttgataattggaaaagtaatttggatttggatttcggagattttataaatactcaagatgagaattatatattgaatttactaaataaaaatcaataga

SEQ ID NO: 201764 - DNA, 841 bp, Unknown
  Bacterial polypeptide expressing nucleotide sequence isolated from the Sargasso Sea
cttgggctggaacgaacagggtgacggtaagctctggtacggcgtgcatgtgcaaaacggtcgccttcgcggcgagatgaagaaggctttgcgcgccgtcatcgagcgttacgagcttcccgttcgtctcaccgcgcaacaagacatgcttctcaccgacgtcgacccggcgtggaaggcggacatcatggccaccctccaggctgcgggcgtcaaggacgcctccgaggtggattcgctcgagcgtctctctatggcgtgcccggcgttgccgctgtgcggcctcgccatcaccgaggccgagcgcggtttgcccgagatcaacgcgcgattacgcaaggtgatgaccaaggttggcttggcgccctccgacgatctcgtcattcgcatgactggctgccccaacgggtgcgcgcgtccgtacatggcggagctcggtttcgtcggcgacggtccggcgagctaccaaatttggctcggtggcacgcgcgcgatgacaggcgtctccaacgcgtacgccgatcgcgtcaaggtcgatgacatcgaaactttcttcgaaccaatcttcgccatgtgggcgcaacagcgtcaatctggtgaattctttggcaacttcatcaaccgcgtcggctttgacgcgcttcgcgcgtacgccgaatcctacacgccgttgcccgacgctccggccttcggcgccgtggaaaccggcggtaggttaccccgcgtcatgatcgaccgcgacgtctttgagcagctccaagcgtacgccgaaaagaagaacacgaccctgacgcgcgcgacgacggacgccatcagaaagatgatcgcggaagacaagtga

SEQ ID NO: 201765 - DNA, 401 bp, Unknown
  Bacterial polypeptide expressing nucleotide sequence isolated from the Sargasso Sea
ttgtcctgctttaccactttgtggtcttgcaatgactgaagctgaaagaatattacctgatgtattaaaaaggattgaaaatttactattagagctaaaaatacaaaagacaatattattcagaatgacaggatgtccgaatggatgtaccaggccttatatggccgaattagcacttgttggaagtgggcaaaacaaataccagttatggttggggggaagtaaaaatctacaaaggcttgctaaaccatttttacaaagaatggaacttaacgatttagaaaaaactcttcaaccattatttgataattggaagagtaatttagatttagatttcggagattttataaattctcaagacgaaaattatatattgaatttactaaataaaaatcaataaa

SEQ ID NO: 201766 - DNA, 473 bp, Unknown
  Bacterial polypeptide expressing nucleotide sequence isolated from the Sargasso Sea
ggctgagctggcggctctcgggttcgatctgcccgatgctcttcctccactggcccgccatgccattgcctgcccggctctgcccacctgcgggctggccatcacagaatcggagcgcatcctgcccagcgtgctggagcgcctcgatgcccagctgcgtcgcctcgagatcgacaaatcggtgctgatccggatgaccgggtgccccaacggctgtgcacgcccctacatggcggaactggccctagtgggcagcggtgtgaatcagtaccagctgtggctcggcggcagtgccaatttgcagcggctggcccagcccttcctgcaacgcatgcctctggacgagctcgagcagaccatcgaacctctgctgatcagctggaagcaagccggcggtcgccgcagcctcggcgatcacgttgaaaaacttggtgatcaggcggtgagtgagctgctgggtgctgcggcataga

SEQ ID NO: 201767 - DNA, 1144 bp, Unknown
  Bacterial polypeptide expressing nucleotide sequence isolated from the Sargasso Sea
tatgcagaattactcagaacatattggaattattggaggagggatagcaggcctttctcttggctgcactttattaaaggagggcatcccagtagtaatttttgaaaaaatgtcagaagaaacctctcatggagcagcaatcagtctttcttcaaatgcattgcgtcttttagatagggtggatgtttatagtgatcttaaaacaaaatcatttgtccattctgaagcatcaattcaaggtccgcaaaagaagatatgcgcattcaaaacacctgaagttttgacaacacgtcgtcaaacattaatgtctcttctgcatttaagatttttaaatttaggcggcgatatttatcatgatcatgcacttgtaagttttgatgctaaaaaatgtgaagcaacgttttcaaacaaaaagaaatataactttaagcacttggctgcatgtgatggaataagatcatcgatacgcgacactttttttccagcaaatcaaaagccaaaatatagtggctatagcgcatggagaggtattggtaaatctgcgctgaaaagtattcattttgcgctaggtcctaaggggcatgttgttagttatccaatcaataataatggtgatgttagttttgttgctgtaaggaaggaagattttcaatttaaagaatcatggaaagagcagggatctcttaataatttattagacgacttttcaatgtatgactcaagtatttttcctgagcttaaagatgaagtgtctctatacaaatggggcatttatattaggccacctttacaatcaatgacttcaaaaaatattactttagttggcgatgctgctcatccaatggttccatttttaggacaaggtgcttgcatggcgatagaggatgcttatacatttgcaatgctttgtaaacataagaatagaaattttactgatgcacaaaatatttatgatttgattaggagtgagcgtactaaaaaaattcaaaaggcgtctatgttgcagggaaagatttatcatatgaaaaatcctatgttggtatttgcaagaaattcagttatgaaatacaccaacattccaggcaatgatctgaagaggattcatgattatgatgcacataaagaagtattaaatttttcttaa

SEQ ID NO: 201768 - DNA, 886 bp, Unknown
  Bacterial polypeptide expressing nucleotide sequence isolated from the Sargasso Sea
cagatccgccttggatattgttgaagaaaaaaatatttatgaattaatacaaagtattgtggctattcaaagagattatggtgacagaaaatcaagaaaaaattcaaggatgaagtaccttcttcatagaaaaggtattaaatggttcaaaaaattgcttcttgaaaagtacttcagaaaagacataaaaaaaattagaaaagaaccgaatcaagttcttattgattacctaggttggcataaacaaaataagacctcatatttcgtaggtttaccattattatcagggagattatccggtgaaaagaagaaaactattactagtatcgtaaaaaaatataatcttgatttaagacttacacctaatcaagatatcttactttgtaatatcgctaataaaaacaaaagtgaaattcaaaaagccctatcaacaattggatacgaaaacttagatgacattaatgaaatacataggcatgccttggcatgtccagctttaccactttgtggtcttgcgatgactgaggcagaaagaattttacctgacgtacttaaaaggattgaaaaattactattagatctaaaaatagaaaagacaatattatttagaatgacaggttgtcctaatggttgtacaagaccttacatggctgaattagcacttgtaggaagtgggcaaaacaaataccaattatggatggggggaagtaaaaatctacaaagattagctaaaccattcttacaaagaatggaacttaacgatttagaaaaaactcttcgaccattatttgatcattggataagtaattcacatttagattttggagatttcataaatacgcaagatgaaagttctattttgaatttactaaatgcaatcgattag

SEQ ID NO: 201769 - DNA, 406 bp, Unknown
  Bacterial polypeptide expressing nucleotide sequence isolated from the Sargasso Sea
tctggccattgcttgtccagcactaccaacctgcggattagcggtcactgaatccgaacgcgttctgccccatgtgttgggccggctcgagaccctgctcgatgagctcaacatcgcgacgcccatcctcgtacgcatgactggctgccctaatggctgcgcgcgcccgtacatggcggaattggcgatggtgggcagtggcgttgagcagtatcagctctggctgggtggcagccctggattgacccgactggcccgtccagtgctccagaaaatgccgcttgcggagatggagtcaacccttcgcccgctgttggtgcagtggcaaaagcaagctcccaagcaaagctttggcgactattgccatggacttggtggtcagctagaggctgtgcttcaagcctga

SEQ ID NO: 201770 - DNA, 670 bp, Unknown
  Bacterial polypeptide expressing nucleotide sequence isolated from the Sargasso Sea
gatgatagataaaaaaataattatcggcacaagaggtagtaaattagctttaaattatgctgaaagagcaaaaaatgaaatatgcagtaaatttaaaattaaagaaaaaaatctagaaattaaaaaaataattactgagggcgataaaattaaggatgtaagactttctgatacaggaggaaagggacttttttcaaaaacgatagaaaatgaacttttagataataaaatcgatatagcagttcacgctttaaaagatatgccatctgatgggactagtgggttaactactaattgctttctagaaagaaatgatcctcgagaagttttgatttcaagagataaaaaaaaattcaatgatttaaataaaggatcaataattgggacctcttcttttaggagagaatttcaatttaaaagaattagaaatgacttaaaatataaattaattagaggcaacgttgacactagaataaaaaaattaaatgaaaaaaattttgatgcaataatactttcatttgcaggattacattctttaaagcttgatcaaaatataactcaaattttttcaacttctgaaataataccaagtgccggacagggaactgtagctttgcaatgtagagaaaatgatggagaaataataaagatacttaaaaaaattaatcat

SEQ ID NO: 201771 - DNA, 952 bp, Unknown
  Bacterial polypeptide expressing nucleotide sequence isolated from the Sargasso Sea
attttaggattagttggagagtctggatcaggaaaaagtacagtaggaaacgctattataaatttaattgatgaaccaggtaaggtttctagtggctcagttattttgggtgatcttaacattcatgaaaattctgagagtattgttaagtatagaggaaacaaaattggattgatatttcaagatcctcaaacttcacttaacccaattcttacagtgggtgaacagttaattgaaacaattcaaacccatcttaaattaagtaaagaagaggcaaaaaataaatctataaatctactgaaagaggttggtataaaagatgcagagataagatttgataattatcctcaccaattctcaggtggaatgagacaacgagtagtaatttctttagctttatgttgtgagccagaattgttaattgcagatgagccaacaacagcattagatgtatcaattcagtctcagattttagaacttattaaaaaattaacaaaagaaagaaatcttgcagttatactcattactcatgatatgggtgttatagctgagacagcagatcgtgtagcagttatgaaaagtggtaatttagttgaaatcggtgaaactaaaaaaatattaactaatccacaagaaaattatactaaaagtctagtaagttcagttccaccaactaataaaaaaatttcaagatttgtgattgtagaaaaagaaaacaataataaaaaaaaaaataatattaaaatattaaatagatggtcaaagaaaaaaattataaaacaagatttagtagaaataaaaaatcttaataaaagttttgatgataatttttttacagaaaattctaaaaattctgtaatggctgttaatgatgtttcatttgaaataaaagagggtgagtcttttggcttagtaggagaaagtgggagcggaaaatccacaatgctaaaat

SEQ ID NO: 201772 - DNA, 664 bp, Unknown
  Bacterial polypeptide expressing nucleotide sequence isolated from the Sargasso Sea
attgccgcctctcaggagatatacagaaatgcccgtctcgaccgccatcgccacaattctcgccgcgctgctgctcggcgccatgagccctggaccgagctttgtcatcgttgcccgcaatgcaatcggtctctcgcgcagcgacggcctcgcgacagcagcgggcatgggcatcggcggcgtgttcttcagcgcgatcgcattgctcggtctgtacaccttgctcgcgaccgtagagtggctatatgtcggcttgaaagtggccggcggcctttatctgatctaccttgcgtcgaagatctggcgcggcgccgccaaaccgctcgcattcgataccgcgcaaggcgccaacaccaatgcgcgcaaatcattctggattggtttgagcacacaacttagcaatccgaaaacggcggtctattacggcagtatcttcgctgccctgcttccgcaacatccgccgctgtggtgctacttcgcgttgccccccgcgatcttcgccattgaggccggctggtacaccgtggtcgcgctgtgcttctcgagcaagcggccgcgcgaaatgtatttgcggtggaaggcctggatcgatcgcgtcgccgcgagcgcagtcgccgcactgggattacgcctgatcctgacagcgcacaaagtgggtatctga

SEQ ID NO: 201773 - DNA, 711 bp, Unknown
  Bacterial polypeptide expressing nucleotide sequence isolated from the Sargasso Sea
atgtagcattaattgatatcgatcaaagatctatagataaattgtctagatctctagctaaaaaatataatataaaatctaaagcttatacttgtgatgtcagcaatgaaaatagcgttaaagatactgttattcatatagaaaaagatataggaaaaattgatattttattaaataatgcggctacaaaaacagaatctttaaaagagttttttatgcctcttgaaaaatattctcttgatacatggaaagaaataatggatgttaatcttactggtatgtatatcatggctaaagaagtagggtcaagaatggcaaaaagaaaaaaaggttctataattcaaatgtcatcaatttatagttcatctatggctgctgatcagagaatctataaagattcaaagtacttagaaactactataaatactcctactgcttatcctgtctcaaaagcaggtatcgttggtttgacgcttcatcttgcatcatattggggcaaaaacaatgttagagtaaatactttatcacctggtggtgtgtatagtggtcaaaataaaatttttgtaaaaaactattctagaaaagtccctctaaacagaatggctgacaaaaaagaaattataggtgcaatgctatacctagcttctgatgcttctagttatgttactggtcagaatatttttgtagatggtggcattagcgtttggtaat

SEQ ID NO: 201774 - DNA, 528 bp, Unknown
  Bacterial polypeptide expressing nucleotide sequence isolated from the Sargasso Sea
taaagaagatactgctaatgggaaaacacaaacaaatattcgagtctggggctattatgctgtatttagcagaaaaacataaccagttgcttggtggcaaaaaaacaaacaagctgtcagtaattcaatggctaatgtttcagatggctaatattggccctatgcttggtcaggcacatcattttaggcattatgctaatgagaatattcagtatgcaatcaatcgatatacgaatgaagcttcaaaaatatacgctgtgctcgatgcgcagcttggaaaatcacagtatattgcgggggaggattacagtatcgctgatattgcaatttacccgtggttaagaccacaaaaaatgcaaggtcaaaacatatcccatcaccccaatattcagcgatggtataacacaatgcgggcacgacccgcaataaagcgcggacttttggtgatgcatgacaaagttagcaacattagaaagaaaccagttggtgacgcatggaaaactttatttgaccgtcagtcaaaataac

SEQ ID NO: 201775 - DNA, 659 bp, Unknown
  Bacterial polypeptide expressing nucleotide sequence isolated from the Sargasso Sea
tatgagaaaaaaaataataattggatctagaggcagcaagcttgccttactttatgctcaacaagctaaagataagattattgaaaataccgaccttagtaatgaagatattttaattaaatcaattacaactaaaggtgacgaagtacaggatataagattatctgagcttggtggcaaaggtttgttttctagtaacattgaaaaagaacttcagttaaaaaatattgatattgcagtccatgcactgaaagatatgcctgctaatgaaacaagaggattaacaacggactctttccttgaaagaaatgaccctagggagattttaattacaaagaacaaaaaaaaacttaaagacttagatcaaaagtcaattgttggcacctcgtcatacagaagagaatttcaaataaaaaaaattagacaagatttgaactgtaaactaattagaggaaatgtagatactagaattagaaaattgaatgaggggatgtatgatgcaattattttgtcttatgctggtattaaatttttaaaatttgaaaatgaaatctcagaaattttttcagctgaagaaataattcctagtgcaggacagggcgtaattgctcttcagtgcagggagaatgataatgagacaatttctattttaaacaaaa

SEQ ID NO: 201776 - DNA, 571 bp, Unknown
  Bacterial polypeptide expressing nucleotide sequence isolated from the Sargasso Sea
atgcactttctagctgacgtttatgtcacatgtgatgtttgtcatggttcaaggtataacgatcaaactctagaagtaaaatataaagataagaatataagcgatgttttaagtatgacagtcgaggatgctttgtctttctttgatcaaattccagcaattaagaataaactcaaaactttaaacgatgtaggtcttggctatattactcttggacaatctgctaccaccctttcgggcggagaagctcagaggataaagcttgctaaggagctatcaaagagaagtacaggtaaaactttatttattcttgatgaaccaacaactggacttcactttcatgatattgagctactgttaaaagttttacataggttaaaagagcaaggcaatactatcattgttatcgagcataatttagatgtaattaaaaccgcagattggattattgatttaggtcctgaaggagggagtcagggcggagagttggttgctagtggtacaccagaaaaagtatcaaaagataagaaatcttttacagggaaataccttaaagggatgcttagctaac

SEQ ID NO: 201777 - DNA, 577 bp, Unknown
  Bacterial polypeptide expressing nucleotide sequence isolated from the Sargasso Sea
atgaaaagaagaaaaataattattggtaccagagctagtaaattagctttgatttatgctgaaaaagctaaaaatcggatattagaatcttcatcagaattaagcgttgataatgtcgaaataaaaaaaataaccaccgaaggagatttaaatttaactgatagattatccgaaattggcggaaagggattattttcaaaaaaaattgaaaaagagttattagaaaataaaattaatatcgcagttcatgctctcaaagatatgccatcagacgaaactccaggacttataacaagttgttttttaaaaagaagtgacccacgtgaagttttaataacattaaataataaaaaatttaagaacttggatgaaaattctataataggaacatcctcttatcgaagagagtttcaacttaaatacaaaaggaaagatttgaagtataaattaataagaggaaatgtagatactagaattaataaattaaaacaaaattcatataatggaattatattatcttatgctggtatcaaaaatttaaactttgaaaaatatgcatcagaaattttgaattaga

SEQ ID NO: 201778 - DNA, 874 bp, Unknown
  Bacterial polypeptide expressing nucleotide sequence isolated from the Sargasso Sea
gttgaagaacctggacttgacgacgaagggcggattctatgtttccgaggcgtcgaacgacaccgatgagaatggaatcacctcaaccttcacggttcgtctctcctcgcagcccggggataatgacacctcgacggcagacaatgtgacgatcacagtctcggtctcggattcgaccgaggcggagcttgtgagcgattcgtccctggtgtttaccgagagcaactggaatgcggctcagacggtgacggtccggggtatcgcagacaatctgagtgatggagatcagtcgtacacggtgatcctcaaagacaatgtgaccagcgatgcacgctaccgctatgtggatcctccggatgtctcgttgaagaacctggacttgacgacgaagggcggattctatgtttccgaggcgtcgaacgacaccgatgagaatggaatcacctcaaccttcacggttcgtctctcctcgcagcccggggataatgacacctcgacggcagacaatgtgacgatcacagtctcggtctcggattcgaccgaggcggagcttgtgagcgattcgtccctggtgtttaccgagagcaactggaatgcggctcagacggtgacggtccggggtatcgcagacaatctgagtgatggagatcagtcgtacacggtgatcctcaaagacaatgtgaccagcgatgcacgctaccgctatgtggatcctccggatgtctcgttgaagaacctggacttgacgacgaagggcggattctatgtttccgaggcgtcgaacgacaccgatgagaatggaatcacctcaaccttcacggttcgtctctcctcgcagcccggggataatgacacctcgacggcagacaatgtg

SEQ ID NO: 201779 - DNA, 964 bp, Unknown
  Bacterial polypeptide expressing nucleotide sequence isolated from the Sargasso Sea
aatacattctctaattataatggagaagcactatatggtgacattgccgttatttgtcgtgggtggggaaatgttacagctatatctgatgcaatgcaaaagtctgcaatccctgttgatatccatattgaaaaattttttgatgtcccaattgtgaaagatgttttgtcttggtctcatctaatcttaaaaaataaaaaatccgatgttgcgctttaccgaatattaaaacaataccttggccaagaatggacaacaagtttttttcaatctgtcgaacgtacatcaattgataaaaaattaattcaacttgaaaaaattaaaaaagattcaaatcatattttatttgtgattgaatcaatatcaaatcttcaagtagcttatcaaaaaacactcaaagctgatgaaatggtatgggaaattctcaaaactttaaagcattcacctttagtgaaaaacttacgtagtcattatagacattctcataggctaaacttagcaaatgctggaaaaattttagatattgcagaaaaatttgtaaataaaaattcaaatggtaatttaaataattggataagatatatggatattatggctttagataaaaaccaaaatgcagcccagcctgatattaataataagaatctagcagttcagattatgtcaatccatcaaagtaaaggtcttcaattcccaatagtaatgatgccattcctttacagcggtagtttcccaagtaatttgaaacgtcctcgaattataaatcgtcctccaaagtcatggacggcctggggaaaaaatacagatgaagatattaaagaattacatctgcaggaagaaagaagagtcttttatgtgggaattacaagggcagaaaaacagctatttttatttggaccaactacaaaacaatctctttttataaaagaattagaaagtttaaatccacaacctaggagataaa

SEQ ID NO: 201780 - DNA, 1011 bp, Unknown
  Bacterial polypeptide expressing nucleotide sequence isolated from the Sargasso Sea
tattaatgcaattcttaaaaataaaaaatctcttacggctaaataccttaatggtgaaaaaagtattcaaattccatctaagcgaaaaaaaccatctgataaaaagataaaagttattaatgcttctgaaaataatcttcaaaatatatctgtaaatattcctattggattatttacatgcattacaggtgtatcaggctcaggaaaatcctcattaataaatcaaacccttatgcctattagttctttcattcttaataagtctaaattaaataaagaaataaagtgcgataaaattgaagggcttgaacatctagataaagtaataaatatagatcaatcccccattggaaggactccaagatcaaatccagcaacttatacaggcttattttcttacattagagaacttttatctaaaactgttgaagcaagagctagaggttataagcctggaagattcagttttaatgtaaaaggaggaagatgtgaggcttgtcaaggtgatggtatgataaaagttgaaatgcattttcttgctgatgtatatgttaaatgtgatgtgtgtaatggctctagatataacgaacaaacattagagattaaatataaaggtaaaaatattagtgatattcttaatatgactgttgaagaaggattagaattttttagtgcccatccacctatttataaaaaattaattacattaaacgatgttggtttgggttatataacacttggccagtctgcaacaacactttctggtggtgaggcacaaagaattaaactatcaaaagagctatccaaaagaagtactggtaaaactctctttattctagatgaaccaacgaccggtcttcactttgctgatattgaattgctattaaatgttttaaagagattaaaaaatcaaggtaatacagttgtagtaattgaacataatcttgatgtaattaaaacagctgactggattatcgatttaggtccagaaggtggggctgatggaggaaa

SEQ ID NO: 201781 - DNA, 605 bp, Unknown
  Bacterial polypeptide expressing nucleotide sequence isolated from the Sargasso Sea
taacttaaaaataattacaaattgtggatttgggaataatatctcaaccaaagcggagctaattagtagattaacagctagtcaatctacacttacaataaatgacacaagtgttaccaaatttgaaagaaataagttggtcaatagagtatttggaaactcaattaaaaattccttcaaaaccaaagatcttcacgttcatgattacaaaagtttatttgggtgtactatttcccataatggatacgaaaataattttggatgcacccataaaagagaattatatttggatcacaatgataataagcttaaaggtgttgatcatatcttaaaaaaaagtgatggcattcctgttaggtatgtgtttagatttcacttaaatccaaaattaacagctataaaaactatgagtggaaatagcgctttaatacaaatttctaagaataaatctcttatttttacgattaaagatgaaagcatccaaattgagaaaagcatatatctcggaggcagaaagatattagataatacttgtataactatttcgggtaatctagtaaataaaaataagactttcgaatgggatattaaaaagaaaatttagc

SEQ ID NO: 201782 - DNA, 219 bp, Unknown
  Bacterial polypeptide expressing nucleotide sequence isolated from the Sargasso Sea
tatgaaagctataatattagctgcaggtagaggaagtagaatgggaaacttaaccctcaataaacctaaatgtctactagaagtggggggtaaaacacttttagaatggcagttagatgctataaagggggcagggattagtgaaatagcgattgtaacgggttataggagagaatgcttaaaagaatacgggctagttgaatttcacaactcacattg

SEQ ID NO: 201783 - DNA, 655 bp, Unknown
  Bacterial polypeptide expressing nucleotide sequence isolated from the Sargasso Sea
atgaaaagagaaaaaattattattggcactagaggcagcaagttagccatgatttatgcagagaatgttaaagatagattaaaagaagtattctctagaactctagaaataagaaaaattgttacctctggtgatgaaaatcaaaaagatagactatcagatttaggaggaaaaggattattttcaaaaaagattgaaaatgaattattagaaaataaaattgatattgctgttcatgcgctaaaggatatgccatctattgaaacagaagggttagaaactaattattttttaaaaagaaattctccaaatgaaatattaatcagtaataaaaaaattaaatttaatgatcttaaacctaattcaatagttggaacttcatcttatagaagagaatatcagcttaaaaataaaagatcagatttaaattataaattaatcagaggaaatgtggataccagaataaaaaaaatggaaagaggggattatgatgcaatattattatctaaagctggaattgattctttaaaattcaattctaaaataacacaagaatttacaacagatgatcttattccttgtgctggacagggaattatagctatacaatgtagaaataatgatcttgaaattaaaaaattattgaaaatataaa

SEQ ID NO: 201784 - DNA, 799 bp, Unknown
  Bacterial polypeptide expressing nucleotide sequence isolated from the Sargasso Sea
atgtgtgaagatagaaataactcatcttctaaaaagaaatcttcctcaactttcaggcggagaattacaaagagttgcaatatgtgctacagttctaaaagaggctgatgtctatttatttgatgaaccatcatcatatctagatattcatgaaagaatgaggattgtaaaattaattcaagaattatctgaaacaaaaagagttctagtaatcgagcatgatctagcaatcttagatgttctatgtgatttagtacatattgtctatggagataagggtgcttttggaatttttacacctccgcgaacgacaagaactgcaataaatgcatatttagatggatatttaccagaacaaaatgtaagaattagagataaaccaattaagtttcaaacacatactgaaagaaatactgaaagaggaataccgtatttagagtggggaaacttagaaaaaaagcttggtaatttttcattaaagactggagaagggaaaatacatcgttctgaagttgttggtgttgttggtgctaatggaattggaaaatcaacattagttaaaattcttgctggtgaacatgaagctgataatggatggattactgaggaagcaaaaatttcgtacaaaaaacaacatgttgaagctgattatgaaggtacggttagagaatggttggatatcgaattaggtgcaagatggcgacaaggagactttaacgttaatgtagtcaaagcattaggtgttgataaactacttgaacaagtcacaacaacactctcgggaggagaattacaagct

SEQ ID NO: 201785 - DNA, 778 bp, Unknown
  Bacterial polypeptide expressing nucleotide sequence isolated from the Sargasso Sea
atggcggagtttagacccgaaacatctctagttgaaacaacaacctttgaaattaatttagtttctaatgaacctgctcttggaggaaagcttgattggactgttggagcttttttcatggaacatgaaattgaaaatcatatcagggggtatgttgataatgaccaaaatggggttattagatatgtttgtggtgaagcattcgcagatcctaattattgttatgaacatgataatagtattcctgctaggtttgctgtttatgatgctgaatttgattttgttactgatgcattcccttcaagagaatcaaaatcagtatttgtagagacatcttacagctttagcgatacttttagattaatttcaggactaaggtattctgatgatacatttgaaaccgatgtaacaaacttcttttatgataattttgttgcagaaggcggtggagacaaagtaacaggtcgtattacaggtgaatttgatgttgcagattacactatggtttatgcctcttttaccactggatataaacctggtggaacaaatttaacatatggatattttgatgataacgcgcctccaatggtttatcaaaaatttgaacctgaaacagtagattcaatggagtttggtttaaaaacagacttttatgatggaaaggcgcgagctaatgttgctgttttttcatatgattacgaaaatcttcaatttcaagctactgatccagatgtatatagaggaggtgttgcaaacataccagaatctgaaatgtcag

SEQ ID NO: 201786 - DNA, 655 bp, Unknown
  Bacterial polypeptide expressing nucleotide sequence isolated from the Sargasso Sea
attgaaacagaggggctaataacaaatttttatttaaaaagaaattcgcccaatgaaatttttattagcaacgacaatataaattttctagaccttaaacctaattcgattataggcacttcttcttacagaagggaataccaattaaaaagtattagatcagatctgaaatataaattaataagaggaaatgtggatactaggataaaaaaattagagaatggagattatgatgcaattttagtttctaaagctggcattgaagctttaggtttgacaaataaaattacacatgaatttaatactgaagaattaataccgtgtgctggacaaggtattattgccatacaatgtagagaaaatgatcaagaaataattaatatcttagaaaagattaatgatgatcagtccagaattattgcaaatgctgaaagaaaaatcttaaaaatactcgagggtgactgcgatacagcagttggtgtgtatgcaaagattgataaagatcttgtaaatataaaagctgaacttttctcagtagatggcaaacaaagattttttgttgaagaaagtgaaaataaaacaatggttaaagatttaagtgttaagattggagaaaaattaaaatcagagtcaaagggatcttataaaaggtaaa

SEQ ID NO: 201787 - DNA, 704 bp, Unknown
  Bacterial polypeptide expressing nucleotide sequence isolated from the Sargasso Sea
agttaaaagtattgcagtaactcatactaacaacgactatggaaaaggtttagcagatgtatatgtgacagctgttaaagctcatggtattaaagttaccgctgtaactgctcacgaagaaggtaaaggtgattatggtgctgaagttgctacattagcttctgctggtggtgatgcattagctgtattaggttatcttgatcaagctggtggtagtattatagctggttccttggatgcaggatcttttgatagatttgtattgtctgatggaatgataggtgattcattaacagatagatttggaaaagatttaaataaatcttttggttcactaccaggatctacaggaaaaggtgcaggagtttttgctaatgttgcaaaagctgctggtattgattcttcaggtccttacacaggagaatcatacgatgctgctgctttaatcactcttgcaatgcaagctggtggaaaagcagatagagcagctatccaagcaaatgtaatgtctgtagcaaatgctcctggaaagaaaatttatccaggtgagttaaaaaaagctttagatttacttgctaaaggtaaagctgttaactacgaaggtgcaactgcggttgagttcactgatgttggtgaagcatttggttctttcctagaaaaagaaatcaaaggtggaaaatttaaaactaaaaaacaaagataaa

SEQ ID NO: 201788 - DNA, 465 bp, Unknown
  Bacterial polypeptide expressing nucleotide sequence isolated from the Sargasso Sea
ttaactttgatcatccaagctcaatagatttttcattgatgataaagcatcttgaaagtctaaaaaatggaattcaaaccaaaatacctatttatgattttgctacccatactcgtaaaaagagcaccaaaactatagacaaacatcgtattatattactcgaaggaattttctctctatttaatgatgaaattagagatatgatgaatatcaaaatatatattgatacgccaaacgatctaagaattataagacgaattaaaagagatattgatgaacggaatagaacgtttgaatcaattataaaacaatactatgaaaatgttcgtcctatgcatattaaatttgtcaaaccaaccaaacaatatgcagatataattatccctatggttagtaaaaataaaattgctatagatatattgagttcaaaaatatttgatttaattaataataaaaataattgat

SEQ ID NO: 201789 - DNA, 724 bp, Unknown
  Bacterial polypeptide expressing nucleotide sequence isolated from the Sargasso Sea
tatgaaaagagctaatcttgtaattgggacacgcggaagtaagttagcaatgatttacgcagaaaatgtaaaaaaagaactaaaaaaatattattttaaagagattgaattaaaaataatagtaacaacaggagatcaaaagcaagatgagagattatctgaaataggaggcaaaggattattttcaaaacaaattgaaaaagatttattaaataaaaatatagatattgcagtacatgccttcaaagatatgcctactgaagaaactagaaatcttataactaataattttttaaaaagaaattctcccaatgaaattttaataagtaaaaacaatataaaatttgaagatttagagccaaactcaattattggcacatcatcatatagacgtgaatatcaacttaagaaaaaaagaccgaacttaaaatataaacttatcagaggaaatgttgatactagagttcaaaaattagaaaaaggggaatatgatgcaataattctctcaaaggcaggactagatgctttaaatttacaacataaaatttcacaagaattcagtattgatgaacttataccttgtgcaggccaagggattatagcaattcaatgcagagaaaatgataacgaaatcaaaaaattgcttgaaaacatcaatgatgaagaaacaagaattgtagccaaagcggaaagagaggtcttaaaagttcttgaaggagattgc

SEQ ID NO: 201790 - DNA, 874 bp, Unknown
  Bacterial polypeptide expressing nucleotide sequence isolated from the Sargasso Sea
cctggatggataccaggatatttcggtctggcgcggcgcggcagactatctcatgggcgacatcgcatcggcatcgaagaattttgatgcgggtgatccgtctctgcaaaattacccgaatccactgaagggaaaattgctgataccgcgtctcgcggtcgcgctggaaaacggacagacgaagttggcgcaaaagtggcgtgacaagcttgccgatgaactcgacgaactcgggcggaaatataagggacgtttgagttattttttcggccggttgtatcgagatgagctcgattttgataatgcgttaggcgcgtaccaggttgcgtcgaacagcggcgatgtatggagccgggtgcgcactgagtacgaattggtcgaccttaatctccagcaggaatcaattgaggtttccgaagccattcaacgcttggagcgcttgcgctttgcttggcgcggcgacgcatttgaacgcaaggtactggacagactggcagagctttatttcacagatagtgattatcgaaatggtctcaacaccttaaaggtcatcgtaagtaatttttccaaacatccggacgcccaggcagccgctcggaagatgcgggatatttttcgtcgactgtatatcgagggagaggccgaaaatatttcgccgctgagggctcttgccctctatgacgagtttcgggaactcacgccggccgggcctgaaggcaatctgatgattcagaagcttgccgaaaagctggttaatgtggacttattggacaaggcgtcggacttgcttgggcatcaggtcaaattccgcttgaagggtgaggagaaggctgcggttggcacaaagctggcgttgatccgcctgattgcccgg

SEQ ID NO: 201791 - DNA, 481 bp, Unknown
  Bacterial polypeptide expressing nucleotide sequence isolated from the Sargasso Sea
atgaatagaaaaattatcattggatctagagggagcaagttagcaatgctttatgctgaaaaagctaaagataaaattgtcaaaactactaattttagtgatgaagatttatttataaaaaaaattactactaaaggggatgagtttcaggatgtaagattatccgaagttggaggtaaaggattattttcaagtaatattgaaaaagaactccaagataaaaatattgatgttgcagttcatgcacttaaagacatgccagccctagaaacaataggacttaaaacagactcatttttagagagaaatgatccaagagaaattcttattacaatcaataaaaaaaaattaagtgaattaaaaaaaaattctataattggaacttcatcttttagaagagaatatcaaattaaaaaaattagatcagatctaagatgtaaacttattaggggaaatgttgatacacggattaaaaaataaa

SEQ ID NO: 201792 - DNA, 765 bp, Unknown
  Bacterial polypeptide expressing nucleotide sequence isolated from the Sargasso Sea
aaataatattatggtatgcaattttaattcaattaccaagaattaaacaagctccacaaatttgggatacattttatatttcgaatagaggtctttatggacctagaccaatttatgaagatggatttttcattgtttctatatttattcttttatctttttttatagctttttttgttagacgatgggcaaaaaaaagacaagataatacaggtcaacaatttccaacttttacaactaatttaggaataattattttattaccacttttaattttctttattatgggatcaccaatgacacttgaatatcctgtattaaaaggatttaatttcaaaggaggtatggttataagacctgaattcatagcaatgtttttagcccttactatctatacaggtgcatttatttctgaaactgtaagatctggaattttatcagttactaaaggacaaagagaagcttcaggggctttaggtttaaagcaaaactggataatgagattaattatcatacctcaagctttaagggttatagtgcctcctttaacaagtcagtatttaaatttaactaaaaattcatctttaggtatagcagttggctatgctgaccttgttcatggatttggtgggataagcttaaatcaaacaggtcaagcaattgaatgtatggcaataacaatggcgacatatctagttataagtttaacaatatctttttttatgaatatatataacaaaagtattcaatttaaggaaaaataat

SEQ ID NO: 201793 - DNA, 538 bp, Unknown
  Bacterial polypeptide expressing nucleotide sequence isolated from the Sargasso Sea
gatgaacgagattgtcgagtggcgggacgaccgcacgctcaccgggcacacggactgggtcttggccgtggcgctgtcgggcgacggcgcggtggcggtgtcgggctcgagagacaacaactgcatcgtgtgggacgtcgggaccggcgcccgcaagcacacgctcaccgggcacacgatgtccgtccaggccgtggcgctgtcgggcgacggcgcggtggcagtgtcgggctcgcgagacaagaactgcatcgtgtgggacgtcaggaccggcgcccaaaagcacacgctcaccgggcacacgtacgccgtcaacgccgtggcgctgtcgggcgacggcgcggtggcagtgtcgggctcggacgacaagaactgcatcgtgtgggacgtcagcaccggcacgctcaccggtattctcaccgggcacacgagctcggtcctcgccgtggcgctgtcgggcgacggcgcggtggcagtgtcgggctcgttggacaatgtcaacaacagctgcatcgtgtgggacgtcgggaccggcgcc

SEQ ID NO: 201794 - DNA, 829 bp, Unknown
  Bacterial polypeptide expressing nucleotide sequence isolated from the Sargasso Sea
cccaatcgattatctatcggcaggcatgcgaattcctgcggatgaaataagcctggtaagcactcttaggggagagccgctacctctagtaaaaagtatatcaaacgatatacgggttcccgccgacgcagagatgattgtggaggggtatcttgacgagagaggctatatagagcctgatgggccgtatggtgaatatgtaggattctacggtccaatgcatcaagacccggtatttcatgtaactgcgattacaatgagagaggatgttctccatcaaaccctttttcacggtgcaggcttgcaaatccatcgagctgagtcagtgcatcttatgagtgtaggactagaggcaaaggcattaaccattttggaaaatgaaaatatcgatgtaagggatgtttttgttcccccgtcgtcagcagaaggccaacatcttagagtatcaattgcacaaaaacatgcaggagatgtcaaaaaagtaatatcagcactgataaataatatgtttgtcacaaaacatgtttttgtcgtagacgaggatataaatatccgagatgaaaaccattgggagtgggccttagtctcccgtttacaggcagatcgagatatttttacctttcctgaaaggcctggaatgcccatggatccatctcttgatgctggaaaagccgggacaaaggcgggttttgacctgacattgccaatcaaaagacgtggagaattaatgttgacaattgcgacagcaccgaaaattaagagctctaaccggtttaaaagcgctagagaggctatttctgaagggggggcaatgtttctgtctgatata

SEQ ID NO: 201795 - DNA, 951 bp, Unknown
  Bacterial polypeptide expressing nucleotide sequence isolated from the Sargasso Sea
ccagctgcaattaaatccttaaaaaaagaaaaagttaaacatgtttttggtttaattggctccgctactatggaaatttttgatgctctttatcatgaaaaaagtataaaatttattggtgttcgggacgaaagaactggcacacacatggcagatggttatgcaagagcgtctaatcaaccgggtgtaatacttgctggacaaaatggtcctggtgctacaaatttagtaacaggacttgcgcaagcgaaggcagccttttctcctgttatttctattgctggttcatattctacaaaagataaaatggaagatgcttttcaaggtcttgaccaacaatctttgtttaaaccagtaacaaaaaaaacctggacagtaaaaaatactaaaaaaattccaaaaatttttagtgatgcttttaacttggtaatgtcacctagaaggggacctgtatgtattaatctaccaagaaatattctagcaaataaagaaaagtttaaaattaacgaaaaaaactcatcctttgttaaccaaaattcaactaaagcaaaatctaattatataaaaaaagctgtaaagattatcagtaattcaaacaagattgttattattgctggtggcggaattaaatatacatcaagatataaaaatgtacttaaattggcagaattgttaaatgtcccaatagtaaccgcagctggacatggagatgctataccatttaatcataaactaaatgctggacaaatgggtccgaggggtaatccagttgcatccaaattagttaaagaagcaagtgttataattgctcttggaacaagactgggatttaattcaactttttattcttatgaaaatataaataaaagagcaaagatcatacaagttgaattggaaaaaagaatgttagggaagatacttttctgtagcagtaggaatttatggagacgc

SEQ ID NO: 201796 - DNA, 384 bp, Unknown
  Bacterial polypeptide expressing nucleotide sequence isolated from the Sargasso Sea
aaagtgtcattaatgaaaaaaaaatacctgttatagcgcccttaggcattggtaaagataaaaatacttataatattaatggtgatactgctgctagttcaatagcaaaaaaacttaaatcaagaaggcttttacttatgacaaatgtagagggagtttatgatgataggaaaactttgatatctgaaattaaaccattcgatatagaaaatttaataaaattaaaaatagttcaaggaggaatgattcctaaaattaaaaattgtattgatgcagttgaaaatggagtgaggggtgtagttatacttgatgggagaaagccacattcgatattatatgaaatattttcagataaaggtgctggaaccttaattagaaaatgaa

SEQ ID NO: 201797 - DNA, 763 bp, Unknown
  Bacterial polypeptide expressing nucleotide sequence isolated from the Sargasso Sea
tatgcgaatttttctcaccggcgcgaccggatttatcggctcgcgtattctcaacgaactgctggccgccggacaccaggtcaccggcctggcgcgttcagaggccagcgccctcgcgctgcagacggcaggcgcagacgtgcagtacggaacactggaagagccgcgctcgctgctggaagcggtcacccgctgcgatgcggtgatccacaccgctttcgatcatgatttcagccgctttgtggaaaactgcgaaaaagaccagcgcattattctcgccatcggcgcggcgttgcaggggagccggcggccgctcatcatcacttccggtaccgccatgggtgacatcggtaacggactacccgccagtgaaatgcacttcaatcccgcgcacccgaacccgcgcgccgcctcagagcgtgcgggaaaccggctgctggatgccggggtggatgtccgggtggtgcgactgccgcaggtgcatgacaccacccgccagggcttattgacctattacatcgcgcatgcggcagaaaaaggggtcgtggtcgtggtcggcgacgggaataactgctggtcggccgcacacatcagcgatgttaccgcgctgtacctgcgggtgctggaacaaggtctggccggcaggcgctatcatgccgttgctgaagaggccatcccctctctgcgcatcgccgaggtggtggcggagaaattgcacctgccgctgcagtccctgagcgccgatcgcgcggcggcccacttg

SEQ ID NO: 201798 - DNA, 514 bp, Unknown
  Bacterial polypeptide expressing nucleotide sequence isolated from the Sargasso Sea
aatgacaaaaaaaataacaattggatctagaggtagtaaattagcattactctatgcacaaaaagctaaagatactattattaaaaatacaaacttaagtgatgtggaagttgttattaaaacaataattactaagggcgaccaatttcatgataaaagattgtctgaatttggaggtaagggattattttcaaataatatagaaaaagaacttcaaaataaaaatattgatatagcagttcatgcattaaaagatttaccagctattgaaacaaatggtttaataattaattcttttttagaaagaaataatccaaaagaaattttgatttctagagataaaaaaatattaaaagaattaaatgtaaaatcaattattggaacttcttcctatcgaagagaatttcaaataaaaaaaattagacctgatgttatttgtaaactcataaggggcaatgttgatactagattaaaaaaacttaaagaaggtatgtacgatgcaataatcttatct

SEQ ID NO: 201799 - DNA, 549 bp, Unknown
  Bacterial polypeptide expressing nucleotide sequence isolated from the Sargasso Sea
caataataggcacctcttcttatagaagagaataccaattaaaaagtattagatcagatatgaattataaattaataagaggaaatgtagatactaggataaagaaattagagaatggagattacgatgcaattttactttctaaagctggcattgaagctctaggcttgacaaataaaattacacatgaatttaatactgaagaactaataccatgtgctggacaaggtattattgccatacaatgtagagaaaatgatcaagaaataataaatatcttggaaaaaattaatgacgatcagtccagaattattgcaaatgctgaaagaaaaatcttaaaaatactcgagggtgactgtgatacagcagttggtgtgtttgcaaagattgataaagattttgtaaatataaaagctgaacttttttcagtagatggcaaacaaagattttttgttgatgaaagtgaagataaaaaaatgattgatgatttaagtattaagattggagaaaaattaaaatcagagtcaaagggatcttataaaaggtaaa

SEQ ID NO: 201800 - DNA, 601 bp, Unknown
  Bacterial polypeptide expressing nucleotide sequence isolated from the Sargasso Sea
gcttctgccttgatagagaatcagtttgtagaagttcttattgctcctagtttttctaaagacgcgctcaatgtcttaaaagagaaaaagaatgttagggtcatatcaaaaaagaattttaaaaaaataccaatgccattctcaatccaagcaatagatggcggattcttggttcaagaggatgattggaaaactatagataaagataatttagaatacgtgactgaaaggaagccaacagatcatcaaatcatagatctgattttcgcttggaaagtctgtaaatatgttaagtctaacgcaattatttttgctaaaaatcaacagactattggtataggcgcaggacaaatgagtcgtgtgaatagtgccaaaattgcaagcttaaaagcaacagccgctgatctggatacaaaagactctgtaatggcatctgatggtttctttccattcagtgatagtataaaaatggcttctgataatggaatctcatgcatcatacagccaggtggttcaatcaaagacaatgaagtcattgaggaagcaaacaaacaaaatattgcaatggtcatgactcgtatgagacattttaggcattaat

SEQ ID NO: 201801 - DNA, 817 bp, Unknown
  Bacterial polypeptide expressing nucleotide sequence isolated from the Sargasso Sea
aattttacaagagatgaaaatgctagaggtcataattttcttaaacaattaggtatgatgtatggagaggaatttatttgtattatagtaagagattcaaaatataagttaaaaaatcagcaatggataaaaaaagattggtcgtaccatgattatcgtgacgctgacatagatacatttaaggatgcagcattattattggcagacaaaggatacaaagtctttcgcatggggaaagatgtgaaaaaaccatttaatgtgaatcatccgaatgtattggattatgcgaattcttcttatagaaatgacttttttgatatctggctcatggctaattgccgtttttgtattacagtagggactggattagatgatgtatctgttgcttttagacgtccccttgtcgaggttaatctactaccagtagccggtatacgttgcaatcaggcctttactattggactatttaaaaaactaaaatataaatcaactggacaattattaggattggatgaaattataaaaacaggtgcaatgacttgttttcgaagtgaatgttacgacgatttaggtatcgaaataataaataatacacctgaggaaatagtcaatacagtaattgaaatggaaggacgcttaaatggtacatggaatgatgtccctaaggatattgaactgcaaaatattttttggaaaaaatttaataagtcttcttattttaatagacgtggactcaaaacatttgggaaaatacatccaaattcaaggattagtgcacattttctccaagaaaataaaaattggtttttagtataaa

SEQ ID NO: 201802 - DNA, 783 bp, Unknown
  Bacterial polypeptide expressing nucleotide sequence isolated from the Sargasso Sea
aagttcaaaataaaagactttctgatgttggtggaaagggattatttactaaaaaaattgaaaatgaacttttaaacaaaaaaattgatattgccgtacatgcattaaaagatattccgtcaaaagaaaataaaaacttatttacaaattgttttcttaaaagaaatgatgttagagatgttttgataactagaaaaaaacagaaatttaaaaatcttccaaaaaactctatagtaggcacctcatcttttagaagagaatttcagcttaaaaaaattagaaaagacttaatttataaattaattagagggaatgttgatacaagaattagtaaattaaaaaataaaatttacgatgcaataatactatcgtatgcaggtttaaaaagtttgaaaatggaaaataatatttcccaagttttttctctttcagaaataataccaagcgcaggtcaaggtaccattgctttacaatgcagaaaaaatgatattagaatggtgcaattattaaaagctattaatcatataccaactaacatatgtgtaaacgttgaaagagatgttcttaaagttttagatggggattgtgaaacacctgtcggggtaaatgcaaaaatacaaaataataaattaaacattgttattgaattattttctttagatggaaagaaaagattctatcttaaatcatcaaaagaattaaaattagcccctttagttggaaaagaacttggtgaaaaaataaaaaaaagatctaagaatctttataaaaaaaataaataaa

SEQ ID NO: 201803 - DNA, 400 bp, Unknown
  Bacterial polypeptide expressing nucleotide sequence isolated from the Sargasso Sea
ttgataaaaaaaagaaaaaaaataagcggtggtcaagccgcggttcaatctttaaaaaaagaaaaagtaaaacatgtctttggacttattggttctgcaacaatggaaatgtttgatgctctttatcatgagaaaagtattaaatttattggagtaagagatgaaagaacaggtactcatatggcagatggttatgctagagcgtctaataaaccgggagtaattttagcaggacaaaatggtcctggagcaacaaatttagttacaggtattgctcaagcaaaagcagctttttcgccagtagttgctattgctggatcattctcaacgaaggacaaaatggaagatgcatttcaaggtcttgatcaacaatccctatttacacctattaccaaaaaaa

SEQ ID NO: 201804 - DNA, 547 bp, Unknown
  Bacterial polypeptide expressing nucleotide sequence isolated from the Sargasso Sea
atgaaaagcaaaaaaataattattggatcaagaggaagtaaattagcattaatttacgccgaaagagcaaaaaaaaaaatattagaagtttcatctgattttggaattgaagaaattttaattaaaaaaatcactacttctggcgatttaaaccaaaaagatcgtttatctgacattggaggtaaaggattattttcaaaacaaatagaaaatgaattaattgaaaataaaattaacattgcggttcatgcacttaaggatatgccagtcaaagagacagatggtttaatcacaaactgttttcttgaaagaaatgatcctagagaaattttaatttcaaatgaaaaaaaaaaacttatggatctaaataaaaattcagtaataggaacgtcatcttatagaagagaattccaacttaaaaaattaaggaaagatttaaactataaactaattagaggcaatgtagatacaagaataaataaagtaaaagaaaatttatatgatggtattattttatcatacgctggtatacaatcattaaatttag

SEQ ID NO: 201805 - DNA, 820 bp, Unknown
  Bacterial polypeptide expressing nucleotide sequence isolated from the Sargasso Sea
aaccttagtaatgatgatattttaattaaatcaattacaactaaaggagaccaagtaaatgatatgagactatcagaaattggtggcaaaggtttattttcaagcaatattgaaaaagaacttcagttaaaaaatattgatgttgcagtccatgcactgaaagatatgccagctaatgagacagaaggtttgaggacagatacatttcttgaaagaaatgatcctagggagattttaattacaaaaaataaaaagaaacttaaagacctcgataaaaactcaattgttggaacctcatcatatagaagggaatttcaaataaaaaaaatgagacaagatttaaactgcaaattaatcagaggaaatgtagatactagaatcagaaaactgaatgaaggaatgtatgatgcaattattttgtcttatgcaggcattaaatttttaaaatttgaaaatgaaatctctgaaattttttcagctgaagaaataattcctagtgctggacaaggtataattgctcttcagtgtagggagaatgacaaagagacaatctcaattttaaataaaattaaccatgaggaaacacataaaagagctcacctagagagaaatattttaaaagttttagatggagattgtgaaacagcaattggtactcactcagtggttgatggagacaagattatagttgaggccgaacttttctcgttggacggcaaacaaagattttacgaaaaaaaagttggtaatttgaatgaatttaaagaacttggtaaaaaagttggaatacttttaaaaaacaaatcaaataattcatata

SEQ ID NO: 201806 - DNA, 502 bp, Unknown
  Bacterial polypeptide expressing nucleotide sequence isolated from the Sargasso Sea
atgtgcattggatgtcatgcttgtactgtcgcttgtaagagtgaacatgatattccaataggtgtaaatcgtacccatgtaaaatatattgaaaagggccaattcccaaattctactagagaattttcagttcatagatgtaaccattgtgctgatgctccttgtgttgaaatatgtccaacaaccgccctgtatgatcgcgcagatggaattgttgattttgatagtgatcgttgtataggatgtaaatcatgcatgcaagcttgtccttatgacgcattatatatagatccagatacacatactgctgcaaagtgtaattattgtgctcacaaagtagactatggctatgaacctgcgtgtgttgttgtttgtcctgttgaagcaatcatttctggtgatctagaagatccagattcaaatatttctcatcttgtaaaaaatgaaaaaacaatgacacgaaagccagaaaaattaactgtaccaaatctgtattatataa

SEQ ID NO: 201807 - DNA, 628 bp, Unknown
  Bacterial polypeptide expressing nucleotide sequence isolated from the Sargasso Sea
atgtgcggacgttttgcccagatccgggaggaagaagaattgatgaaaagcctctcagtgcatcattgtgaggtgagtgttaaaaccagttacaacatagcccccggtgcggatatttccatcattcatcaacaggatagcagacgtgtgctggattcaacaaggtggggtttaattcctttctgggccaaggagggaggacgcggaatgatcaacgcacgttcggaaacagtctcagaaaaaccgagcttccgtcatgctttctcaaaaagacgttgtctgattcccagcagtggtttttatgagtgggaaaaaactgaaaatgggaaacaaccctggttcatcagtggtaagcatcaaccttttgtgtttgcaggtatctgggagcaatggaaatccccggaaggatttttagagaaaacctgtgccatcctcacctgcgatgcaaatgaactaatggctcccatccatcaccgaatgccggttattcttcaggaaaaagaaaggaacatttggttggatccgaggcccaaacttgatctgaaatctttgctccggccctgttcccaggaattacttcaggcctggcctgtttcttcgagagtaaaccgagcctgtattcaatgaa

SEQ ID NO: 201808 - DNA, 686 bp, Unknown
  Bacterial polypeptide expressing nucleotide sequence isolated from the Sargasso Sea
aatgaagatagacatatttgatacgacacttagagatgggtttcaacaggagggaatctccccatcagtaaaggataaattagctattgctaagttaattgacgagttgggtgttgattatattgaaggtggatggcctggagcatcacctaaggaaaaagagttttttgataaagcaaaaaaagatttaaagctagagaatgcaaaattagttagttttggttctacaagaaaattaaatgtaaaagttgaagatgatccacaagtacaggcccttattgattctgaaacagagtacgtctgcatcgtaggtaaatcatcaaatcttcacattacaaaggctctagagactgatgtagacagtgcgattttaatggctactgataccgttaaatatttaaaagataatggacgaaaagtattttttgatgcagaacatttctttgatggtttgaaagaggattcggagactactttgaaaattttagatgcagtagtaaaagagggtgttgattgttttatattttgtgataccaacggaggaacacttcctcatgaggtcacagatcttttaactccaattgtggaaaagtatcccaatcaatcatttggcgttcactttcaaaatgacaatggttgtgcagttacaaactctctggctgcagtgaaccttgggggtgaacatg

SEQ ID NO: 201809 - DNA, 619 bp, Unknown
  Bacterial polypeptide expressing nucleotide sequence isolated from the Sargasso Sea
tatgagaaaaaaaataataattggatctaggggtagcaagcttgccttactttatgctcaacaagctaaagataagattattgaaaataccgaccttggtaatgaagatattttaattaaatcaattacaactaaaggtgacgaagtacaggatataagattatctgagcttggtggcaaaggtttgttttctagtaatattgaaaaagaacttcagttaaaaaatattgatattgcagtccatgcactgaaagatatgcccgctaatgaaacaaaaggattaacaacagactctttccttgaaagaaatgaccctagagagattttaattacaaagaacaaaaaaaaacttaaagacttagatcaaatgtcaattgttggtacctcatcatacagaagagaatttcaaataaaaaaaattagacaagatttgaactgtaaactaatcagaggaaatgtagatactagaattagaaaattgaatgaagggatgtatgatgcaattattttgtcttatgctggtatcaaatttttaaaatttgaaaatgaaatctcagaaattttttcagctgaagaaataattcctagtgcaggacaaggcgtaattgctcttcagtgc

SEQ ID NO: 201810 - DNA, 924 bp, Unknown
  Bacterial polypeptide expressing nucleotide sequence isolated from the Sargasso Sea
tattgttaataaaaataaaaataacaaagcttacatactttcaccaattgttagggatagaaaaggtgaatatagaaaagaaatagaagatttaaaaaaaaaaggttaccaaagattaaaaattgatggaaatgtttatgaaattaatgaagtacctaaattaaagaaaaactttaaacataacatagaagtattaattgataggttagtaattaaaaataacattaaacaaagattagcagaaagtgttgaggttgcactttcgctttcagatggtttagtttatttagaaaatttagacactaaaaaattgacaacttattcttctaagtttgcatgcccaatttctggattttcgattgaagaaattgaaccaagactattcagttttaatgctccaatgggggcatgtgatgaatgtgatggtattggtgttgaaaaatattttgatgataaaaaaattgtaccggatgattcaaggtcaattttaaaaggtgcaataaaaccatgggaaactaaagtatttggatatcaaaaaaaattttttgttgaaacaatttccaaaattttaaaagaatacaaaatagatgtaaaaacaccttggtataaaataccaaaaaatattcaaaatataatccttcatggtgatgaaaataataagcacgattttataagcaattttgaaggtataataaattttattgatagaaaatattcagaaacagaaagatggtgggtacaatatgaattagaaaagtatttatcagaaagagactgtgaagtttgcaatggatttagattaaacaaaaaagctttagcggttaaaattgcagggaatcatattggtgaaataacaaaaaaatctattgatgattgttttgattggtttaacaaattaaacaaaaacctatcttcaaatgaaaa

SEQ ID NO: 201811 - DNA, 591 bp, Unknown
  Bacterial polypeptide expressing nucleotide sequence isolated from the Sargasso Sea
aatgaagatagacatatttgatacgacacttagagatgggtttcaacaggagggaatctccccatcagtaaaggataaattagctattgctaagttaattgacgagttgggtgttgattatattgaaggtggatggcctggagcatcacctaaggaaaaagagttttttgataaagcaaaaaaagatttaaagctagagaatgcaaaattagttagttttggttctacaagaaaattaaatgtaaaagttgaagatgatccacaagtacaggcccttattgattctgaaacagagtacgtctgcatcgtaggtaaatcatcaaatcttcacattacaaaggctctagagactgatgtagacagtgcgattttaatggctactgataccgttaaatatttaaaagataatggacgaaaagtattttttgatgcagaacatttctttgatggtttgaaagaggattcggagactactttgaaaattttagatgcagtagtaaaagagggtgttgattgttttatattttgtgataccaacggaggaacacttcctcatgaggtcacagatcttttaactccaattgtggaaaa

SEQ ID NO: 201812 - DNA, 764 bp, Unknown
  Bacterial polypeptide expressing nucleotide sequence isolated from the Sargasso Sea
cagcgccgactgtcgacagcagcaacaacatcgctttcacaaacaagcgcccgacttattatcacgagtacatgggctggatcgacttccagaggaacctatccaaggtgttattctagctaatgaagtgctggacgcgatgcctgtacataaatttcgttatacacccaatcaactagacgagtaccatgtcacgcatcaacatcaaactctcacctgggaaatactaccctgcacaaatgcagcactaaatcgagctattactcacctcaacattcagagcagccagccctatcactctgaaattaaccttgctttgcctagctggataaaacaactcaaccaatgcttatctcatgggttaatattactcatcgactatggttttcctcgacaagagttctacttcccagaacgccacatgggcacactgatgtgtcactaccaacatcgagcgcatgataaccctttagtgtttccaggcatacaagacattactgctcacgttgactttactgctatagccgaagctgcatctaataatggacttacggttgctggctacacgcatcaggcagcctttttaggaagctgtggcattcacgaccttattcaacaagaatcatccaataacacatctaacattcatacactattgcacccgagcgaaatgggggaacattttaaatgcattgctctcactcgtgaaatagaccaccctctcttggggtttcaattactcaatcaagttgagcgtttataga

SEQ ID NO: 201813 - DNA, 539 bp, Unknown
  Bacterial polypeptide expressing nucleotide sequence isolated from the Sargasso Sea
aatgctacctgctgaaaatttagataataaaataaaagaattttggcccaaagatgggcctcctgctcaagaggtaaataaatacgtaaaaaaatattcaaaagaaaaaatagttatcaaatgtggaggtcgtgttcttttggatcccattttatttaataattttattaaagatgtggtgactttaaaaaaattaggcttaacacctttattagttcatggtggtggactaggaataaaaaaaaaattagataaatcaaatattaaaagtaacttcataatgggattaagagttactgataaaaaaatgattaaaattgttgaagatgtaatggtagaatttaataaagaaattgttaaaactttagaaaaagaatcatgcaaagcaaaatctattacgataagagaaaataatgcaatttatgttcgtcaaaaaagtaaggaactaggattcgttggtagtccaaacagaatagatgacaagttaataaaaaattttattgataaagatttcataccagtaatagctccgatgggga

SEQ ID NO: 201814 - DNA, 400 bp, Unknown
  Bacterial polypeptide expressing nucleotide sequence isolated from the Sargasso Sea
tttggaaaaaaagttattgataagatagattatgcggaacaagaaacggacattaaaaagagtaagctagacttaaatattgcccttggatacggtggcaagcaagatattgtggacataactaaaaaaatagcatcaagtgttttggctaaacaaataaaaatagaagatatcaatgaaaaagttatacatgatgcatcatctgttccagttgaaaacatagacttattaattagaactggtggtgataatagaataagcaattttcttctttatcaaattgcatatgctgagataatgtttgttgataaatattggcctgattttaataggaaagactttttaaaatgtattggtaattttaaaaaaattaatagaagatttggcaaaagaaaatgaa

SEQ ID NO: 201815 - DNA, 597 bp, Unknown
  Bacterial polypeptide expressing nucleotide sequence isolated from the Sargasso Sea
attgaataaatatgacataagctgcataggtattccaaaaactgttgacaatgatttgccatttattgatacctgcccaggatttggatcagtagcaaaatatgtatcgacttctattttagaggcaggactagatgttgcttccatgtctgagacatctactaaagtttttgtaatggaagttatgggtcgtcatgcgggttggatagctgcttctgccgctttagcaggtagcgatagaaatcttcctcctcatattattcttttcccagaaattgaatttaataaaaaaagatttttacaagaagtaaaaaaatgcgtttcaaaacatggctattgcgttattgttgcatccgagggtgttaaagcaaaaggcaaatttttaacagaaagctcttcaaaagatgcttttggacatgctcaacttgggggattagcaccattaattgttgagatgatcaagtcaaatcttaattataaatgtcattgggcagttgctgactatttacaaagatcagcaagacatttgagttcaaaagttgatgttgatcaagcatataaactcggtaaatttgcagttcaacaagcagttcaagg

SEQ ID NO: 201816 - DNA, 586 bp, Unknown
  Bacterial polypeptide expressing nucleotide sequence isolated from the Sargasso Sea
atgagaaaaaaaataataattggatctaggggtagtaagcttgccttactttatgctcaacaagctaaagataagattattgaaaataccgaccttggaaatgaagatattttaattaaatcatttataaccaaaggtgatgaagtacaggatataagattatctgagcttggtggcaaaggtttgttttctagtaatattgaaaaagaacttcagttaaaaaatattgatattgcagtccatgcactgaaagatatgcccgcttatgagacagaaggattaaggacagattcttttctcaaaagaaatgaccctagagagattttaattacaaaaaacaaaaaaaaacttaaagacttagatcaaaagtcaattgttggtacttcgtcatacagaagagaatttcaaataaaaaaaattagacaagatttgaactgtaaactaattagaggaaatgtagatactagaattagaaaattgaatgaagggatgtatgatgcaattattttgtcttatgctggtatcaaatttttaaaatttgaaaatgaagtctcagaaattttttcagctgaagaaataattccta

SEQ ID NO: 201817 - DNA, 844 bp, Unknown
  Bacterial polypeptide expressing nucleotide sequence isolated from the Sargasso Sea
attgtcaaagttagtgatttaaacgatgaagatattgtaataaaaaaaattactacaaagggagatgagattcaggatgtaaaattgtcagaagttggtgggaaaggattattttcaagcaatattgaaaaagaacttcaagataaaaatattgatattgcagttcatgcactcaaagatatgccagcttttgaaactcaaggtcttaaaacagatgtattcttagaaagaaacgatccaagagaaattcttatcacaaaggataaacaaaaattaaatgaattaaaaaaaaactctataattggaacctcatcttttagaagagaatatcaaattaaaaaaatcagatcagatcttgaatgtaaacttattagagggaatgttgatacacgtattaaaaaacttaaagatggaatctatgatgcaataatcttatcctacgcaggaattaaatttttggattttgatagtgaaatttcagaaatattttctacagaaaaaataattccaagtgctggacaaggtataattgcactccaacgtagagagggtgatgaggaaacaatttcagttttaaaaaaaataaatcataacgaaacatttatgagagcacatgttgagagaaatattttaaaagttttggaaggagattgtgaaactgcaattggagcacactctgtaatagcaggtgataaaattacagttgaggctgaattattttctttagatggttcaaaaagatattatgaaaaaaaaactggcaaagttgaagacttcagccaaattggtgaagaagtaggtcaaattttaaaaacgaaatctaataattctaaaaaaagataat

SEQ ID NO: 201818 - DNA, 934 bp, Unknown
  Bacterial polypeptide expressing nucleotide sequence isolated from the Sargasso Sea
aatgcaagacagctatcaacctcatgctgacagcgtggaacgcgcccttactaactatcaacacctagccgaagtactcgaaaaagccagcactactcaccagcgcccagagcagctactcgactggttgaataagcaaattcataagcctgaaagcgatgaagagcttactttgcgtcttgaaagtgacagccaacttattcgacttattactcagcacggctcgaaagggctagagtaccccattgtgtttgttccatttgccaccggctacagagacgccgctaaaaacggcaacactacatcgcaaatatttacctattacgacgaggaaaaacaagatttacaaatgcagcttgggcagacgccacaggccatagctcgcgttcaaagcgagagcgaagcggaagacatgcgactggcctatgtggcggtaacacgagctgcccatcgctgttacatgggcgttgtaccgctgactaacaatgaaagaagtgcattagcacgagcactcggtgtaggtggcgacggcagcaacaacgattggtcgagtgtgttaaaccgtgttgctgaagaagatgcgtcccatgccagccatatcgacggtgatgagtttgaggaagtgtatactggctttgaacaagaagatgagttacctcagcttaccgcgttgcaatttaccggcacggcaagcgaagaatggcgactgtattcattctcagcaatgagccgtttaaccacggttggtgctaaccaaagcgttgaaacagacacagcagcagagtccggcgcaacaacagagcccttgggtcaaacccttcctagtgtgcccgtactttcaaccattcgagatgaagaagtgtatgcaagcgacactcttgtgggtgagatgggctcaattgatgcagacatcatttcctcggcaggtattgaa

SEQ ID NO: 201819 - DNA, 445 bp, Unknown
  Bacterial polypeptide expressing nucleotide sequence isolated from the Sargasso Sea
tcaacaaaaggtaagattaaatttttttggagattattcttcttttggagaaacagttgttaatgctatccaagatgcagagatatctactgcatttgcagatcccaagcttaaattaaatattgccctcggttacggaggtcgagcagacattgttcatgcaataaaactaatagctaatgaaatcaaattagacaaacttacattagaggatgtctcagatgaaataatttttaaatatttaaaagctccaatcaatgatttagatttgcttattagaaccggcggcgatcaaagaattagtaactttttgttatatcatttagcttattctgagatccaatttactgagacactttggccagattttactgaagaagaatttctacaatgcttagaagcattttcaaatacggagaggcgttttggcaaaagaactatataa

SEQ ID NO: 201820 - DNA, 731 bp, Unknown
  Bacterial polypeptide expressing nucleotide sequence isolated from the Sargasso Sea
ttcaaaaaaaattgaaattgaattaattaataataatattgatatagctgttcatgctttaaaagatatgccatcgattgaaacagagggactaataacaaatttttatttaaaaagaaattcgcccaatgaaatttttattagcaataacaatataaattttctaaaccttaaacctaattctattataggcacctcttcttacagaagagaataccaattaaaaagtattagatcagatctgaaatataaattaataagaggaaatgtggatactaggataaagaaattagagaatggagattacgatgcaattttactttctaaagctggtattgaagctttaggtttgacaaataaaattacacatgaatttaatactgaagaattaataccctgtgctggacagggtattatcgccatacagtgtagagaaaacgatcaagaaataattaatatcttagaaaagattaatgatgatcagtccagaattattgcaaatgctgaaagaaaaatcttaaaaatactcgagggtgactgcgatacagcagttggtgtgtatgcaaagattgataaagatcttgtaaatataaaagctgaacttttttcagtagatggcaaacaaagattttttgttgaagaaagtgaaaataaaacaatggttaaagatttaagtattaagattggagaaaaattaaaatcagagtcaaagggatcttataaaaggtaaa

SEQ ID NO: 201821 - DNA, 659 bp, Unknown
  Bacterial polypeptide expressing nucleotide sequence isolated from the Sargasso Sea
tatgaataaaaaaataataattggatccagaggtagtaaattagcattactttatgctcaaagtgctaaggatacaattatacaaaatacagagttaaatgatgaggatattattattaaaacaattactactaagggtgaccaagttaaagatacaagactatcagaatttgggggcaaaggtttattttcaagtaatatagaaaaagaacttaaaaataaaaatattgacatagcagttcacgcacttaaagatttgccagcaatcgaaacaaaaggtttgttaactgatacttttttaaaaagaaataatccaaaagaaattttaatttctagaaataaaaaaaaattaaatgaattggaaataaaatcgattgtagggacatcatcatatagaagggaatttcaaataaaaaagttacgacctgatcttaattgtaaactaatcagaggtaatgttgacactagaatcaaaaaattaaaagagggcttatatgatgcaataattttatcttatgcagggattaaatatttacaacttgaaaatgaaatctccgaaatatttacagctgaacaaataattccaagtgcaggccaaggtattattgcccttccatgtagggaagataatcaagaaattattacacttttaaaaaaaa

SEQ ID NO: 201822 - DNA, 324 bp, Unknown
  Bacterial polypeptide expressing nucleotide sequence isolated from the Sargasso Sea
ttggggacgttaagaacaaaacatgcattattatcgatgacataattgatacagcaggaactctgtgcaacgctgcttatgcattgaaagaacaaggcgctcaaaaagtttatgcttatatttctcacccagttctttctggttctgcaattgaaaaaatatccaaatcaaagctagactcattgatagtaactgatacaattccgctctcaaaagaggctgaaaattgtaagaaaataaagattgtctctatggattcaacattagcaggcgctataacaagagtgaatagagaagaatcaatcagtgaaatgtttttataaa

SEQ ID NO: 201823 - DNA, 683 bp, Unknown
  Bacterial polypeptide expressing nucleotide sequence isolated from the Sargasso Sea
tatgagtaaaaaaataataattggatctaggggtagcaaacttgccttactttatgctcaacaagttaaagataaaattattgaaaatactaaccttggtaataatgatattttaattaaatcaattacgactaaaggtgatgaagtacaggatataagattatcagaggttggtggcaaaggtttgttttccagtaatattgaaaaagaacttcagttaaaaaatattgatgttgcagttcatgctttgaaagatatgccagccaatgagacaaaaggattaattacagattcttttcttaaaagaaatgatcctagggagattttaattacaaaggataataagaaactaaaagacctagatgaaaaatcaatagttggtacctcatcatacagaagagaatttcaaataaaaaaaattagaaaagatttaaactgcaaattaattagaggaaatgtagatactagaattagaaaattaaatgaaggaatgtatgatgcaattattttatcttatgctggtattaaatttttaaaatttgaaaatgaaatttctgaaattttttcagttgaaaaaataattcctagtgcaggacaaggtataattgctatgcaatgcagagagaatgataatgagacaatttctattttaaataaaattaatcatcaggaaacaaataaaa

SEQ ID NO: 201824 - DNA, 493 bp, Unknown
  Bacterial polypeptide expressing nucleotide sequence isolated from the Sargasso Sea
atggaaaaaaaaaatataattattggatctagaggtagcaagttagcattgatttatgcgaataaagtgaggtctgaattacaaaaagattttactggtaaaattgaaatgaaaaaaattgtaacatccggggatgaaaatcaaaaagatagattatcaaacttgggtggcaaaggattattctcgaaaaaaattgaaaatgaattaattaataatgaaattgatatagctgttcatgcattaaaagatatgccatcaatagaaacagaaggattgataacaaattattttttaaaaagaaattcaccaaatgaaattttaataagcaaaggtaatattaaatttgaaaatttaaaatctaattcaattattggaacatcttcttatagaagagagtttcaacttaaaaaaaaaagaccagatctaaattacaaattaataagaggaaatgttgatacacgaataaaaaaattagaaagtgggaatatgatgc

SEQ ID NO: 201825 - DNA, 272 bp, Unknown
  Bacterial polypeptide expressing nucleotide sequence isolated from the Sargasso Sea
aacaattaaactaccagggcttgtaaatgtatcattccctaactttaggtctgatatccttatggcgaaattagaccgtttaaatattgctgtatctaatggctctgcttgcggatctggcaacattaaaccatctccaattcttaccgcaattggagttggtgaagttatgaacctatcaacacttcggtttagttttggatcttcgaatacctctgaagatattgattatttattagttcaattaaaatctattctatctgaaaaatgaa

SEQ ID NO: 201826 - DNA, 463 bp, Unknown
  Bacterial polypeptide expressing nucleotide sequence isolated from the Sargasso Sea
tatgaaaaaagataaaatcattattggttctagaggcagcaagttagctttgatttatgcggagaaagtgaaaaaagagcttggaaaagaatttttgaaaaagattgaaatcaaaaaaattttgacttcaggagatgaaaatcaaaaagatagattatcaaatttaggtggcaaaggattattctcaaaaaaaattgagaatgaattaattaacaatcatatagatattgcagtccatgctttaaaagatatgccctcaatagaaactgaagggctaataacaaattttttcttaaaaagaaattcaccaaatgaaattttgataagcaaaagtaatattaaatttgaagatttaaaacctaattcaattatcggaacatcttcttacagaagagaatttcaacttaaacagaaaagaactgacttaaactataagttaataagagggaatgtggacacaaga

SEQ ID NO: 201827 - DNA, 853 bp, Unknown
  Bacterial polypeptide expressing nucleotide sequence isolated from the Sargasso Sea
agagcaaaatctgagcttaaaaaaatttcaagtgattttgatattgatataaaaaaaataacaacaaaaggggacatcattcaaaacgtaagactttccgatactggaggtaaaggattattttgtaaattaattgaagatgatttaattaataataaaatagatatagctgtacatgctcttaaagatcttccaacgaaagaaacggatggtttagctacaaattgttttttaaaaagaaatgatccaagagatattttaattagtaaaaataatttagatttaaaaaaattaaaaaaaaattctattgttggaacttcttcatttagaagagagtttcagctgaaaaaaattagacaagatcttaattataagcttattagaggaaacgttgatacgagaatcaaaaaattaaaagaaaatcaatttgacgcaataattttgtcccatgctggagttagatcgttaaaattggacagcaatattgctcaaattttttcaatttctgaaattattccaagtgctggccaaggcgtaattgcattacagtgcagaaaacaagacgagagaattataaaaattctaaacaagataaatcataaagaaacaaactatttagttgaagcggagagaaatgttttaaaagttttggagggtgattgcgaaacagcaattggaatctttgcaaaaattgtagatgacaaaattattttagaagctgaattattctctttagatggaaaacaaagattttatgtaaagtcttcaaaagatcttagtttagcgtctgaactgggaaaagaagtaggtgaaattcttaaaaaaaaatctaaaaattcatataagaaataat

SEQ ID NO: 201828 - DNA, 343 bp, Unknown
  Bacterial polypeptide expressing nucleotide sequence isolated from the Sargasso Sea
attggaaagcggagtatatataattagtgttgcagcaaggctgcttgaagtgcaccctcaaacgctgaggaaatatgaaaaatatggtttggttagaccttccagatctgttggcatgttgcgcttatactctgaggaagatctaattagacttaaaattatcaaaacattagttgatgattatggagtaaatttagccggaattgcaataattatggatctcatagaaggaatagatgagatatctatgatttctagcaccacaaatgaaactaacttcaattctagaaaaacaatcataaatcaaaaagttaaacttttattagaaaactttgtagtttga

SEQ ID NO: 201829 - DNA, 652 bp, Unknown
  Bacterial polypeptide expressing nucleotide sequence isolated from the Sargasso Sea
tatggaaaaagttggggaacatataacgctggatatagtcggaactaaaaaggaatatactcctgaattttatgaaaagttagtttataaaattgctaaagcagcaaaagtaacagttttaaaaatttctaaatataaattcgagccacaaggatttacattggtcgctttgcttgctgaaagccacattagttttcatactttcccagaaaaagaaattgtaagctttgattttttcacatgtggaaaagtatcaccaaaagtttctctagatataataaaagacgagatggaacatacaaatatcataattaaagaatttaatagagatactattgatctttatcatgacaattatagttctccaggtttaaaaaaatcatatgttgttaatagagttttagaaaattttaaatctaaagttggtcaatatattgaaatacttgatttagaacaatttggaaaagctttatttattgataatgaaatacaagtagctgaaagtgatgaacatttatatagctcaacctttgtaaattcaggtcttaatttaaattcaaacaaagaaaaagctgcaattattggtggaggtgatgggtggtgttgcaagagaatgcatttcacaaaactttggctttatagattggtatga

SEQ ID NO: 201830 - DNA, 583 bp, Unknown
  Bacterial polypeptide expressing nucleotide sequence isolated from the Sargasso Sea
cgacaatataaattttaatgaccttaaacctaattcaataataggtacttcttcttacagaagagaatatcaattaaaaagtattagatcagatctgaattataaattaataagaggaaatgtggatactaggataaagaaattagagaatggtgattacgatgcaattctactttctaaagctggcattgaagctttaggtttaacaaataaaattacacatgaatttaatactgaagaattaataccgtgtgctggacaaggtattattgccatacaatgtagagaaaacgatcaagaaataattaatatcttagaaaagattaatgatgatcagtccagaattattgcaaatgctgaaagaaaaatcttaaaaatactcgagggtgactgcgatacagcagttggtgtatatgcaaagattgataaagatcatgtaaatataaaagctgaacttttttcagtagatggcaaacaaagattttttgttgaagaaagtgaaaataaaacaatggttaaagatttaagtattaagattggagaaaaattaaaatcagtgtcaaagggatcttataaaaggtaa

SEQ ID NO: 201831 - DNA, 484 bp, Unknown
  Bacterial polypeptide expressing nucleotide sequence isolated from the Sargasso Sea
atgctggacctcggctgtggagacggttccctgacggtagaaatggggcgttttgcggaacgtgtgattggagtcgattacaatccggaactgctcgcttcggcccgacagcgtatggaccgtttggggctggagcacgtgaccttactggctgaggatgtcggcagcctttcgctggagcctcaaagtgtggacgtagccgtattttcccagtctctccatcatctggatgagcccttcaacggaatccgccaggcttttcggttgcttcggccgggagggctgttagcagtgatggaactggcggcgcacgaccaactctgggtactggaaaaactgaagcacaagtggcccggtttcgagcaggagcatttactgaagatgatgcaggaagccggatttagcggcctcaaagaggaaatccttccccagagcaggggagaacttttccaggttattttggcgatgggagttcgggattgag

SEQ ID NO: 201832 - DNA, 622 bp, Unknown
  Bacterial polypeptide expressing nucleotide sequence isolated from the Sargasso Sea
tatggattttgatcctctcaatgaggaagcaaaatttgaaacagttttaaaaatcaaagaggcatgcatatcaactggttttttttctatatccaaccatgggatgccaatagagatactagaagactgttggaattcatctcttcaattctttagacagtctgaatctgaaaagatgaaagttggaatgcctttccctggatatccatatggattcgtcccaatggagcaagaaacccttgctcgctcaaaaggattaactgctccgccagatctgaaggaaagtttttcagttggacctggattggaacctcctcctggactatctgcagaagaagcccagttcgtcttttctgaaaatcagtggcctgaaaatccaaaatattttaaaagcagctggaagttttgctataaatccctagctgagtgtgctgatagagtaatggggcttctggccctggctcttgatcttcctgaaaactggtttgacagattcttcctgaatccaataagcgcaatgcgtgtgaattattatcctgaactgggtaaagagcctgaagaaaatcaattgagagcatctgctcacagtgactatggtagcctaactcttcttcttcaggat

SEQ ID NO: 201833 - DNA, 889 bp, Unknown
  Bacterial polypeptide expressing nucleotide sequence isolated from the Sargasso Sea
cattaaatccttaaaaaaagaaaaagttaagcatgtttttggtttaattggttcagctacaatggaaatgtttgatgctctttatcatgaaaaaaatataaaatttattggtgttcgtgatgaaagaactggcacgcacatggcagatggatatgcaagagcatctaatcaaccaggtgtaatacttgctggacaaaatggtcctggtgctacaaatttagtgacaggacttgcgcaagcgaaagcagctttttctccagttgtttcaattgcagggtcatattctacaaaagataaaatggaagatgcttttcaaggtcttgaccaacaatttttatttaaaccggtaacaaaaaaaacttggacagtaaaaaatgctaaaaaaattccaaaaactttcagtaatgcttttaaattagcaatgtcacccagaaggggacctgtatgtattaatttaccaagaaatattttaacagataaaaaaaattttaaaatcaatgaaaaaagtcaatcttttgataaccaaaactctaccaaagcaaaatataataatataaaaaaagctgtaaaaattattagtagttccaacaaagcggttatcatcgctggtggtggaattaaatatacatcaaaatataaaaatgtagttaaactggcagaatttttaaatgtcccaatagtaactgcagctggccatggagacgcaataccatttagtcataaactaaatgctggacaaatgggtccaagaggaaatccagttgcatctaaattggttaaagaagcaagtgttataattgctcttggaacaagactaggatttaattcaacattttattcttacgaaaatataaataaaagagcaaaaatcatacaaattgaattggaa

SEQ ID NO: 201834 - DNA, 464 bp, Unknown
  Bacterial polypeptide expressing nucleotide sequence isolated from the Sargasso Sea
aatgactgcaattattcttgccgcaggaaagggagagagactaaaaccattgactacattgactccaaagcctttgatagcagtttccggacaaactctgcttgagagaaacatcaattgcctcgcagaatctggagtcaaaaagattatagtcaatggatctaggatgggaaatcagattgaatcattcctcaggaatcattatgaacaatccaatgtgagcattgattacatcagtgaaggcgatgaaccactggggactgctggtgcaatttttaatattattgacgaagggctaataaatgatgatcttttttgggtcgtcaatgccgacatcatcacagactttccatttaagagaattcaattgaatagagagactgtgggccatattgttctggtacctaacccacgtcataattcttctggcgatttttgccttgaaggagatagagttaccattt

SEQ ID NO: 201835 - DNA, 718 bp, Unknown
  Bacterial polypeptide expressing nucleotide sequence isolated from the Sargasso Sea
attgtcaaaaataataaaaaaaaggaaattaattgtgaaaaaaaatgaaatttcgatacagctttacacagcaagaaaattcgaaccactatctgaagtaatagaatttatttctaattcaggaatatcaaatattgaattatttggattagagtcaataaatgtagacagtattagggatttacttgtttcaaataacctgttttgtcattcagcacattctagttatgaatcaatacatgattataacgagataatacacagagcaaaattattaaatattaaacatattattgttccagctccgcccaaaaaaaatgacggtgattttaagagctcttttgatattaatgagctagattggatgtcctttggaaagaaattgtcatcatatgtttctatttttgaagataatggcttaacacttggttaccataatcattcttatgaatttatttcattaccaagtggaaaattgccaatagaatgtgtcatggatcaaaatgaaaatttaaagttcgaaattgatttaggatggaccacagctggcggtgctgatcctaacatttgggttgaaaaatatacgaataaaataatagcatgccatttaaaagatttttattttaaagataaagatatgttagatcataataatcaatctgcagttggtgatggatttataaattggaaagaactgattaataaattaaaaaaataa

SEQ ID NO: 201836 - DNA, 455 bp, Unknown
  Bacterial polypeptide expressing nucleotide sequence isolated from the Sargasso Sea
gatgagtaataacccagccacaacccgatgggcagatcttgacggccagctcttctttcctcgagaactcagctggctctccttcaatgcgcgtgtgctgcaggaggcccagaatcctgcggtcccgctgattgaacgcgtgcgctatctgggtattttctccaacaatctcgacgaattttttcgcgttcgcgtggcggaagtgcgccggcttatcagtgtctccaaagggccgcagcgtcaaagtgcaaaggacctgttgcagtcgattcagaaggaagtggtatcgctgcaaaaagaatttgatgcgatctccgccgcgctgatgaaggaactgcgtcagcaaaagatctatctcatcaacgaaggccagcttgacaaagggcaggccgccttcgttcagcagtatttcagagagaccgtcctgccagagctcgagcccatcctgctcgagg

SEQ ID NO: 201837 - DNA, 436 bp, Unknown
  Bacterial polypeptide expressing nucleotide sequence isolated from the Sargasso Sea
aatgactgcaattattcttgccgcaggaaagggggagaggctaaaaccattgactgcattgactccaaagcctttgatagcagtttccggacaaaccctgcttgagagaaacataaattgcctcgcagaatctggagtcaaaaagattatagtcaatggatctaggatgggaaatcagattgaatcattcctcaggaatcattatgaacaatccaatgtgagcattgattacatcagtgaaggcgatgaaccactcgggactgctggtgcaatttttaatattattgacgaagggctattaaatgatgatcttttttgggtcgtcaatgccgacatcatcacagactttccatttaagagaattcaattgaatccagagactgtgggccatattgttctggtacctaacccacatcataattcttctggcgatttt

SEQ ID NO: 201838 - DNA, 957 bp, Unknown
  Bacterial polypeptide expressing nucleotide sequence isolated from the Sargasso Sea
ccgatggcgtaccaggattggtcggcgtcgcccgtggttgttgatagggcttcccgtcatgatgctgggcacttacatgctgtttattcctcccgaagatgtggggattttatatttcctgatctggctgaccgtgttttttctgggtagcacgatgatcgcgcttccacatagggcctggggagctgagttatcgccagaatatcatcaaaggagtcgggtcaccgcggccagggagttctacatactggctgggttgcttgtcgccgccttcgtgccgatgattatagagatcaccgctgatggcggagttggagtaggtcaggtcgtttcgacactgtggtctgatgcgatcggcgcattctctggcgacttcagggacaaaaaaatagtcgacagagccactctgaccggaccggttttggcaggtctggcgtttgttgttatgtcgctattgcccatttgtgctgcaatcgtgttctttttcgtgcgagagccagatctcgacgatgtcgaaaaaaggcccacctttatggacggcctgaggttggtgatcaaaaacggtcccatgaaaagagttttgttcatcgcgttgcttgtggcttttggcgaatctttccgcaacgcggtttcattattttttatcagggatatcgttggggtgcctactattggggcagcgtatttcttctattttgtggctggcctggccgctattccgttctggctctggttgggacgaacgattggaaaacacaaagcgttcatgtgtactttgattacagttgcggcggtgagtggagcgaacctgctcctagattacggagactatctcccatttttccttctttttgttgtgaagggcttttgttttggcggtctgcagttcttgccggtggcaatgattgctgatgtggttgatgtggatgcagcgcggagcggtgcggcacgggcggg

SEQ ID NO: 201839 - DNA, 805 bp, Unknown
  Bacterial polypeptide expressing nucleotide sequence isolated from the Sargasso Sea
aatgaagtttctaaatatatttgaaaaatataaagaagatttaatttgcttaaaatattcaggcaatgtctttttaagtcgtgagatctttaacaatttcattgaagatctaagtattctaaataaattaggaataaagatttgtgtcatccatggtgggggtccaagaattcaaaaagaattagaaaaatccaacatacaatctaaatttataagaggacttagagtaacagatgaaaaaataatagatattgttgagaatgtacttattgattttaattatgatatagtaagttcattagaaaaaatgggtacaaaagcaattgggatccatactaaaaaaaataatgttattgaagttttaagagacgcacctgaattaggttttgtcggaactccaaacaaaataaataatgaaataatattaaatattattaaagatgataaaatccctattatatctcccttgggtcttcaagaaaatcaaacttataatatcaatggagatgtggcggctggtaaaatcgcacagtcacttaaatgtcgaagactacttttgatgactaatgtggaaggtgttttagataaaaataaaaaactaattgaggaaatatcttcttctgagattttagaaatgattaaaaatgaaactattactggcggcatgattcctaagattaatatggggctagaatctattaataatggggttactgctgtaggaataattgatgcaagaccaaaacactcgatactctttgagttattttctgataaaggctcaggcacattaattagaaaatga

SEQ ID NO: 201840 - DNA, 796 bp, Unknown
  Bacterial polypeptide expressing nucleotide sequence isolated from the Sargasso Sea
atgaaaaacaaaaaaattattattggaacaagaggcagtaaattagcattaatctatgctgaaaaagccaaagaaagaattttaaaattttcaaaagaatttgaaatagagagtgttgaaataaaaaaaattacaacaacaggagatttaaatcaaaaagatagactttctgaaattggaggcaaaggacttttcttaaaacaaatagaaaatgaattaatagaaaataatattcatattgctgtacatgctttaaaagatatgccatcagatgaaactgaaggattgctaacaaattgctttttagaaagaaatgatcctagagaagtattaatttctaaagataaaataaaatttaaagatttaaatgaaaattccataatagggacttcatcttttagaagagaatttcagctaaaaaataaaagaagcaatttaaattataaattaatcagaggcaatgttgacacaaggattaacaaattaaatcaaaatttatatgatgcagtaatattatcctgtgcaggcattaattctttaaatttaaacgaacatatttctgaaattttttctattgatgaaattattcctagtgttggacaaggagttatagcattacaatgtaaaagtgatgatgaatatataaaaaatgttttaaaaaaaataaatgatgacaaaacttttaaaagtgttcaggcagaaagaaatgttcttaaagttttagaaggagattgtgaaacagctgtgggtgcaatagcagaaataaataatgaaaatataacacttcaaggagaac

SEQ ID NO: 201841 - DNA, 548 bp, Unknown
  Bacterial polypeptide expressing nucleotide sequence isolated from the Sargasso Sea
aatgaaaaaaattacaattggagcaagaggaagcaaattatctcaagcttacgcaagtaaggttaaagagcttattttaaaaaaaaatgagagttttagtgaggaaagcatcattgttaaaacaataaaaacatctggagatattcataataaagttaagttgtcggatattggtggaaaaaaattgttttgcaaagaaatagaggaagatttattagctaacaatattgatatagcaattcactctttaaaggatatggagtctgaagaacatccagacttaacgattggagcgtttataaaaagaaatgatcctcgagaagctcttattagcgaaaaaattgtagatttaaataaattaaaagttaataccaagattggatcaagctcaagaagaagagaacttcaactaaaaaggattaataaaaattttctttttgtaaatatgagaggaaatatcgactcgagaattaataaatttactgatgataatttagatggaattttattagctgccgcaggcgtaaaaagtttgaatttagaaaaaa

SEQ ID NO: 201842 - DNA, 145 bp, Unknown
  Bacterial polypeptide expressing nucleotide sequence isolated from the Sargasso Sea
ctgacgatcggcacagggtcgcagattttgcgcgatcttggggtcggcaagatgcgtttgttgagccatccggcacgtttcaacgcgatttccggatttgaccttgaagtggtcgatttcgttggcttcgagaaaccacactaac

SEQ ID NO: 201843 - DNA, 607 bp, Unknown
  Bacterial polypeptide expressing nucleotide sequence isolated from the Sargasso Sea
tctggattttgatcctctcattcaagagtcaaaatttcaaactgttcaaaaaataaaagatgcttgcactacaactgggtttttttccatatctaaccatggtgtgccaatagaggttctttatagttgcttagagtcatccattaaattctttagacagtctgaatctgaaaagatgaaagtgggaatgcctttcccaggatacccatatggattcgtcccaatggaacaggaaaccttagctcgatctaaaggaaaaagcgctgcacctgatttaaaagagagtttttcaattggacctggattgaaatctcctccttggctttctgcagaggaagctcagttcgttttttctgaaaatcaatggcctgaaaatccaaaagattttaaaaacagttgggagatttgctataaatccctttcagaatgttctgataaagttatgaagcttctggccttggctctgaatctacctgaaaactggtttgaaggattctttttgaatccaataagtgcgatgcgggtgaattattaccctgaattggttaaagagccccaagataatcagttaagagcctctgctcatagtgactacggaagtctgact

SEQ ID NO: 201844 - DNA, 479 bp, Unknown
  Bacterial polypeptide expressing nucleotide sequence isolated from the Sargasso Sea
aatgccatcaaaattcattaatcgagaagtgagttggttaagctttaatgagagagttttacaagaggctgaagatgactcgaatcctattattgagcgaatgaagtttttgggcattttttctaacaatagggatgagttttttagagtgagagttgctaatattcgaagagttgcagaacttcctggtactaacttcttgtccactggagaagatccaaaaaaggttttaggtgatattttaaagcaggttttaaagcagcaaactcgttttgatcgtgtgtttaagcgtttgatgaaagatttgcaaaaagagaatatttattttttaaacgaaactcaaattggggaagatcataaggattttgttcgtgatttttttgtagataaagttcgaactaatattgttccgattattataaataaaagaaaaagcttcccttttcttaaagatgcctctacgtacatgtttgtcaaaa

SEQ ID NO: 201845 - DNA, 814 bp, Unknown
  Bacterial polypeptide expressing nucleotide sequence isolated from the Sargasso Sea
gaggcaaattggtcttgatgaagcgccgccaggtgagtttaccaaaagggcatttttaaataataagcttagtcttaatgaggcagaagctgttgctgatttgattgatttaactgatgagcgaggtgtttctatattgggttctactgttatgggtagccttacctctactgtttgtgagttcgcagatgcgatagacaaaataagaatgggggttgaaggagaaattgattttaatgatgaagatgaaaattttataaataaacatttatttaaggacttggagtttttgttggatggatttaaaagctttactgacagctgtataaatattaaaaaaggcacgcataaaaatagggtgttgtttgttggtccagtgaactctggtaaatcatctttgtttaatttgttggttggttatgatagggcgattgtttctgattcccctggaacaacaagggatattattgagtcagaggtgttttttaattcgaatgttttttctgtttttgattctgctggtattagagagacgggtgaggaaattgaaaaaaagggtatagagttatcatttgaagaaattaaaagggctgatttggttgttggtgtttttgagagaaaagattttgatagggtttctttttttgaagatttggtgggttctggttgttttgtaaaaatacaaaacaaaatagatattgatggtatagactctaataactttgattgttgtgtatcagcaaaaactggagagggtttaaaaaactttaaagatttaataagttccagagttgagggtgatatctataaaaaa

SEQ ID NO: 201846 - DNA, 925 bp, Unknown
  Bacterial polypeptide expressing nucleotide sequence isolated from the Sargasso Sea
cggacggcggaggcagcggtgcgcgtccaaaaagctttccgcgggcgggaagcgagaaggtacctccgttctgctagaaagctggctcgttttatccaggtccgggcgcgcctcaagttacgaaggaggcggcgggcggctctaagtattgccggcgccgtgcgcgtcgtcggcgcggcgcgcaagtttcgggcgtcgcggcgcatcgcgcgggccgcgcagacggcgggtcggggtgcccaagcgcggcggaagctcggctggttacgagacgcgaaggccgcgcgcaagttgcaacgggtcgcgcggcggggcgaggcgcgcgggagctttcacagactgcgctcggcgtgtatcacgctgcagtgtctagctagaatccagcaggcgaagcaagcgaagcgccacgagcaccaattaagaagggacgcttccttagtactggtggatctacgcaaggcggaagtgcggacggacgccgtgcgcgccgagacggcggcggccatcgcctccgccaagctcgccaaacaaacacacgacgagaaaatcaaaatgttggatctggaattaagacggcaggcgacggcgcgcgtcgcggcgcgcgcggaggtggccgctgtaagagccgagcgcgatgctgctcttaaggcgttacaagccgaaagggacctgaggcaggctccaaatgacccgagcctcaaaacgaaagcgcgggacgcctcgaacgcccagcgcgatgcgcgggccattgtggatgcgtgcgcccaggactgtcgagatgctgctgcgagagcatccatgtcgcagagcgccaagagcgctctcgacgccgaggccggccgcgccgcggtggccgcgacggaggccgcgcggcgctgtactgatatagaaaagaaggcaaatagagccgcggcgcgcttcgcgg

SEQ ID NO: 201847 - DNA, 814 bp, Unknown
  Bacterial polypeptide expressing nucleotide sequence isolated from the Sargasso Sea
atgacagcccatgccgtgaagatcgttgaatcagccaatattttgttaggccctgactcatgcagccccctattgtctgctgacatacaggggcggcttgagactgtcacgagtctcgaggagttggttgaccgcatagaggcatctggggcgcagcaacaaattgttgttttggcatcaggagatcctcttttctatgggacagcgcgatacgtttgtgccaaacttggcaaggaaagattcgaagttgttcctcatgtaagcagcatgcagcttgcattcgccagggttaaggagagttgggaagacgcctaccttgccagcctttctgggttgacagtcattgaccgtgtcatcgaaaagattcgtacggtcgatactgcgggtcttttcacgagtgaaaaatggcctccaaacgctgtcgctgaggttctgcttgagcagggagtgacagggcttcaggcgtatgtttgtgaaaaccttggctcgcctgatgagcgagtaacacaaggttcactgcaggaaatttccaaggaatcatttggccctttgaacgttatgatccttattcgcccgagcggattaactgaaccaccgagtaaggcagggagacgtctgttcggaaactctgatgagcttttcctgcagtcgcgtccgaagagaggcttgcttactccaaaagaagtccgcagcctggctttggctgagctgtcgttatgctccactagcactgtgtgggatgttggggcaggaagcgggtcgttggctattgaggccgcgaggcttgccccgaattggttttgtttttgctatt

SEQ ID NO: 201848 - DNA, 345 bp, Unknown
  Bacterial polypeptide expressing nucleotide sequence isolated from the Sargasso Sea
taaaacaaaacctttacccagatgatataagagaaactattaatgcacttaatgaagctgaagcaaatgactcaatcatgattgatgtaagccatggcaatagtcaaaaagtgtataaaagacaacttgaaaatattggggttatctctaagcaaatatctgatggcatgaatgaaataagaggaataatgatagagagccatctaagagaaggtaatcagaagattggcgaggatttacaatatggacaaagtattacagatgcatgcattcactttgaagatacaaaacaatgtctttcagagctctcctcagctgttcaagcaaggagattaaaaagctagg

SEQ ID NO: 201849 - DNA, 469 bp, Unknown
  Bacterial polypeptide expressing nucleotide sequence isolated from the Sargasso Sea
gatgagaattgatgttctaactctatttcctaacatctttgacaaccttaattccttctcaattataaaaaaagcaattgattcgaagaaggttaaaattaaatcacataatctaagagagtttgcagaaaattcaagaaaagtagatgattatccttatgggggggctccaggaatggtaataaaaattgaaccaattgataattgcattgaatttctaaaaaagaagaataattatgatgagataatttatctaactcctgacggagaccttctaaatcaaaaaacatcaaactacttatcaacattaaaaaatattattataatctgcggtcattacaaaggaattgatcatagagttagagaacaccttgttagtaaagaaatttcgattggtgattttgttgtatctggaggagaactccctgcagctgttttatgtgactctatagttagacttcttcctgga

SEQ ID NO: 201850 - DNA, 459 bp, Unknown
  Bacterial polypeptide expressing nucleotide sequence isolated from the Sargasso Sea
aatgaattcaacaaccataaaactgcatccaaatgataatgtcgcagttgccgtcaaaacccttcctgcgggaagtgaggcaggcactccgggagtgaccatagaagctccgatccctgcgggacacaaagtagcccaggctcggatcgacatcgaccagccgattcgaaaatacaatcaaatcatcggttttgcatcacagaccattcttcccggacaacatgtccattcacataatgtcacccttcgtgattttgagcgggattacgcattcgggaaggatgtgaaaattccagaagaagttgagcaacaggccacatttgaaggatttcttcggcccgatggaagagccggtacaagaaattatattggcgtcctgacttccgtaaattgctccgcaacggttgcaaagtacatcggtgctgctttcgataaggaaggtgaaacagatcttgggaa

SEQ ID NO: 201851 - DNA, 978 bp, Unknown
  Bacterial polypeptide expressing nucleotide sequence isolated from the Sargasso Sea
ttccgaggcgtcgaacgacaccgatgagaatggaatcacctcaaccttcacggttcgtctctcctcgcagcccggggataatgacacctcgacggcagacaatgtgacgatcacagtctcggtctcggattcgaccgaggcggagcttgtgagcgattcgtcactggtgtttaccgagagcaactggaatgcggctcagacggtgacggtccggggtatcgcagacaatctgagtgatggagatcagtcgtacacggtgatcctcaaagacaatgtgaccagcgatgcacgctaccgctatgtggatcctccggatgtctcgttgaagaacctggacttgacgacgaagggcggattctatgtttccgaggcgtcgaacgacaccgatgagaatggaatcacctcaaccttcacggttcgtctctcctcgcagcccggggataatgacacctcgacggcagacaatgtgacgatcacagtctcggtctcggattcgaccgaggcggagcttgtgagcgattcgtcactggtgtttaccgagagcaactggaatgcggctcagacggtgacggtccggggtatcgcagacaatctgagtgatggagatcagtcgtacacggtgatcctcaaagacaatgtgaccagcgatgcacgctaccgctatgtggatcctccggatgtctcgttgaagaacctggacttgacgacgaagggcggattctatgtttccgaggcgtcgaacgacaccgatgagaatggaatcacctcaaccttcacggttcgtctctcctcgcagcccggggataatgacacctcgacggcagacaatgtgacgatcacagtctcggtctcggattcgaccgaggcggagcttgtgagcgattcgtcactggtgtttaccgagagcaactggaatgcggctcagacggtgacggtccggggtatcgcagacaatctgagtgatggagatcagtcgta

SEQ ID NO: 201852 - DNA, 698 bp, Unknown
  Bacterial polypeptide expressing nucleotide sequence isolated from the Sargasso Sea
aaaaggacatgatattttttttaaaggatatggttcctacactgatccgaataccaatgaatcaactaataataatactttcttaaatcaaatatttttttccaggatagtcgaagacaacgttatgaaaaatgttactgttattgacttttcggttttggggtataaacaaatcttatcagctgaaaaaggaatctttgatgggcaagaatcagcatggatatttactaatggaaagttgattacattagacgaaagtgggaaaacaacaactataggttttaaaaagtatttgtatcctttaggagatggtcctttaaaagtttctaaaattcctgatgatgctaacaaaatgactttaaatcaggctcttaaagcgaaaaaactttatgaagaaactggtgatgcaagggaagcaagaaaaatgtcagtaagaatacaagaaaaatttactttaccttgcgcatgcttagtctttggattgattggaagcagtttaggtgctaagcaaaatctaagaacttcaaaaagccaaggatttgggttaagtgtaattttgattctcttatattatgtactttctttcttgtcaagttcacttggtgtgaagggagttttaacaccctttatttcagcttggctaccagttttgacttcattttcaggaggtctttatttgttaaaaaaagcctcttaat

SEQ ID NO: 201853 - DNA, 958 bp, Unknown
  Bacterial polypeptide expressing nucleotide sequence isolated from the Sargasso Sea
gagcatgacgaagatgctatgcgacaatctgatcatataattgatatgggtcctggagcaggagtacatggtggaaaagtttgtgctcaaggaaatttaaaagatattcttaaaaataaaaattcaataacagcagaatatctttccaagaagaaagaaataaaagcaccttacaaaagatcaaaacataataataatttcataaaaattcgatcagcatttgaaaataatctaaaaaaaataaatgttgatatcccaataggattatttactgctgtcactggtgtatctggttcaggtaaatcaacactaataaatcagacattgcttccaatgagtacatttctcttaaatagatcgactttgaagaaagaaatcaaatgtgaacgaattgagggcctagaagacctagacaaagtaataaatattgatcaatcaccgattggaagaacacctcgttcaaatccagcaacttacattggtctcttctcaaacatacgagacctctttgctcaaactatagattcaagagcaaaaggctacaaacctgggagatttagctttaacgtaaaaggtggtcgttgcgaagcatgtcaaggtgatgggcttattaaagttgaaatgcattttcttgcagatgtttatgttacctgcgatatttgcaaaggatcaagatataatgagcagactcttgaaatcaagtataaaaataaaagtatcagtgatgttttagaaatgacagttgaggatgctttagatttctttgattctatcccctcaattaagaaaaaattatcaactttatcaagtgttggacttaactacatcaaacttggtcaatcagctactacattgtctggtggagaagctcaaagaataaaattagcaaaagaactttcaaaaagaagcactggaaaaacactgtttatcttggatgagccgacaacaggactccact

SEQ ID NO: 201854 - DNA, 769 bp, Unknown
  Bacterial polypeptide expressing nucleotide sequence isolated from the Sargasso Sea
cttgagaaatgcctttgtttctattgtggaccaaatggcagagcaagtccgaaggacctgctactccttcgtagtctataatcgtgatttttcaaattccttgttagatgccgaaggaaataccttggcacagggaaagcaggatttgtcagcacacgttgggaccttacactataagtgtaaggctgttatgaaagaatttggcgaagatattcagcccggtgatgtatttttaattaacgatccctacgcaggcggaactcactttagtgataacagcattttgttgccaatctttttcgatgaggaattgatcgcttggagtcaggcaaatggtcattgggctgatatgggaggtagtgtgccgggctcttttgatgtgagcgcagctgacatgtttaaggagggcttgcgtgtaactccagtaaaaatttggaggaggggagaatactgcaatgatgtagcaaagcttattgctaataatactagagatccgaatgcgattcttggagatatggaagcacagactcaagctgctcggatagccgaaagagaactcttacgattatgcgctaaatattctgtcagcacggtgaagcgtgcgtttcaagaggtgcaagattacgtcgagcgcgcgatacgacatagacttcgggagctacccaatggaagttggtcgacgacagattatctcgatcgagatccctccgaaaaggagggtttgatacctatcaaaataaaattaactattgaagatgatcgagctatc

SEQ ID NO: 201855 - DNA, 866 bp, Unknown
  Bacterial polypeptide expressing nucleotide sequence isolated from the Sargasso Sea
ttgtgagggtcctgaaggtattgaagccagctggcgctttgcatcacacgctctccgtaatggagctggcgtagctattcacctgtccgaccttcgaccaaaaggaactgaaaatggaaagggacttgtcgctagcggcccggtttcatttggccagatctattcaacccttaactctgtactccgacgtggtggtgtgtataaaaacggtgctgtggtgttgcacattgacctgtgccaccctgatgctcttgaatttatacaagcaccacgtcatgaacttccttgggctaagcgatgcgtcaacattacagatgaatggtgggagacgtgttcttttaaggaggaactactcaatggcattaagtctggagacatctggctcaacaaagtgaagtatgacaagaaaggcaaccgtatacgaggcaacgtttgtctcgaagtgtacttgccaagcagaggaacgtgcctacttcagcacgttaatcttggtgcctgcgaattcgacgatataccaagagctttcgtcgaaggtatgtctggcttgtgtgcattgcatggaaccactggagttggagagagtggtgaatacctcccacccgaaacagatcgacaagttggacttggaatgctcggacttgccaatctccttagacgagtaggtgttacttacgagcaatttggacgtgctcttgatcaatacaacgatggacagattgtacaaacccctgcttatgaactggtcacccagcttggtactggtatccatgcggcagcaagcgttgcacgtggttacgacatggatcgagctttcgcaattgctcctactgctagctgtagctaccgcagtaaggatgtagatgggt

SEQ ID NO: 201856 - DNA, 843 bp, Unknown
  Bacterial polypeptide expressing nucleotide sequence isolated from the Sargasso Sea
actgtttattcttgatgcttctggtagtatgaaaacagaatgggataacagtaatcgttttaaaatcgcgacccgtttacttgctaaagttgtagatagtatagaaaaagtcaacaggaatgttgaatttggtctcagagtatatggacatcaatctccaaggcagcttaaagactgtgaagactctaatctagaggtgccatttagtaaatataacagtgcaaatgttaccagtaagcttgcagagttaaaacctcaggggcatacacccattgcatattctatttatcaaagtttagttgatttccctaatgacccatatgcaaaaaatgctattgtattaataacagatggccttgaaaactgtgatggagatatttgtgcattgggcttagagcttgaaaaaaagcatattacaatgaagcctttcataatagggatgggcctagattcgttagaacaaacttcttttgaatgtattggtacgtatcttgatgcaggaaatacagagtctttttcaaacgcacttgacattgttatatcacaagcaacaaataatacatcaacacatgtaaacctcataaaacaaacaggtaagcctgatgaaacaaatgttgaaatgacattttataatgcgcattcaaatgagataagatataatttgatgcacacactagataaagcgggtatgcctgatacaatatatttgaacccattagggaagtatgatttaagggttcatactataccaccgatttcaaaagaagatatagagcttaaccctggaaaacacaatataattggcttggatgcacatatgggtacattaaagcttggttggaa

SEQ ID NO: 201857 - DNA, 613 bp, Unknown
  Bacterial polypeptide expressing nucleotide sequence isolated from the Sargasso Sea
tatgagagcaattattttagctgctggaagaggttcgagacttaaaagtttaacaaaaaataaacctaaatgctttttaaaaataaataacaaaaaaattattactcatcaaatagatgccttaaaaaaaaacggaatagataacatagcagttgttgtcggttataaaaaaaatttatttaaaaaactaaatttaaaaatcatatttaataaaaattggaataaaacaaatatgatatattcactattcaaagcatcttactggcttaaaaacgaagattgtataatatgctacggtgatattatttatgataattctattattgaaaaattaaaaaatagtaaaaaaaaaattctattaccttcaaatgttaattggaaaaaaaactggtctttaagatatcaaaatccattgactgatctagaaacttttaaagtgaataaaaatggtactttaaaagagatagggaataaagcgcaaggttattccgaaattcaggggcaatttatgggtttaattaaaatagataaaagatctatacaaaaatttattaaaatttataaaaacttaccattaaaaaaaaagctaaatttagattttactagtttttta

SEQ ID NO: 201858 - DNA, 781 bp, Unknown
  Bacterial polypeptide expressing nucleotide sequence isolated from the Sargasso Sea
atgagtaaaaaaataataattggatctagaggtagcaagcttgccttactttacgcccaacaagctaaagataaaattattgaaaatactaacctaggtaatgatgatattttaattaaatcaattacaactaaaggtgatgaagcacaggatataagattatcagaggttggtggcaaaggtttgttttctagtaatattgagaaagaacttcagttaaaaaatattgatattgcagttcatgcgctgaaagatatgccagctaatgagacgaaaggattaattacagattcttttcttaaaagaaatgaccctagagagattttaattacaaaagataacaagaaacttaaagacctcgatgaaaaatcaatagttggtacctcatcctacagaagagaatttcaaataaaaaaaattagaaaagatttaaactgtaaattaattagaggaaacgtagatacacgaattagaaaattaaatgaaggaatgtatgatgcaattattttgtcttatgctggtattaaatttttaaaatttgaaaatgaaatttctgaaattttttcagttgaagaaataattcctagtgcaggacagggtataattgctttgcaatgcagggagaatgataatgagattatttctattttaaataaaattaatcatcaggaaacaaataaaagagcccacttagagagaaatatattaaaagttttagatggagattgtgaaacagcaattggtgtccattcaatagttcatggagacaagattacagtga

SEQ ID NO: 201859 - DNA, 592 bp, Unknown
  Bacterial polypeptide expressing nucleotide sequence isolated from the Sargasso Sea
atgacaagcaaaccaaagttaagtcgacgagaacaaatattaatagtattagcgactgaattagagaaaaaacttggattaccaataacgacatcgagccttgcaaattctgttggtgtttctgaagctgccctatatcgacattttgcaagtaaagcaaagatgtttgaggcattaattaattatgcagaagagtcaatatttggtctggttaataaaattttggagcaagaaacagacccaactattcgttgttataaaattattaatctcatactttctttttctgagaaaaatccaggaataacccgtttattaatcggggatatattattaggggaaaatgaacgtttacatcttcgggttacgcaattttttgaacgcatagagatacaaatacggcaagtattacgtgaagctaatttaactaatggtccaagaccaataagcaatattgatgccgcagcaaatcaaatgctaatttatatagagggaaaattgtctcaatttgttataagttcatttaaaaataagccgacagaacatttagaaattcaatggggtgtgattaaagcaggttgctttagataat

SEQ ID NO: 201860 - DNA, 752 bp, Unknown
  Bacterial polypeptide expressing nucleotide sequence isolated from the Sargasso Sea
attcggaggtaaaggtttattttcaagtaatattgaaaaagaacttaaggataaaaaaattgatataggagttcatgcacttaaagatttacctgctaatgaaactgatggtttaataactgatacatttttagaaagaaacgacccaaaagaaattttaatttctaaagataaaaaaaaattaaaagaattagtcatgaattcagtcgtgggtacatcctcatttagaagagaatttcaattaaaaaaaataaggcctgatttaaattataaattaattaggggtaatgttgatactagaataaaaaaattgaaagatggtttgtacgatgcaattattttatcttatgtaggaataaaatatttaaaacttgaaaatgaaatttctgagatatttaaaaccgaggaaataattccaagtgcaggtcaaggtattatttcgttacaatgtagggaaaatgatcaggaaatgatttctcttttaaaaaaaattaatcatgatgaaacttacaaaagagctcatgcagaaagaaacatactaaaagttctagaaggcgattgtgaaactgccataggtgcacattccataattgatggagaaaatattgtcgtagaagcagaactcttttctttagacggttcaaaaaggttttatgaaaaaaaaattgagaaaatagaaaaatttagagaaattggtaaagaaattggtcaaattttaaaaattaaatcaaataattcatataaaagataat

SEQ ID NO: 201861 - DNA, 493 bp, Unknown
  Bacterial polypeptide expressing nucleotide sequence isolated from the Sargasso Sea
tttgtgtattggttgccatgcctgcaccgttgcttgcaaaagcgagcatgatgtacctattggtgtaaaccgaacccatgtaaaatatattgaaaagggcatattcccaaatagtagtagagagttttctgttcatcgttgtaatcattgcgcaaatgcgccatgtgtagaaatatgtccaaccactgctcttttcacacgatctgatggtattgtagattttgataatgataggtgtattggatgcaaatcgtgtatgcaagcctgtccatatgatgcactttacattgaccccgattcacatacggcagcaaagtgtaactattgtgcacatcgccttgatggtggatatgaaccagcgtgtgtaattgtatgtccagtagaggcgatcatttctggtgatatggatgatgaaaactcaaagatatcaggtctgttagcgaatgaaaatgttatggctagaaagccagaaaaaatgacacaacctaacctt

SEQ ID NO: 201862 - DNA, 652 bp, Unknown
  Bacterial polypeptide expressing nucleotide sequence isolated from the Sargasso Sea
tatggaaagaaaaaaaataataattggttcaagaggcagtaaattagctttaatttatgccaacaaggtaaaaagcaagataagtgaaatttttttaaacaatattgaaattaaaactataaaaacatctggagatgaaaatcaaaaagaccgattgagtgatataggaggaaaagggttattttcaaaaaaaattgaaatagaacttatagataaaaatattgatttagctgttcacgcattaaaagatatgccatccattgaaactaatggattaattacaaactgctatttaaaaagaaattgtccagaggaaatattaattagtaaaaaaaataaaaaattaaatgagcttaaatctaaatcggtaataggaacttcttcattcaggagagaatatcaacttaaaaaaataagaaatgatttagtatataaagttataagaggaaatgttgatacaagaattaagaaaataaatgaaggtttttatgatgcaataattttatctaaagcaggcattgattcattaaatttaacacaaaaaatttcacaggaattttctgttgatgaaatcataccaagtgtaggccagggtgtaatagcagttcaatgtagaaaagatgatttagaaatgattaatttattaaaaaaa

SEQ ID NO: 201863 - DNA, 826 bp, Unknown
  Bacterial polypeptide expressing nucleotide sequence isolated from the Sargasso Sea
tatgaaaaaaaatactctaacaattggaacaagaggtagtaagttagcattgatttatgcggaaaaagtaaaaaaagaattaaataaattttttccaaacgaaataaaactaaaaaaaatattaacaacaggagatcaaaaacatgaccaaaggctgtctgatataggtggcaaggggttgtttgcagagcaaattgaaaaagaactacttaatgaggatattgatattgctgtgcatgcattaaaagatatgcctacaattgaaacagaaagtcttttgacaaacaactttttaaaaagaaattcaccaaatgaaatattaataagtaaaaataatacgaaatttgaggatctagcacccaattctgtaattggtacttcttccttcagaagggaatttcaattaaagaaaaaaagatctgatttaaaatataaattaataagaggaaatgtagatacaagaattcaaaaattagaaaatggtgaatttgatgcaatactactttctaaagctggcatagactcattaaaattacaaaataaaattacacaagaatttagtgttgatgacctcataccttgtgctggtcaaggaattattgcaatacagtgtaaaaaaaatgataatggtattatagatttgctagaaaaaattaatgatattgactctagaattgaagcaaatgctgagagagaagttttgaaagttctagaaggagattgtgatactgcagtaggagtatttgcaaaaattactggtgaaaatgtagacttggtaaccgagctcttttctgtagatggcaagatgagatattttattagagag

SEQ ID NO: 201864 - DNA, 781 bp, Unknown
  Bacterial polypeptide expressing nucleotide sequence isolated from the Sargasso Sea
tatgaataaaagaataataatcggatctagaggtagtaaactagcattactttatgctcaaaaagctaaaaataagattatcgaaaacacaaacttaagtcataatgatattctcatcaaaccaattacaacattgggagaccaagaacaaaataagaggttatctgaatttggaggaaaaggtttattccttagtaatatagaaaaagagcttcaaaaaaaaaatattgatatagctgttcatgcactaaaggatatgccagctatagaaacaaaaggattaaaaacagatacatttttagaaagaaatgatccaagagaaattttagttactaccaataaaaaaaaacttaaagaattaaatttaaaatcaattattggaacttcatcatatcgaagagaatttcaaataaaaaaaatcagaccagacattaattgtaaaactataagaggaaatgtagacacaagaattaaaaaattaaaagatggaatttatgacgctataatattatcttatgcaggggtaaaatacttaaacttagaaagtgaaatttctgaaattttttcagctgacaaaattattccaagtgcaggtcaaggagttatagctttacagtctagagaaaaagatgataaaataatttctattttagaaaaagttaatcatgatgaaacttataaaagagcacattcagagagaaatattttaaaagttttagagggagattgtgaaactgcaataggtgctcatttctcagtagatggagacaagattacttta

SEQ ID NO: 201865 - DNA, 625 bp, Unknown
  Bacterial polypeptide expressing nucleotide sequence isolated from the Sargasso Sea
ttcgtccctggtgtttaccgagagcaactggaatgcggctcagacggtgacggtccggggtatcgcagacaatctgagtgatggagatcagtcgtacacggtgatcctcaaagacaatgtgaccagcgatgcacgctaccgctatgtggatcctccggatgtctcgttgaagaacctggacttgacgacgaagggcggattctatgtttccgaggcgtcgaacgacaccgatgagaatggaatcacctcaaccttcacggttcgtctctcctcgcagcccggggataatgacacctcgacggcagacaatgtgacgatcacagtctcggtctcggattcgaccgaggcggagcttgtgagcgattcgtccctggtgtttaccgagagcaactggaatgcggctcagacggtgacggtccggggtatcgcagacaatctgagtgatggagatcagtcgtacacggtgatcctcaaagacaatgtgaccagcgatgcacgctaccgctatgtggatcctccggatgtctcgttgaagaacctggacttgacgacgaagggcggattctatgtttccgaggcgtcgaacgacaccgatgagaatggaatcacctcaaccttcacggtt

SEQ ID NO: 201866 - DNA, 469 bp, Unknown
  Bacterial polypeptide expressing nucleotide sequence isolated from the Sargasso Sea
tatgaatagaaaaattatcattggatctagaggcagtaagctggctatgctttatgcccaaaaagccaaagatcaaattgtcaaaagtactgatttaagtgatgaagatgttgtaataaaaaaaataacaacaaaaggagacgagattaaggatataagattgtcagaagttggtggtaaaggattattttcaagcaatattgaaaaagaacttcaagataacaatatcgatattgcagttcacgcacttaaagatatgccagcttttgaaactcaaggtcttaaaacagatgtattcttagaaagaaatgatccaagagaaattcttatcacaaaggataaacaaaaattaaatgaattaaaaaaaaactctataattggaacctcatcttttagaagagaatatcaaattaaaaaaatcagatcagatcttgaatgtaaacttattagagggaatgttgatacacgt

SEQ ID NO: 201867 - DNA, 664 bp, Unknown
  Bacterial polypeptide expressing nucleotide sequence isolated from the Sargasso Sea
aatggaatcagcagaagaacaacagcttgatgaagtacctgcaaccgaggcaggaatagaagagtcgggattcgcagagaaaaagaaaattggaattggcttctggattgcggctttctggctagccctaatcacgttcttggctgtatttgccccagtcctaccattcaaggaaccgaaccagaatttcattgcctttgaacagaaagaaaacccagtcacggggaaaattcaggataggccggtgcagccaccgtattcccctagtggggagcattggcttggaaccgaccaagatgctcgagatatcttaagccgatccatttacggcgctagggtatctttagcagtcggagctttgactgccctctttggaatcatagtaggaggcgctttgggaatgatcgccggctacttcaagggaattttagacaaaatcatttctgctattttcttagtgagcctaagcttccctgggctaattttagcgattctcgtagtcgcattagtcgatcgatcactgatcactatttctataacaattggaattcttgctgtggcccctattggtcgccttgcacgcgctcaaacacttagttttgccgagcgcgaatttgttcttgcagctgaaacgctcggagctaaaaaatcaaggatccttgtc

SEQ ID NO: 201868 - DNA, 520 bp, Unknown
  Bacterial polypeptide expressing nucleotide sequence isolated from the Sargasso Sea
gtaaataaaggagaaattttagggttagttggagagtctgggtcaggaaaaagtacagtaggaaatgctattataaatttaatagacgaacctggtaaagtttctagtggatcagttattttaggcgatcttaacattcatgaaaattctgaaagtgttattaaatttaggggaaataagattggattgatatttcaagatcctcaaacttcgcttaacccaattctcactgtgggtgaacagttgattgaaacaattcaaactcatcttaaattaagcaaagaagaagcaaaaaataaatctataaatttattaaaagaggttggtataaaagatgcagaaaaaagatttgaaaattatcctcaccaattttcgggtggaatgagacaaagagttgtaatttctttagcattatgttgtgaaccagagttgttgattgcagatgagccaacaacagcattagatgtatcaatacagtcacagattttagaacttattaaaaaattaacaaaagaaagaa

SEQ ID NO: 201869 - DNA, 838 bp, Unknown
  Bacterial polypeptide expressing nucleotide sequence isolated from the Sargasso Sea
taatcaaactctcctaccaataagttctttcattcttaataagtttaaattaaataaggaaataaaatgtgacaaaattgaggggctcgaacatctagacaaagtaataaacatagatcaatcccctattggaaggaccccaaggtcaaatccggcaacctatacaggattattttcttatattagagaacttttatccaaaacagttgaagcaagagcaaggggatataagccaggaagatttagttttaatgtgaaaggaggaagatgtgaagcttgtcaaggtgatggaatgataaaagtagaaatgcattttcttgctgatgtatacgttaaatgtgatgtatgtaatggctctagatataatgaacaaacattagagattaaatacaaagataaaaatatcagtgacattcttaatatgacagttgaagaaggattggaattttttagcgctcatccacctatttataaaaaattaattactttgagtgatgtcggtttgggttatattacacttggtcaatctgcaacaacactttctggtggtgaagcacaaagaattaaactatcaaaagaattatcaaaaagaagcactggtaaaactctatttattcttgatgagcctactacaggtcttcattttgcagacattgaattgttattaaatgttttaaagagattaaaaaaacaaggaaatacagtagtagttattgaacacaatcttgatgtgattaagacagctgattggattgttgacttaggaccagaaggaggtgccgatggaggaaaaatagtatctaatggaactccggagcatgttgccaagaagaagagt

SEQ ID NO: 201870 - DNA, 798 bp, Unknown
  Bacterial polypeptide expressing nucleotide sequence isolated from the Sargasso Sea
ggagttgaaaaatattttgatgaatacaagattataccagatgacaccagatcaatttctgatggagccataaaaccatgggaaactaaagtatttggttatcaaaaaaaatattttgtggaaacaatagataaaattttaaaacaatttaaaataaaaaaaaatgttccatggagtgaaattccaaaaaaggtaaaaaatataattctttatggggatgaaaatagtgagctgaattttttatatgattttgaaggaataattaattttatcgatcgaaaatatgaggaaactgagagatggtggcttcaatacgaattagaaaaatatttatcagagagagattgtgaagtttgcaatggttaccggcttaatgagaaagctttagccgtaagaattgatgaaaatcatatcggtaatattactaaaaaatcgattagtgaatgtttgaactggttttcatcacttgaaaataaacttgataaaaataataaaaaaattgctgaaggggtaattaaagaaattaaagatagattagtttttttaaacagagttggtctagattatttatcattagcaagagctagtaaaactttatccggtggggaaagtcaaagaattagattggcaagtcaaattggttcaggtttaacaggagttttatatgttttggatgaaccttctattgggttacatcaaaaagataatcaacaactaattgaaactttatttcgattaagagatttaggaaatacagtaattgttgttgagcatgatgaggatgcaataagacaatca

SEQ ID NO: 201871 - DNA, 824 bp, Unknown
  Bacterial polypeptide expressing nucleotide sequence isolated from the Sargasso Sea
tccatcatcttctcagactttagttcaaaatcaatttcaagaattgttcaagtcattacttgatgattcagatattagttataaggatattataactttctctacatcaagaagagttacaatatgtgttacaaatttatctaaatctactaaaacaaaaacaattgaaattagaggtccgcaaattaacgctaatgagaaagcaataaaaggttttttaaaatcaaataaccttaataatattgagttattaagtaaaaaagagataaacaaaaaagtctattattttcataaaaagagcagtgaagcgaagagagttgttgatttacttaaatttgaagttccaaagatactgagatcaattaaatggaataaatccatgaggtggggtgaacacagtgatagatggattagacctataaaaaatatattatgtatatttgacaagaaggtagttaaatttgaatttgcaggacatatttcaaatcaatttacatatggaaattatcattattccgagaaaaagatcaaatgcctagactatataaattacaaaaaaaaattaaatgaaaattatgtaattcttgagagatctttaagacaaaatgcgattttaaataaaataaagagtttttgtaaaaaaaataagcttagccacttcgttagtcaatctcttttaaaaagaacttcagatttagtagaattcccaactgttttttttgggaaatttagttcagattttttcaaacttccagaatttttgctaattaatataatgactgataaacaggactactttttttttaaagatcagaaaaacaaac

SEQ ID NO: 201872 - DNA, 569 bp, Unknown
  Bacterial polypeptide expressing nucleotide sequence isolated from the Sargasso Sea
aatgaaaagcaaaaaaaaaattattggttctagaggtagtaaattagctcttatttatgctgaaagagcaaggacaaaattattagaattttgttcaaatgttgagataaaaaaaattacaaccacaggagataaaaatcaaaaagatagattgtctgaaatagggggtaaagggttattttcaaaacaaattgaaaatgatttattagacaaaaaaattgatattgctgtgcatgcgctaaaagatatgccatcaaaagaaacaagtggattattaacaaactgttttcttgagagaaacgatccaagagaagctttaattagtttaaataataatcttattaaagatcttaagccaaattcaacaataggcacatcatcttatagaagagaatttcaattaaaaaaaattagaagtgatataaattataaattaataaggggaaatgtagatacaagattaactaaattaaatgaaaaattatatgatgcaattattttatcttatgcaggtattaaatctttaaaattagatcaaaaagtatctcaaatattttcaacaaaagaaa

SEQ ID NO: 201873 - DNA, 580 bp, Unknown
  Bacterial polypeptide expressing nucleotide sequence isolated from the Sargasso Sea
atggaaatgtttgatgcactttatcatgaaaaaaatataaaatttattggagttcgtgatgaaagaactggaacacacatggcagatggatatgcaagagcatgtaatcaaccaggtctaatacttgccggacaaaatggtcctggtgctacaaatttagtgactgggcttgcacaggcgaaagcagctttttctccagttgtttcaattgcagggtcatattctacaaaggatagaatggaagatgcttttcagggccttgaccaacaatctttgtttaaaccggtaacaaaaaaaacttggacagtaaaaaatactaaaaaaattccaaaaacttttagtgatgcttttaaattagcgatgtcacccagaagaggacctgtatgtattaatttaccaagaaatattttgtcaaacaaaggaatttttaaaatcaatgaaaaaagtcaatcttttgataatcaaaactcaactaaatcaaaatctaattatataaaaaaagcagtaaaaattataaatagttcaaacaagactgttattattgcaggtggtggaattaaatatacatcaataatataaa

SEQ ID NO: 201874 - DNA, 472 bp, Unknown
  Bacterial polypeptide expressing nucleotide sequence isolated from the Sargasso Sea
atgggaattagattaatcataatgggcccacctggggtgggaaaaggaactcaagcaaagatcattaaagagatatatagtattcctcatctttcaacaggtgaaattctacgaaatgaaataaaacttgaatctgaggttggaataatagcaaagaattttatagatgacggactatttgtcgcagatgaaattttgattaaaataattgaaaataatatttcaaatcctatttgtaataatggatacatattagatggctacccaagaaatattgaacaagtaagaaaccttaataaaataataactaaaatgaatcatactatagattatgctattaatctaatcgcagatgagggtgaattagttaaaaggcttataaaacgaagtcaagattcaggaaggcgtgatgatacagttgaaataataaccaaacgtcaaaaaatatatgggagcaaacagctcctataat

SEQ ID NO: 201875 - DNA, 765 bp, Unknown
  Bacterial polypeptide expressing nucleotide sequence isolated from the Sargasso Sea
aagccaagtgaaatggatgtatatgtcccagcaggagtcattaagaaatacagaatacgtaaaggtgattctgttgaaggaccaattagagcaccaagggcaaaagagaaataccctgcattagttgaacctacaactgtcaatggcggagatccagaattattagctagaagagtagagtttgataagttaactcctttatttccagatgagagattaaaacttgaaattgatggagagccagacaaaattgtgggaagaatcgtagacctaattgctccaattggaaaaggtcagagaggtttaattgtctcacctccaaaagctggtaaaactacaattttaaaagaacttgcgaactctattactgctaataatccagaagttcatttaatggttgtacttgttgacgaaagaccagaagaagttacagatatgcaacgttctgttgacggtgaagttgtcttctcaacatttgatagacctccagaagaacatacacaagtttcaaagctagcaattgaacgagcaaaaagattggtcgaagaaggtaaagatgttgttatcttattagattcgataacaagactagccagagcacataacttagctactccagctagtggaagaattttatctggtggtgttgattcaacagctcttactcctccaaaacaattctttggtgcagctagaaatattgaaggtggaggaagcttaacaatccttggtactgcattagttgaaacaggatcaaagatggac

SEQ ID NO: 201876 - DNA, 850 bp, Unknown
  Bacterial polypeptide expressing nucleotide sequence isolated from the Sargasso Sea
gatgatggccgctggtacaggtggacatgtctttccagcacttgcagttgcgaaacaacttcaacaagaaggttgccaagtctcatggttagcgacaccatcgggtatggaaaatcgcttactcaaagatcaaaatattccaatctatcaaattgatattcaaggtgtacgcggtaatggtttagtccgtaaactcagcgcaccttttaaaatattaaaagcgaccttaagcgctatgcgctacatgaaacagttgaaagttgatgcagttgcaggctttggtggttatgtcgcagggccaggtggtttagctgcacgtttacttggtattcctgtattaattcatgagcaaaatgcgattgcaggatttaccaacacccaattggctcgtattgccaaaaccgtgtgtcaggcatttccaaatactttcccaaacagtgataaagtcgtcaccacaggcaatcctgtacgtgcggaaattagttcgattttgaatccttcttggcgttatcaaacccgagagcaggagcatcaaccgattagcatcttgattgtgggagggtcattgggggcacaagcgttgaatgagcgcttacccgcagcattgaaaaaaataaatgcgcctctcaatgtattccatcaatgtggtcagaaccaacaggatgtcacgcttgagcgttatcaagatgcgccagcgacattaaaagttgatgttcagccattcattcatgatatggcaaaggcgtatagtgaagcagatttgattatctgtcgtgcgggtgcgctaaccgtcacagaggttgcgacagcaggggttgctgctgtttttgttccctaccgatcgctgtag

SEQ ID NO: 201877 - DNA, 854 bp, Unknown
  Bacterial polypeptide expressing nucleotide sequence isolated from the Sargasso Sea
gattgaacctagattatttagttttaatgcaccacagggtgcatgttctgagtgtgatggattaggagtcgaaaaatattttgatgaatataaaattgtacccgatgagactagatcaatttctgatggggcgattaaaccatgggaaactaaagtatttggttatcaaaaaaaatattttgttgaaacgatagataaaattttaaagcaatttaaagtaaaaaaaaatgttccatggagtcaaattccaaaaaaggtaaagaatattattctttatggagatgaaaatagcgaattaaattttttatatgattttgaaggaataataaactttattgatcgaaaatatgaggaaactgagagatggtggcttcagtatgaattagaaaaatatttatctgaaagagactgtgaagtttgtaatggttaccgtcttaatgagaaagctttagctgtaagaattgatgaaaatcatattggtaatattactaaaaaatcaattagtgagtgtttagactggttttcatcacttgaaagtaaacttgataaaaataataaaaaaattgctgagggagtaattaaagaaataaaagatagattagtttttttaaatagagttggtttagattatttatcattggcaagagctagtaaaactttatctggaggtgaaagtcaaagaattagattagcaagtcaaattggttctggattaacaggagttttgtatgttttagacgaaccttctattggtttacatcaaaaagataatcaacaactgattgaaactttatttagattaagagatttaggtaatacagtaatagttgttgaacatgatgaggatgcaatta

SEQ ID NO: 201878 - DNA, 596 bp, Unknown
  Bacterial polypeptide expressing nucleotide sequence isolated from the Sargasso Sea
aatgtcagataataattttaattttggcgaaaactggcaatcatatcttagtaagatagataatagaaatattagttttgcatctagtaatatagaagaagttcttggcaaagaattcgttaagaacaaatctttcatagacattgggtgtggttctggaatacattctttatctgcacttcttttaggagctaaatttgtaaaaagttttgatatcgatactaaaaatattgaaaatactaagaacctaataaagaatttttggaaagatcataattatgaagttgagcaaggaaatattttaaatcaatctgggcaagatgaaaaatttgatattatttattcttggggcgtacttcatcatacaggtaatctagaattagctattaaaaattctcttaaatattgtaagaatggttcagtaatttttttagctctgtatgagaaaacatattattgcgagatttggaaaaaaataaaaaaattttacaattcatcaaatttctttattaagcaaatgatcttatatttttacatttttttgaagataattggtttgattgctattttgagaaacccttataaacacataaaaa

SEQ ID NO: 201879 - DNA, 709 bp, Unknown
  Bacterial polypeptide expressing nucleotide sequence isolated from the Sargasso Sea
tatgagaaaaaaaataataattggatctaggggtagtaagcttgccttactttatgctcaacaagctaaagataagattattgaaaataccgaccttggaaatgaagatattttaattaaatcatttataactaaaggtgatgaagtacaggatataagattatctgagcttggtggcaaaggtttgttttctagtaatattgaaaaagaacttcagttaaaaaatattgatattgcagtccatgcactgaaagatatgcccgcttatgagacagaaggattaaggacagattcttttctcaaaagaaatgaccctagagagattttaattacaaaaaacaaaaaaaaacttaaagacttagatcaaaagtcaattgttggtacttcgtcatacagaagagaatttcaaataaaaaaaattagacaagatttgaactgtaaactaattagaggaaatgtagatactagaattagaaaattgaatgaagggatgtatgatgcaattattttgtcttatgctggtatcaaatttttaaaatttgaaaatgaaatctcagaaattttttcagctgaagaaataattcctagtgcaggacaaggtgttattgctcttcagtgtagggagaatgatgatgagacaatttctattttaaataaaattaatcatgaggaaacacataaaagagctcacctgagagaaatatttaaa

SEQ ID NO: 201880 - DNA, 424 bp, Unknown
  Bacterial polypeptide expressing nucleotide sequence isolated from the Sargasso Sea
tatgacaattgttttaaaaaataaagaaactctttattttaatgaatttaaatttaaatgttgtgctggaaaaaatggttttacaaaaaataaaactgagggagataagaaaacacctaaaggaacttattccttaggaaatttatattacagaagaaatagaaatactaagccttttacaaaactaagatgtataccaattagaaaagaaatgggctggtgcaatgatgtaagaagtggaaaatattacaacaagttaattagaacttataaaaatgtaagatacgaaaaattgcatagaattgattataaatacgattattttataccaataaattataatacaaaaaaaacaatttctgggaaaggaagtgcaatatttatccatttaactaaaaactataaacctactgctggatgcata

SEQ ID NO: 201881 - DNA, 652 bp, Unknown
  Bacterial polypeptide expressing nucleotide sequence isolated from the Sargasso Sea
atgagcgtcgtcacctacttcgtcgaaacctcgcaaggctacctggattccgcagccgagacccagtttggcgcggtggcagcaacggtgggcactatgctcgttctcgggacgacgcttgtggtcattctggtctgtgtgaacatgatctaccagtaccgtgccatggacgggcgcactgctttctggctcgcggtgaaggtcggcctcataggggtgttcgcgacaaattgggtgcagttcaacgccttctcttccgccgtgctgaacggaatcgacagcatcgccggatcgcttgtcgcctcggtcggcggcggcacgcccggaccgtcggggaccttcgccgaggaattcgaccggctgatcgccgagcttggcgaatacctgaacgctgctggctcagaactgaactggatggctggtgcattgcttgacgttcttggcgtgctacttctctcgatccttggcgggctcgcggcgtttattctcgtggcatcccggctgatgatcgcgctcctgatcgggatcgcgccggtcatgatcttcctcaccctcttcgaggtgaccaaggactatttcgcccgctggctttcggcgctggtgtccttcgcgctttatccgattgttgtcgccggtgtcttcgcaacgatca

SEQ ID NO: 201882 - DNA, 646 bp, Unknown
  Bacterial polypeptide expressing nucleotide sequence isolated from the Sargasso Sea
atgacagcaattattctagctgcaggaaagggggagaggttgaaaccactcaccacccagatcccaaaacctttgataacagttgcggggaaaactttgcttcagagaaacattgattgcctggatcaatcgggaataaaaaagattattgtcaatggttcaaggatgggggatcaaattgaatcattcctcgaaaatcataatcaatcaaatataagttttgattatattaatgagggtgaggagccacttgggactgctggtgcaattttcaatatcattgataaaggtttgataaatgacgatcatttctgggtgatcaatgcagatatcatgacaaacttttcttttagtgctattcaattgaattctagtttgatgggccatatcatattggtgccaaatcctgagcataacttatcgggtgatttctgtttagaaggagatagagttaccatttctggtaatcagcgatatactttcagtgggatcagttatttttcaatccagtgcttcattcaatcaacacagagatattttacactcgcagatctgttaagagagcatatcgaaaaagaaatgattacgggccagttatttcatggcgattggttggatgtaggaactgcagataggttagctgagg

SEQ ID NO: 201883 - DNA, 715 bp, Unknown
  Bacterial polypeptide expressing nucleotide sequence isolated from the Sargasso Sea
agaacaacaaaacctcatacaagataatgatggactcttatccattaatgcagaaaaagaggttacgcatcagggtgcaattcaaacattaaatgatgacttgctacccgccatgaaaattgttggtgacaaatttggtgcaggagaactaatccttccatttgtcttaaaatctgctgaatgtatgaaggctgcagtaaaagaactggaaaaatatcttttaaaagaagagggcacaagtaaaggaacactagttttgggtactgtttatggcgatgttcatgatattggaaaaaatcttgtcaaaacaatctttgaaaataatggttacactgtacatgatttaggtaaacaagtaccgctacagaaatttgttgaaaaaatcaatgaggtcaaacctgatgctgtaggtctttctgctctactagtatcaacttcaaaacagatgcaattttttgttgaacatgcaagaaaaacagatgttaatgttccaatattgtgtggcggtgctgcaatcaacaccaattacattaatcgaattgcaaaacaagatggaatctatgaacctgggatgttctattgtggtacgatgtttgatggtctaaaaacaatggataagctagtctctgatgaaaaagatgaatttgtgaataactggaaagaaaaattatcaaattggaaggaaacctctacctcgaatgtctctaacgaagaa

SEQ ID NO: 201884 - DNA, 799 bp, Unknown
  Bacterial polypeptide expressing nucleotide sequence isolated from the Sargasso Sea
ggcaaagaattgagttataacaatattaatgatgctgacgcagcattacaattaataaaagaatttgataaagacactcccagtgttgcaattattaaacatgcaaatccttgtggtgttgctagtggaacttcactttgtgaagcgtatatgaaagcattttcatgtgatacgaccagtgcatttgggggtatcattgcacttaaccaaacaatcgataaagagacagcctctgaaattataaaaatatttactgaggtaattatagcaccagatattagtgatgaagcaatagaaatatttaaatcaaaaaataatttgcgagttttaactgtgtcgtctttgaagaaaaaaaataatacgcataactacaaaagtattgaaggagggatcctggttcagtcaaatgatgaagctaatacgacaaaatcagatctgaaagtagttacagcaaaaaaaccaagtgatgatgaaattgatgatatgttgttcgcatttaaagtttgcaaacatgtaaaatcaaatgcaatcatttatgtcaaaaataaaaaaacaattggtatcggtgcaggacaaatgagtagagtagatagtgctaaaattgcctcacaaaaaaatagtgaaatggaaaaatctgatgaaaactctctcgaaaattcagtggtcgcatctgatgcattctttccattcgcagatggcctgctagttacaatttcttctggagccaaggcggtaattcaacccggtgggtcagtaaaagatgacgaagtaatcactgctgcaaatgaagctggtatat

SEQ ID NO: 201885 - DNA, 550 bp, Unknown
  Bacterial polypeptide expressing nucleotide sequence isolated from the Sargasso Sea
atgaaaaagaaaataaaaattggatctcgaggaagtaaactagcattgttatatgctcaaaaagtaaaagagaaaattattgagataactgattttattgatcaggatataaatattgaaaaaatttctactaaaggtgatgagctacaagatacaagattatctgatgttggtggcaaagggttgttttcaagtagcattgaacaggaacttcaaaacaataatattgatatcgccgttcacgcgcttaaagatatgccagcaattgagaccaagggtcttttaacagatacatttcttgaaagaaccgatgcaagagaaattataataattaatgggaagaaaaaatttaaagacttaaaacaaaatgctgttattggaacatcttcttatagacgtcaatttcaaattaaaaaaattagaccagatgtttcctgtaaacttataagagggaacgttgatactagaataaaaaaattaatggatggtgaatacgatgcaataattttatcttatgctggagtaaaatatttaaaattagaagataaaa

SEQ ID NO: 201886 - DNA, 897 bp, Unknown
  Bacterial polypeptide expressing nucleotide sequence isolated from the Sargasso Sea
tttatattggtactcgaggaagtcagttagctcaaatttatactgaaaaagtgataaaccatcttaaaaaagtttcatcgacccacatagaaacaaaaaaaatagtcacaagtggagatgaaaatcaaaaggataggttgtcaaacattggaggaaaaggattattttctaaaaaaattgaaatagaattaattaataataatattgatatagctgttcatgctttaaaagatatgccatcggttgaaacagagggactaattacaaatttttatttaaaaagaaattcgcccaatgaaatttttattagcaatgacaatataaattttatagatcttaaacctaattcgataataggcacttcttcttacagaagggaataccaattaaaaagtatcagatcagatttagattataaattaataagaggaaatgtggatactaggataaagaaattagagaatggagattttgatgcaattttactttctaaagctggcattgaagctttaggtttaacaaataaaattacacatgaatttaatactgaggaattaataccatgtgctggacaaggtatcattgctatacaatgtagagaaaacgatcaagaaataataaatattctagaaaaaattaatgatgatcagtcgagaataattgcaaatgctgaaagaaaaatcttaaaaatactcgaaggtgattgtgatacagcagtaggtgtgtatgcaaagattgataaagatattgtaaatataaaagcagaactcttttcagtagatggtaaacaaagattttttgttgaagaaagtgaaaataaaaaaatggttaaagatttaagtattaagattggagaaaaattaaaatcagagtcaaagggatcttataaaaggtaaa

SEQ ID NO: 201887 - DNA, 361 bp, Unknown
  Bacterial polypeptide expressing nucleotide sequence isolated from the Sargasso Sea
atgagagatttgatattcgcattcaaggttgtaaagcatgtaaaatctaacgctattgtttatgtaagaaatatgaagacaattggcataggagcaggtcaaacgagtcgcgtcgattcatcaaaaattgcaatacagaaattttatgagaatattaatgacaaaaaacaaagaactggatgtgtcattgcatctgatgcattttttccattttctgatggattagatgaagccatcaaatttggtgcagtcgccgtaatccaacctggcggttcgattcgagataaagaggttatcgaaacggcgaataatgctggtctgtcaatggtttttactggttacagacatttcaagcactaac

SEQ ID NO: 201888 - DNA, 827 bp, Unknown
  Bacterial polypeptide expressing nucleotide sequence isolated from the Sargasso Sea
tatgaaaaaaaaaattactataggaacaagaggaagtaaattggctttgatttacgccagaattgcagaaaagaatattaataaatttaaatcaagatttgcaataaaatctgtgaatattaaaaaagtaactacaaaaggagataagatccaaagtaaaagactttctgatattggaggaaagggattattcaccaaaaaaattgaaaatgaacttttaaatagaaaaattgatatcgcggttcatgcattaaaagatataccatcaagggagaataaaaaattattcacaaattgtttccttaaaagaaacgatccaagagaggttttgataactagaaaaaacaaaaaatttaaaagtcttccaaaaaattcgatagtaggcacctcatcctttagaagagaatttcagcttaagagaatgcgaaaagatttaatttacaaattgataagaggcaatgttgatacaagaattaaaaaattaaaaaataaattttatgatgcaataattttatcatacgcaggtttgaaaagtttaaaaatgcaaaacaatatttctcaagttttttctttatcagaaataattcctagtgcgggccagggtacaatcgctttacaatgcagaaaagatgatcttggaataatacaattacttgaggctataaatcatactccaactaatatatgtgtaaatgctgaaagagatgttcttaaagttttagatggagattgtgaaactcccgttggagtaaatgcaaaaattcaaaataataaattaaatatagttacagaattattttctttagatggcaagaaaagttctacct

SEQ ID NO: 201889 - DNA, 450 bp, Unknown
  Bacterial polypeptide expressing nucleotide sequence isolated from the Sargasso Sea
tatgaaacacaccaccgaagtgatgatctccgcggaagagatcagccaaaaattggatcaaatggccgagcaaatcaatgcccactatgccaacagcgagcgtttgctgatggtgggattattaaaaggttcagtcgtatttatggctgatctgtgccgccgtattaaaggccatgttgaaatcgattttatgtcggtttcgagctatggcaatgccatgaccagctcacgggatgtgaaagtgctgaaggatgtgcaatcggatatcgcgggccgcgacgtgctgattgtggaagacttaattgactcgggcaacactttaaacaaagtgcgcgaaatgctgttattgcgtgagccaaagagcttagccctgtgcactctattggataaacctgagcgccgcgaagtggatgttaaagtcgactttatcggttttacgatcccagacga

SEQ ID NO: 201890 - DNA, 405 bp, Unknown
  Bacterial polypeptide expressing nucleotide sequence isolated from the Sargasso Sea
aatgtgcggatatatattaagcacaattaaggataaacataaatttcttgctttaaaaaaagatattttacatagaggaccagatagtcaatcatttaaaaaaacgagcgattgcctaatgtaccattcaagattaaaaattttagatttaacttctaaatcaaaccaaccttttaccgacaataaaaaaaaatattatcttctatttaatggcgaaatttataattatattgaactgaaagaaaaatttaaaattaagaataatacaacttcagatacagaaattcttttcctattattaaaagattttggcataaagaaaactttaagagaaattaaaggcatgttttcttttactttttacgatttaaaaaaaagaaaaattttttgtgcccgagatcattt

SEQ ID NO: 201891 - DNA, 385 bp, Unknown
  Bacterial polypeptide expressing nucleotide sequence isolated from the Sargasso Sea
cttgaccggtggtcaagcggcagtgaaatccctaaaaaaggaaaaagttaaacacgtctttggtttaattggttctgctacaatggaaatgtttgatgcgttgtatcatgaaaaaaaaattaaatttataggtgtaagagatgaaagaacaggaacacacatggccgatggctatgcaagagcttccaatcaaccaggagtaattattgcaggacaaaacggtccaggagctactaatctagttacaggaattgctcaagcaaaagcagcattttcgcctgttgtatctattgccggtttatattctaccaaggataaaatggaagatgcatttcaagggcttgaccaacagtcactttttaatccaataacaaaaaaaaaactt

SEQ ID NO: 201892 - DNA, 490 bp, Unknown
  Bacterial polypeptide expressing nucleotide sequence isolated from the Sargasso Sea
ctggattataaattaataagaggaaatgtggatactaggataaagaaattagagaatggagattatgatgcaattttactttctaaagctggcattgaagctttaggtttgacaaataaaattacacatgaatttactactgaagaattaataccgtgcgctggacaaggaatcattgccatacaatgtagagaaaacgatcaagaaataattaatatcttggaaaaaattaatgatgatcaatcgagaataattgcaaatgctgaaagaaatatcttaaaaatactcgagggtgactgcgatacagcagttggtgtgtatgcaaaaattcataaagatcttgtaaacataaaagctgaactcttttcagtagacggcaaacaaagattttttgttgaagaaagtgaaaataaaacaatggttaaagatttaagtattaagattggagaaaaattaaaatcagagtcaaagggatcttacaaaaggtaaa

SEQ ID NO: 201893 - DNA, 889 bp, Unknown
  Bacterial polypeptide expressing nucleotide sequence isolated from the Sargasso Sea
tcatcaaaatttgcatgtcctgtatctggatttagtattgaagaaattgaacctagattgtttagttttaatgctccacagggtgcttgctctgaatgcgatggactaggagttgcaaaattttttgatgaacacaagattgtacctgatgaaactagatctatttctgatggagctattaaaccatgggaaacgaaagtatttggttaccaaaaaaaatattttgttgaaacaatagataaaattttaaaacaatttaaggtaaagaaaaatgctccatggagcgaaattccaaaaaaagttaaaaatataattctttatggagatgagaatagtgaactaaattttttatatgattttgagggaataattaactttattgatagaaaatatgaggagactgagagatggtggcttcagtatgaattagaaaaatatttatctgaaagagattgtgaagtttgtaatggttaccgtcttaatgagaaagcattagctgtaagaattgatgaaaatcatattggtaatattactaaaaaatcaattagtgagtgtttagactggttttcatcgcttgaaagtaaacttgataaaaataataaaaaaattgctgagggaataattaaagaaataaaagatagattagtttttttaaatagagttggtttagattatttatcattggcaagagctagtaaaactttatctggaggtgaaagccaaagaattagattagcaagtcaaattggttctggattaacaggagttttgtatgttttagacgaaccttctattgggttacatcaaaaagataatcaacaactaattgaaactttatttaggttaagagatttaggaaatacagtaattgtgttgagcatgatgagga

SEQ ID NO: 201894 - DNA, 565 bp, Unknown
  Bacterial polypeptide expressing nucleotide sequence isolated from the Sargasso Sea
ttaattgcacctgatttttctgaagacgcgctcaatatcttaaaagagaaaaagaatattagggtcatatcaaaaaagaaatctaaaaaaacaccaatgccattttcaatccaagcaatagatggtggattcttggtccaagaggatgattggaaaattatagataaagataatttagaatatgtgacagataaaaagccaacaaatgatcaaatcatagatctgattttcgcttggaaagtctgtaaatatgtaaagtcaaacgcaattatttttgctaaaaatcaacagaccattggcataggtgctgggcaaatgagtagagtcaatagtgccaaaattgcaagcttaaaagcagcaaccgctaatctagatacaaaagactctgtgatggcatctgatggtttctttccatttagtgacagcattgaaatggcttctgataatgggatttcatgcatcatacagccaggtggttcaatcaaagatgatgaagtgatagaggaagcaaataaaaataatattgctatggtcatgactcgtatgaggcattttaggcattaat

SEQ ID NO: 201895 - DNA, 397 bp, Unknown
  Bacterial polypeptide expressing nucleotide sequence isolated from the Sargasso Sea
agaaagttttgtcagccagcttgccacagcagagttcgtacagttttgccagccagcttgctatagcagagcttgtcagaagcagttttgccagcaagcttgccgcagcagagttcgtgagaaacagtttggccagccagcttgccgcagcggagtttctgagaaacagttttgccagccagcttgccgcagcagagttcgtgagaaacagttttaccagccagcttgccgcagcggagtttgtgagaaacaggtttgccagccagcttgcctcagcagagttcgtgataaacatttttgccagccagcttgccgcagcagagtttgtgacaaacagttttgccagccagtttgtcgcagcagagttcatgataaacaggtttttccagccagttga

SEQ ID NO: 201896 - DNA, 583 bp, Unknown
  Bacterial polypeptide expressing nucleotide sequence isolated from the Sargasso Sea
ccaaagtggaagaacagagttgtcattcgaagctcaaacaatatgtacaatcaatctctggtagcatcacttatatctaatcttggtgaatctcaaaccgaatcatgggctaaaggattaataaataattttgctagaaaaccgcaaggcaatgatagatcacaaataatagcggtggcgaacggtgaggctgatttagcagtagcaaatagttattacataggtattatgctctccggatctgcaggtaaagaacaattggaagcagcacaaaaagtaagaatgctatttcctaaccaaactaatagaggtgttcatatcaatattagtggcgcaggtatcttgaaacattcacctaatgtagaaaatgctaacctttttcttggatttcttttatcggagagagttcagaagtatatggtagataagtcttatgaataccctattttagagggcatattgccaagcaaggaaattgccagttttggtttaaattttcttgaagaccaaacatcagtgagacaattcggtgagttaaatcctgccgcagttcgattgatggatagggctggttggaaatagt

SEQ ID NO: 201897 - DNA, 559 bp, Unknown
  Bacterial polypeptide expressing nucleotide sequence isolated from the Sargasso Sea
atgaattcagtaaatattattcgtgctgcagaaattttatttaagcataaattaaataaaacaggtttaatagatttagaaaataagtttaaaccattaaacatagaagatgcatataaaattcaagaagaattaaaagttttatacttgggtttaaaaaataatgaaagtcttggaaaaaaaataggggtaacaaataaagatgctgctaaacaagttggtataaatgagccattttatggtaatttatttactaaattttctgatattaatgttaattatttaaattcaaaaaacttttataaaccatatattgaaccagaaataggttttagaataaaaaatgatataaatattaataaagcaccatttaaaaaaaaagatattaatgaattaattgatggggttgtctgtgccattgaaatagttgattttagatttaataaaccaataaatgaaattggagcttttaatttaatagctactaatggtgcttctgattactggttaagaaataaaaaaatttatcctttggataaagttaatcttgataatcatc

SEQ ID NO: 201898 - DNA, 715 bp, Unknown
  Bacterial polypeptide expressing nucleotide sequence isolated from the Sargasso Sea
ttgacgacgaagggcggattctatgtttccgaggcgtcgaacgacaccgatgagaatggaatcacctcaaccttcacggttcgtctctcctcgcagcccggggataatgacacctcgacggcagacaatgtgacgatcaccgtctcggtctcggattcgaccgaggcggagcttgtgagcgattcgtcgctggtgtttaccgagagcaactggaatgcggctcagacggtgacggtccggggtatcgcagacaatctgagtgatggagatcagtcgtacacggtgatcctcaaagacaatgtgaccagcgatgcacgctaccgctatgtggatccaccggatgtctcgttgaagaacctggacttgacgacgaagggcggattctatgtttccgaggcgtcgaacgacaccgatgagaatggaatcacctcaaccttcacggttcgtctctcctcgcagcccggggataatgacacctcgacggcagacaatgtgacgatcaccgtctcggtctcggattcgaccgaggcggagcttgtgagcgattcgtcgctggtgtttaccgagagcaactggaatgcggctcagacggtgacggtccggggtatcgcagacaatctgagtgatggagatcagtcgtacacggtgatcctcaaagacaatgtgaccagcgatgcacgctaccgctatgggatccaccggatgtctcgttgaa

SEQ ID NO: 201899 - DNA, 781 bp, Unknown
  Bacterial polypeptide expressing nucleotide sequence isolated from the Sargasso Sea
tatgaaaagagctaatcttgtaattgggacacgtggaagtaagttagcaatgatttacgcagaaaatgtgaaaaaagaactaaaaaagtatttttctaaagagattgaattaaaaaaaatagtaacaacaggagatcaaaagcaagatgagagattatctgaaataggaggcaaaggattattttcaaaacaaattgaaaaagatttattgaataaaaatatagatatagcagtacatgccttcaaagatatgcctactgaagaaactgaaaatcttttaactaataattttttaaaaagaaattctcctaatgaaattttaataagtaaaaataatataaaatttgaagatttagagccaaactcaattattggcacatcatcatatagacgagaatatcaacttaagaaaaaaagacccaacttaaattataaacttatcagaggaaatgttgatactagagtacaaaagttagaaaaaggcgaatatgatgcaataattctctcaaaagcaggagtggatgctttaaatttacaacataaaatttcacaggaattcagtgttgatgaacttataccttgtgcgggccaaggaattatagcaattcaatgcagagaagatgataatgaaattaaaaaattacttgaaaacattaatgatcaagaaacaagaattgtcgcaaaagcagaaagagaggtattaaaagttcttgaaggagattgtgacactgcagtcggtgtatttgcaaaatcaaatggtaaaaaagtagatctattgacc

SEQ ID NO: 201900 - DNA, 715 bp, Unknown
  Bacterial polypeptide expressing nucleotide sequence isolated from the Sargasso Sea
catgtatctgggcctcgatctcggaacctctgcggtgaaagcgcttcttgttgatgcattcggaacggctgttgccagccagagcgtcccgttgcaggtgattcgtcggcaggccggctggtcggagcaggacccacacagctggtgggatgcaaccaacagggctgtccggtccttgggcgccaaatatcccgaagagatgcgaaagatcagcgggatcgggctgtcgggccagatgcatgggctgacggcacttgatgcaaatgatgccgtgctgcgccctgccattttgtggaatgacacacgctcggcactccaggccaagacactcgacacaggccatcccgcctttcgccggattggcggaaatgccgtgatgccgggatttaccgctccgaaagccgcatggatggccgagaacgagccggagctgttccaacgtctcggcaccgttctgctgccaaaggattatctgcggttgcagatgactggcgagaaagtctccgacatgtcggatgctgcggggacactctggctcgatgttgcgaggcgcgactggtcggatgtgcttctggacatttgcggtctcgaccgccacttgatgccccgccttgtcgaaggcagtgaagtttccggtcagctgcgcgccgaaatcgcacgcacatggggcattgacggcaggcctgttgttgcgggaggcggcggcgataacgcg

SEQ ID NO: 201901 - DNA, 892 bp, Unknown
  Bacterial polypeptide expressing nucleotide sequence isolated from the Sargasso Sea
gtccctcaagctagacgcgtattaaattcggtatttctatatcatgctgtacaaaatggtcttgacagtgcaattgttaatgcacgtgaaattactccatacaccgaaatcgatgaaaaagaaaagaaaattgttgaagatctaatattcaataaacatccaaatgcattatctgaattaatcactcattttgaaaacaaaactcaagattcttcaactaaaacaaaaaaagttgatgtggatccttcatgggctgctggaaaacgagcaaattttagaattatcaataggctcaaagatggaattgaaaatgatgtggtgtctgcaattgctgaaaaactagaccaacaaaacctcttacagaacaatgatggtattttatcaatcagtgcagaaaaagaggtaactcatcaaggtgcaattcaaacattaaatgatgatttactacctgccatgaaaattgttggtgacaagtttggtgcaggcgaattaattttaccatttgtcttaaaatctgctgaatgtatgaaggctgcagtaaaagaactggaaaaatacttactaaaagaagagggtacaagtaaaggaaagctagttttgggtacagtctatggtgatgtacatgatattggaaaaaatcttgtaaaaacaatttttgaaaataatggttacaccgtacacgatttgggcaaacaagtaccactgcaaaaatttgtcgaaaaaatcaacgaagtaaaacctgatgctgtaggcctttctgccttgttagtatcaacttcaaaacaaatgcaattctttgttgaacatgcaagaaaaacagatgttaatgttccaatactatgtggtggtgctgcaatcaacaccaattacattaatcgaattgcaaaacaag

SEQ ID NO: 201902 - DNA, 399 bp, Unknown
  Bacterial polypeptide expressing nucleotide sequence isolated from the Sargasso Sea
cttgaccggtggtcaagcggcagtgaaatccctaaaaaaggaaaaagttaaacacgtctttggtttaattggttctgctacaatggaaatgtttgatgcgttgtatcatgaaaaaaaaattaaatttataggtgtaagagatgaaagaacaggaacacacatggccgatggctatgcaagagcttccaatcaaccaggagtaattattgcaggacaaaacggtccaggagctactaatctagttacaggaattgctcaagcaaaagcagcattttcgcctgttatatctattgcgggcttatattctaccaaggataaaatggaagatgcatttcaaggacttgatcaacagtcactatttaatccaataaccaaaaagacttggactgtaaaaaaggc

SEQ ID NO: 201903 - DNA, 481 bp, Unknown
  Bacterial polypeptide expressing nucleotide sequence isolated from the Sargasso Sea
gctgactggtcgatcgaaaccgaagatccaaagccggtgccgatgccctgacggaaaccgaccacgggtcgcttctcgaggacagaacaaccatttggagcaggatatggaatacactcaactcggttccgcgggcgtgaaagtatcgcgtttatgtctgggcaccgcgttccggggacagaaggatgacgcggtgtgcgagaccgtgattcggaaggggatcgaccacggtgtgaacttcttcgattgtgccaatttctacggactcggacgttcggagcggtttcttggacgagccatcaagggacatcgcgacgatcttgtaatcacctcgaaagtctggagtcgtatcggtgagggtccgaacgacgcgggtctttcacgattcgcgatcattcgtgaatgtgagcgcagcctggttcgtctggacacggaccgcatcgacgtttatctgctacacaacgtcgatcacgagactccg

SEQ ID NO: 201904 - DNA, 493 bp, Unknown
  Bacterial polypeptide expressing nucleotide sequence isolated from the Sargasso Sea
atgaaatttttaatttccgcagctggaactggagggcacgtttttccagcattagagtttggcaaggaatgcattaaaaatgatcataatgtagtctggattggaacaaaaaatggcatagagaacagagttgttcctgaggaaataaagctattaactattcccatgagaggatttagaggaaagaatttttttttaaaaatcgtttccttattcggtttaatcgcttcaatttttaaaagcatttattacattcaaaaaaataatactgattacattgtatgctttggaggttatatttccttgccagtaggtttatcagcgtggatatgtagaaaacctctttttttgcatgagcaaaatgcaattatgggaacctcaaataaggcattaaaaaaattttcaaaattaatttttttaggattcccaattaatgagccagttacaaaaaaaatgaagctagttggaaatcccataaaaaaatataaataaa

SEQ ID NO: 201905 - DNA, 892 bp, Unknown
  Bacterial polypeptide expressing nucleotide sequence isolated from the Sargasso Sea
aaaattgtcattggatctagaggcagtaagctggctatgctttatgcccaaaaagccaaagatcaaattgtcaaaagtactgatttaagtgatgaagatgttgtaataaaaaaaataacaacaaaaggagacgagattaaggatataagattgtcagaagttggcgggaaaggattattttcaagcaatattgaaaaagaacttcaagataaaaatattgatattgcagttcatgctcttaaagatatgccagcttttgaaactcaaggtctcaaaacagatgtattcctagaaagaaacgatccaagagaaattcttatcacaaaggataaacaaaaattaaatgaattaaaaaaaaactctataattggaacctcatcttttagaagagaatatcaaattaaaaaaatcagatcagatcttgaatgtaaacttattagagggaatgttgatacacgaattaaaaaacttaaagatggaacctatgacgcaataatcttatcctatgcaggaattaaatttttgaattttgataatgaaatttcagaaatattttctcctgaaaaaataattccaagtgctggacaaggtataatttcacttcagtgtagagagggtgatgaggaaataatctcagttttaaaaaaaataaatcatgaagaaacatttatgagagcacatgttgagagaaatattttaaaagttttggaaggtgactgcgaaactgcagttggggctcactctgtaatagcaggtggtaaaattacagttgaggctgaattattttctttagatggcttaaaaagatattatgaaaaaaaaactggcaaagttgaagacttcagccaaattggtgaagaagtaggtcaaattttaaaaacaaaatctaata

SEQ ID NO: 201906 - DNA, 837 bp, Unknown
  Bacterial polypeptide expressing nucleotide sequence isolated from the Sargasso Sea
tacaactttaatatgtatgttcatggtaaaaaagtttttttagatactgaaaatactattacaatttataataaacttgcaaataaatttaaagatgtctccattttagagtcagtcattgggggtgataataaaggaagatactctattattctttttaatatattacaaaatgttgaaatttttcataactatgcgcttataaataatcaaaagaaaaaaattaaatcaccagactcttttataaaggacatttataaaaatttaaaaattaaaactatatatgatcagaatatacctctacccatatttattggtaatgtatcatttgatttgtgtaagtttacccttccaaaattaagttataagcctgataagaatgaaattggaataccactagctcattttgtaaaaccaagaaatcttataataatagataatgttcttaatgagacacatttaattgaagtttcaaatatcaagaaaaatccagtaaaatcacttaaaaaattagaaaaaatacttaaagaacctttttccaaaaataaaaaattaaatttcagtaaacctaaaaaatttaaaaaccatattaagaaagaggaattcattaaaagagttaaggaaataaaaagagatattaaagttggtgaaatatttcaagctgttctttctcaaagattttctaatgactatttaattgatccatttaatttttatagagcattaagatcaattaatccctcaccttatcttgtttttttaaacctaaaaaattatcaaattatctgctctagtcctgagactatgattaaagtaaaaaataaagaaattactctt

SEQ ID NO: 201907 - DNA, 502 bp, Unknown
  Bacterial polypeptide expressing nucleotide sequence isolated from the Sargasso Sea
ttaggtacacaagcagctatgtttcatactaagaccgacaacgttatagaagttgagcctgaaagagaggaacttggatttgttggaataccaaataaaataaatgataatttaattcaaaacgcattaaatgaggataaaattccagtcatagcgcctttaggtttaggaaagaatgaacaaacatataatattaacggtgatactgcagccagtgctgttgcaaaaaaacttaagtctagaagactgatattaatgacaaatgttgagggtgtgtatgatgatcagaaaaaattaattacagaaattaaaccttttgatcttgaaaatctcattaaagggaaagttgttcaaggaggtatgattccgaaaatagaaaattgtgtagatgctgtgcaaaatggagtgagaggtgtagtaattctagatggaagaaaaccccattcaattttacacgaaattttctcagataagggatcaggaacactgattagagaatgaa

SEQ ID NO: 201908 - DNA, 558 bp, Unknown
  Bacterial polypeptide expressing nucleotide sequence isolated from the Sargasso Sea
aatctaattcgactataggcacttcttcttacagaagggaataccaattaaaaagtattagatcagatctggattataaattaataagaggaaatgtggatactaggataaagaaattagagaatggagattatgatgcaattttactttctaaagctggcattgaagctttaggtttgacaaataaaattacacatgaatttaatactgaagaattaataccttgtgctggacaaggtattattgccatacaatgtagagaaaacgatcaagaaataattaatatactagaaaagattaatgatgatcagtccagaattattgcaaatgctgaaagaaaaatattaaaaatactcgaaggtgattgtgatacagcagtaggtgtgtatgcaaagattaataaagatattataaatataaaagcagaactcttttcagtagatggcaaacaaagattttttgttgaaaaaagtgaaaataaaaaaatggttaaagatttaagtattaagattggagaaaaattaaaatcagagtcaaagggatcttataaaaggtaaa

SEQ ID NO: 201909 - DNA, 841 bp, Unknown
  Bacterial polypeptide expressing nucleotide sequence isolated from the Sargasso Sea
tatatatgcgcaaaaagcaaaagataaaattatactaaatacaaactatcaggaagaagaaattatcattaaagcaataaagaccaagggagatgagattcaggatattaggttatcagaaactgggggcaaaggtttattcttaactaatatagaaaaagaactgaaagaaaaaaaaattgatatagcagttcatgcgttaaaagatatgcctattttagagacagctggacttagaacaaatacatttttagagcgaaatgatcctagagaaatattaataactaaaaataaaaaaaagctcaaagaattaaaaaacaattcaacaattggaacttcttcttaccgcagagaatttcagattaaaaaaattagaaatgatgttaattgtcaacttatcagaggcaatgttgatacaagaattaaaaaattaaatgatggattatacgatgcaataatcttatcttatgcaggtatgaaatctttaagattagatgataaaattacagagattttttcaactaaagaaattattccaagtgcgggacaaggaattatcgcgcttcaatgtcgtagtgatgataaagaagtaatttctattttagacaaggtaaatcatattgaaactcatcaaagagctcatgccgaaaggaatgttttaaagattttggaaggtgattgtgaaactgctgttggtgtatattctgtgattgaaggaaatgaattaacattagaggctgaacttttttctttagatggatcacaaagattttaccaaaaaaaaatatcaaaaatagagaatgcaaaagaacttggtaaagagttaggtgaaatattaaaa

SEQ ID NO: 201910 - DNA, 580 bp, Unknown
  Bacterial polypeptide expressing nucleotide sequence isolated from the Sargasso Sea
ctttgccgcggagcgcagctcgattcactttgtcgaagcggatgcgcaaacccatgcttttgaaccagagcgttatgacatggtcttctcgcgtttcggtgtgatgttctttgaagaccccgtcgcagctttcaccaatatccggagcgccctgcgtgcatcgggccgtctcgcgttttgctgctggcaacctcgcgccgtgaatccgtttatgaccgtaccggcgatggcggccctcgagctgttaccggcaccgccagagatgccaccgcgcaccccgggccctttcgcgtttgaggaggccgactacgtcacggcagtgttaaccaacgcggggtttgagagtgtcgccgtgacgccgctgcaacaaccattgacctttggacgcgggttgagccttaccaatattgtcgagcggctggttcagattggtccgattgcacagatggtgcgcgatgcacccgaggatctgcagcagccggttcgtgacaaagtcgctgatgcggttaaaccgttctacagcgaagacacgggcatgaccctcgatggccaattttggcaggtcacagcgcgccagtag

SEQ ID NO: 201911 - DNA, 741 bp, Unknown
  Bacterial polypeptide expressing nucleotide sequence isolated from the Sargasso Sea
catagcagaacttaggtttaatattttaaatgaaaaagtcgattattttgtcatagtcgaatcaactgtaaaccatcaaggccaacctaaaaaattaagttttaatataaataactataaaaaatttaaagataaaataaaatatataatagttgatgatactccagaaaaaataaaaaaaagtcacgaaggtggagaatctttagttgaacaacatcaaagaaactcacttatgagggttataaatgatgcacatgataatgatttgattattttgtcagatgtggatgaaataccagatttaagcaagttaacacttttcaataaaaaaaatatcgctgtctttgttcaaaaaatgttcatgtataaattaaatttattaaatttaaatgaaaacaactggcatggatctaaaatttgtattaaaaaaaatttaatttctccacagtggttaagaaatttaaaatttaaaagatatcctttttggcgaattgataaaccaagaaatttgcaaattattcataatggaggttggcacttcgcttatcttcaaagtccagaaaatatatcgaagaaaattaaatcttttgctcatggggaatttaacaaggagcatttatctagtgaaaaaaatatcttaaagaaaattgagcaagggagagatatctttgatagaggttataaaataaaaaaaattgaaattgataacacttaccctgaatatatatacaataatcaagt

SEQ ID NO: 201912 - DNA, 730 bp, Unknown
  Bacterial polypeptide expressing nucleotide sequence isolated from the Sargasso Sea
atgactaaaaaaattatcttaggttcaagaggtagtaaattagcattgttgtatgctcaaaaagctaaagaacaaattattaaaaaaactaatttagatacaaatgatattgaaattaaaactatttcaacaaaaggtgatcaagttaaagatagtaggttgtctgatataggtggcaaaggattgtttgcaactgaaattgaaaaagagttagagaataaaagtatcgacattgcagtacatgcattaaaagatatgccagcaaaagaaaccagcggacttaaaacagactgttttttagagagaaatgatccaagagaaattttgataacaaatgataagaaaaaattaaatgatcttaagctgaaatcaattataggaacatcttcatttagaagggaatttcaaattaaaaaattaagatctgatctaacatgcaaaataattagaggtaatgtggatactagaattaaaaaactaaaagatggaaattatgatgcaataattttgtcttatgcagggattaaaaatttaaatcttgaaaatgaaatagctgaaattttctcagcacaagaaatcataccaagtgctggacaaggaataattgcactccaatgtcgtgatgcagataaaaaaattatttcaattttaaaaaaagtaaatcatgaagaaacatataaaagagctcatgctgagagaaatgttcttaaagttttagagggagattgcg

SEQ ID NO: 201913 - DNA, 908 bp, Unknown
  Bacterial polypeptide expressing nucleotide sequence isolated from the Sargasso Sea
tggtttattaacctgcgttactggggtatctggttcaggaaagtcatcattaattaatcaaacattacttccaatgagttcttttattttaaataaagctaaattaaataaagaagtaaagtgtgaaaagattgaaggactagattttttagacaaagttattagcatagatcaatctcctattggaagaacacctagatcaaaccctgctacctatactggtttgtttacgcatataagagatttgttatctcaaactgttgaagcaaaatcaagaggctataagccaggaagatttagttttaatgtaaagggaggaagatgtgaggcttgtcagggagatggcgttacaaaagttgaaatgcattttttagcagatgtttatgtgacttgtgagttttgtaaaggtcacaggtataacgaacaaacactagaagttaaatacaaagataaaaatataagtgacatattaaatatgactgttgaggaagctttagatttcttcaaagctataccagctatcaaaaaaaagctcgatacattgaatgatgtcggattaggctatataactcttgggcaatctgcaataacattatctggtggtgaagctcaaagaattaaattagctaaagaattatccaaaagaagtactggtaaaacattatttattctagacgaaccaacaactggtcttcattttgctgacatagagttattattgaaagtcttagaaaggcttaaaaatcaaggcaatacagttattgttattgagcacaatcttgatgtaattaaaacagctgattggattattgatttagggccggagggtggaacagacggaggcgatacagtggcttgtggaagtccagaggaaatttcaaaaatcaagaaatcttatacaggacaat

SEQ ID NO: 201914 - DNA, 893 bp, Unknown
  Bacterial polypeptide expressing nucleotide sequence isolated from the Sargasso Sea
gccaaacccagatagattagttcaagcatacaatcaatcagcagctaaattgaatttgttaagagcttttgctcaaggaggttttgcaaatttaaaaaggatacatcaatggaatttaagtttcattggagatagtcctgcttcaaaaaagtttaaagaaattgcagatagaattaatgaatgtcttgatttcatggatgcgtgtggaattaatgaaaaatctgtgagacagttcaaagaaacaagtttttatacaagccatgaggctcttttattgccatatgaacaatccttaacaagaatagatagcactactggaaaatggtatgatgtttcagcccatatgttatggatcggtgaaagaactcgacagcccgatggagctcatgtagaatttatgaaaggaattagtaatccaataggaattaaaattggaccaaccatttcaaaagatgaattgctaaaattattagatatacttaatccagaaaataatgctggtagaataacattaatttgcagaatgggagcagacaacattggcaaagtattgccatcaataattagagaagtggctaaatcaggtaaacaggttgtttggtcatgtgacccaatgcatggaaatattgagaaggcaaacaatgggtataaaacaagatcgctaaaaaatattatatcggaaattaaacaattttttcaaattcaccgctcagaaggcacttatccaggaggtgtacatcttgaaatgacaggtcaaaatgttactgaatgcataggaggagttcaagagataactgaaaaagatctttctagcagatatcatacatattgtgatccgagattaaatgcttcacagtctttggaactagcttttcttttgtcagatatttaaa

SEQ ID NO: 201915 - DNA, 761 bp, Unknown
  Bacterial polypeptide expressing nucleotide sequence isolated from the Sargasso Sea
gctgtcaaacattggaggaaaaggattattttcaaaaaaaattgaaatagagttaattaataacaatattgatatagctgttcatgctttaaaagatatgccatcgattgaaacagagggactaataacaaatttttatttaaaaaggaattcgcccaatgaaatttttattagcaataacaatataaattttcaagatcttaaacctaattcaataataggcacttcttcttacagaagggaataccaattaaaaagtatcagatcagatctggattataaattaataagaggaaatgtggatactaggataaagaaattagagaatggagattttgatgcaattttactttctaaagctggcatcgaagctttaggtttaacaaataaaattacacatgaatttaatactgaagaattaataccatgtgctggacaaggtattatagccatacaatgtagagaaaacgatcaggaaataattaatatcttagaaaaaattaatgatgatcagtccagaattattgcaaatgccgaaagaaaaatcttaaaaatactcgagggtgactgcgatacagcagttggtgtgtatgcaaagattgataaagatcttgtaaatataaaagctgaacttttttcagtagatggcaaacaaagattttttgttgaagaaagtgaaaataaaacaatggttaaagatttaagtattaagattggagaaaaattaaaatcagagtcaaagggatcttataaaaggtaaa

SEQ ID NO: 201916 - DNA, 514 bp, Unknown
  Bacterial polypeptide expressing nucleotide sequence isolated from the Sargasso Sea
atgagtagaaaaattattattggatctagaggaagtaggttggcgatgctttatgcacaaaaagctaaagataaaattaccaaaagtactgattttagtgatgaggatattgttattaaaaaaattactaccaaaggagatgaaatacaggatattagattgtcagaaattggaggcaaaggattattttcaagcaatattgaaaaagagcttcaagataaaaatattgatattgccgttcatgcacttaaagatatgccagctcttgaaacaaaaggtcttcaaacaaattcatttttagaaagaaacgatccaagagaaattcttatcacaaacaataaacaaaaattaatagatttaaaaaaaaattctataattggcacttcatctttcagaagagaatatcaaattaaaaaaattaggtctgatctcgaatgtaaaattattagaggaaacgtagatacacgaattaaaaaattaaaagatggagagtatgatgcaataatcttatctt

SEQ ID NO: 201917 - DNA, 919 bp, Unknown
  Bacterial polypeptide expressing nucleotide sequence isolated from the Sargasso Sea
tatgagtaaaaaaattactattggatcaagaggcagcaagttagctttactatatgcacaaaaagcaagagataaaattataaaaaataccgattttgcagaacaagatattgctattaaaaaaataaccactaaaggtgatgagttcaaagatgtgagattatcagaatttgggggcaaagggttattttcaactaacattgaaaaggagcttaagaataaaaatattgatatagctgttcatgctcttaaagacatgccagctttagaaaccgaaggccttacaacagatgcatttttagaaagaaatgatccaagagaaattcttattacattaaataaaaaaaaattaagcgaactaaaaattaattctattattggcacctcatcttttcgaagagagtatcaaataaaaaaaattaggtcagatattcaatgtaaacttattagaggtaatgttgacacaagattaaaaaaattaaaagatggattatatgatgcaataattttatcttatgcaggaattaaatttttaaattttgatagtgaaatttcagaagtattttcaccagaaaaaataattcctagtgctggacaaggcataatagcacttcaatgcagagaacaagatcaaaaaataacctcaattttgaaaaacataaatcatgatgaaacatttatgagggcgcacagtgaaagaaatgtcttgaaagttttggaaggtgattgtgaaacagctgttggagcttattcaaaaatagagggtagtaaaattactttagaggctgaacttttttcacttgatggctcagaaagattttatgaaaaaaaaacaggtagattagaggattatagtgaaataggcaaagaagttggtgaaattttaaaatcaaaatctaataattcttataaaagataa

SEQ ID NO: 201918 - DNA, 930 bp, Unknown
  Bacterial polypeptide expressing nucleotide sequence isolated from the Sargasso Sea
gttacttttccgatatgtatttttttagctgtcctgtttaatctaaacagaattcgtaatgatagcgaattgatcatacttgggacttcaggtaaatctgaaaaaaatattttaataaaacccataattttatttgcttctttgatgtttctgatagttttcttttttagtctttttttaacacctagctcattaaaagaacttaggtataaaattattgagataagaacctctggtatacatatatctttgttaaaagaaaaaaagtttgtttcacctacaaataattttactgttttcttgcaggaaaaaaaagataaagaaatatttgggcttttaatacatgaccaaagcaatataaacaaacctcggacgtacatagctgagaaaggtaaattcattacaagtgataatgtaagttatctaaaattatttaatggcttcatacaaatatatgatagcgatgtaaacagagtatcagagattgcttttaatacctataatcttgacctaacgccatttaacaagaaagaaagctcacacatttatcctgatgaactatctacaagtgatataagaaataatttaaaaaatttgtcccctagcaacttttcaaaaaatgaaaaagaacaatttgctgagttacataaaagatatgttaatccaatatatataatattttatgcattgcttccacttcttatgattaatttttcaaagagacccgatgatagctggcgctaccctataatagccgtttctgctatagcttttgcaattcaaatatttcaaattacgtttttaaatttacttattgaaaatagtcaattagttactctttattacacatttcctataatattaatctttgtaacaataatgtatttgtataaagattttttatatttattaagaaataaaaatgtttaa

SEQ ID NO: 201919 - DNA, 820 bp, Unknown
  Bacterial polypeptide expressing nucleotide sequence isolated from the Sargasso Sea
ataattggaactcgtggaagtaagttagcaatgatttacgcagaaaatgtgaaaaaagaactaaaaaaatatttttcggaagagattgaattaaaaaaaattgcaacaacaggagatcaaaagcaagatgagagattatctgaaataggaggcaaaggattattttcaaaacaaattgaaaaagatttattaaataaaaatatagatatagcagtacatgctttcaaagatatgcctactgaagaaactgaaaatcttttaactaataattttttaaaaagaaattctcctaatgaaattttaataagtaaaaataatataaaatttgaagatttagaaccaaactcaattattggtacatcatcatatagacgagaatatcaactaaagaaaaaaagacccaacttaaaatataaacttatcagaggaaatgttgatactagagttcaaaagttagaaaaaggcgaatatgatgcgataattctctcaaaagcaggagtagattctttaaatttacaacataaaatttcacaagaatttagtgttgatgaacttataccttgtgcgggtcaaggaattatagcaattcaatgcagagaagatgataatgaaattaaaaaattacttgaaaacattaatgatcaagaaacaagaactgttgcaaaagcagaaagagaggttttaaaagtccttgaaggagattgtgacactgcagttggtgtatttgcaaaattaaatggaaaaaaaatagatctgttaactgaattgttttctgttgatggaaaaaatagattatttcataaaaaaaagtctcaaaaag

SEQ ID NO: 201920 - DNA, 785 bp, Unknown
  Bacterial polypeptide expressing nucleotide sequence isolated from the Sargasso Sea
tcaggaattaaaccctaatacaattcgagataattttaaattactattgcaaatgtctgttgttttgacttttgctactaataaaccagtcgttaaaataggtagaatgggtggacaatttgctaagccaagaagttcagactttgaagaaaaaaatggccaaaaattacctagttatagaggggatattattaattcatttgagtttaacgagacctctagagaaccagatcctacaagaatggttagagcttataaccattcagcttcaactttaaacttattaagagcttttgctcaaggaggttttgctagtttaacacaattaaataaatggaatttagattttgcagataattttgatacaacaaaaaaatttaaagaattatctgaaaaaattgctgaaagtataaaatttatgaatgcctgtggaataaatgaaaataatacaagagaattaagagaaacagatttttacacaagccatgaagcacttcttttaccttatgagcaagcttttacaagaatagatagtactacaggcgagtggtacaatgtaaattctcattttttgtgggtcggtgatagaactcgagatcctaatggtgcacacatacactatttaagcggtataaaaaaccctttaggtcttaaagtaggaccatccacaactgttgatgatttaaaaaaaaatattgagatactaaatcctgaaaatgaaggtggaagacttacacttattgttagaatgggagcagaaaaaattgaatcaaaatttcctgatt

SEQ ID NO: 201921 - DNA, 289 bp, Unknown
  Bacterial polypeptide expressing nucleotide sequence isolated from the Sargasso Sea
atgaattttgagaaaattatacctaaagatggtccttccatcaaagaggttgaaaaatatgttaaaaaatattccaatgaattaattgtgataaagtgtggtggttcggtattgcttgatgaaaacttatttaatcaatttattgaagatatatcagtaattaataaattagggttatcagctatagttgtacatggtggaggtaaaaatattaaaaaaaaacttgatcagtttaaaatagaggcaaagtttatagatggtttaagagttacagatgaaaaaacaatta

SEQ ID NO: 201922 - DNA, 650 bp, Unknown
  Bacterial polypeptide expressing nucleotide sequence isolated from the Sargasso Sea
catggcacaagtcatcaatacaaacagcctgtcgctgttgacccagaataacctgaacaaatctcagtcttctctgagctccgctatcgagcgtctgtcctctggtctgcgtatcaacagcgcgaaagatgatgctgctggtcaggcgattgctaaccgcttcacctctaacatcaaaggtctgactcaggcgtcccgcaacgccaacgatggtatctccatcgcgcagaccactgaaggttctctgtctgaaatcaacaataacctgcagcgtgttcgtgagctggcggttcagtcttctactggtaccaactcccagtctgacctcgactccatccaggctgaaatcactcagcgtctgaacgaaatcgaccgcgtatccggccagacccagttcaacggcgtgaaagtactggcgaaagacaacaccctgaccatccaggttggtgctaacgatggcgaaaccatcgatatcaacctgaaagaaatcaactccaaaaccctgggtctggatagcctgagcgtgcaggatgcttataagactgttgcaacggcagtgccgggcgatggtacttataccgatggtgctgatacacttggcgtgcctgatgcaactgctatcactaatgctgcaggtggtactggtggta

SEQ ID NO: 201923 - DNA, 241 bp, Unknown
  Bacterial polypeptide expressing nucleotide sequence isolated from the Sargasso Sea
catgtcgaacgtactgatcgtcgaagacgacgagcaaaccttcgcggagctcgttgaagcactgaccgatcacggttgcaaggtgcagggcgcgcgcacgggccgcgacggtttgatgctcgcggtcgccaacagttacgacgccatcgtgctcgatcgcatgctgccgggcggactcgaagggctcggcatgctggcggcgttgcgcagtgccggcgtgctcacgcccgtattgattctg

SEQ ID NO: 201924 - DNA, 378 bp, Unknown
  Bacterial polypeptide expressing nucleotide sequence isolated from the Sargasso Sea
gatgataaacaatgttcctaaaataaataatattgacactggacaattctttctaatagcaggaccatgctcaattgagggtgagaaaatggcatataaaattgcagaaaaaattataaaaatcaccgataaacttggcataccttatatctttaaagggagttttaaaaaggctaatagaagtaggattgatagttttactggtattggtgacaaaaaagcactagagatattatcaaaaattagtaaatcctttgatgttcctactttgactgatatacatagccaagaagatgctaagaatgcagcagaatatgttgatattcttcaaatacctgcttttttatccagacaaacagatataatcatttcagcagc

SEQ ID NO: 201925 - DNA, 601 bp, Unknown
  Bacterial polypeptide expressing nucleotide sequence isolated from the Sargasso Sea
atgattgctagaaatagttgtgatcacgacaggaaagcatatatacaacagtttaaggcatttgctttatttttagattcattatctaaagaagaacgggataattgtcatcttattatccatgaaaattatagttatagtttaaaagggcgtatagacttggaaaaacatgcaaaacaattaaatatattagataaaataactgttacaacacataaaactaattccgttgaacatatagttgaattgtataaaatgtctgatgtgttattatgtgcttctaaaagtgaaggttttggattacctatggtagaggcacaaatacatggaacaccggtaataacaactaattgtactgccatgactacaaacacttactatggtatttgtaccgaaccggaagaagtatcggtaacagaaggtggtatgaattcatggtcgaatccgtcaccgaaaaatgtgcaagatgctataacgtatatttataataagaaatataataaagataatagtaaatatagttttgaactaaagtctatagataaaaaaaggtatactaataatactattttaaaacattggatatcttttttggacttaa

SEQ ID NO: 201926 - DNA, 798 bp, Unknown
  Bacterial polypeptide expressing nucleotide sequence isolated from the Sargasso Sea
aaatcacaactaaaggtgacataattcaagacatcagattatcagaggctggtggcaagggattattttctaaaacaattgaagatgaactagtaaatggaaaaattgatattgctgttcatgcattaaaggatatgccatcacacgaaacaaaggggcttataacaaattgttttttagaaagaaacgatccaagagaaattttaattagtaaaaataataaaaagatcaaagaccttgctagtaatgcaatagttggaacttcatcttttagaagagagtttcaattaaaaaaaatacgacaagatcttaattataaattaataagaggaaacgttgatacaagaattaaaaaattaaatgacggttcatttgatgctatcattttatcttatgccggaattcaatcattaaatttagaagataaaatttctcaaactttttcaacatcagaaattattccaagtgctggacaaggagttgttgctcttcaatgtagagataatgataaaaatatgattaaattattagaaaaaattaaccaccaaccaacacataattgtgttttggcagaaagaaatgttctcaaaattttagatggagattgtgaaactgccgttggtgcaattgctcaaattaatgaagaaaatattagtcttgaggcagagttattttctttagatggaaaagaaagattttatcacaaagattcaaaagaaattaaatttgcctttgaactaggcaaagaagtaggattaatattaaagaaagaatctaaaaattcatataaaaaataaa

SEQ ID NO: 201927 - DNA, 558 bp, Unknown
  Bacterial polypeptide expressing nucleotide sequence isolated from the Sargasso Sea
aattattaataataggtcctcccggagttgggaaaggcactcaggcaaagcgtatacgagaataccttaacattgcacacttgagtactggaagtattttgagagcagagataaaagcattttcagctgtagggaaagaagctaaaaagttcattgataagggaaaatttgttccagataaatatcttacaaaaatcgtaagggatgaaataagttctgcaaaatgtaaaaatggttatttattagatggatacccgagaactatcactcaagcaaacaagtttgaaataatcttgaatgatgtcaatcataaacttgatgcagttattggattgagggcacatgaagatgaattaattcgaagattaattgatcgcggaagggatcataatcggagtgatgatcttcctgaaataattcgaaaaagacaaaatatttattgggagcgcacagcccctttattagactattacagctcaaaaggtcttttaaagagtatagatgggctgggggatattgatgaaataactaaaagaataattaatgaattaaaatgat

SEQ ID NO: 201928 - DNA, 768 bp, Unknown
  Bacterial polypeptide expressing nucleotide sequence isolated from the Sargasso Sea
tattaggtctaggaattggtatcgcaggtcttgtcgacatcaatggacagatacggcgggcccctaatcttgccgacgttgacggactcgatatagggccgatattggaaccgaaactcggagtacccgtttatgtagacaacgacgtcaactgtgctgccctagccgaactatcagatggcgccgcagccttggtaaataattcgttgctagtaacgctaggtacaggcattgggggagccttaatagtcgatggagatatccacagaggtgccttcggaatggcagcagaacccggccatatggtcgtcaaccctcacggttttatatgtgcctgtggcaagaaaggatgctgggaagcttacgcatctgctgctgggctcagaaacctggcgatcgatagagcacaaaatgggcaactagaagagatcaatgacaaggtccaaggagacctaaacaaaatcgctagtgaggacatcacacaagcagctcgacgaggtgacatccaatgtcttgaagtgataaacgagttcgcttactggattgcactcgggctcacaaattgtgcagctttactcgaccccgaactcatcattatcgggggaggactagttgcagaatgggaccttttaggagacagaattcgtcattcattcgacgagttgctccttgcatcaactcagcgaaatcgaattccgatcaagccagcggagaatggcaaagcggctggagcaataggagcgactctgttaggaagacaaagatgaa

SEQ ID NO: 201929 - DNA, 727 bp, Unknown
  Bacterial polypeptide expressing nucleotide sequence isolated from the Sargasso Sea
aatgaattttgaaaaaaatattaaaaatacttcagaaacaatagcacgcttcataaatcataccccccttcaatattccccctatttaagcaaaataattgatggtaatgtttatttaaaattggaaaacattcaaaaaacaggatcttttaagtttagaggcgcaatgagtaagatcagttcattagcgatgtctaaaaatccaaaaaaagttattaccgcatcaaccggaaatcacggagcagcgtgttcattggctatgtcattaaaaggggtagatggatctatatatgttccaaagaatgcccaccaaaataaaattgataaaattaaactctatggagcggatgttaaatactatggaaatgattgtgtagagacagaaatgcatgccaaagctctttccattgagcatggtttctcctacatttctccttacaatgacatggatgtaatttttggtcaaggtacagttggatatgaaattgaccaagatttagatattattgatgcaatatttattagtgtgggaggaggaggtcttatttctggagttgggggatatttaaaatctttaaaaagagaaatcaacatatttggagtttctccaataaattcttgtgttatgcatgaatcaattaagaatggtcaaattacagacttacaatcacaacctacactgtctgatggcaaagcagggggtgttgaatctggttccatcacgttt

SEQ ID NO: 201930 - DNA, 505 bp, Unknown
  Bacterial polypeptide expressing nucleotide sequence isolated from the Sargasso Sea
aatgaaaagcaaaaaaattattattggatctagaggcagcaaattagctttaatttatgctgaaattgcaaaaaataaaatttttaaagttaaatctgattttaaaattgaaaatattgacattaaaacaataacaacaaaaggtgatcaagttcaaaatattagattatccgatattggtggcaaaggactttttgcaaaaaaaatagaagaagagttattacaaaaaaaaattgatatagctgtgcatgctctaaaagatatgccatctaatgaaacagaaggtcttattacaaattgttttttagaaaggaacgatccaagggaaatattaataagcagagaaaatttttttttaaaagatctagctaaagattcaattattggaacttcatcttttagaagagaatttcaattaaaaaaaaagagaaatgatcttaattataagttgataagaggaaatgttgatacaagaataaaaaaattaaatgataaattatatgat

SEQ ID NO: 201931 - DNA, 474 bp, Unknown
  Bacterial polypeptide expressing nucleotide sequence isolated from the Sargasso Sea
aatggagttatacgaatcaaaaattttgtcattggttgaagaaaataaaaaaattgttattttaactgctgaaaatcgagtttcgttaagaaacgtacctgagaaattaaatcagaattttatcgatgtaggaatttctgaacagaatctaattggaattggagcaggtttagctaaattaggttttttacccattatgcatggaatgtcaacatttcttacaatgcgtgcttttgagtttattcgtacagaccttggttatccaagattaccatcagtacttgtgggcacatttaatggactttcagcaactgcaaatggaacagcaaatggtccaactcatcaagcaatagaagatattgcattgatgagacttgttccaaacatgacggtagtaacaccatcagatagattagagacactaaagattcttgataatatctcaaagttagaaggaccactttacatgaggga

SEQ ID NO: 201932 - DNA, 767 bp, Unknown
  Bacterial polypeptide expressing nucleotide sequence isolated from the Sargasso Sea
aaaagcaaaaaaataattattggttctcgaggcagtaaattagcattaatttatgcagaaagagcgcgggaaaagattttaaagtactgctctaatgttgaaattaaaaagattaaaacaacgggtgatataaatcaaaaagatagattatctgagataggaggcaaaggattgttttcaaaacaaattgaaaatgaattattacaaaacaaaattgatattgctgttcacgcattaaaagatatgccatctgatgaaacaaagggtttgttgacaaattgttttcttgaaagaaatgatcctagggaaattttaattagtcttaataataatcttataaaagatcttaaaccgaattcaattataggaacttcttcttacagaagagaatttcagcttaaaaaaattagaagtgatattaaatataaattaattagaggaaatgtagatacaagattaaataaattaaataacaaattatacgatgcaataatattatcatatgcaggtattaaagctttaaatttagatcaaaaaatatctcaaatattttctgtaaaagaaattatacctagtgttggacaaggcgttgtagctttacaatgtagggaaaaagattttgaaacaattcaaatattaaaaaaaattaatcataaaataactaatatttgtgttaatgccgaaagacaactattaaaaattttagaaggagactgtgatactgcagtaggcgctatagctaatattgaagatcaaaatattacttt

SEQ ID NO: 201933 - DNA, 842 bp, Unknown
  Bacterial polypeptide expressing nucleotide sequence isolated from the Sargasso Sea
attgattggcattttgggtccttcggggtgcgggaaaacaactcttctcaacgccatcgctcataacagacttgttaaagacggcaacatcacgttgaacggggaacgaatcggcatgcaacaagtcgccttcgtcgaacaatcgatggatttgatttccaagttgacggtctttgagactgtctcaacgcaagcaaaactgaaaatgccgtggttcttctcttcaaaagaagtgtcagatcgcagtaagggtgtgcttcgagatatgggtttagagcacgtctctgatctacgcgtgatgggctctgggttgtctggaggagagttgaaacgcgttcaggtggcgagcgaacttgtcggaggtgacgcgccgctcatcctcctcgacgagccagcatctggtttggatgcgcaaacctcgtggcgacttttttctcaacttcgcgcgctcgccgctgacaaagaaaaaacagtcatcgcgacggttcaccaaccgtcgcgacgcattgtcgatctctaccaccgtatcgtggtgctcacgcacgacggccgagtgatgtggtctggtcctcccaaagaaatcgattcgctattgacacaagttgggatggaagtaccgatgggaatgagcacagccgaatggcttctcgatatcgcgtgtgatgacgcaaaacagaaaaagtttacgtcggggttgaagtcagtcaccgaaacacccgtcgaatcgaattggacgacgcacactccgagacttcagcttccagaggatcgcgtcgcggcgcacgagttcaaatcggcactcagtcggataagtgttctcttgtggcgtgcttttacagttt

SEQ ID NO: 201934 - DNA, 854 bp, Unknown
  Bacterial polypeptide expressing nucleotide sequence isolated from the Sargasso Sea
tttaaaaaaaagaggttaccaacgtctaaaagtagataatgttgtttatgatattgatgaagtgccttcgcttaaaaaaaattttaaacacaatattgatgtcgtaattgatcgacttgttgtaaaaaagaatattcaacaaaggttaagtgaaagtatagaagttgcactaacactatcagatggtttgttatatttagaaaatctagatacaaataaaatatccgtattttcatctaaattcgcgtgtcctatatctggattcagtatcgaagagattgagcctagattatttagttttaatgctccacaaggtgcttgttccgaatgtgatggactaggagttgaaaaatattttgatgaatacaagattgtacctgatgaaactagatcaattgctgatggagctattaaaccatgggaaacgaaagtatttggttaccaaaaaaaatattttgttgaaacaatagataaaattttaaaacaatttaaaataaagaaaaatgttccatggagtgaaattccaaaaaaggtaaaacatttaattctttatggggataagaatagcgaactaaatattttagatgattttgaaggaataataaactttattgatcgaaaatatgaagaaactgaaagatggtggcttcaatatgaattagaaaaatatttatctgaaagagactgcgaggtttgtaatggttaccgtcttaatgagaaagctttagccgtaagaattgatgaaaatcatatcggagatattactaaaaaatcaattagcgagtgtttaaactggttttcattacttgagagtaaactagataaaaataataaaaaaattgctgaaggagtaa

SEQ ID NO: 201935 - DNA, 634 bp, Unknown
  Bacterial polypeptide expressing nucleotide sequence isolated from the Sargasso Sea
aatgacaaaaaagcttaaaataaaaatttgtgggataaatgatccatatataatgagaacagcctgctcgctaaacgttgattttgtgggtttagttttttacaaacattcaccaagaaatatatctctagattttgcaaaatctattatcaaacatagaatgaatcaaacaaaaattgttgccctgactgtcgattctgacgataattttttagatttaatctttgattttataaaacctgattatattcaattgcatggaaatgaaaaagtttctagatgcgtagaaataaaaaataaatatagaactaaagttataaaagcattagaggttaaaaacgttgatatattgttaaatgatataaatgcttataaagatgttgtagatatattgcttttagatagtcctaaatcttttatgcccgggggcaatggcgagccttttgactggcatttacttaacgaaaatgatctagatgcgaattggcttttggcaggtggcttgaatgaaaaaaatgttaatgaagcagttaatttaacaaatgcgacaggagttgatatttcatctggagtagaagtatctaaaggaaaaaagtcaccacaattaattaaaaattttgtaagaatgtgtaga

SEQ ID NO: 201936 - DNA, 840 bp, Unknown
  Bacterial polypeptide expressing nucleotide sequence isolated from the Sargasso Sea
ccgcgccagtggcagcagcagctaatccagctgctcaggcgccggcttgagcgcaaacaaaccagcgatcaagacgtgttggtgtttgctgggcctggtgccggcaaaaccctcggcgccctattggccttcaaggccatgcagcaagaagggcggctgcagcgctttgtggtgttctgccaccgcacctcgatcttgagccaatggcaaagcgccgcggggcggttgggcctaggcctggaggaatggccctgcagcgatcaagctgatggcctgctgatcacctaccaaggcgccggccgccagctcgagcaacttcgcgaagacctgcgccattggggccttgccggcagtttggccatcgccgatgaggcccatcacctgggcctcgatcccgatgagcccgacaacacggcctggggagggacatttttagagctcacccaacactgccgcctgcgcctcgggctcactggcaccccgtttcgcgccgacaacttggccttttgcgcggctcgccgcatccgcttgcgccaaggccatgagctgattgagcagatcgttcctgatctggcggtggaaccccgcgagttgatcgcagccggtgatgtacgcccgctggaatttcgctttcaagatggctgggtggagcacagccgtgaaggcatgccggatcgcgatgtctcgccactatcagctgaaacgcgcgaaagctggcgggcccgcaacctacgccgcgccattgaactcggcgacgagagcggcattggccagcagctactgctgcgggcccagcgcaaactcaagcaggtgcgtttgcagcaccccaatgccgccggg

SEQ ID NO: 201937 - DNA, 503 bp, Unknown
  Bacterial polypeptide expressing nucleotide sequence isolated from the Sargasso Sea
ggcggaccgctttgatgtgtgggtgcatatcggcgcattgcaggtatcgaacctggtcggccatgcgattgcgccgaatgcgcgatttgtctgcgcgtcgcctgcgttcgtgaagcgcttcggtttgccggaaacgcccgatgaccttgccgcgctgccttgcatcgttctgcgcgagaacaaggaggacgtgtcgctctggcacttcagcaagggccgaacgagccgcagcgtgcgcgtgcccaggccgctcatctgcaacgacggcgatgtcatccgccagtgggcgtgcgaggggcgcggcgtgattctgcgctcggaatgggatgtcgccgacgacctgcgcgcaggccgcctcctgcgattgctgcccggctggaaggcgccggacgccaacgtgatcgccctcacgcacaaccgcgcggggttgccgcaacgcacgcgtcacttcatgcaggcgctgcaaggccgtttcaagccgcagccaccgtggcgtgcttgat

SEQ ID NO: 201938 - DNA, 793 bp, Unknown
  Bacterial polypeptide expressing nucleotide sequence isolated from the Sargasso Sea
ttaataaatggtgttttacaatcactagatccatattctgcctatatgagtcctgaactctttaaagaaatgcagactgacactaaaggtgagtttggtggactaggtatagaaattgggatggaatctggagttgtaaaagttatttccccaatagatgatacccctgcagcaaaagctgggataaaagctggtgattacatcgttaaaattggaaatgagcaggtccaaggtaaatctttactagaggctgtaaaattaatgagaggcccggtgggtacatcaattgaactaacagtgagaagaaagaaagtcaaaaagcctttagaatttaaaatagaacgaaaaataatagaagttcaatccgtaagctctaaaacaattggagaagaaaaaaacttaggatatataagattaaaatcatttaacgaaaatagtgacaagcagtttttaaaatctgtgaaagaatttgaaaaaaaatccaaaatcaaaggctatgtgtttgatttaaggaataatcctggtggattattaactcaagcaatcaatattactgatttttttttagaagatggagaaatagtttctactaaaggaagaaaggtctcagaaactagaaaattttttgcaagaaaaggcgatgagattaaagggaagccaattgtagttttaataaataacggatctgcttcagcatctgaaatttttgctggggcattaaaagatcataaaagagcgataattcttggagagaattcttacggaaaaggttcggtgcaatctattatacctt

SEQ ID NO: 201939 - DNA, 808 bp, Unknown
  Bacterial polypeptide expressing nucleotide sequence isolated from the Sargasso Sea
atggaaaaaatatttaataaactttgtgaaggtctcttttcagagctagaaagtaatgaagcattaactttatccttttcaggagaaaatagccaatttatacgcataaataacgcctctattaggcagacaggtttagtagatgatgcaactctgggtttaaagtttgtttctaatagtcgtacatgcgaaggaagtatgacagtttcaggcgattatgaagtagacttatctagaggaatgaaggaactagagcgtatgcgatttgagtcaaatgagatcttagaagatccattcttagttatgcctactaattctggatcatctcgtgaaataataaatgcgaacgggctttcatttgatgatgctattcaagccttaatcccctcaatgcaaggagttgatttagtaggtatctttgctaatggtaaaatgtatagaggcaatgcaaattctcatggtcagaagcattggtttgagacagaatctcattgtctagattattctttagttacccccgagcgtcaaatggtaaaagggacttacgctggaacagattgggatcaaaattcttatgaatcatatattcatcattcaattgaaaaattagaactaatgaaaagaaagccagttcgtgtggatactggtatgtaccgaacatggtttgagccaaaagctgttgctgatttcatcgatatgttttcttggaatggaattagtgaagcaagcttgcagcaagggtgtagtggttttggaaaaatgaggcataatgatgtacgtttatctccaaaaatttacaatttctgaa

SEQ ID NO: 201940 - DNA, 790 bp, Unknown
  Bacterial polypeptide expressing nucleotide sequence isolated from the Sargasso Sea
atgaattcaaaaaattcacatgtaatcgcatataataaacacatttccagtaaaatatttgataaatatgatgttcctgttccaaaattcatatattttaatagaaaacaatttcctgatttttctaatttcaaaaatatattaaataataaaaaattaggatttccattagtaataaaacctacagatgcaagttttggtaaaggtgtctctttagatatacaatcatataacgatgcatttaataaatgtaatgaaatattaaagggttccaaaacaaagggaattatgattgaagaacaagtatatggtgaaaattatagaattttagtttataaagacaaaattgtaagtattgttaaaagagaatatccgcatatagagggagatggaaataataaaattaatacacttattgaaataaaaaataaagaattagaaaaggaaaatatgaaaccaatggttagtttaaatgaatattttatagaaaaacaaggatatacacttgatgatgtacctatgaaaaaagaaaaagtatatgtaagtaatatatgtaattataagaatggtggaaaagttcattatgttgatataaatgaattacattctgataacattaaaatgtttagattacttaattctattattggatctaaattgataggtgttgattatatgacaaacaatatatcagatagttataaaaatggaaatggatatattaatgaagttaattctagaccaggtattacaattcatgagattgctgaaagagattatataacacaac

SEQ ID NO: 201941 - DNA, 631 bp, Unknown
  Bacterial polypeptide expressing nucleotide sequence isolated from the Sargasso Sea
aatgaaaagcaaaaaaattattataggatcaagaggaagcaaattagcacttatttatgccgaaaaagcacggcaggaaattttaaaatttgcaacagaattcaatatcaccgaagttgaaataaaaaaaataaaaactgctggtgataaaaatcaaaaagtaagattgtctgaaataggtggtaaaggacttttttctaaacagatcgaagacgaattgcttaatgataaaataagtattgcaattcatgctctaaaggacatgccttcacaagaaacgaaaggtcttattacaaattcctttttgaaaagaaatgatgctcgcgaagtattaatttcaaaagataaaatgagatttgaaaatttaaaacctaattcaataattggcacctcttcatttagaagagaatttcaattaaaacaattaagaaaagatttaagttataaattaataagaggaaatgtagataccagaattaataaagtcaaggaagatttatatgatgccacggtcttagcaagtgcaggaattttttctcttaatttagataattatgtttcccatatattttctgtagatgagatgttgccaagtgccggacaaggtgtaattgctcttcaatctaaagta

SEQ ID NO: 201942 - DNA, 655 bp, Unknown
  Bacterial polypeptide expressing nucleotide sequence isolated from the Sargasso Sea
cgccttgcgggccttgagccgtcctcggttatcgtcgaaatcctgaaccccgatggcaccatggcgcgtcgcccgcaactcgaagtctttgctaaagagcatgacataaaaatgggcactattgccgatttaatcgagtaccgtaatcttaacgaaaccaccatcgagcaagtggcgaagtgtaaactaccaacacagtacggtgagtttgatttagttacctacaaagacaccatcgatggtcagctgcactatgcgatgatcaaaggtgatatcagcgacccaaccttagtgcgggtgcatttacaaagcacctttaacgatattttactttccgatcgaggcgcggaccgcagttggacattgtctaacgccatggcctatatcgccgaacatgatggtgtgttggttatccttggtaagcaagagcgcagtgacgatatcgaagctatggttaaggcctttgctttggaagatgctggcgaaagtgccaaccaccgtaaaatccaggggacatcgcgcaccgtgggcatcggctcgcaaatcttagcggatttaggcatcaccaaaatgcgcttaatgagcatgccgaagaagtatcatgcgctgtcaggtttccaccttgaggtggttgactacgtacagccagaataag

SEQ ID NO: 201943 - DNA, 850 bp, Unknown
  Bacterial polypeptide expressing nucleotide sequence isolated from the Sargasso Sea
gtggtgataaattttgtccttctgtgtgttcttacacaaagagacccagagtactcccgtcctttggagtcgatatcaaaagaagtaaatattcttactataaatggcgcaaaagaaattgtcttactaggtcaaaacgttaatgcttatgcgtctattaataatggagtaagagtaaatatttctgaccttatcgaagaaattagtaaaactgaaaaagtgaaaaggattagatatacaacttcgcatccagtaaatatgagtgatgatttaattaatctacatgctacaaatgataagcttatgccgtttattcatttgcctgttcaatctggttcagagtcaattttaaaaaaaatgaatagaaaatatgatcctaatttttatcgaagaactatcgataggttaaagaaagtaaaaccagacataaaaatatcctcagattttattgttggctatccaggtgaaacagatcaagattttaatgatacattaaaacttattgacgatattgagtttacccaatcttattcatttatttatagttcaagaccaggaactaagtcatcgacagaagtcgacgatactccaatttcagtaaaaaaagaacgattgttagtattgcaagaaaaattaaagaaaattcaatactcctttaacaagcagttttgtaataaaactgtaaaagttttaattgagaatcaaagtttaagtaatcctgagtatttctttggaagaacaccctttatgcaatcggtttatatcaagtccaacaatctagtgccaggtcatgaaaaagatattgatattacgtcttgcaaccataagagcttatatggtatttgttaaa

SEQ ID NO: 201944 - DNA, 85 bp, Unknown
  Bacterial polypeptide expressing nucleotide sequence isolated from the Sargasso Sea
gatctctttgccttccgctttgaagactttgagttgcagggctatcaggcgcacccgcacatcaaggcgccggtggcggtatgag

SEQ ID NO: 201945 - DNA, 418 bp, Unknown
  Bacterial polypeptide expressing nucleotide sequence isolated from the Sargasso Sea
atgaatttagaaaaaattttacctaaaaatggtccgtctatcaatgaagttaaaaaatatattgagaaatatttagaagaaataattgtgattaagtgtggtggatcggtgctacttgatgaaaatttatttaaacaattcattgaagatgtttcggtaatatataagttaggactatcagtaatagttgttcatggtggtggaaaaaatataaaaaaaaaacttgataagttaaatatagaatcaaagtttattgatggtttaagagttactgacagaaaaactattaaagttgttgaagaagcacttttagaattaaattctgaaattataaataacttaaaaaatcttcaaataaatgtagaatctgtagcacctcacaacaaaaacttaattaaaattaaaccagaaaaaaaag

SEQ ID NO: 201946 - DNA, 418 bp, Unknown
  Bacterial polypeptide expressing nucleotide sequence isolated from the Sargasso Sea
ggcggcgtgtaccaggcgggcacgctgtcgggcaacccggtggccacggcctgcgggctggccacgctgcgcgagatcaagaaacccggcttctttgatgcgctgtcggcccgcacccgctcgctggtcgatggactacaagcggccgccgatgctgaaggcgtgccgttctgcggcgactgcgagggcggcatgttcggctttttcctgctgccggagctgccgcagaactatgcccaggtgctcaagaccgacagcgcgcgcttcaaccagctgttccacggcctgctggaccggggcatctacattgcacctgccctgtatgaagcgggcttcgtgagcgccgcccacactgccgacgacgtggcagtcactgtgactgcagcgcgtgaagtgttcaagacgctctcaaaataat

SEQ ID NO: 201947 - DNA, 436 bp, Unknown
  Bacterial polypeptide expressing nucleotide sequence isolated from the Sargasso Sea
tatggttagaattattaagaaaataattagggaaatttttagacagagactcacaaaacgatttataaactcaaagcagtattgggaaaatagatatttttttggaggaaattctggaagaggatcatataaagaagaggccttaataaaagctgattttgtaaataactctatttcaaaatataatattaattcaatagttgatattgggtgtggtgatggaaataatttgatgctctttgatcaagttgattatattggaatagatccaagtgaaacaataattaatttaaataaaaaaaaatttattagagataatcaaaaaaaattttacttgttaaatggtaatcaaatagaaattgcaaaaatagctaataattttatttctaatcgtaattccattactttaaagttagatattatatttttcatttag

SEQ ID NO: 201948 - DNA, 388 bp, Unknown
  Bacterial polypeptide expressing nucleotide sequence isolated from the Sargasso Sea
atgaatttagagaacattatacctaaagatggaccatccatcgaagaggtaaaaaaatatataaaaaaatattctaatgaacttattgtaataaagtgtggtggctcagtattgcttgatgtagttttgtttaatcagtttatagaagatatatcagcaattaatcatctaggattatctgtaattgtcgtgcatggtggtggaaaaaatatcaaaaaggaacttgataaacataaaatagaatcaaaatttatagatggtttaagagttacggatgaaaatactatgacaattgttgaaaaagcattgcttgagttgaatactgaaattttaaacaatttaactaataaagaagcaaatgcaaaatcggtaactcccaaagagtgaa

SEQ ID NO: 201949 - DNA, 370 bp, Unknown
  Bacterial polypeptide expressing nucleotide sequence isolated from the Sargasso Sea
aatgaatttagagaatattatacctaaagatggaccatccatcaaagaggtaaaaaaatatataaaaaaatattctaatgaacttattgtaataaagtgtggtggctcagtattgcttgatgtagttttgtttaatcagtttatagaagatatatcagcaattaatcatctaggattatctgtaattgtcgtgcatggtggtggaaaaaatatcaaaaaggaacttgataaacataaaatagaatcaaaatttatagatggtttaagagttacggatgaaaatactatgacaattgttgaaaaagcattgctggagttgaatactgagatttttaacattttactaataaagaagcaaatgcaaaatcgg

SEQ ID NO: 201950 - DNA, 651 bp, Unknown
  Bacterial polypeptide expressing nucleotide sequence isolated from the Sargasso Sea
acaaaccaggaagatttagttttaatgttaaaggtggaagatgtgaggcctgtcaaggtgacggaatgattaaggttgaaatgcatttccttgctgatgtttatgtgaaatgcgacgtttgcaatgggaaaagatacaatgaacagactttagaaattaaatataaagaaaaaaatataagtgacattcttgatatgactgtcgaagacgctttgaccttctttgatgcccatccatcaataaaaaagaaattgatcacactaaacgatgttggtcttggatatatcacacttggtcagtcagctcttacattgtctggtggagaagcgcaaagaataaaattagctaaggagttatcaaaaagaagcactggtaaaacactttttatattggatgagcctacaacgggtcttcattttgctgacatagagttactcttaaaagttttagataggcttaagcaacaaggcaatacagttgttgttattgaacataatcttgatgtaattaaaacagctgattggattatagatttaggtccagaaggaggatcagatggcggcacaattgttgctgagggcaccccagaggatgtagctaaaaacaagggctcttatactggagagtttttaaaagaagttctaaattagg

SEQ ID NO: 201951 - DNA, 655 bp, Unknown
  Bacterial polypeptide expressing nucleotide sequence isolated from the Sargasso Sea
catggggggtgggccaagaataaaaagagaattagataagtcaaatattcaaactaaatttatcaaaggtttaagagtaacagatgaaaaagttataaatatagttgagagagtgcttattgattttaataaagatattgttgactcgcttaaaaaaaaaggaactgaagcaatttcaataaatactaaagaaaataacattattgaagttatccctgaatctgaagaacttggttttgtcggaaaaccaaataagataaataatgaaatattgctgaatgtaattaaagaaaaaaaaattccaattgtttcgccactaggtttacaaaaaagtcaaccttttaacataaatggtgattgggccgcaggagcaattgcaaaatctttaaaatgtagaagattacttttaatgactaatgtagaaggtgttttagataaaaataaaaaattaatagatgaaatatcttcttctgaaattttagaaatgattaaaaatgaaactatcactggaggaatgataccaaaaataaatacttgtctagatgccattaataatggggttgctgcggtaggaataattgatgcccgaccacaacactcaatattatttgaactattctcagataaaggctccggcacattaattagaaaatga

SEQ ID NO: 201952 - DNA, 874 bp, Unknown
  Bacterial polypeptide expressing nucleotide sequence isolated from the Sargasso Sea
tttgattaacaaaagagaagagctgattagtagaactagaattaaaaatttaattctaaaagaaaagttgaaattaaataataaaataataacaagtccttcaaaaaaagttttaatgggtgataaattaagtcttcaaattccagaacctgaagaagcttttttaaaaccttataattttaaattagaaataattcatgaggatgaagacttattagttatcaataagccagccgggataatcatgcatccaggggctggaaacaatgacaagacaattgtgaatgcattattaaattataataaaaattcactttcaactattggggatgagcttagaccgggtatcgttcatagaatagataaaaatacatctggcttggttgttattgcaaaaaataatgaaacacatgaaaaattatcaaaacaattcaataaccatacaatctcaagagtttatcaacttttaatttggggtaaactcagaccttcttctggtaaaatcgatacttacataaccagaagttcaaaaaatagacaactaatggaagttagccgttctaaaggaaagcgagctataacaaactataaaacaatagaaacttttgaaaatagtaaaacaccaacattaagtttagtagaatgtaaattagaaactggaagaactcatcagatacgagttcatatgactcatttaggaaatagtatcgttggagatgataaatataaaaaaaaatataaaaaacttaaaaatatagacttgaaattagaaaatttaatctccaagttaaacaggcaatttttgcatgcaaaaaatttgggttttattcatcctaaaaccaataaaaaaatgaatttttcttcaattttgcca

SEQ ID NO: 201953 - DNA, 703 bp, Unknown
  Bacterial polypeptide expressing nucleotide sequence isolated from the Sargasso Sea
attgtgtgatgcatacacaaaagcatactcgtgcgatacgacgagtgcatttggtggaattgttgcactcaatcaaactattgataaagagtctgctacagagattataaaaatattcacagaagttattattgcaccaggtatcacagatgaagctaaagaaatttttaaaacaaaaaataatttacgtgttttaattttgtcttcattgcatgaaaagaatacttcacaaaactataaaagtattgaggggggaattctagttcaatcaaatgacaatgaagaaacttctaagtctgatttaaaagttgttacacaaaaaaaaccaagtgaagatcaaattgaagacatgttattcgcattcaaagtttgcaaacatgtaaagtcaaatgcaattatttacgtcaaaaataaaaagacaattggtattggggcaggtcagatgagccgagtggatagtgctaaaatcgcttcacaaaagaatagcgaaatggaagatatagaaaaaaattcccttaaagattcagttgtcgcatccgatgctttttttccattccctgacggtcttcttgtgaccatttcttcaggggcaactgctgttattcaacctggtggatcggtaaaagacaataaagtaattgaggctgctgacgaagcaggaatttcaatgatatttactgacataagacatttcagacactaa

SEQ ID NO: 201954 - DNA, 716 bp, Unknown
  Bacterial polypeptide expressing nucleotide sequence isolated from the Sargasso Sea
catgatttatgcggagaaagtgaagtctgagttagaaaaaaaatttccaaataaaattgaaattaaaaaaattttaacaataggtgatgaaaatcaaatagatagattatcaaacataggtggtaaaggacttttttcaaaaaaaattgaaaatgagctaattggtgatgaaatagatatagccgttcatgcattgaaggatatgcctacaattgaaactgaaggactaaatacaaatttttttttagaaagaagctcaccaaatgaaattttaataagtaaaggaaatgttaaatttcaagatctagaaccaaactcgattataggaacctcttcttatagaagagagtttcagcttaagcgaaaaagatccgatttgaattataaattaataaggggaaatgtagatacaagaattaaaaaactagaaaatggagaatatgacgcaatacttttagctaaagctggaatagatgcgctaggttttaatgataaagtatcagaagaatttagtactgatgagttaattccttgtgcgggtcagggaatgatagcaattcaatgtagagatagcgatcatgaaatgaaaaacttattggaaaaaattaacaacaatgaagccagaattttagcaaatacagaaagagaagttttaaaaattttagaaggtgattgtgatacagctgtgggcgttttcgcaaaaattgaaaatgaaa

SEQ ID NO: 201955 - DNA, 813 bp, Unknown
  Bacterial polypeptide expressing nucleotide sequence isolated from the Sargasso Sea
atattgaaattaaaactatttcaacaaaaggtgatcaagttaaagatactaggttgtctgatataggtggcaaaggattgttttcaactgaaattgaaaaagagttagagaataaaagcatcgacattgcagtacatgcattaaaagatatgccagcaaaagaaaccagcggacttaaaacagactgttttttagagagaaatgatccaagagaaattttgataacaaatgataagaaaaaattaaatgatcttaagctgaaatcaattataggaacatcttcatttagaagggaatttcaaattaaaaaattaagatctgatctaacatgtaaaataattagaggtaatgtggatactagaattaaaaaactaaaagatggaaattatgatgcaataattttgtcttatgcagggattaaagatttaaatcttgaaaatgaaatagctgaaattttctcagcacaagaaattataccaagtgctggacaaggaataattgcactccaatgtcgtgatgcagataaagaaattatttcaattttaaaaaaaataaatcatgaagaaacatataaaagagctcatgctgagagaaatgttcttaaagttttagagggagattgcgaaacagcaataggggtttattcaaaaatagagggtgagacaattgaagttgaggcggaacttttttcaatagatggcactcaaagattttacgaaaagaaatttgacaagattgataaatttaaagaaattggtaaacaaattgggcaaaatttaaaaaggcaatcaaataattcttacaaaaaataat

SEQ ID NO: 201956 - DNA, 797 bp, Unknown
  Bacterial polypeptide expressing nucleotide sequence isolated from the Sargasso Sea
tagcgagcattatgactttggttcacaccaagatgtatatagccagcatgatgagagtggttcacactcagacacgtatagcgagcattatgactttggttcacacgtagacgtatatagccagcatgatgaaagtggttcgcactcagacacgtttagcgagcattatgactttggctcacacttagacgtatatagccagcatgatgagagtggttcacactcagacacgtatagcgagcattatgactttggctcacacttagacgtatatagccagcatgatgagagtggttcacactcagacacgtatagcgagcattatgactttggttcacacttagacgtatatagccagcatgatgagagtggttcgcattcagacacgtatagcgagcattatgactttggttcacacttagacgtatatagccaacacgaagagagtggttcacactcagacacgtatagcgagcattatgactttggttcacacttagacgtatatagccagcatgatgagagcggttcacactcagacaagtttagcgagcattgggatcaaggctctcatttggacgtgtatagccagcatgatgagagtggttcgcactcagacaagtttagtgagcattatgactttggttcacacttagacgtatatagtcagcatgatgagagtggttcacactcagacaagtttagcgagcattatgactttggttcacaccaagatatatatagccagcatgatgagagtggttcacacacagacaagtttagcgaacacagggaat

SEQ ID NO: 201957 - DNA, 232 bp, Unknown
  Bacterial polypeptide expressing nucleotide sequence isolated from the Sargasso Sea
tatgcacaaatattcagtaaaaccattaagtaacattgccaagataggtttggaaaagttagaggggacttcttgttttcttgaagagaattctgaagctcccgatggagtgctggttaggagtacaaaaatgactagtgaagatctaaccgctaatttaaaggcaatatcaagagctggagcaggagtgaataatattcctattgaaaaatgcactaaagagggaatagtt

SEQ ID NO: 201958 - DNA, 624 bp, Unknown
  Bacterial polypeptide expressing nucleotide sequence isolated from the Sargasso Sea
aggatgtatatcgtttgcaaggtgtaaagattaacgataagcactttgaggtcttagtaagacaaatgatgcgtaaggtacaaattactcattcaggtgacacatattttctggaagatactcttgtaagtaaagatgcttttcaagaacaaaatgataagttgtttggaatgaagattgttactgatgcaggtgattctgaagaattaaaatcagggcagattgtatctctacgagaattgagagaggagaattcgagacttaagagaaaagatgtaaaagaggttgaggctagagatgctatagctgcagttgcttctccagttcttcaaggtattactcgtgcctcgttacaagttgattcttggatttctgctgcatcatttcagcaaactactaaggtacttaatgaagcagctattaatgctaaacgcgatcatttaattggccttaaagagaatgttattattggtaaaaagattcctgcaggaacaggattaattcatgcagctgaaactatagttggttctcaatttgaatatgatagattaaatcaattaaaagaggaagccaacaattctgatgaagtagctgttgaagctacaaatgctgaagaggaataaa

SEQ ID NO: 201959 - DNA, 495 bp, Unknown
  Bacterial polypeptide expressing nucleotide sequence isolated from the Sargasso Sea
tatgactagaaaaattatcattggagcaagaggaagcaagttggcaatgctttatgctcaaaaagctaaagataaaattatcaaaagtaatgattttagtgatgaagatattgttattaaaaaaattaccaccaaaggagatgaaatacaggatgtaagattatcagaagttgggggtaaaggactattttcaagtaatattgaaaaagaacttcaagataaaaatattgatattgcagttcatgcacttaaagacatgccagctcttgaaacaaaaggtcttcaaacaaattcatttttagaaagaaatgatccaagagaaattcttatcacaacgaataaagaaaaattaagcgagttaaaaaaaaattccataattggtacttcatcttttagaagagaatatcaaattaaaaaaattaggtctgatcttgaatgtaaatttattagaggaaatgttgatacacgaattaaaaaattaaaagatggagcata

SEQ ID NO: 201960 - DNA, 601 bp, Unknown
  Bacterial polypeptide expressing nucleotide sequence isolated from the Sargasso Sea
ttgcctaaaatttctgcaataatacttgctgctggaaaatcatctcggatgaaaactcctaagccccttttgaatttagataaagaagccctaattaattttcaaattaaatctctaaagaactctcatattgaagaaataattgttgtgcttggatcaaacgcagaagaaattaaaaaagtaatattatctaatgaagttaaggtagttgaaaacattgattttgaacttggaaaaactacatcaataaaaaaaggtctttctgaaattaatgataagaatgacatattattaattgctgttgatcaacctagaaacaaacttcttattgaacaaatatctagttttcatattaatcatccaggagagaaaaaaatagtaatgccattttcaaatggaaaaagcgggcatcctattatattttcaaatatattttttaatgaactggctcaaataaatgaagaaactgaaggaataagagaagtaattaaaaataaccaggaatcaatgattaaatacaaaactaaagatgaatcagccttggtagaccttaatacgccagagcaatatgaaaaatacttactgaattattttaaatgaa

SEQ ID NO: 201961 - DNA, 481 bp, Unknown
  Bacterial polypeptide expressing nucleotide sequence isolated from the Sargasso Sea
atgttaaaactaagattatctagaggtggaacgaaaaagcgaccagtgtacaaaattgttgttgcggatagtaaatttcctagagatggaagatttatcgaaaaattgggattttttaaccctttgttaccaaaagaaaaaaaggaaagggttggtcttgaaaatgaaagaataaaatactggttagagcaaggcgcaaaaccaactattagagttgctcgattacttggggagaataaattaatggaaatgccaaaagcgggaaataatccactaaaagcaattccaaaaaaagatagaaaaaaagattcaggagaagaaaaaaaagttgatgcaccaaaagatgctgcacctaaggcagaagaaaagaaagttgatgtaccaaaagatgctgcacctaaggcagaagaaaagaaagttgatgtaccaaaagatgctgcacctaaggcagaagaaaagaaatcagaggaaaaaaaataaa

SEQ ID NO: 201962 - DNA, 487 bp, Unknown
  Bacterial polypeptide expressing nucleotide sequence isolated from the Sargasso Sea
aatgaaaagcaaaaaaattattattggatcaagaggaagtaaattagcattaatctatgctgaaaaagcaaaagaaaaaattttaaaagtatccaaagaattcaatatcgagagtgtagaaataaaaaaaattactacagcaggagatttaaatcaaaaggatagactttctgaaataggaggcaaaggacttttttcgaacaaaattgaaaaagaattattagaaaataaaattgatattgctgtacatgctttaaaagatatgccctcagatgaaactgatggattattaacaaattgttttttggaaagaaacgatcctagagaggtattaatttcgaaaaataaaataaaatttaaagatttaaatcaaaattcaataataggaacttcttcttttagaagagaatttcagttaaaaaataaaagaagtgatttaaattacaaattaattagaggaaatgttgatactaggattaacagttaa

SEQ ID NO: 201963 - DNA, 765 bp, Unknown
  Bacterial polypeptide expressing nucleotide sequence isolated from the Sargasso Sea
aatgaaatttaatgtaaatcaaaatgatctacaaaaatcgcttggatattgtcaaggagtgatagaaaaaagaagcactcttccaatactttcaaatattcttcttgatgcacaagcttcaaaattgaaaattgtagccactgatcttgatctcatatttgtaaatgaaattaaaaatgtagaaattattgaagagggaaaaacaacaacaacctcttcaataatgtacgatattatcagaaaatttgattctgggaaaaaaataaatttcaatcaaacaagtgataataaaattcaactagagtctgaaaaatcaatttttaatttaaattgcatatccgcatctgagtttcccgttactgacgaggtgtttaaatcgaacgaatttactgtaaagtccaaagagctgttgaaattactaaataaatgtaaattctcaatttcgaatgatgaaacaagacattatctaagtgggatctatcttcatcaaacgcgcatggaggaaaaaatttatttgactgcagccgcaacagacagtcatcggatgtctatttcaaagatattattaaaggatgaaatacaatttgatccaattattttaccaaaaaaaacaatatttcagttagttaatctattggaagattatgagggagatgtaaaaatttcaaatgaaaaatcaaaaataaagtttgaaatggaaaatagtatattaatttcaaaacttattgacggaaaattcccgaattatatccaagtaattcccaa

SEQ ID NO: 201964 - DNA, 760 bp, Unknown
  Bacterial polypeptide expressing nucleotide sequence isolated from the Sargasso Sea
ggaagattcaagaaattcggatgtttcaggggttgatatttatgctcagcatgtgagttctagcggctctgttactcattctgaaaatggaattttaatttccaatgcagataatttgcagtttaatcctcttgtgagagatgatggagcgggtggttccttaatagtttggggcgatcaaagatctggaggaagctatggtatttacatccagcgcttgcaaaattctggaacttctctaactgctaatggaaaagaaagtttctttggtatttcaactgatgctgcaaatgaaccttatgagcatggtgctgtatatttagagaataatgaggctttagtgtattggcaagataaccgatttggagagtcgaaaatttatggtactaaaatttcatcttcttttgatgggagcgggggtgattatttttcaaattcatcaattaatggacagcccttaacatctttagatttagctcaagaaattcctaaagttatactggctggtgataaaatatttttaagttttaaagttgaagagtctccaaacgaaaatctatactttcaattattaaatttagatttaagtgcatatggttcagcggtagcagttgcggacccttcaacttctaagcagggatttgatatggtatatggagaggatggtaatatttattatgcttattcagaagactatgatattactgttaaaaaaatctcaagttcaggtagtgtagattggacggtgcaggctgttagt

SEQ ID NO: 201965 - DNA, 845 bp, Unknown
  Bacterial polypeptide expressing nucleotide sequence isolated from the Sargasso Sea
tgtagaggtacagaatgaactgaaaattaaggccgcctatatctcagcgatagaaaattgtgaccctcttgcgtttgatacaccaggttttgttgctggctatgttcgctcttacgcaagatatctaaatttaaaccccgacgatgtatttatgaaattttgttcggaaagtggttttgctactgttcatggcatgtcggataaagcgtcatcagttaaaccaaataataattctgtattattacctgctgacaattttattgacggtgaagagctttttaacaaatctccttccgctatattagacaactctgcaaaaacctttgacaaacttgagccgggtgcgattggttcattagtagccttgatttgtatagtttgtggaattggctatggtggattgatgatttttaaccaaatacagaccgtaaaaatctcaccttcaaattctactccgatagttttaaccgaaatcagctcagattttctaggacagcaggatgtagacaattcggtaactggcaaattaaaaaacgatcaattagatagactataccgaccgcaagctttagaagttccagtctttactgctagggatggtcctatatccaccttggacccatcattttcaaaaaatttcgatatgcagcaagagttaattatttctgaggtagcaactaacgctttagaaggaaacttaactgaacaagtttctaccaataatttccatgaggctccgattcaagttgttcaagatcttccgccttctatagcagtcttggtaactgaaaacgcctgggttcaaattacaggatcagatggcacggttatttatgaaaacataa

SEQ ID NO: 201966 - DNA, 805 bp, Unknown
  Bacterial polypeptide expressing nucleotide sequence isolated from the Sargasso Sea
gtacagttttcccgcaggtggagaaaatactgatttacaagtcgaagtaatgaaagatattggtacaactgcatatgtaggtgttccagattttttgaaaatcattttagaaaaagctgacgaaaaaaaaatatcactttcaaaattgacaaaagcaatggtaactggaggacctttatttcctgcagttgctcaaaattttagagaaagaagtattcatgtaagacaatgctatggaactgcagatttaggacttgttgcttatgaagcagcagagaatgatggaatggttatagatgaaaatgttattttagagatcgttaaaccgggtactgggaaacccttaaacgacggtgaagtaggagaagttgtcgtaactgttttaaataattatgagttacctataatcaggtttgctacaggtgatctttctgcaatattagaaggaaacagctcaactggtagaactaataaaagaataaaaggttggatgggtagagcagaccaaacaacaaaagttagaggtatgtttgttcaaccatcacaagttaataaaattttagaaactctaaagataaacggctctgccagaatgattgttagtagatcaaatgataaagatgaattacttttgaaagttgaggctgaagttacagacacaaatcaaatagaatctttggaacaaaaaatatctgatgaaattaaaaatattataaatttaagaggcactgctaaaatagtacccataaaaagtttaccaaatgatggtaaagtgatagatgatatacgtaattttggagagtaa

SEQ ID NO: 201967 - DNA, 802 bp, Unknown
  Bacterial polypeptide expressing nucleotide sequence isolated from the Sargasso Sea
tgatttaacggtgagtggttccttgcatgacagtacggctgtctcgattgcatctggtgctgattacaatgtgaatgcgagtgatacggtagcttccatagagggtgcggggaacattgttcttgcaagcagtcagacattgacggcaggcgatggtaataacaagacgttaagcggagtgatgtcaggtgcgggtaattacattaaagcaggaggaggcacacagacgttaagtgcttcgaacacctatactggcacgacgcaggtgagtgcgggaacattgacggtttcgggatcgggtcgattatcggatagcacggctgtgacggtagacagtggagctgtgtataatgtggcggtgagtgatacggtagcttcgattgcaggtgcgggtagtattacccttggcagcaacacgctgacggcgggtggcagcaatgcgaatacgacctttagtggtgtgatctcaggttcaaatggtaatcttatcaaggctggcagtggtgccttaaccttgagcggggtcaatacgtacactggcacgacgacgattaatgcaggtgatttaacggtgagtggttccttgcatgacagtacggctgtctcgattgcatctggtgctgattacaatgtgaatgcgagtgatacggtagcttccatagagggtgcggggaacattgttcttgcaagcagtcagacattgacggcaggcgatggtaataacaagacgttaagcggagtgatgtcaggtgcgggtaattacattaaagcaggaggaggcacacagacgttaacgggcaac

SEQ ID NO: 201968 - DNA, 572 bp, Unknown
  Bacterial polypeptide expressing nucleotide sequence isolated from the Sargasso Sea
tatgtcttcggttcctcctcagcagtgccttgtagcattagatgttgaaggtgtccttactccggagatctggattgcggttgccgacgaatttggcatagaaggcctaaaacgaaccacaaaggatgaacctaattaccagttgttgatggattctcgtattcagttgatcaactccaacggtattgcgcttcaggacattcaatctgtaattgcttcgctatcacctttggagggtgcttctgactttttggatgagcttcgttctcgtgtttcggtagttcttctttctgatacttttgaagaatttattcagccgttgatggatcagttgggaaacccgttgattctctgccatcgtttgattgttgatccaaacggggtcattactggtttcgtggaacgaattccgaatcagaaattccacgctgttcgctcgtttcaggagctgaattaccgggtgcttgctgctggagattcgtataacgatctttcgatgattgaccaagccgacgctgggcttttatttcgggctccagatcatgttcggtctgagagatcagaccttgtct

SEQ ID NO: 201969 - DNA, 872 bp, Unknown
  Bacterial polypeptide expressing nucleotide sequence isolated from the Sargasso Sea
tgatgcaataaataatgcacaaatgataaaaggaggatttccagctagatatggagggcgtttatcttctgttttagatattcatatgaaggaaggaaatatgaagaagtttaaaggagaaggaagcattgggattatttcttctaaattaacccttgagggaccaattattaaagataaaacatcatttttagtatctggtcgtagaacctatgttgatttatgggctattcctctaattaattcttttaataatagtggcggtggaaaaggggaaggtggatcatcaagctcctccaatacaggaggctattatttttgggatttaaatgcaaaaataaatcacaagttttctgataaaagtaggttatatgttagtggatattttggaaaagatcgtttctatggagatcgaaacaattcctatcctgatggaggtaatcaaataaatgaacaggccagcaatgcacttgagtgggggaatgccatagcagcaataaggtggaataaaattattactccaaaattgtttatgaatgttactgctacatatagtcaatatcaatttggagttggatttacaaatcaaacttcggttacctatacagatagtacccagcaaagttctttgtcttctcagtatgattctggaattcgggattgggctggaaaggttgatttcacttattatccaaatgccaatcattccattaaatttggtttaggaaatacctatcatacttttataccaggagtgaatcaatttcaggttaatcaatcgggtatttcttcagttgattccacatttggttctacccagcaatatggtcatgagcattggatttatgtagaggatgattgggaaattagtg

SEQ ID NO: 201970 - DNA, 738 bp, Unknown
  Bacterial polypeptide expressing nucleotide sequence isolated from the Sargasso Sea
ctagatcaaatcctgcaacatatacgggacttttttcatatataagagatcttctatctcaaactgttgaggctcgatccagaggttataaacctggaaggtttagctttaatgttaaaggtggaagatgtgaggcatgtcaaggtgatggaatgattaaagttgaaatgcattttcttgcagatgtttatgtgaaatgtgatgtttgtaatggcaaaaggtacaatgaacaaactttagaaattaaatttaaagataaaaatataagtgatattcttgatatgactgttgaggatgctttagatttttttgaggcgcacccttcaatcaaaaagaaattaaatacattaaatgacgttgggcttggatatattacgcttggtcagtcagctttgacattgtcaggcggcgaagcccaaagaataaagttagctaaagagttatcaaaaagaagcacaggtaaaacattatttatactagatgaacctacaacaggattgcactttgctgacattgaattacttctaaatgttttagacagattaaaaaaacaaggcaacacagttgttgttattgaacataatcttgatgtaattaaaacagcagattggataatagatttaggtccagaaggaggttctgatggaggtatgattgtggctgagggaactccagaggatattgttaaaaacaaagactcttatacaggacagttcttaaaacaattactaagttaag

SEQ ID NO: 201971 - DNA, 615 bp, Unknown
  Bacterial polypeptide expressing nucleotide sequence isolated from the Sargasso Sea
atacaagaaaactaaaaaagatgttgggttggaagatggagatcaaaaaagaacaattgagcttgctgaatatgctagcattgatgaaatagcaaaagttctagacgtatcaacaagtgaagtaattggtaagtgcttacaaatgggtattttagcaactgtaaatcaaagacttgaatgggatgtaatagaattaattgcaggcgaatatgatgttgaattgaagaaatatgaagaagttgttgatgacctgtttgtaacatctcattcaaaagaagaactatcaaacgctttagaaagagcaccagtagtaacaatcatgggtcacgtagaccatggaaaaacatctattttagactatataagaaaaacaaaagttgcagcaagtgaatcagggggaattacacaaagagttggagcatatcaggttttacacaatgataataaaatcacttttttagatactcctggacacgaggcttttactgctatgagagctagaggcgctcaatcaacagatattgttattttggtagttgctgctgatgatagtgttatgcctcaaacaattgaagctattaatcatgcaaaagctgcggaagtgcctattgtagt

SEQ ID NO: 201972 - DNA, 427 bp, Unknown
  Bacterial polypeptide expressing nucleotide sequence isolated from the Sargasso Sea
tatgcgtgagaaatctgattttgtaggacaaggcatgtcctttcctcttgcaatagatagggctggctcttttctgatggtgtctggctcggagtctcttgagtcctcgataaccatgattctttcaactgctcctggcgaaagagttcaccgcccccgtttcggctgccaaatatgggaacttcttttcgaaccaatctcgcccgagcttttagggaggtgcgagcaggccgtcgagacggcacttgagttttgggaaccgagaatagatgttgtcaatgttgaggcgcgagctacatcagctgaaggggaagtcgaaatccttatcgactatgtcgtcaagatagaaaacgagcgccgtaacctcgtattcccgttttatgtaattcctagtgatggagagtcggatggtctttccgagagttaa

SEQ ID NO: 201973 - DNA, 700 bp, Unknown
  Bacterial polypeptide expressing nucleotide sequence isolated from the Sargasso Sea
aacaatattgatatagctgttcatgctttaaaagatatgccatcaattgaaacagaggggctaataacaaatttttatttaaaaagaaattcgcccaatgaaatttttattagcaacgacaatataaattttctagaccttaaacctaattcgataataggcacttcttcttacagaagagaataccaattaaaaagtattagatcagatctggattataaattaataagaggaaatgtggatactaggattaaaaaattagagaatggagattatgatgcaattttactttctaaagctggcattgaagctttaggtttgacaaataaaattacacatgaatttaatactgaagaattaataccgtgtgctggacaaggtattattgccatacaatgtagagaaaatgatcaagaaataattaatatcttagaaaagattaatgatgatcagtccagaattattgcaaatgctgaaagaaaaatcttaaaaatactcgagggtgactgcgatacagcagttggtgtgtttgcaaagattgataaagattttgtaaatataaaagcagaacttttttctgtagatggcaaacaaagattttttgttgatgaaagtgaagataaaaaaatgattgaagatttaagtattaagattggagaaaaattaaaatcagagtcaaaaggatcttataaaaggtaaa

SEQ ID NO: 201974 - DNA, 679 bp, Unknown
  Bacterial polypeptide expressing nucleotide sequence isolated from the Sargasso Sea
atgagtaaaaaaataataattggatctaggggtagcaagcttgccttactttatgcccaacaagctaaagataaaattattgaaaataccaatctaaaaaatgatgatattttaattaaatcaatcacaaccaaaggtgatgaagtggaggatataagattgtcagaggttggtggtaaaggtttgttttctagcaatattgaaaaagaacttcagttaaaaaatattgatattgcagttcatgcgctgaaagatatgcccgctaatgagacagaagggctaatgacaaattcttttcttgaaagaaatgaccctagggaaattttaatttcaaaggataaaaaaaaacttaaagacttagatgaaaagtcaattgttggaacttcatcatacagaagagaatttcaaataaaaaaaattagaaaagatctgaactgcaaattaataagaggaaatgttgataccagaattagaaaattaaatgaaggaatgtatgacgcaattattttgtcttatgctggtataaaacttttaaaatttgaaaatgaaatctctgaaattttttcagctaaagaaataatccctagtgcaggacaaggcataattgctcttcaatgtagagaaaatgatgatgaggcaatttctattttaaataaaataaatcatgaggaaacacata

SEQ ID NO: 201975 - DNA, 727 bp, Unknown
  Bacterial polypeptide expressing nucleotide sequence isolated from the Sargasso Sea
atgtcttattatcctgatgtcgttattcttgctggtggtgcaggttcaagaataaagaaactttcaaaaaataagcagaaatgtttgataaaatttaacaacaaagtttttttacaatatataatcaaccagatttctgcagaagagataaataaaatttatattttaaccggtttaaaatataaaaatgttcataaaatgtttcacaaaaaaaatcaaaattttcgtgaaataacatgcattagagaaaataagcctttgggcactggaggtgctttaagtcaacttaaaaagttcaatataaatgatttttacttgttaaatggagatagtatatttgatataaaaatatcttctcttaaaaattttgttaataacaaaactattggatcaatggctttactacaaaataataattatagatctaataaaaaattagcaaatcttgatttggttaaagaaaaaattaaatttacaaaaaataataagtatatgaatggtggtatatacttttttaaaaaaaagattttaaaattaataccaaataaaaattgctctttagaagatgacatattgccaaatcaaataaataaaaatagaattgaaggaattccatttaaaaaaaatttttttatagatattggaactccaaaaaacttcaaaattgctgaaaaacaattagagaaaaacttcaaaaaaccagcagtttttctagatagagatgggg

SEQ ID NO: 201976 - DNA, 844 bp, Unknown
  Bacterial polypeptide expressing nucleotide sequence isolated from the Sargasso Sea
attggagactgtgccttccaagactgcacctccctcacctccatcaccatcccgtcctcggtaacgcagattacggttatggccttcaaaggctgctcctccctcacctcggtcaccatcccgtcctcggtgaatattattggcgatggcgccttccatgattgctccaaaatcactggggtcaccatcccgtcctctgtgactagtattggtaggtgggccttctacggctgctcctccctcacctcggtcgacattcctgaaggagtgacgaagattggtgcgtatgccttccgcggctgctccctcacctcggtcgacatcccgtcctcggtgacggagattggcgaaagtgccttctttggctgcacctcactccaatcggtcaccatcccgtcctcggtgacggagattgacgcccgtgtcttcattggctgcacctccctcacctcggtcacgatcccgtcctcggtaacgaagattggcgatggtgccttccgctactgctcctccctcacctcggtcgacatcccgtcctcggtgaggattattggcgatggcgccttccatgattgctccctcacctcggtcacgatcccgtcctcggtaacgaagattggcagcggtgccttccgctactgctcctccctcacctcggtcgacatcccgtcctcggtgacggagattggcgatggcgccttccgcaactgcacctccctcacctcggtcaccatcccgtcctcggtcacggaggtgaggatggatcacgggatgtatgttttccctgttaacgaaattacaacaggtagtgaaacgcggctactatgtaaagcaggtattgtgg

SEQ ID NO: 201977 - DNA, 292 bp, Unknown
  Bacterial polypeptide expressing nucleotide sequence isolated from the Sargasso Sea
catgaacctctacagggatctctccaagaaaatcagagtctgggactcctcggtaggtcaatttgaagagcttgcagcgaaacagcttcaggatgttgcatcgcttcctgttgtggaaggcgtccgtgcgatgccggattcccattgggggcttggggcctgcgtcgggtccgtgatcgccctcaaaaaggcagttattcctgcagcggtgggagtcgatatcgggtgtggaatgctggcctgcaagaccagcctcaattcccaccaccttcctgaaaacctcaaggccttg

SEQ ID NO: 201978 - DNA, 379 bp, Unknown
  Bacterial polypeptide expressing nucleotide sequence isolated from the Sargasso Sea
aatgagttttttaaaaataaacaatcttagtgttgattatcaaatgagaaaagagacagtatatgctgctaagaatgtaaatgtagaggtaaataaaggtgaaattttaggtttagttggagagtcaggatcaggaaaaagcactgtaggaaatgctataataaatttaatcgatgaacctggaaaagtttcaagtggttctgttattttaggagatataaatattcatgaaaattctgaaagtattgttaaatatagaggaaataaaattggattgatatttcaagatcctcaaacttcacttaaccctattcttactgtaggtgaacagttaattgaaacaatacaaactcatcttaaattaagtaaagaggaagca

SEQ ID NO: 201979 - DNA, 688 bp, Unknown
  Bacterial polypeptide expressing nucleotide sequence isolated from the Sargasso Sea
gtcagaagttggtggtaaaggattattttcaagcaatattgaaaaagaacttcaagataaaaatattgatattgcagttcatgcacttaaagacatgccagctcttgaaactcaaggtcttaaaacagatgcattcttagaaagaaatgatccaagagaaattctaatcacgatcaacaaacaaaaattaagtgaattaaaaaaaaattctataattggaacatcatcttttagaagagaatatcaaattaaaaaaatcagaccagaccttgaatgtaaacttattagaggaaacgttgatacacgaattaaaaaacttaaagatggaacttatgacgcaataatgttgtcttatgcaggaattaaatttttgaattttgatagtgaaatttcagaaatattttctccagaaaaaataattccaagtgctgggcagggtataattgcacttcaatgtagagagggtgatgaggaaataatctcggttttaaaaaaaataaatcacaacgaaacatttatgagagcacacattgagagaaatattttaaaagttttggaaggtgattgtgaaactgcagttggagcccactctaaagtagaaggtggtaaaattaccgttgaagctgaattattttctttagacggtttaaaaagatactatgaaaaaaaaactggtaaacttgaagac

SEQ ID NO: 201980 - DNA, 191 bp, Unknown
  Bacterial polypeptide expressing nucleotide sequence isolated from the Sargasso Sea
taatgagttagatctattgattagaaccggaggagatcgccggataagtaatttcttgttatatcatttagcttatactgagatccaattttctaaaacactctggccagattttacggaagaggaatttataaagtgcttggaagtgttttcaaaaacggagaggcgttttggcaaacggactttataaa

SEQ ID NO: 201981 - DNA, 619 bp, Unknown
  Bacterial polypeptide expressing nucleotide sequence isolated from the Sargasso Sea
attgaaaacagttcatttcataagacatggtgaaactgagcagaatgcactaaaagtttggcaaggacacactgacacacctttaaataaaaaaggattagaacaagctaaattattatctgaaaggataaacagtagagtcactaaagttttctcttctgatttaaaaagagcatctcaaacagcctcatttttgtctagttcttcaatccttagagataatcttagagagattaatgtcggcgactttacaggaaagtctgtgaaagacacctacacttcaaatcatgaaatttttcaatccctgcaaaatgactcttttcaatttcctaatggtgagtcggtacaagaatttaaagacagagttaggaacgagttagaatatatttttaatcagacagaagaagattcagaaactgttgttgttacacatggattttttataggcactgctattggtttgacactagggtttaacacttatccttttccaataggagatataacaaatacttcaatttcaaccattgtgaaaagagaaacagttacacaggtaaataaatttaatgactcaattcatttgaacaaagagaatatagacttcccagctaaatcaaaa

SEQ ID NO: 201982 - DNA, 665 bp, Unknown
  Bacterial polypeptide expressing nucleotide sequence isolated from the Sargasso Sea
tatgtttggaggttctacaccaaatgaagcattcagaatcagtgataatggtaatgcaacaattactggtaacttatctattaaaggtgtggtgggtgggacaggtgaaaatggggcattggaattatatgaaccttctggaacaggggcgaataaaatcacaataaaagctccaaatagtattacaagtgatactacactaactttacccgatggagctggttcaaatacaaatgttttacaaacggatggatctggtaatttaacatgggttgctaaagatagtggtccaactggatctcaaggacctactggttctggtggtagtacaggggcacaaggacctactggaacaactggttcacaaggaccaacaggttcaactggacctactggttctggtggtagtacaggagcacaaggacctactggttcacaaggaccaaccggttcaactggttcacaagggcctactggttctggtggtagtacaggagcacaaggacctactggaacaactggagcacaagggacaacaggaacaactgggtcaggtggcagcacaggagcacaaggtccatccggccctgctggtttgggggggctgggtgatactggtccccagggacctaccggggaaactggttctcaaggccctactggat

SEQ ID NO: 201983 - DNA, 537 bp, Unknown
  Bacterial polypeptide expressing nucleotide sequence isolated from the Sargasso Sea
aggagcgattaatgcctcatatacatattagttggcaatcaggcgatgatttaattcttaagagaatgaaaagacgacataatagatcacaggttataaaattttgtgaaaaagcaaaaagattaaggcccaatatagtttttggtgcagatataataacaggattcccaacagaaactgacgacatgtttaaaaataccagtaatttgattaaagaatgtgatttgatatatttacatgtttttagatattcaaaaagattaggaacacctgcatcaaaaatgccgcaagtttgtgaaaaaattaaaaaagagagatcaaaaattttaagaacaattggtaaaaataaattagttgaatataaaaataccattattggtactcaaaaaaaaatattaattgaacaaaatattaaaaatcactcaataggacgaactcaggaatattttaaaataaaaatagactctaatttagttgaaggaaaaatatataatttattaattggatcaaacacagacaatatgttaatagcatgaa

SEQ ID NO: 201984 - DNA, 259 bp, Unknown
  Bacterial polypeptide expressing nucleotide sequence isolated from the Sargasso Sea
tcacgggatgtgaaagtgctgaaggatgtgcaatcagatatcgcgggccgcgacgtgctgattgtggaagacttaattgactcgggcaacactttaaacaaagtgcgcgaaatgctgttattgcgtgagccaaagagcttatccctgtgcactctattggataaacctgagcgccgcgaagtggatgttaaagtcgactttatcggttttacgatcccagacgagtttattgtgggttaccgcatcgattatgctgagc

SEQ ID NO: 201985 - DNA, 523 bp, Unknown
  Bacterial polypeptide expressing nucleotide sequence isolated from the Sargasso Sea
aatgattattggatccagaggtagcaaacttgccttactttatgctcaacgagctaaagataagattattgaaaatactgatcttggtgatgaagatattttaattaaatcaattataactaaaggtgacgaagtacagaatataagattatctgagcttggtggcaaaggtttattttctagtaatattgaaaaagaacttcagttaaaaaatattgatattgcagtccatgcacttaaagatatgcctgctaatgaaacaaaaggattaacaacagactctttcctggaaagaaatgaccctagagagattttaattacaaataacaaaaaaaaacttaaagacttagatcaaaagtcaattgttggtacttcatcttacagaagagaatttcaaataaaaaaaattagacaagacttgaactgcaaactaattagaggaaatgtagatactagaattagaaaattgaatgaagggatgtatgatgcaattattttgtcttatgctggtatcaatttttaa

SEQ ID NO: 201986 - DNA, 807 bp, Unknown
  Bacterial polypeptide expressing nucleotide sequence isolated from the Sargasso Sea
tatgaatagagataaaatagttattggatcaagagggagcaaattggctctaatttatgctgaaaaagtaaaaagcaaattaatagataattgtccaaaaaaaattgaaataaaaacaattgttaccgaaggcgatgtaaatcaaaaagatagactttcagaggttggaggaaaagggttattttcaaaaaatatagagtcagaactattagaaaataaaattgatttagcagtacatgcattaaaagatatgccaggaattgaaactaaaggtctagttacgaattgttttttagagagaaattatccaaatgaaatactaattagtaaaaacaatattaaatttaacaaacttaaatctaaatctataattggaacttcttcttatagaagagagtaccaactaaaacacatgagaaatgacttaaattataaattgattagaggaaatgtagatacgagaataaaaaaactaaatgaaggtttgtatgatgcaattatcctttccaaagctggaattgactcattaaatttaaacaatcatataacacaagaattttcaattgaagaattaatacctagtgctggacaaggtgtgatagcagttcagtgtagaaatagcgacaaagatataaaagaaattttaaaaaaaattaatcatcaagaaaccaacacttgttgtgttgcggaaagagaactattaaaaaccttggaaggagactgtaatacagcaataggtgcaatttctactattgatcaaaacacaattacacttaatgttgaactattttcaaaagatggaaaaaa

SEQ ID NO: 201987 - DNA, 768 bp, Unknown
  Bacterial polypeptide expressing nucleotide sequence isolated from the Sargasso Sea
catgtcccatcaatcaagccttatcgcgtctgacatcgatgaatatcttgctcagcatgaacaaaaggaattacttcgcttcatcacctgtggcagtgttgatgatggaaaaagcacactcatcggtcgtcttttctatgaatcaaaaatgatctatgaggaccagcttgcagcgatcaagaaggacacatcccggtatggcacaaccggtgaagaagttgacttagcgctttttaccgatggcctcgaggatgagcgccagcaggggattacaatcgacgttgcctaccgatacttttcaacagacaaaagaaaattcatcatcgccgatacccctggccatgagcaatacacacgaaacatggcgaccggtgcctcaaccgctgaccttgcaattattcttattgatgcacgtcatggtgttttgcctcagacgaagcgtcattcatttatcgtttctcttctgggaatcaagcatattgtcgttgcggtcaacaaaatggatatcgttgactacgatcaggcagtctttgaaaaaataaagagtgattacgttgatttcgctgctcgcctcgatctgcctgatgtccactttatgccgatttcagcgctcaagggagataacgttgtaagcctgagtccaaacacaccttggtatacaggctcaccactgatgccactgctagaaaccgtgtacatcggctctgaccgaaatatggaagattttcgttttcctgttccatatgttctacgtccggacccttattt

SEQ ID NO: 201988 - DNA, 905 bp, Unknown
  Bacterial polypeptide expressing nucleotide sequence isolated from the Sargasso Sea
tgtgacgatcaccgtctcggtctcggattcgaccgaggcggagcttgtgagcgattcgtcgctggtgtttaccgagagcaactggaatgcggctcagacggtgacggtccggggtatcgcagacaatctgagtgatggagatcagtcgtacacggtgatcctcaaagacaatgtgaccagcgatgcacgctaccgctatgtggatccaccggatgtctcgttgaagaacctggacttgacgacgaagggcggattctatgtttccgaggcgtcgaacgacaccgatgagaatggaatcacctcaaccttcacggttcgtctctcctcgcagcccggggataatgacacctcgacggcagacaatgtgacgatcaccgtctcggtctcggattcgaccgaggcggagcttgtgagcgattcgtcgctggtgtttaccgagagcaactggaatgcggctcagacggtgacggtccggggtatcgcagacaatctgagtgatggagatcagtcgtacacggtgatcctcaaagacaatgtgaccagcgatgcacgctaccgctatgtggatccaccggatgtctcgttgaagaacctggacttgacgacgaagggcggattctatgtttccgaggcgtcgaacgacaccgatgagaatggaatcacctcaaccttcacggttcgtctctcctcgcagcccggggataatgacacctcgacggcagacaatgtgacgatcaccgtctcggtctcggattcgaccgaggcggagcttgtgagcgattcgtcgctggtgtttaccgagagcaactggaatgcggctcagacggtgacggtccggggtatcgcagacaatctgagtgatggagatcagtcgtacacggtgatcctcaaagacaatgtgacca

SEQ ID NO: 201989 - DNA, 333 bp, Unknown
  Bacterial polypeptide expressing nucleotide sequence isolated from the Sargasso Sea
aatggttatagtttttattggccctcctggttgcggtaaggggacacaagctaatattttaaaagacagtattttaccagatttaaatattctaactgtcagttcgcttctaaaagagaaatctcaagatgaaagtattttaggtaaagaaattaaacataaaatggataatggtgacttaatcgaggatactgttgtaatctcagtattaaaagaaaaagtaaactctctatccaatgaacagatattgattgatgggtttcctagaagttctattcaagctgactcacttcttgaaatattcgataataaagaactaagtattatcaactt

SEQ ID NO: 201990 - DNA, 883 bp, Unknown
  Bacterial polypeptide expressing nucleotide sequence isolated from the Sargasso Sea
aatgtttgcattagcatccatattatctttgttagctcttataatttctgttccaatttttttagtatttggtttaggtagctctgtagctgctattggtggacttaatctcccttggtctgttttaattcaggtatcttttggggctctaacaaaacatgtacttatagctgtgccattatttatttttagtgggatggctatgctcaaaggtggagcagcacttagacttgtaagatttgcaacgactttggttggacattggcctggaggtctaggtgtggcaatggttattgcgatgggattctttgcagcattttgtggatctatattagctgcaattactgctgttggaactatcatgatgcccaaaatgattgagcaaggttaccctactccatttgtggtcgtgcttgctgcgtctgctgcacttcttgaagctctaatacctccgtcaaatgcagctattttgtttagtgcacttacatacgttcctgtctcaaaaacatttgctgcaggagttataccgggaattattcttctaattttaatggttcttttagttttatttaagtgcagacatataagagcagacaaaaaagctacattcaaagaaagattaagttctttcattgcagctcttccagcattgataaccccagttataatattgggtggaatatatgcaggttttttaactccatcagagtctgcagctattgcaggagtttatgcagttgcaataggatttttaatttatagagaattaactttttcatctttattaagttgtttaaatagatactgcaataattactgctgttatattttcaataattgcaacagctacttttttaagtgttgtgcttacctacacacaagc

SEQ ID NO: 201991 - DNA, 817 bp, Unknown
  Bacterial polypeptide expressing nucleotide sequence isolated from the Sargasso Sea
tatgaaaaataaaaaaattattattggaagcagaggaagtaaattagccatgatttatgctgaaaaagcaaaaaaccgaatattaaatttttaccctgagtttacatttgatgatatcgagataaaaaaaattacaacaaaaggagatgtttatcaaaatgaaagattgtctgaattaggtggcaaaggacttttttcaaaaaaaattgaagaagagttaataaataataaaattgatattgcggtgcatgccttgaaagatatgccatcggaagaaactgatggattaataactagttgctttctaaaaaggaatgatcctagagaagcaatattatctaataaaaatataaaacttaaagatttgaactcaaattctttagtaggaacttcatcatacagaagagaatatcagttaaataatttaagaaatgatttaaaatttaaattaataagaggaaatgtggatactaggataaaaaaactaaaagataatttgtatgatgcaattattttatctattgcaggaattaattctctaaatttgaatgaatatgtaactgagatattacctactaatgagatgctaccaagtgctggtcaggggattatagccttacaatcaaaagaagatgataaaagaataaatacaatattaaaaaaaataaatcatgagtcaacttatcaatgtgctcaagctgagagaaatgttttaaaagtcttagagggggattgtgaaactgcaattggagtatattcatctattagtgataaaaaaattgagattaaagctgaactttttctctcgatgaaaaaa

SEQ ID NO: 201992 - DNA, 892 bp, Unknown
  Bacterial polypeptide expressing nucleotide sequence isolated from the Sargasso Sea
aatgggtgaaaatgctagaaaaaacgcaataaaaaatcatggacttaatgatactcattttaaaaaagtgtttcctgaaattctaaaaatcgtaagaaatacctcccctaaaaaatctatttttaaacaaaaaactgataataaatcaagtgaaaaacaaaaagtttctaaaaataaaaaaaattcacgcaaagaaaaagaagaaattcaaacacaggaaattgatattctagacgatgatgaacttcctaagatttcagttgtaacactgacacataacagaaaatttatgtttaaaatggctatatataactttaatactataagttatccaaaaaataagttggaatgggttatatatgatacgagtaatagtgataattcagttgaagatttactgccatcagaaaaagatagaaaagagctaaatattaagtatattagttataactcagaaataatttctattggtgagtccagaaatagatcaatagattactgtagcaataatatagttgtttttatggatgatgacgatttttatccacctgaaagtgtaaaaactagggtatcaattcttgaaaatagtaataaaaacatcatagcctgcacaactataggttcatttgatataaacaaatttatttcatttattgatgttccgccatatttaaatacttatagccatcgtatttctccagcaacactatgttttagaaaaaatataattaacaacaaatgtagatttagtgatgaaaatatatttgaatgtctagatttatttaaaaatatagattatatggattttaaagaaataagctgggttaatgttatagtatctctatgccataactttaatactacaagcagaaattccctaatactaaaccta

SEQ ID NO: 201993 - DNA, 870 bp, Unknown
  Bacterial polypeptide expressing nucleotide sequence isolated from the Sargasso Sea
tcgaaggtcttaagaaaaaaaatatagccaatgctgatatgcttcagggaaaagagctttcatataataatattgttgatgctgatgctgcatgggaatgtgtaagagaatttaatgatccagcatgtgtaatagttaagcatgctaatccttgcggagtttctgagagtgattctattttcaaagcctatgatctagcatttaatactgaccccacctcagcatttggaggtattattgcttttaataaagaagttgatggtgatactgcaaaagaaataaacaagcgtcaatttgtagaactggtaatagcaccagattatgaaaaaaaagctattaaagaactctcaaaaaaaaagaatataagagtattaagagtagacattaatcaagataagttatatccaggaacaataaaaaaaatttctggaggccttttaatgcaggatgatgatgataagaatattaatatagaagatctaaaatgtgtaacaaaaagacaaccaactgcagatgaattaagtgatttaatgtttgcatggaaagttgctaaatttgtaaaaagtaatgcaattgtatatgtaaaagataaacaaactattggcattggtgcgggtcaaatgagcagagtcattagtgctgagatagcaaatctaaaagctaaagaagaaggtttaaaagttattgatgcggctatggcttctgatgcttttttcccttttagagatggaatagacatagctgcttctagcggtattgcttcaataattcaaccaggtggatctgtaaaagatgatgaagtcatagcagcagctgatgagcacaatattgcaatgatgtttacaggtgtgaggcattttagacactaat

SEQ ID NO: 201994 - DNA, 949 bp, Unknown
  Bacterial polypeptide expressing nucleotide sequence isolated from the Sargasso Sea
gatgaagatagacatatttgatacgacacttagagatgggtttcaacaggagggaatctccccatcagtaaaggataaattagctattgctaagttaattgacgagttgggtgttgattatattgaaggtggatggcctggagcatcacctaaggaaaaagagttttttgacaaagcaaaaaaagatttaaagctagagaatgcaaaattagttagttttggttctacaagaaaattaaatgtaaaagttgaagacgatccacaagtacaggcacttattgattctgaaacagagtacgtctgcatcgtaggtaaatcatcaaatcttcacattacaaaggctctagagactgatgtagacagtgcgattttaatggctactgataccgttaaatatctaaaagataatggacgaaaagtattttttgatgcagaacatttctttgatggtttgaaagaggattcggagactactttgaaaattttagatgcagtaatacaagaaggcgttgattgttttattttttgtgacaccaacggaggaacacttcctcatgaggtcaccgatcttttaactccaattgtggaaaagtaccccaatcaatcatttggcgttcactttcaaaatgacaatggttgtgcagttacaaactctctagctgcagtgaaccttggggttgaacatgttcaagggactatgaatggttatggcgagcgtactggtaatgcagatctttgtactcttattcctaacctctctttaaaaatggactttgagacagtgcctgaagagtcacttgaaaaactgactcctatagcaaatcacattgcggaattagtaaatatcgctattgactcaagacatccttatgttggttcatctgccttcacacataaggcaggacttcatgcttctggtatgtcaaaagacaatactctctatgagcac

SEQ ID NO: 201995 - DNA, 736 bp, Unknown
  Bacterial polypeptide expressing nucleotide sequence isolated from the Sargasso Sea
ttgttttcaaaaaaaattgaaacagagttaattaatcataagatagatatagcagttcacgctttaaaagatatgccaacgattgaaacagatggtttgataacaaatttttatttaaaaagaaattcacctaatgaaatattaattagcaatagaaatattaagttccaggatcttaaaccaaattcaattattgggacttcttcatacagaagagagtatcaactccaaagtattagatcagatcttaattataaattaataagaggcaatgtggacactaggataaataagttagagaatggagattacgatgcaattttgctttctaaagctggtgttgaagctttaggactaaataataaaattacacaggaatttgaaatagaggaactcataccatgtgctggacaaggaattattgcaatacaatgtagagaaaatgatcaagaaataataaatatattagaaaaaattaatgatgaacattcaagaataattgcaaacgcagagagaaaagttttaaaaattcttgaaggagattgtgatacagcagttggtgtctatgcaaaaattgaccaagatgttgcaaatattaaagctgaacttttttcagtagatggtaaacaaagattttttatagatgaaagggaaaataaaaaaaagattaatgatctgagtattaagattggagaaaaattgaaatcagagtcaaaaggatcatacaaaagataaa

SEQ ID NO: 201996 - DNA, 592 bp, Unknown
  Bacterial polypeptide expressing nucleotide sequence isolated from the Sargasso Sea
gatggcgccggaaaccggcgcggtgtgcggcaatggctcgccctacaaattcttcatcaaccgggtaccgaatacccgcaacaccatcgtctacctggagggtggcggtgcctgctgggactacgccagctgcagcgggcaggccggcattcgcggtgcgcgcaaccccgacgggatcgccgacgactacatgtcgctgctcaatccgggggcgagcctggtcagcccgttcgtggtgcgcctgcatccctggacgcgggtgaagacgcagaactggaacatggtctacgtgccgtactgcaccggtgacatctattccggcgacaaggtggcggtgtatgacgacccgcaggggcagcagcaacccctggtctggcatcacaacggcctgcgcaacatgcgcgccgtggtggggtggctcaaggacaacctgccgcgccccacgcagatgctgaccacagggtgcagcgccggcggcgccggcagcctgaccaactatgccaacctgcgccaggacatggcgcccagtcgcggctacctgatcaacgactccgggccggtctacaccgccctggcggggggacaccaacgc

SEQ ID NO: 201997 - DNA, 609 bp, Unknown
  Bacterial polypeptide expressing nucleotide sequence isolated from the Sargasso Sea
tttcgaaatttattaatggcttaagggtaacagataaaaatataatagatactgtcgaagaagtgttaatagattttaacatcgatatagtaaattcacttaaaaaattaggctctgaagcagcctcttttcacacaaagaagaattgtataattgaagttgagccagaaagagaagaactaggttttgtaggaattccaaaaaaaattaatataaatttaatcgaagatgctttaaataagaataaaattccaattattgccccattgggcttaggtaaaaataatcaaacttttaatattaatggtgatacagctgcaagtgctatagctaaaaaactcaaagctagaagactaatattaatgacaaacgtaaaaggtgtttatgatgataaaaaaaatcttatttctgaaattaaaccttttgatcttgataatttgatcacatggaagatagtcgaaggaggaatgattcctaaaatagaaaattgtgtggatgcagtagaaaacggggttagaggtgttgtaattcttgatggaagaaagcctcactcaatacttcatgaaatattttcagatacaggatcaggaacactaataagaaaatgaa

SEQ ID NO: 201998 - DNA, 669 bp, Unknown
  Bacterial polypeptide expressing nucleotide sequence isolated from the Sargasso Sea
ttggttatagaaataatcctatgggctttaaatggccaaatggtatgaaagaagttcattacttggataggctagagggcagcaaagcaatttttaaggatgggcatgagcaaaatgctgatgctatcattttatgcagtggctatttgcatcattttccatttcttgatgatagtttgaagttaaaaacaggcaatcgcttatatcctccaaaactttttaaaggaattgtatggcaagataatcatcagttaatatatcttggaatgcaagatcaattccacacatttaatatgtttgattgtcaggcttggtatgcaagagatgtaattatgggaaaaattaaattgccaagtgatgctgaaattgaagcagatataaaaaaatgggttgcagaggaagaaagtttggaagatccaattcaaatgatagattttcaaactgaatataccaaagaattacatgctgcttctgattatcctgcaattgatttcgagttaatgagaaaacattttaaagattgggagcatcacaaagaagaagatattttaacatatagaaatagatctttttcttctcctgtaactggaacagtggctccaattcatcataccccatgggcagaagcaatggatgactccatggatacttttatgaaatcaaaataaa

SEQ ID NO: 201999 - DNA, 459 bp, Unknown
  Bacterial polypeptide expressing nucleotide sequence isolated from the Sargasso Sea
tatgcaaaaatattcagtcaaaccattaagcaacatagccaagataggtttagaaaagttagagggaacctcctgttatcttgaagagaatgcaaaaacacccgatggagtgcttgttagaagcacaaaaatgaccagtgaagatctaactgctaatttaaaagcaatttctagagctggagcaggagtgaataatattcctattgaaaaatgcactgaagagggaatagttgtatttaacacccccggggctaatgcgaatgccgttaaggagttagtgctggccggtctaatgctgtcatccagaaatgtctatgcaagcatagactttgttaacaaacttactgagatgaatgacatggctgaacttgagccttttttagaaagcaataagaagcaatttaaaggaaacgaactagctgggtctactttaggagtagtagggttaggtgcaatagg

SEQ ID NO: 202000 - DNA, 943 bp, Unknown
  Bacterial polypeptide expressing nucleotide sequence isolated from the Sargasso Sea
ataaataatctaagtgtcgattaccaaatgagaaaagaaactatttatgccgctaaagcggtaaatattgaggtaaataaaggtgaaatactaggactagttggtgagtcagggtcaggaaaaagcaccgtaggaaacgcaataattaatttgatagatgagcctggcaaggtttcaagtggctcaatcattttaggcaatataaatattcatgaagattcaaagaatattgctaaatatagaggaaaaaaaattggcttaatatttcaggatccacaaacatctttaaatccaatacttactattggagaacaattaatagagactattcaaactcatcttaaattaagcaaagaagaagcaaaaaataggtcaattaatttactaaaagaagttggaattaaagatgcggaaagcagatttgataattacccgcatcaattttcaggaggaatgagacaaagagtagtaatttctcttgctttatgctgtgaacctgaacttttaattgcagatgagccaacaacagctttggatgtttctattcaatcacaaattttagaattaattaaaaaattgaccaaagaaagaaatctagctgtaattttaattacgcatgacatgggagttatagcagaaacagcaaatagagttgcagttatgaaaaatggtaatttagtagaaataggctctacaaaagaagttttaactaaccccaatgaaacttataccaaaagtttagttagctctgttcctccaacaaataagaaaatatctagatttgtaattgtggaaaaagaaaataaaaataaaaaagaaaataatctaaaaatattaaacagatggactaagagagatattttaaataaagaattagttaatgttaaaaatcttactaaaagttttgatgataatttttttactgaaagttcaaaaagttcag

SEQ ID NO: 202001 - DNA, 346 bp, Unknown
  Bacterial polypeptide expressing nucleotide sequence isolated from the Sargasso Sea
atgattgttggttcaataaaagaagacataatttcagagaaaagagtttctatcactcctgagacagcaaaaaacataattaatttaggattgaaagtgtgtattgaaaaaaattacgctactcatttaggtatcgacgataacgaatataaaaaaactggagtagaaatcaaagattcctcaagtgaagttttaaacttaagtaatttgattattaaagtaaattgcccttctgaaaatgaaatcagtttattaaaagagaaaacaattttaattggaatgctcaatccgtcaaaaaataaagatcaaatagataaaattgttaaaaaaaaaataaaaatttttt

SEQ ID NO: 202002 - DNA, 889 bp, Unknown
  Bacterial polypeptide expressing nucleotide sequence isolated from the Sargasso Sea
aacgggtaatacgcgtcagattgatttgtcgagcaacattactacgacgggcacccagacctataatggtcctgttcgtctggttggtggtgatcgtacggtggcaaccacgaacagcaacgttgtttttgcgagcacagtgaacagtgatggcacacaacgggctttgacggtaaccaatggtactggtgatacgacctttagtggagtgattggtggcagtgctgcggttaagtctttaacgatcacttctgatcagttaacggcaggtgcgatgacattgaatggtgccttaacggccacccttggtggatcgagttccatcacgggagtaattgcaaatggtggtggaggtacggcgagcctggtcaaggctggtaatggtaccttaacgttaagtgcttcgaacacctatactggcacgacgcaggtgagtgcgggaacattgacggtttcgggatcgggtcgattatcggatagcacggctgtgacggtagacagtggagctgtgtataatgtggcggtgagtgatacggtagcttccatagagggtgcggggaacattgttcttgcaagcagtcagacattgacggcaggcgatggtaataacaagacgttaagcggagtgatgtcaggtgcgggtaattacattaaagcaggaggaggcacgcagactttgagcggaaccaatacttatacaggtaccacggccatcaacgctggggatctcacagtgagtggttccttgcatgacagtacggctgtctcgattgcatctggtgctgattacaatgtgaatgcgagtgatacggtagcttccatagagggtgcggggaacattgttcttgcaagcagtcagacattgacggcaggcgatggtaataacaag

SEQ ID NO: 202003 - DNA, 880 bp, Unknown
  Bacterial polypeptide expressing nucleotide sequence isolated from the Sargasso Sea
ttagtgggagagtcaggatctggaaaaagtacagtaggtaacgcgattataaatttaattgatgaaccagagaaagtgtcaagtggttcagttattttaggtgatttaaatattcatgaaaattcggacagaatagtcaaatatagaggaaataaaattggattaatatttcaagatcctcaaacttcactcaatccaattcttacagtaggagaacaattaattgaaacaattcaaacacatctaaaattaactaaagatgaggcaaaaataaaatcaatcagcttattaaaagaagtcggaataaaagatgctgaaaaaagattttataattatcctcatcaattctcaggtggtatgagacaaagagtagttatttctttagcattatgttgtgagcctgaattattaattgcagatgaaccaaccacagcattagatgtgtcaatccaatcacagattttagaattaattaaaaaattaacaaaagagagaaatcttgctgtaattctaattacgcatgatatgggtgttatagcagaaacagcaactcgagttgcagttatgaaaagtggcaatctagttgaaattggtgaaacaaaaaaaatattaaccaacccacaagaaaattatacaaaaagtttggtaagttctgttccaccaacaaataaaaaaatttcaagatttattattgtagaaaaagaaaataaaaataacaaagaaaataatattaaaatattaaaacgatggacaaaaaaagaaattataaatcaagatttggtacaagtaaaaaatcttagtaaaagttttgatgataatttttttacagaaaattctaaaaattctgtaatggccgtaaatgatgtttctttgagataaa

SEQ ID NO: 202004 - DNA, 826 bp, Unknown
  Bacterial polypeptide expressing nucleotide sequence isolated from the Sargasso Sea
ttaaaaaaagaaaaagttaaacatgtttttggtttaattggctcagctactatggaaatgtttgatgcgctttatcatgaaaaaagtataaaatttattggtgttcgtgatgaaagaaccggaacacatatggcggatggatatgcaagagcatctaatcaaccaggtattatacttgctggacaaaatggtcctggtgcaacaaatctagttaccgggcttgctcaagcaaaagcagccttttctcctgttgtttctattgctgggtcatattctactaaagataaaatggaagatgcttttcaaggtcttgaccaacaatctttatttaaaccagtaacaaaaaaaacctggacagtaaaaaatactaaaaaaattccaaaaacttttagtgatgcttttaaattagcaatgtcaccaagaagaggtcctgtatgtattaatttaccaagaaatattttggcagataaaggaaattttaaaatcaacgataaaaatcaatcttttgataatcaaaactcaactaaagtaaaatctaattatataaaaaaagctgtaaagattattagtaattcaaacaaaactgttattattgctggaggtggaattaaatatacatcaagatataaaaatgtagttaaattggcagaattgttaaacgtcccaatagtaactgcagctggtcatggagatgctataccatttaatcataaactaaatgctggacaaatgggtccaagaggtaatccagttgcatctaaactagttaaagaagcgagcgttataattgctcttggaacaagactgggatttaattcaacttttt

SEQ ID NO: 202005 - DNA, 172 bp, Unknown
  Bacterial polypeptide expressing nucleotide sequence isolated from the Sargasso Sea
tgaaataagaggaataatgatagagagccatctaagagaaggtaatcagaagattggcgaggatttacaatatggacaaagtattacagatgcatgcattcactttgaagatacaaaacaatgtctttcagagctctcctcagctgttcaagcaaggagattaaaaagctag

SEQ ID NO: 202006 - DNA, 946 bp, Unknown
  Bacterial polypeptide expressing nucleotide sequence isolated from the Sargasso Sea
gtcttgtcccacaagccccgacgtgtattaaattcagtatttttgtatcatgctgtacaaaatggtcttgacagtgcaatcgtaaatgcacgtgaaattactccgtatactgaaattgatgaaaaagaaaagaagatagttgaagatttgatcttcaataaacatcctaatgcgttatcagacctaatcactcattttgaaaataaaactcaggatccatcatcaaaaaccaagaaagttgatgttgatccaacatggcctgcaggacagcgctcaaatttcagaatcattaaccgattaaaagatggaatagaaaatgatgttgtatctgcaattgtagaaaaactatctcaaaaggacattctcgtggataatgatggtgttttatcgattaatgccgcaaaagaagttacacaccaaggagcaattcaaacattaaatgatgatcttttacctgcgatgaaaattgttggtgacaaatttggtgctggagaattaatccttccctttgtactaaaatctgcagaatgcatgaaagctgctgttaaagaattagaaaaatatctactaaaagaagagggtaccagtaagggcattttggttctaggaactgtgtatggagacgttcacgatattggtaaaaacttggtaaaaacaatcttcgaaaataatggatacactgtgcatgatttaggaaaacaggtacctttacaaaaattcgtagaaaaaattaatgaggtaaaacctgatgctgtaggtctttcagcattgttagtatcgacatcaaaacaaatgcaattctttgttgaacatgcaagaaaaactgatgtcaatattccaatactatgtggcggtgctgcaataaacagtaattacattaaccgaattgcaaaacaagatggaatctatgaacctggaatgttttactgtggtaccatgtttgatg

SEQ ID NO: 202007 - DNA, 652 bp, Unknown
  Bacterial polypeptide expressing nucleotide sequence isolated from the Sargasso Sea
tgagcttggtcttcctgttggtactgagtttcttgatccaatttctccgcagtttgtagctgatttagtttcatggggcgccattggggctagaactgctgaaagccagattcatcgagaactggcatcaggactttcatgtcctattggctttaaaaatggaacaacgggtgatctaaatccagctatttatggcataaaagcttcaaatcattctcatgtatttttttcaaacactaaggagggaatggtttctatttataaaacatccgggaactctgatacgcatatcattctcagaggtggaactgagccaaaccttcatccagaagatatacgaaaaactattaatgcacttcaagaagcagaagcaaatgactcaattatgattgatgtaagtcatggcaatagtcaaaaagtctttaaaaggcagcttgagaatataggcattgtttcaaagcaagtatctgatggtatgaatgaaattagagggataatgatagaaagtcacttaaaagaaggtaatcagaaaattggtaatgatttgcaatatggacaaagtattacagatgcatgcattaactttgaagatacaaaacaatgtctttctgagctctcctctgctgttcaagctaggagatcgaaaagctag

SEQ ID NO: 202008 - DNA, 135 bp, Unknown
  Bacterial polypeptide expressing nucleotide sequence isolated from the Sargasso Sea
gtgatggcgtgttggtaatcaccgaattacaacctgccggaaaaaaagccatgaaagtaatggatttcctcaatggccgcgcggactggtttcaaccaggacagatgttgccccctgttgatgggcagagctgat

SEQ ID NO: 202009 - DNA, 796 bp, Unknown
  Bacterial polypeptide expressing nucleotide sequence isolated from the Sargasso Sea
aactactaaaggagatatagttcaaaacagaagactatcagatattggtggaaaaggtttattcacaaaaaaaatagaggacgaactattaaaaaaaaagattgatattgcgatacacgctttgaaagatgtaccttcaaatgaaaataaaaaattattggtaaattgttttctaaaaagaaatgatcctagagaagttctaataagtagaaatagaactaaacttgaaaatttgccaaaaaattcagttataggcacctcgtcttttagaagagaattccaattaaagagaaaaagggatgaccttaaatataaattgataagaggaaatgtagatacaagaataaaaaaattaaaaaataaactttatgatggaataattttgtcatatgcaggtttaaaaagtttaaaaattgtaaataatatatctcaagttttttctttatcacaaataattccaagtgctggtcaaggtgtaatcaccttacaatgtagaaaaaatgataatagaataataaaattattaaaaggcataaaccatataccaacagaaaaatgtgcaaatgcagagagagatgttcttaaagttttagatggagattgcgaaacacccgtgggagtacatgcaaaaataaaaaataaaaaaatatccttagaaacagaattattctctctggatggaaagaaaagattttatttaaaatcctcaaaaaaagtaaattcagcaggtttaattggaaaagaacttggtgaaaaaattaaaaaaagatctaaaaatctttataagaaaagataa

SEQ ID NO: 202010 - DNA, 853 bp, Unknown
  Bacterial polypeptide expressing nucleotide sequence isolated from the Sargasso Sea
gaaaagaatttaagagtagatgtattaattaacaaaagagacgaaattattagtagaaccagagttaaaaatttaattttaaaagaaaaattaaaactaaataatgaaataattaaaagtccatctaaaaaagtttcgattggtgatgttgtaaatcttacgattccagagccagagattgcatctctaaagccttatgattttaaattaaatattgtttatgaagattctgatttattagtaatcgataaaccttcaggaattataatgcatcctggggcaggcaattatgacaaaacaattgtaaatgcattaatgcattacaataaagaatctttatcaactattggggatgaattaagacctggaattgtacatagaattgataaaaatacctcaggtttagttgttatagcaaaaaataatgagacccatgaaaatttatcaaaacaattcagtaagcacacaattattagagaataccaacttttaatatggggaaagctaagaccatcttttggtaggatagaaacatttattactcgtagttcaaaaaatagacaacttatggaagtgagcggttcaaagggtaagaaagctgtaacaaactataaaacaattgaaattttcgaaaataaaaaaataccgacgttaagtttagttgaatgcaaattagaaactggtagaactcatcaaatcagagtgcacatgaattataaaggaaatagtttagttggtgatgataaatataaaaaaaaatataaaaaattaaaaagcgttgattttgacattcaaaattcaattacaaatttagacagacaattcctacatgcaaagactttaggctttgttc

SEQ ID NO: 202011 - DNA, 484 bp, Unknown
  Bacterial polypeptide expressing nucleotide sequence isolated from the Sargasso Sea
catgctggacctcggctgtggagacggttccctgacggtagaaatgggtcgttttgcggaacgtgtgattggagtcgattacaatctggaactgctcgcatcggcccggcagcgcatggaccggttggggcttgagcacgtgaccttattggctgaggatgtcggcagcctttccctggagcctcaaagtgtggacgtcgccgtattttcccagtctctccatcatctggacgaccccttcagcggaatccgtcaggcttatcggttgcttcgcccgggagggctgttagcagtaatggaactggcggcacacgaccaactctgggtagtggaaaaactgaagcacaagtggcccggttttgagcaggagcatttactgaaaatgatgcaggaagccggatttagcggccttaaagaggaaatccttccccagagcaggggagagcttttccaggttattttggcgatgggagttcgggattga

SEQ ID NO: 202012 - DNA, 898 bp, Unknown
  Bacterial polypeptide expressing nucleotide sequence isolated from the Sargasso Sea
ccagactcttattactatcacactgcaaataacctcaaaaaaagaccatcactaagcggttcacatgacacagatatatgtgttgtaggcgctggctatactggtcttttaactgcactgaatctttctgaaagaggttacgatgtcacaattttggaagccaacaaattggcatggggggcttcaggacgtaacggaggacaggttggaagtggccataacaaaaagattcatgaattagaaaaagattacggaaagaccatggccaatgagctttggcagctctcagaatacggaaagagtatcgtaaagaccagaattgaaaaacatgagattgattgcgatctgaaggttggaaatgcaactgtatcaaacgacaggaatgatgatcatcatcacaaagaatatgtagaaaagctgaatgcagattatgactataatctgattcgttacatgagccctgaagaagtagaagaaatgtttcacagtccattctttgacgggggtggatcactggacatgggaggaatgcaccttcacccacttaactatgcacttgggcttgcgaaggcagcagaagaatccggcgtaaaaatttttgaagactcgagggttataaactactcaaatgaaagcccatgcattgttaagacgaacgaaggagaggtaaggtctaggcatgtagttttggcttgtaatggctatctggataacctagaaaaaaaattggctgtaaaaataatgcctatcaataactttatcattgccactgagccaatgagtgaagaggaagtgagatatataaatagggatgatatttgtgctcatgacaacaagtttcatgtgaattattttcgcatatctcaagacaatcgacttttgtttggcggaggagaga

SEQ ID NO: 202013 - DNA, 826 bp, Unknown
  Bacterial polypeptide expressing nucleotide sequence isolated from the Sargasso Sea
aaaaaagaggttaaatgcaaggaaataaaaggacttgaaaatttagataaggtaattgatatagatcaatctccgattggtagaactcctagatctaatccagctacctatattggtttattttcaaatatacgagacctatttgctcaaactattgaagctagagcaagaggatataagccgggcagatttagttttaatgttaaaggaggcagatgcgaagcttgtcaaggcgatggtcttataaaagtagaaatgcattttcttgcagatgtttatgtgacatgtgatgtttgcaatggttcaagatacaacgatcaaacactggaagtgaaatataaagataaaaatataagtgatgtattaaatatgacagttgaagatgcattatctttctttgatcagattccccccatcaaaaagaaacttcagactttgtatgatgttggtctaggatatataacacttggtcaatcagctacaaccttatcaggtggagaggcacaaagaatcaaattagcaaaagagttgtctaaaagaagtacaggtaaaactttgtttattttggatgagccaacaactggacttcactttcatgatatagagttgctacttaaggttcttcacagactaaaagaacaaggtaatacaattattgttatagaacataatttagatgtaatcaaaactgctgactggattattgacttagggccagagggggggagccaaggtgggcaacttatcgcaaatggttcaccagaaaaggtggctaaagataaaagatcatttacaggaaagtatctaaaagaaatgcttaactagc

SEQ ID NO: 202014 - DNA, 793 bp, Unknown
  Bacterial polypeptide expressing nucleotide sequence isolated from the Sargasso Sea
aatggaaaataggccaaaaaaaagtttgggtcaaaattttttaattgataaaaatattatcaatttaatagtggatttaggtgaaataaatcaaaatgatactgtgttagaagttggaccaggtacaggaaatttaactaaggcaattttattaaaaaaaccaaaaaaactgattgtaattgaaaaagataaaaacttagcctcatctttaaaaaaaaaacttaaagatcaaattacaattattaatgatgatatactaaaaattaatgaaaataatattgccaataaaccaatgactatatacggcaatttaccctataatatatctactcaaattcttgcgaaatggatcaaaaataataattttaataatatagctaaaaatttaattttgatgtttcaaaaagaagtggctgacagaattattgctaatactaatgaaaaaacttatggaaggctgtctattttatcttgttggaaaatgaaaattaaaaaaattatagatattaatccaaattctttttatccttctccaaaaataaagagtactgttttattttttgaaccaaaaaaaaaatactttaaattaaataaccctaataaccttgaacatattactagagttttttttaatcaaaaaagaaaaatgattaaaaaaccattaaaattattgttcaagaataatattgaaatatcaaataaattaggaattaatctcaacttaagacctcaaaacctgtctccaatgacttactttaagctatgtgatgaatatgaaaatttatctaaatag

SEQ ID NO: 202015 - DNA, 874 bp, Unknown
  Bacterial polypeptide expressing nucleotide sequence isolated from the Sargasso Sea
aacacaaatagaggaaagcacgtaataacctcagcgggtgagcatcatgcagtcctagatccactagaagatctcgcaagacggaacgaaataagtttaagtatcgttccattaaggaccgacggaagcatacattttgaggatatagaagctcatatacaaagtgatacgattcttatttcactgatgcacgctaataatgagatcggcactatcaacgatattccccatatttttaagaaactcaagactacttacgagcgcatctctctacatacagacgcggtgcagtcggtggctcacatccctgtggatctatcaaaattgcatgccgatctggtctctttcaccgcccacaagttatacgggcctcgtggtgctggtgcactttatattcgatctggcacacctctacacgggcagattcttggtggaggtcaagaagaagggttacgagctggcacagaaaatactccggcaatagtcggatttgcctccgcgatagaactcgcatcgaaacgtatgactaatgatatccaacaagatcgcgaacttcagcaaattttgatgactgaactgcccagacgaattccctgcatgggaataacgggcacgaaagatttgaacagccgtttacctggacacgtttcctgcgtgatcggttttgtagagggagagtccatcctacttgctctcgatctcatcgggatagcagcatcttcaggatccgcatgtacaacagggtcaatcgagccaagtcatgtcctcaccgctatgggtgtccccttcgatctagctcgcggatcgctcagaatcagcttaggtcgagagacgacgaaagaagctatcggaagtctgttagctagcctacctg

SEQ ID NO: 202016 - DNA, 868 bp, Unknown
  Bacterial polypeptide expressing nucleotide sequence isolated from the Sargasso Sea
gttgaaaaatattttgatgaatataagattgtaccagatgaaactagatcaatttctgatggagccattaaaccatgggaaactaaagtatttggttatcaaaaaaaatattttgtcgaaacaatagataaaattttaaaacaatttaaaattaagaaaaatgttccttggagtcaaattccaaaaaaagtaaaaaatattattctttatggggatgaaaatagcgaattaaattttttatatgattttgagggaataataaactttattgatcgaaaatatgaagaaactgagagatggtggcttcaatatgaattagaaaaatatttatctgaaagagactgtgaagtttgtaacggttaccgccttaacgaaaaagctttagccgtaagaattgatgaaaatcatattggaaatattactaaaaaatcaattagcgagtgtttacaatggttttcatcacttgaaagtaaacttgataaaaataataaaaaaattgctgagggagtaattaaagaaataaaagatagattagtttttttaaatagagttggtttagattatttatctttggcaagagctagtaaaacgttatctggaggtgaaagtcaaagaattagattagcaagtcaaattggttctggattaacaggagttttatatgttttagacgaaccttctatcgggttacatcaaaaagataatcaacaactaattgaaactttatttagattaagagatttgggtaacactgtaattgtcgttgagcatgatgaggatgcaattagacaatctgatcatataattgatattggtgttaaggctggcgtaaatggaggccatataattgcagaaggaaatctaaaaa

SEQ ID NO: 202017 - DNA, 782 bp, Unknown
  Bacterial polypeptide expressing nucleotide sequence isolated from the Sargasso Sea
ttctgctttaaagttaaatcagactgctgaggctatttttgcttttgagcgcaccattgaaagcaacccaaagtggtatgaagcgcgtttatttttagctcgcgcttatatgttggtaaaaaactttcctgctgcacaaaatcaagccttaatacttgttaactcatctatggcgccaaacaccataaaaacctctgcacaggcattgttagatagggtcgctttacaaagtaaacgagccggtgatttttactctcaaaatattgagtttgcgttgggcgttgatggcaacgtaaatgcaggcactacagaagatacaattattattcctgaaattggggaatttttattatctcctgaaagcaaaagcacagatgatagttacgctaagcttaattactcaggtaaatactcttatcctattaatcaacaaagcactgtagtaataaacgctaacgctgggtggtacaaattcgccgaactgagtcagtatgaccgcgttaatgcccattttagtgctgcatacaattatgatattggaagtattaattggcacgttcaggcttcaacaacgcctttaatacttgattcagaactttatagaacagagtcggctattaccttgggggctaactttacgttatcagacagtattaccctttttacagcgctcagtgggggggagttaaacaaccgatttgacgacaagctcgataatacattttatgcgattaatacaggagtaagttattcaacacagcattggtttaaccggctttagt

SEQ ID NO: 202018 - DNA, 703 bp, Unknown
  Bacterial polypeptide expressing nucleotide sequence isolated from the Sargasso Sea
caaaaggcgccacggccaccagccagaggccggcaacctgcagccccagcgctacagccaccagccagaggccggcagcctgcagcgacggcgccacagccaccagccagaggccggcagcctgcagcgacaatgccacggccaccagccagaggccggcagcctgcaacgacggtgccacggccaccagccagaggccggcagcctgcagccccagcgccacggccaccagccagaggccggcagcctgcagcgacggcgccacagccaccagcaagaggccggcagcctgcagccccggcgccacggccgttgagggcaaggcgcgttgcaccgaaccctttcgggcaaggtgcgcctgccgaaccctttcgggcaaggcaggatagaccgaaccctttcgggcaaggtctgcgcgccaaaaacttgcaggcaaggcacgtcgcaccgacccctttcgggcaaagtgcgcctgccgaaccctttcgggcaaggcaggatagaccgaaccctttcggacaaggtctgcgcgccaacccctttcgggcaaggcgcgttgcaccaaaccctttcgggcaaggtgccctgccgaatcctttcgggcaaggcagcgtagaccgatccatactgtcaagcgcaagacttgcatgcgtctcatactgcagggaacgccgatccatactgtcaattgtgagggtttgat

SEQ ID NO: 202019 - DNA, 584 bp, Unknown
  Bacterial polypeptide expressing nucleotide sequence isolated from the Sargasso Sea
gttgttaaaattaaaaattattatgaaagtttgcatattaggtaatggattagtaagtctcgctttagctaaagctttaataaataaggatatatttgttgacattgtttcaagaaaaaaaaaagtaatctatgataaggagcgttcattaggtatttcaaagagtaatattacattctttaataaaaatattgtgaatattgataaattactttgggatataaaaaaaattgaaattttaagtgagaattttgaaaataagaagatcttggatttcgaaaataaccagaatcttttttcaacaattaaaaattacaaattgcatgacttgttatttgagaaaattaaaaaaagtaaattcctaaacttcaaaagtaaatttaaaattgatcaatataagcttataattaactgtgatttttcaaataatttgacaaagaaatttttttttaaaaaattttacaaagattataagagctgtgcttacacaacaattattaaacataaaaaagtaaaggacaataatattgcctctcagatttttacaaaacatggtcctttagcttttctacctatttctgatg

SEQ ID NO: 202020 - DNA, 810 bp, Unknown
  Bacterial polypeptide expressing nucleotide sequence isolated from the Sargasso Sea
tatgggactggaattagatgactttgggactttcgaagacgactatgtcatgactatggcaactggtatggatgttgaagcttatggaaacctggatgatgacacaatgatgggtatggccatgggcatggaaactgacgactttttaatgttcgaagatgaccaacttttcggcttcgtagtagaaatggatccaacaacactagacgaagtgggtagtgatgctgcactgggaatggctgttgcactagatgtagaagcgtatgcaaccttagaggatgattaccttgtgggaatggctgcaggcatggaattcgatgactttgaagttttcgatgaagagcagctctacggtttcgttgaaaatattgaacctgaaaacttcgatgaaatagactcagactcagttagaggaatggcaaccaatatccaaccagatgcttatgacgatcttggaagtgagcttgtagagggcatagcgactgcaatagaccctcttgaaattactgcactagatcctgagcgtaaaacagcaatcattgaagtggttgagccagaatctttagctgaatttgatgaagacctgttaggtggaatagtagcaggagttgaaccagacaatattgctgaatgggatcctgaagttgaacttgcgatattagaaggacttgattgtgatgtaatgggaacctcaggtgcagactttgatgaacttctacttgaagcacccgatacaaacttcgatgatattgctacagcagctatttctgctgtaacacagcaagctggagcggactttgaagatctgct

SEQ ID NO: 202021 - DNA, 929 bp, Unknown
  Bacterial polypeptide expressing nucleotide sequence isolated from the Sargasso Sea
tgctgttcctgacggagacgctgctgtaggaattatgcaagaagttgctgccgctaatccagatgcagctggagcttttgctggtggaatggcacaagccaaccctgctgccgcaggtgaaatagctggtagccttgccgctattgatccagcacttgctggagatatggctggagctatggcaaccgctaatcctgccgctgcaactttagttgctgctggtgttgccgaattagcacctgacgccgttggcgcaattgctggttctatggcggatgcaaaccctgctattgcaggacaagttgctgctggtatggctcaatttgatcctggtgcagctgcacagtttgctggagatttagttgctgctaatccagatatggctgcaaatattgcgagtggaatggcacagctagcaacacaaggtggaatggctgatcttgctggagagtttatggggcaaatggctgctgcaaatcctgagatggctggaatgatggctgccggcatgactcaaatgatgggtaaccaaggcgcaggcttcatggcagatatgggtgacattatgggagccgatatggctgcacaattacaatctgatatgcaagctcaaatggctgacatgcaatcaatgatgcaaaatgctatgcaaggtggagaaatgtttatgggtccaatgatgacagcagacatgatgggtcctgcagactttggtggaatgatggatatggacatgggcatgcttcccggcatgggacctgacccaatgatgatgggcatgggtccaatgatgggacctgatccaatgatgatgggcatgggtccaatgataggaccagatccaatgatggggatgatgggacctgatccaatgatgggaatgatgggacctgatccaatgatgggaatgatgggacctgatccattta

SEQ ID NO: 202022 - DNA, 843 bp, Unknown
  Bacterial polypeptide expressing nucleotide sequence isolated from the Sargasso Sea
actggaaagtaaaattattctgatccgaatggttcgaatgcgaagactgtataaacataaactgacattctgtttcgggatgctgttactgctcttgtggagtggtatctcagaagcccagaccagaagcggttttgggcgggcggttcggaacaagtttacttcactcaatccttataagattggtcaattcgattacaagcgcccctattcgatcctcaaaggaagaaactggagacttaaatacctgactccaatctatgacactacaaaatacactgataaccccttggaccgggaccaaaaattcgaaggatatgaagaaggccaatccccctatagtgtctttcttagttataaatggctaggagttggaaaaacttctctggcttatagaatcaataccaatccaaatttcaaatatcacttcaatatggagttccatgactttggactaacctttggactacagaaacgatttctctacagaaaaggaaaaagaaaatatggaggagtttcttcagtctatcgttccaacattaccttaggttatggcaggatggtaaatggagaagttactattgattacaccatagaaggtatcggggagtcgaatgtcactgtcatgaaagaaaaattccagaggggtgacacttggtttttgatttacggctgggaagtatttcagtgggattctatcagtatcgaagctgcagctggttatcgtgagaacaatattatttataaccccccaactgtagtcggtgatccaagtctaacaacggatgagccaattcagggggattttaaccaaatcatgcttggttttggtgtttcattctg

SEQ ID NO: 202023 - DNA, 910 bp, Unknown
  Bacterial polypeptide expressing nucleotide sequence isolated from the Sargasso Sea
tttgggcgacccagttgtaattactccagatacttttagaggtgcgaaatggcggggagcaatggtttatgtaaacgattatgaagggaaaatttcaaaaattaacttaactaatgaactgacttctaaaggctctaatccggcgccaatagaattatatgattatactactttattttctctaaatacaaacgaggagaacggcagagttagtttttttggaatggacgctgcttttggaatggatactaaaaacttatatttgtttggagccactggggactttaatgacatcgcgcggagatcaagaggaatggataacatcttatatggaataagagattttgattttccaaattttagaatggttaattctggaggtgttgggtctttaacagaggctatgaatgcaagaaagattgatgcagaagacggatatactttaagtccaaattgtgtaaatactgctgacgaaacaatggatcagggagattgtcctgcgatatctaaggacgcctgggtatttaaattagataagccatttgacaaaagacaagacgagtctttagtcactgatacaggagctccaaatttaacgcaaaatttatatcacaaagctaccgcatcacccactgtgtttaagggcacggtttattatcctgtttatcaaccaccagagggcggaaagtgtaatgtcggaaacgcttatgtctgtgccgctgatgatgaatgtggaattaatacctcagaagaaattggacgagcaagcagacagatggatgcaaatgcaggctttgatgaaaagacaggttgttattatttacaacctggtgttctttcgaagttagaagtgtttgcagataaactttttgcaaacattacaacagatagtgaagacaagaagatacac

SEQ ID NO: 202024 - DNA, 625 bp, Unknown
  Bacterial polypeptide expressing nucleotide sequence isolated from the Sargasso Sea
ttgaaaaaaatttttccaaataaattaattaaaaaaaattttaatgttaatcaatttttaaaacttaaaaaattcctgttctctcaaggaataatagttaaaaaaaaaaccaattttgaatttggatttgaaaaatttaaaacgctatatttaactggattctcaagtttattaataattcttgttgcatttattgtacccttattttctgaaataagcccaaaaatatcaaaaaaaataacaattaacgactctaataagaagtttaaaaaagtactagaagggggcgatctagagaataagtcaaaaattgatgaaggtctagatttatcaaatattttagaggatgtctttaaatttgaagagttacccaaagacactgtacgactcagcgcctcgactatagaacaactttttagagatacagattattcattaactgaagtcaggaaaagtaaaaaagtcaaaccaattaggctttctcttttacctaacgaaattaagcaaattgaaagttcaaagaaaaggaaaaacttgtttattcaaattattttaccgttaattttagaagaaaataatcttattttaatagataggaaaagattatttaactatattaaataaa

SEQ ID NO: 202025 - DNA, 385 bp, Unknown
  Bacterial polypeptide expressing nucleotide sequence isolated from the Sargasso Sea
ttttttccaaattttcgaaattttcgggcaccgaaagttggccgtgcggacgacccaggacgtgtccagaggtcgcgctggcgcctcaaggcagccttcctaagtgtcgtgaacgctgttgggaaggtacactgcgtcccacatctgaatttgaagagcggcgctgacaatccgaaaatttccgaaatttttccaaattttcgaaattttcaggcaccgaaagttggccgtgcggacgacccaggacgtgtccagaggtcgcgctggcgcctcaaggcagccttcctaagtgtcgtgaacgctgttgggaaggtacactgcgtcccacatctgattttgaagagcggcgaagacaatccgaaaatatccgaaaattttccaaatt

SEQ ID NO: 202026 - DNA, 790 bp, Unknown
  Bacterial polypeptide expressing nucleotide sequence isolated from the Sargasso Sea
atggattttattatcccattaactattggacatggtgtagtaaatgtcggagatttgccaataccatttgacatagttttaaatgcttcagctttagttgttcttattacttttgtttatttaaaggtttcgtggaaggagtcaattattgcccatcgggacgaaatatttgacgataaacaaagtttgttaggaaagttgtttggatttttaattttatttttacttgttgccccaggtgtaattagtaatgaatcagctaaaacatcagtagccccactcatgttatgggtatttttatggattggtgttccagttcttggtctgttgtttggagatgtatatgcgaaatttaatcctttaaatctttttcctgtttcctcaaataggccacaatccgtatattttgcttgcgttctatttattggtctaacctggtttgagctggtgtggagaaaacctggaaaccctttcaatattggggttgtctttatattgctttttatcactgtaaatttattgagatattttttaaaaaaatcattaattgaagttgatccattacttttacttcattatttgtacagtaagttgaaactattcaactcgagaccttactttcgatcattgcttgataacattggaaatcttgcaaggcttagaggtattgagtattttgtgcttttaatgatcggcaccgttacttacgatggtttgagagagaccactttctggtacgaacaattcggtccaagaataaacgatatgggattctcgacaatgatgttct

SEQ ID NO: 202027 - DNA, 535 bp, Unknown
  Bacterial polypeptide expressing nucleotide sequence isolated from the Sargasso Sea
atggattatattatcccactaacttttggacatggtgtcgtaaatgttggggatttgccaataccgttcgacatagttttaaatacttcagctttagttgttcttattacttttgtttatttaaaggtttcatggaaagaatcaattattgcccatcgtgaggaaatatttgacgataaacaaagtttatttgggaagttgtttggatttttaatattatttttacttgttgcaccaggtgtaattagtaatgagtccgccaaaacatcaattgctccgctcatgttatgggtgtttttatggattggtgttccggttcttggtctgttgtttggagatatatatgcaaaatttaatcctttaaatctctttcctatttcctcaaataagcctcaatcagtatattttgcttgcgttttgtttattgggctaacctggtttgagctggtgtggagaaaacctggaaatcccctcaatattggggttgtctttatattgctttttattagcgtaaatttattgagatattttttaa

SEQ ID NO: 202028 - DNA, 1555 bp, Unknown
  Bacterial polypeptide expressing nucleotide sequence isolated from the Sargasso Sea
attgatcaaatccggcatgatagtgtccggaatgacgttggcgtcccgcgtgatgggcttggtgcgcgatgtggtcatcgcaaatctgctcggtgccggggtggccgcagacgtcttcttctttgccaaccgcattcccaactttctgcgtcgcctgttcgccgaaggtgccttcaaccaggcctttgttcccgtgatgacggagtacaagaaaaagggcgacgagagcgaagtgcgcgagttgctggccgcggtggcgggcaccctcggggggatcgtcaccgtggtcaccctgctcggggtgttgggctccggggtgctgaccgccctgttcggctggggctggttctgggactggctgcatggcgggccggcggccgagaagttcgagatggcgagcctgatgctcaagatcaccttcccctatctctggttcatcacctttaccgccatggcgggggccatcctgaataccttcggccgcttcggggtctcctccttcacgccgatctttctcaacatcaccatgatcgccgccgcctggtggatctcgccctggctggacgaccccgaactggcgctggccatcggtgtcttcctcggtggcctggtgcagttcctgttccagttcccgttcctgcgccagatcaacatgctggtgtggcccaagtggggttggcaccatccgggggtggtgaagatccgcaccctgatgatcccggcgctgttcggggtgtcggtcagccagatcaacctgctggtcaacaccatgctcgcctcgtttctggcgaccggcgccatcagctatctctattactcggaccgactgctggagttcccgctcggcatgttcggtgtcgccatcagtaccgtcatcctgccagcgctggccaaaaaacacgtggatgccgatccggccgacttctcccgcaccatggactggggggtacggatggtgatgctgctcggcctgccggccatggtgggtatcgccgtgctgcgcgaacccattctgcgggtgctgttcatgcgcggcgagttcggcttgcacgaggtgagcatgtccagcgccagcctgctggcatccaccacgggcctgctgtcgctgatgctgatcaaggtgctggcacccggctactacgcccgccaggatacccgcactccggtgcggatcgggatgatgtcgatggcggccaacatggcctgcaacctcatcttcatctatccgctcggttacgtgggactggcgctctcgactgcctgctcgggcacgctgaacgcggccctgctgttcaaggggctccatcagcagaacgtctaccggccctcccgtcacaccggggtattctgcctcaagctgttgaccgcaagtctgctgatggggggcgtgctcctctacctctcgccggatctggcccaatggggcgcctggcacatgagcaaggcgagcatgcagctgaccatgctgctggtactggggggcgccatctatgctggtgtcctgctggcgctgggcattcggccaaaagatctgagagcagggcgggatgactga

SEQ ID NO: 202029 - DNA, 1233 bp, Unknown
  Bacterial polypeptide expressing nucleotide sequence isolated from the Sargasso Sea
cctgactggcggtcaagccgcaattaaatccttaaaaaaagaaaaagttaaacatgtttttggtttaattggatctgctacgatggaaatgtttgatgcgctttatcatgaaaaaagtataaaatttattggtgtgcgtgatgaaagaactggaacacatatggcagatggatacgcaagagcatctaaccaaccaggtataatacttgctggacaaaatggtcctggtgctacaaatttagtaactgggcttgcacaagcgaaggctgccttttctcctgttgtttctattgcagggtcatattctacaaaagataaaatggaagatgcttttcaaggtcttgatcaacaatctttgtttaaaccagtaaccaaaaaaacttggacagtaaaaaatactaaaaaaattccaaaaacttttagtgatgcttttaacttagcaatgtcgcctagaagaggacctgtatgtattaatttaccaagaaatattttgactgataaaagaaattttaaaatcaatgaaaaaagtcaatcttttgataatcaaaactcaattaatgcaaaatctaattatataaaaaaagctgtaaaaattattaataattcaaacaagactgttattattgctggtggtggaattaaatattcatcaagatataaaaacgtaattaaattggcagaattattaaacgtcccaatagtaactgcagctggccatggagatgctataccatttaatcataaactgaacgctggacaaatgggtccaagaggtaatccagttgcatccaaattagttaaggaggcaaccgttataattgctctaggaacaagactggggtttaattcaaccttttattcttacgaaaatataaataaaaaagcaaagatcatacaagttgaattggaaaaaagaatgataggaagatactttcctgtatcagttggaatttatggagacgccgccacaatagctgatcaattttataaagaaattaagaagcaaaatattactattgatataaaaaaatggaccaatagctatttaaatgaaagaaaaaagtttttgcttagtagagataaatttaatcagaaaaattttcctattcagccgaatggcttgtttaaacaattaagacaggtacttcctaaaaactctgcaataactttagatgcaggtactctttgtttgcaagcgacagatgctcttgaatattatgatcctccatcttt

SEQ ID NO: 202030 - DNA, 636 bp, Unknown
  Bacterial polypeptide expressing nucleotide sequence isolated from the Sargasso Sea
tatgaataaaaacttttggaaaaataaaaagattttaattacaggacactcagggtttactggtatttggttgacatcattattagccttaatagggggaaaaatagttggaatttctttgaaacctaatccaaaaataaatttaaataaggataaattttttaataaaaaagtaaaaaattattattttgatattagaaattttttaaaattaaaaaaaattgttaaaaatgaaaatccagatattgttattcatttagctgctcaaagtttagtttcagagagcatcaattatccaccagatacttttacaactaatataaatgggactattaatttactggaagctctcaaagattcaaaaaaaataagatcgatcatgttgtttactacagataaagtttataggaacctggataataaaaaaagatttcaagaagatgatcctttaggaggtgatgacccatactcatcaagtaaggcttcaaaagaaattattgctaattcttatatcaaaacattttttagcaaaaaaaaagttggtctcgttactattagatcaggaaacattattggtggtggtgattggggaaaaaatagattaatacctgacttgataagatttaattttgaggg

SEQ ID NO: 202031 - DNA, 1270 bp, Unknown
  Bacterial polypeptide expressing nucleotide sequence isolated from the Sargasso Sea
atgatcctttccgacacatccctccttatcctctcaatctcgatggtgttactcctttgctcttcagcttatttttctgggacagaaacagccatgatggcaattaataggtatcgattaaaacatctggtcaagaaaaaacaccgagcagcaagaatttctaacaagctattacgttacccagaccgcctcttgggcgtcatccttataggcaacaatctcgttaatttcacggcggccaccatcgccacaataattggaatgcgcttattcggagatactggagtgcttttagctccctgggtacttacggcaacctttctcgtgtttgctgaagtcgctccgaaaacattagccgctgaaagaccagaaagatgggcattcaaggctgtgtatgtgctagcgccaatacaaagattgctagtgattccggtaaaaatggtcaacctactaagtaatgctatcgtcaggttatttttaaaaaatgaacccgctcaaagtgacagcctgtccactgatgaactccgtaccgtcgtcaatgagggagccaaaggtgtaggtgaacgccaaaatatgatggttcggctgcttgaccttgagcaagtatctgtaaacgacatcatgattcccagaggggaaattgaggcaatagacatagattctgagatgaacgagattgtcgaagtcgcctctaacagtcaatataccttactacccatctacaaagaatcaatcaacaatataatcggtattctacatttacgacgtttagcacggtttatgggttccaatgaattcaccaaatcagatttgatgcagttaacccgagaaccttactacattccagaagccacatcgctcgacaaacagcttattagatttcaggcagaaaaacagagaatagcccttgtcgttgatgagtacggagaactccagggactagtcaccttagaagatatcctagaggagatagttggcgaatttacctcagatttttctgcaaacatccccgagatacttccccaagacgatgacagctttgttatagatgggggcgccttactacgagacattaatcgtgctttggattgggaattacctatctcaggacccaaaactttaaacggcttggtattggaacatcttgaaacaattccagaagaaaatctatgcattcaaataaacgactatcaaatcgaaaccttgcagctctccgacaacatggtcaaaaatttaaagtgtgttcgagtcgcctccaacagcctagcgc

SEQ ID NO: 202032 - DNA, 895 bp, Unknown
  Bacterial polypeptide expressing nucleotide sequence isolated from the Sargasso Sea
gatgccacaccccgggcgaggcaagccggtctggatggaggcgagcctcgcccaggctttgaccgacgtgccatcggttcataccgtgatcagcctgcgacggttcggcggtgcggtagccgatcccgcccgcgatctggactggagcgaaaccgtgggccgcgccagtccggagtttgccgccgttcccgtcagtgccgatgacacctttctgatcgcctatacgtcaggcaccaccggacggcccaagggcgtcgtgcatacccatctgggcgtgcaggccaaggccacggccgatttcctgctttgcctcgacatgaaacgggatgaccggcacctctggatgaccgacatggggtgggtcatgggaccgcttacccttttgtcggtgctcttgtccggttcaactctggtgctggccgagggcgcaccatcaatgcccggcgatcccttcaggctgctgcgtcttgcgtccgagatggaggtcacgcatctcggcgtggccccgaccctggtacggcagttcatgacgcaggatactgaatctttgtcgggctacgacttgtcgtccctgcgcatcgtcgcctcgaccggcgagccctggaccgaggatgcctggctctggcagctcgatcatatctgtcgccgccgcgccgtgccgctgaacatctcgggcgggaccgagctttttggcgcgatcctgacctcgaccgtgctgcatgaaatcaagcccggcggattttcggcccaggccctgggtgtcggggccaaggttctgcgccaggacggcagcgaagccgcaccgggcgaggtcggcgaactggtcgtgacccagccgcctctgggtctgaccccggccatctggggggaccgcgatcgctacctgaaacctact

SEQ ID NO: 202033 - DNA, 919 bp, Unknown
  Bacterial polypeptide expressing nucleotide sequence isolated from the Sargasso Sea
atgaatagaaaaattataataggctcaagaggaagtaaattggctttgctttatgcgcaaaaagctaaagataaaattattaaagctttaaatttaccagatgatcagatcattattcaaactattacgacaaaaggtgatcaaatacaggatcgaagattatcggaagttggtggtaaaggtctattttcgagtacaatcgaaaaagaacttaaagaaaaaaaaattgatatagccgttcatgcattgaaagatatgccagcaattgaaactaaaggactaaaaacagactcatttttagagagaacagatccaagagaaattttaataacaaatgataagaaaaatattaaagaattaaagcaaaacgcaatagtaggaacttcttcttatagacgagaatttcaaattaaaaaaataagatcagatgttagctgtaaattaataagaggaaatgtagatactagaatcaaaaagttaaaggaaggcatttatgatgcaataattttgtcttatacgggtattaaatatttaaatctagataatgagatttcagaaattttttcgactgatcagattattccaagtgcaggccaaggtattattgctttacagtgtagagacgatgacagtgaaatcatatcagttttagaaaaaataaatcacaaagatacatataagagagctcatatagaaagaaatattttaaaagtattggaaggtgattgcgaaacagcaataggtgctcattcaattatagaagggaacaaaattactgttgaagctgaactattttcattagatggttctcaaatattttatgaaaaaaaatctggtaatgttgatatgtttaaagaaattggaactgaagttggtaatgctttaaaaattaaatcaaataattcatataaaaagtaaa

SEQ ID NO: 202034 - DNA, 868 bp, Unknown
  Bacterial polypeptide expressing nucleotide sequence isolated from the Sargasso Sea
attgatttatgctgaaaaagccaaagctgaaataataaaattctctaaagagtttgatatagagataaaaaaaataacaacaaaaggtgatataattcaagatgtaagactatctgatacaggtggcaaaggacttttttgtaatttaatcgagcaagagttaataaataaaaaaatagacatagcagttcatgctcttaaagatcttccatcaaatgaaacccaaggtctaactaccgactgttttcttaaaagaaatgatcctagagaaattttaattagtaaaaataatttagatttttacaaaattaaaactggctcagtaattgggacatcatcatacagaagagagtttcaattaaaaagaattagaaaagatttaaaatatagacttataagaggaaatgtggatacaagaattgaaaaactaaagaaaaatttgtttgatgctattattttatcgtatgcagggataaaatcattaaatctagaagataacattgcccaaattttttcaacttcagaaattattccaagcgctggtcagggtgtaatagctttacaatgtagaaaagatgatgaggctatcattaatttattgaaaaaaataaaccataaagaaacacattgttgtgttcaagctgaaagaaatgtattaaaagttttagagggagattgtgaaacaccagttggggttttggcaaagatagaatctgataaagctatattagaagctgaattattttccttagatggaaaaaaaagattttatgtaaagtcctctaataaattaaatttagccaaaaatcttggtatacaagttggcaagttattaaaaaaaaggtctaaaaattcatataaaagataa

SEQ ID NO: 202035 - DNA, 925 bp, Unknown
  Bacterial polypeptide expressing nucleotide sequence isolated from the Sargasso Sea
atgaaaagcaaaaaaattattattggatcaagaggtagcaaattagctttaatatatgctgaaaaagcaaaagaaaaaattttaaaagtatctaaagaattaaatgttgagagtgttgaaataaaaaaaattactacagcgggagatttaaatcaaaaagatagactctctgaaataggaggtaagggacttttttcaaaaaaaatagaaatagaattattagaaaataaaattgatattgctgtgcatgctttaaaggatatgccatcagatgaaacagagggattaataacaaattgttttttagaaagaaatgatcctagagaagtattaatttctaaaaataaaataaaatttaaagatttaaatcaaaactcaataataggaacttcttcttatagaagagaatttcagttaaaaaataaaagaagtgacttaaattataaattaattagaggcaatgttgacaccaggataaacaaattaaatcaaaatttatatgatgcagtaatattgtcttatgctggtattaattcattaaatttagacgaacacatttctgaaattttttctattgatgaaattattccaagtgctggacaaggagttatagcattacaatgcaaaaatgatgatgaatttataaaaaatgttttaaaaaaaataaatgatgaaaaaacttttaaaagcgctcaagccgaaagaaatgttcttaaagttttagaaggtgactgtgaaacggcagttggtgcaatatcagttataaataatgaaaatataactctagaaggagaacttttttctttagatggaaaagaaagattttattgtaagtcttccaaagatataaaacatgcgtcagaactaggaatagaaattggtgaaaatttaaaaagtcaatctatggggagttataaaaaatagt

SEQ ID NO: 202036 - DNA, 919 bp, Unknown
  Bacterial polypeptide expressing nucleotide sequence isolated from the Sargasso Sea
tatgaatagaaaaattatcattggatctagaggcagtaagctggctatgctttatgcccaaaaagccaaagatcaaattgtcaaaagtagtgatttaaacgatgaagatgttgtaataaaaaaaattactacaaaaggagatgagattcaggatgtaagattgtcagaagttggtgggaaaggattattttcaagcaatattgaaaaagaacttcaagataaaaatattgatattgcagttcatgcactcaaagatatgccagcttttgaaactcaaggtcttaaaacagatgtattcttagaaagaaacgatccaagagaaattcttatcacaaaggataaacaaaaattaaatgaattaaaaaaaaactctttaattggaacctcatcttttagaagagaatatcaaattaaaaaaatcagatcagatcttgaatgtaaacttattagagggaatgttgatacacgtattaaaaaacttaaagatggaatctatgatgcaataatcttatcctacgcaggaattaaatttttggattttgatagtgaaatttcagaaatattttctacagaaaaaataattccaagtgctggacaaggtataattgcactccaacgtagagagggtgatgaggaaataatttcagttttaaaaaaaataaatcataacgaaacatttatgagagcacatgttgagagaaatattttaaaagttttggaaggagattgtgaaactgcagttggagcacactctgtaatagcaggtgataaaattacagttgaggctgaattattttctttagatggttcaaaaagatattatgaaaaaaaaactggtaaagttgaagacttcagccaaattggtgaagaagtaggtcaaattttaaaaacaaagtctaataattcttataaaagataa

SEQ ID NO: 202037 - DNA, 881 bp, Unknown
  Bacterial polypeptide expressing nucleotide sequence isolated from the Sargasso Sea
tttttatatagacgacgccaagcaaggcgatggaatagcaaatgctgatcaactgcaaggtaaacaactttcttataacaatatagctgatacggacgcagcttacgaatgcgttaaagcctttgaagaacctgcttgcgtaattgtaaaacacgctaatccatgcggtatagcaacagataaaaatattctcgtagcttatgaaaaagcttttgcatctgatcctacgtctgcatttggtggaattattgctcttaacagagaactaaataaagaacttgcagaaaaaattataaataatcagttcgtagaagtgataatttcccctggagtaacagatgaagcgcttaatctgaccaaggataaagagaatgtaaggattctaaatagtaaagaacttggctcccaggtaaaaggttttaaatttctaagtgttactgacggaatgttagttcaagaaacagataatggaattgttacaaaacatgatcttaaaattgtttcgaaaagagttccttcagagatagaaatccaaaactgtttatttgcctggaaagtttgtaaatttgttaaatcaaacgcaattgtatacacaagagagaatcaaacaataggcattggtgctgggcaaatgagtagaattgacagtgccaagatagcagcctctaaggctacagaaagaggattcaaaactgaaggatgcaccatggcttcagatgcatttttcccttttagggatggtattgatgctgcagcagaaatcgggataacttctgtaatccagcctggaggttcagtaaaagatgatgaagttattcaagcagcagacgaagcagatatggccatgatctttactggcattagacactttaggcattaaa

SEQ ID NO: 202038 - DNA, 678 bp, Unknown
  Bacterial polypeptide expressing nucleotide sequence isolated from the Sargasso Sea
tttgttcgtgtcgcctaacggtgtcatcgggctggtcattgtcttggggttgattttttgcgctacttttgccgaaatcttagctccctatgaccctgcaaaaatgggtactggcgggcgatttttgccgccgagtggggaattctttctgggaacagatgagttcggccgagatatgctctcacgcattctatatggcagccggatcacactgttgattggggcggtggcggtgggtatttcgatgacaatgggtatgctggtcggtatggttgccgctttccgtcgaggctggctcgaaacaatcctgatgcgtagcaccgatgtgctgttttcttttactgagaccctcatcgctctaagttttgtcgccgtacttggtccaagcctacagaatgccgtgattgccgtaggcgtcgcgggcatacccttctatgctcgtacgtgttattcggcggctttagtggaaacctcaaagccatattttgaggcaagtatttctgcgggcgccggcccgggacgtttgttgtttttccaccttatgccaaatgttttgcctacgatgattgttgtggcaacgctgggcgtttcaacggcaattctggccgctgctggcctgagttttttaggtctgggggcacaaccgccacttcagaatgggggtatatgctggcaggg

SEQ ID NO: 202039 - DNA, 511 bp, Unknown
  Bacterial polypeptide expressing nucleotide sequence isolated from the Sargasso Sea
agagaacataagagttctaagatgtgatcttgatggagacgcagttggtattcagtttaaggttgtttcaggtggtgtacttgtgcaagatgaagacacaaaaattatttcaatagatgatctaaaagtagtttctgatcttaaaccttcgcaggagcaattagatgattttatgtttgcttggaaggtagctaaatttgtaaagtcaaacgctattgtatttgcaaaagatgggcaaacgattggtattggagcaggtcaaatgagcagagttgttagtgctgaaattgcaagcttaaaagctaaagaagaaggcttgaatgttgaaggatcatgcatggcatcagatgcattctttcctttcagggatggtattgataaagcagctagtagtggaatcaaatcaataatacagcccggtgggtctgtcaaagatcaagaagttatagatgctgcaaacgaacataaaatggttatggtttttactggcgtaagacattttaggcattaa

SEQ ID NO: 202040 - DNA, 1723 bp, Unknown
  Bacterial polypeptide expressing nucleotide sequence isolated from the Sargasso Sea
gctgatttagagagcacacttgatgaggggatcaacggtactcaagtaaccttaatgagtacaacgcttaccgaggagcaatctacccgcgcgccgcacttatctgctatgcaagcatgggaaggtgactggtcggtagaagatgccaaaacggtattgacgacacaagcggttgttggcggatatgatgctgaagggacgctagtagcagcaacaggtatccaattggctaatgctattgatgctctgtacaccttaggagaagacgatgctgatgaagctcaacttgggggcatctacactgacgcaggtataactgctgcactgtgggcacctactgcttcaaatgttgaccttttactttataatgacaacaagacattaaaccaacgtattgaaatggttcgtgacgatacctcaggtgtttggcgccatgaaggtgatatgtcgcttgaccgtcagctttaccgttatgaagtcactgtttatcacccgataacgggcaaaatagagacactgcttgtaacagacccatattctgtatcactaagcacaaacggccgtttctctcgctttgtaaatctagcggatgatgatttaaaaccacaaggctgggatactcatactattccgacggttgaaaattatgaagatgcagtcatttaccaaggacacgttcgtgactttagcgtacgtgatatgtctacgtctgaggaaaatagaggtaaataccttgcctttactgaagagggcacagcaccggttgagcaccttaaaaagcttgttgaagcagggcttacttacttccatatacttccagcaaatgacatcgcaaccattgacgaagaccctactaagaccgttgatttgtatgatacggtaggcaaattgtgtcgcttaaacagcggtgcggcagtgtgtgaagaagaaagcgcaaacgcactgctaatcgatgtttacaattcttatgatccactatctgaagcgggcaaggcacaacagcttactaatgatttgcggaatctagatacgttcaactggggctatgacccccatcactttaacgcgccagaaggaagttatgcgtcaagtgcagaaggtgttgaacgcattgtagaaatgcgcgcaatgatccaggcgcttcacgagatgggacttcgtgttgcattagacgttgtatacaaccacaccaatgcatcgggtgttttcagcaagtcagttttagacaaagcggtaccgggctactatcaccgttacgaagtggatactggtgcgattgttcgtgaaacatgctgtgatgacaccgaacctcgtaatgtcatgatggaaaaattcatgaaagactcactgcttatgtggactgaacactataagtatgactctttccgtttcgacattatgagccaagccactaaggacaccatggtgcgcttgcgtgatgctgttcattctattgacgaagataattacttttatggggaaggttggaccaaaatagaccgtggttacgagcaagcgagccagctcaatatggctggtaccgagattggtacctataacgaccgtattcgagaagctattcgccaaggcgctatctttagaccggaagatgaagggctattaagcgcgcaagaccgtgtaaaaatgggcatgatcggaacgttaaaagactatgttttggagacgtcttcaggaagtgcaggcgctaccagtaacttaggcg

SEQ ID NO: 202041 - DNA, 850 bp, Unknown
  Bacterial polypeptide expressing nucleotide sequence isolated from the Sargasso Sea
catgtcctcttatgaaaatcatcaggcgcttgacggcctgactctaggtaaatcaacggattaccgagacaattacgatgcaagtctgttgcagggcgttccgcgcagcctaaaccgcgatccgctggatttaaaggccgataccctgccttttcacggtgcagatatctggacgctgtatgaactgtcgtggctgaataccaacggcttaccccaggtcgcagtcggtcacgtggaactggattacaccagcgtaaatctgattgaatcgaaaagctttaagctttacctgaacagttttaatcagacgcgttttgattcctgggatgcggtacgtcagacactggaaaacgatcttcgcgcctgcgctcagggcgatgtcagcgtggccctgtaccgccttgacgaactggaagggcaaccgatagcccactttaacggcacctgtatcgacaatcaggatatcgtcatcgataactaccagttcagcactgcgtatctggaaaatgccgtgagcggtgaaaaggcagtggaagagacactggtcagccatctactgaaatccaactgtctgattacccatcagcccgactggggctccatacaaattcagtatcgcggacggaaaatcgacagggagaagctgctacgttatctggtctccttccgccaccataatgaatttcacgagcagtgtgtggaacgcattttcaatgacattctgcgcttctgccagccggagaaactgagcgtttatgcacgctacacgcgacgtggtggcctggacattaacccatggcgcaccaacaccgatttcactccggcaaccggtcgtctggtgcgtcagtaa

SEQ ID NO: 202042 - DNA, 2020 bp, Unknown
  Bacterial polypeptide expressing nucleotide sequence isolated from the Sargasso Sea
atgcaaggaacgaacgtgctgttcggtcagattgccgtcgtcttcggcatcgtgatcgctggcgtatggagcgccacgcaatggacagcagcggccctgggctaccagctacgcctgggctcgccgtggttcgacttcttcggtacgccggtctaccacccctggggcctgttcgagtggtggttcttcttcgacgcctacgcgccgcatatcttcgacgcgggcggtgccattgccgcaggcagcggcctgatcgcgatggtagttgccatcggcatgtcgatctggcgctcgcgccagtccaagctggtcacgacctacggctcggcccgctgggccaatgcggaggacatccacaaggcgggccttgaccagcctgcgggcgtgttcctcggcctgcatcgccagcagtacctgcgccatgaaggcccggaacacgtcctgacattcgcgcccacccgctcgggcaaaggcgtgggcctggtggttcccaccttgttgagctggcctgcatcggccgtcattcacgacatcaagggcgagaactggagcatcaccgccggctggcgctcgcgcttctcgcattgcctgctgttcaacccgaccgatgcgaagtcgtcggcctacaacccactgctggaggtgaggcgcggcgcgcacgaagtgcgcgacgtgcagaacatcgcagacattctggtcgatcccgaaggagcactggagcggcgcaaccattgggagaagacctcgcatgcgctgctggttggggccatcctgcacgtgctctacgcaggcgaagacaagacgctgcgcggagtcgccaacttcctcagcgacccggcctgtcccttcgagctgaccctgcatcggatgatgaccacgccgcacatcggtggtgggccgcatctggtggtggcatcggcagcgcgcgaagtcctgaacaaatcggacaacgagcgttccggcgtgttgagcaccgccatgtcattcctcggcctgtaccgcgaccccacggtggccgaagtcacctcgcgctgcgactggcgcattgccgacctgatcgcggccgagcatccggtgtcgctgtacctggtggtgccgccttcggacatttcgcggacgaaaccgctcattcgcctgatcctcaaccagatcgggcgacggctgacggaatcgctcgacggcagcgacggcatcgcgcgccgccacaagctgctattgatgctcgacgagttccccgcgctcggacggctcgacttcttcgagacggccctggccttcatggccggctacggtatccgcagcttcctcatcgcccagtcgctcaaccagattgacaaagcctacggccagaaccattcgatcctggacaactgccatgtccgggtgacgttcgccaccaacgacgagcgcaccgccaagcgcatctccgaaacgctgggcaccgcgaccgagctgcgcgcgcagcgcaactacgccggccaccggctcgcgccatggctcgggcatctgatggtgtcgcgccaggagacggcacgtccgctgctcacgccgggcgaggtaatgcagcttccgcccgacgaggccgtggtgatggtgtccagcgtggcgcccatcaaggccaagaagctgcgctactacgcggacagcaatttcaagcggcgcgtgcttccgccgccggtgcttgcaaccctgtccatgcaggggcgctatgccgatgtgccaccggaacgcgccgacgactggagcgggctggcgattcccgccatgccggtcgcaccgacggccgacgccgccgatgggctggagaacctgggttcggccgacgacagcggcccacgccgccagcccgaactttccgaagccgtcacctacgaccccgacctggttgcgcccgcagccgacctcgggctgctcgatgacgacgacatgccgcatccccttcctcgccagctcgatccggccctgcagcgcacggcccggctggcttccctcgaccctgacgacggaatcgacctatgac

SEQ ID NO: 202043 - DNA, 1144 bp, Unknown
  Bacterial polypeptide expressing nucleotide sequence isolated from the Sargasso Sea
atgtctgattcgataagaatattccaactagcaaaagagctaaacatatcacataatgatattttagactttttaaagtctaaagacatatctgtctcaagtcatatgtctcccattgatggtaaaacgcagcagatagtatatactgagtttgctaaagaccgccaatcagcagaaagggacagaaaagagcaggtcagaaaagaaattcatgactcaaaagttgtgatgaaaactaagtctgtcaaaaagttcaaaattatgtctgttgaagatcaacgtaaatcagagaagaaaaaagttgaagcgccagttaaggaagaaaaagacagtaaaaagacagaggtcaaaaaagaagctcctgttgagaaaaaaccaaagaaaaaattgagaaaaatctctttacgtgaaccagaaaaggcagaggataaaaagcaggcaaaaaaacataaagatgaactgaaaaaagatagctctgctgtaaaaagattgaaaaagactcttgcttctatggattcaagtccaaagaagaagtcatataagaaaactaaaaaagatgatgggttagatgacgtagatcaaaaaagaacaatcgagcttgctgaatatgctagcattgacgaaatagcaaaagttttagatgtatcaaccagtgaggttattggtaaatgcttacaaatgggtattttagctaccgtaaatcaaagactcgaatgggatgtcatagaattaattgctggtgaatatgacgttgaattaaataaatatgaagaagttgttgatgatttgtttgtaacatcgcattctgaacaagagctttcaaatgctacagaaagagctccggtagtaacaattatgggtcatgtagaccatggtaaaacatccattttagattttattagagaaacaaaggttgcagcaggcgaatcgggtggaattacgcagagagttggagcttatcaggttttacataacgacaataaaattacttttttagatacacctggacatgaagcctttactgctatgagggcaagaggtgctcaatcaactgatatagttattctagtcgttgctgccgatgatagtgttatgcctcaaacaattgaagctattaatcatgcaaaagctgcggaagtgccca

SEQ ID NO: 202044 - DNA, 715 bp, Unknown
  Bacterial polypeptide expressing nucleotide sequence isolated from the Sargasso Sea
tatgaaaaaaaatactctaacaattggaacaagaggtagtaagttagcattgatttatgcggaaaaagtaaaaaatgaattaaataaattttttccaaacgaaataaaactaaaaaaaatattaacaacaggagatcaaaagcaagatcaaagattgtctgatataggtggcaaaggattatttgcagagcaaattgaaaaagaattacttaatgaggatattgatattgctgtgcatgcattaaaagatatgccaacaattgaaacagaaagccttttgacaaacaattttttaaaaagaaattcaccaaatgaaatattaattagcaaaaacaatataaaatttgaagatttagcacctaactctgttattggaacttcttccttcagaagggaatttcaattaaagaaaaaaagatctgatttaaaatataaattaatcagaggaaatgtagatacaagaattcaaaaattagaaaatggtgaatttgatgcaatactactttctaaagctggcatagattcattgaaattacacaataaaatcacacaagaatttagtgttgatgaaatcgtaccttgtgctggacaaggaattattgcaatacagtgtaaaaaaaatgatagtgatattatagatttgctagaaaaaattaatgatattgaaactagaattttggcaaatgctgaaagagaggttttgaaagttctaggg

SEQ ID NO: 202045 - DNA, 913 bp, Unknown
  Bacterial polypeptide expressing nucleotide sequence isolated from the Sargasso Sea
tatgaaaagagctaatcttgtaattggaacacgtggaagtaagttagcaatgatttacgcagaaaatgtgaaaaaagaactaaaaaaatacttttctaaagagattcaattaaaaaaaatagcaacaacaggagatcaaaggcaagatgaaagattgtctgaaataggaggcaaaggattattttcaaaacaaattgagaaagatttattaagtaaaaatatagatatagcagtacatgctttcaaagatatgccaaccgaagaaactgaaaatcttttaactaattattttttaaaaagaaactctcctaatgaaattttaataagtaaaaataatataaaatttgaagatttagagccaaactcaattattggcacatcatcatatagacgagaatatcaactaaagaaaaaaagacccaacttaaaatataaacttatcagaggaaatgttgatactagagttcaaaagttagaaaaaggcgaatatgatgcgataattctctcaaaagcaggagtagattctttaaatttaaaacataaaatttcacaagaatttagtgttgatgaacttataccttgtgcaggtcaaggaattatagcaattcaatgcagagaagatgataatgaaattaaaaaattacttgaaaacattaatgatcaagaaacaagaactgttgcaaaagcagaaagagaggttttaaaagtccttgaaggagattgtgacactgcagttggtgtatttgcaaaattaaatggggaaaaagtagacctattgaccgaattgttttctgtcgatggaaaaaatagatatttcataaaaaaaagtctgcaaaaagataatattgagtctactagtagaatggtaggagaagagcttaaattaaaatcaaaaggttcttataaaaattaa

SEQ ID NO: 202046 - DNA, 889 bp, Unknown
  Bacterial polypeptide expressing nucleotide sequence isolated from the Sargasso Sea
catgcaaccggcttcaatcgacgacactctcgcgcagctcgcagcccaggattacttcgcgagccgtgaactcgcgaccgcgttgtatctcgcgctgcgcatggaacggccgctgttcgtcgaaggtgagccgggtgtcggcaagaccgaactcgccaaggctgcggcggggatgctcggcacctcgatgctgcggctgcaatgctatgaaggcctcgacaccgccagcgcgttgtacgagtgggactatccgcgccagatcatggcgctacgtctcgccgaagccgctggtgagcggcccggcaacgacacgctgtatcgcagcgaattcctgctgaagcgaccgctgctgcaagcgctgatgcccgacgaaaatcacccgggcgcacggcgcgtgctgctgatcgacgaaatcgaccgtgccgacgagccgttcgaagccttcctgctggaactgctttcggactttcagatatcgattcccgagtacggcacagtgcgcgcggcgcagcggccgcttgtcgtaatgacgtcgaaccggacacgcgaagtgcacgacgcgttgaagcgccgttgcctgtatcaatggatcggctatcccgagcgcgatcgtgaacttgaaatcgtcgccgcgcgtgcgccgcagacgtcggtggaattgcaacggcgtgccgtcgatttcgtgcaccggctgcgcggcatggatctgttcaaggcgcccggcatcgccgaaacaatcgactggtgccgtgcattggacgcactgtcagtgacggagctcgacccgcaatcggtgcagaacaccttgggcgtgctgctcaagtatcaggacgatctggcgcgcgtggatgccgcgcagatcgcgcaatgtctcgcgccgccagggtag

SEQ ID NO: 202047 - DNA, 2143 bp, Unknown
  Bacterial polypeptide expressing nucleotide sequence isolated from the Sargasso Sea
ctgtcgattgataaagaactctcttggttgtcatttaatgagcgagtgctgcaagaggcctgcgaccccaatgtgccgattgttgagcgcgtgcgctttttgggtatattctccaataatatggatgagtttttccgggtgcgggtcgcagcagtcaggcgctctatattactgtcttccctgcaggaagggcgtagtaatagtcgtcacttaatggcaaaaattcaatccaaagtgatggcactgcaggagcgtttcgacagtatctatgccgagctgatgcgcgaattagttcgccgtaatatattgttaattaatgaaaaacaattaagcgacttccatagtaactggcttaaaaagcattttcgcgatcattttaaacgccatatagcgccgcttatcgtcaataacaatcgcgacctcgtaaaacatatcaacgatgatgcaacttacctttgcgtatgcttatacactaagttgcgcagacaatatgctctcgtagaggtacccaccaaaaatgtcccgcgttttattgagttaccagcagagaaatctaaagccaaaaaatacctgatcctgctggataatattatccgccactgtgtggatgagttgtttggaccgttttttgaatacgatgcgattgaagtttattcgatgaagctcacccgcgatgcggattttgatattaccgatgagctagaacaaactcagctagaaaaaatgaccaagggtctgaaaaagcgcctgacggctgaacctgtgcgtttggtatacgacaaagaaatgcccgaacatatgcttgaaatgctgaaggaaaatttaaatatcagctctactgaatgtttgatcccaggcgggcgttaccacagtttcaaagactttattggcttccccaaccccagccgtgattacctcgaaaacgagaaactgcccgcgctaaatagctcgggctttggccgcagtgccaacagtttcgatgcgatcaaaatgggcgatattatgcttaattatccgtaccataagttctcccactttacggaaatggtacgtcaagccgcctacgatcctgcggtacggtttattcgcatcaatctgtacagggtagcgaaaaaatcccatgtgatgcagtcacttatcgatgcagtcaaaaatggtaaacaagtcactgcggtaatagaactacgggctagatttgacgagcaatccaacattgaatggacgcgagtactcgccgaagccggcgtaaaggtccaccatgggatcaccagcttaaaagtacactctaagttgtgcttaattggccgtgaagagcaaggcgaaatgaagctttactgccatgtcggctcaggcaactttaacgaaggcacggcacgggtctataccgatttgtccctctttaccgccaatcaggaaatcgcccgcgaagtggagcaagtgttcgacttaattgaacatccctaccgccgtgataacttccagcatttgattgtgtcaccctatgatgcgcgacaaaagctcacccatttgattgataaagagattgttaacgcccaaagccatattaaggcggcgattactttaaaattgaataacttactcgatgagtctctagtacaaaagctctatgaagcatcggctgcgggcgtcaaagtcaaattattgatccgcggaatttgctcgctgataccgcaaattccggggatcagcgataacatcgaagtctacagtattgtcgaccgctttttggagcactctcgggtgatgctatttcacgcgggtggtgaaaataagttgtttatttgctccgccgattggatgagccgcaatattgataaccgtgttgaagtgagcgtaccaatctatgatccgcgtctaaaacaaatggtgatggatattttatcgttacaattcaacgataatactaaggctcgcattatcaataaggaacagagtaatccttatcgtaatcgcggtaataaacgtaaagtgcgttctcaaattgccatttatcaatatctgattaattatgaaaagcggttacagcaagaattaaacgcccaacgggaagctgcaaagcttgaagcagagcaagcacaagcactgactctcgatcccgcattacaggccaaagccagctaac

SEQ ID NO: 202048 - DNA, 634 bp, Unknown
  Bacterial polypeptide expressing nucleotide sequence isolated from the Sargasso Sea
atgatacctcgttatagccgtcccgaaatgtcatcactatgggaagccaaaacccgctttgcgatctggcttgatattgaacgttacgcctgcgaagcacaagagaccctaggcataattcctgcaggcgttgctcaagcaatcatggaccgcggaaaatttgagattgagcgaatcgatgagctagagcgagacctcaaacatgatgtaatagcctttctaactaacgtgtctgaaaatataggggaagaggcgcgatttatgcaccaaggcctaacctcctccgacgtgctggacacggcctttgcagtacaactcaaccgcgcatgtactattttgagcgcggatctggagaacttgtgcgatgtactaaaaaatagggcccatgagttcaagcataccgtttgcgtaggcaggagccatgggatacatgcggaaacgacaacctttggactgaagcttgcgtacgcatattcggagtttactcgatcaaaagagcgcatagaagcagcacaaaaagaggtgtcggtctgcgcaatttcgggagctgtgggaacctattccacgctggaccccgcaattgaacagcacgttgcaaaaaaactaggtctcatccctgagacaatttctactc

SEQ ID NO: 202049 - DNA, 919 bp, Unknown
  Bacterial polypeptide expressing nucleotide sequence isolated from the Sargasso Sea
tatgactaaaaaaattatcataggttcaagaggtagtaaattagcattgttgtatgctcaaaaagctaaagaacaaattattaaaaaaactactttagatacaaatgatattgaaattaaatctatttcaaccaaaggtgatcaagttaaagatactaggttatctgatataggtggcaaaggattgttttcaactgaaattgaaaaagagttagagaataaaagtatcgacattgcagtacatgcattaaaagatatgccagcaacagaaactagcggacttaaaacagactgttttttagagagaaatgatccaagagaaattttgataacaaataacaaaaaaaaattaaatgatcttaagctgaaatcaattataggaacatcttcatttagacgggaatttcaaattaaaaaattaagatctgatctaacatgcaaaataattagaggtaatgtggatactagaattaaaaaacttaaagaaggaaattatgatgcaataattttgtcttatgcagggattaaaaatttaaatcttgaaaatgaaatagctgaaattttctcagcacaagaaatcataccaagtgctggacaaggaataattgcactccaatgtcgtgaagcagataaagaaattatttcaattttaaaaaaagtaaatcatgaagaaacctataaaagagctcatgctgagagaaatgtccttaaagttttagagggagattgtgaaacagcaataggcgtttattcaaaaatagaaagtgatacaattgtagttgaggcagaacttttttcaatagatggctctcaaagattttatgaaaagaaatccggccagattgataaatttaaagagattggtaaacaaattgggcaaaatttaaaaatgcaatcaaataattcttacaaaaaataa

SEQ ID NO: 202050 - DNA, 919 bp, Unknown
  Bacterial polypeptide expressing nucleotide sequence isolated from the Sargasso Sea
tatgagaaaaaaaataataattggatctaggggtagcaagcttgccttactttatgctcaacaagctaaagataagattattgaaaatacagaccttggtaatgaagatattttaattaaatcaattacaactaaaggtgacgaagtacaggatataagattatctgagcttggtggcaaaggtttgttttctagtaatattgaaaaagaacttcagttaaaaaatattgatattgcagttcacgcgctgaaagatatgcccgcgaatgagacagaaggattaaggacagattcttttcttgaaagaaatgaccctagagagattttaattacaaagaacaaaaaaaaacttaaagacttagatcaaaagtcaattgttggtacctcatcatacagaagagaatttcaaataaaaaaaattagacaagatttgaactgtaaactaattagaggaaatgtagatactagaattagaaaattgaatgaagggatgtatgatgcaattattttgtcttatgctggtatcaaatttttaaaatttgaaaatgaaatctcagaaattttttcagctgaagaaataattcctagtgcaggacaaggcgtaattgctcttcagtgcagggagaatgatgatgagacaatttctattttaaacaaaattaatcatgaggaaacacataaaagagctcaccttgagagaaatattttaaaagttttagatggagattgtgaaacagcaattggtgctcattcagtggttgatggagataagattatagtggaggctgaacttttttctttagatggtaaacaaaggttttatgaaaaaaaagttggtaatttgaatgagtttaaagaaattggtaaagagattggaatacttttaaaaacaaaatcaaataattcatataaaagataa

SEQ ID NO: 202051 - DNA, 1786 bp, Unknown
  Bacterial polypeptide expressing nucleotide sequence isolated from the Sargasso Sea
atgacacatcgtgttgccgtattggataaggagttatgccaacccaaaaaatgtgggttagaatgcatcaaatattgcccggtcaataaatccggggcagattgtattgtactcaatgaagatactaacaaggcaaccatagatgaagacatttgtaatggttgtggaatttgtgtcaaagtttgtccatttgatgcaattacaatcgtgaatttggctagtgaactaaaaacagacaaaattcatcagtatggaatgaattcatttagactatacaaattaccaactccaaaaaaaggcgaagtggttggattacttggaaggaatggtatgggaaaaagtactgtggtcaatattctttcaggtattttgaaacctaatttaggaaattatgaacaaccaccagaatgggatgagattttaaaatattacaaaggtacagagcttaaagcacattttgaaaaaataaaaaatggtgagattaaagcatcgattaaaccacaacaggttcatacaattgcagatgcatttgatggaacaggaaaagaacttttagataaatttgatcaaagaggaacctctagagaattggttaaacaattaggattagaaaattctttagaacaaaatctcaaagaactcagtggaggcgaactccaaagattatcagttgcaactgctgcatcaagagaatcagatttttacttttttgatgagccatcatcttacaacgatgtatttcaaagaacaggagttgcaagagtaattcacggtcttgcagaagaaggaaaaagcgtaatggtagtagaacatgatctaacattactggactttcttagtgattatatcgaggtgctatatggtgtgcctgcagcatatggaattgtttcaaatgtattatcaaccaaagttggtattaacgtatttcttgatggttatcttccaactgaaaatgtaagatttagagataagaaatttacttttgatgcatcaacatcaggtgacgagggattagagggggacgccgtgatatcatatccaaagttggaaaagaaatatgattcattttcagtttcaattgaaccaggaacagtaagaaaaggagaattacttggaattatgggagccaatgcattaggaaaaacaacaatgatgaagatgattgcaggtgttgaaaaaccaacagacggttcagtcgataaaaaaatcaagatttcatacaaaccacaatatctttctaatgatattgatgtggaagtaatttctgttttagaaaaagcaaatggctctacaatagaaggaagtgccgaagaagaacagattttggacccattgaaattaaaaaaattgtataataaatcagtaaaaaatttgtcaggaggagaactgcaaaaagttgcaatagcatcatgtctactacaaaaagtggatttgtatgcgctagacgaaccatcagcatttttagatgtggaagatagaattgcagttgccaaattcttacagaaatttgtacgctcatttggtaaatctgcaattatcatagaccacgatcttcaattgatggacctagtctcagattctatggtgatttttgaaggaacatcaagtgtagaaggaattgcgacatccccaatgccaaaaacagatgccatgaacagatttttagaatcacttgacatttcatttagaaaagatgagaaaacaagtagacatcgtgttaacaaagaagcaagtagattggataaagaacaaaaatcatcaggtaattactactttagaaaatgac

SEQ ID NO: 202052 - DNA, 904 bp, Unknown
  Bacterial polypeptide expressing nucleotide sequence isolated from the Sargasso Sea
atgagaaaaaaaattaaatttattggtgtaagagacgaacgtactggaactcatatggcagatggatacgcaagagcagcaaataaaccaggtgttattattgcaggacaaaatggtcctggggcaactaatttagtaacaggaatagcacaagcaaaagcagcattttcacctgttgttgcaattgctggatcatattcaacaaaagataaaatggaagatgcttttcaaggacttgatcaacaatctttattcactccaattacaaaaaaaacttggactgttaaaaattcaaaaataatacctaacgtaataagtgatgctttcaatatagcaatgaaacctagaagaggtcctgtgtgtattaatttacctcgaaatattttagcagcttcaaataattttaagataaatacaaataaagtttcttttaagtatgaaagtaatcttaagggtaatattgagaaaattaaaaaagcagcaaaaataatttgccaagcaaaaaaatttgtaataattgctggtgctggaattaaatatacatctaagtataaagaagtaactaaattagcagaattattaaatataccaattgttacgtcggcaggtcatggtgatgctataccttttaatcataaacttaatgccggtcaaatgggaccaagaggaaatcctatagcttcaagacttgttaaagaagcagatgttattttagctattggaactagattaggatttaattcaactttttactcatacgataatataaataaaaatgcaaaaattattcagattgaaatcgaaaaaaaaatgattggaaaatattttccagttgttattggaattaatgcagatgcagcaacagctacaaatcagatatatgatgaaattaaaaaacagaaaa

SEQ ID NO: 202053 - DNA, 949 bp, Unknown
  Bacterial polypeptide expressing nucleotide sequence isolated from the Sargasso Sea
tttgaaaatacttattaaaggatttaaaaaagcattaaccgaattaaaacttttttattttacttcgtttattgtcgcacttttagtaatcattccaatttccaattttctacttgaaggagtccaatatgttgtaagtggtaatttttcattaggcattgctggaggagaagaggtattagaaactttaaaagttttagtactaacaagtttttttggaggaggattaggcactttaaatggatggttactttcaaattgtgattttaagttcagaaaagttctccgtatttgtcagctcattccgctagccgccccagcatacctaataactgctgttttgcaggatttaggaagtatttttgggtatcaagtaaccggtttatggtggggggtattaatactttcaatttctacttatccatatgtattcattcttgctaacgaaagttttaataaatttggagttaatcaaatcaatgctagtagaggattaggagttgggccgtggaggagcttctttaaaatcgcttttccaatggcgttaccagcactaataacaggaataagtttaatgtgtatggaagtaatgaatgagctaggtacatttgcattattaaatattccaagtatttctacaggtatagctgaaaattggataattgagggtaatccaaaaagtgctattggactatctttggtagctttattaataattttcactttaattatttttgaaaaattctcgagaagaaaatcaaagaggtggagtgaaaatcctgcatcaaaagattctcaagggtgggaattaaaaaaaaccagagctcttttagcaacaaccatatctttattccctccaattttctcttttggaattccttgtttttgggttctgctcaatatcgatcaaatttcaaaagggttgtctatagaattacttaccttatca

SEQ ID NO: 202054 - DNA, 1363 bp, Unknown
  Bacterial polypeptide expressing nucleotide sequence isolated from the Sargasso Sea
atcaggtggagaggcacaaagaaataggttggctagtcaaattggttcaggattagttggtgttacttatgttcttgatgagccctctataggtcttcatcaaagagataatgcaaaattgattaaaactcttaataatttaaaaaatcttgggaataccgtaattgttgttgagcatgatgaagaagcaataagatctgcagatcatattattgatattggtcctggcgcagggaaacatggaggagaaatatgtgctcaaggtaatatagatgcaattttacaaaataaaaattcaataactgctaaatacttatcaggtaaaaaacaaatcaaaataccacaaaaaagaacaaaatttaaagatgaaatgataaggattattgatgcttatgaaaataacttaaagaagatatctgtagacatacctgttggtctttttacatgtatcacaggagtttcaggctcaggcaagtcaacactaattaatcaaactcttttacctataagctcttttattctgaataaatcaaaactctcaaaagaaatcaaatgcgataaaattgatggcttagatcatcttgataaagttattagtattgatcaatcgcccattggaagaactcctagatcaaatcctgcaacatatacgggacttttttcatatataagagatcttctatctcaaactgttgaggctcgatccagaggttataaacctggaaggtttagctttaatgttaaaggtggaagatgtgaggcatgtcaaggtgatggaatgattaaagttgaaatgcattttcttgcagatgtttatgtgaaatgtgatgtttgtaatggcaaaaggtacaatgaacaaactttagaaattaaatttaaagataaaaacataagtgatattctagatatgactgttgaagatgctttagatttttttgaggcgcacccttcaatcaaaaagaaattaaatacattaaatgacgttgggcttggatatattacgcttggtcagtcagctttgacattgtcaggcggcgaagcccaaagaataaagttagctaaagagttatcaaaaagaagcacaggtaaaacattatttatactagatgaacctacaacaggattgcactttgcagacattgaattactcctaaatgttttagatagattaaaaaaacaaggtaacacagttgttgttattgaacataatcttgatgtaataaaaacagcagattggataatagatttaggtccagaaggaggttctgatggaggcacgattgtggctgaaggaactccagaggatgttgttaaaaacaaagactcgtatacgggacagttcttgaaacaattaataggctaa

SEQ ID NO: 202055 - DNA, 1567 bp, Unknown
  Bacterial polypeptide expressing nucleotide sequence isolated from the Sargasso Sea
ttgaatataaaaattaaaaccgcgctgatttctgtttcagataaatcgggtttagaaaaagttgttcaatcgcttaaagaacataatattaaaatagtttcaacgggtggtaccgcaaaagcaatcgcagccatgggtgttgatgtaacagatgtatcttctttaaccaatttcccagagatgatggatggacgtgtaaaaactttgcacccaaatgtacacgggggtttgctttcaaaaagagatgacaataaacatgttcagtctcaaaaggaacatgacatagaagatattgacttaataattgtaaatctttacccattcgaagaaacaataaaatcagagaaaaatgaggaaatttgtatagaaaatattgatattggtggcccagcaatgttgcgatcagccgctaaaaatcatcaatttgtcacagtagttactgatattaaagattacgatgagctcattaatgagatcaataaaaacagtggttcaacaactttggggtttagaaagtcacttgctgcaaaaacattttcaaccactgcttattacgattctttaatcagcaattggttttacagaaatacaaacgaacctattaataaattttcgacagctgcagagttatcttctacacttcgctacggtgaaaaccctcatcagactgcaagtctctataagtcatccttgcagcaatcagggataccacatgcaaaattacttcaaggaaaagaattgagttacaataatattaatgatgctgatgctgcattacagttaattaaagaatttgacgaagacactcccagtgttgcaattattaaacatgcgaacccttgtggtgttgctagtgggagttcactttgtgaagcgtatatgaaggcattttcatgtgatacaaccagtgcatttggaggtatcattgcgcttaaccaaacaatcgataaagagacagcctctgaagttataaaaatatttactgaggttattatagcgccagatgtgagtgatgaagctaaagaaatatttaaatcaaaaaataatttgcgagttttaactttatcgtctttacgtaaacaaaataattctcataactacaaaagtattgaaggaggaattctggttcagtcaaacgatgaagctaatacgacaaaatcagatctgaaagtagttacagaaaaaaaaccaagtgatgatgaaattgaagatatgttatttgcatttaaagtatgcaaacatgtaaaatcaaatgcaatcatttatgtcaaaaataaaaaaacaattggtatcggggcaggacaaatgagtagagtagatagtgctaaaattgcctcacaaaaaaatagtgaaatggaaaaatctgatgaaaactcactcgaaaattcagtggtcgcatcagatgcgttctttccatttgcagatggcttgctagttacaatttcatctggagccaaggcagtaattcaacccggtggatcagtaaaagatgacgaagtaatcactgctgcaaatgaagctggaatatcaatggtttttacgggcaaaagacattttagacactgat

SEQ ID NO: 202056 - DNA, 526 bp, Unknown
  Bacterial polypeptide expressing nucleotide sequence isolated from the Sargasso Sea
gctgcgcaacgagcatctgcgcttcgtgcgcgaggcgccgcgcggcggtgtactgcattgcttcgtgctcgattgttccgggtcgatgcttggcgcgcagcgccttgcacttgccaaaggtctgctgattgcgttgttcgatcgcgcgagtgccgcgcgcgccgaggcggcgctggtgtgttttggcggtgccggcgccaccctgcgtttcggtcctgccgtgccgcgctggtggaacgagcgatggctaagtccggtgggtggaggcggtggcacgccgctcgcgtccggtgtgcgcgaggctgcccaggtgctggagcgcaacgcccggcgcaagcccgcgcagcagcgctggctgtggattctgaccgacggccgcagtggcgatcgaccggcgcggccgcgtcacgcggacgaggtggtgttcgtcgatttcgagcgtgaggcgatacgactgggccgctgccgcgcgcttgccgatgcgtggggcgcggcgctgtgtacgccggacgaactgatcgtctga

SEQ ID NO: 202057 - DNA, 1336 bp, Unknown
  Bacterial polypeptide expressing nucleotide sequence isolated from the Sargasso Sea
attgctattcgaagactacgcccgtggaaaacttcttaagggtgttgagaaactcgctgatgctgtcgcagtcaccatgggaccaacaggtcgtaatgtgattatcgacaaaagcttcggtggaccaaccgtcacaaaagatggggttaccgtcagtaaggaagttgatctcgaagatgcatttgagaatatgggtgccaaacttgtaaatgaagtggcttccaagacatctgatcttgctggtgacggaaccaccaccgcgactgtcctcgcacgagcggtctttcgtgaagggattcgaaatattgttgccggcagtaatccaaccgcggtgcgtcgcgggattgaaaagggtgtcactgctgccgtcaaccatcttatggagattgctcgtcaggtaagtcgtccagaggaagtggctcaagtaggagccattagtgcaaataatgacacctttattggtgacctgctcgccgaagcattacaaaaagttggtaaagatggagtaatcaccgtcgaagaagggaagacaaccgaaacggctgtccgttttgtcgatgggatgcagtttgacaagggctatatctcaccgtatttcataaataagccagctgaaatgatctgtgaatttgaagatgcactcatccttattcacgaaaagaaaatttcgaacctcagagaacttgtgccactcctcgagaaagttgctcagtctgggaaaccattcctaataatcgctgaggatattgatggagatgctctaacggcactggttgtcaacaaactccgcggtgtattaaatatctcagcagcgaaggccccagggtttggggatcgcagaaaagccatgcttggtgacattgccacattgactggtggcacgctgattagtgaagatcttggcatcaaacttgaaaatgtagagctctcacaccttggaacagctcgtacgattacgatcgacaaggatgaaacgacgattgttgaaggcgcaggaaagcctgctgatgtacaggctcgcgttcaacaaatccgaaatcaattagaggcaacagaaagcgaatacgatcgtgaaaagcttcaggaacgcctggctaaactcaccggtggtgtcgcgattgtatccgtaggtgctggaaccgaagctgaaatgaagcaaaagaaggctcgggttgaggacgccctccatgcaacacgtgctgccgttgaagaaggcattgttccaggcggtggcgtggcgcttgtgcgttgccgtgaagctgtcgagaaggcacgttcccaggcgaaaggtgatgaaaagataggtgtcgatatcgtactcggcgcactcaaagcc

SEQ ID NO: 202058 - DNA, 2503 bp, Unknown
  Bacterial polypeptide expressing nucleotide sequence isolated from the Sargasso Sea
tatgttaaaggctagagtaagttcttcaatcaaatccgttgatttgaaacaagaggtgggacctctaataattggtgagagacttaacactcaaggttcgaaaaaagcaaaagaactggttttgaatgacgattttgatgggctagttgacttggcaagaacccaggttgaagatggagcccattgtattgatgtatgtgttgcaacaactgaacgttcagatgaaaaagagtttattctaaaacttgtaaaaagtctaagtcttgaaattgatgcccctcttgttattgattctacagatcctcaagttattgaatctgcaattgaacaaattcctggtaaaccaatcataaattctattaatcttgaaggtgatggaagtagatacaaagcattagccccattgatggcaaaatatggaattcctgcaatcgcattatgtattggtcctgatggaatggcaaaaactcctgaacaaaaagttgcaactgctgaactattgtataaatctggaaaaaaatatggtttacgtccagaacaattcatctttgatgttctaacatttactcttgctactggtgaagaagaatttcttgatgcaggaaaacatactttggaaggaattaaacttgtcaaagaaagatttccaacatcatttaccactcttggattaagtaacatcagctttggtcttgtcccacaagcccgacgtgtattaaattcagtatttttgtatcatgctgtacaaaatggtcttgacagtgcaatcgtaaatgcacgtgaaatcactccatatactgaaatcgatgaaaaggaaaagaagatagttgaagatttgatcttcaataaacatcctaatgcgttatcagacctaatcactcattttgaaaataaaactcaggatccatcatcaaaaaccaagaaagttgatgttgatccaacatggcctgcagggcagcgctcaaatttcagaattattaatcgattaaaagatggaatagaaaatgatgttgtatctgcaattgtagaaaaactatctcaaaaggatattcttgtggataatgatggtgttttatcgattaatgccgcaaaagaagttacacaccaaggagcaattcaaacattaaatgatgatcttttacctgcgatgaaaattgttggtgacaaatttggtgctggagaattaatccttccctttgtactaaaatctgcagaatgcatgaaagctgctgttaaagaattagaaaaatatctactaaaagaagagggtaccagtaagggtattttggttctaggaaccgtgtatggagacgttcacgatattggtaaaaacttggtaaaaacaatctttgaaaataatggatacactgtccatgatttaggaaaacaggtacctttacaaaaattcgtagaaaaaattaatgaagtaaaacctgatgctgtaggtctttcagcattgttagtatcgacatcaaaacaaatgcaattttttgtcgaacatgcaagaaaaactgatgtcaatattccaatactatgtggcggtgctgcaataaacagtaattacattaaccgaattgcaaaacaagatggaatctatgaacctggaatgttttactgtggtaccatgtttgatggtcttaaaacaatggataaactagtttctgacgaaaaagatgaatttgtaaataattggaaagataaattatcaaactggaaggaaagtaaagttcagcaagttgactctgaaaatcttcctcatagcgatatcaaacctgtttctccaccaactccgccacaacttaatgaagttattagattaaaacctgaagattttgatctaaatgaaatctggaatcatttgaataaaaaatcacttttcaaactatcgtggggaattagaggaaactcaaaaactgatacaattgatgatcctgaaaaacttcttgttgaatggaaaaaacgtgtaattgaagataatctctttgaaccgcaagctgtttacggatatttctcatgtcacaatcgtgatgataaattagttgtagatggcccggacggtcaagacataatttttgattttcctcgttcatcaaaaactaaacatctgtgtttaacagattattttggtgaaaatgatattgtggcatttcagtctgtaactgttggtacaaaagctgctgaattgattgaaaaatgggataaagaagacaagtacactgatgcgtattatctacatggtcttgctgttgaaacagctgaagcaatggcagaatggataaatgaaaaaattaaaactgaacttggattatctgataaaggtggtttgagatatagttggggatatccaagctgtcctgatacaactcagcaacatcttgtatggaaattaattcatggagaaaaatctggaatggagctgacagaatctggacaaattatacctgaacagtcaactgcagcaatagttgttcatcatccagaagcagaatactttgttttatag

SEQ ID NO: 202059 - DNA, 1771 bp, Unknown
  Bacterial polypeptide expressing nucleotide sequence isolated from the Sargasso Sea
ggggcgtcggcggtggccttgtctgtggatgccggcacgcccgacccggtggtcggctgggaagatgcggcggtcgatccgttgcgtctcggcgactatctgcgcgcgtttcaggcactggtggatcgttacggctacgagacgagtctgtacggccatttcggcgacggctgcgtgcacgcacgcattaccttcgatctgcgcagcgtggaaggcgtcgcgacgtggcgcaagtttctgcgcgaagcggcacaactggtggtcgagttcggtggctcgctgtcgggcgaacacggcgacggtcaggccaaggccgagtttctgccgatcatgtacggccctgaactgatgcaggccatggagcagttcaaggcgatctgggatccggccaatcgattgaatccgggcaaggtcgtgcatgcatatcgcgtcgacgaaaatctgcgcatgggtcccgcgtacaaaccggtgactctgcaaacaaagcttacgttcgccagtcagcaaggggacggctttcagcgcgagatcgaacgatgcatcggcatgggcaagtgccgttcgctcgaaggcggcacgatgtgtccgagctatcgagcaacacgcgaagagcaatactcgacacgtggccgcgcgcatcttttctgggaaatgctgcaaggcgatgtgatcgccgacggctggcaaagccgcgaagtgaaggcggcgctcgatacctgcctcgcgtgcaagggctgcaaatccgattgcccgacgcacacggatatggcttcgtacaaagcggagtttctttcgcattactacgagacgaatcgtcggccgcgcgaggcgtggttcatggggcggatcggcgaatgggcgccgtgggcggcacggtttccgaggctgacgaatttcatgacttcggcgccgggcctggctgcgttagggaaatgggctgccggggtggcgcaagcgcgggaattgccgaagttcgccgtgcggagttaccggcagattgcgcgacgatcgctccagaccgagggcgacgttcgtgctgatcgtgaggtcaagaaagtcattctgtgggtcgataccttcaatgaccacttcacgcccgagattgcgcaggccgctgccgatgtgctgacgcaaatgggctggcacgtcgtgctgccgaagaagcgtttgtgttgtgggcgtccgctctatgacttcggtttgctcgatcgtgcgcgtgcgttgctgaccacgattctcgatgacctcggcgacgatattgccgcgggcgtgccgttggtcggtcttgagcccggttgtttatcggtgttcaaggacgagttgctaaagcagcttcccggtcatgcgttagcgaaacaactgtcggcgcaaactttcctgttctccgatttcgtcgcgcgtcagccattcgtatggccgacgcttgcggccgatgtgatcgtgcacgggcattgccatcagaaggcgctgttcggtatgcaaggcgatgccgcgctgctggacaagctcggcgtgaaatggacgttgctcgacaccggatgctgcggaatggcgggctcgttcggctttaacgacaagcatcacgcgctatcggagaagatcggcgaagaccggctgtttcctgccgtgcgtgccgcggccgctgcgaatgcggaaacgatcgtgctgaccaacggcttcagttgccgagagcagatcgagcaggggacgggccaacatgcgatgcatatcgcgcaactggcgcagcgggtgttggcggggcgttgctaaa

SEQ ID NO: 202060 - DNA, 2071 bp, Unknown
  Bacterial polypeptide expressing nucleotide sequence isolated from the Sargasso Sea
ttgaaaaaaataactaaaaatttatttttattatccttttttgggatatctttatttgcgtcttctgaaaaagttgatttttcaatttccgaaaaatatcaagatctaagctctgagattttcaagaacatatcctcacatcactacacaagagaaattgataaagaaagttttaatgatttgtatattgatgcccttctagaggaattagatggaaataaaaatctatttttaagctatgaaataaaatctttcaaaagaaaatcttctaattacaaaaaaaatagagagaattttgatattaatttggcttatgaaatcctcaacacctattttaatagggtcattgaaatttctgaatatcaaattaagttagctaaaaaagatagctttgatttatctatagatgagggtattgatattttttatgatgataatgaatatgcttctactatgcttgagttaaaagagagatggagaaaaacaacaaaaaatgattttatcgtttctgttttagcaaaagatgatgaagatgagattatttctaatcttacaaataggtatgaaagaagaattaaaagagtcttgcaaagaaaagatgaagacatctttttgttagctataaatataatgactagacagtttgatcctcattcaacatatttatctccttataatgcagaagattttgaaattgatatgagcttaaagcttggcggcataggtgcattgctttcaaactctgcgacagaggactacgcaataattgtaagtcttgttccaggtggtcctgcagaaaaaaatggtgaactggagcctaatgacaaaatcgtaaagatcaaacaacaaaatgaagatatttttgaagacgtaactggatggaggattgatgaagttgtccaaaaagttagaggggagcctcagactctcgtaacattggagatcataccaggagatgctgaagataacagtgttcgaaaaataattgaaattgagagagagatagtcgaattagaagagagagcggcaaaatcaaaaatttattctcttaataagaatggtagtgaatataaaattggaattattgacctgccctctttttatttagattttgaagcatggcaagccagggatccaagttataaaagtagcagtaaagatgttaaaaatattttggacgaatttaaaaaacaatcagttgatgcagttttggttgatcttagaaataattctggtggagctcttacggaagcaaataaacttacagggttatttacatcagctggggctacgcttcaaatcaaagaatctaatggcaatattatcccctggggtgatgcaagagtgaggcaagcttggtcaaaacctatggcggtcttagttaataggtattctgcttctgcttctgaaatatttgcaggtgcaattcaagattatcaacgaggactagtaattggacagagaacatttggaaaaggaacagtccaaagattagataatttgtctgagggacaactaaaaattactgaatcaaaattttatagagttagtggagatagcacccaaagcagaggtatagatcccgacattattcttccatcaacctgggacatagaaacggttggtgaaagctcccttccctctcatttgccatgggataaaataaaaccaactagatatagaacctttaccgaagactcaattgcaattgaaaaaactattgttgcctatgaagagcgtttatctactgatccaaatcttatttatttaaaagatgttagatcacggtatgatcaaaataagaataaaatggaactctctttaaacatagatgaaagaagatctgagcaaaaagaaagaaagcaatggctccttgaggtagaaaataaaagaaggtcatctcttggcatggaaatttttaaagattacgaaagtatggatgaattcaatgataattttgatcctgaggatattgatacaattaaagactattctttacttcaaggtatagaaattattggtgactatattgattcagaatctaattttcttagttggagaaatacataat

SEQ ID NO: 202061 - DNA, 934 bp, Unknown
  Bacterial polypeptide expressing nucleotide sequence isolated from the Sargasso Sea
tatgtccgcaagaacacaattacaatcaaaaccagtagcagatttacgcgctattgctgaaggtcttggccttgaacacaaaggattacagaaggctaaattaatagatcttttaattaagcaaggtgatgctgtgcttgaagctgaagtgcctgagtctaagccaaaaacagatgacgatcttccttcagttgttaattctggcgatagtcaaataaaaaaaggtgaaacaagaacaggctttttagatattcttccagaagggtatggatttctgagatgtgacggatacaagccaagtgaaatggatgtatatgtcccagcaggagtcattaagaaatacagaatacgtaaaggtgattctgttgaaggaccaattagagcaccaagggcaaaagagaaataccctgcattagttgaacctacaactgtcaatggcggagatccagaattattagctagaagagtagagtttgataagttaactcctttatttccagatgagagattaaaacttgaaattgatggagagccagacaaaattgtgggaagaatcgtagacctaattgctccaattggaaaaggtcagagaggtttaattgtctcacctccaaaagctggtaaaactacaattttaaaagaacttgcgaactctattactgctaataatccagaagttcatttaatggttgtacttgttgacgaaagaccagaagaagttacagatatgcaacgttctgttgacggtgaagttgtcttctcaacatttgatagacctccagaagaacatacacaagtttcaaagctagcaattgaacgagcaaaaagattggtcgaagaaggtaaagatgttgttatcttattagattcgataacaagactagccagagcacataacttagctactccagctagggaagaattttatctggtg

SEQ ID NO: 202062 - DNA, 1495 bp, Unknown
  Bacterial polypeptide expressing nucleotide sequence isolated from the Sargasso Sea
ctggatcgaacggccggccagctagggcgtcaactcgcccaactgctgcgcgacgcgatacgtcgcggcgacctgcaagcaggcgaaatgctgccgtccacgcgcatactcgccgcgtccttgcaggtcgcacgcggcaccgttatcgaagcattcgatcagttgatcgcggagggtttcctgacggcaagcccgagagcaggcacaagcgtggcgcactcgttgacgccgcctgccgacgtccaggcgcgcccgtccccagtcgagccctcttcgcttccgggacgtgcccacctgctcgcgcaggttgcgcgtcaattttcagccgtaccggcggcccccttcgccgtgtcggtgccggttggccgtgccctgccggacgacatctggcggcggctcggcaaccgtgtgcgcgcccggggtcccggcgcacccgcgggttatggcgatccgcagggcgcacgcgcgctgcgtgaagccatcgccgactacgtcagacggtcccgctcggtccgctgcgaagccggccaggtcatcatcacgagcggtacgcagcaaggcctttatctgtcctgccaggtgctgctcgacgccgacgactcagcgtgggtggaagacccggcgtaccgaggcatcacggccatcctcgaaagcaccggccgtcccgggcgcatgatccgggtacccgtcgatgcggaagggctcgacgtcgacgccggcattgaactcggtgcgcacgcccgcgctgcattcgtcacgtcgtcgcatcaatacccgttaggcatgccgatgagcatggcaagacgcaacgcgctactggcatgggctcgcacgcacaatgcctggatcgtcgaggacgactacgacagcgaactgcgttatgccggccatccgtttccgtcgctgcagggactcgatccgagccgtgtgatctatctcggcaccttcagcaagattctgtttccatcgttgcgcctgggttatgccgtcgttcccgactaccttgtagatgccttctgcggcgcgcgcgtgctgatggaccgcaatccgccgaacgccgatcagcacgtgctggcggccttcattgcggaaggccatctggaccgtcatatccggcgaattcgcagtgtctatgccgagcgccgctcgcaaatcatcgagaccgtcgagcggctgctgccgaaggaactcgcctggttgcagcccagcgatcaaggcatgcacatggtgctctggctgcgtgagggcgtcgacgacaccgctgtggcgtcgttagcggcgcaaagcggcgttgccgtacgggcagtgtctcccatgtattcggctggcaacgcccggccgggtttgatactgggcctcggcgcgttcaccgacagcgagattgaaatagccgctcgacatctcgccaggtgtgttgacgcggcggcgataggcgtcacgcgcaatgcagcgaaacggccgaagaaaaaagcgacgcaagatcgttctcactagc

SEQ ID NO: 202063 - DNA, 1231 bp, Unknown
  Bacterial polypeptide expressing nucleotide sequence isolated from the Sargasso Sea
ttgacatcgaataaaagatacgatttgataattgttggtggtggtccagcaggagcaacagctgcactctacgcaaatcgtctaggtttaagtgctgttatacttgataaatcaatatggccaagagataaaatttgtggtgatgctctatctggtaaagctgttgatatattaaaggatctggatatattaagcgacgtaaaactattagatggatcaactataaatagaatagtatttggaagtccaaaaaataagatatttgagattgatctgtcaaaatctttaaatgatagacatatacgtgaaggatatgttatccccagaaaaacttttgatgattatctttttgataaggcaaaaaaatcggtagagtttttagaggggtttaatgttcaagatgtgctaatgaatgatagatcagtggtgggtataaaaggaattaatcaaaaaggacaagaagaaaaaatattttcatctattgttcttgggtgtgacggatttaattctatcatagcaaaaaaattaaatttatataaaatggatatgaagcataccgctttaggaatacgttgctattttgaaggcgtaaaaggtttgactgatcagattgaattgcactttattaaagagattaatccaggatatttttggatattcccagcaggggatggtatagtaaatgtaggtttaggattatctaaaaaatatataaagaagaataaaaaggatcttgtaaaattacttgatatagttacccaactaaattatttccgtgatagatttaaaagtgctaaacctttagagaagcctaaaggttggaatttacccatgggtagtatacataggaaaaaccatggggatggttttatgttattaggggatgctgcaggattaattgatccatttacaggcgaaggtattggtaatgctatgctttctgcaaaatttgcaattacagtttcaaaaaaggcaattgaaatgcaggacacaagtgaaaggagcttatcgagatatgataaaatggtatggaaagaaattggaccagaactacaaataagtacaaatcttcaaaaacttgcacggtcaaaatttcttctaaattttgttattaatagagcctctaggaatgaaaaaataaaagatattattggaggtatgcttgccaatgaagttgcaaggggtgacttaactaatccattattctattataagattcttttttcttgaa

SEQ ID NO: 202064 - DNA, 1237 bp, Unknown
  Bacterial polypeptide expressing nucleotide sequence isolated from the Sargasso Sea
atgcagaagccagtccttacaataaacgatctcgcagctgattttcttcagtgtcccgatcgccatgacaccggttcagaaaaatgggatcgctatcgtggcaggaaaacatccacgggaaaagaaattcttccgttctgggtggctgatatggacttccaatcgcccgacgttgtactcaatgcaattcgtaaaagaacgagccacgctgtctttggctatacgcatgagacgcctgactttgcaacgactctgactactcatctccgtgagcagcacaactggcagattgatccatcatgggtccttggcgtgcccggcattgtgacaggactttcaatcaccgctcggctcttatcccaaccaggtgatggcattctgaccctgacaccggtctatcagccatttctctttcttccaaagcttgcagagcggcggagtgtgcgggtccccttgcatgccgatgtcaccgcacaacgatggaccatcaattgggaagcacttgaagcggccatgacgcccgatgtgaaaatcttttggctgtgtcatccgcacaatcctactggcaaggtctttacccaagaggagttgcttcggattgcagaactgtgtgaaagacgtggggtgaccgttgtcagtgatgaaatctgggatgatctcatccttgatgattcgtgccacattccttttgccagtcttgaccatccggcagcacgtcgatcaataacatttgttgctgcctcaaaaacatggaatattgctggcctcggctgcgctgcagccatagttccaaacgaagattttcgaaaacaatggcgacaggctggaggaggacttgtccccatggtcaatccgcttggctatgccgcatctgaggccgcatggaaagatggtgagccttggcgacagaaacttttggatgtcttgaaatacaacaagcagcttgcggtcgaagccattcacgaaataccgggcatctcctgcataccaccacaggcaacgtatctcctttgggtcgattgcaatgagtgggttgctcgtcaacgtgctggccaaaaccaaccacaacaagcgtgcgaagacgctgggattgcaccatcaaatggacctgagtttggggggccaggatttctacgactcaactttggctgcccacctgcattactacaagaaggtctcaagcgattacgtgacgcgtttggtgcaaacaaaacttttggtcagaagcaccgttaat

SEQ ID NO: 202065 - DNA, 1183 bp, Unknown
  Bacterial polypeptide expressing nucleotide sequence isolated from the Sargasso Sea
atggaagagtttaaattaatcatagaggcaattggtggttttctttggaacaactataccctctatgtcgttgttgccactggtattgtttttacaatatggagtggattttcacaatattacgctttgacacatggttttaaggtaatcaaaggtgattatgataaagatgatgatccgggtgcaatctcacattttcaagccttgtcaactgcactctcagctacggtaggccttggtaacattggcggtgtggccttggctatatcgctcggtggcccaggggcggtgttttggatgtgggttgtaggatttttaggtatggctattaagttaagtgaagtctcgctctcgatgatacacagaaatatagatgaagcagacaatcccagtggtgggccaatgtgggttgttgaaagaaatttttctgggaaaaaggggtttatgaaaatcatcggaaagcttcttgctgggacattttgttttgctctaataatcaacacaatcactgcaggaaatatgtttcaggcttggaatgttgcaaatctgactcaagcttattttggtgtcccaactctagttacaggtgccatattggccttgattgttgggtctgtaatcataggcggtataaaaagaatcggagcagtgacatcaaaacttgttccaataatgctcataatttatgtcattgcttgcatatatgttcttgcaattaattttacagcgattccagaaatgctaaggctcattgtgagcgcagcattttctccaatggagtcaagcaatgccttccttggtggaaccgctggagcagcctttatatttggtatgcagagagcgcttttttcaaatgaagcagggcaaggttcatctgccattgctcattcggctgccaaaacagatgagccagttagagagggtgttgtagcaggcctagagccttttattgataccattgttgtctgcacgatgagtgcgctggtaattttggttacaggcatttggaatcgacctgcagaagttcagctttctaatctttcagtaaatcaatctggtcaaaattggtccattgatggaacaattggtgatgctcccacgctcagttctggcgacaaagttttcatgatttactctggctcaaataatgctgagtctggtaatgctttaaacaaagtttatg

SEQ ID NO: 202066 - DNA, 1042 bp, Unknown
  Bacterial polypeptide expressing nucleotide sequence isolated from the Sargasso Sea
cctgactggtggtcaagccgcaattaaatcattaaaaaaagaaaaagttaaacatgtttttggcttaataggttctgctacaatggaaatgtttgatgctctttatcatgaaaaaaatataaaatttattggtgtccgagatgagagaactggaacgcatatggccgatggatatgcaagagcatctaatcaaccaggtataatacttgctggacaaaatggtcctggtgcaacaaatctggttaccgggcttgctcaagcaaaagcagctttttctccagttgtttcaattgctggttcatattctacaaaagataaaatggaagatgcttttcaaggtcttgatcaacaatctttatttaaaccagtaacaaaaaaaacttggactgtaaaaaatgctaaaaaaattccaaaaacttttagtgatgcttttaaattagcaatgtctcctaggaggggaccagtttgtattaatctaccaagaaatatattggcagataaaggaaattttaaaatcaatgacaaaaatcaatcttttgataatcaaaactcaactaaagcaaaatctaattatataaaaaaagctgtaaagattatcagtaattcaaacaaaactgttattattgctggtggtggaattaaatatacatcaagatataaaaatgtagttaaattggcagaattgttaaacgtcccaatagtaactgcggctggtcatggagatgctataccatttaatcacaaactaaatgctggacaaatgggtccaagaggtaatccagttgcatctaaactagttaaagaagcaagcgttataattgctcttggaacaagacttggatttaattcaactttttattcttacgaaaatataaataaaagagcaaagatcatacaagttgaattagaaaaaagaatgataggaagatactttcctgtagcagtaggaatttatggggacgctgccacaatagccgatcaattatataaagaaatcaagaagcaaaatattactcttgatataaaaaaatggaccaaataa

SEQ ID NO: 202067 - DNA, 1948 bp, Unknown
  Bacterial polypeptide expressing nucleotide sequence isolated from the Sargasso Sea
atgcaccgcaacaagctgaccacgctcattctcgccgccctcgcatcacacgcctatgccgccgagcaggaggtcatggtcgtgaccgcctccggcttccagcagaagatcgaggataccgccgcctccatctcggtggtgacccgcgagcaattggagaaacgcgcctatcgcgacgtgaccgacgccctcaaggatgtgcccggggtagtgatcaccggcggtggcagcagcagcgatatcagcattcgtggcatgggctccaagtacacgttgatgctggtcgacggcaaacgggtcgacagccgtggcacccgtcccaacagcgacggccccggcatcgagcagggctggctgccgccgctgcaagcgatcgagcggatcgaagtggtacgtggccccatgtcctcccgctacggctctgacgccatgggcggcgtcatcaacgtcatcacccgcaagaccgccagcatgacagcctggcagggctcgctgcatgccgactcgaccttccaggagaacaaggagtccggcgacatcttccagaccaacgcctataccgccggcgccctggtggatgggctgctgggggtgcgggtgaacggccagctctcccaccgtggcgaggatcagttccagaacggtttcgccgagcaggagatgcgcagcggtacggccgtcttcagcctgaccccggacgagcacaaccgcttcgatttcgaagccagtcgcggtctgcaggatcgcaaccgcacaccgggtgaatcgctctcggccaagtcaaaacccagcctgagcacctacgagcgcaccaacttcgccatcacccacgacggccgctatgacttcggctcctccaccagctacctgcagcgggaagagaacaccaatcccggccgtcagatgcagctcatcaacaccatcgccgatacccacacccagtttgaactgggagctcactatctgagcgtgggcggtcagtaccgctacgaggatctgcaggatcagggcaaccagctcaacgtggccaaccgcgccaatcagctgacccgctggagctgggccatgttcgtggaagatgagtggtcgctgaccgacaccttcgccctgaccggcggcgtgcggatggatcaggaccagaactacggcacccactggagcccgcgtctgtatggggtctggcacctggccgactcctggacgctgaaagggggcgtctccaccggctatcgttcaccggatctgcgcatgtcggccgccaactggggccaggccaccggcggtggcactcaggacggcatgctggtcggcagcccggaactgaaaccggaaaccagcgtgagccaggagatcgccctgctgtgggatggtcagcaaggcctgaacacagggctgaccctgttcaataccgacttcgaggacaagatctccgagatccgccgctgcgaaagcaagagcaacccctcctgcaccctgaacggtcacacctatgacttcatcagcgaccgcatcaacgtcgacaaggcgaacatgcgcggggtggaaggcacggccaactggaccatcaatgacgcctggtcgctggcctccagctacaccttcacccagtccgagcagaagagtggggcgatggaaggcaagccgctgaaccagatgccgcgccacatgttcaacaccacggtcgactggcagaccaccgagaccgtcagcctctggtcacgggtcaacttccgcagcaagacctccgattacctgagccgggtcaagatggccgagggcaccccctcctacaccttcttcgacaccggtctggtctacaaggccaacgaacacctggatgtcaccgccggtgtctacaacctgttcgacaagacagtggattactccagcttcggtaccgtgctggatgggcgtcgctacaccctcggcatgacctacaacttctgat

SEQ ID NO: 202068 - DNA, 703 bp, Unknown
  Bacterial polypeptide expressing nucleotide sequence isolated from the Sargasso Sea
ttgagtcgtcccgtgcgtttagacaaatttatctgtgaaagtacctcgcttacccgttctttagcgaaaaaagccctgcaccgtggtgacatcacctgtgatgggactgtgattaaagatgctggttttaaagtgctcgaggggatgcaagtgtgtcttgaaggtgagcctatctccctcgttggtgagcgctacctgatgcttaataagcccgtggatacgatttgctcgacgatagatgaagtctacccttcggtattgagcctgctggatattgaaaagcccgaaaccttacacattgctggtcgtttagatgccgatactactggcctagtgttgatcacgagcgatggtcaatggtcgcatcggatcacctcgcccaaaaaagactgtggcaagcgttatttagtgacgttagctgagcctgtggatgagagtctgattggcgtctttgccgctggagtggagctgagaaacgaagacggcctgacaaaacccgcagaacttgaaatcatcgagccgcagcgggtgcgtttaaccattaccgaaggtaagtatcatcaagtgaagcggatgtttgccgccgtaggcaatcatgtggttggcttacaccgtgaaagcattggcaaaattgaattagacgctgaacttgccctcggcgaatggcgctatctgacgagcgaagaaatcgcctcgatttaac

SEQ ID NO: 202069 - DNA, 3421 bp, Unknown
  Bacterial polypeptide expressing nucleotide sequence isolated from the Sargasso Sea
atgcgaattgccaggtggcttgcgagctacgatcggaaccgggacatccatagcggaacggggcaaacctccaccgccgctgcacgaggatcggggtcattcgttggactgtgcgacgcgcttcgagaacgtcatggatggcgctggcggtatagagatcgatgggtactggttgcgggggacgaaccgatcgtcaggcgcgtcgcccccgatctcgtgcagaacggttacaggatctccggcaacactctgctgctctacgcaaggcagactggtgagcagatggatgccacctggctggatcagatccggcccttgcgccggaggcgaccggtcgacgccattgtggcggtctttcgggcgcatacctccggcagccagccgttcgatgcggagcgcaccgcccaacggctcatccgccatgcgcgcgcgctgcgctgggcggctccggcgtacctgctgaatgtgaccgacgctggcgacgagacgtccggcccgcacgaagcgatcggttgcacatggtcgaatgccagcgtacgtcgggaagcaatcgatgcctcgctgcgcgagctgtccggcgagttggctgacgccggcgtcatgcgtcttgcgaagcacccttcagaccgatatgcagccgagctgtcgcagcatattgcccgttatggcaatcttctatcggacctggtcgtgcggattggccaattccgcatctggcgcagtgcgattcacggcgtgcttttcgcaccgatcttcacggaacgcgtaagtgaagcgtcggacgttccgacggaggatgctgaaagcgatcccatccggcaacagctcgtctggcagaccgttgccgaccatagccgccgcatccacggccgccgcgttggtttctctctcccgacgaccgccgcgtggattgcgaccacactgatcggactctggatcgcgggcgccatgctgtcgggcttcatgaaccggtcggcaatccagatggcgaccagcacggcgacaaggctcgcgactacagtggaccccacggaagccgccctgaccctcgacagtctgcaaaagcagctcgacaccctcgaaatccgccagcacgacggcgcgccgtggcatacccgcttcggcctgaaccgcgacgcggcactctttaccaccctgtggcccgtctacgaaggcggagccgcccgcctggtagtcgcgcctatccgcgccaggttggaggaacggctacaacaactggcctcgctctcagacgcggacattgcaagcggcggggacgcacagatcaagtccgcatacgacacactgaagacgtacctgatgctcgcgaaacccgagcgcgctgacccgaaattcctcacgcagcaattgttcgcaaccggagcgcccgctcttcccgtcaactcgtctttgagcgagggtgcatggcaggatctgcgtgagcatctggccactttctacgcaagtcacctcatacgagacccggcggccagcggcacgtcgctcgcgatcgttcccgacgcattgctagtcggtgcggcacgccagacggtgatcggcgtgagaggcatccagaactcgaccgacaccgtctaccagcagatcctggatgacgcaaaacccaagtatccgccggtgtgcttgtcgaccctgctgggcgacaccagcagccgcggactgttcagcacgacggcgaccgtgccaggggttttcacacgggccgcgtgggacgaacggatttcgaagtcgattgatgacgcaagcgaacagggcagcgttgcgggagactgggtattgtccgacagccggacccgtgccgcgccgacggcatcgctcaaggccgagttacggcaacgctatttcgacgactacgctcgcgcgtggcaggcatttctgaacggcatccgctggcagccgacggcaacgctctcgggcacagtcgaccagctgaccctgctcggtgatccgcaacgctcgccgctcgtcgcattgatgaatgtcgtcgtgtaccaggctgaaaccggcgcaacggcgcaatcgctttcggacacgctgctcaacaaggcgcagcaactggtcggtgccgatgagaaggacccctcgaagattgcccggccgcaacacgctgccccgctggctgccgcattcggtcccttggtgcggctgacgggcaacgatctggccgcgggaggcgccggtagcagcaaggcgtccatgcagatggccgcagccggcgatctgagtctggcgcgcttcctggaacgcgtcaccgcgatgcggctgaagctccagcagatcatgatgagcactgatccggacgcgatgtcccgctcggcagcccaggccgtgctgcaaggcaagacttcggacattgccgacagtcgcgactacgcgagccgcgtggccgcaagcctcgggcagcagtgggcgggcttcggcgagctgttccagcagccgctcgagcagacgtggcaggtcgtcctgcagcctgcggcatcgagcctgaacgacacctggcgcagcgggattctcgccgactggaaccggaacttcggtggtcgctatccgttcgccgactccgacaacgacgcgtcgctgccggaaatggcccgcttcatgcgaccggacagtggtgtgattacccagtttgtcagcacgcagttggccggcgttgtcgagcggcagggtgatcgctgggttagcgcacacggatcgggttataactttctgacggtcgacccggcctttctcgccgcgttgaacacgctgatgcgtgtgtcgacctcgttctttccatcgggcgatgcgcgcgtgcgtttcgagctgcgtgcagtgtccacgccaggcatcaccgacatgaaggtcgtgctctcaggccgcgagctgcactacttcaatcagaaggaagagtggacgccgttcatctggccgggcgatgcgctggagaacatctcgcgcatcgaatggcagacgcaggaaggcggcctgcgctcggcgctcgatgcgccgggccgcttcggactgattcgcctccttgaacgcgcgagggtcacgccgcaggacaacgcacgctatctgcttgcgtggatgccggatccgactcaggacatcccgctaaaagtgcagctacgtagcgaagtcggggcgggaccgctcgacatgctcgcgctccggcatttctcgctgccgcagcgcatttttttgacggggtcgtcgcgtggtacccaggagagggctctcggcgaacttcctccactgccggcatcgatgacggcggcagcgcctacttctacggccacgtcgatgaaatccagcgacgagggcaaaccatcgtccgattcgaatccacccgtggcaggccgcgtgaaagcgggagtaacccgcgcgaatcgcctgctagccgatgcatttgtctattgag

SEQ ID NO: 202070 - DNA, 793 bp, Unknown
  Bacterial polypeptide expressing nucleotide sequence isolated from the Sargasso Sea
catgaaaattcgcacacatgacatggcaactttaggattgtgggggcctaaggcgaaagatgcattgggtcattttatagatccaaatgaaatcagtattgagaattttccttttgttgcagcaaaacatctcactctcaatctaactggcgagaagtcgattgatgtttgggccgcacgaatttcttatgttggagagagtggctgggagatttacctagacaatgatagtgaggatggtcttgctctatatgattcattacttgaggttggagttgttccggtaggtattgaaacttatgccaatagccgaagacttgagaagagctttaggcttcaaggagcagacttattgactgaatacaatgcttgtgaatcagctgttcatagaccaaaagttaaagaagcaaactttcatggaaaagaagcacacctgatacatagagaagaagagccttctgcaattttatgtaccatgacattggacaatctcgatgtctcaggcaacggcactcgatatccagttggtatctcaccaatcattgatccagatacaggtgaagtgcccatagatagcaaaggcagaagatcatacactacaagcatgtcttactgcccatcaataaagaaacatgttgtcatggggtacctgcctataaatattgccattgcaggtaaaaagctttcaatggaatatttcaatgaagacggtgatggaatctatcccatgaccgttgagattgttggcaagggctgtctctatgacccaaaaaatgaaaaggttcgctcataa

SEQ ID NO: 202071 - DNA, 859 bp, Unknown
  Bacterial polypeptide expressing nucleotide sequence isolated from the Sargasso Sea
atgccttcctatgccttccgcctgctgaacgtattcgccgaatcgactttcggcggcaacccgctttgcgtattcgaagatgcgcgcggcatggacgacgcgaccatgcgggcactcgcggtgcagttcaacctgtccgaaacgaccttcgtgctgccgtcggagcgcgcgcatgcgcgggtgcgcatcttcacgccgggccatgagatggcctttgccggccatccgacgctcggcaccgcgcatgtcgtgcgcgacctgcagcgtgcgggcaacgcgctcgcgctcgagttcaaggctggggtggtcgacgtgagcgcgcacgacgacgtgtggacgttcaccgcgccgcacgcaggcatgccgaagacggcgccgtgcgaattgtccgacgcccggacggcgaccttgctcgggctgacggaagacgatctgctcgccccgccgatctggatcgacaccggcgccgaccagttgctggtcgcgctcaaggaccccgccgccgtgcgccgcgcgcagccggacagcgcatgcctcgatatctggccgaccagcagcctcggccgcaagaccgcctacgtcttcgcgttcgatgccgagcgcccggggacggtggtgtcgcgttactttttcgtgaagcaaggcagcgtctcggaagatccgggcacggggtcggcctgcgcgaacctcggcggttggctgcttgcgatgaagcgcgacctgccggccgcgtttcaggtcgaacagggcgacgcgatcggccgaccctgccggctgcggttgtcggtcaatgcgagcggtgaaatcggcgtcggcggccgcgtgatcgaactcgggcgcggcgtggtcaacgtgtaac

SEQ ID NO: 202072 - DNA, 925 bp, Unknown
  Bacterial polypeptide expressing nucleotide sequence isolated from the Sargasso Sea
atgtcaacagctgatagagatggatttatatggtttgatggtaaattagttccatggagggacgctactgttcatgtattaacccacacattgcattatggaatgggtgtttttgagggagtgagagcttacgatactaaaaatgggacttgtatttttagaatcgaagaacatacccaaagattaataaattctgccaaaatccttggaatgaaaattccttattctttcgatgaaattgtagatgcacaaattgaagttgtaagagaaaataaacttacctctggatatataaggccaatgtgcttctatggcgctgaggggatgggtttaagggctgatggtttaaaagagcaccttatagtagccgcttgggaatggggctcatatttctcaaaagagaatttacagaaaggtattagggtgaaaacttcctcatacaataaacactttgtaaattcttcaatgtgtaaggcaaaagcaaatggaaactatataaattcaatgttagctttacaagaagctttaaatggaggctatgatgaagcactgctcttagatacaaatggttttgttgctgaaggcagtggtgaaaatatatttatagttactgaagggaaaattgttacacctgagcttacgtctgctcttgatggtattacaagaagaagtgttattgaatttgcacatgatcttggcattgaaattataactaagccaattacaaaagatgaaatttatattgccgaagaggcattctttactggcactgcagctgaggtaactccgattagagagcttgacgataaaacaattggaaatggagaaatgggaaatatcacaaaggagcttcaaaagctttactttaaagtagtaaatggtgaagaaaaaaagtataacaagtggttaaagcccataaaataaa

SEQ ID NO: 202073 - DNA, 913 bp, Unknown
  Bacterial polypeptide expressing nucleotide sequence isolated from the Sargasso Sea
atgaacctctatagggatctctccaagaaaatcagagtctgggactcctcggtgggacaatttgaaaagcttgcaacgaaacagcttcatgatgttgcttcacttcctgtcgtggaaggtgtccgtgcgatgccggattcccattgggggcttggagcctgcgtcgggtccgtgatcgctctcaaaaaggcggttattcctgcagcggtcggagtcgatatcgggtgtggaatgctggcctgtaagaccagcctcaattcccaccatcttcctgaaaatctcaaggccttgcgcgcaaaaatcgaaacccatattccccatggaaagacactggcaaagaacaaaagcagggatcacggtgcctgggattctcagaaaattcctgcccatgtgaaaaaacagaaaaagaaaattgaaggatggtttgaccgttaccgcctcgactgtggtggaatttcaaagtggctcaatcgccgacatccgatcacccacctcggtactctcgggaccgggaaccatttcattgaactctgtctggatgaaaaggaccatgtttggataatgcttcattcgagatctagaggaatcggaaactcggtgggaacccatttcatcaacaaggccaaggaagaaatgggggaccggttgggggctctgcctaacaaagattgtgcatacctaaccaacaatcagaaaactttcaaggattactgcagggcggtttccatctgtcagcaatacgcacaattgaatcgggagatgatgctgacctcagtggtggagcagatgggcagagccttcaagaacttctgcctgacggaatccgtcattgactgtcatcacaattacatcgattttcattatgctaaggacctcatcattaccagaaaaggtgcggtctcggcaaaaaaag

SEQ ID NO: 202074 - DNA, 925 bp, Unknown
  Bacterial polypeptide expressing nucleotide sequence isolated from the Sargasso Sea
atgaaaagcaaaaaaattattataggatcaagaggaagcaaattagcacttatttatgcagaaaaagctcgacaggaaattttaaaatttgcatcagaattcaatataaatgaagttgaaataaaaaaaataactactgctggtgataaaaatcaaaaagtaagattgtctgaaataggtggcaaaggacttttttctaaacggatcgaagatgaattgcttgatgataaaataagtattgcaattcacgcactaaaagacatgccctcacaagaaacgaatggtcttattacaaattcttttttaaaaagaaacgatgctcgcgaagtattaatttcaaaagataaaattcgattcaaagaattaaaacctaattcaatcattggtacctcttcatatagacgagaattccaattaaaacaattaagaaaagatttaaatttcaaattaataagaggaaatgtagatactaggattaataaagtcacggaaaatttatatgatgctacagtcttagcaagtgcgggaattttttctctcgatttagatagtcatatttcgcatatattttctatagatgaaatgttaccaagtgccggacaaggtgtaattgctcttcaatctaaagtggatgataattttataaaaaatttattaaataaaataaatcataagcaaacatattttagtgttcaatctgaaagaagtgttttaaaggttttagatggagattgtgaaacagcaattggagtatattccagtataaaaaatgatattatagaattaaaagctgaacttttttctatagatggaaatgaaagatattacgtggaatcttcaaaaaatattagtcaagcaaatgaattaggtttagaagtaggtgagaatttaaagagacaatcaaaaggtaattataaaaaataaa

SEQ ID NO: 202075 - DNA, 1042 bp, Unknown
  Bacterial polypeptide expressing nucleotide sequence isolated from the Sargasso Sea
caaatcaaaattttattctcttaataagaatggtagtgaatataaaattggaattattgacctgccctctttttatttagattttggagcttggcaagctagggatccaaattataaaagtagcagcaaggatgttaaaaatattttggatgaatttaaaaaacaatcagttgatgcagttttggttgatcttagaaataattctggaggagctcttacggaagcaaataaacttacagggttgttcacatcagctggggctacgcttcaaatcaaagaatctaatggcaatattatcccctggggtgatgcaagagtgaggcaagcttggtcaaaacctatggcggtattagttaataggtattctgcatcagcttctgaaatatttgcaggtgcaattcaagattatcaaagagggctagtaattggacagagaacatttggaaaaggaacagtccaaagattagataatttgtctgaggggcagttaaaaattactgagtcaaagttttatagagtcagtggagatagtactcaaagtagaggtatagatcctgatattgttcttccttcaacctgggatatagaaacagttggtgaaagttctcttcccactcatttgccatgggataaaataaaaccaacaagatatagaacctttaccgaggactcaattgcaattgaaaaaactattgttgcttttgaagaacgtttatctactgatccaaatctaatttatttaaaagatgttaggtcacgctatgatcaaaataaaaataaaatggagctatctcttaatatagacgaaagaaggtctgagcaagaagagagaaagcaatggcttcttgaggtagaaaataaaagaaggtcatctctcggcatggaaatttttaaagattacgaaagcatggatgagtttaatgataattttgatgctgaggatattgatacaattagagactattctttacttcaaggtattgaaattattggtgactatattgattcagaatctaattttctaagctggagaaacacataa

SEQ ID NO: 202076 - DNA, 1350 bp, Unknown
  Bacterial polypeptide expressing nucleotide sequence isolated from the Sargasso Sea
cttgaccggtggtcaagcggcagtgaaatccttaaaaaaggaaaaagttaaacacgtatttggtctaattggttcagctacaatggagatgtttgatgcgttatatcatgaaaaaaaaatcaaatttataggtgtaagagacgaaagaactggaacgcatatggcagatggatatgcaagagcctctaatcaaccaggtgtaataattgctggtcaaaacggtccaggagcaactaatctcgttacaggcatagcacaagcaaaagcagcattttctcctgtagtatctattgcaggtttatattctactaaagataagatggaggatgcctttcaaggacttgatcaacaatcactttttgatcctataacaaaaaaaacatggacagtaaaaaaggcaagtcatataccaacggcctttagagatgcttttaaccttgcaatgtcaccacgcagaggaccagtttgtataaaccttccaagaaatgttctttctgatacttcaaagtttaagattaatgaaaataaaaaatcttataaagctgaaagtgacttaaaaagtaaaaagaatttaattgatagaactataaaacttattctcaactcaaaaaaaacagtaattgttgctggaggaggaataaaatataattcgaaatttaaatctgtgacaaagcttgctgaatatttaaatattccaattgtaactgcagcgggacatggagatgcaattccctttagtcataagttaaatgccggacaaatgggacctagaggaaatattgttgcatcaagattagtcaaagaggcagagctaattattgcaattggtacaagacttggtttcaattccactttctattcgtatgacaatataaataaaaacgcaaaaattgtacaaattgagttagaaaaaacaatgataggaagatactttccaattaatgtaggtattcatggcgatgctgcacttgtgacagatcaaattttagctgaattaataaaacaaaagaaaattttcaattacaaagaatggacaaatagctttttattagagagatcaaaatttcttaatgatagagataatataaagtcaaaaaattttccaatccaaccgaacggtctattcagagaattaagaaaagtactaccaaaaaatactgcaataacacttgatgctggaacactttgccttcaagcaacagatgctttagaatattacaatcctccttcccttttcacaccccttgattttggtttagtaggcttctcatttgcatgtggtttgggaataaaggttgcaaaacctaataaaacagttgttagtttaatgggtgatggtggatttggaat

SEQ ID NO: 202077 - DNA, 173 bp, Unknown
  Bacterial polypeptide expressing nucleotide sequence isolated from the Sargasso Sea
aatgaccgcaattattcttgccgcaggaaagggagagagattaaaaccattgactgcattgactccaaagcctttgatagcagtttccggacaaactctacttgagagaaacatcaattgcctcgcagaatctggagtcaaaaagattatttgtcatggatctaggatgggaa

SEQ ID NO: 202078 - DNA, 963 bp, Unknown
  Bacterial polypeptide expressing nucleotide sequence isolated from the Sargasso Sea
aaaaattttcttttgtaggaaaattatcatcgacgcttcgatatggtgaaaatccccatcagtctgcaattctttataagtcatcaatgcaaaattcgggcattcctcaagcaacattacttcaaggaaaagaattaagttataacaatattaatgatgctgatgctgctttacaattaattaaagaatttgaagaagcaactcctactgtcgctattatcaaacatgcaaatccatgtggtgttgctagtggatcaactttgcatgaagcgtacacaaaagcattttcatgtgatacgacgagcgcatttggtggtatcattgcactcaatcaaacaattgataaagattccgccgaacaaattgtaaaaatatttactgaagttattatagcaccgggcattacagatgaagctaaagcaatattcaaaacaaaaaataatttacgtgttttaattttaacttcattacacgaaaaaaataactcacaaaattttaaaagtattgaaggtggaattttagtccaatcaaacgatgatgagagtacagacaaatctgacttaaaagttgttacagaaaaaaaaccaagtgatagtgaaattgaagatatgttatttgcgtttaaagtttgcaaacatgtaaagtcaaatgcgattatttatgtcaaaaataaaaaaacaattggtatcggtgctggacaaatgagcagagttgatagtgctaagattgcctcacaaaaaaatagtgaaatggaaaagtctgaagaaaactcgcttgaaaattcagtggttgcatcagatgcattttttccatttgctgatggaatgcttgttacaatttcatctggagcaaaagcagttattcaacctggtggctctgttaaggatgatgaggtaattgaagctgcaaataaagcaggtatttcaatggtatttactggtgtaagacacttcagacactaaa

SEQ ID NO: 202079 - DNA, 1561 bp, Unknown
  Bacterial polypeptide expressing nucleotide sequence isolated from the Sargasso Sea
ctgaaacaagaggttggccctctcataataggtgaaagactaaacacacagggttccaaaaaagcaaaagaattggtcatgaatgatgattttgatggactagttgatcttgcaagaacccaagtagaagatggtgctcattgtattgatgtttgtgttgcaacaacagagcgctcagatgaaaaagagtttctcttaaaacttgtaaaaaacctaagtcttgaaattgatgccccacttgtaattgactctacggatccacatgttattgaaacagcgattgaacaaatccctggaaaaccaatcattaattctataaatctcgaaggtgatggtagtagatacaaagcattggctccgttaatggccaaatatggaattcctgcaattgcattatgcattggccctgatggaatggcgaaaactcctgaacaaaaagttgcaactgccgaattattatacaaatctggaaaaaaatatggtttacgtcctgaacaattcatctttgatgtactaacatttacacttgctactggagaagaggaattccgtgatgcaggaaaacacactttggaaggaatcaaattagtaaaagaaaggtttcctacatcatttaccactctaggtttaagtaacatcagctttggtcttgtacctcaagctagacgtatactaaactctgtatttctatatcatgctgtacaaaacggtcttgacagtgctattgtaaatgcacgtgaaattacgccttacactgaaattgatgaaaaagaaaaaaaacttgttgaagacctaattttcaataatcatccaaatgctttatctgaattaattactcactttgaaaatacaacgcaggattcttctgtaaaaacgaaaaaggttgatgttgatccttcttgggctgcaggtaaacgtgcaaatttccgaattatcaataggctcaaagatggaatagaaaatgatgtagtatctgcaattgctgaaaaattagaacaggaaaacctcgtacaagacaatggtggtattttatcaattaatgcagaaaaagaggtcacgcatcaaggtgcaattcaaacattaaatgatgacttactaccagccatgaaaattgttggtgacaaatttggtgcaggagaactaatccttccatttgtcttaaaatctgctgaatgtatgaaggctgcagttaaagaactggaaaaatatctactcaaagaagagggtacgagtaagggaactttagttctgggtactgtttatggtgatgttcacgatattggaaaaaatcttgtaaaaacaatctttgaaaataatggttacactgtacatgatttaggtaaacaagtgcctttacaaaaatttgtagaaaaaattaacgaagtaaaacctgatgctgtaggcctttctgctctactagtatcaacttcaaaacagatgcaattctttgttgaacatgcaagaaaaacagatgttaatgttccaatattgtgtggtggtgctgcaatcaacaccaattacatcaatcgaattgcaaaaacagatggaatctatgaacctg

SEQ ID NO: 202080 - DNA, 637 bp, Unknown
  Bacterial polypeptide expressing nucleotide sequence isolated from the Sargasso Sea
attgggaccaaataaagactctactaatagaatcgatgattatttaatttgttttcgtaaattttataatttagctgattatataactataaatatttcctcaccaaatacagaaaatttaagagactttcataatcaggatgaattaaattcattgattgacaaactaaaaaatgaaaaaaataaattgaattcaaacattccattagcaataaaagtttcacctgatcttaatgacgatcaaattaatgaagtatccaagatcattatggaacaagaaatagaaattattattgtttctaataccacagataagaacagagaaaatttaaaaaatataaataaattagaaaagggtggactgtcaggcaaaccaattaaaaagatttcaaacgaggcaatttctaaattttataaaattctaaaagataaaacaaaaataataggagtgggaggtgttagtaatggacaagatgcttttgaaaaaattatttctggcgcaacactcgttcaattatatactggaatggtttatagaggtcctcgtatagcttcaaaaataagtaaagaattaattgatttattaaaaaataagggttttaaaaatgtttcagaggccattggaactaaaaattaa

SEQ ID NO: 202081 - DNA, 937 bp, Unknown
  Bacterial polypeptide expressing nucleotide sequence isolated from the Sargasso Sea
aatgggtttttccgttagtggtgcccagcagaggactggtggtggaggttctctagtatcgagttcagaggatgaactggggagagtttacgacggtcaagttgttatcaggttattcagttatgtgggactgtaccgtggatgggccttatttagtcttgcagcagttttagtatataccgctgcgactgtatgcattcccgtgatagttaaatgggggatagactctaatattcagccatttattggtacaggaaaaaccagtaatctaggattggttatagtagtttttgcgataactagcgttgtccattacgtatccaactacttacagtttgttggaatctctaaagtaggccaaggtattttatattctatgagaacacaactgtttaatcatttgcagtcgttatctccttcattttttgctagaaccgaagtcgggcgaataatgtctagagttcaaaatgatattttacagttacaagagacattttctttgttagttcttaccctagctgatgttttaagtctggtcggaattatttcgatgatgatgataatgtcgtggaagttatcattgttgacttttgcagtactaccaattttggttttattgatggctttttggcagaaatttgcaaaaagatcatttgtaagaattagaacggctatagctatggtcaatggagcgttgcaagaaaatctcgctggagtaagggtggtccaaagttttaatagacaatctcttaatttaaatagatttgatggacttaacagagagcatcttaacgccaatatacaagcttctatgtactctggtggtgttcaaccattagtagaaggtctaactggtatatcgatgggctttgtaattttggttggtggttggtgggtatataacggtacactggaagtgggcgtgttggtggctttt

SEQ ID NO: 202082 - DNA, 561 bp, Unknown
  Bacterial polypeptide expressing nucleotide sequence isolated from the Sargasso Sea
tgccttcctgctccatcctgcttctggcgggtggccgtgggcaacgcatgggaggacaggacaaaggactggtcgaatggcagggacgcccattgattgcatggttgcatgagaccgttcgtaagcgtctggccaacacacctccccggttcttccagctagcggcatggtgtccacctgtttttggtggacaccatttcaagcccccctgcagaggatctcccgtgccaggccaacgccgctcctatcccaaatctttcaaggcccaggtcgtcgatgagtgcacccagcccggcgcctcggttgccggcgtggccttgagccacggcctcaacgccaatctcgtgcataagtggattcgccgccagcaggcacagctgcccgctgtgccttcaggttttattccgattcctcccgtcccgagcctgccggctaccccgagtgcggccgacatggccatccagatcgccattccccatcgggccggcaagctgtcggtgcagtggccgggcaacgaccctgaaggctgcgcccgcttcctgcgcgagctgctgaagtgat

SEQ ID NO: 202083 - DNA, 1240 bp, Unknown
  Bacterial polypeptide expressing nucleotide sequence isolated from the Sargasso Sea
atgagacgacttgctattccattgcagggcgcacaaatgttgtttgtcgcatttggcgccctggtactgatgccactgttaaccgggctcgacaccagtgttgcactctttaccgcaggtattggtaccctactatttcaattaatcactaaacgccaagtgcctatttttctggcttcctccttcgcttttatcgccccgattctttacggggtacaaacttgggggatcccatcaaccatgggcggtatcatggccgcaggcgcggtctatgtatgcctaggcgccttagttaaagtacgcggcactgactttattcatcggctgttaccacctgtagttgtaggacccgtcatcattatcattggcctaggcttagcgcctgttgccgtgaatatggcgctgggcaaaagtggcgacggcagtctaaccttagtcgcaaccaatacggcattaatcatttcgcttgtatccctttgtaccaccattgccgtagcgatttttgctaaagggttactcaaggtgatgcccattcttgctggcattatcgttggctacagcctgagtctagcatttggtatcgtcgattttgcggtagtcactgcagcaagttggatcgccattccaaaatttgtagcccccgaatttaactggcatgcgattgcgtttatgatccctgttgccattgctcctgcggttgaacatatcggtgacatcttggctatttccaatgtcactggtaaggattttatgaaaaaacctggcctgcaccgcaccttaactggtgacggcgtagcaacaatcgccgcagcagccttcggtggtccaccaaacaccacctattcagaagtcacaggtgcagtcaccttaacccgtaacttcgacccaaggatcatgacatggacagccatcactgccattaccttggcgtttgtaggtaaattaggggcactgatgcaaactatccccgttccagttatgggcggcattatgtgtttgttatttggttcaattgccgctgtaggattaaataccttaatccgtaatcacgtggacttatccgagccgcgtaacttaagcattgtcggtgtcaccttagtcttcggtattggcggtatggcctttggtattggttcctttagccttacaggcattagtctttgcgggattgtcgccattaccatgaatctgctattacctgcgagcaaacaccacgatcgagatgcggcatcacactaag

SEQ ID NO: 202084 - DNA, 904 bp, Unknown
  Bacterial polypeptide expressing nucleotide sequence isolated from the Sargasso Sea
tatggcttttttttcaatacaagactctttaattaaatttatttttgaagatattgctttattcgagctttattttggaagaacccttatacaatcagtatttttgctatcatttgttttaatcactaaaaaaacaatatctttaaaaacccattacccactattaacattaataagagttgtatgttttttctttggttttagttttttttatatttcactgacttttatgacgcttgcgatgacaagtgcactatttttctcctgcccgttctttatgtctatgtttgctaaatttttcttaaaagaaaaaattggaattagaagatggagtgcaattgtagttggatttattggagtattaattgttttaaatccatctttagataattttaatttctttaaattagcacctgtagcatgtgcgctttgctattcaatctcgatgacaataacaaaatatacatccgataaagatagtatttatactcaaatgacttggctttatgtttttgcattatttgcaagtttggtaatattttttgttagcggagatggaaaatttaacacttttacagatccaactttacaatttattgttagagaatggtttactaacccaggagaggcatggccctatgttttaattatgggaatagttgcttcgatttcgtttttttgtgtatttactgcttatagtattgcctcaccatcggttgtttcattatttgagtattcatacatagtgtttgcaatggtagctggttatatattatttgaaacaataccagtgccaagaacttttctaggtgcatcaataattattggtgctggcgtatatatttattttagagaaaaagtccgaggacaaatgattgctacagatacaccagcgaatagatga

SEQ ID NO: 202085 - DNA, 585 bp, Unknown
  Bacterial polypeptide expressing nucleotide sequence isolated from the Sargasso Sea
aatgaatttagagaaaattatacctaaagatggtccatccatcgaagaggttgaaaaatacgttaaaaaatattccaatgaattaattgtaattaagtgtggtggttcggtattgcttgatgaaaacttatttaatcaacttatagaaaacatagcagtaattaacaaattaggtttatcggcaatcgtagttcatggtggtggtaaaaatattaaaaaaaaacttgatcaaaataatatagagtcaaagtttatagacggtttaagagttactgatgaaaaaacaattaaaattgttgaagaagctttattagagttaaatactgaaattttaaatagcataaatgacaaaaaagcaaatgcacaatcagtaactcccaaaaacggaaatattattaaaattattcccgaaaaaaaagaacttggatttgttggtactcctaaagaagttaataaagaagtgcttttaagtatagttagaaaaaaaaaagttccaattatagttccactaggaattggagatgatggaaagatttataatgttaatgcagatgcggtagcttcagcgattgcaaaagaaataaa

SEQ ID NO: 202086 - DNA, 899 bp, Unknown
  Bacterial polypeptide expressing nucleotide sequence isolated from the Sargasso Sea
gcaagtctttataaatcatctatgcaacaatgcggggatacctcatgcaaaattacttcaagggaaagagttgagttataataatattaatgatgctgacgcagcgttgcagttaattaaagaatttgacgaagacactcctagtgttgcaattatcaaacatgcgaacccttgtggtgttgctagcggggagtcactttgtgaagcttatatgaaagcactatcctgtgatacaactagcgcatttggaggtatcattgcacttaaccaaataatcgataaagaaacagcctctgaaattataaaaatatttactgaagttattatagcacccaatgttagtgatgaagctaaagaagtttttgaatcgaaaaataatttacgagttttaactttatcgtcaacgcacaaaaataataattctcgaaactataaaagtattgagggaggaattctagtccaatcaaatgatgatgcaaatacgattaaatctgatctaaaagtagttacagaaaaaaaaccaagtgatgatgaaattgatgatatgttgtttgcgtttaaagtttgcaaacatgtaaaatctaatgcaatcatttatgtcaaaaataaaaaaacaattggtattggcgcaggacaaatgagtagagtagatagcgctaaaattgcctcacaaaaaaatagtgaaatggaaaaatctgatgaaaattctctcgaaaattcagtggtcgcatcagatgcattctttccctttgctgatggcttgctggttacaatttcttatggggctaaagcggtaattcaaccaggcggatcagttaaagatgacgaggtaatcagtgctgcaaatgaagccggtatatcgatggttttcactggcaaaagacattttagacactgaa

SEQ ID NO: 202087 - DNA, 1336 bp, Unknown
  Bacterial polypeptide expressing nucleotide sequence isolated from the Sargasso Sea
actggatgaccaagttcctacgttattacttaacggtggtgattcattacaggaagttgctattggccacctatgtgatgctttgcaaaaaagcgacttagtatattgtgatacggatgaacttgatattaatggggctaaatcatcaccaagattcttacccgattggaaccctgagcttcaattctctaccgcttatatcaatactggggtaatgattaaagcagcgctgctcaagtcgctacacattactaaccaaacaacaattgcagaaatagttacagagctttccctcactacccaaagtttggctattgatcatttgccgctgcccttggtgcgccaatcaccagttaaaaaaggtgagtcaaacacgctagagcgcgttaaaacagtgatagaaaaacatacaaacgcgaaagtcgaactagacgagcaatttagcgtaaaccgggtatgctggcctaatagtgatcccttggtaagcttgatcattcctacaaaaaatgggaaagccttggtgaaagcatgtattgagtcaatcctagagaaaaccatctaccataattacgaaatattgctgattgataacggctctgatgaacaggaaagtattgagtattttagctatttaaacacattggaaaaagtaaaggttattcgttatccagcgccatttaattactctgcaattaataacttcggtgtagaacatgcaaaaggttccattcttggtttagtaaataatgatattgaggttatatcgcctgattggctaacatatatggttggtcacgttgagcgggaaagcgttggctgtgttggtgcaaagttgctttattccgatacgcgtatccagcacgctggtgttgttttaggatacggcggtggtgctgggcatgctcacaaaaactttccgcgctttcatactggttacttaaaaagaatcgtcgctacaaacaactatagtgcggtaaccgcagcgtgcttattagttaaacgcacggattttgatgccgtaaacggtttgaatgaaaaagacctttctgttgcctttaacgatgtggatttttgtttaaaggttaagggcttaggcgttaataatgtttactgtgcagaagcagagcttttccatcatgaatcggttagtcgaggcttagatatttcacctgaaaaagcggctcgttttaatcgcgaattagcttaccttcaaacaacgtggagcgacttcatagcaaatgatccagcttacaatccgaatctaacgctaaagcgtgagaacttttcgataagaagcgcagtagaattgaaagagtgtcacataaggcataattga

SEQ ID NO: 202088 - DNA, 2116 bp, Unknown
  Bacterial polypeptide expressing nucleotide sequence isolated from the Sargasso Sea
catgtttaccccgacccgtattgccgtcgcgctgtccggcgcgttctccgtgctcttcacgtcggccgcgtgcgcacaggccatcgccgcgccgaccgactcgccgaccgcgtcgacactgcccgcgatccacgtcaacgcaacccgcgagacggactcgctgacatcgaaatcgaccgacagcctgaagcgcacgctcgagcagacggtcggctcggtgggcttcgtcgatgccgacagctaccggaatacctatgcgttcacgctgcgcgacgtgctgaaggatgtgcccggcgtgttcgtcgagaaccgctacggccaggagctgcggctgtcgattcgcggctcggggatcgcccgctcgtaccacacgcgcggcctcgaaatcctgcaggacggcatcccgaccaacctcgcggacggcagcggcgactactaccagatcgatccgctcgcgctgcaggcggtgcaggtctacaagggcggcaacggcctcgcgtacggcgcgtcgacactcggcggcgcgatcgacttcatcacgccgaccgcccataccgccgatgcgccgaacatcctgcgcgtggaaggcggcagctacggcacggtgcgcgccagcgcgcagatctcgcgcgtgctcggcccgctcgacttcctcgcgaacttcagcgtcaatcacgcggacggctatcgcgatcattcgaaggggcaatacgagcagttcaacgcgaacgtcggctaccggttcagcccgacggtcgagacgcgcttctacgtcggcgtgtacgtcatcgaccagttgctgcccggcacgctgtcgctgtccgacgcgctgaacaatccgaccaaggccgcgccgaacgcgatatcgggcgaccaggcgcgcaacacgcgcaccgagcggatcgcgaaccgcacgacggtgaaactcgattcgggcgaactgcagttcgacacgtgggcgatccacaagagcctctatcacccgatcttccaggcgctcgaccaggacggctggacctacggcttcgcaccgcgctacacgggccacctgacgctcggcggaatgcgcaacgacctgatcgtcggcgcgcgcttcttcggcggccgcacgcaggcgaaccagtacgtgaacgtcaacggcaacaagggcgcacagacgctcgactcgacgcagacggcgttcaactacgaggcgtacgtcgagaaccggctgttcttcgtgccgaccgtcgcgctgatgacgggcgtgaaggtgctgcactcggtgcgcgagtacatcgacaacggcgggctgccgcgcaacccgaactacaagtcgacgaacgcgagctacagcggcgtcaatccgaagctcgggctgatgtggcagccggatgcgcacacccaggcctacgtcgacatcacgcgcagccaggacgtgcccgacttctccgacctcacgcagaccttctcgaacacgacgcgcttcacgccgctcgcggcgcagcacgcgtggacgatcgagttcggcacgcgcggctcgcgcgagcgcgtgagctgggacgtgaccgcctatcgctcgctcgtgcgcgaccagctgctgcagtacacgacgaacccggatgtcccggcatcgacgttcaatgcgaacaagacggtgctgcaagggatcgaggccggcgcgtcggtcgagttgctgcgcaacgtcaccgggcgcggcgcgggcgacaaggtcacgctgtcgggcatctggaacctgaacgacttccgcttcaagaacgacccgcagtacggcaacaaccggatcgccggcgtgccgctcaacgtgctgcgcgcgacgctgggttacgcgcggccgagcggcttccacatcgcggcgacgctcgactgggtgccgtcgggcgcgtgggccgacgatgcgaacacgttgcgcgtgccgagctacacgctgctcgggctgcaggccggctacgacttccgcaatggcctctcgctgttcgtcgatgcgcgcaacctgaccaacaagcgctatgtgagcgacatcagcacggtcgcgaatgcgcgcaccgcgaacaccgcgatcttctatccgggcgaagggcgcagcgtgttcgccggcatgcggtacgcgttctga

SEQ ID NO: 202089 - DNA, 491 bp, Unknown
  Bacterial polypeptide expressing nucleotide sequence isolated from the Sargasso Sea
aatggaaatagataaaattttacccaaaaatggtccatctattcaagaagtaaaaaaatatattgataagtacttaaatgaaataattgtaattaaatgtggcggttcagtactgcttgatgaaaacttattcaatcaatttatagaagatatatcagtaattaataaattaggattgtcagcgatagttgtgcatggtggaggtaaaaatattaaaaaaaaacttgataaacaaaatattgagtcaaagtttataaatggtctaagagtgactgatgaaaaaataattaaaattgttgaagaggccttattagagttaaatactgaaattttaaacagtataagtgaaaaaaaagcatatgcaaaatcagtaactcctaaaagtggaaatataattaaaattgttcctgaaaaaaaagaacttggatttgttggtaaaccaaaagaaattaataaagaaataattttaaatatagttaaggaaaaaaaag

SEQ ID NO: 202090 - DNA, 436 bp, Unknown
  Bacterial polypeptide expressing nucleotide sequence isolated from the Sargasso Sea
aaagtaaaattaaaattttttggacatactgaagactttggtgaaaaggttattaaaaaaattaaatatgctgaatctgagacattttgtgaagattacaaattaaatctaaatgttgctcttagttatggcggaaaacaagatatattggacttggtaaagaaaattagtaaagaggttttcgataaaaaattgaacatagatgatattgatgaaagcaaaattcatgagagttcatgtgcgcctgttaatgaaatagatcttctcatcaggactggtggcgacaaaagaattagtaattttttactttatcaaattgcatatgctgagattatgttcattgataaattttggcctgaattctctaaaaaagatttcaaagaatgtgtaagtaatttccaaaaagtgagtagaagatttggtaaacgagtataag

SEQ ID NO: 202091 - DNA, 992 bp, Unknown
  Bacterial polypeptide expressing nucleotide sequence isolated from the Sargasso Sea
ttcgacacatatatttttgcagcaaatgttaaaaaagatggaagagtgccatcatgtttttttaactccaactggttttggttcggtatttttatcgatttttagcataattcgtccaggcgatgaaattctagcatctgatccagtctattccccaacaagagcattaacacaagattttcttaaatcatttaatattaaaacaattttttataatcctcatgatttaaatacattaaaaaaaaatattacaaaaaaaacaaaattaatttatgttgagaatcccggaagcaattcatttgattttcaagatttatccaaaatagtatcaattgcaaaaaaatataaattgtttacagcaatagataatacttggggcactccatattttttaaaacccattaaattgggatttgatatgtctattgtttcagcaacaaaatactattcaggacactctgatgtgatgggaggtagtttggcagttaataagagagtttttaaatacgttgaaaaagcaaataaaattgctggtttgagattagggccagatgatgcatatcttataataagaggattaagaactttagatgttcggttagataggcatcaagaaaatgcaaaaaaaattgcaaattttttatctaaaaataaaaaaataaaacttttatatccttataaaaaaggttcttttaattttaaaatgtggaataaatattattctggtgcatctggattgatgggactaaaaattaaatcaaaaaataaaaaatcagtacttaaatttgtaaactcattaaaattgtttggatatggatatagttggggaggttttgaaagtttagcccttcatcaagaatctagagagcttggagatagaaattttttacgtttggcaaaagatgaacatttagtaagacttcatattggactagaagatccaaaagatcttattgcggatttgagaaaagctattaaactcattaaatgaa

SEQ ID NO: 202092 - DNA, 1090 bp, Unknown
  Bacterial polypeptide expressing nucleotide sequence isolated from the Sargasso Sea
agcataaatgatgatctaattgatacaagctttgaaagtgcaaaagctatagagaatttaaagtttacacctggaggagcttttggttcatgtagatataaattatctgatgttaaaaaaagtgaagtcgattaccaaaaaatattaaatacctttgaaaaatataacataggctattttttttataatgggggtggtgattcacaagatacaactaataaattatcaaaattctgtaaattgaataaatatgacatcagctgcataggtattccaaaaactgttgataatgatttaccatttattgataactgcccaggatttgggtcagtagcaaaatatgtatcgacttctattttagaggcaggactagatgtcgcttccatgtccgagacatctaccaaagtttttgtaatggaagtcatgggtcgtcatgcaggttggatagctgcttctgccgctttagcgggtagaggtagaaatctccctcctcatattattcttttcccagaaattgaatttaataaaaaaagatttttacaagaagtaaaaaaatgcgtttcaaaacatggttattgtgtgattgttgcatccgagggcgttaaagcaaaaggcaaatttttaactgaaagctcttcaaaagatgcttttggacatgctcagcttgggggattagcaccattaattgttgagatgatcaagtcaaatcttaattataaatgtcattgggcagttgctgactatttacaaagatcagcaagacatttgagttcaaaagttgatgttgaccaagcatataagctcggtaaatttgcagttcaacaagcagttcaaggtaacacagatagaatggtctctataaagcgaataagttctaaaccgtacaaatggaaattaattacagttccattatcaaaagtagcaaacgttgaaaaaaaattaccaaaaaactatatttcatcagatgggttttatattacaagtaagtgtagagactacttacaacctcttatttacggggagctaggaccaacttataaaaacggtattccagtatattcaagacttaaaaatataaaagctaagtaaa

SEQ ID NO: 202093 - DNA, 928 bp, Unknown
  Bacterial polypeptide expressing nucleotide sequence isolated from the Sargasso Sea
atgaagaaatattttgatgtaaatagcccttctagtgtgccgctttcactttatatacatattccttggtgcataaagaaatgtccatattgtgattttaattcacatgaggcatcaatatcttttgacgagctaggttatgttgatgctctaataaaagaccttgaagtcgagttacctcatatttggggaagatcaatcgtaagtatatttattggaggaggcactccaagtttattttcacccgagtcaatagataagttacttagctcaattcgtgcatatttcaattttaattcaagtatcgagataactttggaagtaaacccggggacagtagaagcaaacagattttctgaatataaagctgttggtataaaccgcctatcgatcggagtgcaaagttttaatgataaatatctcaaattactgggaagaatacatacctctcgagaagcagagaaagcaatttcgatctgtaaaggagcagggtttaaaaattttaatatcgatttaatgtttggtttgcccagtcaaaacacaaacgatgctttattagatctcagtacagcttttgatcaattaccaacacatatttcatggtatcaattaactattgaaccgaatacccaatttagttttaatccacctaatcttccttgcgacgataatatttggtctatgcaaaaagaaggacaggaattactcaaatataacgatttttttcaatacgaaatttctgcgtatgcaaagaaaaaatttgcatcaattcataatactaattactgggagtttggagattacattgggataggagcaggagcacatagtaaaattacaaattttaatgatggaaaaattgaaagattttcccgacatagagttccaaaacgttatattgagttagccggccatagtgacgttattg

SEQ ID NO: 202094 - DNA, 955 bp, Unknown
  Bacterial polypeptide expressing nucleotide sequence isolated from the Sargasso Sea
atgaaaaaagttttaattacaagacgcttgataagagaaagtgaagacaaagcatctaagttatttgaagcaaaatttaatactaatgatgaactttattcacaaaaaaaaattattgaaatgagccaaggatttgatggcatattatcatcactaactgaaaaattagatgcagaaacaatcaatcaattaccagatacaattaaaataatttctaatttcgcagttggatttggaaacattgatttagaagcagcaaagaatagaggcatagcagtaacaaatacaccggaagttttatcagatgcttcagcagagattggaattttattaattctaggagcatgcagaagagcttctgaaggaatagagtcggcaaaagaaggtggatggaaatggtctgctgactatctaattggaaaacaattaaccggaacaagattaggaattttaggtatgggtcgtattggccaaaaaattgcaaaaattgcaaaatctttaggcatgatcattcattatcataatcgttcaaaattaagtgaagataaagaacaaggtgcaacatatcatgatagtataaaaagtcttttttctgtctcagatgttttatcaatttgttgtcctgccacaaaagaaacagagaacttaataaataaagaaactgttgagtatttccccaaaggtgctgtgataactaatgttgctagaggcgatatagttgatgatgaagctttaattgatgcattgaatagaagaaaaatttatgcagcaggattagatgtttataaaaatgaaccaaatttaaatcctggctatttaaaaatccctagcgcttttgttttacctcatcttgggagtgcaacaaaggatacaagaattgcaatgggaaatttagcaattgataatcttgatgagttttttagaactggaaactgtatcaataaagtaaattaaa

SEQ ID NO: 202095 - DNA, 1681 bp, Unknown
  Bacterial polypeptide expressing nucleotide sequence isolated from the Sargasso Sea
tctgactggcggccaagcagcaattaagtctttaaaaaaagaaaaagtcaaacatgtttttggtttaattgggtctgcaacaatggaaatgtttgatgctctttatcacgaaaaaaatataaaatttattggtgttcgcgatgaaagaactggaacacatatggctgacggatatgctagagcatctaatcaaccaggtataatacttgctggacaaaatggtcctggtgctacaaatttagttactggacttgcacaagcaaaagctgctttttctcctgttgtttcaattgcaggatcttattcaacaaaagataaaatggaggatgcatttcaaggtcttgaccaacaatctttgtttaaaccagtaacaaaaaaaacttggacagtaaaaaatactaaaaaaattccaaaaatttttagtgatgcttttaacttggcaatgtcaccccgaagaggccctgtatgtattaatttaccaagaaatattttagcgaaaaaagaaaattttaaaataaacgaaaaaatacaatcttttgataatcaaaactcaactaaagcaaaatctaattttataaaaaaagctgtacaaattatcaacaattcaagcaagactgttattattgctggtggaggaattaaatattcatcaaaatataaaaacgtagttaaattggcagaactattaaatgttccaattgtaactgccgctggtcacggagatgctataccatttaatcataaactaaatgctggacaaatgggtcctaggggtaatttggttgcatccaaattagttaaagaggcgagtgtcataattgctcttggaacaagacttggatttaattcaactttttattcttatgaaaacataaataaaaaagcaaagatcatacaaattgaattagaaaagagaatgataggaagatactttcctgtagcagtaggaatttatggagatgcagcaacaatagctgaacaattatgtaaagaaattaaaaaacaaaatattacttttgatatacaaaaatggaccaataactatttaaatgaaagaaaaaattttttgcttagcagagataaatttgtacagaaaaattttcctattcaacccaaaagcttatttaaacaattaagacaagtgcttcctaaaaactctgcaattactttagatgcaggtacactttgtttacaagcaacagatgctcttgaatattacgatcctccatctttgtttactcctttagactttggtttagttggtttttcttttgcatgtggtttaggtgtaaaaattgcaaaacctgacaaaaaagtaattagccttatgggagatgggggttttgggatgacaatctcagaattgagtacagctgttgaatataaaataaatacaataactatagtactgaacaataaaagttggggagctgaaaaagcttatcaaaaagatttttatggaaaaagatacttaggtgctgatattagtagtccaccttttgataaagttgcggagctctatggtgctaaaggttttaaggttaaaaaagtttcagaaataaaccaagctgttagagaagctttaaaaataaataagcctgtagtcattgatgttgatgtagatccaaaagcactatacagttttagaagagatagtttccaacatagagaaaaaaaatga

SEQ ID NO: 202096 - DNA, 673 bp, Unknown
  Bacterial polypeptide expressing nucleotide sequence isolated from the Sargasso Sea
tatgaataaaataataactattggatctagaggtagcaagttagcattactttatgcccaaaaagctaaagataaaattatccaaaatacaaatttaagtgaggaaaatattgttattaaaacaattacaactaaaggcgatcaagttcaggatacaagactatcagaagttggaggcaaaggtttgttctcaagtaatattgaaaacgaacttctgaataataatattgatatagcagttcatgcgcttaaagatatgcctgctattgaaacaaaaggactcagaacagatacgtttttagaaagaaatgatccaagagaaattttaataactacagataaaaaaaaacttaaagaattaaatttaaaatcaattattggaacctcttcgtacagaagagaatttcaaataaaaaaaattagaccagatatcgattgtaaacttattagaggcaatgttgatactagaataaaaaaattaaaagaaggaatatatgatgcaataattttatcatatgctggaatgaaatatttaaaacttgaaaataaaatttctgaaatatttaaagttgaagaaataattccaagtgcaggacaaggaattatagcattacagtgtagggaaaatgatagtaaaataatttctattttagaaaaaactaatcatgaagaa

SEQ ID NO: 202097 - DNA, 1222 bp, Unknown
  Bacterial polypeptide expressing nucleotide sequence isolated from the Sargasso Sea
ttggaaaacagtcaatatgtaaacgcaactcaggaactaattaattacctaagtacccagaagattggagcatttaaagcagaggggttcaaacaatggattgacaataatccaaatcatccattgatatctcttgcaagatttaactatgctcaacagcttttttatgcgggaggcactcaacagagcaaaatacacctttcaaaggtgaagccctacgaactttcaaacagtgaccaggctgattattcttttatgaccggagtatccttgttgcaggatgaaaactatgagaacgcaggaaaatattttgaggcggccaggaaaaatggatttgataaccattcacaactctcttattatcaggccttaacggattataatttaaacaatcaagaagaggcgttggaaggattttatacgataagagaagatatgaattacggtctttcagctaatttctatagggccaggatcctgttagctaaagaagattatgatggcgtgatccgtttagcgcaggaagaattatcagaagaaaaatccataaccaatgccggattgtttcaattgcttggtgaagcttatgctaagacaggagaaacctcaaaagctgatgcatattttgaaaaagccatccttaaatatcccggaaaaccctcctctgcactttattatcaggcgggagtttcaaaatttaagcttggtaacgtggataaagcattagcatacctgacagaatcaggcattggttcgggaccttttgccacgctcagtgcatttcagttaggcaggcttcacataaaaagaaatgatttggaaaatgcacttgcagcctatattgaagcctcttcttcagaggatatagcaataaaggaagaatcaatttaccaggccgccatgctcaatgcaaagctggaacggtataccgcttctattgactattgtcatgattacttatctaaatataatcagggaaaatggcgcaatgagataaatgatttacttgcccagtcttatctaaagacatcagactatgacaaggccatcaaattacttgagaaaatcagcatatcgaatcaacgccaaaaggaggtataccaaaaggtgacttttcaaaaatcattactccgttttaatgatgggctatttgatgaggcggaagaatggttcaaaaaatcgctaagatatcctgtgatagaagaattaaccaataagacct

SEQ ID NO: 202098 - DNA, 758 bp, Unknown
  Bacterial polypeptide expressing nucleotide sequence isolated from the Sargasso Sea
cttgctagtctttatttgttttttttcatcccttaacactattcctcctttagatagggatgaatcaaggtatattcaagctacagttcaaatggtggagtcaaaagacttcataaatattaagtttttagatactccacgtttaaaaaaacctccaggtatttattggatgcaggctttatctgcaactgtagttaaaaatattttatttttagaaaaagcacctttatggtcctatagattgccttctgcaatagcggctagtatttctgtatggttaacatttttattaggtaaacttttgtttggtagaactcaaggttttattgcagcacttttattgttaagttcacctttagtatttattgaatcgcacatagcaaaaacagattcggcacttatggcatgtgttttatttattatttatatttttgcaaaaattatatttgattctaaatttaaagataattactactcaaaatatttaatcctttttgcatggctagttatgggatttgcttttctcattaaaggcccacttatcattttatttatattttttatggcaatattttttaggatatttagtggtattaactttataaaagattgcagaataataactggctttactatatttttactaatttcactaccatggtttataattatcaacttaggagataacagcgaaatattcgtgaattctgtcaaaaaagatatggttattaaaattggtaagcatcaagaatctccat

SEQ ID NO: 202099 - DNA, 1212 bp, Unknown
  Bacterial polypeptide expressing nucleotide sequence isolated from the Sargasso Sea
catgaatttagataaaattgttataaaaggtgcaagagagcacaatcttaaaaatatcaacttagaaataccaaagaataaactcgtagtaataactggtgtaagtggctcaggaaaatcgacattagcatttgatacaatttattctgaaggacaaagaaaatatgttgaaagtctttcagcgtatgcaagacaatttctccaaatgatgaataagcccgatgtagatagcattgatggtttatcaccagcaatatctattgaacaaaaaacaacacaaaaaaatcctcgtagtactgttggaaccgttactgaaatttatgactatttaagagttctttatgctagggttggagttccctattctcctacaacaggcaaaccaattaaatcacaatcagtaagtgaaatgactgatcttataattaaaaataatattgataagagaatttatattttatctccgatagttagagatagaaaaggtgaatatagaaaagaaatcgaagatttaaaaaaaaggggttatcaacgtcttaaagtagataatgtagtgtatgatattgatgaagtgccttcacttaaaaaaaattttaaacacaatattgatgttgtaattgatcgacttgttgtaaaaaaaaatatccaacaaagattgagtgaaagtatagaagttgcattaacactatcagatggtttactatatttagaaaatctagatacaaataaaatatccattttctcatcaaaatttgcatgtcctgtatctggatttagtattgaagaaattgaacctagattatttagttttaatgctccacaaggtgcttgctctgaatgtgatggacttggcgttgaaaaatattttgatgaattcaagattgtgcctgatgaaactagatcaatttctgatggagctattaaaccctgggaaacaaaagtatttggttaccagaaaaaatattttgttgaaacaatagataaaattttaaaacaatttaaagtaaagaaaaatgttccatggagtgaaattccaaagaaagttaaaaatataattctttatggggatgagaatagcgaactaaattttttatatgattttgagggaataataaactttattgatcgaaaatatgaggaaactgagagatggtggcttcagtatgaattagaaaaatatttatctgaaagagactgtgaagtttgtgatgg

SEQ ID NO: 202100 - DNA, 3658 bp, Unknown
  Bacterial polypeptide expressing nucleotide sequence isolated from the Sargasso Sea
attgacaaggaatgaagttgtgaagacaaaactatctatcgctatctccgcggcactattatcaagtgctgctgttgcaggtacaactgctcagtacaatacaaccaatcaaacaactgataagtatgcaggcttaagcgttactaaaaatgatagtaacgaacaaaaacaagctgtagcttggatggtaaaattaaaggcaccttctcttgcgcaacaaagccagctaaagggatttaataagcaatcggtcatgagccaaatcgaaagctctcaaaccaaagtcaaaaatgcaattaacagcatggatgctgatttaaaaatcgttgcaacaacgtcaaaattagtaaactcgattgttgtggaaggtaatcataagcaaattgcatccctgcttaacaacgctgaagtagcggctattctgccaatctatgactacaaactagatgttgccgcaagcgctgaatacatcaaagcaaaagcggttattgatgcgggtattgcttcgggtaaaggtcaacgagtggccgtgctcgatactggcgttgactatacccacaaagccttaggtggctcaggattagttgctgactacaaagcagccgtcgcagcaaaaagtgaaatgccaaactggccacaaggcaaagtcattggaggttgggactttgttaataatgatccaaacccaattgatgtcacaaccaatcatggtactcatgtaagccattctgttgttggaatagctccagatgttgagctgctcgtatattcagtgtgtaactctggctgttctggtatcgctcaattaagcgcgcttgaagcctctatggatccaaacggtgatggagacatcagcgatcgcgtcgacactgttaacatgtcgttaggcggtgattttggtgatgttgaggacggcgccgttcaagccatgatcaatgaaatggtcaaactaggtgtaaaccttgtgatctcagccggtaacgatggtccaacaccttttgtggtcggtggcccaagtaccactaatagcgctctttccgttggcgcaatgacgcatccaacgactaaagttggcaaaattgaagcatccatagcgggtaatacagtcacagcaattggtgctggatttaataaatccaatgcttatagcttcacaaataccgttgcaccgattgtttaccccgctgccaataaaaatggctgcgcggcttatactgaagatttaacaggcaaaacggtgctaattgaccgcggaacctgtggttttacagttaaggtactaaatgctcaactaaaaggagcctcatttgttattgtggctaacaacgcagccaatgctggtgcgattgtgatgggcgggaccgacgacaagatcaccattccttcggtaatggtttctaaggaagatggcgatgcaatcaaagctgcactcgcatctggcgatgttccatttagtattacatcaactgaagtcactaccgcaggtgccattgcgacctttacgtcaagaggtccatcaatcggcggaaccttaaaacctgagatcaccgcacctggtactgatattctcaccgcacacccaggattaggtgaaggattaagtccaatcagcggcacatcattctctagcccgattacagctggtgccgtcagtatcattcgtgaagccttacctcatcgcaatgcatttgaggtaaaagcgaccatcatgaacgcggctaaccttgatgtaacgctggaacctaaagaaatcaaccctgatacagagcttgcacctatcagctatatcggttcaggtttagttgacgtagaaaaagccattaatctgcccgttgcggcttggaataaagacaccaaacaagcggcgttagcctttggcttattagcgctcaacaaaaccacatcaatcactaagacagttactgttaaaaacttctctgcagctgaaaaaacttacaccttaaaagtcgatcaacgtttccaaaacgatcttgattcaggcgccttaagttttgcattaccagccagtgtcactattcctgccggacaaaccgttgattttgatgttactgcgacaattgatccgactaagttgccagaatggacgctaacctcatcctatgaactagacggaactgctgcagatgcatcagtagcactgacgctatctgaatacgatggtgcaattgagttcatggatggtgaatcgaaagcactccacttggtataccacgtgttacctaaagcagcggcggcaatttcagttgaaactgaagtcactgaagacggtttagttcgtacactaaccaacgttggtgcaacctcaattaccgatccatttacagctccattgatcgcaacaagccctgtcgacgaatctaaacgccatgacttgttaaatgcatcgagtgaactgttgctcagtagctcatgtgatactggcattgcaatctataacaccttacaaatgcgcgatcctatcgttcatgcgttagtggccagttatgacgtagactatgacctcaacaatgacggtgtttgggactacacagcagcaaccgcaaacctaaactggtttaatgatgcctatccaagatcaatctatggtttagtggctaaatatggcacctcatcaggtacgcttgagcctgttttccacgtcacaggtaatgacttcctaaccagcaaagtgtgttttgaagacatggggttaactgaagcagacttaggtaaaaccattaaagttcgttaccgtgtagaagacagtgattgggctccgacaccttctggtgatgaagacagtgttgttgcatcgcttgtacttgatggctcaggaacatcagccatgttagtggatagcgatggaaaagaagtcactgaactcaaaccaggtgaaagtgcgattttagaagctcaagttggtgataacgctaaaggctttatgttcctgtcggactcaggctctatgtctgttgtagctaataccactgatgaaggtaactcagcgccaacggtagaaaacttaacactatcagttaagaaaggtactgctgctggaaccgtattaggacaaataaaagcgactgaccctgatatgctgacaagcccgttctccgaatttgtgactacaggctcgaatagcagtatggttttagttgctaaagatggaacagtacgcttaagtgacgacgctgtaattaatcagcaaagcaaaactatggaagttgaagttattgctctagatacgatggggaatgcttctgcaccagccaaagtgacagtgttgattaataacactaagccaacagtctctcctaccagtgcaaatgctactgagaactcatatgtagccttgctagcaaatggtaaagatgctgatggcgatactttaacttacacttggaagcaaacatctggtcctgcaataagttttgttaacggctcagataaacttggatttacagcccctgcaggtgacaacgtttacacatttaccgttgtcgcatctgatggggtagatgatagtaatactggtacatcaacagtgacagttaaaacaacaaaagcaaacaatgctggcggtacctccggcggtgcgctgggttggttaacggcgttgttattacctctggcggcaatgcgtcgtcgtatgaagtaa

SEQ ID NO: 202101 - DNA, 459 bp, Unknown
  Bacterial polypeptide expressing nucleotide sequence isolated from the Sargasso Sea
aatgacagcaattattctagctgcaggaaaaggggagaggttgcaaccattgaccagccagaccccaaaacctttgataaaagttgcagggaaaactttgcttcagagaaacattgattgtctgaagcaatctggaataaaaaacattattgttaatggttccaggatgggggatcaaattgaatcattcttggaaaatcataagcaatcaaatataaattttgattatattaacgaaggccaggagccacttggaactgctggtgcaatttttaatatcattgataaaggtttgataaatgacgatcatttttgggttattaatgctgacatcattaccaacttttcttttggtgctattgaactaaattctagtgtgatgggtcatatcatattggtcccaaatcctgagcataatttatcgggtgacttttgcttagaaggagatagagttaccat

SEQ ID NO: 202102 - DNA, 480 bp, Unknown
  Bacterial polypeptide expressing nucleotide sequence isolated from the Sargasso Sea
aatgaattacggatttgttattgataatcgcatgtgcattggatgtcatgcttgtactgttgcttgcaagagtgaacatgatatcccgattggagtgaatcggacccatgtgaagtatattgacaaaggtgagtttccaaaatcaacgcgtgaattttcagttcacaggtgtaatcattgcaaggatgctccgtgtgttgaaatctgtcctacaactgcactgtatgatcgtgcagatggaattgttgattttgatagtgaccgctgtatagggtgtaaatcttgtatgcaagcttgtccgtacgacgcattatatatagacccagatactcatactgctgcaaagtgcaattattgtgcccacaaagtagatcatggatatgaacctgcgtgtgttattgtttgcccagttgaagcaattatttctggtgacttagatgatccaaactcgaatatttctcatttggtaaaaaatgagaa

SEQ ID NO: 202103 - DNA, 762 bp, Unknown
  Bacterial polypeptide expressing nucleotide sequence isolated from the Sargasso Sea
aatgaaatttttaatctctgcagcaggaaccggaggtcatgtttttccagcattagaatttggcagagaatgtatcaaaaatgatcatgaggttctttggattggaacgaaaactggtatagaaaatcgagttctcccaaagaacataaaatttttaaccattcctatgattggatttagaggaaaaaatttaatttttaaaattacttccttaataggtttaatagtctcaatttttaaaagtattttttacataaaaaaaaataatattaatttcatcgtttgctttgggggatacatctcattaccagttggtttatcagcatggatttgtagaaagcctcttttcttgcatgagcaaaatgcaattatgggcacttccaataaaatattaaaaagattttcaaaaatagtttttttaggattttcaattaatgagtcgatttcaaaaaaaacgatgctcgtaggaaatcctattaaaaagttggaattatcatctttcacaaatcataatcataatcataatcatgatcctgtaaggatctatataactggtggaagtcaaggctctgaatttataaataaaaatgtacctattgctttaaatcaattaaatatcccattagaagtgaagcatcaatctggaattggaaaatctttagggataaaagaattatactcaagcaatatttctatagaggtagaagagttttatgactcacctcatgaattaattttatggtcagactttattatttctag

SEQ ID NO: 202104 - DNA, 2821 bp, Unknown
  Bacterial polypeptide expressing nucleotide sequence isolated from the Sargasso Sea
tatggatagtatttatatcaaaggtgccaggacgcataatttaaaaaacataagtcttgagatcccaagaaataaaatcattgtaataactggtttgtctgggtctggaaagtcatcactcgcttttgatactctttatgcagaaggtcagcgcagatatgtagagtctctatcaacctatgctagaagattcctatcaatgatggaaaaacctgacgtcgatcaaattgaaggtttatcaccggctatatcgattgaacaaaaagcaacttctcataacccaagatcaacggttggaactgttactgaagtatatgattatttaagattactattttcaagaattggtacaccggtttgtccagatcatggtgaagagttaaaagcaaaaacagtctcagaaatttgtgatgaaattcttaaaataaaagagaatacaaaaatcatgctccttgctccagttgttagagggaaaaaaggcgaacatctgggaatatatgaagaattacgaaagagtggatatgttcgtgtaaaagtaaatggaacagtatatccaatggaagaatttccagacctagataaaaataaaaaacatgatattgcagcagtaatcgatagattggtaattaaaaagagtgatgatataagatcaagaatatcagaatctatagaaacctctttactgctatctgaaggccttattgaggttgaaaatatggacaaaaatgagataactctatattcgtctaacttttcatgttctcaatgtggttatgctgttccagaacttgagccgagaatgttttcgtttaacaatccatatggtgcttgtacaaaatgtgatggactaggagtaattcaattcttcaatgaaaaaagacttattcaagatgatgaggtctcaatagcaaacggagcaataaagggttggactagaagaaatagattttattattatcaattaagatgccttgcaaatcattacgactttactctaacgacaaaatggaaagactatcctcaaaaaattaaagatattatcttgtggggtaccaaagaaaagattgatttctcacatcgctttagaagtggcagcagaatagttaggaaacatcgttttgaaggaataattccaagtacagaaaggcgtttcaaggaaacagattctgaatacatcagaaatgaattagcaaaattaatgtctgaaagttcttgtgatgaatgttcaggatcaagactaaataactattcacgcaacgttttcataaataaaacacaaatacataaaatcaccagcatgaggataaatgactctcttaaattcattaaaggtatgaatctaactggagctaagaaaaaaattgctgaaaaaattctaaaagaaatagttgatagattaacttttcttgaagatgttggccttaattatttgactcttgatagaagtgctgagacgttatcaggtggtgaagcacaaagaataagattagctagtcaaataggatcaggtcttgtaggtgtaacttatgttctagatgagccctctattggattacatcaaagagataatgcaaaacttataaaaacactcaaaaatctaaaagaattaggaaatactgtaattgtagttgagcatgacgaggaagcaataaggtcagccgatcatataatagatattggaccaggagctggagttcatggaggaaagatctgtgctcagggtgatattaaagctattttaaaaaataaagactcaataacagccaagtacttatcaggtaaaagagaaattaaagttccaaaaaaaagagctaaggtcaattccaaaaaaattacaatcatcaatgcccacgaaaataatcttagtaatgtaaatatcgatataccagtaggattatttacctgtgtaaccggtgtgtctggttctggaaaatcatcacttatcaatcaaacattattacctattagttcatttttacttaataaagcaaagctatcaaaagaggttaaatgtgaaaaaatagaaggtctggatcatttagataaggtaataaatattgatcagtcaccaataggaagaactccaaggtcaaatccagcaacttatactggattattttcacatatccgtgatcttctatcacaaacagtcgaagctagatcaagaggatataagccaggaagatttagttttaatgttaaaggtggaagatgtgaggcttgtcagggtgatggaatgatcaaagtagaaatgcattttctggcagatgtttatgtaaagtgcgacatttgtgatggtaatagatacaacgatcaaacccttgaagtaaaatttaaagaaaaaaatataagtgatattcttaacatgactgttgaagatgctttagagttttttgatgcacatccctcaattaaaaataaattgataacattaaatgacgtaggtctgggatatataactctaggtcaatctgctttgactctttctggaggagaagctcaaagaatcaagcttgctaaagaattatctaaaagaagtacgggtaaaactttgtttatattagatgaaccaacaactgggttacattttgcagacattgagctacttttgaatgttttaaatagacttaaagatcagggcaataccgttgttgttattgagcataatcttgacgtaattaagacagctgactggattatcgatcttggtccagagggcggcagtgacggtggcaggattgtagctgaaggaactcctgaagaagtttcgaaagtgaaagaatcttttaccggaaaatttttaaagccaattttatcttaa

SEQ ID NO: 202105 - DNA, 910 bp, Unknown
  Bacterial polypeptide expressing nucleotide sequence isolated from the Sargasso Sea
atgactaaaaaaattatcataggttcaagaggtagtaaattagcattgttgtatgctcaaaaagctaaagaacaaattattaaaaaaactactttagatacaaatgatattgaaattaaatctatttcaacaaaaggtgatcaagttaaagatactaggttatctgatataggtggcaaaggattgttttcaactgaaattgaaaaagagttagagaataaaagtatcgacattgcagtacatgcattaaaagatatgccagcaacagaaactagcggacttaaaacagactgttttttagagagaaatgatccaagagaaattttgataacaaatgataagaaaaaatttaatgatcttaagctgaaatcaattataggaacatcttcatttagaagggaatttcaaattaaaaaattaagatctgatctaacatgcaaaataattagaggtaatgtggatactagaatcaaaaaactaaaagatggaaattatgatgcaataattttatcttatgcaggaattaaaaatttaaatcttgaaaatgaaatagctgaaattttctcagcacaagaaatcataccaagtgctggacaaggaataattgcactccaatgccgtgaagcagataaagaaattatttcaattttaaaaaaagtaaatcatgaagaaacttataaaagagctcatgctgagagaaatgttcttaaagttttagagggagattgtgaaacagcaataggcgtttattcaaaagtagaaagtgatacaattgtagttgaggcagaacttttttcaatagacggctctcaaagattttatgaaaagaaatctggccagattgataaatttaaagagataggtaaacaaattgggcagaatttaaaaatgcaatcaaataattcttaca

SEQ ID NO: 202106 - DNA, 1681 bp, Unknown
  Bacterial polypeptide expressing nucleotide sequence isolated from the Sargasso Sea
cttgaccggtggtcaagcggcagtgaaatccttaaaaaaagaaaaagttaaacacgtctttggtttgattggttcagctacaatggagatgtttgatgcgttgtatcatgaaaaaaaaatcaaatttataggtgtgagagatgaaagaacaggaacacatatggcagatggttatgcaagagtttctaatcaaccaggtgtaataattgccggtcaaaacggtccaggagcaactaatctcgttacagggatagcacaagcaaaagcagcattttctcctgtggtatctattgcaggtttgtattctactaaagataagatggaggacgcctttcaaggactagatcaacaatcactttttgatcctataacaaaaaaaacatggacagtaaaaaaggcaagtcatataccagctacctttagtgatgcttttaaccttgcaatgtcaccacgcagaggaccagtttgtattaaccttccaagaaatgttctttctgatacttcaaagtttaagattaatgaaaataaaaaatcttataaagctgaaagtgacttaaaaagtaaaaagaatttaattgatagaactataaaacttattctcaactcaaaaaaaacagtaattgttgccggaggaggaataaaatataattcgaaatttaaatctgtaacaaagctagctgaatttttaaatattccaattgtaactgctgcgggacatggagatgcaattccctttagtcataagttaaatgctggacaaatggggcctagaggaaatattgttgcatcaagattagtcaaagaagcagagctaattattgcaattggtacaagacttggtttcaattctactttctattcgtatgacaatataaataaaaatgcgaaaattgtacaaattgagttagaaaaaacaatgataggaagatactttccagttaatgtaggtattcatggcgatgctgctcttgtgacagatcaaattttagctgagttaagaaaacataagaaaattttcaattacgaagagtggacaaatagctttttattagagagatcaaaatttcttaaagatagagataatataaagtcaaaaaattttccaatccaaccgaatggtctattcagagaattaagaaaagtactaccaaaaaatactgcaataacacttgatgctggaacactttgccttcaagcaacagatgctttagaatattacaatcctccttcccttttcacaccccttgattttggtttagtaggcttctcatttgcatgtggtttgggaataaaggttgcaaaacctaataaaacagttgttagtttaatgggtgatggtggatttggaatgactatttctgaattaagtactgcggtagagcatggcattaacacaattacaattgtaatgaataataagagttggggggcagaaaaagcttatcaaaaagatttctatggtgaaagatatttaggagctgatattcaaagtcctccttttgatgaagttgcgaaactatacggtgctaaaggaattaaagttaaaaaattatcagaagttaatgaggcagtaaaaagtgcattaaaagtaaataaaccagttgttatagatgttgatgtagatccaaaagcgttatacagttttaggagagatagctttacacatagaattaaaaaatga

SEQ ID NO: 202107 - DNA, 925 bp, Unknown
  Bacterial polypeptide expressing nucleotide sequence isolated from the Sargasso Sea
aatgaaaagcaaaaaaattattattggatctagaggtagtaaattagctttaatttatgctgaaatagcaaaaaataaaatttttgaagtaaaatctgattttaaaattgaaaatattaacattaaaacaataactacgaaaggtgatgaagttcaaaatatcagattatcagatattggtggcaaaggactttttgcaaaaaaaatagaagaagagttattacaaaaaaaaattgatatagctgttcatgctctaaaagatatgccatctaatgaaacagaaggtcttattacaaattgttttttagaaaggaacgatccaagagaaatcttaataagtagagaaaatttttttttaaaagatctagctaaaaattcaattattggaacttcatcttttagaagagaatttcaattaaaaaaaaagagaaatgatcttaattataaattgataagaggaaatgttgatacaagaataaaaaaattaaatgataaattatacgatgcaatcatattgtcatatgcaggaattaaatctctaggattagataaaaatatttctcaaattttttcaacttctgaagttattcctagtgctggtcagggtgttatagcacttcaatgcagaaaagaagataaagaaataattaatttattaaaaaaagtaaatcacgaatcaacatatcattgtgttcaagctgaaagaaatgttcttaaagctttagatggtgattgtgaaactgcagttggagcatttgcacagattgatcaagataaaattaatattgaagcagaattattttccttagatggtaaggaaagattttatcataagtcttcaaaagaactaaattttgcaagccaacttggtaaagaagttggtgaaatattaaaaaaacagtctaaaaattcttataaaaaataa

SEQ ID NO: 202108 - DNA, 958 bp, Unknown
  Bacterial polypeptide expressing nucleotide sequence isolated from the Sargasso Sea
atgattaagaaaaacaatcttactattaatgaaaaattatataattttgttaacaaagtagtaatacctgaaacaaatttaaatatagataaattctggaatgatttttcaaatattgtcgatgaagtagatccattaaacaaaagtctaataaagaaaagatcagacttgcaatcaaaattaaatgactggtataaaaataacaaaggaaaagagattaatattgcagaatataaaaaatttcttttagacattgattatttgattgaagaaggggatgattttaaaattgatacaaaaaatgttgaccctgaaatagctagtatatgtggtcctcagttagtagtgccaataacaaacgctaggtattcgttgaatgcaattaatgcaagatggggaagtttttacgatgcaatttatggaacaaatgttttgggagatttgccaacaacaaaagagtatgacataaaaagaggagaaagagttataaaatttgccaaagaacatttagataaaattgcacccttaaatttatcttcatggaataatgtaaaaagtattaattttattaataacaaaattaattttgatctttctactaatgaaacaacaacacttttagacgaaaatcaaattgcaggtattcgcgcaaattctgaaaatcaattaagtgaattaatattaattgtaaataatttgcattgtcgcattcttataaatagaaataatgctattggaaaagctgacatagctggaatttctgacattgttttagaatcagctatttcttccattttagattgtgaggatagtgtagctacagtagatgcaaatgacaaagttttagcttatgaaaatttgttaggtttaatgaaaggtaatttagagtcaacatttactaaaaataacaaaaaaataacaagagttttaaatcaagatataaaaattaaaactataa

SEQ ID NO: 202109 - DNA, 815 bp, Unknown
  Bacterial polypeptide expressing nucleotide sequence isolated from the Sargasso Sea
tgacaaaccattagttattattaatgaaagtatgcaattttctgcgggtgttaacttgaattatgttatggagttcgttcaaaaaaaagacttaaaatcagttgagaaatttgtgaaatattttcaagaaacatgtaagcatttaaaatattgtaaacatccagttgtatcggcaccttctggtttggcattaggtggaggtgaagaagtagttatgcaaagtaattatgttgtgtctcatacaaacattgttatgggtttagtagagacaatagttggattagttccagcaggcggtggttgtaaggaacttttatggagatggactcagagtgatcaggctaaaagggatcctgattttgccccattaaaggtttttgatattattggatatgctaaaacggcaacctctcctcaagaagcaaatcctttattatttttagacaaaaaccacgaagtaattattaatagaaacaatttattacctgcggcgagatcttttattgcaaaaaataaaggtttagtttcccctcagaaatgtaaatttagattatcaggtgagcaagtaagaaaaaaaatgaaaaaaattctagaagaattgtataatagtaagaaaattttggaccatggtatggatgttggtaaggaattagcatatgttttaagcggaggagatactaacttagacaaagaagtaacagaagatcaaatgtatcagttagaattagatagttttatgaagttattacaaacagaaaaaactcaaaaaaggattactcacactttaaaaacaggaaaaccattagtaaattaaa

SEQ ID NO: 202110 - DNA, 877 bp, Unknown
  Bacterial polypeptide expressing nucleotide sequence isolated from the Sargasso Sea
atgtcacttaataaagcttttatttatatatttttacgacttttatcaaaattatctcttaaaagcataaataaattgggaagggttctagggtctatcttaaatctaacccccaacaggcacaaaaagattaccttaattaacttaaggcttgcttttcctaaacttgaagaagaggaaataatcggcctttgtaagaaaagcttaattgagacctcaattactttattagaatcgggatatgtgtggatgaaactgcctggaagtaacttgcccatgtcaatacaaactagaggttttgagcacattttaaagtcagctaaagatgcgcaaggcttgatagtgtttacacctcaccaggcaaacatagaagttcttattaattttttaggacaaaaaattgattgctccgttctctattcaggaattaaaaataaatatcttaatgcttatgttaaaaatgcaagagcgaagatgggggtgaaaatggttaaagacgatatatctggcgttaaagttttgcttaaaaatttgaaagaagggcgtggtgttgcaattgcatcagatcaagttccggaattgtctggaggagagctatcaaaattttttgggcaagactgtctctccatgacactgctatctaaattacaccaaaagacaaatgcaaaaattcattctatggtttgtattagggaggagaatggcaaagggttcaaattaatattcagtccgcaactaaatatgccaccaacaacaaaagagggtgttgatacaatgaataaagaactagaaaaatgtataatgcttgcacccgaacagtatgcctgggaatataaaaaatatagaagggcaggtaatgaaaatctttataattaaa

SEQ ID NO: 202111 - DNA, 625 bp, Unknown
  Bacterial polypeptide expressing nucleotide sequence isolated from the Sargasso Sea
atgaaatttttaatttctgcagcaggaacaggaggtcatgtttttccggcactagagtttggcagagaatgtatcaaaagtgatcatgaggttctatggattggaacaaaaactggcatagaaaatagagtcttacctaagaatataaaacttttaactattcccatgaaagggtttagaggaaaaaatttgatttttaaaattacctccttaatttgtttaatagcttcaatttgtaaaagtattttttacatacaaaaaaacaatattgattatatcgtttgcttcggaggatatatctctttgcctgtcgggttatcggcatggatttgcagaaaacctcttttcctgcatgagcaaaatgcgatcatgggaacatctaataagatattaaaaaaattttcaaaaataatttttttagggttttcaattaatgagccgatttcaagaaaaatgatgatcgtcggaaatcctattcaacagttgaaattatcctcctccataaatctagatcatgagcctataaggatctatgtaacaggtggaagtcaaggctctgaatttatcaataaaaatatacctattgccttaaatgaactgaacatcccattagaagtgaagcatc

SEQ ID NO: 202112 - DNA, 745 bp, Unknown
  Bacterial polypeptide expressing nucleotide sequence isolated from the Sargasso Sea
atgaaaagagataaaattattattggtactcggggtagtaagttagctctaatttatgctgaaaaagtgactaagtttcttaaaaaagtttcatcaactgacatagaaataaaaaaaatagtcacaagtggagatgaaaaccaaaatgataggttatcaaatattggtgggaaaggtttattttcaaaaaaaattgaaacagagttaattaatcataaaatagatattgcagttcatgctttaaaagatatgccaacgattgaaactgaaagtttgataacaaatttttatttaaaaagaaattcacctaatgaaatatttattagcaataataacatcaagtttcaggatcttaaaccaaattcaattattggaacttcttcatatagacgagaatatcaactccaaagtattagatcagatctaaattataaattaataagaggaaacgtggatactaggatcaaaaagttagaaaatggacattacgacgcaattttactttctaaagcaggcattgaggctttgggattagattataagattactcaagaatttaatacagatgaactcataccatgtgctggacaaggaattattgcaatacaatgtagagaaaatgatcaagaaataataaatatattagaaaaaattaacgataatcagtcgagaataattgcaaatgctgaaaggaatgttttgaaaattcttgagggcgattgcgatacagctgttggtgtctagc

SEQ ID NO: 202113 - DNA, 1193 bp, Unknown
  Bacterial polypeptide expressing nucleotide sequence isolated from the Sargasso Sea
tatgaatggtatagatccaattgaactgaatcttttctctagcaaggtatctgcaatttgcgatgaaatgggcttggtattgaaaagggcagccttctcacccaatatcaaagaccgtcttgactactcttgtgctattttcgatataaagggggaaatgcttgctcaggctgatcacatgcctgtccatcttgggagcatggcatatgcgatgcattcaattgtcagggataaagattggatgcaaggcgacctattagttctcaatgatccatttctgggaggcactcacttaccagacgtgactgtcattagtccaatatttgtagatgataatcgcttaggtggctttgttgtaaatcgtgctcatcatgcgaacattggatgtaatatacctggctctatgcctatatcttccaggatagaggaagaaggtttagttattccaccgacctttctatttagagctggggttttgcagaaagattcggcgcagctccttggaattgctgataatgctcttacaggcgattttgccgcgcaggcaggtgccaataaaataggtaggattagattagaacagttgattgagaagataggctggacaacttatcaaaagaatatagaacagctcaacaattttgcggaggaaatatcatcagctgcaatatctaaattgaaaccgggaacctataaattcatagattttttagatgatgatggttgtggaacagtcaatataaaattagcaataacaatggaaataatatctgattcggtaatgttggatttcacagactcatcgacgatggtacaagggaatttaaattgtccaaaagccgttgtggctgctgcaagttattattgttttcgctgtttgatgccatcgtacactccggcttgtcatggtctatttcggaatatagaaatcaagacttgtgaagggtctattttgaatgcaaaaagacctgcggccgtcgcagccgggaacgtcgaaacctcaatgcgtttggtagatttgatttttggagtgttagcgaaggcttctcctgagctgataccttctgctgcgcagggaactatgaataatatagcgatgggattaattaacgaggataaaggcagccgctgggattactacgagacgatagcaggtggcacgggtggagggccgacctttaaagggcttgacg

SEQ ID NO: 202114 - DNA, 1411 bp, Unknown
  Bacterial polypeptide expressing nucleotide sequence isolated from the Sargasso Sea
gcacactggagagcaacaaacaagcggaggtagaaaaggcgataagccatccatagcgctggcggagcagcttttggaaatcatgccaagaacaggcaggcttaaaacaggaacgcctcctagaatattgaaagcaagcattaattttaaaaagctcgaagaacaggctggcgacaacccaaggcctgtcttttcttttatgtcatcaagagaagaccacccaaaacaggtcagctgctacattgcacacacaaaccaaagaacgcatcaaatcattcttgattcattgaaggactcaccgatgtacacaggaataattaaaggggttggaccaagatattgcccatcaattgaagacaaggtggttaagttttcagaaaaaccaagacaccaaatctttgttgagccagaaggtcttgactctgaagaggtctacccaaacggaatttcaacaagcataccagagaaagcgcagcggagatttgttcgatcaattgagggttttgaaaacgcagaaatttctcaatcaggatatgccatcgagtatgactattttgacccaagagaccttaagccaacattggaaacaaaaagcatctctggactcttttttgctggtcaaataaatggcacaactggatacgaagaagcagcggcccaaggccttgttgctggaatcaatgcagcgcttaagatccaaaacaaagccacttggtcaccaaaaagaagcgaggcctatcttggtgtattggtcgatgatttggtaacaagaggaacaaatgagccctatcgaatgttcacaagcagagcggagcatagactggtcttaagggaagataatgctgacaaaagacttacaccattagccagagaaatgaacctcatctcagagcttaggtggacaaaatattgtaataaacaagaaaaaacagagctcgagatacaaaggcttaaggatacaaaaatcacaatagagcaactaaagaatatagacagtgagagcaaaaagaatgattcaaacaaaaccgcttttgagctactcaagagaccaggcgtaacatatgagaaaattgtaagcgaaataggccatagagcacactaccaaaaaaacactctcgaagatgaaacaatagatgacttgattcaaacagaggcaaaatatgaaggctatctaaagcgtcaaaaaagagagatcgagaaccaagaaaaatacacaaacttaaagcttccaaaaaacatagattactctagcctcccagggctttcgaacgaggtcagacaaaaactagctgaatttgagccgccaacaattggacacgctgcacaaatacaaggcgttacaccggcatctatctcggtattaatggtgcaccttaaaaaacaacaaattaaaagagcggagggaatgtga

SEQ ID NO: 202115 - DNA, 1057 bp, Unknown
  Bacterial polypeptide expressing nucleotide sequence isolated from the Sargasso Sea
atgaaatttttactagtagctgcaaaaacaggaggtcatgtttttcctgcatctgtaattggggaagagctaattaaaaataatcatgaggttatttttattggtacaggttctgaaattgaaaaaaatgcataccataacctagattctcgactctatgaattatcaatggaagggttccgaggcactaatttaattaagaaattacaagtcctttttcaaacctttatcaatatttttaaagtaattcaaattattaacaaagaaaaaataaatgcaatgattggatttggtggttttatcactgttccagttggcgttgcatgttggataaagagaaaaccaatttttacacatgaacaaaatgctgtaattgggtctgccaataaattattatcaaaaatatctataattaattttcttgggttccctatcaatggatttaataagtctatttattcaggtaaccctataaggaaatcattcattaataatggcgaaaatattattaatgataaaaatgagataaggatttatatcacaggcggtagccaagggtcagaatatataaataagcagctaccaagaatttttaaggatatttcaagtaatataaaaataattcatcaatgcggaaaaaataattttcaagaagtaagcaatatatattctctagaaggcattgatgcagaaatatctgaattttatcaaaatcctgttgagcaaatactgtggtctgattttgtaatatcaagagggggcgccttaagtttatctgaaattacctcacttagacgaggtgttgtaattattccactgccaacctcaatagataatcatcaagttgagaatgcaaaaagtattgaaaaaatagacatgggtataatgcatgaacaaaaagaccatataaataaattacaagaaaaaataagaggtattattgaaaataaaatatatcttaagtggaaggatttagaaaataataaccatatcaactcatccaaaataatagttaaacaattagagaattatctagataaaaatgaaactctttaaa

SEQ ID NO: 202116 - DNA, 580 bp, Unknown
  Bacterial polypeptide expressing nucleotide sequence isolated from the Sargasso Sea
atgttgaaccactctgcaaaaattagattgttcatagatacaacccttaaattaaactcttgtatagagcttactacagagcaatcaagatacctttttgctgttatgcgattagtattacgcagtaaaattcttgttatagacggtagaacgggtgaatatgaggctgaaattatagataagaaagccaaaactggaacaattaaattactttctaaaacgcgtgacattttatatccacctgacctttggttactatttgctccaatcagacctagccgaacaaaaataattgttgaaaaagcgactgaattgggagtgaccgtgataaaacctgtcattactgagcgtactaattatcgtgatttgaatatgaaaaaaatgcgattgattatgagagaggctttagagcagtgtggtggcacttttatcccaaggttagatgagcctaagtatctaggatctgttttagaaagttggccagcagatagatctttggtttattgtgatgaaaagttagcagaggtagataacaaagtagaacatcgagctctatcagtttgtcattcagctgggatat

SEQ ID NO: 202117 - DNA, 1780 bp, Unknown
  Bacterial polypeptide expressing nucleotide sequence isolated from the Sargasso Sea
cttggatcatccaatcaggtcaatcattgtatctttaattgctaccattagtgttggctgtggagttttatcatttatgattgatgatgatatgatgaaacttttgccttcagatcttgattcgaaaattgcttgggatgaaattcaagatgagtttggcagtacagagttaatctatatcgcatttggtgaaaaaggaaaatcggtttttaattctaagacttttgcggatatgtgggatctatcaaaaaccttagaagctactgatcaaattgaagaagtcttttcactggtcaacacaaatcgaattgataatatagatgattttatggaagttgatgatctacagacaaaacgtgatttaacccaagccgaggttgatgatattcaaaattatctattaaaaaacccttcattaaaaaaacgatttattagtgaaaatgatgaatattttgttattactgcacagccttatactaatgaagaatttgatgtattttcaaaaattgtagtggataaatctgataagatacttgatggttatgaaattcattatggaggcaatgcctatatttcaggtattatgcctggactcattcgcgatgatgcatttagcttgatgcgttttgggatgctgatcatgatcttcacattacttttaaatttgagaagtatagctggggttgcgatggttttgatggtaatagttctttctttgttttccatgataggcgcaatggggtggatatattatttcactggatcaaataagttcttgtttaccctagccaacacctcaatgcctattattttgcttacgattgcaaattcagatggagtgcatattgtttcaaagttttttagggaaatgcgttcaaaaaaagatactagaaaagctgtggcgtcaaccatggattccctattagtgccaatttttgtgacgagcgttactacaatctctgcctttctaattatgacaacctctccaatccaaccattaattgggtatggaatatcaatgtcaatcggaataacatgggcctggtttttgagctcactactacttccagctgtaattagcttaaaaacatggaatcctgaagatacggcttttaccaagcctagcttttttgaaaaattagtagataagcttggttcggcagttctaaatcatcccaagcgtgtatttggtacaggaataacgattgtaattattggattatttggagtaaccaaagtcacggtagatgttaatatgcgcaattttttcaaacccggaacggaaatacgcgatagtatggattttatggataatgaaatgaatggcacagttgatatccgtgttcgtgttgagggagacataaaagatccacaaaccctttcaagtatggatgagttgcaatcatttatggttaaagatgaacaggtctcaacaagtttttctattgctgatgttgttaagcagatgcaccgcacagtaatgaacgatgatctcaagtatgaaactatacctgaaaatcgaggtaaagtgaataatctctttacgatgtattctatgtctggtgatcccgatgattttgaagcactggtagattatgaatacaaaattgggttaattacagccttcgcagatgtgatgtctactgaacaaattttttcttatacaaataaattgaatgagcatataaataaaaactttaatgatgattcaaagattgatgtaaccggaatgatcgttgtctttagagatttggtcattctaatcgtacgatcatcattt

SEQ ID NO: 202118 - DNA, 2806 bp, Unknown
  Bacterial polypeptide expressing nucleotide sequence isolated from the Sargasso Sea
atgaatcaagataaaattgttattaaaggtgcaagagagcacaatttaaaaaatataagtcttgaaattccaaaaaataaatttgtagttataactggagtaagtggctcaggtaaatctacattagcatttgatactatttattcagaaggacaacgtaaatacgtagagagcttatcagcttatgcaagacagtttttgcaaatgatgaataaacccgatgtggactcaatcgatggtttatcaccagctatttctatagaacaaaaaactactcaaaaaaatcctagaagtacagtcggaaccgtaactgaaatctatgattatcttagagttttattcgcaagagtaggtacgccctattcgcctacaacaggaaaaccaattaaatctcaatctgttggtgaaatatgtgataacattataaataaaaataaaggtagcaaagcatatattttatcaccaattgttagagacagaaaaggtgagtataaaaaagaaatcgaagaattaaagaaaaaaggatttcaaagacttaaagttgatggaattatttatgaaattgatgaagtaccaaaattaaagaaaaattttaaacacaatatcgatatattagtggatagactagttataaaaaaagatattcaaaaaagattagctgaaagtattgaagtttcacttatgcattcagatggattagtttacttagaaaatttagactctaagaaaatcactacttattcttcaaaatttgcttgcccagtttctggtttttcaattgaagaaattgaacctagattatttagttttaatgcaccaatgggtgcttgtgaagaatgcgatggaataggagtggaaaaatattttgacgataaaaaaatcatccctgatgactcaagatcaattttaaaaggagccattaaaccatgggaaactaaagtatttggttatcaaaaaaaattttttgttgaaacagtctcaaaaatattaaaagtttataagatagatattaatacaccatggtacaaaattcctccagatattcaaaatataattttatatggggatgaagataatagtgttaaatttattagtgattttgaaggaattataaattttattgataggaaatattcagaaactgagagatggtggatacagtatgaattagaaaaatatctctctgaaagaaattgtgaagtttgtaatggatttagattaaataaaaaagctttagcagttaaaatagctggaaatcatataggggaaatcactataaaatctattgatgattgtttaaattggtttaaaaaattaaagaaaaatttatcagataatgaaaataaaattgcagaaggtgtaataaaagaaattaaagataggttagattttttaaacaaagtaggtttagattatttatcactatcaagagctagtaaaagcttatcaggtggagaaagtcaacgaattagacttgcaagtcaaattggttctggattaactggagttttatatgttcttgatgaaccatcaattggattacatcaaaaagataatcaacaattaattaacaccctatttaaacttagagacttaggtaacactgtaattgttgtagagcacgatgaagaagcaattagacaagctgatcatataattgatataggaataaaagctggaattcatggaggtgaagtagtagctgatggaaatttaaaaaaaattcttaaaaataataaaagtttaacagtacaatatttgaaaaaggaaaaaaatatagaaataccaaaaaaaagaagaaaatttaacaaaaataaaatctttactttacaaaaaataaaaacaaacaatcttaataatttggaagtaaaattccctttaagtaactttatctgtgttactggagtttctggaagtggcaaatcatcacttattattgatactctttataaaagattggacgaatattttaataaatcacttaataaagatgaaagttattttaactttagaggaattaaaaatattgataaagttattgatatagatcaatcacctattggaagaacgccaagatcaaatccagcaacttatacaggatgttttacacctattagagattggtatgcaggacttaatgaatctgcagcaagaggatataaaccaggaagattttcttttaatgtcaaaggtggaagatgtgaatcatgtgaaggtgatggagttaaaaaaatagaaatgcattttctagcagatgtttatgttgagtgtgatgtttgcaaaggtaaacgttataatagagaaacacttgaagtaaaatataataataaatctattgctgatattttagatatgacagttgaggaaggttataaatttttttcaaaaattccttcaataaaacaaaaattaaaaacgttaatggaagttggtttggattatataaagataggtcaatcagccactacattgtcaggtggtgaagcacaaagaatcaaactctcaaaagaactctctaaaagatctacaggaaaaacactatatatattagatgagccaacaactggcttacattttgatgatgtaaataaattattaaaaattttacatactttagtagatgagggaaacacagttattgttattgaacacaatttagatgttattaaaacagcagattatataatagatttaggtcctcatggaggtataaaaggtggtcaaattattggaaatgggtcacccgaagatattgcaaatattaaaaaaagctttacaggtaaatttctaaaaaaaattttataat

SEQ ID NO: 202119 - DNA, 403 bp, Unknown
  Bacterial polypeptide expressing nucleotide sequence isolated from the Sargasso Sea
atggatttagagaaaattttacctactaatggtccatctatcgaagaagttaaaaaatatattgaaaaatatttagaagaaataattgtaattaaatgtggtggatcagtacttcttgataaaaatttatttaaacagttcattgaagatgtttcagtaatacataagttaggattatcagtaatagttgttcatggtggtggaaaaaatattaaaaaaaaacttgataaattaaatataaaatcaaagtttattgatggcctgagagttactgatgaaacaactattaaagttgttgaagaagcgcttttagaactaaattctgaaattataaataatttaaaagatcttcaaataaacacggaatctgtagcgcctcaaaataaaaatataattacaatta

SEQ ID NO: 202120 - DNA, 907 bp, Unknown
  Bacterial polypeptide expressing nucleotide sequence isolated from the Sargasso Sea
atgctcactgaaaatcctgaaaaattaatattaaaagcagctaataattggtccattgagataacgccaaatgcttcaaaaaaaattgaagatttttcaactattcttgaaaaaaataccacagtaaatgtaacttttttacctaatactcatatttctgaaacaatagagacatcaaaaaaactctttgaaagtggaatgaaccctgttccacatgtttcagcaagagcaattagagatgtaaaggaattagactattttattaaaaatttatctgaaacttgtaatgtaacggaagtcttagttattgctggaagtggcaaaaagccagttggtgactttcatgaaactatgcaaattcttgaaacgggtgtgcttcaaaattataatataaaaaacataggtgttgcaggtcacccggagggcagtcctgatatagaaaatgatgtgatactggactcgctcaaacgaaaatatgaatggtctaaaaaaaataaaattcccatttacatagagacacaatttttatttgatgctgaaattgtattatcatgggaaaaatttgtcagagaaaatggcataaatgtccctattagagttggtattcctggccccgcaacgattaagacactttttcagtttgctcaatcatctggtgttggtgcttcaatgagaataattgcaaaacaagcaaaaaatatttccaaactattttttgtgcaagcaccagacaaattcattttcgatctttcaaaaggtattcacaataatagaaattgtttaatagacaatttacacttttatccgtttgggggctttaaaaaaactgctgaatgggcaaaagctctagaaagaggtaattttaccttgaattcaaatggtggtttttctattcacgaaagttagt

SEQ ID NO: 202121 - DNA, 346 bp, Unknown
  Bacterial polypeptide expressing nucleotide sequence isolated from the Sargasso Sea
tatgagtgattgtcttttttgtaaaatcgtagctggtgaaattccttgtgataaggtttttgaaaatgaattattaattgctttcagagatatatcgccagtatcaccaactcatattttaattattcctaaaaagcatattagttcattaaatgaattatcagaagaagataggtttttagctggtgagatgcttctttctgctaaaaaaattgcaaaatctgaaaaaattaatttatctggatatagaacagtttttaatacaaatgatgatggaggtcaaacagtatttcatattcatatgcatttaattggtggtcgtaaaatggattggccaccaggttga

SEQ ID NO: 202122 - DNA, 253 bp, Unknown
  Bacterial polypeptide expressing nucleotide sequence isolated from the Sargasso Sea
cctgactggtggtcaagccgcaattaaatcattaaaaaaagaaaaagttaaacatgtttttggcttaataggttctgctacaatggaaatgtttgatgctctttatcatgagaaaaatataaaatttattggtgtccgagatgagagaactggaacgcatatggccgatggatatgcaagagcatctaatcagccaggtataatacttgctggacaaaatggtcctggtgcaacaaatctagttaccgggctg

SEQ ID NO: 202123 - DNA, 655 bp, Unknown
  Bacterial polypeptide expressing nucleotide sequence isolated from the Sargasso Sea
ctgtcaaatcaatttactcattcacaaagttttaatgatttttcaaatgtaaatttttcggagttaagtgatggagaaattgatttattcttaagaagagcaactgcacaaggatatactcaatttgatttattaaaaatggcaaaagctcaagggtttactcaagctgatatagaaaatttagataaaagatttaaatcagctcaaacaatagcaagaatagcagaaagtgctactactcctcttgaagaaacgaggttaaggaagcagtggcttcaaaatcttgaagtttttagagaaactgatagtgatgtgttcggatacaatgttttcagaggaactagctttttaagttttcagtcaaacttgaatttacctacaccagatgattatattgttggtgctggagataagctatttatcgatatatatggtcaatctgaagcatattatcaggctgagatatcacctgagggatatgcaatactcgaaaatattggccctgttaatgtcaatggattgactattaaagatgcaagaacaagattaattcaaagatttaagagagtctataatggaattgatcaaaataaaacatttatcaatgtttctgttggaatacctagagctattagaataaatataaactggtgaa

SEQ ID NO: 202124 - DNA, 1324 bp, Unknown
  Bacterial polypeptide expressing nucleotide sequence isolated from the Sargasso Sea
atggaaaaaatatttaataaactttgtgaaggtctcttttcagagctagaaagtaatgaagcattaactttatccttttcaggagaaaatagccaatttatacgtataaataatgcctctattaggcagacaggtttagtagatgatgcaactctgggtttaaagtttgtttctaatagttgcacatgcgaaggaagtatgacagtttcaggcgattatgaagtagacttatctagaggaatgaaggaactagagcgtatgcgatttgagtcaaatgagatcttagaagatccattcttagttatgcctactaattctggatcatctcgtgaaataataaatgcgaacgggctttcatttgatgatgctattcaagccttaattccctcaatgcaaggagttgatttagtaggtatctttgctaatggtaaaatgtatcgaggcaatgcaaattctcttggtcagaagcattggtttgagacagaatcccattgtttagattattctttggttaccccagagcgtcaaatggtaaaagggacttacgctggaacagattgggatcaaaattcttatgaatcatatattcatctttcaattgaaaaattagaactaatgaaaagaaagccagtgcgtgttgatacaggtatgtaccgaacatggtttgagccaaaagctgttgctgattttatcgatatgttttcttggaatggaattagtgaagcaagcttgcagcaagggtgtagtggttttggaaaaatgagacataatgatgtacgtttatcaccaaaatttacaatttcagaagatttttcttcaggtatggtgccaaagttcaattctaacggtgaaactggaccagaatctttacctattatatcaaatggggttttacagaataccttagttagttcaagaacttctgctgaatatggggtatcgtcaaactatgctgaagatacagaagaattgcgttcaccttctatggcttcaggtgacttaactcaagaagatgtattaagcaggctagataagggtttatttctatctaatatccattatcttaattggagtgataatcccggtggaagaatcactggattaacacgatatgcatgtttttgggtagaaagtggtgaaatagttgcacctattgagacgatgagatttgatgatacattttatcggttctttggatctgagttagaatctgttggttctagagtagaggtgataccagatgtgcttacatacggtcaacgcaaccttggggtggtaacttgtccaggtattttaacgaatcaatttcaactaacactttaat

SEQ ID NO: 202125 - DNA, 796 bp, Unknown
  Bacterial polypeptide expressing nucleotide sequence isolated from the Sargasso Sea
tatgatatatctaatttcagcaatagtattactgggcgttcttattgccatccatgaatttgggcatttcattgttggcaggatgtgtaatatacacatctatcgtttttcgataggcatgggcccagttatttataaaaaactcgacaaacatggaacagaatttgcactctctgcgcttccgctgggtggatatgtggcattccatacagaaaaagctacagagggagaattagatcttcagcagcctttaactcctgagcaaaatgagaatacttttgaaagcaagcctaagtggcaaagggcacttgtcatgctagcaggcccagctgccaattttattcttgctataggaattttatctataatttttgttaattctgtcgaacgtcaatttatccctgaggtgtctaacatttcttccccatacctaaagagcaattcatcacttaaggcaggagatatcttgacttcaatcaatgaaaagaaggtttctagccttcaagatattaggctggagttgctttcattgtcaggaacaaatggaagcattaatttcaatttcataactggtccacgtgcatctgaatatacggtatcagtcccggtagaaaattacctttcagatccagatgagcaaaatgctccagaaaattttatgggttttgacctatccatgaagttacaaccaactgtaggtatgatagcaaaaaatactgaagcagctaaaagtgaattaatggtcaatgatcgcattttggctgtgaacagccagtctattaagtcatttgaagat

SEQ ID NO: 202126 - DNA, 1144 bp, Unknown
  Bacterial polypeptide expressing nucleotide sequence isolated from the Sargasso Sea
atgaagaatatatactcaacttttttaataattcttttatcattaagtatttctaaatatgcgtattctacaaacgatgatgatatttataaaaaaattgatttgtttagtgaagtattagacaaaattaataaggagtatgttgaagatattaatcaaagcgaagttatggatgctgcaattaatggcgtattacaatcattggacccgtattctgcttatatgtcccctgaatcttttgaaaacatgcaaacagagacaagtggagaatttggaggactaggtattgaggttagtatggaagctggtgtagtaaaagtaatttcccccatagatggatctcctgctgatgaagttggcgttaaggctggagactacattgtaaaaattaatgaacatcaagttcaaggaaaaactttaacagaggctgttgatcttatgagaggtccagtaggttcagatattgaaataactgttagaagaaaaggagttaaaaaagcaatagtttttaaaataactagagaaattataaaaatacaatccgttaaatcaaaaaaaattaatgataatattggatatataagattaacagcttttaatgaaaacagcagtacccaaattaagaaaaaaataaatgagtttactaaagataaaaaaattaaaggatatattttggatctgagaaataatcctggaggactattatcacaagcaattaaaatttcagatttctttttaacaaatggagaaatagtatctacaaaatcaagaaaagaatcagaaaatagaagatggtttgcaaataaaggagatattattaatggcaaagtactaatagtattaattaattacggatctgcgtccgcttctgaaatagtggctggagctctcaaagataacaaaagagccattctgttaggagaaaatacctatggtaaaggatctgtacaatcaataatacatttaaaaaataatggcgctataagactaacaatttcaaaatactatctaccttctgggaaatcaatttcagaagttggaattacaccagatatagaagttgcagaaagtgatgatgaatttcgaataaatacagaaaaagataaccagcttaattttgcaattaaactactaaatgggtaac

SEQ ID NO: 202127 - DNA, 1495 bp, Unknown
  Bacterial polypeptide expressing nucleotide sequence isolated from the Sargasso Sea
gatgcttcgcagcaaagagcgtttcattaacgaaatcacccacgaacttcgcaccccaattcagctcatcaatggatcgttagaaggcatatccaaaacagctcatgcagcgagcaaagaactgatatgtgttcaggacaatatgaaaagggtcgaacagttgattaatcaaatgagtcaagatgtccctaaagccttggctgctgccgactactacaggtcctactcgccagacaacataaaattcatcgtcctatcgctagagccattagccaagcagaaacggcagaatttagaattacgtattaaagggaaaaaagaaatatcgctcattaacgacagcttagagaaaatcctggcaaatctaattcaaaatgcaattaagttcacaccagaacttggcacaataaaagtagccgctatacaagatagtaaagtgcttaaagttatcgttagtgatgacggagaagggattgatgagcactttcacaaaaaagtattcgagcgattcactaaagggagcagtgagcatgaaggtcatggtgttggcttagcaatggtgaaaaccttagttgaactgaaccagggcgaaattgcgttagagagtcaaaaaggcattggaactaaagttaccgtaacgttacccattgatgatattgagtatgtaaattcgcatgctgaaaaattgtcacccgcaaatgtcaaatcgaacaagaaatcactattaatagttgatgacagcagagagttccgctcttatctatttgatttgttttctagcaaatatcgctgtttagttgcgcgaaatggtgtgcaggcgttagacgttatgcagcattaccttgtcgatctagttatcacagatcaaatgatgcacgaaatggacgggctgagtttaataagagaaattcgcggtaatgtcagctatgccagtattcccatattgatgttaactgcggaaaccggaactgaattagaaaaatcagcgctagaagagaaagtggactacttcttggcaaaacctgcatcaaaagaggaaattactcttagggttgagcatttattgtcggtcagagaggcaaaagagcgcgaggaagaggaaagcgaagagcctgcatttaaatttggatgcttgaaaatccccgagtttgataacgaaaaggatatggcgttctttttgaactttatcgcagtattggaaaagaattaccacaatgaatcattcaatagagaccaagctgcctcgcagttattgataagtcctagaagtttgaaccgaagaatgtcagagttgtttgaatacaacttcagcgagtttctttcacgcttcagaatcgaaaagtctattccgttactgttagagggaaatagcattctagatacctgcctagacgttggcttcggcaccgcagcttatttttcgacgtcctttaaaaaggttatgagcttaccgcccaaaaagtttgtggagcaatacaataaaacagtagcgtaa

SEQ ID NO: 202128 - DNA, 865 bp, Unknown
  Bacterial polypeptide expressing nucleotide sequence isolated from the Sargasso Sea
cttgaccggtggtcaagcggcagtgaaatctctaaaaaaagaaaaagttaaacatgtctttggtttaattggttcagcaaccatggaaatgtttgatgcgttgtatcatgaaaaaaaaattaaatttatcggtgtaagagacgaaagaactggaacacatatggcagatggatatgcaagagcttctaatcaaccaggtgtaataattgctggtcaaaacggtcccggagcaactaatctcgttacaggcatagcgcaagcaaaagcagcattttctcctgtggtatctattgcaggtttatattctactaaagacaagatggaagatgcctttcaaggacttgatcaacaatcgctttttgatcctataacaaaaaaaacttggacagtaaaaaaggcaagtcatataccaatggcttttagagatgcatttaatcttgcaatgtcgcctcgaagaggaccagtttgtataaatcttccaagaaatgttctttctgatactgcaaagtttaagattaatgaatataaaaaatcctataaaactgaaagtgacttaaaaagtaaaaagaattcaattgacagaactgtaaaacttattctcaactcaaaaaaaactgtgattgttgctggaggaggaataaaatataattcaaaatttaagtctgtaacaaagcttgctgaatttttaaatattccaattgtaactgcagcaggacatggagatgcgattccattcagtcataagttaaatgcaggacaaatggggcctagaggaaatattgttgcatcaagattagtcaaagaagcagagctaattattgcaattggtacaagacttggtttcaattccactttctattcgtat

SEQ ID NO: 202129 - DNA, 562 bp, Unknown
  Bacterial polypeptide expressing nucleotide sequence isolated from the Sargasso Sea
tttgaaaattttaaaagaaactaaagctttaatagacgggcattttatattgtcgtctgggttacatagtcctagatacgttcaatgtgctcaattactaagcaaaccacaaaaagcttttaaactatgcaattctttagcagaaaaaataaaagaatctttcaaggattttgatttgattttatcaccagcaatggggggagtaattattggttatgagataggaaaaattttaaacaaggaaacaatattttctgagagaataaatggtaattttactttaagaagaggtttttctattaaaaataatcaaaaggttttaattgttgaagatgttatcactactggaaaatccagtttagaatgttcaaaattgattattgggtctggagctgaggtagcaggctactcttgcataatagatcggacaaatggaaattctattttaaaagaaaaaatagtttctcaaataaaactaaatataccaacttttacaaaagataatttacctgaaaatctatcttctattgaagctattaaacctggtagtagaaatctttaa

SEQ ID NO: 202130 - DNA, 1564 bp, Unknown
  Bacterial polypeptide expressing nucleotide sequence isolated from the Sargasso Sea
aatgaagatagacatatttgatacgacacttagagatgggtttcaacaggagggaatctccccatcagtaaaggataaattagctattgccaagttaattgacgagttgggtgttgattatattgaaggtggatggcctggagcatcacctaaggaaaaagagttttttgataaagcaaaaaaagatttaaagcttgagaatgcaaaattagttagttttggttctacaagaaaattaaatgtaaaagttgaagacgatccacaagtacaggcacttattgattccgaaacagagtatgtctgcattgtaggtaaatcatccaatctccacattacaaaagctttggagactgatgtagacagtgcgattctaatggctacagacaccgttaaatatctaaaagataatggacgaaaagtattttttgatgcagaacatttctttgatggtttgaaagaggattcagatactactttgaaaattttagatgcagtagtaaaagagggcgttgattgttttatattttgtgacactaatggaggaacacttcctcatgaggtcacggatcttttaacaccaattgtggaaaagtaccccgatcaatcatttggcgttcactttcaaaatgacaatggatgtgcagttacaaactctctggctgcagtaaaccttggtgtggaacatgttcaagggactatgaatggttatggcgagcgtactggtaatgcagatctttgtacccttattcctaacctctctttaaaaatggactttgagacagtgcctgaagagtcacttgcaaaactaactcctatagcaaatcacattgcggaattagtaaatatcgctattgactcaagacatccttatgtaggttcatcagccttcacacataaggcaggacttcatgcttctggtatgtcaaaagacaatactctctatgagcacataaatgctagtcaggtaggaaactacacaagaactactgtctctgagttagctggaagagcaagtgtaattactaaagcaaaagaatttggaatagaacttacaaatgatgatgcaaaaaatcttattgagcaagtacaagatctcgaatatcaagggtttcagtttgaggctgctgatggttctctatatttattaatgaaaaagatcaaaggagaagagccatctttttttgattttgaaagcttcagagtgtattcggaaagaagaaactctgaaaatgttgtttcagaagctgtttgtaaaatatctgtaggtgaagaaagattcgtaacaacaggagagggagttggtcctgtcgatgctttaaataaagctttgaaatctgccttgaataagaactatccggatgtagacaagattaaattaactgactataaagtgagaatcattgactcttcagatggaactgaggcaagaacaagagtccttgttgaatttacagatggggagataaattggagcactattggtgttcacgaaaatataattaatgcatcttggaatgctttatgtgatggctttaattattattttatggaaagttcatcataa

SEQ ID NO: 202131 - DNA, 1303 bp, Unknown
  Bacterial polypeptide expressing nucleotide sequence isolated from the Sargasso Sea
ctacgtccagaacaattcatctttgatgttctaacatttacactggctactggtgaagaggaatttcgtgatgcaggtaaacacactttggaaggaatcaagcttgtcaaagaaagatttccaacatcatttaccactcttggattaagtaacattagttttggtcttgttccacaagccagacgtgtattaaattcagtatttttgtatcatgctgtacaaaatggtcttgacagtgcaattgtaaatgcacgtgaaatcactccttatactgaaattgatgaaaaagaaaagaagatagttgaagatttgattttcaataaacatccaaatgccttatctgatttaatcactcactttgaaaatgtcagccaagattcatcatcaaagaccaagaaggttgatgttgatccaacatgggctgcaggtaaacgtgcaaatttccgaatcatcaatcgtcttaaagatggaatcgaaaatgatgtcgtatctgcaattgctgaaaaattagaacagcaaaacctggtacaagacaatgatggtattttatcaattaacgctgaaaaagaggttacgcatcaaggtgccattcaaacactaaatgatgatttacttcctgccatgaagattgttggtgataagtttggtgcaggagaattaattctcccatttgtactaaaatctgcagaatgcatgaaagctgctgttaaggaattagaaaaatattttctaaaagaagagggtaccagtaaaggtattctagttttaggaactgtatatggtgacgttcacgatattggaaaaaatttggtaaaaacaatctttgaaaataatgggtatactgttcatgatttaggaaaacaggtacctttacaaaaatttgtagaaaaaatcaatgaagtcaaacctgacgctgttgggttatctgcactacttgtatcgacatcaaaacagatgcaattttttgttgaacatgcaagaaaaactgatgtcaatattccaatattatgtggcggtgctgctataaacagcaattacattaatcgaattgcaaaacaagatggaatctatgaacctggaatgttttactgtggtaccatgttcgatggtcttaaaacaatggataagctagtttctgaagaaaaagacgaatttgtaaataattggaaagataaattatcaaactggaaagaaagcaaagttcaacaagttgaatccgagaatctccctcatagtggcatcaaacctgtttctccacctacaccgccaaaactaaatgaagtaattagattaaaaccctgaa

SEQ ID NO: 202132 - DNA, 985 bp, Unknown
  Bacterial polypeptide expressing nucleotide sequence isolated from the Sargasso Sea
atggcgaatgccattcgcgaatcatctattcgtggaatacgtgatgttgttgtatcgcctgaccgcgtcacggtgctttataaccccctgcttatcgattgcctccgtaccttcgaagccagagtacatgctgcactgacgcagccgcagtctccaccgactagcggaaggcttcatgacgtgccggttcggtacggcggagagtccggccctgatttcgacgcagtctgccgcgctcatgcgattgacaccaaaacacttattcagttgcatacagaaccggaatatgtggtgactgcgatcggttttgtaccgggctttccataccttgaaggccttccaaagacactcgaaacacctcgtcttcccacacctcgacggcgtgttcctgctgggtccgtgggtattggaggcagccagaccggcgtataccctttcgaaacccctggtggctggcatctgatcggacgaacagataccactttcttcgatccgatacattcgcctcctgcccttttgcagcctggtgatcgagtccgtttttatgaaacgaaccatgtgaatccgacacccaaccacgcaactattgctgaaccaagagggacgacgccaaactatattacgatcctcgaaccgggactcatgacaaccgtacaggatcttggccgcagcggatttcgttcttctggcgttccgtctagcggcgctgcagatagagtttctgccatactcgcaaatagtattctcggcaatcccgagaatgcggcagtgcttgagtacacgctcctcggacccacagtgcaatttaaaacagattgtttcatcgcgattgctggtgccacagacaattcactcgctacattacggccaatccatgtccgacgtggtgacaccttgcaccttggtcatgtagcaaagggatgccgaggctacctcgctgtggctggaggtttctgtgtgcctcccgttctgaatagctgtagca

SEQ ID NO: 202133 - DNA, 553 bp, Unknown
  Bacterial polypeptide expressing nucleotide sequence isolated from the Sargasso Sea
atgagcaaacaaataacgattggatctagaggtagtaaattagcattactctacgcccaaaaaactaaagaaagtattataaaaaatactaatttaggtaataaagatatttttattaaaaaaattaccactaaaggtgatcagatacaggatataagattatctgaggttggtggtaaaggtttattttcaagtaatatagaaaaagaacttcaagataaaaatattgatatagcagttcatgcattgaaagatttaccagcaattgaaacaaaaggattaataaccgatacatttttaaaaagaaatgatccaagagaaattttaatttctacaagtaaaaaaaaacttaaagaattaaatctgaattcaattgtgggaacttcttcgtatagaagagagtttcaaataaaaaaaataagaccagatgttaattgcaaaattattagaggtaatgttgacactagaataaaaaaattaaaagaaggtatatatgatgcaataattttatcttatgcaggaataaaacatttagaatatgaaaatgaaattt

SEQ ID NO: 202134 - DNA, 1228 bp, Unknown
  Bacterial polypeptide expressing nucleotide sequence isolated from the Sargasso Sea
attgaaaacagttcatttcataagacatggtgaaactgagaagaatgcactaaaagtttggcaaggacacactgacacacctttaaataaaaaagggttacaacaagccaaattattatctgaaaggataaacagtagagtcacgaaagttttctcttctgatttaaaaagagcgtctcaaacagcctcatttttgtctagttctccagttcttagagataatcttagagagattaatgtcggcgactttacaggaatgtctgtgaaagacacctacacttcaaatcatgaaatttttcaatccctccaaaatgactcttttcaatttcctaatggtgagtcggtacaagaatttaaagacagagttaggaacgagttagaatacatttttgatcagacagaagaagattcagaaactgttgttgttacacatggattttttataggcactgccataggtttgacattagggtttaacacatatccttttccaataggagatattacaaatgcttcaatttcaacaattgtgaaaagagaaacagttacacaagtaaataaatttaatgattcaattcatttgagcaaagagaatatagattttccagctaaatctaaagataatgcaataacgtttatcagacatgggcagactgattcaaatttagaaggcatttggcaaggtcatatagacaaccctttgaatgaaacgggaataaaagaggcgagtcttttaaaaggtttatttaaaaattatgatctttatatttcctctccatacaaaagagcaaaccaaactctttccttaatcaccgaaaacaatattgaaatttctgacgagttaaccgagatgaatctgggccagtgggaaggcttaacgacttctgagatactaaataagtatcaagaaaactttatagaagcattatttataaatcataaaactaaatacggcattgatggagagtcaatacatgaagcaggaaaaagagttgaaaatcttataagcgatcttgaaaagaaaaagttattaatggcaagccatggaggaactattaaatcagcaattacaaatttaataaaatctccagattcaaaagcagcatcagcattcacgattccaaataatcttggagtttcttgtatggtacctaaagataacaaatattttctttggtcttataatgtaggaaaaataggatatgaaaacattagttataacaaatga

SEQ ID NO: 202135 - DNA, 916 bp, Unknown
  Bacterial polypeptide expressing nucleotide sequence isolated from the Sargasso Sea
ctgaaatggctaaggcctgacgtcatctcgatgacggagcgcgtagcacgtagtggccatatcggcagcattctctggcttaccggcctctccgacgcgggcaaatccacactggccttcgagcttgagcggccgctgttcagtctcggttacagcacggtggtgctcgactgggataaattgcgcgggagcctgagtagcgatcttgtggtctcgaaagaagatagttcccagggcgtcaggcgactcgccgccagagccaacctgttcgctgccataggcacgatagccatcgtctcgcttatctcccccttcgccgaggggcgcgcgaaagcacgtggaaatgccagtgtgccgtttcgcgagctgtttgtacgcgcaacttcgggcgggtgcagccgccgaaaccccaaaggtttcgatgcacgggtcgcctcaggcgcgattcagcggttcaccgaaatcgcgtctccctacgagccaccggaatgccaggatccaattatcgacacgtgcgcggcgccggtgactgaatgcgcgaatcacttattcgatttcgtctgcaacgccgtaccgattcggctggcttcccccaatacccgccccagcaaagtcttcgtttcaagtctaaaaaatcaatgttcattctatttggctcaccccgctccggcacaacgctatacaaagagtccctcaatctgcacagcggcatcttcgtgccgtaccagacgacgtttatcagcccgattgctcatatcatcggctgcatcagtgattgggaaaaggcgcgcagaatcattgcgaatgtcatcacttcaaccgacgactatgcagaagttctgcagccttatatcagtccaatggaggtgcaagaagtactcgaattggcagagccgacactggccggcgtgctgaa

SEQ ID NO: 202136 - DNA, 915 bp, Unknown
  Bacterial polypeptide expressing nucleotide sequence isolated from the Sargasso Sea
catgaacctctttagggatctctccaagaaaatcagagtctgggactcctcggtaggtcaatttgaagagcttgcagcaaaacagcttcaagatgttgcatcacttcctgttgtcgaaggtgtccgtgcgatgccagattcccattgggggcttggagcctgcgtcggttccgtgatcgccctaaaaaaggcggttattcctgcagcggtgggagtcgatatcgggtgtgggatgctggcctgtaaaaccagcctcaattctcatcatcttcctgaaaatctcaagtccttgcgcgcaaaaatcgaatcccatgttccccatggaaagacactggcaaagaaaaaaagcaaggatcatggttcctgggattctcagaaaattcctgcccatgtggaaaaacagaaaaagaagattgaaggatggtttgactgttaccgcctcgactgtggtggaatttcaaagtggctcaatcgccgacatccgatcacccacctcggtactctcgggaccgggaaccatttcattgaactctgtctggatgaaaaggaccatgtatggatcatgcttcattcgggttctagaggaatcggaaactcggtgggaacccatttcatcaacaaggccaaggaagaaatgggggaccggttgggggctctgcccaacaaagattgtgcatacctgaccaacaatcagaaaaccttcaaagattactgcagggcggtttccatctgtcaacaatacgcacaattgaatcgggagatgatgctgacctcagtggtggagcagatgggcagagccttcaagaacttctccctgacggaatccgtcattgactgtcatcacaattacatcgattttcattatgctaaggatctcatcatcaccagaaaaggtgcggtctcggcaaaaaaaga

SEQ ID NO: 202137 - DNA, 832 bp, Unknown
  Bacterial polypeptide expressing nucleotide sequence isolated from the Sargasso Sea
cctgactggcggtcaagccgcaattaaatctctaaaaaaagaaaaagttaaacatgtttttggtttaattggttcggctacaatggaaatgtttgatgctctttatcatgaaaaaaatataaaatttattggtgtacgtgatgaaagaactggcacgcatatggcagatggatatgcaagagcatcaaatcaaccaggtattatacttgctggacaaaacggtcctggtgcaacaaatttagtaactgggcttgcgcaggctaaggcagctttttctcctgttgtttcaatcgccggttcttactctacaaaagataaagtggaagatgcttttcagggtcttgaccaacaatctttatttaaaccagtaacaaaaaaaacttggactgtaaaaaatgctaaaaaaattccaaagactttcagtgatgcttttaaaatagcaatgttacccagaagggggcctgtatgtattaatttgccaagaaatatcttggcagataaagaaaattttaaaataaataataaaaatcaatcttttgataatcaaaactcaactaaagcaaaatcaaattatataaaaaaagctgtaaaaattataaggaattcaaacaagattgttattatagctggcggtgggattaaaaattcatcaaaatttaaaaatgtagttaaattggctgaattgttaaacgttccaatagtaactgcagctggtcatggagatgctataccatttaatcataaactaaatgctggacaaatgggtccaagaggtaatcctgttgctaccaaattagttaaagaagctggtgttataattgcacttggaacc

SEQ ID NO: 202138 - DNA, 811 bp, Unknown
  Bacterial polypeptide expressing nucleotide sequence isolated from the Sargasso Sea
tattttaattaaatcaattacaactaaaggtgacgaagtgcaggatataagattatcagagcttggtggtaaaggtttgttttctagtaatattgaaaaagaacttttgttaaaaaatattgatattgcagtccatgcattgaaagatatgcctgctaatgaaacaaaaggattaacaacagacactttccttgaaagaaatgaccctagagagattttaatctcaaacaataaaaaaaaacttaaagacttagatcaaaagtctattgttggaacctcatcatacagaagagaatttcaaataaaaaaaattagacatgatctaaactgtaaattaattagaggaaatgtagatactagaataagaaaactgaatgaaggaatgtatgatgcaattatattatcatacgcaggtatcaaatttttaaaatttgaaaatgaaatctcagaaattttttctgctgaagaaataattcctagcgcaggacaaggtataattgctctacagtgcagggataatgatgaagagacaatttctattctaaataaaattaaccatgaggaaacacataaaagagctcaccttgagagaaatattttaaaagttttagatggagattgtgaaacagcaattggtgctcattcagtagttgatggagataagattatagtggaggccgaacttttttctttagatggtaaacaaaggttttatgaaaaaaaaattggttatttgaatgaatttaaagaaattggtaaagagattggaatacttttaaaaactaaatcaaataattcatataaaagatag

SEQ ID NO: 202139 - DNA, 463 bp, Unknown
  Bacterial polypeptide expressing nucleotide sequence isolated from the Sargasso Sea
aatgaaaaaagtaacattacaaataaatggtaaaaaggttacaagggaaatttcagatcatataacgttatcaggtttattaagagatattttaaatttaacaggtacacacattggctgtgatacaagtcaatgcggagcttgtgtagttcatgtagacggaaaatctataaagagttgcactgctttagcagctgatcttgatggtgcaaaaattacaacaattgaaggcctagtttcaaatggcaaattacatccaatgcaagaagcatttaaaaaaatgcatggattgcaatgtggattctgtactcctggtatgatcatgagtgcagttgatcttttaaaaaataaaaaaaatccaagtgatcaagaaataagagactggctagagggtaatatctgcagatgtacaggatatcataatattgttgcagcagttaaggaagctgcatctaaaatgtag

SEQ ID NO: 202140 - DNA, 607 bp, Unknown
  Bacterial polypeptide expressing nucleotide sequence isolated from the Sargasso Sea
ttttgaaattataaaaatatttactgaagttattatagcgcctgatgtaagtgatgaagctaaggaagtttttaaatcaaaaaataatttacgagttttgactttatcatcaatacaaaaaaataataattctcaaaactacaaaagtattgaaggaggaattttatttcaatcaaatgacgaagcaaatacaactaaatctgatctaaaagtagtcacagaaaaaaaaccaagtgaaaatgaaatcgaagatatgttgtttgcatttaaagtttgcaaacatgtaaagtcaaatgcgattatctatgtcaaaaataaaaaaacaattggcattggtgctggacaaatgagcagagttgatagtgctaaaattgcctcacaaaaaaatagtgaaatggaaaagtctgaagaaaactcgcttgaaaattcagtggttgcatcggatgcattttttccgtttgctgatggactgcttgttacaatttcatctggagcaaaagcagttattcaacctgggggctctgttaaagatgatgaggtaattgaagctgcaaataaagcaggtatttcaatggtatttactggtgtaagacacttcagacactaa

SEQ ID NO: 202141 - DNA, 3052 bp, Unknown
  Bacterial polypeptide expressing nucleotide sequence isolated from the Sargasso Sea
aatgcaattcgaaaattatcgtcctcgtccgccacaacccgaacctaaggctaagcgtcagcgcaagccaagatctaaggggcgtgtctggttcctgttttttattctgattatctgtgtggcggtgttgattggccaggaggtcaaaacctcttatttccagtctaagtatgttcatcaatatgcgaagaccttgacctatgagctgaaaaatcagcccactcagtcaattatctatccaagctacggccccttcgatgagcgtcacggctacagtaagctgccacaatatatcgatagattgctgcaacgtaacttccaggtaacgcagcaagtcgagttttcccccgcgctgcaggaatatgcccagatgggctttttcccgccttaccatgagaaagcgcaatcgggtttgaccctgctagattgtcgcaataccgatctctatgagtttgcttatcctaaacgtgtgtatcaggatgacgataaaatccccaatgaaatcgtcaataccttactgtttattgaaaaccgcgagctgtggactacagaacccaaactgaatcctgtgatcgactggccaaggtttattgtggcggggatgagtcaaatcgctgaaatggtggggatgaatgtgtctaccgccggtggcagtactctggcgacgcaaattgagaagttccgccattcctcccaaggcttaaccttaagcattaaggataagctgctgcaaattggctcggccacagtgcgcgtttatcagcagggggaaattaccgagcctgcccgtaagcggattattcaagattatttaaacacagtgcctttatcctcagcgcctaaccacggtgaagtgcatggcataggcgatggcctatgggcgtggtttggtaccgatttcgataccgccaataaactgcttgcttcgccgcaaatcaaagccaatgccgttaagcgtggccaagtgttccgtcaagtggtggccttgatgattgcccagcgccgtccttcctattatttgttacagggacatgaggatttagaaaatctggtcgacagccatattcgtttactcggccaatactatttgattgaccgccaacttagagacgcagcgcttgctcaaaaactgcagtttaaggtggctaaagcccaacgtaatacccagtcgggagcggataagggcgttaatacgatacgcattcgtactgcgggcatgttaaatgtcggcctgtatgatttggaccgcctcgatttgaccgtaaacagcagcttgcacagcgacttacaacagcaggtgagtcattacttacgcagtcttgggcaagccgctacggccgagaaggtcggtctcttaggtgagcgcttactcgaacccagccaactgcaaaacgtgctctacagttttaccctctatgaaaaaaccgagacggcgaaccgtgtgcgggtgcaaaccgacagtaccgatcaacccttcgatattaacgaaggcagtaagttagagctgggctcgacggccaaactcagggtgctcgcaacataccttgagatcattgccgaaatccacgacaaatactcgaagaaacatggtattgagttggagtcgattgagattgaaccccgagatcatctgacgcgctgggcgattgattacttgattgtgaatccggatagacgcctcgaccgcatgctcgatgcggcgttgcagcgggaatactcagcctcaccgaacgagcaattcttcacgggtggcggtttacatgtgtttaataactttaaaaaatcagaagattttaaagtgccaaccatgtatgaggcgctgcaaaactccatcaacttacccttcgttcgtttgatgcgtgacatagtcaactacagcagtagtatgcaaaacgaaggcaacatggcgcgtctactgcgcaacgataaggatccacgccgcgaggaatatttacgggtgtttgctgatcgcgaaggtaataccttcgtcaataagttctaccgtaaatataagaaagtggcgcccaatgagcgtttagagctattcttcgatggccaaccccaagcagagcagcagctcaccgcggcttatcgttatttgcagcctaatgagtctatggcctcgtttaaggccttcttgcagcagcgtttgccgcaaaacaattacacagataagcgcattaaagagctgtataacaagtacggccctgaaaaatataatctgcctgaccaaggttatatcgcgcgggtgcatccactcgagctatgggtgctcgattacttgaatcaacaccccgaggccaaccttaacgatgtgaaagaggccagtaaggatgagcgccaagaagtttaccgttggttgtttagaacgcgtcataaaaacgcgcgggatgtgcgggtacaggtaatgctggaggtggaagctttcctcgacattcatcaacgttgggcgcgtttgggctatccctttgaatctatggtgccttctttgggctctgcgctcggcagttcgggggacagacccgcggcgctggcggagttgatggggattatccaaaacgatggttatcgtttacctacggtgcggattaatcaactgcactttgctgaagagacgccctatgaagttcggctcgaaaaccaaaatactcaaggtgaacgagtgatgcgccatgaagtcgcccaagccttaaaggcggcgctggcaaatgtggttcaaaacggtactgcacgacgtcttaaaggcatctttaccgacgacaacggcgagatgctggcaattggcggtaaaacggggacgggcgataaccgtatcgtgactcagatgcagcagggccgcaaagtggctaccacggcgatgaaccgtaccgcgacgttcgtgttttacttaggcgataattatttcggcaccttaactgcgtttgtaccgggcagtaagtcggacgattttagttttacctcggcgctgccattacaagtgatgaagggcatgatgccaattctcgcgccctatgtgaaatcctcgaagggcatgtgtgtgcgggatgagtaa

SEQ ID NO: 202142 - DNA, 640 bp, Unknown
  Bacterial polypeptide expressing nucleotide sequence isolated from the Sargasso Sea
atgaaaaaaagaataatcattggatctagaggtagtaagttagcattactttatgctcaaaaagctaaaaataaaattatacaaaatacgaatttaagtgaggaagatattattattaaaaaaataataactaaaggtgatcaagctcaggatactagattatctgaaataggaggaaaaggtttattttcatctaatattgaaaaagaacttcagattaataacattgatatagctgttcatgctcttaaagatatgcctgctattgaaacgaaaggacttagaactgatacatttctagaaagaaatgatccaagagaaattttgataactaaagacaaaataaaacttaaagaacttaaatcaaaatcgataattggaacatcttcatacagaagagaatttcaaataaaaaaaattagaccagattttatttgtaaacttattagaggtaatgttgatactagaataaaaaaattaaaagagggattatatgatgcaataattttatcttatgctggaataaaaaatttaaaacttgaaagtgaaatttctgaaatatttacaactgaagaaataattcctagtgctgggcaaggaattatagcattacaaaaagagatagtgatgatgaaataat

SEQ ID NO: 202143 - DNA, 1240 bp, Unknown
  Bacterial polypeptide expressing nucleotide sequence isolated from the Sargasso Sea
aatgaaacgactcgctattccgcttcagggcgcacaaatgctgtttgttgcatttggcgccctagtgctaatgccgctactcacggggcttgataccagtgtcgccctgtttactgcgggtattggtacgctattatttcagttgatcacgaaacgccaagtccctatcttcctcgcctcctccttcgcttttattgctccaattctgtatggagtacaaacctgggggatcccatcaaccatgggcggcatcattgccgcgggtctagtgtatgtgctccttggggcactcgttaaagtgcgcggcaccgactttatccatcgactgcttccacctgtggtggttggcccagtgattattatcattggtctaggtttagcgcctgtggcggtgaatatggcactgggtaaaagtggagatggcagtttaacgctcgtccccaccaatacggctttgattatttccctcgcctcactctgtactaccatagctgtggctatttttgccaagggcttacttaaagtcatgccgattctggcggggattgtggtgggttatggcctaagtcttgcctttggtatcgtggattttgcagtggttaccgcggcaagctggattgctattccgaaatttgtcgcgcccgaatttaactggcatgccatcgcctttatgatcccagttgcgattgcgcctgcggttgaacatattggtgatattctggcgatttctaacgtcacgggtaaagactttatgaaaaaacccggcctgcatcgtaccttaaccggtgacggcgtcgcgacaattgccgcagcagccttcggcggtccgccaaacacgacttattctgaagtgacaggcgctgtgactttaacccgtaacttcgaccccaaaatcatgacgtggacggcaattaccgccattaccttagccttcgtgggtaagttaggcgccctgatgcaaaccattcccgtccctgtgatgggcggcatcatgtgtttgctctttggctctatcgccgcggtgggcttaaataccctaatccgtaatcacgtggatttatccgagccacgtaacttaagcattgtcggcgtgaccctggtatttggtatcggcggtatggcctttggcatcggctccttcagcctcacgggcatcagcctttgtggtattgtggccatcaccatgaatctgttgttacccgcgagcaaacaccacgagcgtgacgctgcctcgcactaa

SEQ ID NO: 202144 - DNA, 247 bp, Unknown
  Bacterial polypeptide expressing nucleotide sequence isolated from the Sargasso Sea
caaattaaattaaaagacattaatgaaaaaactttacacaatgcgtcatcggttcctgttgatgaaatagatctattaatcagaacaggaggcgataagaggataagtaactttcttctatatcaaatagcatatgctgaaattatgtttattgataaatattggcctgattttaacaaaagtgactttttaaaatgtctcgataattttaaaaatattaaaagaagatttggtaagagaaaatgaa

SEQ ID NO: 202145 - DNA, 964 bp, Unknown
  Bacterial polypeptide expressing nucleotide sequence isolated from the Sargasso Sea
ggagtcattcatgcaggtgtttattatgataaggactcaatgaaggctaaattttgtgctgatggaaatcgtagaatgtatgagtattgtcaaaaatttaatgtacctcacattaatacaggaaagttcattgttgcaacatccgccaatgaaattcctaaactcgaggaaattttctccaaagcagagtataatggtgttgaaggaatagagagagtaacaggaaattatgttgccagcaaagagcctttagtcaaatgtattgaggcattattcgtgccatcttcaggcattgttgatcaaaactctctcatgaggtcttatcttggcgaattggaggaaagctctggcaatattgtttttaattcacaattcttgcgttctgaaattcatggtgaaaaatattgttccactgtgctgagtgatggagaagaaataatcatagaatcgtcggctataattaatgccgctggtctaaatgctgaaaatattgcatataatattttaccattagatgaaaaatatattcccaaaacttatttcgcaaaaggtaactatttcgaaacgggaaaagacctaaagattcgacatctaatttacccaataccaaatgatgcaagtcttggtttgcatttgggattagatttaggaatgcaagttagatttggacctgatgttgaatgggtagatgaaattgattatgaagtaaaaaaagatagacaggttttatttcataatgatgtaataaaatatattccctcaattaaaattgaagatcttaaagctggatattcaggcgtaagaccaaaacttaagaataaaggcgagggtaaaagtgacttttcaattcaaggagaaaagacacatggtattaagaatcttgttaacttatttggaatggaatcgcctgggttgacttcttcacttgttattggagaatacgttactaatatggtaagttaaa

SEQ ID NO: 202146 - DNA, 931 bp, Unknown
  Bacterial polypeptide expressing nucleotide sequence isolated from the Sargasso Sea
cgcggtgtgtttgcgatgccggacgaaatcgtcgtgtcgatcggctgccagcaggcgctttatctgattgcggacctgctggcgagcgagcggaccacgatcggctttgaaaaccccggttatccggatgcccgcaatatcttcgagaatcgcaatgcgcggctgcagccgctgccggtggatagcggcggcgtgcgcccggtcgaagacgccgatctgctcgcgcaatgcgactacgtctacgtgacgccgagccaccagtgccccaccacggccaccatgccgatcgagcggcgccatgcgctgctggaacaggcgcaggcccatgacttcgtgctgatcgaggacgactacgaaagcgaaaacaacttctcgggcgcaccgcatccggcgttgaagagcctggataccgcggaccgggtgatctacatcggcagtctgtcgaagactttcgcgccgggattgagattgggttatatcgtcgggccgcgtgagctggtgcgtgagttgcgcgcgctgcggcgcctgatggtgcggcatccggcagcctatattcagcgcgcgttcgctacctttctggcgctcggtcaccacgatgcattgctgcggcgcctcgcacacgcctatcgggagcgcgcccaggcgctgatgaccgcgctcgacacacacttgccggaagcgcgctatctgccgatgtcgggcggcgcgtcgtgctgggtcgaggggccgccgtggctcgatgcgacacgccttgcggcggatgcgcagacacacggcattctgatcgaactggggcgggtcttcttcatgaccggactggagcagaaccactgcttccggatgggcttttcggccatcaagcttgaaaagatcgacgaaggcgtacggctgcttgcgcaactcgtgcgcgcgcagcagcccgaggagtagg

SEQ ID NO: 202147 - DNA, 562 bp, Unknown
  Bacterial polypeptide expressing nucleotide sequence isolated from the Sargasso Sea
tatgcctagaattccaaacaaaaaacgagtcagtagtggtgggatattgtgcataatacctgcgaggggaaatagtaaaagactaccagaaaaaaatcttaaaaatctaggcaacaagcctttaatcgcttggtcaatagacttcgcggttgatagcgagatttttgactgtgttttagtttctacagataaccctcgcatagcagaagtcgcccttggctgcggtgcttcagtgccttggcttagacctgatcatttggcaactgatgaggcgacaactatatcggtggttaaacatgcgttggcttggtatgaaaaagaatgtggtaagcccaatgcaatcgttctgcttcaacctaccaccccgttaaggtgcatatctgtcttacgtgaaatgttggatatatataatgagaccaaaaataaggttaaatcagtagttagtatgagctcaatcgattatcatcctggttggacattttatgaaagtggagagggctggaaaccctgtatggattgggagttggggtttgcaccaggtctcaggaattaccaagggtag

SEQ ID NO: 202148 - DNA, 814 bp, Unknown
  Bacterial polypeptide expressing nucleotide sequence isolated from the Sargasso Sea
tttgagcacacttgaaatcataggtgaaggtgcatttgatctacttcagggtcaaatcacatctgatatggataaagtaacagaccatcaaatctgtcttggggccttgtgtaatattaaaggaagagtagaaagttcatttattgttatcaaaaaaccccaaactaaagacacatttcttctcataggcgacagagcagttttaaaagaaactgaagaaatactaaaaaaatattccccattctataaattaaagatgagattaaatgataactataaattcattgccattaatgaaaatttcctttcggatactttcccagacactgacttaaatctaaacgttcagcaacagggagaatttttaagaatgcactatttaaagaaaaaataccacttgttgcttttaaatgcaggttatacctgctttaaagatttcgagatatccaatgaccttaacgaatgggaaagagacaacataataaatgaagacttcaatataaaatcaggtgacactaacaaatatactccccatgaactaggttatcatcaaacaaatagaattgactttgaaaaaggctgttatacaggtcaagaaatagttgcaagaatgcattacagagctaagaaactaccacgcttacttacaaaaagtgtaggtaagaatgaaacaatatcttccgaagtctttgatgaagaaggtaaaaagataggctctcttttatcaacagcacaggaattagataccaccctatgccttctttctatgaataaaaactacgaagacggaataatcacctttgaaaggtcttga

SEQ ID NO: 202149 - DNA, 1048 bp, Unknown
  Bacterial polypeptide expressing nucleotide sequence isolated from the Sargasso Sea
aatgtttgatgctctttatcatgaaaaaaagataaaatttattggtgtgcgagatgaaagaactggcactcatatggctgatggttatgctagagcgtctaataaaccaagtgttattttagctggacaaaatggtcctggagctaccaatttagtaacaggtgtcgctcaagcaaaagctgctttttctccagtagttgcaattgcaggatcatactcaactaaagataaagttgaagatgcgtttcagggtcttgatcagcaatctttatttaaacccattacaaaaaaaacttggactgtaaaaaaacctaaaattattcctcaagtaattagtgatgcttttggactagcaatgaagcctagaagaggaccagtttgcattaatttacctagaaatattttagcagcaacagagaactataatataaatgtaaaaaaaccttcatttgatagcgaaagttaccttaaaggaaacaaagaaaaaattacaagagcagcaaagataataagtcatgcaaaacaatttgtgataattgctggtggtgggattaaatatacttctaaatatttagaagtgattaagcttgcagaattattaaatacgccaatagttaccgctgcaggtcatggggatgccataccatttaaccataaacttaacgcaggccaaatgggacctcgtggaaaccctgttgcatcaaggcttgtgaaagaagcagatgttattttggcgattggaaccaggttaggttttaattctactttttatagctacgataatatcaataaaaaagcaaaaattattcaaattgaaattgaaaaaaaaatgctgggcaaatattttcctgttgttctaggtatcaatgctgacgcagccacagtcactaatcaaatatataatgaaatcaaaaaacaaaaaattaaactagatataaaaaattggacaaatgaattttcaaaacaaagaaaagattatttaactgatagagaaactaataatctaggtaaaaattttcctattcaaccaaaaggtttgtttaaacaa

SEQ ID NO: 202150 - DNA, 447 bp, Unknown
  Bacterial polypeptide expressing nucleotide sequence isolated from the Sargasso Sea
aatgacatttttaaaaataaacaatcttagtgttgattaccaaatgagaaaagaaacagtttatgctgctaagaatgtgaatattgaggttaataaaggagaaattttaggattagttggagagtctggatcaggaaaaagtacagtaggaaatgctattataaatttaattgatgaaccaggtaaggtatctagtggatcagttattttaggtgatcttaacattcatgaaaattctgaaagcattgttaaatataggggaaataaaattggattgatatttcaagatcctcaaacttcacttaacccaattcttacagtgggtgaacaattaattgaaacaattcaaactcatcttaaattgagtaaagaagaagcaaaaaataaatctataaatttattaaaagaggttggtataaaagatgcagagtcaagatttgataattt

SEQ ID NO: 202151 - DNA, 685 bp, Unknown
  Bacterial polypeptide expressing nucleotide sequence isolated from the Sargasso Sea
atgacagcaattattctagctgcaggaaagggggagaggttgagaccactcaccacccagatcccaaaacctttgataacagttgcggggaaaactttgcttcagagaaacattgattgtctggatcaatcgggaataaaaaagattattgtcaatggttcaaggatgggggatcaaatcgaatcattcctcgaaaatcataatcaatcaaatataagttttgattatattaatgagggtgaggagccacttgggactgctggtgcaattttcaatattattgataaaggtttgataaatgatgatcatttttgggtgatcaatgcagatatcatgacaaacttttcttttagtgctattcaattgaattctagtgtgatgggccatatcattttggtgccaaatcctgagcataatttatcgggtgatttctgtttagaaggagatagagttacgatttctggtaatcagcgatatacttttagtgggatcagttatttttcaatccagtgcttcattcaatcaacacagagatattttgcacttgcagatttgttaagagagcaaatcgaaaaagaaatgattacgggacagttatttcatggtgattggctggatgtaggaactgcagataggttagcagaggctgagaatatttgcagaagaagacaaaataatgaataag

SEQ ID NO: 202152 - DNA, 544 bp, Unknown
  Bacterial polypeptide expressing nucleotide sequence isolated from the Sargasso Sea
atgcaaccagcagaaaatttagaaagcaaaataaaagaactttggccaaaagatgggccttctagtttagaagtagaaaaatacattaaaaaatactctaaagaaaaaatagtaataaaatgcggaggcaaagttcttttagatcaatcccttttaaataacttaattgaagatattgtaattttaaaaaagctaggattgactcctatagttgttcacggcggaggtttgggaattaaaaaaaagcttgatgaacagaatataaaaagcaaatttattatgggtttaagagttacagacagaaaaatgattaatattgttgaaaatgtcatgacagaatttaataaaaaaattgttgatgctcttaataaaagatcctgcaaagcaaaatctataacgataaaaaaaaataatataatttatgttgagcaagaaaataaagaattgggatatgtaggcaagccaaaaaaagtagattcaaaactacttaaagaaataattaaagaggattttgtccctgtaataatacccaatgggtcttgat

SEQ ID NO: 202153 - DNA, 685 bp, Unknown
  Bacterial polypeptide expressing nucleotide sequence isolated from the Sargasso Sea
atgactgcaattattcttgccgcaggaaagggggagaggctaaaaccattgactgcattgactccaaagcctttgatagcagtttccggacaaaccctgcttgagagaaacataaattgcctcgcagaatctggagtcaaaaagattatagtcaatggatctaggatgggaaatcagattgaatcattcctcaggaatcattatgaacaatccaatgtgagcattgattacatcagtgaaggcgatgaaccactcgggactgctggtgcaatttttaatattattgacgaaggcctattaaatgatgatcttttttgggtcgtcaatgccgacatcatcacagactttccatttaagagaattcaattgaatccagagactgtgggccatattgttctggtacctaacccacgtcataattcttctggcgatttttgccttgaaggagatagagttaccatttccaataatgaaagatatacttttagtggaatcagttacttttcaagacgctgtttcacgcagtcgtctcagagatatttctcacttgcagaattgttgaatgaacacatcgagaaaagaatgatcacaggcgaactgtttcaaggcgattggttagacgtaggaaccatgaagagattgactgaggctgaaaataagttagcagataaaagaaatgaatagg

SEQ ID NO: 202154 - DNA, 1240 bp, Unknown
  Bacterial polypeptide expressing nucleotide sequence isolated from the Sargasso Sea
aatgaaacgactcgctattccacttcagggcgcgcaaatgctgtttgttgcatttggcgccctagtgttaatgccgctactcacggggcttgataccagtgtcgccctgtttactgcgggtattggtactctactgtttcagttgatcacgaaacgccaagtccctatcttcctcgcctcctccttcgcttttattgctccaattctctacggagtacaaacctgggggatcccatcaaccatgggcggcatcattgccgcgggtctagtctatgtgctccttggggcactcgttaaagtgcgcggcaccgactttatccataagctgctaccgcctgtggtagttggcccagtgattattatcattggtctaggtttagcaccagtggcggtgaatatggcactgggtaaaagtggagatggcagtttaacgctcgtccccaccaatacggctttgattatttccctcgcctcactctgtaccaccatagctgtggctatttttgccaagggcttacttaaagtcatgccgattctggcggggattgtggtgggttatggcctaagccttgcttttggtatcgtggattttgcggtggttaccgcggcaagctggattgctattccgaaatttgtcgcgcccgaatttaactggcatgccatcgcctttatgatcccagttgcgattgcgcctgcggttgaacatattggtgatatcctggcgatttctaatgtcacgggtaaagactttatgaaaaaacccggcctgcatcgcaccttaaccggtgacggcgtcgcgacaattgccgcagcggccttcggcggtccaccaaacacgacttattctgaagtgacaggcgctgtgacgttaacccgtaacttcgaccccaaaatcatgacgtggacggcgattaccgctattaccttggccttcgtgggtaagttaggcgctctgatgcaaacgattcccgtccctgtgatgggcggcattatgtgtttgctctttggttctatcgccgcggtgggtttaaacaccttaatccgcaatcatgtagatttatccgagccacgtaacttaagcattgtcggcgtgacactggtatttggtatcggtggcatggcctttggcatcggctccttcagcctcacaggcatcagcctctgtggtattgtggccatcaccatgaatctgctattacccgcgagcaaacaccacgagcgtgacgctgcatcacactaa

SEQ ID NO: 202155 - DNA, 3052 bp, Unknown
  Bacterial polypeptide expressing nucleotide sequence isolated from the Sargasso Sea
atgcaatttgaaaactatcgtcctcgtccgccacaacccgagcctaaggcaaagcgtgagcgtaagcctagatctaaagggcgtgcttggtttctattatttattctggttttttgtttagcgattttgattggtcaggaggtcaaaacctcttattaccagtctaagtatattcaccaatacgctaaaactctgacctatgagctgaaaaacgagcctactcagtcgattatctatccaagttatggccccttcgatgagcgtcatggctacagtaagttgccacaatatattgatcgcttattgcaacgtaatttccaagtgacacagcaggttgagttttctcctgcgttgcaggaatacgcccagataggctttttcccgccttaccatgagaaagcacaatcgggtttgactttgcttgactgtcgcaataccgatctctacgagttcacttatccaaaacgtgtgtatcaggatgacgataaaatccctaatgaaatcgtcaatactttgctgtttattgaaaaccgcgagttgtggaccacagagccaaaactaaatccggtgattgattggccacgttttattgtggcggggatgagccaaatcgctgaaatggtggggatgaatgtctcaacagcgggtggcagtacactggcgacgcaaattgaaaagttccgccattcttctcagggattaactttaagtatcaaggataaattgctgcaaatagccacagcaacagtgcgagtgtaccaacagggagaaatcactgaacctgcccgtaaacgtatcatccaagattacttaaacacagtgcctttatcctcagcccctaaccacggtgaagtgcatggcataggtgacggcctatgggcttggtttggtactgacttcgatacagcaaaccagctgttgtcttcccctcaaattaaagctaatacagccaaacgtggccaagtgtttcgccaggtggtagcactgatgattgctcagcgtcgtccttcctattacctattacagggacatgaagatttagagaatctagttgatagccatatccgtttactcggccaatattatctgattgaccgtaaactcagggatgccgcactaggacaaaaattacagtttaaagtcgctaaacctcagcgtaatacccaatcgggcgcagacaagggcgttaacactatccgtattcgtacagcgggtatgttgaatgtcggcttatatgatttggaccgactcgatttaaccgtgaatagtagtctacacagtgagttacaacagcaagtaagtaactacttacgcagccttgggcaaacttcaacggctgaaaaagtcggacttttaggtgagcgtttactcgaacctagccaactgcaaaacgtactctacagttttacgctgtatgaaaaaaccgccacggccaatcgtgtacgggtacaaacagacagtactgaccaacctttcgatattaacgaaggtagtaagttggagcttgggtcgacggcaaagctaagggtgctcgcgacttaccttgagatcattgctgaaattcacgataagtattcgaaaaagcacggcattgagttggagtcgattgtgattgaacctcgcgatcatctcacgcgctgggcgattgactatttgattgtcaatcccgataggcgccttgatcgcatgctcgacgccgcgctgcaacgggaatattccgcctcgcctaatgagcagttcttcaccggcggtggtttgcatgtgtttaataactttaagaaaacggaagatcttaaggttccgaccatgtatcaagcactgcaagactcgatcaacttgcccttcgtgcgcttaatgcgggacatagtcaactacagcagcagtatgcaaaacgaaggcaatatggcgcgtttgctgcgcaatgataaggatccgcgccgagaggaatatctgcgggtatttgctgatcgtgaaggcaataccttcgtgactaagttctaccgtaaatataagaaagtggcacccaatgagcgtttagaactgtttttcgatggtcaaacccaagcggaacaacaactcactgcggcttatcgttatttgcagcctaatgagtctatcgccgcctttaaggcctttttacagcagcggctaccacaaaatagttacaccgataagcgcatcaaagagctgtataacaagtacggccccgaaaaatataacctcccagatcaaggttatatcgcacgggtgcatccactcgaactctgggtgctcgattacttgaatcaacatcctgaagctaacctcaacgatgtgaaggaggcgagtaaggatgagcgtcaggaagtctatcgctggctgtttagaactcggcacaaaaacgcaagggatgtgcgagtacaagtaatgctggaggtcgaagctttccttgatattcatcagcgttgggcgcgtttaggctatccctttgaatctatggtgccttctttaggttcggcgctcggtagctcgggcgacagacctgctgctttagcggaattaatggggattattcaaaacgatggttatcgtttaccgacggtgcggattaatcaattgcactttgctgaaggtacgccctatgaagtacggctcgaaaaccaaaatacccaaggcgaacgagtgatgcgtcatgaagtcgcccaggcgttaaaggcggcgttggcaaatgtcgttcaaaacggtactgcacgacgtcttaagggtatctttaccgatgataacggcgagatgctggccattggcggtaaaacgggtacgggcgataaccgtattgtgacccagatgcagcagggccgaaaagtcgctaccacggcgatgaaccgtactgcgacttttgtgttttacttaggtgataactacttcggcaccttaactgcctttgtgccgggcagtaagtccgatgattttagttttacctcggcgctgccattacaagtgatgaaagggatgatgcctattctggcgccttatgtgaaatcatcaaaaggcatgtgcgtgcgggatgagtaat

SEQ ID NO: 202156 - DNA, 1351 bp, Unknown
  Bacterial polypeptide expressing nucleotide sequence isolated from the Sargasso Sea
tatgtccgcaaggtcacaattacaatcaaaaccagtagcagatcttcgtgaaatagctgatggtttaggtcttgaacacaaaggccttcaaaaagcaaagttaatagatcttttattagaacaaggtgacgctattggtgatattgcagatggtgcagaagaagaagtagcagttgtagcttcagataatgatatgccatcagttgtaaattctggtgatagccaaattaaagagggtgaaacaagagagggtattcttgatatcttgccagagggttatggatttttaagatgtagtggttataaaccaagtgagatggatgtatatgtaccagcgggagcaatcaaaaaatttagaatgagaaaaggcgacctcgtgacgggaccaattcgtgcaccacgagcaaaagaaaagtatcctgcattagttgaacctaagactgtaaatggagctgatccagaacttttggctcgtagagtagactttgacaaacttacacctctttttcctgatgagagattaaaacttgaaattgatggtgaaccagaacgacttgttggaagaatcgtagaccttattgcacctattggaaaaggtcagagaggattgattgtttctccaccgaaagcaggtaaaactacaattcttaaagaaattgcaaactctattactgctaacaatccggaagtttatttaatggttgtcctagttgatgaaagaccagaagaggtaaccgacatgcaacgttcagtagatggagaagttgtattttcaaccttcgatagaccaccagatgagcacactcaagtttccaaattagctatcgaaagagcaaaaagacttgttgaagaaggtaaggatgttgtaattttattggattcaattacaagacttgcgagagctcataacttagcgaccccagctagtggaagaattttatcaggtggtgttgattcgactgctttaactcctcctaaacaattctttggtgcagctagaaacatagaaggtggaggaagcctaacaattcttggtactgcacttgttgagactggatcaaaaatggatgaagttatcttcgaagagtttaagggaactggaaacatggaacttcgtttagatagacaacttgcagacaagagagtctttcctgcgatagatgttactccatctggaactcgtgaagagcaacgactagtttcaccaaaagaacttgagtcattatggactctaagaagggttcttgttggccttgagggtggagctgcaacagaattattaattgataggcttaaaactcttaaaagcaatgacgcattcttaaaggatgtcgcaaaaaccaataaataa

SEQ ID NO: 202157 - DNA, 919 bp, Unknown
  Bacterial polypeptide expressing nucleotide sequence isolated from the Sargasso Sea
atgagaaaaaaaataataattggatctaggggtagcaagcttgccttactttatgctcaacaagctaaagataagattattgaaaataccgaccttggtaatgaagatattttaattaaatcaattacaactaaaggtgacgaagtacaggatataagattatctgagcttggtggcaaaggtttgttttctagtaatattgaaaaagaacttcagttaaaaaatattgatattgcagtccatgcactgaaagatatgcctgctaatgaaacaaaaggattaacaacagactctttccttgaaagaaatgaccctagagagattttaattacaaagaacaaaaaaaaacttaaagacttagatcaaaagtcaattgttggtacctcatcatacagaagagaatttcaaataaaaaaaattagacaagatttgaactgtaaactaattagaggaaatgtagatactagaattagaaaattgaatgaagggatgtatgatgcaattattttgtcttatgctggtatcaaatttttaaaatttgaaaatgaaatctcagaaattttttcagctgaagaaataattcctagtgcaggacagggcgtaattgctcttcagtgcagggagaatgatgatgagacaatttctattttaaacaaaattaatcatgaggaaacacataaaagagctcaccttgagagaaatattttaaaagttttagatggagattgtgaaacagcaattggtgctcattcagtgattgatggagataagattatagtggaggctgaacttttttctttagatggcaaacaaaggttttatgaaaaaaaggttggtaatttgaatgaatttaaagaaattggtaaagagatcggaatacttttaaaatcaaaatcaaacaattcatataaaagatagt

SEQ ID NO: 202158 - DNA, 1286 bp, Unknown
  Bacterial polypeptide expressing nucleotide sequence isolated from the Sargasso Sea
tatagatgaagcagacaatcccagtggtgggccaatgtgggttgttgaaagaaatttttctgggaaaaaggggtttatgaaaatcatcggaaagcttcttgctgggacattttgttttgctctaataatcaacacaatcactgcaggaaatatgtttcaggcttggaatgttgcaaatctgactcaagcttattttggtgtcccaactctagttacaggtgccatattggccttgattgttgggtctgtaatcataggcggtataaaaagaatcggagcagtgacatcaaaacttgttccaataatgctcataatttatgtcattgcttgcatatatgttcttgcaattaattttacagcgattccagaaatgctaaggctcattgtgagcgcagcattttctccaatggagtcaagtaatgccttccttggtggaaccgctggagcagcctttatatttggtatgcagagagcgcttttttcaaatgaagcagggcaaggttcatctgccattgctcattcggctgccaaaacagatgagccggttagagagggtgttgtagcaggcctagagccttttattgataccattgttgtctgcacgatgagtgcgttggtaattttggttacaggcatttggaatcgacctgcagaagttcagctttctgatctttcagtaaatcaatctggtcaaaattggtccattgatggaacaattggtgatgctcccacgctcagttctggcgacaaagttttcatgatttactctggatcaaaaaatgctgagtctggcaacgctttacataaagtttatgggaccgtggttattgatggcactcaagcatctatcaaatgggatgaaattaactctaataaacagcctgaaacaaatggcgaagtttatcttgattatgtaggcgccaatttgaccgcagcagcatttgacaaggtctcagatggtctaggcaaatggttggtgacgcttgcctcttggctttttgccatatctactatgatttcttggagttactatggtgagaaaggtgtttcatttctgcttggtgaaaaagcaatactcacatacaagctcgcattttgtatattggctgtcttatccactacaggttttattcagaccgacagagaattaaatctgtttgccaaccttggcacaggcctttgtatcatggcaaaccttcccatactctggctttttggatatcaagcaataaaagactataaagattatatttctaaactaaaaagtggtgaatttgggcagtaat

SEQ ID NO: 202159 - DNA, 959 bp, Unknown
  Bacterial polypeptide expressing nucleotide sequence isolated from the Sargasso Sea
cttcgagggtggttaccacggccgtaccctgggcgcgtcgtcgatcacctccagctaccgctaccgccgccgctacggccacttcggcgagcgcgcgatgttcattccgttcccgtaccccttccgtcgcccgaagggcatgaccccggacgagtactccgaccactgcgtgtggcagttcgagcgcctgttcgaaagcgaatacaacggtgtgtgggatcccaaggtcggccaggccgagtacgccgcgttctacgtcgagccgatccagggcaccggcggctacgtcatcccgccgcgcaacttcttcaccggcctcaagcgcgtgctggacaagtacggcatcctgatggtggtcgatgaaatccagatgggcttctggcgcaccggcaagctgtggtcgatcgagcacttcggcgtgaccccggacgtgctggtgttcggcaaggcgctgaccaacggcctgaacccgctgtcgggcctgtgggcgcgcgaagagctgatcaacccgaccgtgttcccgccgggctccacccactccaccttcaactccaacccgctgggcacccgcctgggcctggaagtgctgaagctgggcaaggaaatggattacgagcgcaccgtgccggaaaagggcgcgtacttcctcgacggcctgcgtggcctgcagaagcgccacccggaaatcggcgatgtcgacggcctgggcctggccctgcgtgcggaaatctgccagaccgacggctacaccccgaacaaggaactgctggaccgcatggtcgacatcggcctggccggagacctgctgcacgacggcaagcgcatgggcctcgtgctcgacgtgggtggctggtacaagaacgtgatcaccttcgcgccgtcgctggacatcagctacgaagagatcgacctggcgatcaccctgctcgaccaggcgctgaccaaggccaagggctgac

SEQ ID NO: 202160 - DNA, 919 bp, Unknown
  Bacterial polypeptide expressing nucleotide sequence isolated from the Sargasso Sea
tatggatagaaaaattttcattggatctagaggtagcaagttggctatgctttatgctaaaaaagccaaagatcaaattgtcaaaagtagtgatttaggtgatgaagatgttgtaataaaaaaaattactacaaaaggagatgagattcaggatgtaagattgtcagaagttggtgggaaaggattattttcaagcaatattgaaaaagaacttcaagataaaaatattgatattgcagttcatgcactcaaagatatgccagcttttgaaactcaaggtcttaaaacagatgtattcttagaaagaaacgatccaagagaaattcttatcacaaaggataaacaaaaattaaatgaattaaaaaaaaactctataattggaacctcatcttttagaagagaatatcaaattaaaaaaatcagatcagatcttgaatgtaaacttattagagggaatgttgatacacgaattaaaaaacttaaagatggaacctatgacgcaataatcttatcttatgcaggaattaaatttttgaattttgacagtgaaatttcagaaatattttctcctgaaaaaataattccaagtgctggacaaggtataattgcacttcagtgtagagaggacgataaggaaataatctcagttttaaaaagaataaatcataacgaaacatttatgagagcacatgttgagagaaatattttaaaagttttggaaggagattgtgaaaccgcagtcggagcccactctataataaaagatgacaaagttattgttgaagcagaactattctctttagatggctcaaaaagatattatgaaaaaaaaactggcaaagttgaagacttcagccaaattggtgaagaagtaggtcaaattttaaaaacaaaatctaataattcttataaaagataa

SEQ ID NO: 202161 - DNA, 157 bp, Unknown
  Bacterial polypeptide expressing nucleotide sequence isolated from the Sargasso Sea
ataaaaagtatctttactgacgatattttaaagacaggtaccgatataatattaggtaatacatatcatttatttttgagaccaggagttgaaattcttaataaatttggaggtttacataagtatatgaatttggaagaaaccaattcttactgac

SEQ ID NO: 202162 - DNA, 886 bp, Unknown
  Bacterial polypeptide expressing nucleotide sequence isolated from the Sargasso Sea
tttggctcgtagagtagactttgataaacttacacctctttttcctgatgagagactaaaacttgagattgatggtgaaccagagcgacttgttggaagaatcgtagacctaattgcacctattggaaaaggtcagagaggattgattgtttctccaccgaaagctggtaaaactacaattcttaaagaaattgcaaactctattactgctaataatccagaagtttatttaatggttgtcctagttgatgaaagaccagaagaggtaacagacatgcaacgttcagtagatggagaagttgtattttcaacctttgatagaccaccagatgagcacactcaagtttctaaattagctatcgaaagagcaaaaagattagtagaggaaggcaaagacgttgtaattttattggattccattacaagacttgcgagagctcataacttagcgaccccagctagtggaagaattctatcaggtggtgttgattcgactgctttaactcctccaaaacaattttttggtgcagctagaaacatagaaggtggaggaagcctaacaattcttggtactgcacttgttgagactggatcaaaaatggatgaagttatcttcgaagagtttaagggaactggaaacatggaacttcgtttagatagacaacttgcagataaaagagtattccctgcgatagatgttactccatctggaactcgtgaagaacaacgacttgtatcaccaaaagaactcgaatcattatggactcttagaagagttcttgttggccttgagggtggagcagcaacagaattattaatagataggcttaagactctcaaaagtaatgacgcattcttaaaggatgtcgcaaaaaccaataaataa

SEQ ID NO: 202163 - DNA, 3217 bp, Unknown
  Bacterial polypeptide expressing nucleotide sequence isolated from the Sargasso Sea
ttctcaaaaaattttaaaagacaaagatgttgatgaagttttggcaaaaacaaatccgtacagggaatggttgaaaaaaaattcaaaacacttagaagctaatttacatgaatatgctggacctcaaatgcgtgaaatatctgaaaaatactttaatgactcagcaagaacattctgcctttccaaggaggagattaatctgctagaaaaatattctgtggaaggaggagagcctacaggttcaatgggagatgacactcctcttgcgccaattagtgaatttgttagatccccttacgatcattgcaggcaaaaatttgctcaagtcacaaatccaccaatcgattctctcagagaaaagtatgtaatgtctcttgaaacttgtattggtccagaactagatatttttgaggagacctctgaacatgccaataggatagttgttaactctcctattctttcacacaaaaaatttaacttacttataaaaaataaaaagttcaaagtgaaacggttcttaatagagtacgagagagaagattctcttgaagaaagtttaattaaattatgtgaagatgttttggcatcggtaaaggaaagttactcaattatagtacttgatgagaagcaaacctcattcaataagcctgttattccagctcttttagcaacatcagcaattcataattatttgatcaaaaataatgagcgagtttcctgcaatattattgtaaatactgcctctgcaagagacactcaccaaatagcatgtttaataggttttggagcaacatgtgtccacccttggcttggtcttcaaacagttttaaaaattggaaaacaaagagaattagattccccaggcaatgagctttgcgcatcttatagaaagtcattaaataatggtttattgaaaataatgtcaaagatgggaatatcgaatatttccagttacagaggagcaggactttttgaagttgttggattttccgaaaagattaataaagtttgctttcccaaaaatgaaacacttatttttggcgattgctttaaagacatagaaaggaaatctcttgaagttatagatagtgataaagatagtaaaattttgccaaaaggtcttcataaatttgttcatggaggagaggagcatgcttatcagcctggtgtggtaattgagttacagaactccctcaaagaaggatcttatgaaaaatttaagaatttctcagaaattattaatgaaagaaagccactggctgtaagagatttttttgaattaaagaaaaacgaaaaaactattgatcttgaagaagtagaaccagtagaaagtattttaaaacgtttcgactctgctggaatgagtctaggttcactatctcctttagcccatgaaacccttgctgctgcaatgaatggtttgggctgtcgatctaattcaggagaaggaggtgaggacaggaaaaggtttggaactaatttaatgtcgaagattaaacaagttgcctcgggaaggtttggagtaactccacattatttagttaacgctgaggtgttacagataaagatcgcccagggagcaaaacctggagaaggaggccagctacctggagctaaagtggattcgtacatcgctaaactcaggcattcaaaaccagggataaccttgatttcccctccacctcatcatgatatttactcaattgaagaccttgctcaacttatttatgatcttaaacaagtaaatcacaaagcacttgtttcagttaagcttgtttcagagccaggtgttggaattgtcgctgcaggagtagtaaaagcaaatgcggattttattactatttcgggacatgatggtggtacaggtgcaagcccaatatcatcaataagatatgcaggctctccatgggagactggattgtttgaaacacaaaatatcctacttcaaagcaaccttaggtctagagttaaacttcaaacagatggtggactaaagactggattagatgtaataaaagctgcaatttttggtgcagattcctttggctttggtacggcgccaatgattgcaatggggtgcaagtatttgagaatttgtcatctgaataattgtgctactggtgttgctactcaacaattgagaattatcaatgatcattttcttggtgaggtggaaaaagttcaaaattattttatttttgtcgcaaaagaaataagagagattcttgctgcattgggttataagtcgattgaagaaattattggtaaatctgatttgcttgaattaaaaaaagagcattacgaaagatcgacaaaaatgggtctagataaacttttatttagatttagacctaataaatctcaactgaatactaaggctcaaaacaacataaataaatccttgaatgatgaatctttatcaaatcttatttcagagaaaatatccaaaaatatagagaaaggcaaaggaggtgcatttagttttaagatctctaatacccatagatcaataggtgctgaagtatctggaatgatatcaagggctcatagtgaaaagggcatgccagagaggcttattttgaacttcaaaggaactgcaggacaaagctttggttgttggaatgccaaagggcttgaattgaatttaaaaggtctagcaaatgattatgttgggaaaggaatgaatggaggaaaaattgtaattacaaaagaaaaacatctaaaagacgacagatcagttttgcttggaaatacttgtctttttggagctacaggaggagagttttacgcaaatggtgtagcaggggaaagatttgcagttaggaattctggtgctaaggcaatcattgaaggtgcgggagaccattgttgtgagtacatgactggtggtgaagtaattgtgctgggttcagttgggaataattttggtgcaggaatgacaggaggctttgcatatgtatttgatgaagacagaagctttgttgatcgatgcaataaagatcttatttcttttaatagaattacaagccaagaaatggaggctcatagaagctatctaaaagacagaattttccagtttataaaagaaactgacagcaatgttggaaaaacaattcttgaagacttcgatagatataaaagtctattttggatcattacaccttacgcagaaaatctcgaaaagataataaaaaatacaagagaggaggctgcataa

SEQ ID NO: 202164 - DNA, 877 bp, Unknown
  Bacterial polypeptide expressing nucleotide sequence isolated from the Sargasso Sea
ttgactggtggtcaagctgcagtgaaatccctaaaaaaggaaaaagttaaacacgtctttggtttaattggttctgctacaatggaaatgtttgatgcgttgtatcatgaaaaaaaaattaaatttataggtgtaagagatgaaagaacaggaactcacatggccgatggttatgcgagggcttctaatcaacctggtgttattattgctggacaaaatggcccaggagcaactaatctagttacaggaattgctcaagcaaaagcagcattttcgcctgttgtatcaattgcgggtttatattctaccaaggataaaatggaagatgcatttcaaggacttgatcaacagtcactatttaatccaataaccaaaaaaacttggactgtaaaaaaggcaagtcatattccaaaaactttcagtgatgcattcaatcttgctatgtcaccaaggagaggtccggtttgtataaacttaccaagaaacgtactttcagatacatcaaaatttaaaatcaatgaaaataaaaagtcttttaaaagtgaaagtaatttaaaaagcaaaaaaaatttaattcagaaaacaacaaaacttattcttaattccaagaaaactgtaattgttgctggtggaggtataaaatataattcaaaatttaaatctgtaactgatcttgctgaatatttaaacgttccaatagtaacagccgcaggacacggagatgcgataccatttagtcacaaactaaatgctggacaaatggggccaagaggcaatttagttgcttcaagactggtgaaagaagcagaacttatcattgcgttaggaacaagacttggttttaattctactttctattcttacgataacataaaca

SEQ ID NO: 202165 - DNA, 925 bp, Unknown
  Bacterial polypeptide expressing nucleotide sequence isolated from the Sargasso Sea
aatgaaaagcaaaaaaattattattggatccagaggaagtaaattagcattaatttatgctgaaaaagcaaaagaaaatattttaaagatatctaaagaattcaatattgggagtgtcgaaataaaaaaaattacaacagcaggagatataaaccaaaaagatagactttctgaattaggaggcaagggacttttttcaaagaacattgaaaaagaactattagaaaataaaatcgatattgcagttcatgctttaaaagatatgccctcagatgaaactgaagggttgctaaccaattgttttttaggaagaaatgatcctagagaagtattaatttctaaaaataaaataaaatttaaagatttaaatcaaaattcaataataggaacttcttcttttcgaagagagtttcaattaaaaaataaaagaaaagatttaaattataaattgattagaggaaatgttgatactagaattaaaaagttaagtgaaaatttatatgatgcaatagtcttgtcttatgcaggtattaattttttaaatttaaatcaaaatatttctgaaattttttctactgaggaaattattccaagtgccggacaaggagttatagcattacaatgtaaaagtgatgatttacatatcaaaaatatattaaaaaaaataaatgatgaaaaaacttttaatggtgttcaagcagaaagaaatgttcttagagttttagaaggagactgtgaaacagcagtgggtgcaatatcaatgattaaaaacaaaaatataacgcttgaagcagaacttttttctttggacggaaaagaaagattttattgtaagtcttctaaagatataaaatatgctgcagaattaggaatagaagtcggtgaaaatttaaaaaagcaatcgaaaggtagttataaaaaataa

SEQ ID NO: 202166 - DNA, 1288 bp, Unknown
  Bacterial polypeptide expressing nucleotide sequence isolated from the Sargasso Sea
atgaaagaatccaccggttatccagactcttattactatcacactgcaaataacctcaaaaaaagaccatcactaagcggttcacatgacacagatatatgtgttgtaggcgctggctatactggtcttttaactgcactgaatctttctgaaagaggttacgatgtcacaattttggaagccaacaaattggcatggggggcttcaggacgtaacggaggacaggttggaagtggccataacaaaaagattcatgaattagaaaaagattacggaaagaccatggccaatgagctttggcagctctcagaatacggaaagagtatcgtaaagaccagaattgaaaaacatgagattgattgcgatctgaaggttggaaatgcaactgtatcaaacgacaggagtgatgatcatcatcacaaagaatatgtagaaaagctgaatgcagattatgactataatctgattcgttacatgagccctgaagaagtagaagaaatgtttcacagtccattctttgacgggggtggatcactggacatgggaggaatgcaccttcacccacttaactatgcacttgggcttgcgaaggcagcagaagaatccggcgtaaaaatttttgaagactcgagggttataaactactcaaatgaaagcccatgcattgttaagacgaacgaaggagaggtaaggtctaggcatgtagttttggcttgtaatggctatctggataacctagaaaaaaaattggccgtaaaaataatgcctatcaataactttatcattgccactgagccaatgagtgaagaggaagtgagatatataaatagggatgatatttgtgctcatgacaacaagtttcatgtgcattattttcgcatatctcaagacaatcgacttttgtttggcggaggagagaactatacaagaaacttcccaaaggatttgaaatcatatgtaagaaaagcaatgcttgaggtttacccacatctgcatgataaaacgattgattatgcttggggaggaagggtcggagtgacggtcaatcgaatgccacatgttggcagattgcacgccaatgtatattttgcacatggatattcaggacatggagtagctatggcaagtcttgcaggaacagtccttgctgaggcaattgatggctcagtatcaaaccttgatattttctcaaaaattaaaataccgacttttccaggagggacactattgcgatggcctggattttatcttggcatgctttattacgctctcagagatcggttgtgaa

SEQ ID NO: 202167 - DNA, 919 bp, Unknown
  Bacterial polypeptide expressing nucleotide sequence isolated from the Sargasso Sea
atgaataagaaaataacaataggatcaagaggtagcaagttagcgttaatttatgctaaaattgctaaagaaaagattgttcaaaatacttttttaaatgaagaagatgttttaattaaagaaattaccacaaaaggtgatcaggttcatgatgtgagattatcagaattaggtggtaaaggattattttcaaaaaatatagaaaatgaacttcaggataaaaaaattgatatagcagttcatgctttaaaagatttgccagttattgaaactaaaggtttaattacagatgtatttttagaaagaaatgatccaagagaaattttaataacgagtaataaaaaaaaacttaaagaattgaaaccaaattcgataattggaacttcttcatttcgaagagaatttcaaattaaaaatattagaaaagatcttatctgtaaacttattagaggaaacgttgatacaagaattaaaaaattaaatgatggtttatatgacgctatcattttgtcttatgccggaattgaatctttaaaattaaataatttaatctcagaaatattttctgttggtaatttaattccaagcgctggacaaggaattatttcacttcaatgtcgtcaagatgatgatgatataatttcaatattaaaaaaaacaaatcataatgaaacttatcaaaaagctaatgcagagagaaatgttttaaaagttctagaaggagattgtgaaacagctgttggtgcccatgctatagttgaaggaaataaaattattttagaagctgagcttttttctttagatggaaaacaaagattttatgaaaaaaaatcttctgaaattgaaaatgcaaaagaattaggtaaagaggtaggacaaatattaaaaacaaaatctaataattcttataaaaaataat

SEQ ID NO: 202168 - DNA, 1163 bp, Unknown
  Bacterial polypeptide expressing nucleotide sequence isolated from the Sargasso Sea
tctaataatcaacacaatcactgcagaaaatatgtttcaggcttggaatgttgcgaatctgactcaagcttattttggtgtcccaacactagttacaggtgccatattggccttgattgttgggtctgtaatcataggcggtataaaaagaatcggagcagtgacatcaaaacttgttccaataatgctcataatttatgtcattgcttgcatatatgttcttgcaattaattttacagcaattccagaaatgctaaggctcattgtgagcgcagcattttctccaatggagtcaagcaatgccttccttggtggaaccgctggagcagcctttatatttggtatgcagagagcgcttttttcaaatgaagcagggcaaggttcatctgccattgctcattcggctgccaaaacagatgagccagttagagagggtgttgtagcaggcctagagccttttattgataccattgttgtctgcacgatgagtgcgctggtaattttggttacaggcatttggaatcgacctgcagaagttcagctttctaatctttcagtaaatcaatctggtcaaaattggtccattgatggaacaattggtgatgctcccacgctcagttctggcgacaaagttttcatgatttactctggctcaaaaaatgctgagtctggtaatgctttaaacaaagtttatgggacagtggttactgatggcacacaaacatctatcaaatggaatgaaattacctctaataaacagcctgaaacaaatggcgaagtttatcttgattatgtaggcgccaatttgaccgcagcagcatttgataaggtctcagatggtctaggcaaatggttggtgacacttgcctcttggctttttgccatatctactatgatttcttggagttactatggtgagaagggtgtttcctttctgcttggcgaaaaagcaatactcacatacaagctcgcattttgtatattggctgtcttgtccaccactggctttattcagactgacagagaattaaatctgtttgccaaccttggcacaggcctttgtatcatggcaaaccttcccatactctggctttttggatatcaagcaataaaagactataaagattatatttctaaactaaaagctggtgaatttgggtagg

SEQ ID NO: 202169 - DNA, 1339 bp, Unknown
  Bacterial polypeptide expressing nucleotide sequence isolated from the Sargasso Sea
atgtccgcaagaacacaattacaatcaaaaccagtcgcagatttacgcgctatagctgaaggtcttggccttgaatacaaaggcttacagaaagctaaattaatagaccttttaattgagcaaggtgatgctgtgcttgaagctgaagttcctaagtctaagccaaaagaagatgatgatcttccttcagtagttaattctggtgacagtcaaataaaaaaaggtgaaacaagagtaggatttttagatattcttccagaaggctatggatttcttagatgtgatggatacaagccaagtgaaatggatgtatatgtaccagctggaattgttaagaaattcagaatgcgaaaaggtgattctgttgaaggaccaattagagcaccgagggcgaaagaaaaatatccagcactagttgagccaacaactgtaaatggtgcagaccctgaattactagctagaagagtagagtttgataaactaactcctttatttccagatgagagattaaaacttgaaattgatggagaaccagacaaaattgttggaaggatcgtagacctaattgcaccaattggaaaggggcagagagggttgattgtttctcctccaaaagctggtaaaactacaatcttgaaagaacttgcaaattcaattactgcaaacaatccggaagttcacttgatggttgtacttgttgatgagagaccagaagaagttacagatatgcaacgatctgttgatggtgaagtagtcttctctacattcgatagacctcctgaagaacatacacaagtttcgaagctagcaattgaacgagccaaaagattagttgaagaaggtaaagatgttgttattttattagattctataacaagacttgcgagagctcataacttagctactccagctagtggaagaattttatctggtggtgttgattcaacagcacttactcctccgaaacaattttttggtgcagctagaaatattgaaggtggaggaagcttaacaatacttggtactgcattagttgaaacaggatcaaagatggacgaggtcatttttgaagaatttaaaggaactggaaacatggagttgcgtcttgatagaggcctcgctgataaacgtgtatttccagctattgatgttactccttcaggcacaagagaagagcaaagacttgtatcacctaaagaactagaatccctctggactttaaggagagtattagtaggccttgagggtggagcagcaacagagttacttattgataggatgaaaactttgaagagtaacgaggctttcttaaaagatatctcaaaagctaaaaaataaa

SEQ ID NO: 202170 - DNA, 568 bp, Unknown
  Bacterial polypeptide expressing nucleotide sequence isolated from the Sargasso Sea
aatgggaattagattaatcataatgggcccacctggggtgggaaaagggactcaggcaaagatcattaaagagatatacagcatacctcacctttcaacaggtcagattctacgaaatgaaatagaacttgaatctgaggttggaatgatagcaaagaattttatagatgatggactatttgtcgcagatgaaatcttgattaaaataattgaaaataatatttcaaatcctacatgcagtaatggatacatattagatggctaccctagaaatctagaacaagttagaaaccttaatgaattattaactaaacttaatcatactattgattttgctgtcagcctaatcgcagatgagaacgaattgataaaaaggctaacaaaacgtagtaaagattcagggagacgtgatgatacagttgaaatcgtaaccaaacgtcaaaaaatatattgggaacaaacagctcctataattcaatactataaagatttaggaatcttaaaagaagtaaatggtattggaacaatagaagaaatatcccaaaatattataaaagctatcacttaa

SEQ ID NO: 202171 - DNA, 913 bp, Unknown
  Bacterial polypeptide expressing nucleotide sequence isolated from the Sargasso Sea
tatgaaaaaggataaaatagttattggttctagaggtagcaagttagctttgatttatgcggagaaagtgaagttagagctggaaaaagaattttcaaataaaattgaaataaaaaaaattgtgacatcaggagataaaaatcaaaaagacagattgtcaaatttaggtggtaaaggattattctgtacaaaaattgaaaatgaactgattaacaatgaaatagacattgccgtccatgctttgaaggatatgccatcaatagaaactaaaggacttaccacaaacttttttttaaaaagaaactcaccaaatgaaattttgataagcaaaggtaatattaaatttgaagatttacaatctaattcaattattggaacatcttcttacagaagagagtttcaacttaaacaaaaaagatcagatttaaattataagttgataagagggaatgtagatacaagaattaaaaaattagaaaatggtgaatatgatgcaattcttttatcaaaagcaggaatagatgctctaggttttaatgaaaaaatatctcaagaatttgatgtagatgaattaataccttgcgcaggtcaaggaattatagctatacaatgtagagataatgataacgagatgaaagatatattagaaaaaataaacaataaagaatctagaattttagcaaatgcagaaagagaagttctaaaaatattagaaggtgattgtgatacagctatcggagtttatgccaaaattgaaaatgaaaaaataaatttaaaaacagaacttttttcagtagatggcaatgaaagatattttgtgaatgagagtggagaaaaagaatcatttttaaatttaagtaaaagtataggtgaacaattaaaatcaaaatctaagggatcatataaaaaataa

SEQ ID NO: 202172 - DNA, 910 bp, Unknown
  Bacterial polypeptide expressing nucleotide sequence isolated from the Sargasso Sea
atgaaaagcaaaaaaataattattggttccaggggtagcaaattagctcttatttatgccgaaagagccaggaaaaaattatcagaattttgttcaaatgttgagattaaaaaaattaccactacaggagatataaatcaaaaagatcgattatctgaaataggtgggaaaggcttattttctaaacaaattgagaatgatttattagataaaaaaattgatattgctgttcatgcactaaaagatatgccatcaaaagaaacaaaaggattgttaacaaattgtttccttgaaagaaatgatccaagagaggttttaattagtcttaataataatcatattaaagatcttaaaccaaattcaatcataggcacttcttcttacagaagagaatttcaacttaaaaaaattagaaaagatataaattataaattaattagaggaaatgtagatacaagattaaacaaattaaatgaaagattatatgatgcgataattttatcttatgcaggtatcaaatcattaaaattagatcaaaaagtatctcaaatattttcaacaaaagaaatcatacctagcgttggacaaggtgtagtagctttacaatgcagagaagatgattttgaaacaattaaattattagaaaaaataaatcataaactaactaatatttctgtaatagctgaaagacaattactaaaaattttagaaggagattgcgaaacagcagttggagctatagccaatattgaagataaaaatattaatttagaagcagaattattttcagttgatggaaaacaaagattttatcataatgctacaaaaaatattaattttgcatttgaattgggaacagaagttggcgaaattctaaagaaagaatcaaaaaattcatataaaagataaa

SEQ ID NO: 202173 - DNA, 919 bp, Unknown
  Bacterial polypeptide expressing nucleotide sequence isolated from the Sargasso Sea
atgaataaaagaataacaattggatcaagaggtagtaagttagcattactttatgctcaaaaggctaaagataaaattattgaaaatactaacttagttgatggggacattattatcaaatctataacaacaaagggtgatcaaattcaggactcaaggttatctgatgtaggagggaagggtttattttctagtaatattgaaaaggaacttaaaaataatagcattgatatagctgtccatgcacttaaagatatgccagcgattgaaacagatggacttataacagatacattcttagaaagaaacgatcctagagaaattttaataactaataataaaaaaaaacttaaagaattaaatttaaaatccactattggaacttcatcttatagaagggaatttcaaataaaaaaaattagaccagatattaaatgcaaacttataagaggaaatgttgatactagaataaaaaaattaaaagaaggaatttatgatgcaataatactatcttatgctggaataaaatatttaaactatgaaaatgaaatttctgaaattttttcagctgaagaaattattcctagtgctggacaaggaattattgcattgcagtgtagagatgaagataaagatacagtatctattttagaaaaaattaatcatctagaaacttataaaagagcacatgcagaaagaaacattttaaaaattttggaaggagattgtgagactgcaataggtgctcattctaaaataaatggagatcagattactttagaagcagaacttttttccttagatggctcacttagatttcatgaaaaaaaaactgctaaaattgatgaatataaaaaaatcggaacagaaattggtaaaattttaaaacaaaaatcaaaaaattcttataaaatataat

SEQ ID NO: 202174 - DNA, 769 bp, Unknown
  Bacterial polypeptide expressing nucleotide sequence isolated from the Sargasso Sea
tatggcatactctgacaatggaggagaattattctcaaaatctaacattgtaaaaaacaaagtttgcccatgctgttcaactgatatctgttctaagaccactggtgaaacctttgtccaatacagaaatgtaattggaaattatggtgagccaaactatcgtgatattgtagtctcaaagtcagatgatcatggaatgatctggcagccaccaacccttgtaggtgatgatggttatgagacaaatggctgtgctcacacagtttcctcaatggcacttgacagcaatggatacttacatgccacatggtacacaggtggccgttcaaatgctgaaggtccaggtctttactatgcagtaagcaaagatgacgctgaaacatggtcctatccaaccaaagtattcggtgaaacattcttcccccctgcacacatcaaaatcactattggttctgatgatgtcccaagactcgcatggtctgacagaactgtaactggaggagaggtttacactgcagcaattgatccaaagaccaatgcactccaaggaatgcaaaaagttggtagtggtgacaatgcatggattagttctgttggcggaatcaccgcaatgacatggaatagctctagcgtctggtgggatactgataatctagacgaagatggagtctatgaaaaatggaaagacggtgattacactggcggaaacataaaggacaaacagactgaaggtgaaatctttgttagaatctgggatgaccgtctctag

SEQ ID NO: 202175 - DNA, 1112 bp, Unknown
  Bacterial polypeptide expressing nucleotide sequence isolated from the Sargasso Sea
gatggccgacgcacgtaaggagtggctccgtggctacgacccgaacgtcttcgtcaaccactcgtcgtctcagatcacctacacggacttcgtcgacagggagctcatccacttctcgaacgcggataacgtccgctcgatcccctcgatggtcgacggcctcaagccgggacagcgcaagatcctcttctcgtgcttcaagcgtggcaagtcgatcatcaagaacgagattaaggtcgcccagctcgccggctacgtctccgagcactcggcgtaccatcacggcgaggcgtcgctcgcgggcacgatcgtcggcatggcgcagacctttgtcggctcgaacaacatcgctctgctccatccggccggacagttcggtacgcgcctcctcggcggtaaggacgcggcgtcgccccgttacatcttcacgaagctcccgtcgctcacgcgcctcatcttccacccggatgacgatggcctcctcgactacctcgaggacgacggccaggcgatcgagcccaagtactacgtccccgtcctcccgatggtcctcatcaacggtgcggagggcatcggtactggatggtcgtcgtccgtccccaactacaacccgagggacgtcgtcgacaacctcaaggccatgatgaagggagagcagatcgagccgatgcacccgtggtaccgcggcttcaccggcacgatcgcgccctcgaatgaggcgagcacggcgttcaccacctacggcaacgtcgccaagcttgatgatgagaccgtcctcgtctcggagctccccatccgtaagtggacccaggattacaaggatggcgtcctcgagccgctcctcggcaatgtcgccgacccgaaggagaaggagaagatcgtgccgctcctcaacgacatccgtgagcaccacaccgatacgaccgttagcttctctctcaagttcgccggcggtgcgaaggccctcagcgagcacgaggaggctggtaccctccacaagacgctcaagctctcgtcgtcgctcgccacgacgaacatgacactcttcgacgcgcacggccgcatcctgaagcacgagtcgccggaggacatccttacctccttctactccc

SEQ ID NO: 202176 - DNA, 685 bp, Unknown
  Bacterial polypeptide expressing nucleotide sequence isolated from the Sargasso Sea
atgacagcaattattctagctgcaggaaagggggagaggttgaaaccattgaccacacagaccccaaaacctttgataacagttgcggggaaaactttgcttcagagaaacattgattgcctggatcaatcgggaataaaaaagattattgtcaatggttcaaggatgggggatcaaattgaatcattcctcgaaaatcataatcaatcaaatataagttttgattatattaatgagggtgaggagccacttgggactgctggtgcaattttcaatatcattgataaaggtttgataaatgatgatcatttttgggtgatcaatgcagatatcatgacaaacttttcttttagtgctattcaattgaattctagtgtgatgggccatatcatattggtgccaaatcctgagcataatttatcgggtgatttctgtttagaaggagatagagttacgatttctggtaatcagcgatatactttcagtgggatcagttatttttcaatccagtgcttcattcaatcaacacagagatattttgcactcgcagatttgttaagagagcatatcgaaaaagaaatgattacgggacagttatttcatggtgattggctggatgtaggaactgcagataggttagcagaggctgagaatatttgcagaagaagacaaaataatgaataag

SEQ ID NO: 202177 - DNA, 604 bp, Unknown
  Bacterial polypeptide expressing nucleotide sequence isolated from the Sargasso Sea
attgactggtggccaattagccgtcaaatcacttaaaaaagaaaaaataaaacatgtatttggtttaatagggtctgctacaatggaaatatttgatgctctttatcatgaaaaaaatataaaatttattggagtgagagatgagaggaccggtacacatatggcagatggatatgcaagagcctcaaatcaaccaagtgttataattgccggacaaaatggacctggtgctacaaatctagttactggattagcacaagcaaaagctgctttttcacctgtagtttctttagcaggtttgtattctacaaaagataaaatggaagatgcatttcaaggattaaatcagcaagctttatttgaacctgtaacaaaaaaaacttttactgtaaaaaaaacaaataaaatttcgaaaactctaagtaaagcatttgaaatagcaatgtctcccaaaagaggtcctgtttgtgttaatttaccaagaaatatacttgcaaataaaacttatagtaaaattaatattaataaaaaatcctatttaagcttaagtaacgacaaagggaaaataagttcaattaaaaacagctgcaagcttgttaattaa

SEQ ID NO: 202178 - DNA, 549 bp, Unknown
  Bacterial polypeptide expressing nucleotide sequence isolated from the Sargasso Sea
attattctggccattctgatgttatgggaggaagtttagctgttaataaaagggtttttaaatatgttgagaaagcaaataagattactggtttaagattaggaccagatgatgcatatttgataataagaggtttaagaactttagatgttcgcttagatagacatgaacaaaatgcaaaaaaagttgcttcttttttatctcgtcataaaaaagttaaacttttatatcctttcaaaaaaggttcccacaattataaaatgtggaaaaagtattactcaggcgcatctggattaatgggtttaaaaattaaagcaaaaaataaaaattctattaataaatttgtaaattcattaaaattgtttggttatgggtatagttggggtggttttgaaagtttggcattacatcaagaatttagagaattaggaaatagaagttttttgaaattagaaaaaaatgaacacttagtcagacttcatattggtctcgaagatccaaaagatttaattaatgacttagaaagatctttgagatttattagatgac

SEQ ID NO: 202179 - DNA, 978 bp, Unknown
  Bacterial polypeptide expressing nucleotide sequence isolated from the Sargasso Sea
acccaaatggaatttcaacaagcataccagagcaagcgcaacggagatttgttcgatcaatcgagggctttgaaagtgcagaaatttctcaaccaggatatgccattgagtatgactattttgacccaagagaccttaagccaacactggaaacaaaaagcatctccggactcttttttgctggtcaaatcaacggcacaactggatacgaagaagcagcggcccaaggccttgttgctggaatcaatgcagcgcttaagatccaaaacaaagcagcttggtcaccaaaaagaagtgaggcctatcttggcgtattggtcgatgatttggtaacaagaggaacaaacgagccctatcgaatgttcacaagcagagcggagcatagactggtcttaagggaagacaatgctgacaaaagactgacacctttagccagagaaatgaacctcatctcagagactaggtggataaaacattgtaataagcaagaaaaaacagagctcgagatacaaaggcttaaggatacaaaaatcacaatagagcaactaaagaatatagacagtgagagcaaaaagaatgattcaaacaaaaccgcttttgagctactcaagagaccgggcgtaacatatgagaaaattgtaagcgaaataggccatagagcacactaccaaaaaaacactctcgaagatgaaacaatagatgacttgattcaaacagaggcaaaatatgaaggctatctaaagcgtcaaaaaagagagatcgagaaccaagaaaaatatacaaacttaaagctcccaaaaaacatagattactctagcctcccaggactttcgaacgaggtcagacaaaaactagctgaatttgagccaccaacaattggacacgctgcacaaatacaaggcgttacaccggcatctatctcggtattaatggtgcatcttaaaaaacaacaaattaaaagagcggagggaatgtgaa

SEQ ID NO: 202180 - DNA, 1615 bp, Unknown
  Bacterial polypeptide expressing nucleotide sequence isolated from the Sargasso Sea
atgaattacggatttgttatagataatcgcatgtgcattggttgccatgcttgtactgttgcttgtaagagtgaacatgatattccaataggagtaaatcgtactcatgtaaagtatattgaaaagggacaattcccaaattcttctcgagaattttcagtacatagatgtaaccattgtcatgatgcgccatgtgttgagatatgtcctacaactgcgctgtatgatcgtgcggatggtatagttgattttgatagtgaccgttgtataggttgtaagtcttgtatgcaagcttgtccgtatgatgcattatatattgatccagatacccatactgctgcaaaatgtaattattgtgctcataaagtagatcatggatatgaaccagcgtgtgttgttgtttgtccggttgaagcaattatttctggtgatttagatgatccaaactcaaatatttcacatcttgtgaaaaatgaagaaacaatgacaaggaagccagaaaaacaaactataccaaatttatattatataaatggatctaatgagatgctagatccaacagcaacggaaagaacttctgattatttatggtcagaacaatctaaaggagtagggcactttgcaaaatatgccgaagaaagagtagctgaatcaaatactgaaaacttattagtacaattagcaatggaaaattcgtcaaaattaaataaaccaatcgatagacgtgcaattgatgatgttgcaaaagaaatcaataatgaaatagataataaggaagtcaaacgtacctatgatacaccaagtaaaggagtattgtggggttgggaagtatctacctatgtttggacaaaagcgattgctacaggtacatttcttatgctttctttttattcattattttttggcagtattgataattcgatagaaataaatgggatgctcatttcattaatctttatggcaattacaggtggattacttgttatggatttagatagaccagaccgttttctatatgtactattacgacctcaatggaaatcatggttagttcgtggagcatatataattactgcctttggtggaatagtttcgttaaaactaattgatactatgtttgaattaggtatgggatttttatggtatgttggtgcgatcttttctatcctaggggctatttatacagcttttttgtttgctcaagcgcgagctagagatctatggcaatctaaatggacttcagcatttcatatgttaatccatgcaatcatggccggaactatcgtaataatttttattgacaaatcatcactaaatacgttttcggatatactcatgtggtgcattattataaatttaataataattacaaaagaaatattctttcctcatcataccactgatatagatcaaactattacattaatgacaaaaggatactatgctagatatttttggactggaattattattggaaatcttattccatttttaatgcttttaatttttccagatacaattatatgcctaatagctggttctttagttatgctgggtatactcttaactgaattagtaagaattagaactcctcaaatgataccattaagttaaa

SEQ ID NO: 202181 - DNA, 1189 bp, Unknown
  Bacterial polypeptide expressing nucleotide sequence isolated from the Sargasso Sea
tttgccaataccattcgacataattttaaatgcttcagctttagttgtattaattacttttgtttatttaaaggtttcatggaaagaatcaattattgtccagcgtgaggaaatatttaacgataaacaaagtttatttgggaagttatttggatttttaatattatttttgcttgtagctccaggtgcaattagtaatgagtcagccaaaacatcaatcgctccactcatgttatgggtgtttttgtggattggtgttccggttcttggtctgttgtttggagatatatatgcaaaatttaatcctttaaatctctttactgtttcctcaaataaacctcaatcagtatattttgcttgcgttttgtttattgggctaacctggtttgagctggtgtggagaaaacctggaaaccctctcaatattggggttgtctttatattgctttttattagcgtaaatttattaaggtattttttaaaaaaatcattaattgaagttgatccattactattacttcattatttgtacagtaagttgaaactattcaactcgagaccttactttcgatcattgcttgataacattggaaatcttgcaaggcttaggggtattgagtattttgtacttttaatgattggtaccgtaacttacgatggtttgagagaaaccactttctggtatgaacaattcggaccaagaataaatgatatgggattctcaacaatgatgttctttctaatgaatctagcaacaattctgttttatcgttttgcatgtttctttgcaataaagattggagggtctgatcttgagctcaacaaggtatcaaatctgtttggacatacaatgttacctattgcttttgcatatcacgtaacacattatttaactttgttactatttgaatctcaaactttcttttttcgattgaacgatcccattgggactggtttaaatttatttaatgctcaagaaccatctattaactactttgtagaacctatagttatttggagtgttcaagtaggtgttactcttttaggccatatgcttagtgttattctagctcatgatctagcggtgaagctttttggtcatcaacaaagtgataaaacacaatacatatttttatttataactgttgcactaacacttcaggctttatttgttttgagtgtcggataa

SEQ ID NO: 202182 - DNA, 1487 bp, Unknown
  Bacterial polypeptide expressing nucleotide sequence isolated from the Sargasso Sea
cctggaggagttaacacctttatctgattttactcctgatgcaggaggtatatttgctggtggttattatggagatgttgatttccctgctgcttacgatacttcctatttagattcagatggttattatgctgaaatccaaattgtatcagatctagatgggccatttaatttccaagcaggtgctaattatggagaaggagaagctcacactatttatgatgtgtattttaatggtggtgatgtagcaagtttattcccagcccttcaaggtcttagattatggcctggacatttcagaaatgagagtaaaccagctaaaacagaaactatcggtatttatattgatggaacttatgaggtaagtgaagatgtcagtatatcagttggagtaagacataatgatgttacaaaaactgttcgtgatagatctttattattaaattcaattattcttgctggtggtacggctcctggagtaccagtgtttgcaacagtgcaaacaagtgatccaaatttatttggtattcttactggtcaaactggtccggctcaaaatacattggctgattttcctgccttaggagaacaaagagcaacatacggcttacctactgaaataactgaagaagaagtaactggacgagttgtagtaaactggacacctgatcttgaatttactgatagtactttagtttatggttcttattctaaaggttatggtcctgggatgtttaacccgattgttaatccagctcaatatcctggcgttcctacagagtcagatggagaaatgatagatgcatttgaaattggaacaaagaatatattacttgatggtactttgttagccaacctatctgctttccattacgaatacgatggaatgcaaacaacaaaaattactaatcgtacagctgttaatgtgaatttagatgctgagatgactggttttgaagttgaattacaatggaaagttgcagcggttcctggattgactgtcgaatttaatgggtcagtacttgatactaaatatgctagcggaacaacggatattaatcctaccaataaaggaaataatgatcctagcttatggcagcttagatgtatcgatagttggggaactatggctttcccaaaaatgggattacttgctggtataggtggaggcattttaaatcttgatcctactgcaggtgcattagatatgattgcagcgccaaaaacattatctgttgatggctttacatcagctgatcctagcgggactgttaatccattaattcaaattggaggcatgggagcattacctactatcggtcattgtgccaatattgatggtaagcttactgctgcaggactaatggctgaagatggaacacttggtatatctaaaccaatcgatattagtggtaatccattgccttactcacctgaggtttcatattctgttgcacttcaatatggatacacttatcaaccccagg

SEQ ID NO: 202183 - DNA, 1768 bp, Unknown
  Bacterial polypeptide expressing nucleotide sequence isolated from the Sargasso Sea
aatgttaagaaaaatattaagcaaaggctatcagaaagcatagaaacagctttaacattatcagatggacttatatatgttcaaaatctagaaaatgataaaatagaaatttattcatcaaaatttgcttgtcccgtctctggatttactattgaagaaattgagccaagattattttcctttaatgcccctcaaggtgcatgtgaagaatgtgatggattaggaatagaaaaatattttgatgaaagaaagattattcctgatgaaacaagatctataaatcaaggagcaataaaaccttgggaaacaaaagtttttggcagacaaaggagattttttatagaaactataaataagatattaaaaaattataatatatcaataaatacaacttgggaaaaaatacctttaaaaatcaaaaatatcattcttgatggtgataaaaagaatgaaattaaaaatttagataactttgagggaattataaattatattgatcgcaaatataatgaaactgaaagatggtgggttcaatatgaattagaaaaatatttatcagaaagagattgtgaaatttgtgaaggatttcgcttaaataagaaaccattatcaattaaaataaataatgttcatattggagaagtcacaaagaaatcaataaaagaatgtctagattggtttgaaaatttatcgaagaaattaaataaaaatcaattaacaatagcaaaaacaataattagagaaatttatgagaggcttaattttttaaataaggttggattagattatatttctttatcaagagctagtaaaacattgtctggaggagaaagtcagagaattagacttgccagtcaaataggatcaggattaacaggggtactgtacgtattggatgaaccatctattggtcttcatcaaaaagataatcgtcaattgattgaaacattatttagattaagagatttaggaaatactgtgatagtagtagaacatgatgaagaagctattaaaaatgcagatcatattattgatataggtattggtgcaggtattcatggaggagaagttatagctgaaggaccaatacaaaatattactaaaaataaaaaaagtttaactggtcaatacataaataaacaaaaaaatataattgtaccaaaaataagaagaaagaaagataaaaataaaatccttcagatacataaagcaaatttaaacaatcttaaaaatttatcagtgagcttccctttaagtaattttatttgtgtaacaggagtatctggtagcggaaaatcttcattagttatagatacattatatcaacgcttagatgaatattttaataaatcattaaataaagaagaaaaaaattttaatattagtggagttaagaatatagataaaataattgatatagatcaatcgccaattggtagaactcctagatcaaatcctgcaacttatactggttgttttacaccaataagagaatggtacactactttaaatgaatctcaaataagaggttacaaacctggaagattttcatttaatgttaaaggtggaagatgtgaatcatgtgaaggtgatggagtcaaaaaaatagaaatgcatttcttagcagatgtttatgtagaatgtgatgtatgtaaaggaagtagatataatagagaaacattagaagtaaaatataaagaaaaatctatttcagatgtattaaacatgacagtagaagaagggtataaatttttttataaaattccat

SEQ ID NO: 202184 - DNA, 1511 bp, Unknown
  Bacterial polypeptide expressing nucleotide sequence isolated from the Sargasso Sea
aatgatcatcccaagagtcactcaaccttatgaacctggattaccagctcttggtgatgacttagaaaattatttggtaactggcggaggttctctcacattaaaattagaaccagatgataaatttaaaataattaatttagaaggccatcaacaggccgagattgtatgctttaattctaagcgagagtgtaatctatcagctttaggtcttaataacgagcacaatggtcaattaacaaaaaaaatcctttcgagcgaggaggagtcagctcaaatagctcgaactaaattaaaaaaacttggatatgagttagagtctattaatcaatcgattttagtattttctcaaaattcactttcaggttcaattgaggagtttaaaacaaacgactccattgtttgtataatttctgcaccaggcgaaagtgaaattacacatgaaaatattcctgcatccgaactacgagtaattgttcaaagaaataaaaaacgtgaagagggggaatttttattaccagaccctttaatggatcctgttgaagaaatttttgttaaaagatataccgcaatggcctatgaagtcaaagaaggagactttattcagataattgatgtttatggaagacaatgttctgactttatggcattcgactcagagagccttcaaaaaggccaagagctctcaatagatacaactaacagtagatatttaatgggaagtgcttttccaatgccaggtctccattctaaatattacgatgaaaatcaaatgcccatggttgaagtctacagagacactgtcggaagacatgatacgttcggtactgcatgtacttcaaaattttatgatgatattggttattttggtcatccaaattgctctgataatttcaattatgtattagataagtttactgtgagaaaaagactaggttggaatgctataaatttattttacaacacagccattgatgcaaataatgctttaatttttgatgaaccatggtctagaccaggagactatgtgatgtttaaagctctgaaaaatttagtttgtgtctcctctgcctgtccagacgatgtagatgcagctaatggatggaatcctactgacatttttgttagagtctatagaccgaatagaccttttagtaaaggaatggcatttagaatgaaagcagactctgaacctaaattaactaaagaaactggttttcacccaagagtatcaaaacttactgaaaatattgttgagtacaaaggcttctggttagcttctaattataataatcacggggcgcaccaagaatatgaagcttgcagagagcgtgctatcattatggatttatcagcacttagaaagtttgaagtaagaggtccagacgctgaagaacttttacaaatgacttgcactagaaacatcagaaaactatctgttggccaagttgtttacactgcgatgtgctacgagcatggaggtatgcttgatgacggtacagtattcaaaa

SEQ ID NO: 202185 - DNA, 1651 bp, Unknown
  Bacterial polypeptide expressing nucleotide sequence isolated from the Sargasso Sea
tttaaaaaaagaaaaagttaaatatgtttttggtttaattggttctgcaacaatggaaatgtttgatgctctttatcacgaaaaaaatataaggtttattggtgttcgcgatgaaagaactggaacacatatggctgacggatatgctagagcatctaatcgacctggtataatacttgctggacaaaacggtcctggtgctacaaatttagttactggacttgcgcaagcaaaagctgctttttctcccgttgtttcaattgcaggctcttattcaacaaaagataaaatggaggatgcatttcaaggtctagatcaacaatctttgtttaaaccagtaacaaaaaaaacttggacagtaaaaaatactaaaaaaattccgaaaacttttagtgatgcttttaatttagcaatgtcaccccgaagaggccctgtatgtattaatttaccaagaaatattttagcaaaaaaagaaaattttaaaataaacgaaaaaatccaatcttttgataatcaaaactcaactaaagcaaaatcttactatattaaaaaagctgtgcaaattatcaaaaactcaagcaagactgttattattgctggcgcaggaattaaatattcattaaaatataaaaacgtagttaaattggcagaactattaaacgtaccaattgtaactgccgctggtcatggagatgctataccatttaatcataaactaaatgctggacagatgggtcctagaggtaatttggttgcatccaaattagttaaaaatgcaaatgttataattgcgcttggaacaagacttggatttaattcaactttttattcttatgaaaacataaataaaaaagcaaagatcatacaaattgaattagaaaagagaatgataggaagatactttcctgtagctgtaggaatttatggtgatgcagcaacaatagctgaacaattatacaaagaaattaaaaagcaaaatattattcttgatgtacaaaaatggactaataactatttaaatgaaagaaaaaattttttgcttgaaagagataaatttgcacagaaaaattttcctattcaacccaaaagtttattcaaacaattaagacaagtgcttcctaaaaactctgcaataactttagatgcaggtacactttgtttacaagcaacagatgctcttgaatattacgatcctccatctttgtttactcctttagactttggtttagttggtttttcttttgcatgtggtttaggtgtaaagattgcaaaacctaagaaaaaagtaattagccttatgggagatggggggttcgggatgacaatctctgaattaagtacagctgttgaatataaaataaatacaataactatagtcctgaacaataaaagttggggagctgaaaaagcttatcaaaaagatttttatggaaaaagatacttaggtgctgatattagcagtccaccttttgataaagttgcggagctctacggtgctaaaggttttaaggttaaaaaagtttcagaaataaaccaagctgttagagaagctttaaaaataaataagccagtagtcattgatgttgatgtagatccaaaagcactatacagttttagaagagatagttttaaacataaatcaaaaaaatga

SEQ ID NO: 202186 - DNA, 1254 bp, Unknown
  Bacterial polypeptide expressing nucleotide sequence isolated from the Sargasso Sea
caagcatccccgaaatagtttgctatgagaaacaagaagattggggaggtctgtggaattatagttggagaactggatctgatcaatatggagatcctgttccaaatagtatgtaccgttacttgtggtcaaatggtccaaaagaatgtttagagtttgcagattattcgtttgatgaacatttcaaacaaccgataccatcttttccaccaagagaagttttatacaattacatattaggtagagcaaaaaatggtaacttaaaaaaatatattaaacttagtacgacagtaacaaacgtcaatttcaatggtagtcaatttgaactcacatcaataaataaaaaagaaaataaaataattaaagaaatatttgattatgtagttgtttcaactggtcacttttctgtgccatatattcctgaatatgaagggatgaaatcttttcctggtagaattttacatggtcatgattttagagacgctgaggaatttagaaataaagatgtcgttgtattaggaagtagttattctgccgaagatatagctctccaatgttacaagtacggagctaaatctgtaactattggttatagaaataatcctatgggctttaaatggccaaatggcatgaaagaagttcattacttagataggctagagggtagcaaagcaatttttaaggatgggcatgagcaaaatgctgatgctataattttgtgcagtggctatttgcatcattttccatttcttgatgacagtttgaagttaaaaacaggcaatcgtttatatcccccaaaactttttaaaggagttgtttggcaagataatcatcaattaatgtatttgggaatgcaagatcaattccacacatttaatatgtttgattgtcaggcttggtatgcaagagatgtaattatgggaaaaattaaattgccaagtgatgctgaaattgaagcagatataaaaaaatgggttgcagaggaggaaagtttggcagatccaattcaaatgatagactttcaaacagaatataccaaagaattacatgctgcttctgattatcctgcaattgatttcgagttaatgagaaaacattttaaagaatgggagcatcacaaagaagaagatattttaacatatagaaatagatctttttcttctcctgtaactggaacagtggctccaattcatcatactccatgggcagaagcaatggatgactctatggatacttttatgaaatcaaaataaa

SEQ ID NO: 202187 - DNA, 1714 bp, Unknown
  Bacterial polypeptide expressing nucleotide sequence isolated from the Sargasso Sea
tggaagaggagcaaaaccaaaaattggattagttggctataatgtttcgaatttaagaattccaaattttctaagaagttgggaaaaagcagaacataagccctctagaattgcatcaccgcttgatattatgattgaagctcctattggtgcagctgcttttaataatgagtttggaagacctgcaaccctaggttatttcagatgctttgaaactgattttaaaaataacaaagcttttggttatcacaaaccaattatgttggcaggtggaataggcgaagttcgcgatgctaataattttaaattacaaattgaggaagattatttagttgttgtacttggaggacctgcgatgttaattggtctcggtggtggtgctgcttcctcagtttcatcaggagacagtgacgaagatttagattttgcatcagttcaaagagataacgcagaaatggaaagaagatgccaagaagttattaataggtgctcatcacaagataatagtttaattgaatttattcatgatgtcggtgctggaggcttatctaatgcaatacctgaattagctaaagattctaatttaggagtatttattgagttatccaaaataccaaattctgacaaatcgatgtcacccatggaaatatggtccaacgaatctcaagagagatatgtcttggcaatccacaaaaataataaagagtcatttgaaaaaatttgtaaaagagaaagatgtgaatacgccatagtcggacatacaacaaaagaaatgtctgtaaagttatatgatgccgaaaatgaaaactaccctgttgatgtacctctatcaatgctttttggagatcttccaattacagagatggaggtttttgaagaagttgctgcagaaatacatgaagataattcagaagaatttggtcttgatagctcgatcacaaagattcttcagcatccgactgtagcttcaaaatcctttttaataacaattggcgacagatcagttggtggcatggttgcgagagatcaatttgttggaccttttcaagttcctgtttctgattattctcttagtctaagatcttttacatcaaataaaggtgaggcggttactattggtgaaaaacctactatagccctagttaatccagaagcatctatgagaatggctttgggagaagctctcacaaatatgtctggtgtggttataacgggattaaataacgttcaagtatctgcaaattggatggcagcatctggagaaaattcggacgatttagcacttagatctggcgtcgaggctttatcaaaaatagcgattgatttgaaagtttctattcctgtaggaaaggattctttatcaatgagaacaaaatggtctgaaaaaagcagagattttgaagtgtcaagtcctctttcaggaattgtaactgcaatggcaccggttgaagatgttacagactcagttacacctgaattgaatcttaatgaaaatacatgccttctattggtaaagctagaggatgaaaatagattagctggatctattttttctgaggttactcaatcgacatataaacaaaccccagacatagaaaatatcgataaattcaaaaatttgtttaacacaattcaaaatttagtaaaaaataaaaaaattttggcaatgcatgatatttctgatggtggcttaattacaacattactagaaatg

SEQ ID NO: 202188 - DNA, 2524 bp, Unknown
  Bacterial polypeptide expressing nucleotide sequence isolated from the Sargasso Sea
tttgatattgagagaatcgaagttcttcgtggtcctcaaggtactttatatggttctacagctacaggtggtgttgttaatattaactttaagcaacctgttatgggagagattgaaggatcaggtgagatttcacttggtaattataatcacgaagtgatgaaagtagctcttaatattccaatgggggataatgttgctttaagagtttctggaatgtctcaagcaagagatggttttacaacaaacaatgtaacaggtaacgatattgatggaagaaatatggatcaattccgtgccattctaaaagctaatctctctgaagatacaaacataacacttactgcatttagacttgctgaaaatagtacaagagcgcgtgcaggaagaacaatgtgtcatgcaactgaaacacctaactggggttgtcatccaaataagattggatatgacggtgctcctcttggcgcttcaggtctaaatggtatcacactcgcgttatcaggtttattaggtttctcaccacttgattacacaaaatcaaatgctgtagttggtgaaagaactgttaatatgtggcgtgatcctacttatgttactaaagaagaaggattttcattaaaactagaaacaaaaataaatgatgattatttagttgcggttagagctgctaaatatactaactatgttatgtctcaacaggattactcaaattcaggaacagatacaaaattaagtccatttaacccagcattccctgggggagttacaccattatccgattttactcctgatgcaggtggtatctttgctggtggatattatggagatgttgatttccctgctgcttacgatacttcttatttagattcagacggttattatgctgaaatccaaattgtatcagatctagatgggccatttaatttccaagcaggtgctaattatggtgaaggagaagctcacactatttatgatgtatattttaatggtggtgatgtagcaagtttattcccagccctgcaaggtattaggttatggcctggacattttagaaatgagagtaaaccagcaaaaacagaaactattggcctttatattgatgggacttatgaggtaaatgaagatgtcagtatttcagttggtgtaagacataatgatgttacaaaaactgttcttgatagatctttattattaaattcaattattctagcaggtggaacagctcctggagttccagtttttgcaacagttcaaacaagcgatccaaatctatttggtattcttacaggccaaactggaccagctcagaatacattagctgattttcctgctttaggtgaacaaagagcaacatacggcctacctactgaaataactgaagaagaagtaactggacgagttgtagtaaattggacgcctgaccttgaatttacagatagtacattagtttatggttcttattctaagggttatggtccgggaatgtttaacccaattgttaaccctgctcaatatcctggtgttcctactgaatctgaaggagaaatgattgatgcatttgaaattggaacaaagaatatattacttgatggtacattgttagccaacctatctgctttccattacgaatatgatggaatgcaaacaacaaaaattaccaaccgtacagctgttaatgtgaatttagatgctgagatgactggttttgaagttgagttgcaatggaaagttgcggcggttcctggattgactgtcgaatttaatggatcagttcttgatactaaatatgctagcggaacaacagatattaatcctaccaataaaggaaataatgatcctagtttatggcagcttagatgtatcgatagttggggaactatggctttcccaaaaatgggattacttgctggtataggtggaggtattctaaatcttgatcctactgcaggtgcattagatatgattgcagcgccaaaaacattatctgttgatggctttacatcagccgatcctagcgggactgttaatccattaattcaaatcggaggcatgggagcattacctactatcggtcattgtgctaatattgatggtaagcttacagctgcaggactaatggctgaagatggtacacttggtatatctaaaccgatagatatcagtggtaatccgttaccttattcacctgaggtgtcatattctgttgcacttcaatatgatacacttatcaatccaggtgtagttgctactgcaagaattgattattactggcaagataatatgtggtctcgtccttacaaaggacctagagatggtattgatgaatatgataatattaatgcaagtataacttttgcatcagttgaaaatggctggtatgtgagaatttggggtcaaaaccttgctgatgactctaatgtaattgcacattatcatactgaaaatacatcaggtatgtttagaaatgaattccttatggatccgcaaactgctggtatcacacttggtcttcaattttaaa

SEQ ID NO: 202189 - DNA, 1459 bp, Unknown
  Bacterial polypeptide expressing nucleotide sequence isolated from the Sargasso Sea
tgctgaaaaaatactaaaagaaattaaagatagattaactttccttgaggatgttggtttgagttatttaactctagataggagtgcagaaactttatcgggtggggaagctcaaaggataaggttagcaagtcaaattggatcaggtttggttggggttacttatgttctagatgagccatcaattggtcttcaccaaagggataatgcaaaacttataaaaaccttgaataatcttaaaagtcttggaaatactgtgatagtagttgaacatgatgaagaagcaattaggtctgcagatcacataattgatattggacctggtgcaggaaaacatggtggagaaatttgcgctcaaggtgatttaaactcaattttaaagaataaagattcaattacagcaaaatatctttcaggaaagaaaaaaattaagattcctgccaaaagaacaaaaatcaaaaatgaaaaaatcaagataatcaatgcttgtgaaaataatctcaaagaagtttcagttgatattcctgttgggttatttacttgtgtaactggggtatctggatcaggaaaatcatcattaataaatcaaacattgatgcctattagctcatttgttttaaataaatctaaactatctaaagaaataaattgtgaaaaaattgagggtttagatcatttagataaggtaataaatattgaccaatctccaattgggagaactcctagatcaaatccagcaacatatactggacttttttctcatataagagatcttttatcacaaactgttgaagcaaggtctagaggatataaaccaggaagatttagttttaatgtgaaaggtggaagatgtgaggcttgccaaggagatggaatgattaaggtagagatgcatttcctagcagatgtatatgtaaaatgtgatgtttgccaaggtaatagatataacgaacaaacgttagaaataaaatataaagacaaaaatataagtgatatcttaaacatgacggtcgaagatgcattagatttctttgaagcacatccatcaattaagaaaaaattagttactctaaatgatgttggtcttggatacattacacttggtcaatcagcattaaccctatcaggaggtgaggcacaaagaattaaattagctaaagaattatctaaaagaagtaccggaaagaccctatttatacttgatgagcctacaactgggttgcattttgctgatatagaattgcttttaggtgttctggaaagacttaaaaatcagggaaatacagtagttgttattgagcataatcttgacgttataaaaacagctgactggataattgatctcggtccagaaggaggttctgatgggggtgaaattgttgcagaaggatcacctgaggatgttgctaaagtcaaaaagtcttttactggtatgtttttaaaagatgttttgagttaa

SEQ ID NO: 202190 - DNA, 1107 bp, Unknown
  Bacterial polypeptide expressing nucleotide sequence isolated from the Sargasso Sea
aaaaaatatggtttacgtccagaacaattcatctttgatgttctaacatttactcttgctactggtgaagaagaatttcttgatgcaggaaaacatactttggaaggaattaaacttgtcaaagaaagatttccaacatcatttaccactcttggattaagtaacatcagctttggtcttgtcccacaagcccgtcgtgtattaaattcagtatttttgtatcatgctgtacaaaatggtcttgacagtgcaatcgtaaatgcacgtgaaatcactccatatactgaaatcgatgaaaaggaaaaaaaaatagtcgaagatttgatcttcaataaacatcctaatgcgttatcagacctaatcactcattttgaaaataaaactcaggatccatcatcaaaaaccaagaaagttgatgttgatccaacatggcctgcaggacagcgctcaaatttcagaattattaatcgattaaaagatggaatagaaaatgatgttgtatctgcaattgtagaaaaactatctcaaaaggatattcttgtggataatgatggtgttttatcgattaatgccgcaaaagaagttacacaccaaggagcaattcaaacattaaatgatgatcttttacctgcgatgaaaattgttggtgacaaatttggtgctggagaattaatccttccctttgtactaaaatctgcagaatgcatgaaagctgctgttaaagaattagaaaaatatctactaaaagaagagggtaccagtaagggtattttggttctaggaaccgtgtatggagacgttcacgatattggtaaaaacttggtaaaaacaatcttcgaaaataatggatacactgtccatgatttaggaaaacaggtacctttacaaaaattcgtagaaaaaattaatgaggtaaaacctgatgctgtaggtctttcagcattgttagtatcgacatcaaaacaaatgcaattttttgtcgaacatgcaagaaaaactgatgtcaatattccaatactatgtggcggtgctgcaataaacagtaattacattaaccgaattgcaaaacaagatggaatctatgaacctggaatgttttactgtggt

SEQ ID NO: 202191 - DNA, 1363 bp, Unknown
  Bacterial polypeptide expressing nucleotide sequence isolated from the Sargasso Sea
atgaaaataccacaattaagaaaaaaactggaggttaaatcttgccacaatatcagttgggaagataattacagctgggttcaccaagaaaatatccttgaagtccttaaagatggaagcaaacttctccctgaagtcagagaatatttaaatgaagagaataaatatactgactttcaattgaaagacacatctgaaatccaaaaaacattatttaaagaaataaaaggcagaataaaattagaggatgaatctttaaagtacaaagataaagcatatgaatattggactaaaaccactgaaaaagggaactattctataaaacttagaaaaaaaattggtactgaaaatattgaagaaatttggaatggtgatttagagaaaaaaaaactaaatacaaattattttggagtaggtgatttagaggttagttataacgacaaatatttagcatactcattggatgttaaaggctctgagtattttacaatttatgtaagagatatcaaaactaatacttttgttacagaagaaattaaggatacttcagggtcaataatgtttagtcttgatgacaaatttattttttactcaaaacttgatgaaaatcataggcctagaaaaatatttagacacgaaattggaaaacctgtcaaagatgatattttaatttttgaagaaaaaactaaagcttttactgttggtattggtcttacatcagatgaaaaatactatttaattaccagttcagatcataatacaactgaaaaatattattttcatgttgatgagaaaatacctgagcctaaactgataaaagaacgtgagaaaggtataatttattctataaattcgtggaataataatttttacatgcatactaataaagatgcagaagactttaagattttagtgtcaaaaaatattgattcaaatcattgggaagattttataagtgctaaagatgagactttgataggaagtttagtatttttaaataattggattataagaacagaattgacaaatgctttggataaagttttcataagaaatataataacaaatgaagaagaggagctaatatttactgatgaaaaagtttatgatccaagtgtttctttaagacaaaaagatcgagatacagacgaaatatatatttcctactctacccctaaaactcagaatagaacttatctttacaatataaaaacaaaggaaaaaaaattagtcaaagaacagataataccatctggtcatgaaccgaatgattatatagttgagagattggaatgcccttcacatgatggtagagttgtgccaattacaataactaggcacaaaaatactcctattgatggtt

SEQ ID NO: 202192 - DNA, 1243 bp, Unknown
  Bacterial polypeptide expressing nucleotide sequence isolated from the Sargasso Sea
gatgatattaattaactcagcatcattaaatcatggtgttgtaaatgttggagatctcccaatacctttcgatattgtcctcaattcttcagccttagttgtattgattacatttgtttatttaaaagtctcatggaaagaatccattattacaccaagacaagaggtttttaatgacaagcaaaattttattggaaaattgtttggaataatcattttatttttacttgttgcacctggaatatttggaaatgaatcatcaaaaacatccgtcgcccctttgatactttgggtttttctttggattggtgttccagtacttggcttattgtttggtgacatatattcaaaatttaaccctttaaatttattttctttaaaatcggataagccagaatctgtttattttgcttgcgtattatttattggacttacctggtttgagcttgtttggagtagacctggaaatcctttaaatattgcagtcgtcctaattacactctttgtttgtgtaaatttattgagatattttttaaagaagtcattaatcgaagttgatccattacttttacttcattatttgtatagcaaactaaaactatttaacagcaagccttattttcgatctcttttagataatattggaaatttagcaaaactaagaggtatcgaatattttgtacttttaatgataggtaccgtaacttacgatggtttaagagagactactttctggtataaccagttcggatcaagaacagatgatatggggttttcaacgatgatgtttttgatcatgaacttaggaacgattcttttttatcgttttgcatgcttttttgcaatcaaagtaagtggttccgatcttgaactcaaccatgtttcaaacctatttggacatacgatgctaccaatagcttttgcataccatgtaactcactatttgacacttctactttttgaatcccaaacatttttttacagatttaatgatccgataggaattggtatgaatatattaaacgttcaagaaccaacgataaattattttgtagaacctttagtcatctggggaattcaagttgctgttacccttctagggcatatgttaagcgttgtgttagctcatgacctagcagtaaaactatttggacatcaacaaagtgataaaacccaatacatatttttattcataactgttgctttgacgcttcaggctttatttgttttgagtgtcggataa

SEQ ID NO: 202193 - DNA, 1000 bp, Unknown
  Bacterial polypeptide expressing nucleotide sequence isolated from the Sargasso Sea
atggccggagggaggagcacaaagaagatcgcgaatgacaagaagggaggcaagaaggtcgagcggaagaagaccatcgtcaccatcgccaaggccaagaagcagcaggatgagcaacaaccgcacagaccctccaagtacgtcggagtgaactggaacaagagggataacaagtgggaagccgcgatcaagatcgatggcaagaggaagttcctgggcctctaccacgacgagaaggaggccgcgcgcatgtatgacgagcaagccgccctcctcggcaaacccgtgaactttcccctgcacgagggcatgatgcaggcggtgaaggagcggaaggatcggtccaaggtgccaaacgtgaatcggccatccaagtacgtcggagtgacctggagcaagcagggcaagaagtggcaagcccagatcatgatcgatggcaagaggaaaaacctgggcctctaccacgacgagaaggaggccgcgcgcatgtacgacgagcaagccgccctcctcagcaaagccgtgaactttcccctgcacgagggcatggagcaggcggtgaagcctatcaaggatcggtcgaaggtgccaaacgtgaatcggccatctaagtacgtcggagtgagctggagcaaggagatgaagaagtggcaagcctcgatcacgatcgatggcaagcagaagagcctgggctactaccacgacgagaaggaggccgcgcgcatgtacgacgagcaagccgccctcctcggcaaacccgtgaactttcccctgcacgagggcatggagcaggcggtgaaggcagcgccgaagggaagcgggaagcgcatgcagaagtcgcgtgcgaaatcatcaaacgatgatgaagacgagagcgatgacgactcgatggaggaacaagacaacaacaacgaggcgctcgacgacgatgacaacgacgagattgacgacccgatcatcatgggtgatgaggatcgcgatgatgaccagcacgcatcct

SEQ ID NO: 202194 - DNA, 345 bp, Unknown
  Bacterial polypeptide expressing nucleotide sequence isolated from the Sargasso Sea
gctgtattcataaaagggagatatatctagatcataatgataataaactcagaggcgttgatcatatcataaaaaaaagtgatggaattcctataaggtatgtgtttagatttcatttaaatccaaaattaacagctgtaaaaactatgagtgggagtagtgctttaatacaaatttctaagaataaatctctgatttttacgatgaaaaacgaaaatattgaaattgaaaaaggtatttaccttggaggaagaaagatattagataataattgtatatctatttcaggtaaccttgttaataaagacaagtcttttgaatgggatattaaaaagaaaatttagc

SEQ ID NO: 202195 - DNA, 1072 bp, Unknown
  Bacterial polypeptide expressing nucleotide sequence isolated from the Sargasso Sea
ctgaacctccagagccgaaatctggcgctctatccagttgagctacaagcgcatatagtattaatattatattttatgaaaaaaagcattaattttatagttgaagaagaagaaaagaatttaagagttgatgtattaattaacaaaagagaggaaattattagtagaaccagagtcaaaaacttaattttaaaagaaaaattaaaactaaataatgaaataattaaaagcccatcgaaaaaagtttcgattggtgatgtggtgaatcttataattccagacccagagattgcatatctaaaaccatatgattttaaattaaatattgtttatgaagatgcagatttattagtaattaataaacctgcgggaattataatgcatcctggagcagggaactatgacaaaacaattgtaaatgcattaatgcattacgacaaagaatctttatcaactattggggatgaattaagacctggaattgttcatagaattgataaaaatacttcaggtttagttgtgatagcaaaaaataatgagacccatgaaaatttatcgaaacaattcagtaatcatacaattattagagaataccaacttttaatatggggaaagcttagaccatcttttggtaggatagaaacgtttattacacgtagttcaaaaaatagacaacttatggaagttagccgttcaaaaggtaagaaagctataacaaactataaaacaattgaaatttttgaaaataaaaaagtaccaacattaagtttggtcgaatgcaaattagaaacaggtagaactcatcaaatcagagtacacatgaactataaaggaaatagtttagttggtgataataaatataaaaaaaaatataaaaaattaaaaaatgtcgattttgacattcaaaattcaatttcaaatttagacagacaatttctacatgcaaagactttgggctttattcatcctagaactcagaaagagctgatatttacctcaattttacctcaagaactaaataatattttaaaaatgcttagaaatactgaagaaaaaattattgaaaattaaa

SEQ ID NO: 202196 - DNA, 583 bp, Unknown
  Bacterial polypeptide expressing nucleotide sequence isolated from the Sargasso Sea
tatggaaacatgtaaaattaaatttagtaatttttttttattcttaataatattaattttttttcaaacacaaacatgcgcttcaagttttaaagaaattgcaaaatcaaaaatttctattattgatttggtaattttcaagatcgaaagttttatgataaaaaataaacaaagaatgtttgttcaagacccattcaaaattttgtatcaagaaattggttttaatgtgcagtatatagatggagagaaaatacatatatccgtattaggacttatggataaacttagatataaaaaaacaaaaaaatacaaacctaatatcaaagattgtaatgtgttaagaaataaaattttttacaacaagtacggttacagtccaataagaagaaaaaaaactttagatttagatgaaaattatatgaaagaaattttaaaagaatatgtttttaatttagatagcttaggtgaaaaacaagtcgattttttaatcgacaacacacatattgaaatcttaatttctcatcctttgcctaggtataatatttcctgtataggaaaacttacggcttttgaattggaataa

SEQ ID NO: 202197 - DNA, 1714 bp, Unknown
  Bacterial polypeptide expressing nucleotide sequence isolated from the Sargasso Sea
cttacaagtgagaacgctccacaagaagaaaacttatcgtttgcaacacaacaatttctagtcagtaatgatcctatgcgatttgtacaatccacctatgaaagcaataaggtataccatgcattagtgtttgaacaggaggatacattaaattttcaatacaaaatggatagtgagccggaagggtatgagcgaccagaccacctattgtccatacctttggaacaggcaaaaagacttcctcaagcagatcgattaacaaatacacacatagatcttatcagtgtggcaaagcgcgctggtagcgcgaactttccacaggatcaagatggtatcattcgtcgagctccaaccgcgatacactttgaaggtccaaatcatgtatatcctactttagtcctcgctgctgcaatggacattttgggtgtaccggctgatggattcgattatgattttgaaaattttgttcttcgtctaacggatactaccggaactgtagtacgagaaatacctattgatgaagaagggcgtatgtatgttaattattatggaagatttaaaacgttttattacctgccttatatgtattgctttgacccagaaatgcttgatcccacatattgggaaggtaaggttgcaatggttggagcatcgttgcctgggttaatggacttacgtaatacacccgtacaagaaacatttgcaggggtagaaattcatgcaaatgtcatgaatagtattttgcaaaaccaatttgtcacaaaaacaagtccaagtaaaaacttttatacgattttgattcttaccattttcactggaattattgttagtcttcctaaaaagacactgtatacaataccagtaccaattataggaatggttgcctggtgggcatttactctgtttcaattttttaatcatttgattatgtgggaaatggttcgaccaatgttgtctattttcggtacatatggtggggttttcttatacaacttttttggtgcagagaaagacaaacgattcttgaaaaacacatttagcacgtatatatctccagaattaattgatcagatgtttgacgcaaaggaggagccacaattaggcggggaggaaggatatcacacagcattctttacagatattcaaagcttttctgctttttcggagaaactaagtgcttcagaccttgtcgaactgttaaacgattatctaacagaaatgactgatattttattagataataaaggaacattggataaatatattggtgatgcaattgtagcattttatggagctcctgctcctgtggatgatcatgaatattatgcatgtaggactgcagtgataatgcaaaaacgtttaagcgaaatgagagataaatggcgagctgaaggtgatcgttggccagaaattgttcataatatgcaaaaccgtattggaattaatacaggtcaaatggttactgggaatatgggatctactatgagaatgaattatacaatgatgggggacactgtaaatcttgctgcaagacttgaatcatccgcaaagcaatatggaatttatattcaggttgcaaatgaaagctatactgcctgcaaagatcaatttgtatggagagatttagactttgtacgagtgatgggtaaaacagaacctgcacaggtatatgaattgatcgcgattgctggggaagaaacagagaaagaaaaaa

SEQ ID NO: 202198 - DNA, 1208 bp, Unknown
  Bacterial polypeptide expressing nucleotide sequence isolated from the Sargasso Sea
tacggataggatagaattcaatcttggtggccctgacctttttttacaaacctacccagatataatgggactagatctaccaggtcgtttttcttttttctttaatggatatggaaaaatgtatgatggaaatttacctgtagcgtcaaagctgtacccacatcgctattggaattcatctctgcttaatgataatactgctgataatatcatgtcaaaattggctggtagggagaataacgattggcacttgttatataaaatgacctgggagatctctcctaagaaaaaggcttctttatcatacgatgcatcaatgaatattaaccaaggcttctttatgcccagagcattttcatccacctattttccttatcgatatatgaatattcttgataattataatacaatcacaagagatactcgacttatcaatatgaactggacccacactctttcaactcgatcattctatgaaataactgttggcagatttacaaccatggaacatagtgctgtgcaagatctgcattggaccgattatcaacaacggttagacctagaaccgatcaattataatcttgataacacagaccttgatgggaatattcatattacttatggagatgagttctatgatactggcttcgcaccagaatggtacgatctcagtagtgaaaatactcgtatggatatggattggaccatccacactcgatcaggacataagcttaaaacaggctttgagcatactataacagatatacaggttctagacatagatgaaccttggagtggttcatcggggtttggtgcgaactatgaccactataatgctaaaacttattttggagcattttatttacaagataggatcatttttgaaggaatgaccctgaatattggctttcgtaatgattattggataccaggaaggtatgttgaagatgcaattagtgatacatcaagcattattataacagaaaaagcaagagagatcttccaaaaagaaacttttgagtttccctggtttggagatccatatagaatgaaggcaaggcttagtccacgttttggtatctcgcacccgatcactgataatgatgtgctttatttttattatggccacttttctcagctaccaacattccaatatgtatatgctaaaataaattcaagagcacaatcgacttatcaggtatttggta

SEQ ID NO: 202199 - DNA, 1396 bp, Unknown
  Bacterial polypeptide expressing nucleotide sequence isolated from the Sargasso Sea
atgaaaaaagtagaaatatactttcttattaacttaggtgctattctaagtatttttgctattgagggtgagcttggtgaatatatgagacgtcaagatgatatactacttgaggttgcaaaagacaagctagaatcaatggttagtatagaaaacatcaattctcttaattctgattcattatacaaatttacctttaatcttgatggtgagtatgaagataattcagccaatgttgaagccaatttcactttaaatgataccagcgcttcagatgttcaatattctgtatcatcaaaagcggttgaaaaagaaggttcttatgttgcagaaattcccctttcagattttgatgtttatcaaaataagcggtttgatgttgagctgataattggttttagaccagaaatttcgaacttaacaatgaataattgggctagtgtatttggaagtgaaaaaattgcgacaaaaattgaaaagaatatttcagataaagttagacgcgaaggatcatttaaaatctcaagaaaactagatgcattcattacccccgtacctcttgaaggacaaagaactgatttttttgttttgtttgataaaaagagatatacagttcttaagggattaaaatgggaagtgccaattacagttggaggcgtgtactctaataaggattttgaaatatcagtaaccagtggaaaagatatggtggcaaagcttgaacaaggaacgccaagatccatacttattgggacatcaacaaacactggcggcactattgaagtgagtggaataagaaaaagcgatagtaaagttgttacaagcaaagcaagaattgttgtgattgagccaaaatgggcatcggatcaagatattgctgagatttatactaatgaaaaatataattttgatatgcgagtcaaatctttatcaagagatcgtgtggcaattagattctcaagcacttttggtgataaaaacaagataattgaaaaatcatcaatgacagttggtccatataaaaaatcaggtaagctaacctttgaaacattagtagatggcacgcctttaaaagatttaacgcatgtggtccaggttaaaacacttccggctccatcagtcgattttaaacgtaaacccaatactaatgatcttacgcttgaagttgttacttatggaaaatcgaatgctgtagataaattatttcctattggtggtatcagtggaaaagtaattgaaattagcgctgagaaatatggcaatagaaagctaacaagatacaggctatccatttcaagacctgcatatgggggcttgcaatcagtaaaacttaaaataaaagataaatatggtgtattgaatgaatatgaaaatgaatttgaataccttgattaat

SEQ ID NO: 202200 - DNA, 2332 bp, Unknown
  Bacterial polypeptide expressing nucleotide sequence isolated from the Sargasso Sea
tatgcttaaaagacaaaaaaagaaatccatattagaatctgtgattaatcaagctaataattattggcaacaaattgcgatgatatctttgctaataattttactttcttttttatttccacgcggtaagacacttttatattcatatcaattgaatgatgtttcaaaagaggagattgttgcaccttttaacttccctatactaaaaaataatgtggagcttcaatccgaccttgatgaagcaattgctcttgagccttatcttttcgttcggtcaaatagtgcagtaaataaccaaattaaagaaataaatactttttttgatttaacaaaaaaaaatcaaatcgcaaatcttaaattaattgaatctagaaataatttatatatagatcgtttttctaaaaacttcaataagtctagaatgatcgtagaagctgatagcgtttcattatctgagcttaataacaggatgaaaaaaacatttacatttactggagaggatgataaatggaataaaattttatttgaaagtacatcttcttatactgagatagatttagaaacattaaagaaaataataattaaaatttctaggaatagatgggcagaaggaatatatgatatacctatttctaatattttaagcaatcaggtagcgatgaatctatctgatggtaaagcaaatattcttacaagcccatcagattataatgatttacaaaccgcatggaccaaagcgcgctttgagataacaaatgaattttctgaaaatcaagtgattgaaagagaaattggctattctctcattgtagaattaatgaagccaaatttaatctttgatcgagagaccacagaacgaagacagcaggctagattagatagagtacctcgaaacaaaggaattattctagaaaatgaaagagttgttgaagccaataagaggataacagaagatgatcttgagaagctttattcattatctgtagccgttgatgctaaatcagcatcagaagataccttgcaaatagctctcgcttattttggccgattaattgttgttggtatattggcctctcttttgtttggattcatttttgtttataaaagatcaatttttgaagatcaaaaaatggttttatttctaagcattatttttttgattgaaggagtattaacatatttgctcacgcaaaaatttgcactttctgaatatctaattcctattaccgttgcagcaatggttatcacgattatgtttgatggctttgtaggcttgattgcaacattttcaatggctttacttattggaactcagattggaaacaatgtagactttatgattacttctgtttttatatccattatgggaatttacactgtaagaaaccttcgcaggagaagtcagctgtttaccgcaatctttgttctaattgcaagtagtgcaatagcaatagttgggcaaggattatttaaagggcatacttggcaagcaatgagttatgatatgacgaatttgctattgctatctgttttatcgcccattttaacttatggtttaataggaatattggaagtctcatttggcataacaacaaacctaacattaattgaattgttagattttcaacaacctctattaaaaagactccaaaaagaagccaatggaacatttaaccattgtgttgtcgttggaaatttagctgaggcttgtgctgatgctattggtgcaaattcattactatgtagggtaggtgcttattatcatgatattggtaaaatgcttaggccagagtattacattgaaaatcaatatggcggtgaaaataagcatgataagattaccccagtgatgagcgcaaaaataattaaaagccatgtatcagatgggctgattcttgcaaaagagtatagcctccctagtattgtaagcgactttatccccatgcatcacggaacaactcgtgtagagtatttttatagaaaagcaatagaagaagaaaaaaatgttgatgaggatcagttcagatatcccggtccaaagccaaatacaaaagaaactgggattctgatgatatgcgaggctattgaagcaggtattcgatcaatcaaagacccagatttaatcaaaattgatgatatgataactaaaattatcaattctagagtgtcatcaggtcagctatcagaatgcccattaaccatggatgagctaaatagaattaaaggaaatatggatgggaatactggacttctatcggtactcaagggcatttatcatattcgcatagaatacccagatgaattagaaagcaataaagccaccaagcaatga

SEQ ID NO: 202201 - DNA, 790 bp, Unknown
  Bacterial polypeptide expressing nucleotide sequence isolated from the Sargasso Sea
ggtactagaggaagtcatttagctcaaatttataccaaaaaagtgatagaccatcttaaaaaagtttcatcaactcaaatagaaacaaaaaaaatagtcacaagtggagatgaaaaccaaaaggataggttgtcaaatattggaggaaaaggattattttcaaaaaaaattgaagtagaattaattaatcataatattgatattgctgttcatgctttaaaagatatgccatcgattgaaacagagggtttgataacaaatttttatttaaaaagaaattcgccgaatgaaatttttattagcaaagacgacataaattttcatgaccttaaacctaattcaataattggtacttcttcttacagaagggaatatcaattaaaaagtattagatcagatctgaattataaactaataagaggaaatgtggatactaggataaagaaattagagaatggagattacgatgcaattttactttccaaagccggtattgaagctttaggtttaacaaataaaattacacatgaatttaatactgaagaattaataccgtgtgctggacaaggtattattgccatacaatgtagagaaaatgaccaagaaataattaatattttagaaaaaattaatgatgatcagtccagaattattgcaaatgctgaaagaaaaatcttaaaaatactcgagggtgactgcgatacagcagttggtgtgtatgcaaagattgataaagatcttgtaaatataaaagctgaaaatgtttcagtagatggcaaacaaagatttt

SEQ ID NO: 202202 - DNA, 583 bp, Unknown
  Bacterial polypeptide expressing nucleotide sequence isolated from the Sargasso Sea
tatgaaaagggataaaattattattggtactcgagcaagtcagttagctcaaatttataccgaaaaagtgataaacgatcttaaaaaagtttcatcgacccacttagaaacaaaaaaaatagtcacaagtggagatgaaaaccaaaaggataggttgtcaaacattggaggaaaaggattattttcaaaaaaaattgaaatagaattaattaataataatatagatatagccgttcatgctttaaaagatatgccttcgatcgaaacagaggggctaacgacaaatttttatttaaaaagaaactcgcccaacgaaatttttattagcaacgataatataaattttcaagaccttaaacctaattcaataataggcacttcttcttatagaagagaatatcaattaaaaagtattagatcagatctgaattataaattaataagaggaaatgtggatactaggatcaagaaattagagaatggagattacgatgcaattttactttctaaagctggcattgaggctttaggtttgacaaataaaattacacatgaatttaatactgaagaactaataccatgt

SEQ ID NO: 202203 - DNA, 831 bp, Unknown
  Bacterial polypeptide expressing nucleotide sequence isolated from the Sargasso Sea
tatgaaaagagataaatttattattggtactagaggaagtcagttagctctaatttatactaaaaaagtgatgaagtttcttaaaaatgtttcatcaactgatatagaaataaaaaaaatagtcaccagtggagatgaaaaccaaaatgataggttatcaaatattggaggaaaaggcttattttcaaaaaaaattgaaacagaattaattaatcataaaattgatattgcagttcatgctttaaaagatatgccatcgattgaaacaaaggggctaataacaaatttttatttaaaaagaaattctcctaatgaaatatttattagcaataacaacatcaagttccaggatcttaaaccaaattcaattattggaacctcttcgtatagaagagaattccaactccagagtattagatcagatttaaattataaattaataagaggaaatgtggacactaggatcaataagttagagaatggagattacgatgccattttactttccaaagctggcatagaagctttgggactgacaaataaaataacacaggaatttgatacagaggaactaataccatgtgctggacaaggaattattgccatacaatgtagagaagatgataaagaagtaataaatatattggaaaaaattaatgataatcagtcgagagtaattgcaaatgctgagagaaatgttttgaaaattcttgagggtgattgtgatacagcagttggtgtctatgcaaaaattaccaaagatattgtaaatattaaggcagaacttttctcagttgatggcaagcagagattttatgttgatgaaagtga

SEQ ID NO: 202204 - DNA, 811 bp, Unknown
  Bacterial polypeptide expressing nucleotide sequence isolated from the Sargasso Sea
catggaaataaaacaaatagtaacaagtggagatgaaaaccaaaatgataggttgtcaaatattggtgggaaaggcttattttcaaaaaaaattgaaacagagctaattaatcataaaatagatatagcagttcatgctttaaaagatatgccaactattgaaactgagggtttgataacaaatttttatttaaaaagaaattcacctaatgaaatatttattagcaataataatatcaagttccaggatcttaaaccaaattcaattattgggacttcttcatatagaagagaatatcaactccaaaatattagatcagatctaaattataaattaataagaggtaacgtggatactaggatcaaaaagttagagaatggagattacgatgcaattttactctctaaagctggtattgaggctttgggattagataataagattactcaggaatttaatactgaggaacttataccatgtgctggacaaggaattattgcaatacaatgtagagaaaatgatcaagaaataataaatatattggaaaaaattaacgacaatcaatcgagaataattgcaaatgcagaaaggaatgttttgaaaattcttgagggcgattgtgatacagcagttggtgtctatgcaaaaattatcaaagatattgtaaatattaaggcagaacttttttcagttgatggaaaacagagattttatgttgatgaaagtgaaaatgaaaaaatgattaatgatctaagtattaaaattggagaaaaattaaaatcagagtcaaaaggatcatacaaaaggtag

SEQ ID NO: 202205 - DNA, 832 bp, Unknown
  Bacterial polypeptide expressing nucleotide sequence isolated from the Sargasso Sea
atgaaaagggataaatttattattggtactcgaggaagtcggttagctcaaatttatactgaaaaagtgataaacgaccttaaaaaagtttcatcgacccatattgaaataaaaaaaatagtcacaagtggagatgaaaaccaaaaggataggctgtcaaatattggaggaaaaggattattttcaaaaaaaattgagatagaattaattaatcataatattgatatagctgttcatgctttaaaagatatgccatcgattgaaacaaaggggctaataacaaatttttatttaaaaagaaattcgcccaatgaaatttttattagtaatgacaatataagttttcaaaaccttaaacctaattcaataataggtacttcttcttacagaagagaataccaattaaaaagtattagatcagatctgaattataaattaataagaggaaatgtggataccaggataaagaaattagagaatggagattacgatgccattcttctttctaaagctggcattgaagctttaggtttggaaaaaaaaattacacatgaatttaatactgaagaactaataccttgtgctggacaaggtattattgccatacaatgtagagaaaacgatcaagaaataatcaatatcttagaaaaaattaatgatgatcagtcaagaataatcgcaaatgcagagagaaaaatcttaaaaatactcgagggtgactgcgatacagctgttggtgtgtatgcaaagattgacaaagatcttataaatataaaagctgaacttttttcagtagatggcaaacaaagattttttgtagaacgaaagtgaa

SEQ ID NO: 202206 - DNA, 700 bp, Unknown
  Bacterial polypeptide expressing nucleotide sequence isolated from the Sargasso Sea
tatgaaaagggataaatttattattggtactcgaggaagtcagttagctcaaatttatactaaaaaagtgataaaccatcttaaaaaaatttcatcgacccaaatagaaacaaaaaaaatagtcacaagtggagatgaaaatcaaaaggataggctgtcaaacattggaggaaaaggattattttcaaaaaaaattgaaatagaattaattaataataatattgatatagctgttcatgctttaaaagatatgccatcgattgaaacagagggactaataacaaatttttatttaaaaagaaattcgcctaatgaaatttttattagtaatggcaatataaattttcaagaccttaaacctaattcgataataggcacttcctcttacagaagggaataccaattaaaaagtattcgatcagatctgatttataaattaataagagggaatgtggatactaggataaagaaattagagaatggagattatgatgcaattttactctctaaagctggtattgaagctttaggtttaacaaataaaattacacatgaatttaatactgaagaattaataccgtgtgctggacaaggtattattgccatacaatgtagagaaaacgatcaagaaataataaatatattagaaaaaattaatgatgatcagtctagattatttgcaatgctgagagaaaatctt

SEQ ID NO: 202207 - DNA, 418 bp, Unknown
  Bacterial polypeptide expressing nucleotide sequence isolated from the Sargasso Sea
ggagctagtggaaaggaagcagaattactatatgttcctggcggtgggtcaaaagacgtgaatggttttagatttttaaaaatggaaggtaaagaagtttttaaagaagctgtaaaggtaattcagtctaactcacttgaagctataaaagctgctaatcttgaacctgcagacatagatctttttatcccacatcaagcaaatatgagaattatagaagccgccagggagagattagagctacctttggaaaaatgctttattaatatagacaaatatggcaatacatcgtccgcttctgtgcttttagcacttcacgaagcacataaggaatcaaaaattaaaaaaggagataatattttattctccgtttttggtgctggatttgcatggggctcggctgtcttaaaatggtaat

SEQ ID NO: 202208 - DNA, 736 bp, Unknown
  Bacterial polypeptide expressing nucleotide sequence isolated from the Sargasso Sea
ggcgttaacggaacccaaccagttgttttttgagccgccacaactcggctactcgcccgcacccccgcattacagctcttggggccggcgtttttcattacgttatttgttgtatttttctgcaagcgctcctagcagttcccgcgacttgcgcacaagtgatttagaattgtgggcgttaacggaacccaaccagttgttttttgagccgccgcaactcggctactcgcccgcacccccgcattacagctcttggggccgacgtttttcattattctatttgttgtatttttctgcaagcgctcctagcagttcccgcgacttgcgcacaagtgatttagaattgtgggcgttaacggaacccaaccagttgttttttgagccgccacaactcggctactcgcccgcacccccgcattacagctcttggggccggcgtttttcattatgttatttgttgtatttttctgcaagcgctcctagcagttcccgcgacttgcgcacaagtgatttagaattgtgggcgttaacggaacccaaccagttgttttttgagccgccgcaactcggctactcgcccgcacccccgcattacagctcttggggccgacgtttttcattattctatttgttgtatttttctgcaagcgctcctagcagttcccgcgacttgcgcacaagtgatttagaattgtgggcgttaaaggaacccacctttcctccaggcttcaagtaa

SEQ ID NO: 202209 - DNA, 850 bp, Unknown
  Bacterial polypeptide expressing nucleotide sequence isolated from the Sargasso Sea
tatgaaaagggataaatttattattggtactcgaggaagtcagttagctcaaatttatacggaaaaagtgataaacgatcttaaaaaagtttcatcgacccacatagaaataaaaaaaatagtcacaagtggagatgaaaaccaaaaggataggctgtcaaacattggaggaaaaggattattttcaaaaaaaattgaaatagaattaattaataataatattgatatagctgttcatgctttaaaagatatgccatcgattgaaacagagggactaataacaaatttttatttaaaaaggaattcgcccaatgaaatttttattagcaataacaatataaattttcaagaccttaaacctaattcaacaataggcacctcttcttacagaagagaataccaattaaaaagtattagatcagatctgaattataaattaataagaggaaatgtagatactaggataaagaaattagagaatggagattacgatgcaattttactttctaaagctggcattgaagctctaggcttgacaaataaaattacacatgaatttaatactgaagaactaataccgtgtgctggacaaggtattattgccatacaatgtagaaagaatgatcaagaaataataaatatcttggaaaaaattaatgacgatcagtccagaattattgcaaatgctgaaagaaaaatcttaaaaatactcgagggtgactgcgatacagcagttggtgtgtttgcaaagattgataaagattttgtaaatataaaagctgaacttttttcagtagatggcaaacaaagattttttgttgatgaaagtgaagataaaaaaatgatgaag

SEQ ID NO: 202210 - DNA, 652 bp, Unknown
  Bacterial polypeptide expressing nucleotide sequence isolated from the Sargasso Sea
tggaggtccaagaatagaaagaaagttaaaagaggaaaatattcaaacaaaatttattaatggattaagagttactgatgaaaaagtaatttctatagttgagaacgtattaattgattttaacaaagatattgtggaatcgttgaaaaaaaaaggttcagaagctgtttcaattacatcaaaaattaataatattattaatgtaataccagataataaagaattaggattcgttggtattcctgacagtataaacattgagtttctaaaagatattattgaaaaaaaacagataccggtaatagctcccttgggagttgataaaaataaaaatatttataacattaatggcgataccgcagctagcgcaatagcaaaaaagcttaaatctagaagacttttacttatgacaaacgttgagggagtttatgacgatagaaaaactttgataactgaaattaaaccatttgatatcgaaaatttagtaaaattgaaaatagtccaaggtggaatgattcctaaaattaaaaattgtatagatgcagtagaaaatggcgttagaggtgttgttatacttgatggaagaaaacctcactcaatattagatgaaattttttcggataaagggtcaggtactctaattagaaaatga

SEQ ID NO: 202211 - DNA, 712 bp, Unknown
  Bacterial polypeptide expressing nucleotide sequence isolated from the Sargasso Sea
atgaaaaataagatcttaattggtacaagagaaagtaaattagctctttatcaatcaaatcttgtaataaaaaaactttcttcattatatcccaatatatctttcgagataaaaaaaataaaaaccaaaggagatattcttttaaaccacaatattgaatcttcaattgataaaggcttttttgttaaagaaatacaacaaaaactattaaataaagaaattgatatagctattcacagcttgaaagatttacctgttgatgacgtttcgggtttggaaatttcagctattttaaaaagagataatcataaagatgtttttttaagtaataataattttaccatttcaaaaattaaaaaaaatgctgttattgctacgtcttcaaatagacgaaaatcccagttacttagattaaacccaaaatttaatataattagtatccgtggaaatgttgatacgaggatatctaaaatgagaaatggttattgtgatggcttggtacttgctgctgctgctttggagaggttaaatttaaaagataatattgcaaattattttgattcggatgaaatgttatcttctcctggccaaggtgcaatagcaattgaatcaaggaaaaatgataagataaatcagttgttatccaatcttaatcacgaagagacaagtttatgtattaagcaagaaagatcttttttgaaatatttagagg

SEQ ID NO: 202212 - DNA, 868 bp, Unknown
  Bacterial polypeptide expressing nucleotide sequence isolated from the Sargasso Sea
tatgaatcaaaaaacaataattcgacaacttaatgataattggttttacgaaaaagctggaggtgtcccagatttagtatttggatatcaaaaaagtaaggtcttagttgataagtatagtaaatttcaacatattgaattatttgaaagccaacaatggggtaaagtattagttctagatggagtcttacaaattactgaaaaagattattttgcctataatgaaatgatggcccatattcctatttatgctcatcataatccacattctgtatttattattggaggtggtgatggttgtattttaaatgaagtaactaaacatgaatatcttaaaaatattaccatttgtgaaatagatcaagatgtaatagatatatccaaagaatattttcctttttggtctcaaggttggagtgatccaagagttaaatctattactaaagacgccaatttatatattaaaactattccatctaaaagtttatcttgtattattatggattcatcggattattatgaagatactccttctgctgttttatataagaatgagttctttactgaagttgatagagtattaaccgatgatggaatttattgttttcaaggagaatccattcattttgataaaaaggaaataaaacagtttatgacagatttacaaaagttttttccaatttgttgctatggtaatatgactacacccacatatccaggaggacaaattggtattattatttgttctaaaaaatataatcctaaaattcttaataaaaacagaccaataattaaaaatttaaaacactataatttcgcttaccacgaagcctcttttgtgttaccaaatagtcataaaatattttaa

SEQ ID NO: 202213 - DNA, 775 bp, Unknown
  Bacterial polypeptide expressing nucleotide sequence isolated from the Sargasso Sea
accaaaagggataggctatcaaatattgggaggaaaaggattattttcaaaaaaaattgaaatagaattaattaataataatattgatatagctgttcatgctttaaaagatatgccatcgattgaaacagaggggctaataacaaatttttatttaaaaagaaattcgcccaatgaaatttttattagcaacgacaatataaattttcaagaccttaaacctaattcgataataggcacttcttcttacagaagggaataccaattaaaaagtattagatcagatctggattacaaattaataagaggaaatgtggatactaggataaagaaattagagaatggagattatgatgcaattttactttctaaagctggaattgatgctttaggtttgacaaataaaattacacatgaatttaatactgaagaattaataccgtgtgctggacaaggtattattgccatacaatgtagagaaaacgatcaagaaataattaatatcttagaaaagattaatgatgatcagtccagaatcattgcaaatgctgaaagaaaaatccttaaaatactcgagggtgactgcgatacagcagttggtgtctatgcaaagattgataaagatcttgtaaatataaaagctgaacttttctcagtagatggtaaacaaagattttttgttgaagaaagtgaaaataaaacaatggttaaagatttaagtattaagattggagaaaagctaaaatcagagtcaaagggatcttataaaaggtaa

SEQ ID NO: 202214 - DNA, 801 bp, Unknown
  Bacterial polypeptide expressing nucleotide sequence isolated from the Sargasso Sea
agttctatctttaaacctagaaataaaaaaaatagtaacaagtggtgacgattaccaaaaagatagactttcaaatattggaggaaaaggtttattttcaaaaaaaatagaaaatgagttaattgaccaaaatatagatatagctgtgcacgctttaaaggatatgccttcaattgaaactgagagtctaattacgaacttttatttaaaaagaaattctccaaatgaaattattattagtaaaaataatataaagttcaacgatcttaaaccaaattcaataattggtacttcctcttacagaagagaataccagcttaaaaatattagatcagatctgaattacaaattaataagaggaaatgtagatacaagaattatgaagttggaaaatggagattatgatgcaattttactttctaaagctggtattgaggcgctaggtctaacaaataaaataacacaagaatttaacactgaagagttaataccctgtgctggacaaggaattatagcaatgcaatgtagagaaaatgataaagaaattatcaatattttggaaaaaattaatgatgaacattcaagaatgattgcaaacgctgagagaaaagttttaaaagttcttgaaggtgattgtgatacagcaatcggtgtttatgcaaatattaaacaggatgttgttaatatgaaggctgaacttttttcagtggatggtaaacaaagattttttattgacaaaagtgcaaacaaaaaattagttaatgatcttagtattaggattggagaaaaattaaaatcaga

SEQ ID NO: 202215 - DNA, 526 bp, Unknown
  Bacterial polypeptide expressing nucleotide sequence isolated from the Sargasso Sea
atgaaaagagataaatttattattggtactcgcggaagtaagttagctcaaatttatactgaaaaagtgactaagtttcttaaaaaagtttcatcaactcacatagaaataaaaaaaatacttacaagtggagacgaaaaccaaaaggataggttgtcaaatattggagggaaaggcttattttcaaaaaaaattgaaacagagctaattaatcataaaatagatatagctgttcacgctttaaaagatatgccaacgattgaaactgagggtttgataacaaatttttatttaaaaagaaattcacctaatgaaatacttattagcaataataatattaagttccaggatcttaaaccaaattcaatcattggaacttcttcatatagaagagaatatcaacttcaaagtattagatcagatctaaattataaattaataagaggcaatgtggatactaggatcaaaaagttagagaatggagactacgatgctattttactttccaaaggcctggccattgaag

SEQ ID NO: 202216 - DNA, 601 bp, Unknown
  Bacterial polypeptide expressing nucleotide sequence isolated from the Sargasso Sea
acctccgaacatggcggtcacctccgagcatggcggtcacctccgaacatggcggtcacctccgagcatggcggtcacctccgaacatggctgtcgcctccgaacatggcggtcatctccgaacatggctgtcacctccaatacctccgaacgcggaggtcacctccgaacatggcggtcatctccgaacatggcgtcacctccgaaaatctcggtcacctccgagcatggcggtcacttccgaacatggcggtcacctccgagcatggcggtcacctccgaacatggctgtcgcctccgaacatggcggtcatctccgaacatggctgtcacctccgaacatggaggtcacctccgaacgcggaggtcacctccgaacatggcggtcacctcccagcatggcggtgacctgcaaacatggcggtcacctcacgaacatggcggccacctccgaacatggcggtcacctccgaacatggcggtcaccttcgaacatggcggtcacctccgaacatggcagtcaccttcgaacatggctgtcacctctgaaaatcctcatttgcaaccatcattcattatttgcaaccatcactcatggttt

SEQ ID NO: 202217 - DNA, 664 bp, Unknown
  Bacterial polypeptide expressing nucleotide sequence isolated from the Sargasso Sea
gttacgtatacggatagtgatggtgatagtgcgacgaagtataacctctggacgagtaatgactggtggttagcggatgttggtcaggatgcgagtggtacgggtaagtatctagatgccaatgctggttatcaagtgacgggtgcggagtttaaccgtttatatgtgagagcggatgataagctctctgaacagacattgtgggttcagagctatgatggagaggactatagtgactggggatcgtttattttaaagaccattgctagtacgaactcaccaccgaaggtaacgatatccggtgatgttacactaaacgagggagggtataagaaggtctctgagtttgttacgtatacggatagtgatggtgatagtgcgacgaagtataacctctggacgagtaacgactggtggttagcggatgttggtcaggatgcgagtggtacgggtaagtatctagatgccgatgctggttatgaagtgacgggtgcggagtttaaccgtttatatgtgagagcggataataagctctctgaacagacattgcaagtacgggcttatgatggagaggattggagtgactggggatcgtttattttaaagacccaggttccgaacaataaacctgttatcaatgtgagtgaccaggcgcttaaagttg

SEQ ID NO: 202218 - DNA, 781 bp, Unknown
  Bacterial polypeptide expressing nucleotide sequence isolated from the Sargasso Sea
gatgaaaatcaaaaggataggttgtcaaacatttggaggaaaaggattattttcaaaaaaaattgaaatagaattaattaataataatattgatatagctgttcatgccttaaaagatatgccatcgattgaaacagaggggctaatatcaaatttttatttaaaaagaaattctcccaatgaaatttttattagcaatgacaatataaattttcaagatcttaaacctaattcgataataggcacttcttcttacagaagggaataccaattaaaaggtattagatcagatctggattataaattaataagaggtaatgtagacactagggtaaagaaattagaaaatggagattatgatgcaattttactttctaaagctggcattgaagctttaggtttgacaaataaaattacacatgaatttaatactgaagaattaataccatgtgctggacaaggtattattgccatacaatgtagagaaaacgatcaagaaataattaatatcttagaaaagattaatgatgatcagtcaagaattattgcaaatgctgaaagaaaaatcttaaaaatactcgagggtgactgcgatacagcagttggtgtatatgcaaagattgataaagatcttgtaaatataaaagctgaacttttttcagtagatggcaaacaaagattttttgttgaagaaagtgaaaataaaacaatggtgaaagatttaagtattaagattggagaaaaattaaaatcagagtcaaagggatcttataaaaggtaa

SEQ ID NO: 202219 - DNA, 913 bp, Unknown
  Bacterial polypeptide expressing nucleotide sequence isolated from the Sargasso Sea
atgaaaagggataaatttattattggcactcgaggaagtcagttagctcaaatatatactgaaaaagtgataaacgatcttaaaaaagtttcatcgacccacttagaaataaaaaaaatagtcacaagtggagatgaaaaccaaaaggataggctgtcaaacattggaggaaaaggattattttcaaaaaaaattgaaatagaattaattaataataatattgatatagctgttcatgctttaaaagatatgccatcaattgaaacagaggggctaataacaaatttttatttaaaaagaaattcgcctaatgaaatttttattagcaacggcaatataaattttcaagaccttaaacctaattcgataataggcacttcttcttacagaagggaataccaattaaaaagtattagatcagatctgatttataaattaataagagggaatgtggatactaggataaagaaattagagaatggggattatgatgcaattttactttctaaagctggaattgaagctttaggtttaacaaataaaattacgcatgaatttaatactgacgaattaataccgtgtgctggacaaggtattattgccatacaatgtagagaaaacgatcaagaaataattaatatcttagaaaaaattaatgatgatcagtccagaattattgcaaatgctgaaagaaaaatcttaaaaatactcgagggtgactgcgatacagcagttggtgtgtatgcaaagttagataaagatcttgtaaatataaaagctgaacttttttcagtagatggcaaacaaagattttttgttcaagaaagtgaaaataaaataatggttaaagatttaagtattaagattggagaaaaattaaaatcagattcaagaggatcttataaaaggtaaa

SEQ ID NO: 202220 - DNA, 3232 bp, Unknown
  Bacterial polypeptide expressing nucleotide sequence isolated from the Sargasso Sea
ttaaaagcaagaaacaccaaagaacttaatggtgttggtacgaaccatgaaataggaaactatcttagacttaccaatgtgtatggttcacctgatattagtgatgtctctggtgagacaacagcatacagaccgatattattgtgggataacaaccaatcatccagaggaacaattagtgatgctaatgcagttggtgttttaagacctagatcatttgaacatgaagctaacggttctgcaactggtactgcgactgctggttcatcctctactaacgatgatggtgtttatcgattatatgcatttgatgttcgtaattttgtacgacttacaatgactgatactccaaatagaagtctaagttctgcatatttcgcaactggtggtgtccgagttacaggagttacctctggtgcaacaggatttgtttttaatgatactactagttttccaggcaccacttttacatcaggagcaaccatttacttaacaaatgtaattggtgaatttgatgagggtgaaaaaattaaagcatctgaggatacaaatgcagatttaattatgcaaaactctagtggtacagatttaacaatagtttctattataaacagtagacttagtgatgcaagagctgtgcagatgcaagagtctgactcaggacaacaatttaccgcagacattgtactggaaaatcttgagggtaatagtacttcagtatttttggaagaaagtgatgattctgaaaatgcaactggtggaacacaagaaaagaaacagattggtaaggatgatgaagcaactggaatcgagttagaagtacttaaaggtgcgaagttaagagatccacaacttcaacaatctctcttcaaattacctaaagatgctattaaaacattactgacaccaaaaaataatggtgcatctgataccgatttaatttttagaagacagtttgtaggaacaaccagtgcttcgggtgcagtatctttttcagctgcttctggagaaatatttgaagcacacacagaaaaagattataccctatcagtcttaactgctggtaatggtagtgcatctcaaggagatattgttagtgttgcgagtaccatatcaggaacaggaacaagcacaataacaataacagactcaactaatcttggtgattctgcaaaggttaaagtcatcgcaacggttaaaaagacagatgttattcaagcagtcaagactacaaacttatctaaacaattaaaagttatcgcaagtgatgccgatggagcatttggaactagagcaacggatgatattatatcattaggtagaactgatgtttacagaatacaagctatatatgattcagaagatacttcaacggatgctgttgcaccaacacttactgtaagtgacatatcagggacttttgaacgtggagaacaaataaaaggtgcgacctctggtgcaagaggacgattaattacaacttcaagtccactgtcttatacattaacacttggagatggtgctgacgatttcgtggtgggagagactataaagggcacagcatcaggtgcgactgcaacaattgatactgatggtgttactgctggtagtaaaatagtaacaaatgattttgtatttgatgacggacaacgaaataactattatgatatttcaagattggagaggaaaaaagatcgtaacgcaccaaagggaagaatgttagtaatttatgattacctatctcatggtgctggtagtttcttttcagtggattcttacagtgctgtttctgaacaaatgacttacgatgatattcctatatttgttccaactgttactgaccccgatgatccagctccagcatcagagtttcctttatcggattgtttagattttcgtccaacagtggaaaatattgctggaacatctgaaacaataacagatgttgatcaggtaacagcaaattcatttgattttcgttctagacagtttgacggtactggtgcggttattgtggatacaccaaaaccagatagtcttgtaacgacagatattgaattttatttaccaaagatagcttgtttgtatttagataagaacgcagattttattctaagagagggtgaacctaatgagaacttaataccacctgctccaatatatgaagctataaaaattgcagaatttacattgcctgcatatacttttagaccaacggacgttggaatttactacgagccatataagcgatatcgaatggaagatattgctgccttagagggtcgcattgattctttagaatattatacgtccttgacactcttagaacaagatgtgcgttcattagaagtacttgacacaaatggtcttcctagatttaagtctggatttgtaacggactcctttaacggtcatgcagttggagatgttaatcacattgattatgactgtgcgattgataatatagaaagggaacttagaccaaaaacagttgataaaagagctggtctagaggaatttttaactaccgatgcagcaagagaagctgcaggatataacagaaaagcaagtataattactttaccttatgatgaaactgttgccattaataattcatctcaggggcctgttctttgcacctctgctggtcttgttgcaactgattttgagggggaattaactttaactccagacacagataactggtttgaaacagagattttaagtgaaactcctgtttatgatactgctagttttgataaaactaaaaaacaggttgataaacataacgcaaattcaaagtatggtggatggaatgatgttggatcagcagtgccaacaaatatagggtatggatatagtgctccaggcgctggtggtgttcagaattatactggacgaggtggttctaacggacatattaatagacacgatagtaaaggtaatccaacttcgggtgatgtgtggatatatgagtttagatatactcaaaaacaaaaaagaaccaaaacacttaaatcaattagtcatgattggacttcccctgtaacaacagatgttcttagaagcacatcgcaaattagatacatccgtccaattaaaattcaatttgttgctgaaggattagcacctttcacaaaacattatatttattttggtgggagagatgttggtaaatttactaccccagattctcttgaatttacaagtgcgagcagtgttaaaaaaggtg

SEQ ID NO: 202221 - DNA, 2722 bp, Unknown
  Bacterial polypeptide expressing nucleotide sequence isolated from the Sargasso Sea
cgtagtaataactggtgtaagtggctcaggaaaatcgacgttagcatttgatacaatatattctgagggacaaagaaaatatgttgaaagtctttctgcatatgcaagacaatttcttcaaatgatgaataaacctgatgtagatagtattgatggtttatcaccagcaatttctatagaacaaaaaactacacaaaaaaatccaagaagtactgtaggtactgtcacggaaatctacgattacctaagagtgctttatgctagagttggggttccctactctccaacaacaggcaagccaattaaatcacagtcagtaagtgaaatgactgatcttataattaaaaataatattgataagagaatttatattttatctccaatagttagagatagaaaaggtgaatatcgaaaagaaatcgaagatttaaaaaaaagaggttatcaacgtcttaaagtagataatgttgtctatgatattgatgaagtgcctctacttaaaaaaaattttaaacacaatattgatgttgtaattgatcgtcttgttgtaaaaaaaaatatccagcaaaggttaagtgaaagtatagaagttgcactaacaatatcagatggtttgttatatttagaaaatttggatacaaataaaatatcggtattttcatcaaaatttgcatgtcccgtatctggatttagtattgaagaaattgaacctcgattatttagctttaatgctccgcaaggtgcttgctctgaatgtgatggtctaggagttgaaaaatactttgatgaatataagattgtacctgatgaaactagatcaatttctgatggagctattaaaccttgggaaacgaaagtatttggttaccaaaaaaaatattttgttgaaacaatagataaaattttaaaacaatttaaagtaaaaaaaaatgtcccatggagcgaaattccaaaaaaagttaaaaatattattctttatggagatgaagaaagcgaattaaattttttatatgattttgaaggtatagtaaactttattgaccgaaaatatgaagaaactgagagatggtggttgcaatatgaattagaaaaatatttatctgaaagagactgtgaagtttgcaatggttaccgtcttaacgagaaagctttggccgtaagaattgatgaaaatcatattggtaatattactaaaaaatcaattagcgagtgtttaagctggttttcatcacttgaaagtaaacttgataaaaataataaaaaaattgccgagggagtaattaaagaaattaaagatagattagtttttttaaacagagttggtttagattatttatcattggcaagagctagcaaaactttatctggaggtgaaagtcaaagaattagattagcaagtcaaattggttctggattaacaggagttttgtatgttttagacgagccttctattgggctacatcaaaaggataatcaacaactaatagagactttatttagattaagagatttaggaaatacagttattgtagtagagcacgatgaagatgcaattagacaatctgatcatattatcgatattggtgtaaaagcaggtgtcaatggaggtaatataattgcagagggaaatcttaataaaatattaaaaaataataaaagtttaacagctaaatatttaaataaatccctagaaatagaggttccacaaaatagaagaaaatttaataaaaataaagtttttaaacttaataaaataaaaacaaataatttagataatcttaatgttaccttacctttaggaaattttattactgtgacaggtgtatccggcagtggtaaatcttcattaattattgatacattgtatcaaagattagatgaatatttcaataaatccttaaacaaggatgaaagtcgttttaactttaaaggtattaatcatatcgataaagtaattgatatcgatcaatctccaatcggaaggacgccaagatcaaatccagcaacatatacaggatgttttactccaattagagattggtttgcaaacttaaatgagtcaagtgctagaggctataaaccaggtcgtttttcatttaatgttaaaggtggtagatgtgaatcatgtgaaggtgatggagtaaaaaaaatagaaatgcactttttagctgatgtctatgtcgagtgtgatatttgcaaaggtaaaagatataatagagagactttagaagtaaaatataaggataaatctatttctgatgttttagaaatgactgttgaggaaggttataaattttttgataaaattccagcaataaagcaaaaattgcaaactctaatggatgtaggtttagattatataaaaataggtcaatcagcaactacactatcaggtggtgaagctcaaagaataaaattatctaaagaattatcaaaaagatcgacaggaaaaacattatatattctggatgaaccaacaactggtctgcattttgatgatgttaaaaaattacttaaaatacttcatactcttgttgatgagggaaatactgtaattgtaatagaacataatctagatgttattaaaactgccgatcatataattgatcttggcccactaggaggcgtcaatggtggcaaaattgttggaacaggtacacctgaaaatattgcaaataataaaaaaagctatacaggtgaatttttaaagaaaattttataa

SEQ ID NO: 202222 - DNA, 2380 bp, Unknown
  Bacterial polypeptide expressing nucleotide sequence isolated from the Sargasso Sea
atgattattgctccaataattagaggaaaaaaaggagaacatcttgctgtttatgaagaccttcgacaagaaggttttgtgagagctaaagttaatgaaaagatttattcattagatgaatttccagagttagaaaaaaataaaaaacacaatatttcagcagttgtagataggcttgtaataaaaaataatgaagaatttaggcagcgtgtagcagagtcagttgagacagcctcaaacttttccgatggaataattgaaatagactttattgatggaaagaatgaatctattctattttcaacaaatttttcatgtccagagtgtggttattctattcctgagcttgagccaagaatgttttcttttaatagcccttttggagcatgcgatgcgtgtgatgggcttggcataattcaatatattgatccctcaaaacttattccagatgaggatgtctcaataaataatggagccattaagggatggacaagaagaaatagattttatttttatcaactaaagtgtcttgcaaagcattatgatttctcgcttacaactaagtggtcagatctagatgaaaaatataaagatattattctttggggaagtgatgatgtcatagatttttcaaaaagatggcgaagtgggagtaggttagttaggaaacacaagttcgaaggtgtaattgtaaatacgcaaagacgatttagagacacagattcagaatttatgaggaatgagctatctaaacttctttctgataaaaattgtgatgcatgtgatggttctagactaagaaaagaatctagaaatatcttcatcgaaaatactcccattaatcaaataactgaaatgaggataaatgaaagtctcaaattcgtatcagagttaaatcttattggtaacaaaaaaaagatttctgagaaaatacttaaagaaattaatgataggctttcgtttcttgagaatgttggtcttggatatcttgctctagatagaagtgcagaatctttatcaggtggagaagctcaaagaattagactggctagtcaaattggctccggcttggtgggagttacatatattcttgatgagccaagcataggacttcatcaaagagataatgggaaattaatagaaacgcttaaaaatttaagagaccttggtaatactgtaatagttgtagaacatgatgaggatgcaatgcgtgaggctgactatattatcgatatgggccctggtgcaggagttcatggtggaaaagtatgtgctgaaggagactttgaaaaaattattaaagataaaaaatctataactgcaaaatttttatctaaaaaaagagagatcaaagtcccaaaaaagaggtcgaaacatcaagacaaatttattgaaattaagtctgcatttgctaacaacttaaataatatagatattgagatacctgttggtctatttactgcagttacaggagtatctggctcaggaaaatcatctctaattaatcaaacccttcttccaatgagttcttttatgcttaatagagcaaacctcaaaaaagaagttaaatgtaaagaaataagaggtcttgaacatctggataaagttattgatattgaccaatcaccgataggaaggactccacgctccaatcctgcaacttacattggattattttcaaatataagagacctttttgctcagactattgaagcacgagcgagaggatataagcctggaagatttagctttaatgttaaaggtggaagatgtgagtcttgccaaggagatggtcttatcaaagtagaaatgcactttctagctgacgtttatgtcacatgcgatgtttgtaatggttcaagatataacgatcaaactctggaagtaaaatataaagataagaatataagcgatgttttaggtatgacagtcgaggatgctttgtcattctttgatcaaatcccagcaattaagaataaactcaaaactttaaatgatgtaggtcttggctatattactcttggacaatctgctactaccctttcgggtggagaagctcagaggataaaacttgctaaggagttgtcaaagagaagtacaggtaaaactttatttattcttgatgaaccaacaactggacttcactttcatgatattgagcttctattgaaggttttacataggttaaaagaacaaggaaatactatcattgttatcgagcataatttagatgtaattaaaactgcagattggattattgatttaggtcctgaaggaggaagtcagggcggagagttggttgcttgcggtacgccagaaaaggtttcaaaagataagaaatcttttacagggaaataccttaaagggatgcttagctaac

SEQ ID NO: 202223 - DNA, 1334 bp, Unknown
  Bacterial polypeptide expressing nucleotide sequence isolated from the Sargasso Sea
caccagtgccactcaagatgcggcctatagctacaccttggtggcgacagacagcgatgtaggcgacagtctcaccttaagcgccgtgacactgccaagctggctgagcttcaatgcggctacgggcgtgctgagtggtactccaagtaatgccaatgtcggcagtcatgcggtggtgctgagagccacggatgtggatggcttaaccgcagaccaaagctttaccattgtggtggcaaacgttaacgatgcaccgaccatcagttcaacggcgttaaccagtgccactcaagatgcggcctacagctacaccttagtggcgacggacagcgatgtgggcgacagtcttaccttaagcgcagtcacactcccaagctggctgagtttcaatgcggcgacgggcgtgctgagtggtaccccaactaacgctaacgtcggcagccatacggtggtgttacgagccacggatgtggatggcttaaccgcagaccaaagctttacgatagtggtggcaaacgttaacgatgcaccgaccatcagttcaacggcgttaaccagtgccactcaagatgcggcctacagctacaccttagtggcgacggacagcgatgtgggcgacagtcttaccttaagcgcagtcacactgccaagctggctgaacttcaatgcggcgacaggcgtgctcagtggtaccccgactaacgctaacgtcggcagccatacggtggtgttacgcgccacggatgtggatggcttaaccgcagaccaaagctttacgattgtggtggcaaacgttaacgatgcaccgaccatcagttcaacggcgttaaccagtgccactcaagatgcggcctacagctacaccttagtggcgacggacagcgatgtgggggacagtcttaccttaagcgcagtcacactcccaagctggctgagtttcaatgcggcgacgggcgtgctgagcggtacgccaagtaatgcgaacgtgggcagtcatgcggtggtgctgagagccacggatgtggatggcttaaccgcagaccaaagctttacgatagtggtggtaaacgttaacgatgcgccgaccatcagttcaaccgcggtgaccagtgccactcaagatgcggcctacagctacaccttggtagcgacggacagcgatgtgggcgacagtcttaccttaagcgcagtcacactgccaagctggctgaacttcaatgcggcgacaggcgtactgagcggtacgccaactaacgctaacgtcggcagccatgcggtggtgttacgcgctacggatgtggatggcttaaccgcagacaaagctttacgatagt

SEQ ID NO: 202224 - DNA, 911 bp, Unknown
  Bacterial polypeptide expressing nucleotide sequence isolated from the Sargasso Sea
ctttattagtttctattacagggatgtattagctgcaaccatattaggttttgtagttggtattattcgattatcttcaaattggttactaagcagagttgcatatatttatgtagaatttacaagaaatgttcctttgttacttcagattattttatggtacgctattctaattcaattaccacgtattaaacaagctattcaatttttcgataatttttatattgctaatagaggactttttggtcctcgacctatttttgaagaagggtttaatgtagtattttatataattatattaacaatcattgttgctttttttattagacgttgggcaaaaaaaagacaagatcaaacaggcaaacagtttccaactttttcatttaatacaggtttaataattttcgttcccttaataatattttttattgttggatctccactatcatttgaatatccagcgcttaaaggttttaattttaaaggcggaatggtgattaggcctgaatttatagctatgtttttggctttaactatatacactggtgcttttatttctgaaactgtccgttcaggaatcttatccgttacaaaaggtcaaagagaggcatctggcgcacttggattgaaaaaaagttggattatgaggttgattatacttcctcaagcattaagagttattgtccctccattaaccagtcaatacttgaatttaacaaaaaactcatctttagggattgctgtaggatatgctgatttagttcatggttttggaggaataagcttgaatcaaacaggtcaagcaattgaatgtatggctataactatggctacctatttaacaataagtctgactatttctttgtttatgaatatttataatcgtagcatacaatttaaggaaaaataaa

SEQ ID NO: 202225 - DNA, 907 bp, Unknown
  Bacterial polypeptide expressing nucleotide sequence isolated from the Sargasso Sea
atgaacgactcggccgatatccggtttctgctgaccatccgcgaaagcggcagcctgatcgccgcggcgcgaaaactgggattgtcaccctcggcggtgacccaacgcttgcagcaactggagaagaggctgggcgcccagttggtgaaccgcacggcgcgccgtttgcagttcacggaagaaggcacgcttctgtgcgaacgcggcgccgaactggtccagcaattcgacgcgctgttcgaagactttcagacccgccggggcggtctgatcggcacgctgaagatcaatgcgccgctgggattcggacggcgccacctggcgcccgtcattgccgatttccaacagcagaacccggatgtcgacgttgcgctcacgctgtccgaccagccgctgaccgagacgatggaccgcttcgacgtcgtcgtgcatatcggcgaattgccggtatccaatctggtcggctatacgattgcaccgaatgcgcgtttcgtctgcgccgcgccggcgctggtcaagcgcatgggtcagctggagtcgccggaggaactgagcaagctgccgtgcatcgtgctgcgcgagaataacgaagatgtctcgctgtggcagttcagcaagggccgcacgcggcgcagcgtgcgcgtttcttcgcatctgagctgcaatgacggcgacgtgatccgccaatgggcatgcgaaggccggggggtcatcctgcgttccgaatgggacgtggcggacgacctcgcgaaaggaagactcgtgcgcctgctgccaggctggaaggcgcctgacgccaacgtcatcgccctcacgcatcagcgagccggcttgccggcgcgtacgcggcatttcatgcagtatttacagggccgattcaggccgttgccgccgtggcgaagataga

SEQ ID NO: 202226 - DNA, 2268 bp, Unknown
  Bacterial polypeptide expressing nucleotide sequence isolated from the Sargasso Sea
cagtgatggcacacaaagggctttgactgtaaccaatggtactggtgatacgacttttactggagcgataggcggcagtgctccagttaagtctttaacgataacttctgatcagttaacggcaggtgcgatcagcttgaatggtgccttaacggccactcttggtggatcgagttccatcactggagtgattgcaaatggtgcaagtacggcgaaccttgtcaaggcgggcagtggcaccttaaccttgagtgcttcgaacacttatactggtacaacgcaggtgagtgcgggaacattgacggtttcgggatcaggtcgattatctgatagcacggctgtgacgattgcatctggtgctgactacaatgtgaatgcgagtgatacagttgcttctatagagggtgcggggaacattgttattgcgagcagtcagacgttgacggcaggcgatggtaataacaagacgttaagtggtgtgatatctggtgcaggtaattacattaaggctggcagtggcacactgacactgactggtaacaactcgtatacggggtcgacgacgatatctgcaggtcttctaaagattattcgggataatccgacgtcttatttagctgcgacatctggttttacaggacctggtaatttaacgattgagtcatcaggtgatgactttacagctgatatagttacaggcacgcatgttcagttagcagggactgctttaggcaatttaatcattggtaaaacgggtaatacgcgtcagattgatttgtcgagtgacattactacgacaggtactcagacctataatggtcctgttcgccttgttggtggtgatcgtacggtggcaactacgaacagcaacgttatttttgcgagcacagtgaacagtgatggcacacaaagggctttgactgtaaccaatggtactggtgatacgacttttactggagcgataggcggcagtgctccagttaagtctttaacgataacttctgatcagttaacggcaggtgcgatcagcttgaatggtgccttaacggccactcttggtggatcgagttccattactggagtgattgcaaatggtgcaagtacggcgaaccttgtcaaggcgggcagtggcaccttaaccttgagtggtgccaatacgtacactggtaccacgacgattaatgcaggtgatttaacagtgagtggttccttgcatgatagcacggctgtgacgattgcatctggtgctgactacaatgtgaatgcgagtgatacagttgcttctatagagggtgcggggaacattgttattgcgagcagtcagacgttgacggcaggcgatggtaataacaagacgttaagtggtgtgatatctggtgcaggtaattacattaaagctggatctggtacgcagacattaagtgcttcgaacacttatactggtacaacgcaggtgagtgcgggaacattgacggtttcgggatcaggtcgattatctgatagcacggctgtgacggtagatagtggagcggtgtataatgttgcggtgagtgatacggtcgcctcgattgcaggagctggtagtattacccttggcagcaatacgctgacatctggtggcagcaatgcgagcacgacctttagtggtgtcatctcaggaacgaatggtaaccttgtcaaggcgggcagtggcaccttaaccttgagtggtgccaatacgtacactggtaccacgacgattaatgcaggtgatttaacagtgagtggttccttgcatgatagtacggctgtgacgattgcatctggtgctgactacaatgtgaatgcgagtgatacagttgcttctatagagggtgcggggaacattgttattgcgagcagtcagacgttgacggcaggcgatggtaataacaagacgttaagtggtgtgatatctggtgcaggtaattacattaaagctggatctggtacgcagacactgactggtaacaactcgtatacggggtcgacgacgatatctgcaggtcttctaaagattattcgggataatccgacgtcttatttagctgcgacatctggttttacaggacctggtaatttaacgattgagtcatcaggtgatgactttacagctgatatagttacaggcacgcatgttcagttagcagggactgctttaggcaatttaatcattggtaaaacgggtaatacgcgtcagattgatttgtcgagtgacattactacgacaggtactcagacctataatgg

SEQ ID NO: 202227 - DNA, 873 bp, Unknown
  Bacterial polypeptide expressing nucleotide sequence isolated from the Sargasso Sea
tgtcccttgtcaagcattagcagatccgggggatggcatagatgtgagtggttgtttatcagtagcttcaggaactgattgcacggtatcttgtgaggctactcatgtagggtcttctacaacatacacatgtcccccgaataatacagaccctacagttcaacccacgggagatccaccttcatgtgtcccgattgtcccttgtcaagcattagcagatccgggggatggcatagatgtgagtggttgtttatcagtagcttcaggaactgattgcacggtatcttgtgaggctactcatgtagggtcttctacaacatacacatgtcccccgaataatacagatcctacagttcaacccacgggagatccacctgcatgtaacgagattgtcccttgtcaagcattagcagatccgggggatggcatagatgtgagtggttgtttatcagtagcttcaggaactgattgcacggtatcttgtgaggctactcatgtagggtcttctacaacatacacatgtcccccgaataatacagaccctacagttcaacccacgggagatccacctgcatgtaacgagattgtcccttgtcaagcattagcagatccgggggatggcatagatgtgagtggttgtttatcagtagcttcaggaactgattgcacggtatcttgtgaggctactcatgtagggtcttctacaacatacacatgtcccccgaataatacagatcctacagttcaacccacgggagatccacctgcatgtaacgagattgtcccttgtcaagcattagcagatccgggggatggcatagatgtgagtggttgtttatcagtagcttcaggaactgactgcacggtatcttg

SEQ ID NO: 202228 - DNA, 741 bp, Unknown
  Bacterial polypeptide expressing nucleotide sequence isolated from the Sargasso Sea
attgactggaccacaaggaattcaaggcccaacgggagcacaaggtattcagggaattcaaggtgtaactggagctaatggacaagatggagcaacgggagcgcaaggtattcaaggcccaacaggctcacaaggtatccagggaatccaaggtgtaactggagctgatggacaagatggagcaacgggagcacaaggtattcaaggaccgataggcccaacaggctcacaaggtatccagggaatccaaggtgtaactggagctgatggacaagatggagcaacgggagcacaaggtattcaaggcccaacaggctcacaaggtatccagggaatccaaggtgtaacgggagctaatggacaagatggagcaacgggagcacaaggtattcaaggaccgataggcccaacaggatcacaaggtatccagggaattcaaggtgtaactggagctaatggacaagatggagcaacgggagcgcaaggtattcaaggaccgataggcccaacaggatcacaaggtattcagggaattcaaggtgtaactggagctaatggacaagatggagcaacgggagcacaaggtattcaaggaccaataggcccaacaggctcacaaggtatccagggaattcaaggtgtaactggagctaatggacaagatggagcaacgggagcgcaaggtattcaaggaccgataggcccaacgggagcacaaggtattcaaggaccgataggccc

SEQ ID NO: 202229 - DNA, 688 bp, Unknown
  Bacterial polypeptide expressing nucleotide sequence isolated from the Sargasso Sea
catggcgtgcaccgccaccctcacaggccacggcgcctgtgtgcgctcggtggtgtttcacccgacgcaggccgccgtcctcgcctcggcgagtgaagacaagacggtcaagctgtgggacattgacacgggcaaaagcaccatcaccctcacaggccacggcaacaatctgacctcggtggtgtttcacccgacgcaggccgccgtcctcgcctcggcaagtggcgacaggaaagtcaagctgtggaacattgacacgggcgaatgcaccgccaccctcacaggccacggcgactgggtgcgctcggtggtgtttcacccgacgcaggccgccgtcctcgcctcggcgagtgacgacaagacggtcaagctgtggaacattgacacgggcgaatgcaccgctaccctcacaggccacggccactatgtgttctcggtggtgtttcacccgacgcaggccgccgtcctcgcctcggcgagtggcgacaagacggtcaagctgtggaacattgacacgggcgaatgcaccgccaccctcacaggccacggcggcactgtgtactcggtggtgttccacccgacgcaggccgccgtcctcgcctcggcgagtcgcgacaagacggtcaagctgtggaacatcaacacgggcaaatgcaccgccaccctcacaggccacggcggcattgtg

SEQ ID NO: 202230 - DNA, 595 bp, Unknown
  Bacterial polypeptide expressing nucleotide sequence isolated from the Sargasso Sea
atgatgatgaacgatccagctatgatgcaaatggggatggatttctttggcggcccagaaaacatgatgaacgaaatgatgatgggcatgggacctatgatgggaccagatcctatgatgatgggtatggatcctatgatgggtatgcctggaatgggtccaatgatgggaccagatcctatgatgatgggaatgggacctatgggaccagatcctatgatgatgggtggaatgcctggaatgggaccaatgatgggaccaatgatgggaccagatcctatgatgatgggcatggggcctatgggacctgacccaatgatgggaatgatgggaccagatcctatgatgatgggtatggatcctatgatgatgggtatgccaagtatgggacctgatccaatgatgatgggtatggatccaatgatgatgggtatgccaggtatgggacctgatccaatgatgatgggtatggatccaatgatgatgggtatgccaggtatgggacctatgatgggaccagatcctatgatgatgggaatggatcctcagtcgatgatggacaatatggttatgatgggcatggacccttatgatg

SEQ ID NO: 202231 - DNA, 841 bp, Unknown
  Bacterial polypeptide expressing nucleotide sequence isolated from the Sargasso Sea
caagacggagctacaggtgctcaaggaatccaaggaccaacaggttcacaaggcatacagggaattcaaggaattcaaggtgtaaccggagctgatggacaagatggagctacaggtgctcaaggaatccaaggtattcaaggtccgataggaccaacaggttcacaaggtattcagggaattcaaggagttcaaggtgtaaccggagctgatggacaagatggagctacaggtgctcaaggaatccaaggtattcaaggtccgataggaccaacaggctcgcaaggtattcagggaattcaaggagttcaaggtgcaacaggatctgatggacaagatggagcaacaggagctcaaggaatccaaggaattcaaggtccaataggccctacaggttcacaaggcatacaggggattcaaggagttcaaggtgtaaccggagctgatggacaagacggaactacaggtgctcaaggaatccaaggaccaacaggtttacaaggcatacagggaattcaaggagttcaaggtgtaactggagctgatggacaagatggagctacaggtgctcaaggaatccaaggtattcaaggtccgataggaccaacaggttcacaaggtattcagggaatccagggtccgataggaccaacaggctcgcaaggtattcagggaattcaaggagttcaaggtgcaacaggatctgatggacaagatggagcaacaggagctcaaggaatccaaggaattcaaggtccaataggccctacaggttcacaaggcatacaggggattcaaggagttaaaggtgtaaccggagctgatgacaagacggagctac

SEQ ID NO: 202232 - DNA, 1348 bp, Unknown
  Bacterial polypeptide expressing nucleotide sequence isolated from the Sargasso Sea
gtgcaagcctgtgtatgaaacgcgcgagcagtgttacacggtatgcaagcctgtgtatgagacgaagacgaaagagattccatatacagtgtgcaagcctgtgtatgaaacgcgtgagcagtgctacacggtatgcaagcctgtatatgagacgtgcacgaaagagattccgtatacagtgtgcaagcctgtatgggaaacacgagagcgagatgtttgtcataccgtctgtaagccagtgcactacaccaagactgtaaaggtctgcaagggtcgctgggaaactgaaagatgtgaaattccagggccattggtcacaaagtgtgtccggcagccaggttgttgggagacggactgttcaggaaaacgctgttaccgtccggggccagtgaagaagattcaggttcagtgcccatccaggacaatctgcaaaaaagtatgggttcctgaaatttgtgagaagcagattgactgtgtccgctatgagcgagagaccattgtcaaaaagcaatgttacaaagtctgcaaaatggttcaggagcaaagaatcaagacatgctgttacaaagtatgcaagatggttccagagcaacgcgtacgcacctataaagtgtgcaagatggtgccggagcagcgtgtgcggacctgctgctacaaggtatgcaagatggttccagagcaacgtgtacggacgtatcaggtatgcaagatggtaccagagcgtcgggttaagacctgttgttacaaggtttgcaagatggttccagagcaacgtgtacggacgtatcaggtatgcaagatggtgccggagcagcgtgtacggacctgttgttacaaggtttgcaagatggttccagagcaacgtgtgcggacgtatcaggtatgcaagatggtgccggagcagcgagtacgaacctgttgttacaaggtttgcaagatggttccagagcaacgtgtacggacgtatcaggtatgcaagatggtgccggagcagcgtgtacggacctgttgttacaaggtatgcaagatggtgccagagcaacgtgtgcggacataccaggtatgcaagatggtgccggagcagcggacgaagacatgctcttatcgagtgtgcaaaatggttcgggagcagcgttgtcgtgaagaatgctacaaagtgtgcaagacggttaaagagacacatacaaagaaagtgccgtattgtgtgacgcgacctgtgcactacacaaaaaccattgatgtttgtcgcttggttccaaagaaggttgcctacacggtgacgaagtgtgttccaaagacagtttggcgtgaagtcccatgtgagccatcatgtggatatgaggactaa

SEQ ID NO: 202233 - DNA, 1477 bp, Unknown
  Bacterial polypeptide expressing nucleotide sequence isolated from the Sargasso Sea
cagcgcaagcccctgggttgcccaaaagtcactaacaggaacacagcgccagcccctggtggcccccaaatcactaacaggaacacagcgccagccccgggtggccccaaagtcaccaacaggaaaacagcgccagccccaggtggcccaaaagtcactaacaggaacacagcgccagcaccgggtggcccaaaagtcactaacaggaacacagcgccagccccgggcggcacaacaatcattaacatgaacacagcgccagccccgggtggcccaaaagtcactaacaagaacacagcgccagccccgggtggcccaaaagtcactaacatgaacacagcgccagccccgggtggcccaaaagtcactaacatgaacacagcgccagccccgggttgcccaaaagtcactaccatgaacacagcgccagccctaggtggccccaaagtcattaacaggaacacatcgccagccccgggtggccccaaagtcaccaacaggaaaacagcgccagccccgggtggcccaaaagtcactaacatgaacacagcgccagcaccgggtggcccaaaagtcattaacaggagcacagcgccagccccgggtggcccaaaagtcagtaacatgaacacagcgccagccccgggtggcccaaaagtcactaacaggaacatagcgccagccccgggtggcccaaaagtcactaacaggaacacggcgccagccccgggtggcacaaaagtcactaacaggaacacagcgccagccccgggtggccccaaagtcactaacatgaacacagcgccagccccgggtggcccaaaagtcactaacaggaacacagcgccagccccgggtggcccaaaagtcactaacatgaacacagctccagccccgggtgacacaaaagtcaccaacatgaacacagcgccagccccgggtggcccaaaagtcactaacatgaacacagcgccagccccgggtggcacaaaaatcactaacaggaacacagcgccagccccgggttggccaaaagtcactaacaggaacacagcgccagccccgggtggcccaaaagtcattaacaggaacacagcgccagccccgggtggcccaaaagtcactaacaggagcacagcgccagccccgggtggcccaaaagtcattaacatgaacacagcgccagccccaggtggtccaaaagtcactaacaggaacacagcgccagctccgggtggccccaaagtcactaacaggaacacagcgccagccccgggtggcccaaaagtcattaacaggagcacagagccagccccgggtggccccaaaatcattaacaggaacacagcgccagccccaggtggccccaaagtcactaacaggaacacagcgccagccccgggtggccccaaagtcaccaacaggaacacagcgccagccccgggtggcacaaaagtcactaacatgaacacagcgc

SEQ ID NO: 202234 - DNA, 957 bp, Unknown
  Bacterial polypeptide expressing nucleotide sequence isolated from the Sargasso Sea
agatattggtgggccaactttaattagagctgctgcaaaaaattatgaatttaaaatagttgttgtagataacaatgatttttcaattattttagatgaaatgattaattcaaaaggcgtgtcacttgaaactagaaaatatttggcaatgaaagccttcttatacatttctaactatgataatatgattgcccaatggttccttaaagagaatgaacccaaccattatccaacatattttccattatcagctaaactgaaatatcaattaagatacggtgaaaatccacaccaaaaaggagcagtttattcatctgacaaaaatataaaaggtgctttaaatgcaaaattattacaaggagatacattgtcatacaataatttgaatgatgcagataccgcatttaacttagttcatgaatttttagaaccaacagtagctataataaaacatgccaacccttgcggagtttcatctgacatttctatcaaaaaagcatggaaaaaagctttgaattgtgaccccatttcagcgtttggaggcattatatcattaaataagaaagttacttcagaaattgcaaaattgttaataaaaatatactcagaaataattatagctccagaattttcagcttctgcagttaagatttttaaacaaaagccgaaattaaaaatattagagactagatatcaaaatcagaatgaacaaaatatctatactgtaaaatcaattaatggtggttttttaatccaagataaagataactactcattaaataaaaatgaactaaaaactgtaacaaatttttctccttcagaaaagaatattcaagatatgctatttgctgcaaaggtaataaaatatgtaaagtctaatgctattgtctttgtaaaaaacaaaataacaattggtattggagccggtcagatgagtagaattgatgcagcctacct

SEQ ID NO: 202235 - DNA, 577 bp, Unknown
  Bacterial polypeptide expressing nucleotide sequence isolated from the Sargasso Sea
ggtgttttaagatcgttaccaaatataacaataatttcgcctgccgatccaactgagacggttaaagctgtatttgcttctataaaacataatgaaagtgtttacatcagacttactgggggatcaaactgtccacaaatttataaaaaagactacgactttgaaataggaaaagccgtaaatcttaaagatggtacagacttattaattgttgcatgcggtccaatggttaaaacagctttagatactgcggaccacttagaaaaaagtggaataagttcacaagttttaaatatgcatacaattaagccattagacaaaaataatttaaacaaagccatcaaaggaaaaaaaatggttgtaactatagaagagcataacgtaataggtggtttgggttcagcaatttcagaagtcttatcagaaaatgataatatgccaaaaaaaatttcctttggaattaatgataaatatagtaaaggaggaagttattcttttttaaaaaaaaattttgggttagatgttgatactttaacaaaaaaaattatggatcaattaaattatggaagaatataaa

SEQ ID NO: 202236 - DNA, 676 bp, Unknown
  Bacterial polypeptide expressing nucleotide sequence isolated from the Sargasso Sea
ttgaaattaaaagaatctgttaaattccttgaagaggacgataactttctaagttttaaaacaagattttttggtatctaccaagctgctgctttaactcagaaaagttatgatagccttgcaaacgatattgaagtagaaagtcttgtaagtaaacttaaaaacaaatatcaaacagaaatttttactacaattaagactgtagaaaatacaatcccaactccacaacaaacaaacgatctagaagaaaacttaatagttgttccagttaaaacagaaaacagcatagacactgataatgatggagtagaggacagtgctgacaattgtgttggaatagcaaacacgggacaagaaaaccttgataaggataactatggggacgcctgtgacccggataaagatggtgatggggtagcaaatgaagacgatgcttttccaattaatgcaaatgaaactttagatacagactctgacggcattggtgacaacggggataactgtaaagaaacagcaaacacgggacaaaaaaaccttgataaggataactacggggacgtctgtgaccctgataaagacggtgatggggttgcaaataataatgacgcctttcctcttaatgcaagtgaaactttagatacagactctgacggcattggtaataatagtgataact

SEQ ID NO: 202237 - DNA, 247 bp, Unknown
  Bacterial polypeptide expressing nucleotide sequence isolated from the Sargasso Sea
atgttgtggtcaaatatcattcagcctagattaatatctttggcttgtacttcaaagcctatttgcaaacaaagaagcaaagtcattccttttgcaaagggagaggtattagagattggatttggttcaggtcataatcttccttactataatcaaaatgaaattaaaagtctcattggacttgaaccctcattaagtatgcaaaaattatcaagtgaaaggctcaaagattctgccattaacttta

SEQ ID NO: 202238 - DNA, 424 bp, Unknown
  Bacterial polypeptide expressing nucleotide sequence isolated from the Sargasso Sea
aatgggtcacgaacatcaaaaagcaacagttaaagaatcaacactcttttcacatacaggtaatgctggatcatcctccttcattggtcaaactgataaagataattataataatgcagaaactaatccaacaaaagaattaatctcattaaatagaaatccgaccattaataacaccaaaatattcaatggtggtgattcaattaatatgaaagttgataaaattgaagaaaattatattaatgatagaattaatggagcagataaagtttatcaagaaattccaacagaacataattgcaaattaacatccatgaaagatagattagaagataaatcaatatctaatagaattaattccgaattattagatccattcaaatcaaacccatatacacaacctttaaattcatttgcttattaa

SEQ ID NO: 202239 - DNA, 2425 bp, Unknown
  Bacterial polypeptide expressing nucleotide sequence isolated from the Sargasso Sea
gctgacgcgaaggccataccctcgggggtttcacatgactatccgtcatcgcatcacgctattggttatcttgatgttcgtcgctttatccgcgatcggcggctacgcggtgtatcagacgcgcggcagcgcagccgaagtgcgcaaggtgaccgaaggcgtcgtacccagcgcgctcgcttccgctgacctcgtctcgcaagtcaaagacgtccaactcgcgaccatgaccctcgtctacgcgccggacgccaacatggtcagccaggctcaagacgaactgaagaagaaaaagaccgcgttgcaacaggccctcgcactgcaggccaaagacgccgcgagccatgcccagcaaggtctcgtttcacaggccaacgagagtctcgaaaactacttctccgcgattgccgagacggcgaaaatgaaggccgacggcaagaacgaactcgcgcaagcgtatctgttcgccaacgtggcgcagtatcgcgacgaactcgaaggcatcgtcgaaacgttgcgcgtcgagaagaaccgccagaaagacgaggcgatcaccgcgctgaacgccacgctttccaccacgacgacggcgatcgccgctgtcaccggtatcgcgattattctgctgaccttcatcggcacgctgctctaccgtcagatcacccgtccgctcagccgcatgcaggcgatgatgagcgagatcgcgtcgagccaggatttcacgcgccgcgtgccggtgggccggctggatgagatcggccattcgatcgtcgccttcaacggcatgatcgaaaagatccaggaaagctcggcgcaactcaagcagaagaccgccgacattcaggcgatgttgcagaacatgcagcaaggtatcttgacggtggtcgacggcgccgtgatccactcggagtactcggcgtatctggaagacatcttcgaaacgaaagacattgccgggcgtggtctgatggacctggtgttctcggataccgatctcggctcggacgtgctctcgcaaatcgatgcggcggcgcacgcgtgcctcggtgaagactgcatcaacttcgcgttcaatcagcatttgctagtgggcgaaatttcgaagcgcatggccgacggccgcgtgaagattctcgacctgagctggtcggcgattaccgacgaaaacgacatcatcgtgcggttgatgctgtgtgtgcgcgacgtcaccgaactgcgcaagctcgccgcggaagccagcgaacagcgccgccgtctcgacatgatcggcgagattctcgcggtgagcgaagagaagttccatcatttcatcgaaagctccgctggcttcatcagcgagaacgagcgcattatccgcaagcattcggaagccgatcacgcagcgatcgccgaactgttccgcaacatgcacaccatcaagggcaacgcgcgtacctacaacctggcgcacctgacgaacgtcgttcacgaaaccgagcagagttaccacgaactgcgccaacccgatgcggatcgctcatgggatcaagacctcctgatgcaggagctgactcgcgtgcgcgaggcgatcgaaagctacgcgcggatcaacgagcagagcctcggccgcaaggccaaagccggcgcgaacaatgccggccacgccggccgctatgtgatggtcgagaaagagcagattcagcagaccctgagcatgctggacaagaccaacgccggcgatctccacgaattgcagtcgatgcacaacgcaatgcgccagaccttgagcgcgctcggcagcgaaagtgtgcgcgacgcgctatccggagtgctggattcactgccttcgctcgcgcaggaactcggcaagccggcgccgacggtgcgcatcgatgacaacggctaccgtctgcgcggccagacgggcggcacgctgagcaacgtattcatgcatctgctgcgcaactcgatggaccacggtatcgaaaccgccgaggcacgcagcgcgcagggcaagacgccggccggcacgatcgatatcgaagtgggtgtggatagcggcacgctgcagatcacgctcagcgacgacggccggggcctcgcgctcgagcggattcgcggcattgcggtggagcgcggctgggtcggcagcgacgaacagttgagcgacgaagcgatcgccgaattcattttccggccgggtttctcgaccgcggcaacggtcacggaagtgtcgggccgtggcgtggggatggacgctgtgcgcgatttcctcaagcgcgagaacggccgcatcgaactgcgcttcaccgacgatcacaagggcgcatcgttccgtcagttccagacgatcgtctgtctgccggatagcgtcgccgtcgacacgctgggggagcaggcgcgtggcgacgccggccaactgcgggtcggtgcgatggtggattga

SEQ ID NO: 202240 - DNA, 2971 bp, Unknown
  Bacterial polypeptide expressing nucleotide sequence isolated from the Sargasso Sea
aatgcttaaaaaaactttatcaatagctatttcagctatttttgtacctatattatttataggtgttgttaatacgcaaacacttgaaagaggcggaatagaagaaataatcgtaacagcgcaaaagactgacgaaaatatacaagatgttcctattgctgtaactgcttttagtaatgagagtttggaattacaacaaattgaaacttttggtgatcttcaatttaatgctccaaacataacttttacaaaaagtaattttacaggcgcgaatatgactattcgtggtgttaattctgggacagtcgctgcatcaggtgatggtggtgttgccttccatgtaaactctgttcctgttccaacaagagtatttgaaactgaatattatgatcttgaatcagtcgaaatactaagaggtcctcaaggaactctttatggtgcaaattcaacaggtggtgttgtcaatatgaagtttgcaaaacctacagaagtatttgaaggcgcagttgaccttgaagtagctgactacaatcataggcgaataaaaggtgtaattaacatgccaattactgaaagcgtatctatgcgtatagcaggcatgatgcttgaaagagatggctttactgagaatcaatttcctggaaaagaaggagaagatatcgatggtagagatatcacctcttggcgcatgacaatagctgctgagttaagcgaaaatacaaccgccacttttacttactataactttgaggaagatgataacagagctcgtgttggtaaacaaatgtgttatgaaacggagacaccagtgtatggttgtaatccctataaaattcgatatgggcagccaaagggagcatctgatctttcgggtgtttggggtgctattgcaggtctaaatacttggagtccgcttgattatgctgcaggtaacctaactcgatctcaagatttaagagaaacttatcaaaatattgacccagtttataaagcttcagaagacacatacattcttgaaattgaaagtggagctatagaaaactatactattactgcaagagcagcttattcagaaacaagtgttttctcccaacaagattattataatactgatggaagtcaaaaatatgctaaattaggagaaaatgcaggaaacccacttctgcctcctggtaatgcagcatttccagatggtatagttccagtatctgcttacacagagagtatgtgtggtatcttctgtaatgcaatttctggttattatgattttgcaatggcatatgacacctctgctggagaaaccgaatttaaatttgctgaaatacaagtatcttcagatttagatggtcctgttaacttcttagcaggctttaattatactgaagcaacatcaagttctatttatgatgtgtattggactactgccgaagcagcagctctatctcctttattagggccaagactatatccttcacactatcgtaaccaaacagatccttatgaacttgaaagaaagggtttatacactcaagtttattacgatgcatccgaagatttaagaatcactgttggtgctcgttggaatgaatcagaaaaatctgttgctgatagacaaaatctagttaactcaataattcttgctggtggtacaagagttggagatcctgttacgcttggtgtacaaactgtcgatccggctcttggacttgtacttactggccaaggagcacctactttacctctagtacctggccttggccaacaaaggaaaacattaggtgtgcctactagctttactgaagaagaaataaccggaaaagttggagttgattggacacctgatttagaaggaacagactccactctggtttatgccacattttcaagaggatatcgaccaggtgcatttaatccaccaatcgatccaacattatttagcaatgttcctcaaacaactgatcctgaatttattgatgcttatgagattggtatgaaaaatgtcctacttgataatactctagtagcaaaccttactgctttcttctatgactatgaaggcctccaagtttcaaaaattattgcaagaacttcagttaatgaaaatattgatgccgaaatgcaaggattagaagctgaatttttctggtcaccatcttcggtgccaggactgcgatttgatcttcaagtatctttattggaaacagaaattgctaatggagtaacttctgttaatcctttagataaaataagtaaagttaaaggagataccgaaggttggctaatgaaagattttggaagtggtgctacttgtggatttaaaaaacaagatctgtttataggtattggtgcgggagcattgaatattaatccagctgctggtgcattagatatgattgcagctccaaaaacactatcacctacagaaggtcccggaagtaactttgattcagctgatccaacaggtctagtaaatcctgcagtcctaattggtggaggagctttaccaacaattgctaattgtgcatcaattcaagcaaaattagctggtttaaaagctgctggcgttccaggtgtttatggtgattattgggagccagtgtatgacctaagcggcaacgagctagttcaatctcctgctacaacaattcattttggcgctgaatatacagccaattttgaaaatgctgatcttcaagttgtatcaagaattgattattactggcaggatgatatgttctcaagaatatataataatccgagagatttgattgatgcttgggatgtattaaatgctcaaattattattcaatcaacagtgaatccttggtatgtaaagatttgggggcaaaaccttatggatgatgataatattactggtcattatttcactgctgaagcctccggcggatttaggaatgatttcttagttgatccacaaatgattggtattagctttggagcgagattttaa

SEQ ID NO: 202241 - DNA, 1066 bp, Unknown
  Bacterial polypeptide expressing nucleotide sequence isolated from the Sargasso Sea
aatggatttaacaataatattagattacataattataagcataattgcatcattgactgtaaattcatttctaagaaattatgctaaaaaatataaaattcttgttgatataccagatacgagcagaaagtttcacaagaggccaacccctcttactggtggtattggtattttaattgcccttttaatttcaggcaaattatatattgaccttaataaccttacaggttatgtccctgaatttacttttcaattaatggtgatatctattccactagttatattattccttattgatgatttcaaagaattaaaaccattgtttcgaattttaattcaagtggccctcacaatatatatgattcaaagcaccggagtgtatttagaaactttgggtaatttgtttggacctggagaaattaatcttggaatttttagtatgcccataacagtattttgtgttgttggtattatgaatgcttttaatatgatggatggcataaatggactttgttctggctgcgcaatgattactttaatgctaattggttttttttcaggattaatatatgactcgatgctagttctaattattggttcgatgattggatttgtaatatttaatttaggtatatttggaaaacaaaatggtgttttcttgggtgacagcggttctaatctagtaggattttgggtggcatggattgcgatttatgcatcacaaagcaaaatttacagtattgagcctatgacaattttatggttcgtagcaataccacttctagattgtattggattaatttttactagaacgataaatggtataagttgggctacagctggaagagatcatattcatcataaattaatgaaaaagttttctcctcaaagcacacttttaataatattaaccacaactttgctcacaggcatattcggaataatagttgaaataatatttacgtcatatatttcgacattattgttttttgtatatgctattttatactatttatttacaggttacttttggaaaaaagttttttttggggatgcaacaaattag

SEQ ID NO: 202242 - DNA, 783 bp, Unknown
  Bacterial polypeptide expressing nucleotide sequence isolated from the Sargasso Sea
tgcaaggagactttcccctatcctaaaagttccatatcacaaactttttaatgagctaaaatcaaaacagcagttcatttggataaaacgaagattacatcctcaacaaacaagacttattcagaaacttggattaaagggaattggatttatagaggaatatagaagattttatcctaacggtaattttgccggacaacttttaggatattccggaattgacacgcaaggtttagaaggtatagaacacaaatatgagtctttgcttgcaggcataccagtaacatatgtactagagaaggaaggaatgtatcgtacggaccccctttcaaatatatcaaaaaaaattccggatcagtattcactctatttgactatagacagtacgattcaacattttgcagaaaaggccttaagagaaggtgtaattaagtctcgtggtgacagaggaacagctgttgtaattcatgctaaaactggtgcgatcctggcaatggctaattatccaggctatgatccaaaccgttatcagcgttacagcagggagcgtcagcttaactatgccgtaaccgctggttacgagccaggatctacctttaaaatggttactcttgctgcaggacttaatgagaggcttatatctgctgatcaggaatttttctgtgaagacggagagtataagataggtaataacttaatcagagactcatcaccacaaggtatgttgacactagagcaaattttaaaaaaatcatcaaacatttgtgcggcaaaaattggcat

SEQ ID NO: 202243 - DNA, 803 bp, Unknown
  Bacterial polypeptide expressing nucleotide sequence isolated from the Sargasso Sea
ggccgatggcggggagggcctgctggacgtgctgggtggccccgaccgttccacggtggtcaccggcccgttgggcgaccccgtagaggccggctggcgtctcgaccgaggcacagcagttatcgagatggcacgggtcgccggcctggagttggccggcggagccgacggaaaccaccccttggacgccaccaccgccggggtgggtgagctgatcttgagcgcggtggagtccggagcccgacgggtcgtcgtcggcatggggggatcggccaccaccgacggcggtttgggggctatcgacgccatgggatcgcaggcccggtaccggggtgtggagatcctggtggcgtgcgacgtccggacccggtttaccgacgccgccgaggtgttcggtccgcagaagggggccaccgacgcccatgtccggctactgaacggtcgcctcgagcgcctagtgcaggtctatggcgaacggttcgacgtcgatgtctccgtattggatcgagccggggcggctggtggtctggctggtgggctggctgccatgggtgccgagctggtcgacggcatcgacctggtggccgaggagctccggctcgacgaacatgtggctgacgctgacttggtggtcactggcgagggttggctagacccgacctcatacgacggcaaggtcgtcgggggcgtgggtgtctacgccgctgccgctggcgtgccaatgttggtggtggtcggaggtgccgaacccgaggtcgtgggccgaggcggggtggtatcactgtcggaccggttcgggatgg

SEQ ID NO: 202244 - DNA, 898 bp, Unknown
  Bacterial polypeptide expressing nucleotide sequence isolated from the Sargasso Sea
ctgattttgaatgcaggtgaaagaatgatagaaggtttagaagaagcagtcgaatacataagaaacgcaaaaaatatctatattacaggtagtgggacaagttacaattcagcattaattgcaaaacagatcttatcaaaatatgtgaaaataaaatcagaaccaattatagcaagtgagcttcaatttgcaccagaaacaattgaagaaggttctgttttaattgcaatatctcaaagtggagaaagtgcagatgttttagaagcagtaagaattgcaaagaaaaataattgcaagattatttctattgtgaatttactcacatcatcactctcacgtaaaggagatgttgtgttaggaatgggttgtggtccagaaataggggttgctgcaacaaagagctttactgcacaattaatcatactatacaaaattgtacaaaagttaggtgagaatattacaattgattttgaaggattttcagaatcaatttcaaaaatgatagagaatacacttggaattaagaaaattgcaaaagagttgaaaaatgtgtcagacatttacattttgggtagaggaataaactatccaattgcaatagaatcagcattgaaattaaaagagttgacctacattcatgcagaaggaattccaggtggagaattaaaacatggacctcttgcattaatggatacagatgtttttgtaattgttatcaatccaagtgattcaacatataatgacacattaacaagtgcacgagagattaaagcccgtggagcaaaaattatcggagtttcagatattgaaagtgacgtttatgattattggatggatattccaaaaattagcgagattctttatccatttcagagatatttccaatacagttactgac

SEQ ID NO: 202245 - DNA, 747 bp, Unknown
  Bacterial polypeptide expressing nucleotide sequence isolated from the Sargasso Sea
aatgacatcaaatagtcttaaatttttagacaaatttagggaagtcaaaaacttagagattattgaaagccaatctgacgtaaaaagactttcaaaagatttttataactactctccaatccttactgaaagattagacgaatgtatcgctgatttggtggtaagacctagtgatcataacgcggtgaagaaagtagcaaaaatttgttgggaattttctatccctcttactttacggggttcaggaacaggcaattatggacaagctgttcctttgtttaaaggagttgtaatgcagatgagtcactttaataagttagaagaatttgatccagatacaggttttgtgaaagcacagtctggatgtgtcatgggagatttgaataaacaattagaaaaatatggaagggaattaaggttgcttcctagtacttggaaaaccgctacaattggaggctttattgcaggcgggtcaggaggtattgggtctattaggtggggatttttaagagatccaggcaatcttattggtttagaggctgtgactataaatgaaaaaccggatttattaaaatttgatgctcaagaatccgaacctcttaatcatgcttatgggactaatggaataattacttctttattacttgctactgatatcaaacgtaagtggtattcaatagttatcgcctgtattgaatttgaaaaaacaatagaaattttaaaaactcttacaagcgccgcaatgat

SEQ ID NO: 202246 - DNA, 856 bp, Unknown
  Bacterial polypeptide expressing nucleotide sequence isolated from the Sargasso Sea
gaagatgatgagatcaccgtcgatagtcagggcgtcgagaagaaaaaacgtaggagacgagccacaaaaggttcatcagagaaacgcaggaagcgggccgagaagcggcgattagctgctttaagaaaagccgaagccgccgagaacatcaagaccgcggaacgcgaggaacgttttagtatgcgatacgaggactttaggagcagagaagtgaggaaggacgagcatcggttgcaggtttatctagagggtgcggatcgcgccttagataaggcggactacattcttgagcagcgcgacgaagaggaagccgtgaaattgaggcatgaacagggtgtggtgagaacggaactgaaaatggagcgccgcgagaaggagaggcaagaggaagaacaaatgttaattgagtgtgtcaaattggacggggaggcgtctggaggttatttatctggaggattggacaggtttgtaagaggttctacggcgaaaaaggatagcaggtgtcctcccatgcgggagataagggagtcggcgatgaggatgacccaggacttattcgaggctcgtagtcgcttggttcttgccttacaacagtgcctacagttggaggacgtggtgaaacagttctcgaagagcgccgagagggccgaccacgaagctcggaaactgcaaaggactttaaggttactagaaagcaatcgaggcttgaagggcgccttagctcccaagcagcaagagatcgacgagatgcgccacgctcatgaacttaaagtggccgaataccaatcgacttccgacgtgttagcgtctcgcgaaagaaaattaagattggcgaatcgcatcgcccaagcctgaa

SEQ ID NO: 202247 - DNA, 902 bp, Unknown
  Bacterial polypeptide expressing nucleotide sequence isolated from the Sargasso Sea
tatgaaaattattcattttcttattctttttcttgtttcaattaatacatattcaaatcaagagatactaaccttaggttttggctcttgtcttcatcaagaccgaagcatggctattcttaagaccatagaaaagaaagaattggacctatttatgtttattggagataacgtttatggagatcaggaagatggagaattagataaactcataagaacttataagcagcaattcaataatttagagaattttttacagaatgtaagtacagagtttatttgggatgatcatgattttggattaaatgatggtggttctaattatcgttacaaagatatagcaaaatctcttttcttagagacttggcaaattcctgctaacgatccacgcagactaagagacggtctctattttgacaaaataataaacaaaaatggtcttaaaatacatttaatctttttagataacagatcatttaaatctgaatggaaattaacagatgaattcaataaaaaaggaaaagaaagatatattgaagatttcaatcctgaaaagacattgttagggaaaaatcagtggaaatggctcaaagataaattaattgtagaaagcgatataaaaatcatcatatctagtttgcagattttgagtttagggcatggatgggaatcgtgggataaatttcccttagaaagagaaaaattccttaaactcatagatgaatccaatatttctaatctttttattctatccggagatagacatagaggtgggttttatcaatttaagacagttggtaacaataatatttatgaattcacatctagttcattgaatctaccaatactatttaatactgaagagaaaggtcccttgaggatcggttcaacctatagaaaag

SEQ ID NO: 202248 - DNA, 1117 bp, Unknown
  Bacterial polypeptide expressing nucleotide sequence isolated from the Sargasso Sea
gctatgggaggtgacaggcctaaatatgaaaaagaatatattataccatcaacatttgatcccagattaattagcgtaatacctgtagctgttgcaaaggcagcaataaagagcggagttgctagaaaaaaaattgaaaattttgaaatatattctgaacaacttaagcaaagattagacccttctgtaacaattatgcaaggtattaactcacaaataaaaagaaatcaaaaaagagtagtttttgctgatggagaagatgaaaatacactaaaagctgcaatagcttttcaaaaaagtggttttggtactccaattttagtcgcaaaagaaaaggtagtcaaacaaagattaaaagaaattggatacagcgaaaactttaatattcaaataattaattctacagataaagaaaaaagagaaaaatataaaaaatttgtttttgaaaaacttcacagagaaaaaggttttttagaaagagattgtgatagacttgttagaaatgatagggttgtatggggatcttgcatggtatcttgtggtgatgctgatgcaatggttacaggtaatacaaggagatatggtcaatctcttcaaaaagttttaaagatcataaagtcaaggcctggagaaataatgtttggtttaaatatggttgtaaacaaaggaagaacagtatttataggagatacaactgttcatgaatatccctcatctgaacaaatggctgatattgctttatcagctgcaagagttgtaaggctttttggttttgatccaaaagttgcttttctatctcattcaacttttggtcaacctatcactagcagaactaaacacataagagatgctgttgaaattttgaagaaaaagaaagtagattttaaatttgacggtgatatgcagcctgatgtagctttaagtgaggagtacaaagatttatatcccttttcagaaatagtagggaaggcgaatatactaataatgcctggtcaacatagtgctgcaatttcttataaaattatgaaaacacttgggggtgcaaaagtaattggtccacttttaattggtttaggagaacctattgagattgctccattaagatcttctacatctg

SEQ ID NO: 202249 - DNA, 659 bp, Unknown
  Bacterial polypeptide expressing nucleotide sequence isolated from the Sargasso Sea
aatgagtaatgatatcttgattgttgatgatgaatccgacatcagaacattattaagcggaattctggaagatgagggttatttcacgcgagaagcagcaaactcagagcaagcttacgccgaaattaatgcaaggttgccaagtttagttatactcgatatttggcttcacgggagtgaacaagatggtgtcgatatacttaaatgggtgaaaacagtatatccaagcgttccagttattatgataagtggtcatggtaatatagagaccgcggttaattctataaaagctggagcgtacgaatttattgaaaagccctttcaggcagataaattagttttattagtaaaacgcgcacttgaagcagaaggtttgagacaagaaaatctagaattgcgaaaacgtgcaggtttcaatgaagagttaataggtgagtcgctatcaatctcacagctaaaagctactatcaacaaggttgcacccggaaatagtcgtattctaatcacggggcctcccggggctggtaaggaaatagttgctcgcgcaatacatgccaattcgggcaggatagatgcgcccttcattgttcttaattgtgcaactatgaatccggataggttagaagttgaactttttggaataaatcacccgagtaata

SEQ ID NO: 202250 - DNA, 890 bp, Unknown
  Bacterial polypeptide expressing nucleotide sequence isolated from the Sargasso Sea
tgcagactttgatggagatcagatggcagttcatgtgccactatcgattgaggcacagctcgaaagtagggcattgatgatgtcatctaataatattctttcacctgcaaacggggagcccattattgttccatcacaggatgtagttttaggtctttactacatgaccagagagaaagtcaaagataaaggtgagggcggtatttttgcaaatattgaagaggtagaaagagcatttcataatgggtttctgggtctgcacgctaaaattaaattaaaggttgcaacgcaaaatgaggaaaagcctacagagattgctgagacaacttgtggcagagccttattctcaaaaattgttccagacgagatcccattttcagtaacaaataaaacaatggatagcaaagagatttctagactaatcaaccgttgctaccgtgaagttggactcaaggctacagttatatttgcagataaactgatgtatcttggtttcgagtatgcaacgaaatcaggagtatcaattgctctagatgatatggttgttccagaaaataaagaagaaattctgactgatgctgaatcacaagttaaaagtattcagaaccaatttacttcaggtctcctcacacaaggcgagagatacaataaagttgtcgatatttggtccagaacaaatgatcaggttgctaatgcaatgatggataagcttggaaaagagagagtgactgatagcaaaggtaaaaaacaggatcaagaatcattcaattcgatctttatgatggctgattctggtgctagaggatctgccgctcagattaggcaattggctggcatgagaggccttatggcaaaaccagatggttctattattgaaactcctattacag

SEQ ID NO: 202251 - DNA, 270 bp, Unknown
  Bacterial polypeptide expressing nucleotide sequence isolated from the Sargasso Sea
ttctgaaacaaggggtaacagttttaggtcatgtacaaagaggtgcacaaccaacacatcgggatagacttattgctagcgcttttggggtatatgctgttgatttgattgcaaaaaagaaatttaatagagttgtagtttggaaggatagaggtgttcaagatcttaaattaagtcaggttgcaggtttttcaaaaacaattcaaaaaaatgatcctttaattaaagtcgctagaggtttaggaatttatattggtgagctaacttaaa

SEQ ID NO: 202252 - DNA, 797 bp, Unknown
  Bacterial polypeptide expressing nucleotide sequence isolated from the Sargasso Sea
aatgagttttttaaaaatacaaaatttaagtgtagattataaattgagaaaagagacagttcatgctgcaaaagatattaatattgagataaaaagaggagaaattgtaggattagttggggaatctgggtctggaaaaagtactgtagcaaatgcaataattgatttaattgacgaaccagggaaagtatctgaaggatcaatttatttaagtgacataaatattcatgaaaataaaaaaaatattcttagtttaagaggaaaaaaaattggatttatttttcaagatcctcagacatctttaaatcctattttaacaattggacaacaacttattgaaacaattcaaactcatttaaacctcagtaactcagaagcaaaagaaaaatcaataaatcttttaaaagaagtaggtataaaagatgctgaaaaaagatttaatgattatcctcatcaattttcaggaggtatgagacaaagggttgttatatcactttctctatgttgtgaaccagagttgttaattgcagatgagcccacaactgcacttgatgtatcaatacaatcacaaatattagaacttatcaaaaaactgactaaagagagaaacttagcggttatattaattacacatgatatgggagttatagcagagactaccaatagagttgctgtcatgaaaaatggtaatttggtagaattgggaacaacaaagcaaatattaacagaaccaaaagaaacttatacgaaaagtttagttagttctgttcctccaacaaataaaaaaatatccagat

SEQ ID NO: 202253 - DNA, 627 bp, Unknown
  Bacterial polypeptide expressing nucleotide sequence isolated from the Sargasso Sea
gatgaaaataaagaaagcagtttttccagtagccggttttggtaccaggtttttaccagcaaccaaatcaaccccaaaagaaatgttgcctgttgttgataagccactgatccaatatgccgtagaagaagcaagcaagataggagtggaagaattcatttttataacccatcacgccaaaggttcaattgataaacatttccaaaataatgaaggcctctttaatatgttagcagagcagggtaaagatgatttagccaagtcaattaaagatatcggtggttcaaacgcaaaatatatctctgtcgatcaaggcgaaccaaagggtcttggccacgcaattggatgtgctgaaaattatattgaagaaaatgaattttttgttgttcttcttgctgatgatctgatttacaccaaagaacgtaatgtgctcgaacaaatgaaagagcaagctgaaaaatatggaaaacaagttttagctttggagcaaatcccaaaagaagatatatcaaaatttggtgttgttgaccctaaatcgagtgagggcagtatttctcatcttaaaggtatagttgaaaagccagcagctcatgatgcaccctctaacttagcagtcgttggtaggta

SEQ ID NO: 202254 - DNA, 295 bp, Unknown
  Bacterial polypeptide expressing nucleotide sequence isolated from the Sargasso Sea
atgattaaaaaagaaaatgaagcgtataaaactataagtgaggtcgcagaagaattgaatttagttaatttaaaatctggcaaagtttcgacacacactcttagattttgggaaaaagaatttaaacaaattaaaccaaaaatatttgctggaaatagacgttattatgatatcaaaacaatagaaattttaaaaaaaattaaatatttacttaaagataaaggcatgaccattaaaggtgttaaaaatcaattattaatcgatgaatcagatcttgacgtatcaactaatacaa

SEQ ID NO: 202255 - DNA, 493 bp, Unknown
  Bacterial polypeptide expressing nucleotide sequence isolated from the Sargasso Sea
agaaaagctaaaacaaaacaaaagaatgaaattattggatctacagcaaagatatattcccaaaaaggcacaggaaatgcgagacatgctagtaaaaaagcacctatatttgtaggaggtggtgtagcacatggtccaaaaggagaaagcaactataaaattagaaaattaaataaaagtgaaaaaaaattaagtattgcctcaataattacagaaaaaaataaaagtaataatcttttagtatttaatgatttcaatgaaaaaattcaaaaaacaaaagatgtaaataaaattttactgaagtttgatgcaaaaaattcaattctgatcgtagataaaaaatcaaaagagaatattgaaaaagcaacaagaaatattccaaatgtaaagattacagatattggacatttcagtgcatttgatcttgtaaaatataaaaaaataatttttacagaaagctcagttaaagagttagaaaaaaggtatcaataat

SEQ ID NO: 202256 - DNA, 669 bp, Unknown
  Bacterial polypeptide expressing nucleotide sequence isolated from the Sargasso Sea
aatgattttagctttagtatttgcagtttcagtaattggatctgcttctgctaaaacattaaaaatccaacttacttttcctaaaacatcatacgatggacaaatcgtaaaaatgtggactgacagagtaacaaaactaactcgtggagagttaaaatttgagcttctttcaaaaggtgaagttgttggtatgaaagaaacactagaagctgttgacaaaggtctagtagatggtggtgcagcatggactcactactggtcaaactatcacccagctgcgatgttatttggatcgccagttgctggtggaggaattggtttaagcactaaatcttggttagcttggtatttcgataatggtggtaaagaattatacgaccaattatggagcgaaatgggaatgaatgttaaaggtttcgtgatggcatcatcaggacctgaagcattaggttggtttaaagagccaattaaaaacatggatgatttcagaaaatacagattcagaactcctccaggaattccaggacaaacatacaaagatatcggaattgcatcagtatctttatcaggtggagatattttaccagcacttgaaaaaggaactattgatgctgctgaatggtgttgtccaaaaccagactcagtttttggttttcaaaaagttcttta

SEQ ID NO: 202257 - DNA, 772 bp, Unknown
  Bacterial polypeptide expressing nucleotide sequence isolated from the Sargasso Sea
gttgttccatatagcaccaaaggctggaattaaacgtgatagggatacaggtcgccgttacttcgataacagccccgcctatcttgaggccgaattagacaaatcactggcgcgccttgggcttgatcgtatcgatttattctacatacaccgccgtgatcccaacactgacattgaagaagtgacggaaacgctggctgcaatggttaaagtaggaaaaattggagcttttggcttttctgagatatctccaacaacgctttataaggctgctgccattcatgaagtagccgccgttcagtccgagtattcactttctgttcgtagccccgaaatggggcttgtgcaggcaaccgcagatttaggtgtatcccttgtggctttttcacctgtcggtcgatcacttctaactgaccgaccgcattcgttcgaaacggctcaggcggcaccctttctgaagcccaacccacgctttaatgagccaaatttatcagccaacattgcagcaacgtcaggatttcgagagttagccaaagaatttgacacgagtgcagccgcacttgcgatctcctggttgttgcacaaaggccctcatgtcatcccaatcccaggcacccggtcagtcaaccatttccgcgaactttgcagcggggtagaaaaacgcctttcggcagaggacatgggacgtattgaaactgtgctacctatcggctgggcgcatggcgatcgctattcagtagcacaatgggacggtgctgaacgctattgctaa

SEQ ID NO: 202258 - DNA, 553 bp, Unknown
  Bacterial polypeptide expressing nucleotide sequence isolated from the Sargasso Sea
tatgactataaagcgtgtaaagttttcggatattcgcataaattttttcgatgatgtcattgacgttcgttcgccattagagtttgaagacgaccggataccagggtctattaatcttccagttctttctgatgccgaacgggaaatgatcggcaagatgtataaacagagaagtaaatttgaagcaaaaaagttaggcgcatctatagtgtctaaaaatatttcagatcatttaaaagattatctctacaacaagaatagagattggcttcctttgatatactgttggcgaggtggacagcgatcttatgccttggcaactatactggaccaaataggttggaaagtagaagtagtagatggaggctacaagtcatttcgaaaacatgtcagtgaattcctgaataaaaatatagaaaggtactatctaatactcctcacaggtaatacgggcacagcgaaaacaaaagtacttaatttgatagaaaaaagagatgggcaaactattgatttggaaagcctggcaaatcacaaaggatctgtatttggatca

SEQ ID NO: 202259 - DNA, 235 bp, Unknown
  Bacterial polypeptide expressing nucleotide sequence isolated from the Sargasso Sea
cgaaaaactggcaggcgaacttgcggaaaaagcacaaaagggagaagatttcgccaatctggcccgtatgaattccgatggcccctcagtaccgaaaggcgggttgcttggaaccttcggacgcggacagatggttcctcccttcgaagaagctgcttttgtactcaaagtcggggaagtcagcggagtcgtagaaaccccttttggttttcatgtcatcaaacgtgaccggtga

SEQ ID NO: 202260 - DNA, 616 bp, Unknown
  Bacterial polypeptide expressing nucleotide sequence isolated from the Sargasso Sea
aatggctaaagtaatacttgagggtgtaaaatctcttaaaccgaaaaaagatcgtaacctaattgcgattgcgggccctccgggcgcagggaaatccacggtggcagaaatagtcacagatttaatgaatgaaaaccttatgaaaacgagccttgtacctatggatggttttcacttggataataaaactttgaagagggcaaaattattagatcgcaagggtgctccagagacttttgacgtaaaaggtttcacagaattaataaaaaatttacgttataagaggaatttaagtgtaccactttttgatcgctcagtagatgaagttgtaaaaaatgctagaaaaattccagcagagcaagaatacataatagcagaagggaactatctcttgctaaacaaagattattggcgagatctttataattattgggactacaaagttttcatatccgttgataaaaatgtcttaaagtcaagattgcttgaaagatggctcagtgaaaatcatacgtattcagaagctgaggcaagagtattaaaaaacgacttagttaatgccaatattgtaaactcaaatagattaaatgccacagtagagtttcaaactggataa

SEQ ID NO: 202261 - DNA, 625 bp, Unknown
  Bacterial polypeptide expressing nucleotide sequence isolated from the Sargasso Sea
gatgaaaataaataaattaagtattgatggaaaaaaacagagcattgaagttctagataaaatcttcagtgccaaaattaataatcaattagtcagcggtgtcatttacaaattgaacgcaaattttaaaggtagaaaagcaaagactaagcaaagaaatgaaattacaggctcaacttctaaaatttattcgcaaaaaggtactggtaatgcaagacattctagtaaaaaagcacctatatttgtaggtggagggatagctcatggaccaaaaggtcaggataactacaaaattagaaaattaaataagagtgaaaaaaaaatgagtattgcctcacttatcactgaaaagaataaatctaataacttaattatttttgatgattttggaaaaaaaattgaaaaaacaaaagaaatgtttgaacttttaaagaagtttgatgcaaataattcattattaatagtagatactaaatcaaaagataatattttaaaatcaactaaaaatattcctaatgtcaaattaacagacgcaaatcattttagtgcatttgatttagttaaatacaaaaaaatcatttttactgagagttcagttaaagaattggaaaaaaggtatcaataa

SEQ ID NO: 202262 - DNA, 542 bp, Unknown
  Bacterial polypeptide expressing nucleotide sequence isolated from the Sargasso Sea
attgacccctgaagaagttgaaagttattttactagaaatgatggcacttttttatttgctaggtggggacgaccggtcgctcccgtggtatttggcttagacgataattctttagctatactaaaaggtgccattgaagcagttatgtcacttacaaatcaacaaatgagtgagacagacccagagcttggttcgaattttatgttctttttttttagtaattggctcgagcttattgaagtaccaaatctcgacaaattggtgccaaacatgtccacacttgtggaacagcttatagaagcggaagcaaatcagtataggatttttcgatttgataatgcaggagctattcgcgcttgttttgtatttattaaaatcgatgaaaatataatgcaagtgccagcgcaaacactgatgttatcacaggttgtacagtcggttttactgtggtcagatgatgcttttaaaagcggctctcccttgttagtttctgatgatcatcatacttttgtgaaacctactgtctcaacacttatcaggg

SEQ ID NO: 202263 - DNA, 602 bp, Unknown
  Bacterial polypeptide expressing nucleotide sequence isolated from the Sargasso Sea
ttgttttttaaaagagatagaatctttaaataccatactaaattcatctaatcaaaaaataacagctattgttggtggaaataaaatagatgataaattacaaatgttagacaatttatctaaaaaaataaataatatttatatagctggcaataatattaatgcatataatgataaaaaagaatttattaataaattaaataataataaagctaatattatacttatgaaagatggttttggaaatactgataaaaatgaaacacctttatatataaattcttgtttagacaaaaaagatgaccaaaaaatatttgatattggacctaaatcattatgtgaattacataatttaattggtaattccgatattattttttggaatggaacattaggtattgttgaagataatttttataaatatggttctgaaatgttaatcaactttttaaattattctaataaaaaaattataattggtggaggagacaccgcaggatttgtaaataattactctaataatttttatcatgtttctacaggtggtggtgcttctattgaatatctaagtaatggatatttaattggtatgaaaaaatagt

SEQ ID NO: 202264 - DNA, 604 bp, Unknown
  Bacterial polypeptide expressing nucleotide sequence isolated from the Sargasso Sea
tttgaaaaagattttaattattggtggaagtgggctaataggaaaaaaattaaaaaaaaatttaaagaaaaaatataaattaatagctcccaaaagaggtaaaaattttgatattcgaaagattagtactttaaaaaaatattttaatgagtctattgatgtaataataaatttgtctggtcaagcaagtgataaaaaaaaaatgaacgaaacaattattattggaaataaaaatattatcaatttattaagaaagctaaataaaaaaattttaataatctatttttcaactaatttggtttatggatactctaataaaatattaaatgaaaaatctaaaactaatccatttgatttttattccaaatataaactaaaagctgaaaaaaattatgagagatctaatttaaattatttaattttgagacttggaaatatatatggtgacataaaaaaagaaaataatgtattatcaaaaatatataattctttaaaaaaaaaaaataaactaaatattacaaacccaaaagtttttagaaactatatttcattggatgatctagtaaatattataagaaaaatattggcaaaaagactaaaagaa

SEQ ID NO: 202265 - DNA, 960 bp, Unknown
  Bacterial polypeptide expressing nucleotide sequence isolated from the Sargasso Sea
ggcaatactagagtacgcatctacaacatagatgagaaaatcaggcaggtaaaacttagaactacaaattcagaaatgccagcgaatctggatataggtccttcatcacctcaaaattatagtatcccacagtcagcattattaagattctctgaaagtatcgtaaacgaagacatcccttacgatgcaatattggacctactgaaccggaagtccccaaatataaaaggtataacccgaggatcaccaataatccagtccggagatttattatctgaaatcagaaatataatccctaatctgcagaattcttgcctaagtatccagggacctccaggagcaggtaaaacctactccgccagtagggcaatcgttgatttacttaaatctggaaatcgtattggtattgcctccaattcccacaaagcaatcaataatcttctcgacggtattatgaaggcagccaaggaacagaattttgtatttaagggtgtcaaaaaatcaacggtagactatgacatcagtgaattcgacgatggttatgctggtcaatacattgaaaataatgcttacactcttcagagggaagactttctctatccctacgaagagtgcaccaacagcatgtgcaagagacctcgaacccggcgagaccgacttcctgtagggagtccatattcagaaggaacatgccccagttgcggtagctatggatttggttctagtggtgtgttccacatccgactgtatgcaggaacagcatggtcattttcacaggaaaggtttgaccagttatttgattatatgtttattgatgaagcgggtcagttgtcaatggcacatacaatagcaattgcaacagcagcaaagaatctggtgcttattggcgaccagatgcaattacctcaaccaacagtagcaacacacccgggagattcaggactttcctcattagaatat

SEQ ID NO: 202266 - DNA, 838 bp, Unknown
  Bacterial polypeptide expressing nucleotide sequence isolated from the Sargasso Sea
ggatccgttgatgatggcaagtcgactttattaggtagattattgtatgactctcaaaatgtatttgctgatcaaatggatcaagcaaagattgaaagtgaaaaatatggaacccaaggaaaagatatagatctagcattattaattgatggattacaagcggagcgagaacaaggaattacaattgatgtagcgtatcgtttctttgaaacatcaaaatgtaaatttattgttgctgatacgcctggacatgaacaatatacacgtaatatggcaacaggtgcctctaattctgatgttgctatcattttaattgatgcacaaaaaggggttttagagcaaacaaaaaggcacagttttattgttaatcttttaggtattcagcatgttgtcgtggcaatcaacaaaatggatttagtaaattatgatgaacatatctttaataaaatcgtcacagaatataaagaattgataaagaattttaattttatctctaccaagtatattccgctatcagctttaaagggagataatgttttttcaaattttgaaaatactaaatggtattcaggtccttcccttattgaaactttagaaaacattcaaattgaagaggagggcatgaacgatggatttagtatgccagtgcaatgggtaaatagatcaagctcagattttaggggatatgctggaacgatcacttctggcaaaatatctaaaggagatgtaatctcaactgcctcatcgaattctcaaacttctataaagaatatttatggtcctaatggtgagttggatgaagcttttactaatcaggcagtaacattaacattacaag

SEQ ID NO: 202267 - DNA, 844 bp, Unknown
  Bacterial polypeptide expressing nucleotide sequence isolated from the Sargasso Sea
aaatttattaacaaaagataaatggatttctcaaccaattattgatgaattgacttcttgtttaaataaaaaagaacaagcattattatttttaaatagaagaggttactctccgctaagtttgtgttttgagtgcggatatagataccagtgtaatcaatgtacttcatggttagtaatgcatagatcaaaaaaacgtttgttatgtcaccactgcggtgtaatttaccctataaaatctgattgtccaaaatgtgaatctaaagaatcaataaaattaattggaccaggaattgaacgtattcaagaagagctaggcattttgtttccacaatataggattggagtaatgtcgagtgatgttgcaaacacaccaaataaaattaaaaatatagtagaaaattttgaaaataataaaatagatattctagtagctacccagataatggctaaaggttaccattttcctaatctgtcttttgtaggagttttggatgctgatgcaggtttaaccggaggagatatgagggcaatagaaagaacttataacctattgcaacaagtaagtggcagagctggaaggactaataaaagaggtaaagttttaattcaaacttattttcctgatcaagaagtaattcaatctctgataaaaagagaccgtaaattatttgttcaacaagctcttcaagataggaagacatttaatattcctccttttacctatatgacatcaattattatatcagggcacgcaaaaagccaggcagaaagttacgctcaaaaattagtacaaaacaatttttcttcaaaaaatattaatattctaggtcctgtcgaagcg

SEQ ID NO: 202268 - DNA, 779 bp, Unknown
  Bacterial polypeptide expressing nucleotide sequence isolated from the Sargasso Sea
tttggatcttgcttctgctaaaacattaaaaatccaacttacttttcctaaaacatcatacgatggacaaatcgtaaaaatgtggactgacagggtaacaaaattaactcgtggagagttaaaatttgagcttctttcaaaaggtgaagttgttggtatgaaagaaacactagaagctgttgacaaaggtctagtagatggtggtgcagcatggactcactactggtcaaactatcacccagctgcgatgttatttggatcgccagttgccggtggaggaattggtttaagtactaaatcttggttagcatggtatttcgataatggtggtaaagaattatacgaccaattatggagcgaaatgggaatgaatgttaaaggtttcgtgatggcatcatcaggacctgaggcattaggttggtttaaagagccaattaaaaacatggatgatttcagaaaatacagatttagaactcctccaggaattccaggacaaacatacaaagatatcggaattgcatcagtatctctatcaggcggtgatatattgccagcacttgaaaaaggaacaattgatgctgcagagtggtgttgtccaaaaccagactcagtttttggttttcaaaaagttcttaaaaattactatctacaaggattacaccaaaacgtagtaaatggtgatatctatattaatggagatgtttacaattctttaactgaccatcaaaaatatgcaatggaagttgcatctgaagcgatgatcactagaaacatcacta

SEQ ID NO: 202269 - DNA, 229 bp, Unknown
  Bacterial polypeptide expressing nucleotide sequence isolated from the Sargasso Sea
aatggaagaatttaaaatttcgatagttaccccctcattaaatcaaggtaattatattgaagatgccattcaatctgtattgaatcaaaattataagaattttgaacatataataatagatggtctttcaacagataaaacaattgagatattaaaaaaatataagcatttaaaatggatttcagaaaaagatgaaggacaaagtgatgccatcaataaaggattcaaa

SEQ ID NO: 202270 - DNA, 809 bp, Unknown
  Bacterial polypeptide expressing nucleotide sequence isolated from the Sargasso Sea
tttgctgaaggtataaaagagcacgtcatggaaacaggtgcatctataataagtgcacaaaaatcacaagaaacctatcaagaaccaagtctctttacagaaaatagcatgctaaaggaatcagcagtttgggattgtgttacctgcggtgcatgtatggaagaatgccctgttatggttgaacatgttgactccattgtcgatatgcgtagatatctagtaatggaacaagccagtatgcctgagggggcagaaggtgttttattaaacatggaacaaagaggacatccatggagtggaaatcaaacctccaaaactgaatggatggagggtttggatattccaacatttgccgatgaaaatgaagcagaagttcttttatgggtaggctgtacttctgcattaaacgaagctaatcaaaaagcaccacgagctatggcttctattttacgcgtcgctgatattaaatttgctgtactaggaaatgaagaaggttgtactggagatcctgccagaagaattggaaatgaatacctgtaccaaatgatggctgaacaaaatattcaaacattaaaccaatattcattcaaaaaaattgttacactatgtccacattgttttaacaatatcaaaaatgaatatccacaacttggaggtaattacaaagtttatcactatactgaatttgttgatgaattaattcaaaacggaaaactaaaacctgttaaaagtgttgatattagtatgacttaccatgactcttgttacctcggaagacataacaaagtttatgatgcaccacgaaatat

SEQ ID NO: 202271 - DNA, 601 bp, Unknown
  Bacterial polypeptide expressing nucleotide sequence isolated from the Sargasso Sea
ctgcttttcatcatcatccccgtcgtcgcaacaacgaacgctgttgacggtccgccgtgctccgtcgcccagttcggggcggtggccgataacaagaccgacaacactttggcattcagacaagccgcaaaagcttgcgctggcggcgaagtgctcgtgcctgctggcgcttggatgactgggccgttcaacctttcgagcaacaccatccttcgcgtcgaaggcaccatcagcggcagtcagatccctgaggtttaccccgtggtcacgcagcagccattggacgaagcttaccgcgcgccgtggaaactcaatcgccagcggcaggccttggtttcagcttattccgccaccaacatcacaattacaggcgctgggaccatcgacggcaacggttggccttggtgggacaaccaaacatcgcagcaatgcaacggccgtcaccccaccacctggaaacctaatgccagccagactgcctgcttaatgcaacgtcccaagctcgttgagttcgtggactgcgaagatatcactttggtcggtgattcggcagacaagccgctgactttgcgcaatagcccattctggacattcacccgac

SEQ ID NO: 202272 - DNA, 232 bp, Unknown
  Bacterial polypeptide expressing nucleotide sequence isolated from the Sargasso Sea
aatgttaaaagtaaagaaagccgtttttccagttgctggttcaggtacaagatttttacctgcaaccaaagctatgcctaaagaattacttccgataattgataaacctttaatccaatatgctgcagaagaggcagttcaagctggtattgatacattgatctttattacaggaaggaataagcgagcggttgaggaccatttcgataataatcaagagttagaaatggca

SEQ ID NO: 202273 - DNA, 760 bp, Unknown
  Bacterial polypeptide expressing nucleotide sequence isolated from the Sargasso Sea
ttttgccaatgatcgagagggtatgcatgacctagcggaggctttagatttgccactatcgagtgtaatgagtagggtagagacactagctgaatataatccgatgcttggcatgcgtggggttcgtgtcggtgtaacagttcctgaaatttatgagatgcaagcaagggcaattttcgaagcaaccgctgaagcaagtaaaaatggtactttcgttgtcccagaaataatgatccctctcgtgtcggcaaaacgtgaagttgaactggttagagcacgaattgatggcgttgcatcaatggtccgggcggaaacaggagttaaatttgattatcgtcttggaataatggttgagacacctagggctgctttgcgcgcagatgatattgccttgaattctgcgtttttgagttttggaactaatgatttgacccagatgacctatggtttatctcgcgatgatgcgggtcgattcatgtctgattatgttcaacagggcgtttttcctgaagatccttttcatactctcgacattgatggagttggcgagttgttgaaaatgggtgtaaccagagcccgatccgttaaaagtgatattgttttatctatttgtggcgaacatggcggaagtcccgagtctatagatttttgtagacaaatcggaatggactatgtttcctgctctcctttcagggtcccaattgctaaattggctgcggctcagttggccattaaagaccgtattgatccctctaaataa

SEQ ID NO: 202274 - DNA, 763 bp, Unknown
  Bacterial polypeptide expressing nucleotide sequence isolated from the Sargasso Sea
tacattcttgctttctgcatacttattgtattttctaaaaaataaatatgtaaatacaacaagtagtaatcctccattttctataaagaattttcaagaaggtattaactacttttttaaaaccaaaaatattaggaacatagctttttcaatttcttcttgtttaattggtgcaggaacattattcattctaggccacacatttttgactgtagatttaggttttagtgaaagctcgtttggtttcatgattgcttcctttggaacaggaataatatttagtatgctaactcttagttattttgttacaacttttaatagaataaattttctcataggctcatgcatgataattacaggaatttccctattttcagcatttagatcagtagattttgttgtaatcttattatcaattttcatatctggagttggaacgggtggggtttatcttctaactataagttacttgcaagcttctactaatcctgaactacgaggaagagtttttggtaacttttataccattggaagacttgcactactaatttcttttttgatatctggtacagctgcaaattatttagatggagttttcaatcaagacggagtttatttagtattgataggaagttcaattttgatatttattactggaattttgaattttactattggatacaaaagaatttttaaggaatttggtattgagagatcaaatttcaataagattaaatttgatttagacaaaaaggaaaattaa

SEQ ID NO: 202275 - DNA, 833 bp, Unknown
  Bacterial polypeptide expressing nucleotide sequence isolated from the Sargasso Sea
acaggaatattttttaccatttacttaggctttccacaaataaagtattttaagcacggttggagaatcctttcaggtaaatacgttaaggaagatacagaaggagacactactccttttcaagccttaaccacggcattatctggaacagtaggaactggaaatataggtggagttgctcttgcaatatttttaggaggtccggctgccatcttctggatgtgggtaactgctttcttgggtatgaccacaaaatttgttgaagtaacactatcgcataaatacagagagaaattaccagatggaactatgtcaggtggtcccatgtactacattgaaaacggtttaaatatgaaatggctagcaattgtcttctctgtatgtctgttaatgatgtgcttaggaacaggaaatatgcctcagataagtagtatttctgttgtacttctagatacttttgatattcctaagattgttacaggactagtactttctgttcttgtttggttagtaataattggaggtatcaagcgaatagctcaaattgctagtaaattagtaccttttatggccttttggtacatagtaggtggtttagcagtaattattagtaattatgaaaatataatcccttcatttcaatctatattcattcacattttcacgcccacagcagctgttggaggatttctaggtgctagcgtagcggcagctcttactagaggtgttaatagaggtttatactcaaatgaggcaggtcaaggttcagcacctatagcacacgcctcatcaaaaacagaaaatcccatagaagaaggtatggtatccgtact

SEQ ID NO: 202276 - DNA, 877 bp, Unknown
  Bacterial polypeptide expressing nucleotide sequence isolated from the Sargasso Sea
tttggtagcgacggtttcgacggtggcctatctgggcctggaggcgcgcacggtcgaggtgcagtgccagcttgttccgggattgcccgccttcatcgtcgtcggcctgcccgacaaggcggtggccgaaagtcgggagcgggtgcgcaatgcgatcgccgcgatcggcctgtcgctgccgcccaagcggatcaccgtcaatctctcgcccgccgacctgcccaaggaaggatcgcatttcgacctgccgattgccgtcgcgctgctcggcgcgatgggggtgatcgatgccgagacgctggcgggctatatcgtcgtcggcgaactggggctggacggccgtaccgcgccgtcgcccggcgtgttgctggcggcgctgcatgccggcgaacaggatctgggtctggtctgtccggccgcacaggggagcgaggccgcctgggcggggcaggtggaggtcgtggcgacacccgatctcctcagcctgctcaatcatttcaagggcacggcggcattgtcgccgccccagcccggcgcggtcgagccgccgatgcgggccgctgacctgcgccaggtgaaggggcaggaaagcgccaagcgcgcgctggagatcgcggcggccggcggccataatctgttgatggtcgggccgccgggggcgggcaagtcgctgatggcgagctgcctgccgggcatattgcccgagctgacgccgaccgaggcgctggaaacgtcgatggtcgccagtgtcgccggcacgctggagggcggacggatcagccgtgcccggccgttccgcaatccgcaccatagcgcatcgatggcggctctggtcggcggtggcctcaaggcgcggccgggcgaggtcagcatggcc

SEQ ID NO: 202277 - DNA, 757 bp, Unknown
  Bacterial polypeptide expressing nucleotide sequence isolated from the Sargasso Sea
aatgacatcaaatactcctaaatttatagacaaatttaggggagttaaaaacttagagataattgaaagccaatctgacataaaaaggctatcaaaagatttttataactactctccaatccttactgaaaaattagacgaatgtattgcagatttggtagtaagacctagtgatcacaaagcagtaaaggcagtagcagaaatttgttgggaattttctatcccacttactttaaggggttcaggtacaggtaattatggacaagctgtcccattgtttaaaggagttgtaatgcagatgagtcactttaataagttagaagaatttgatcctgatacaggttttgtaaaagtacagtctggctgtgtgatgggagatttgaataaacaattagagaaatatggtagggaattgaggttgcttcctagtacttggaaaactgcaacaattggaggttttattgcaggtggatcaggaggtattggttcaattaggtggggatttttaagagatccaggaaatcttattggtttagaggcagtaacgatgaatgaaaaacctgaattattaaaatttgatgctgaagaatccgaacctcttaatcatgcttatgggactaatggaataattacttctttactacttgctactgatatcaaacgtaagtggtattcaatagttatcgactgtattgaatttgaaaaaacaatagaaatattaaaaactctcaccagcgcggcaattgaccttaactag

SEQ ID NO: 202278 - DNA, 445 bp, Unknown
  Bacterial polypeptide expressing nucleotide sequence isolated from the Sargasso Sea
atgagtatttatagtgaaagaattctttacacagcaaaaatagatttaatttcatcaaaaatttcatcaaataaattactcagaaaagctctgataaaatatcaaagaagatttccaaaaattcaaaaaaaaataattaagcatgtaattattgaaggaagagatattggaactgttatttttccgagagctgaggtgaaattttttatgtgggcatcatcaaaaattagggcaaaaaggagatatgatcaggtcaaaaagacaagcaaaaaagccaaattgttatcaattcacaaagaaattgataggcgtgacctaagagatatgactaggaaggttgctccaatgataccagctgcagattcctacttgattgacaatactaattacgatataccccagacgtttaatgcaatacttaagatattaaacgaaaagaattaaa

SEQ ID NO: 202279 - DNA, 577 bp, Unknown
  Bacterial polypeptide expressing nucleotide sequence isolated from the Sargasso Sea
aatgattttagctttagtatttgcagtttcagtaattggatctgcttctgctaaaacattaaaaatccaacttacttttcctaaaacatcatacgatggacaaatcgtaaaaatgtggactgacagagtaacaaaattaactcgtggagagttaaaatttgaacttttatctaaaggtgaagttgttggtatgaaagaaacactagaagctgttgacaaaggtctagtagacggtggtgcagcatggactcactactggtcaaactatcacccagctgcgatgctatttggatcgccagttgctggtggaggaattggtttaagtactaaatcttggttagcatggtacttcgataatggtggtaaagaattatacgaccaattatggagcgaaatgggaatgaatgttaaaggtttcgtgatggcatcatcaggacctgaagcattaggttggttcaaagagccaattaaaaacatggatgatttcagaaaatacagattcagaactcctccaggaattccaggacaaacatacaaagatatcggaattgcgtcagtatcattatcaggtggtgaa

SEQ ID NO: 202280 - DNA, 529 bp, Unknown
  Bacterial polypeptide expressing nucleotide sequence isolated from the Sargasso Sea
aatgcagaactcaaaaaacaaagataatgaaaatattaatttagatattttaaaaagattaaactacatctacaaatcaataatttctgaggacaaaactctagagtactcaaaaaaaattaatagacttattaatcattttaaaaaatcagaagttaaaactgaaacaaaaggtacatggtctgaaaacacaatattactaatcacatatgcagacagtattaataaaggtatatcaggtaaaagccttaataattttggaacattctacaaaaaatatcttaaaaaatttattaatagtattcattttcttccgttttttccgtcaagtggagatggtggtttttctgtcaaaaatcattttgaagtggatgaaacttttggaacatgggaagatataaaagatttatcaaaaaatgctaacataatgactgatttagttttaaatcatgcatcttcaaaaggtctatggtataaaaattttttaaaaagagaaaagaccgggcaaaaattatttttatattattga

SEQ ID NO: 202281 - DNA, 919 bp, Unknown
  Bacterial polypeptide expressing nucleotide sequence isolated from the Sargasso Sea
gccgaggacttcaccgtgctgggtgggtccatcgggccggggagcacgtccaagcgtcatcggatcgccgaattggccgaacgggaccgactgccactggtcatgttgttggagggggcgggacaccggccatcgggaaccggaggtgccgaaccggggaggaccccgaccgacctgattcagcaggctcggctatccggtcgggtcccattggtggcggccattctcgggccgtcggcgggccacggtgccctggtggttccgttgtcggactacacggttatgactcgtgatgccgcagtgtttaccgccggcccaccggtggtgaaggcggctctcggcgaggaggtcaccgctggggagctgggaggtccagacgtagcggtggctagtggcctggtccatgacgtggccgacgacgatcgcagtgcccttgatctggtcagaacctggctgtcgttcttcccgagcagtgcctggtcctatccgccgcgtcgagaggggatcgacaccgatctccggcccgtggacgaccttgtggacctgatcccccggcaatccaaccgcgtttatgacgtccgcccggtggtcgagcgcctagtcgacgacggacggttcgtcgaggtccagccgggtttcggtgcctccatcatctgtggcctagcccatctgggaggcgagtcggtggctgtggtagccaaccagccggcggtccgggctggcgccatcgacgtggcggcggccgacaaggcggcccacttcatccaggtagccgactcgttccacttgccgctggtcttcctgactgacaaccctggggtgctggccggcacggcctcagagcgagctgggatcctgcgggccggcgcgcggatgttcgccgctcagacccaggcacgcacaatcaaggtccaggcca

SEQ ID NO: 202282 - DNA, 460 bp, Unknown
  Bacterial polypeptide expressing nucleotide sequence isolated from the Sargasso Sea
atgaacgacatcatccgcacattgagctcggaattctccgatctcgctaatgctgccgaggcagtacgtgccgtcgttcgaatgaccgtctctatcgttttggggggcttgctggggtacgagcgggagagctcgggaaaatccgcaggcgtgcgcactcacatgctcgtcgcgctgggggcatgcgtttttgtcgtggttcccctccaggcgggcgtgcagcttgccgacatgagccgcgtgcttcagggtctcacgtcaggcatcggattcctttgtgcaggggcgatcctgaagccggacaatgagacacacgtcagggggctcacaactgccgcgagcatctggattgctgccgcgatcggcgtggccgccggcatgggccatgcggtgacggccatcgtcgcgactgccttcgcactcatcgtgctcagaatccttcaaatgtcgaagaagtaag

SEQ ID NO: 202283 - DNA, 655 bp, Unknown
  Bacterial polypeptide expressing nucleotide sequence isolated from the Sargasso Sea
atgagttttttaaaaataaataatttaagtgtagactataaaatgaggagagagacagtttatgcagctaaaaatgtaaatatagaagttggtaaaggggaaatcttaggattagtaggtgagtctggctctggaaaaagtacagtagctaatgcgatcataaatctaatagatgaaccgggaaaagtttctaatggttcaatatttttaggtgatataaatattcataaagatccagaaaatattgttaagtatagaggtaaaaaggtgggtttaatttttcaggatccacaaacatcattaaaccctatatttacaataggtgaacaattaattgaaacaatacaaactcatttgaacttgaacactgaagaggcaaaaaataaagctatcactttgttaaaagaggttggaattaaagatgctgaaaaaagatttgacaattaccctcatcaattttcaggcggaatgaggcagagagttgtaatttctctagcactttgttgcgaacctgaattattaatagcagatgagccaacaacagctttagatgtatcaatacaatctcaaattttagatttaattaaaaaattaactaaagaaagaaatttagctgtaatacttattactcatgacatgggagttattgctgaaa

SEQ ID NO: 202284 - DNA, 419 bp, Unknown
  Bacterial polypeptide expressing nucleotide sequence isolated from the Sargasso Sea
gctttactctagtgatgtagataatgtatcctcaataatatcggcgagaaaacaagtaagaaataaactaatcatgtttcaaagaagttttccaaaaaagtatgggaacaacattaaatttgcgattatagaaggtagagatattggtacagttatctttccaaaagcaaactataagatttttttgtgggcagacgcagaaataagagccaagagaagatacaagcagctaggaaaaaatgccaaaaatgtaagctatagtaagatttttagtgaaataaacgtccgcgatcgaaaggatatgacaagaaaaattgcccctcttatgccagcagcaaattcggtattgctagataccagttatattgatatagaacaggcttttaacgcattaaaagagataatactaaaagcttaaa

SEQ ID NO: 202285 - DNA, 685 bp, Unknown
  Bacterial polypeptide expressing nucleotide sequence isolated from the Sargasso Sea
ctggtatcgccaattgggcctgacggtatcaagccaaagacactggccaacattgcggcagatttgcgcgcccgacgtcctgctactctttgtttgaatgcgtcctctgggaagcttgcgcaacccttatcctcttcaataccaaagaccagttgccttgatgagaaatcaatgttgttctacctcgtgcagccgcccgggcgccgactggtcattattggcggtgtccatataagccagtttttggcaccaatggcaaattttgtaggttacgacgtcaccataattgaccctcgttcggtgttcacgtcggctgaacgctttcccgaaattaattgtgtgaccgcttggccagatgaggcaatgcgaaccctaaaacctgattcacggacagcaattgtcgcgcttgcacatgatccgaaaattgatgatccggggcttcaagtgggcttggcaagtgatgcattttatattgcgtgtctcgggtcggatcgaacccacgcggctagatgtgcacggctgcaagaggccggctttaacaaggttgaccttcagcgtctaaacgggccagcgggattaaatatccatgcattaacaccagcggaaattgctgtgtctattctggctgaaatgatcgctgccgatcgaaaccctgagattatgattaatcaggtggtttgctgat

SEQ ID NO: 202286 - DNA, 307 bp, Unknown
  Bacterial polypeptide expressing nucleotide sequence isolated from the Sargasso Sea
taaaggcaagaaatttgcaattattgaaggaagagatattggaactgaaatatttccacaagctaaaattaaaattttcatgtgggcagatgcaaaagttcgcgctaaaagaagatacctgcaaattaaaaaaaagggccaaaaaactagcttaaagcgcatttatgacgaaatagttgctcgtgatatgaatgatttaaatagaaaaatagcaccactaaaacctgctgtaaattcggtattgctagacacaagttatcttgatatagaacaggcttttaatgtaattaaaagaatatttagttaa

SEQ ID NO: 202287 - DNA, 752 bp, Unknown
  Bacterial polypeptide expressing nucleotide sequence isolated from the Sargasso Sea
aacactagaagctgttgacaaaggtctagtagatggtggtgcagcatggactcactactggtctaactatcacccagctgcgatgctatttggatcgccagttgctggtggaggaattggtttaagtacaaaatcttggttagcatggtatttcgataatggtggtaaagaattatacgaccaattatggagcgaaatgggaatgaatgttaaaggtttcgtgatggcatcatcaggacctgaagcattaggttggttcaaagagccaattaaaaacatggatgatttcagaaaatacagattcagaactcctccaggaattccaggacaaacatacaaagatattggtattgcatcagtatctttatcaggtggtgatatattaccagcacttgaaaaaggaactatcgatgctgctgaatggtgttgtccaaaaccagactcagtttttggttttcaaaaagttcttaaaaactactatctacaaggattacaccaaaacgtagttaatggtgatatctatattaatggagatgtttacaattctttaactgaccatcaaaaatatgcaatggaagttgcatctgaagcgatgatcacaagaaacatcactaatagagctgtagaaaatggtaaagcgttaatcgatcttactgaaaatcacggtgtaaaactttgggatacaccagctgattatttcactgagtacatgaacgctgctcaagcgactcttaaaaagaatgctgcatcaa

SEQ ID NO: 202288 - DNA, 895 bp, Unknown
  Bacterial polypeptide expressing nucleotide sequence isolated from the Sargasso Sea
aatgacttttcttaaaataagtaatttgagtgtcgactataaaatgagaaaagaaaccgtaaatgctgcaaaaaatgtaaatatagacattaaaaaaggtgaaatagttggattagtcggagagtctggttctggaaaaagtactgtagctaatgcgattgtaaatttaattgatgaaccgggtaaagtttcaagtggatcaatattgatgggagaaacaaatatcagcgaaaatccagaaacaattgttcagtatcgaggaaaaaaaattggattaatatttcaagatcctcaaacctctttaaatccaattttaacaattggtgaacaacttatagaaacaatacaaactcatttaaaattaagttcagaggatgcaaaaaataaagcaattaatttattaaaagaagttgggatcaaggatgccgaaaaaaggttttataattaccctcatcaattttctggtggtatgagacaaagagttgttatttctcttgctttatgttgtgagcccgaattattaattgcagatgaaccaacaacagctctagacgtttctattcagtctcaaattcttgaattaataaaaagattaacaaaagagagaaacttagctgtaatacttattactcacgatatgggagttatcgctgaaactacagacagagtggctgtaatgaaaaatggagacttagttgaaataggtttaaccaaacagatattggttgagcctaaggaaaaatacacgaaaagtttagtcaattctgtaccaccgactaataaaaaaatatctagatttacaataatagaaaaagagaatgtaagtaatcaaaataataacgttaaaatattaaacagatggtccaaaaagataattgttgatcaaaatttatag

SEQ ID NO: 202289 - DNA, 787 bp, Unknown
  Bacterial polypeptide expressing nucleotide sequence isolated from the Sargasso Sea
atagcagtatttcctatagctggtatgggcacaaggtttttacctattacaaagactatttcaaaggaaatgttaaacattttggataggcctttactagattatgcagtaaaagaggcaaaagatgccggaatagaaacatttatttttgtaacaaataaagaaaatacaaagcctatagattacttttcaaaaaatactaagttagaaagttttttaaaaaaaaagaaaaaaattaatatattagaagaaattaaaaagctgaatataaataaaaaaaatctaaaaattatttttcaagataagcctgctggtttagctgatgcaattttaagaacagaaaaatatgttaaaaaagaagacttttgtgtaattttacctgatgatcttattataggttcaaactgtactaaagaattaataaatgcttataataaaaaaaaatcaactgttatagcgataatggaagtaaataaaaaagatgtatcaagttatgggattatagaaagctcaatatttaagcaaaatatatataaaataaaaaatatggttgaaaaaccttcagttaaggatgctccttctaatttagcaatagtaggaagatatatcttactcaatgatatatttaaatatataaaaaaaactaaaatgggcagtgggcaagagcttcaaataactgatgccatctttttgagtagcaaatttaatgaaatttggggttataaattcaatggtaagcgttatgattgtggtaataaaatagggtttttaaaagctcaaatagcag

SEQ ID NO: 202290 - DNA, 571 bp, Unknown
  Bacterial polypeptide expressing nucleotide sequence isolated from the Sargasso Sea
atgacaataaagaaatgtctattccccgtagctggttttggaacacgttttttaccagcaaccaaagcagtgccgaaagaaatgcttccgattgttacaaaaccactgattcaatatggcgtagaggaagcgatgtcggcaatgattgatgaaatggcttttgtaaccggcaaaaataagagggcgattgaagatcacttcgatattaactatgaactcgaaaatgcgatttctggtaccgaaaaagaaactctgatagaaagcacgcgaaatattataaataactgttcgtttgtttataaaaggcaaactgaaatgttgggactaggtcatgcgatattgataggtgaggcaatgattggaagtgagccttttgctgtcattctgccagatgatctttgttttggatctgaattaagcgtgattgatcaaatggtaaagctatatgagcaatacaattgcagtgtcatcgcgattgaagaagtacccagggaggaaactcatcgttatggagtaatagcgggtgaggaggaaagcgccggtatttttagagttagcgatatggttgaaa

SEQ ID NO: 202291 - DNA, 187 bp, Unknown
  Bacterial polypeptide expressing nucleotide sequence isolated from the Sargasso Sea
gatgagacaaattagaaaagcagtttttcctgtggccggctcaggaactcgctttttgccagccactaaagcaatgcctaaagagttactgaccgtagtagataaacctctaatacagtacgctgcagaagaagcagttgctgctggtatagatactttggtttttgttacaggtcgaaataaaagg

SEQ ID NO: 202292 - DNA, 910 bp, Unknown
  Bacterial polypeptide expressing nucleotide sequence isolated from the Sargasso Sea
aaaatgtggactgatagagtaacaaaattaactcgtggtgagttaaaatttgaacttctttcaaaaggtgaagttgttggtatgaaagaaacactagaagctgttgataagggtctagtagatggtggtgcagcatggactcactactggtcaaactatcacccagctgcgatgctatttggatcgccagttgctggtggaggaattggtttaagtactaaatcttggttagcatggtatttcgataatggtggtaaagaattatacgaccaattatggagcgaaatgggaatgaatgttaaaggtttcgtgatggcatcatcaggacctgaagcattaggttggttcaaagagccaattaaaaacatggatgatttcagaaaatacagattcagaactcctccaggaattccaggacaaacatacaaagatatcggaattgcatcagtatctttatcaggtggtgatatattaccagcacttgaaaaaggaactattgatgctgcagaatggtgttgtccaaaaccagactcagtttttggtttccaaaaagttcttaaaaactactatctacaaggattacaccaaaacgttgtaaatggtgatatctatattaatggagatgtttacaattctttaactgaccatcaaaaatatgcaatggaagttgcatctgaagcgatgatcactagaaacatcactaatagagctgtagaaaatggtaaagcattaattgatcttactcagaatcatggagttaaactttgggatacaccagctgattactttactgagtacatgaacgccgctcaagcaactcttaaaaaaaatgctgcatcaaatgctttctttaaagaagtttatgagcacatgacagcacatgctaaaattgtagtaccttttattgcac

SEQ ID NO: 202293 - DNA, 269 bp, Unknown
  Bacterial polypeptide expressing nucleotide sequence isolated from the Sargasso Sea
aatgacgtttctaaaaataaataacttaagcattgactataaaatgaggaaagaaacagtaaatgctgccaaaaacataaatatagatattaataaaggtgaaatagttggaatagttggcgagtctggttcgggaaaaagtaccgtagctaacgctatagtaaacttgattgatgagccaggtaaaatttcaagcgggtcaatatttatgggtgaaacaaatatcagtgaaaatccagaaactatagtttcatacagaggaaaaaaaa

SEQ ID NO: 202294 - DNA, 544 bp, Unknown
  Bacterial polypeptide expressing nucleotide sequence isolated from the Sargasso Sea
atgattttagctttagtatttgcagtttcagtaattggttctgcatctgctaaaacattaaaaatccaacttacttttcctaaaacatcttacgatggacaaatcgtaaaaatgtggactgatagagtaacaaaattaactcgaggtgagttaaaatttgaacttttatcaaaaggtgaagttgttggaatgaaagaaacactagaagccgttgacaaaggtctagtagatggtggtgcagcatggactcactattggtcaaactatcatccagctgcgatgttatttggttcgccagttgctggtggaggaattggattaagtactaaatcttggttggcatggtacttcgacaatggtggtaaagagttatacgaccaattgtggagcgaaatgggaatgaatgttaaaggttttgtgatggcatcatctggaccagaagcattaggttggtttaaagagccaattaagaatatggatgatttcagaaaatacagattcagaactcctccaggaattccaggacaaacatacaaagatatcg

SEQ ID NO: 202295 - DNA, 877 bp, Unknown
  Bacterial polypeptide expressing nucleotide sequence isolated from the Sargasso Sea
aatctttcaaaagagtctatcaagataaatggtttagacgatccagaattgcaaagaaatataccaaaagatcttttagaaaaattggttgaagagcttgagatagtaaaaaccctcttaccaaaactagatagcaaatctattcttgaaggtcacttgacgccaatttggtttgggtctgcaataaactcttttggcgttaaagagcttatgaacggtctaaccaagcttgctccagaacctcaaattcaaagagctaccccaagagatatactaccagaagaagagaaagtatctggatttgtttttaaggttcaagctaacatggatccaaaacacagagatcgagtagcgttcctacgaatggcttccggacatttcaaacgtggaatgaaacttacccacgtgcgcactaataaaccaatggcgatttcaaaccctgttatgtttcttgcatcggatagagagttagcagatgaagcttgggcaggtgacatcataggtgtacccaaccatggacaacttagaattggtgacacacttactcagggggaggaattaagggtcagcgatataccctcattcgcacctgaacttttgcaatactgtcgagcagccgatccattaaagtctaaacatttagaaaaggctttgatgcagtttgctgaagaaggcgccgctaaggtttttaggcccagcgttggaactgggttcattattggggtaattggctctttgcaatttgacgttttagcaagccgaatagagttagagtatggtttacctgttcgatttgaggcatcccagtttaattctgcccgctggatttctggcaataagattgatttagataaattttcatcagaaaacaaacaac

SEQ ID NO: 202296 - DNA, 478 bp, Unknown
  Bacterial polypeptide expressing nucleotide sequence isolated from the Sargasso Sea
atgatcaagaaatgcttgttcccagcagccggttacggcactcgcttcttgccagcgaccaaagccatgcccaaagaaatgctgccagtggtgaacaagccactgattcagtacggtgtggaagaggctctggatgccggtttgaacgagatctccatcgtcacgggtcgtggcaagcgcgcgctggaagaccacttcgacatcagctatgagctggaaaaccagatcaagggcaccgacaaggaaaaatacttggtcggtatccgtaaactgctcgacgagtgctcgttctcctacacccgtcagactcagatgaaaggtctcggccacgccatccttaccggtcgcccgctgattggtgacgaacccttcgccgtggtcctggcggacgatttgtgcgtcaacctggaaggcgacggtgtgctgaccacagatggtcaagctctaccagaaataccgttgcaccatcgttgcggtg

SEQ ID NO: 202297 - DNA, 801 bp, Unknown
  Bacterial polypeptide expressing nucleotide sequence isolated from the Sargasso Sea
aacctaaattattaaaatttgatgctgaagaatccgaacctttaaatcatgcttatgggactaatggaataattacttctttagtacttgctactgatatcaaacgtaagtggtattcaatagttatcgactgtattgaatttgaaaaaacaatagaaatattgaaaactcttacgagcgcagcaattgatctgaaattaggagcaattcttgaagaagaaattgtagatcaaatgccaaaatggtttaaaacaaaatctagaagtcacaagatattaattcaatctactcttggaggaataaaaaccattgagctaatttgtaaaaaatttaaagtagaatctaacctacttggggaagaagaaaagctcgtcaatggaatttctgaagtcgtatggaatcatacaactcttcatatgaggtctagggataaaaattggacttatttacagatgcttttgccgcttaataatgaactagagttaattaattttttgagaaaaaaatggggtaaaaaagttctttggcatttagaggcagtttctcaacaaggatcaccgcgattagcggctttgcctgtattaaagtggaatggggcagaagaactaaatgaaataatggaagattgcaagaaacttggtgcgtttatttttaatcctcatgttttaacagttgaaggcggaggtctcggagtggtggatgccgatcaagtaaaagcgaaattaagatttgatcctaaagggcttttaaacccaggcaaattggaaggttgggaagtaaaagaacaatttaaaatttaac

SEQ ID NO: 202298 - DNA, 694 bp, Unknown
  Bacterial polypeptide expressing nucleotide sequence isolated from the Sargasso Sea
atgcaaaaagttaataaagcagtttttccagttgccggtatggggacgcggtttcttccagcaacaaaggctatgccgaaagagcttctacccatcattgacaagccacttatacaatatgctgcagaagaagctatcgctgctggcatcgaaacacttatttttgttactggacgcaataaacgtgctattgaagatcactttgataataacagggagcttgaaatggctctacgttccaaaaataaaaatgagcaggcaaatatggtcaaaaatattcttccagcaggtgtagaatgtatatttgtacgccaaccagaacaacttggtctagggcatgcagttctttgtgccgaacgcgcggttggtagtgaaccttttgctgtgcttctcgcagatgattttctaacttacgagggtgcaggcgccacttcagatttgatttgcaattttgaaacctctgggaacacccaattgagcgtaatggaagtgaatagtcaagaaatctctaattatggtgttatcattccaaatctcgagttaggatcagttgcgggcctgattgaaaaaccaaaagttgaagatgcgccatcgaacttggccagcattggtcgctatgttctaacgtcagatatctttcaaatcttgcgtagccaacctgctggtgccggtggcgagattcaattagctgatg

SEQ ID NO: 202299 - DNA, 145 bp, Unknown
  Bacterial polypeptide expressing nucleotide sequence isolated from the Sargasso Sea
aggcgacctaattcatagatctgagtttgatttattaaaaactccgaatctatgtaagaagtctttaaatgaaattaaagatgttttggcttctaaagatttatcgcttggtatgaatgttgaaaactggcctccagtaggataa

SEQ ID NO: 202300 - DNA, 544 bp, Unknown
  Bacterial polypeptide expressing nucleotide sequence isolated from the Sargasso Sea
gtccataattagtacaagaatttttcgacgcagaagaagagctttattaaaaatcaaaccgtatgttgagcattggcataatcacctaagtaaatctaaggagcaaataggtataaattttctttcaggcatacaaaatattagtccagaagaagaagaagaagaagttataagtaagaaaatagcagaacaactattaaagcagcgttcaatagaagcattgacaggtaaatgtagttttggacctcatcgtgatgatattgaatttctaattaataatatttcagtaagaaaatatggttcatctgggcagcaaaggacttttatcttagcgttaaagatggcggaactagatttattatccaaaacattaaatgttcctccgattttaatattggatgatgtcttagcggaactagatataactagacaaaatttgttactaaattctgtcgggaagaatagccaatgttttataagtgcgacacatctagataaatttaatcaatctttcttagactcttcgcaaatgatttatttataa

SEQ ID NO: 202301 - DNA, 787 bp, Unknown
  Bacterial polypeptide expressing nucleotide sequence isolated from the Sargasso Sea
atgtcccctaatcccgatttaatcgtgtttgacgaacccaccactgcgctagatgttactactcaagtggatgtcctagcggcaatgcgcgatattgtaaaaacctacgaaacggcagccatatatataacacatgatctctcagttgtagcccaaatggccgacagaattaaggttctacgatatggtgaggaggttgaagaagcgatgacacgaaaaatgttgaagtctccaaaagaagattataccaaaagcctttggtctgttcgatctattcaaaagcctgagaaaaaaagtaaagacattattttagaggttggaaatattgatgcgttttatggaagttttcatgtgctaaaaaatataaatattaaattacccttgggtcggacagtggcattggttggtgaaagtggttcagggaagtcaacggttgctcgcgtaattactggattgctggagccaaagacaggttccataaaattcaaaaatagtgacttacctccatccctaaagggcagaactaaagaccaacttcaaaaaattcaaatgatctatcagatggctgatgttgcgatgaaccctaagcagaccgtttatgatattatcagccggcctgctagcttttttgctggcttaacgggtgctaatttacgaaaaagagtaattgaactcttaaagcaaatagatctggatgaaagttttatagacagatatccaagtgaactatctggggggcaaaaacaacgcatatgtatagcaagagctttagctgctaatccagagg

SEQ ID NO: 202302 - DNA, 845 bp, Unknown
  Bacterial polypeptide expressing nucleotide sequence isolated from the Sargasso Sea
gagcaacggcgatgatgccaaattccaggacttcgttaaccaggcgattagccagaaatacgacggcattattctctcccagggacgcgatccgtactcgaccgcgctggtgaaaaaagcggtggatgccggaattaaagtcgccgtattcgatacggcggtcaacggtgagatcccgggcgtcaccgtcacccagcaggacgatgcttcgctgaccgagctctcctttggccaactggtgaaagacttcaacggcaaagccaacatcatcaaactgtgggtcgccggcttcccgccgatggagcgccgccaggccgcttaccagacgctgcttaagcaaaacccggggattaaagagctggagtcgattggcgccgtctcgtccgacgtgcagggcgataccgccaataaagtgggtgcgattctggctaaatacccgaaaggcaagatcgatgcgatttggggaacctgggatgcgttcagccagggagcctataaagcgctgaaggagaacggtcgcagcgaaatcaaactctacagcattgatatttctaaccaggatctgcagctgatgcgtgaatccggcagcccgtggaaggtgagcgtggcggtggatccgaagcttatcggcgccactaacgtgcgcctgatcgccaataagattgccggtgaaccgacccctgcaacctatgacttcaaagcggcggctattccgcaggcgctgctggcggcgcagccgggggcagttaacgttgcctcgctgggtaaaatcattccgggctggggccagacggaagactttatcgccccgtggttcgccacgctggaagcaaaaaacaagtaac

SEQ ID NO: 202303 - DNA, 876 bp, Unknown
  Bacterial polypeptide expressing nucleotide sequence isolated from the Sargasso Sea
agccagtttaaaaagctggttcacaactgccattttgatgcggcgaaagatcccgtcgcctggttgccacctatggttgttctgcagtcgcaagataaattcatacagcaatgggttacctatcctgattggctcccacaaactcatcggttgactaacgtattttgtggcggcgaaacccagggtaaattgcagttagacagttattttgcttccaatttaccccacagttataaattagtgagaaatgaattggctgggtgggagcattcaacaaagttttcgccttggttagcaaatggtagtgtgtctgcccgacaagtgttgtcggcattgcggcaatttgagtcgcaacatggtgctaatgagtcgacgcaatggattgagtatgagttactttggcgtgaatacttccactggtatagccacaaatttaacaataaactattttggttttcgggaatcaatggcaaaaaaccattaaccagtttttatgcccaacgatttcaggcgtggaaaacggcaaccactccttacccgctagtgaatgcattaatgtcacagttaaaccaaaccggctacatgtctaatcgtggcagacaaatagtggccagttgtttaatccacgaattacagtgtgattggcgctatggtgcggcttattttcagcaacagctaattgattttgacgtcgcaatcaattggggcaactggcaatatttggcaggtgtgggggctgatcctcggggctcaaggcggtttaaccttgctaagcagcaacagacttacgatccaaaaggccagtttattaaagcctggttaggcagtgttgcgttgtcgcaagataacctagaacaggttgctcaacttgattat

SEQ ID NO: 202304 - DNA, 811 bp, Unknown
  Bacterial polypeptide expressing nucleotide sequence isolated from the Sargasso Sea
tgctggcggcaccacgacaacccggtgggcacgtccttccgctggcaggtcgacgagcccaagacgctggtcgacggcttcgagagccagcacaagacgatgatcaaggcgatgaagggtgtgcccggcgtcaagcccgagcgcttcgaggccgcgtcgaagcaggtgcgccactgcgcgctctcattggtcggtgagccgatcatctacccgcgcatcaacgagctgctcgacgagctgcacgggcgcggcatctcgagcttcatggtgacgaacgcgcagttccccgaccagatggagacgctccgcccgtgcacgcagctctacatctcggtcgacgcgccgaccgcgccggagctcaaggccgtggaccggccgctcttccccgacttttgggagcgcttcctcgcgtgcgtcgacctgctgcgcgagaagcgccagcgcacggtcttccggctgaccctggtcaacggctggaacacggccgagctctccaagtacgtcgagctcgtgcgccgcggccagcctgactttgtggaggtcaagggcgtgacttactgcggcgactccaaggcctcgccgctgacgatcaagcactgcccataccacgacgaggtcagggcctactgcgcggcgatggtggccgagctcggggagggctacgagctggcgagtgagcacgcgcactcgaacatcgtcctgatcgcgcggagcgccttcaaggtggatggcgtgtggcacacgtggatcgattacgaccgatttgccgcgctcgccacctcgggccaagcgtttggcgcgctggactatg

SEQ ID NO: 202305 - DNA, 946 bp, Unknown
  Bacterial polypeptide expressing nucleotide sequence isolated from the Sargasso Sea
gactgacagagtaacaaaattaactcgtggagagttaaaatttgaacttctttctaaaggtgaagttgttggtatgaaagaaacactagaagctgttgacaaaggtctagtagatggtggtgcagcatggactcactactggtcaaactaccacccagctgcgatgctatttggatcgccagttgctggtggaggaattggtttaagtactaaatcttggttagcatggtatttcgataatggtggtaaagaattatacgaccaattatggagcgaaatgggaatgaatgttaaaggtttcgtgatggcatcatcaggacctgaagcattaggttggttcaaagagccaattaaaaacatggatgatttcagaaaatacagattcagaactcctccaggaattccaggacaaacatataaggatatcggaattgcatcagtatctttatcaggtggtgatatattaccagcacttgaaaaaggaactatcgatgctgctgaatggtgctgtccaaaaccagactcagtttttggttttcaaaaagttcttaaaaactactatctacaaggattacaccaaaacgttgtaaatggtgatatctatattaatggagatgtttataattctttaactgatcatcaaaaatatgcaatggaagttgcgtctgaagcgatgatcactagaaacatcacaaatagagctgtagaaaatggtaaagcgttaatcgatcttactgaaaatcatggtgtaaaactttgggatacaccagctgattatttcactgagtatatgaacgctgctcaagcaactcttaaaaagaatgctgcatcaaatgctttctttaaagaagtttatgagcacatgactgcacatgctaaaattgtagttccttttattgcacaaatggaaacatctgatgcatcaattggttctgcgttgcagctc

SEQ ID NO: 202306 - DNA, 622 bp, Unknown
  Bacterial polypeptide expressing nucleotide sequence isolated from the Sargasso Sea
aatgaaaatagacaaaataaatattgatggcaaaaaaaactctattgaagttttagataaaattttttcggcaaaaattaacaagcaacttgtatcgaatgtaatttacaaaattaatgctaattacaaaggcagaaaagcaaaaacaaaacagagaaatgaaataagtggatcaactgcaaaaatatgggcgcaaaaaggaactggtaatgcaagacatagtagtagaaaagctcccatatttgttggaggcggtgtagctcacggtcctaaaggtgaatcaaattataaaataagaaagttaaacaaaagtgaaaaaaagaatagtctagcttctttaattactgaaaaaaaattaaataacaatgtaataattttctcagattttacttccaagataaacaaaactaaggaaatgaagtcaattttagttaagtttgagattttaaatggattaatagttctagacaaaaaatcgaaagaaaatgtttataaatcattaagaaatatatcaaatatcaaaactactaatgctagccatttttctgcttatgacatagtgaaatataaaaaattaatttttactgaaagttcagtgaaggaactagaaaagagattttaa

SEQ ID NO: 202307 - DNA, 774 bp, Unknown
  Bacterial polypeptide expressing nucleotide sequence isolated from the Sargasso Sea
aaaagatttttataactactctccaatccttactgaaaaattagacgaatgtattgctgatttggtggtaagacctagtgatcacaaagcagtaaaggcagtagcagaaatttgttgggaattttctatcccacttactttaaggggctcaggtacaggtaattatggacaagctgtcccattgtttaaaggagttgtaatgcagatgagtcactttaataagttagaagaatttgatccagatacaggttttgtaaaagtacagtctggctgtgtgatgggagatttgaataaacaattagagaaatatggtagggaattgaggttgcttcctagtacttggaaaactgcaacaattggaggttttattgcaggtggatcaggaggtattggttcaattaggtggggatttttaagagatccaggaaatcttattggtttagaggcagtaacgatgaatgaaaaacctgaattattaaaatttgatgctgaagaatccgaacctctaaatcatgcttatggaactaatggaataattacttctttactacttgctactgatatcaaacgtaagtggtattcaatagttatcgactgtattgaatttgaaaaaacaatagaaatattaaaaactctcaccagcgcagcaattgatctgaaactaggagcaattcttgaagatgaaattgtagatcaaatgccaaaatggcttaaaagtaatgatagaagtcacaagattttgattcaagctacttttggaggaacaaaaacgat

SEQ ID NO: 202308 - DNA, 822 bp, Unknown
  Bacterial polypeptide expressing nucleotide sequence isolated from the Sargasso Sea
catacgcaacattacctatagcctctttattgttgggtttttttagcgatcttgatacctttaatgtagttaatgaatttggaaatggatggagtgggtcgataatttttttactcgacaccattacattcttgctttctgcatacttattgtattttctaaaaaataaaaatgtaaatacaacaagtagtaatcctccattttctataaagaattttcaagaaggtattaactacttttttaaaaccaaaaatattaggaacatagctttttcaatttcttcttgtttaattggtgcaggaacattattcattctaggccacacatttttgactgtagatttaggttttagtgaaagctcgtttggtttcatgattgcttcctttggaacaggaataatatttagtatgctaactcttagttattttgttacaacttttaatagaataaattttctcataggctcatgcatgataattacaggaatttccctattttcagcatttagatcagtagattttgttgtaatcttattatcaattttcatatctggagttggaacgggtggggtttatcttctaactataagttacttgcaagcttctactaatcctgaactacgaggaagagtttttggtaacttttataccattggaagacttgcactactaatttcttttttgatatctggtacagctgcaaattatttagatggagttttcaatcaagacggagtttatttagtattgataggaagttcaattttgatatttattactggaattttgaattttactattggatacaaagagaatttttaag

SEQ ID NO: 202309 - DNA, 448 bp, Unknown
  Bacterial polypeptide expressing nucleotide sequence isolated from the Sargasso Sea
tttaggcggaccagcagctatattttggatgtgggtaactgctttcttgggcatgactaccaagttcgtagaagttactctttctcataaatatagagaaaagttaccagatggaagtatgtcaggcgggcctatgtattacatagaaaatggattaaacatgaaatggttggcagttgttttttctgtctgcctattaatgatgtgcttaggaacaggtaatatgcctcagataagcagcatttctgttgttttacttgatacttttaatatacctaagatagtaactggacttgttctttctgttcttgtttggttagtaattattggaggtatcaaaagaatagcccaaatagcaagtaaattagttccttttatggccttttggtacatagttggaggattagcagtaattattagtaattacgaaaatattattccttctttt

SEQ ID NO: 202310 - DNA, 856 bp, Unknown
  Bacterial polypeptide expressing nucleotide sequence isolated from the Sargasso Sea
gcacaggctcgacgtggtgaaggtggagctcccgccccggttcaagaagatcggcaggtacgccttctacgggtgctcgaacctcgaggagtgtgtggtcccgccgggggttgaggtcgaccagaacgccttctatgattgctcgaagctcagggcgacgacggtgctcggtgacgcagacttcccgacggtgtgggacgacactgtctccgagaaggctttcattcacaggctcgacgtggtgaaggcggagctcccgcccccgacgacggttctcagcgacgcggacttcccgaccgagtggggcgacaccgttcccgacaaggcgtttgcatacaggcgcgacgtggtcaaggtggagctcccgccccggatcaagaagatcggtgtggaagccttcattagatgctcgaaactcgaggagtgtgtggtcccgccgggggtcgaggtcggcaaggacgccttcacgtggtgctccaagctccgggcgacgacggttctcagcgacgcgtacttcccggttgagtggggcgacaccgttcccgacaaggcgttcgtgaacaggcgcgacctgaagaaggttgttctcccgccccggatcaagaagatcggtgtggaagccttcgcaagatgctcgaaactcgaggagtgtgtggtcccgccgggggtcgaggtcggcaaggacgccttcacgtggtgctccaagctccgggcgacgacggttctcagcgacgcgtacttcccggttgagtggggcgacaccgttcccgacaaggcgtttgcagacaggagcgacgtggtgaaggtggagctcccgctccggatcaagaagatcggtaagaatgccttctacggg

SEQ ID NO: 202311 - DNA, 517 bp, Unknown
  Bacterial polypeptide expressing nucleotide sequence isolated from the Sargasso Sea
ggcatggcgcaccgcggccgtctcagcacgttggcccacatcctcggcaagccgtacgccaacatcttgagtgagtttgaaggcaaagcctacgacggcgacggcctgttcgatggtgatgtgaagtatcacctcggctactcgcgcaagcaggtggcggacaccggagaagaggtcaccatcaccttggcgcccaacccctcgcacctcgaggcggtggatcctgtggtggaaggcatcgcacgcgcccgcatcgacgcgagggacggcgatgaagcgagtgtgttgccgattttgattcacggcgatgcggccatcgcgggacaaggtgtggtgtacgaggtggcccaaatggccggccttgagggttaccgcacaggcggcaccgttcacattgtcgtgaacaaccaagtgggcttcaccaccaactacctcgacgcacgcagctcaacgtattgcacggacgtggccaaggtcaccaaatcgttggtcttccacgtgaacgccgacgacgtgg

SEQ ID NO: 202312 - DNA, 871 bp, Unknown
  Bacterial polypeptide expressing nucleotide sequence isolated from the Sargasso Sea
gatgaaaataaagaaagcagtttttccagtagccggttttggtactaggtttttgccagcaaccaaatcaacaccgaaagagatgctgcctgtggtagacaagccactgattcaatatgccgttgaagaagcaagtagaatcggtgtggaagagttcatttttattacgcatcatgccaaaggaacgattgaaaagcattttcaaaataatagcgaactttacaatatgttgttagatcaaggtaaggatgatttagctaattcaatcaaaaatatcggtggccccaatgctaaatttatctctgttgatcagggcgaaccaaagggtctcggccacgcaattgcctgtgcggaaaaatatattgcagaagacgaattttttgttgtaattcttgctgatgatttaatttattgcaaagaacgtaatgtactcgaacaaatgaaagagcaggctgaaaagtatggaaaacaagttctagctttagagcaaataccagtagtagatatttcaaaatttggcgtagttgatccagaatcaagtgagggcagaacttttcatcttaaaggtattgttgaaaagccattagccgaagatgcaccgtctaatttagccgtggttggtagatatttattcaacaaaagcatttttgatcacattgataatgacaatgctgggaaacatggtgaaattcaaattactgatgcaatactaagcaatattaatgattttattggttttaagtttgaaggtgacagatttgattgtggtagtaaggttggctacttgaaggcaaatattgctcttggtctagctaatgaggaattgtcagagagattaaaaaattatattgaggaaattaaagatttataa

SEQ ID NO: 202313 - DNA, 940 bp, Unknown
  Bacterial polypeptide expressing nucleotide sequence isolated from the Sargasso Sea
catgatcccgccaagcttgctcccggaggggctatccgatcgcctgccgccgcaggccgaagcctccgcgcgcctggcgcgccgcgtgctcgatacggtcgcgactcatggctatgagcgggtcatgccgccgctggcggagttcgaggatacgctgactcagcggctcaagtcgatgcgcgcgcaggatctggtccgcgccgtcgatccggtatcccagcgcactttggccttccgccccgacatgaccgcgcaggtcggccgcatcgccgccacccgcctgcgcagcgcgccgcgtccgctgcgcctgtcctatgccgggccggtgatccgccagaaggctagccagctgcgccccgagcgcgagaagatgcagctgggcgccgaactgattggcagcgacagcgccgccgccgcggtcgagatcgtcaacatcgcgatcgaggcgctgaccgcagccggcgtcaccggcatcaccatcgatttcaccttgcccgacctgatcgacgcgctggccgctggcccgttgccgctgggcgccgaagaattggaagccgtgcgcgccgaactggacgccaaggatgccggcgcgctggtggcgatcagcccggccgccgccgcctatctgccgctcattgaggcgaccggcccctttcatgccgcgatggaacggctggaggcgttcagcgccagcctgggtggcgccatcgacagccgcatcgcgggcctgcgcgcgatcgccaagccgatcggctgggacatcaccctgaccctcgatccgaccgaacggcacggtttcgagttccagaactggttcggcttctccatctttgccgagggctcatcggcgagatcggccgtggcggcagctatgccattgcccgtggcggcgaaacggatgagccagccatgggcttttcgctctatcccgatccgctga

SEQ ID NO: 202314 - DNA, 610 bp, Unknown
  Bacterial polypeptide expressing nucleotide sequence isolated from the Sargasso Sea
atcgttggtttaacaggtagtgtcgcctcggggaaatcaactgtagctagctggatgtgcgaaatgggcattgccgtccacgatgctgatgctgtggtgcatagcttgctcgcgtcaaacggagaggctgtgatggaaaccatttccacatttggatcggatattggggcatctgatggtagcattgatcgaaaaaaacttggcaaacatgtgtttgccaatccagctgatcgcaagaaactagaatcaatattacatccgctggtgcggcatcatcgtgatcaatttttgagagatcaacagcgtctaggcagtcagattgttgtccttgatgtgccattattatttgaaactggtggtgatctattatgcgattatgtgattgtggtatacgctagtgaggatactatccggcgtcgtgcattatcccgccctggtatgaccgctgggaaattatcaggcattttagctacgcaaatgccagccagtcagaaatgtcagcgtgcggattttgttcttgatacagatcttgatcccgacataactcggcaggatctgtctagttggcttaaacggatcactaccgcaccggactcatcaaaaaggtaaa

SEQ ID NO: 202315 - DNA, 565 bp, Unknown
  Bacterial polypeptide expressing nucleotide sequence isolated from the Sargasso Sea
aatgaatcagtctttgatccaaggcattttgaaaaatgaccatggatctattgctagagttatgtctctcgttgaaaataatgagatttcagcagatatactgagtaaattacatattcattctaaaaaatctattcgagttggaataacaggaccccctggtgcaggaaaaagtactataacaaatgcattgatagaaatttgtttagcaaatcaaaaaacagtcggagtgatcgcagttgatccgactagtccttttacgggcggagcattattaggcgatcgagtaagaatgaataaatattcatgggatgagaaagtatttattcgaagcttaggtagtcacggtgatttgggcggtctttccagaaaagcccatgaaattggagatgtcttagctgcaagcggtaaagattatattttttttgaaacggttggagttgggcaaggtgagcatgatattataaataccgctgatatttgtgtagttgttttaacccctgaatcaggagatgagattcagctaatgaaagctggtcttattgagatagcagacatttttatt

SEQ ID NO: 202316 - DNA, 856 bp, Unknown
  Bacterial polypeptide expressing nucleotide sequence isolated from the Sargasso Sea
gagcaaatatctgatctagtaaaagaagaaaaaaaattaaaaaagaatggtgttccgaaaacttttaaagaattttcctacataaaatccataggattttccgacagtaaaatcgctgaactaactaagagttcaactaaagaaattcaaaagaaaaggcaaaagttcaaaatttttccagtatttaaaaaaattgatacttgtgccggagaatttaagtcagaaactccatatatgtattcaacttatcaaaaattagctgataatttatctgcgtgtgagtcgaacccaactaaaaaagaaaaaattataattttaggaggtggtccaaatagaataggtcaaggtattgagtttgactattgttgttgccaagcaagctttgctttaaggaaaaagaaatatgaaacaataatgataaattgtaatcctgaaacagtttctactgactatgatacaagtgatagactatatttcgagcctttaattgaagagcatgttatgaatattatttataaagaaaaggaaaaaggtaaattgcttggggtaattgcccaatttggtggccaaacaccaataaaattagcaagaacattaaatgataataaaattcctattttaggaacccaatttaactctattgatcttgcggaagatagagagagatttaaaaaaataattataaaagaaaatcttaaacaagcagaaagtggaattgcaaagaataaagaggagtcttttgaaatagcaagtaaaattggttttccaatagttattagaccatcatacgtacttggtgggaggggaatggaaataatttatactcgatctgatcttgaaaagtatatagatgaag

SEQ ID NO: 202317 - DNA, 418 bp, Unknown
  Bacterial polypeptide expressing nucleotide sequence isolated from the Sargasso Sea
aatgtactcaagcaatgtagataatattgcatcaataatctcctctaaagaagaattaagaaaagaactaattaagattcagcaagacttcccaaaaaaatttgcaaaaaataaaaaatttgcaattattgaaggcagagatattgggacagtaatatttccagatgcaaatcacaaaatctttctatgggcaaaatcgagtataagagctagaagaagatgtgatcaaattataaaaaatggtaaaaaagctaactataataagatttatagtgaaattaataagcgagatagtaaagatataactagaaaaatagcgccgctgaagccggcagaaaattcggtattgctagatacaagttatcttgatatagaacagtcctttaatgctgtaataaaaatattaggtcgctattaa

SEQ ID NO: 202318 - DNA, 773 bp, Unknown
  Bacterial polypeptide expressing nucleotide sequence isolated from the Sargasso Sea
gctgcctgtcggcagtgatactcttttggcccattatggtggaggtgctggcgagattcccatgaccatcgactattttgttgatcgcaatgggacatcaaccgatgcgcctactcacactattgatgtcgatttttctgcgcctggccctgctccgggtgaagatccggaaaacagtttgctcgcgcgcgtgcgggtcttcggcgttgacccgactaaggaaaatgagctcacagacgctgacttcaatagggacgcgactatcgagaccgtgctttggagcacccctcttcccgcgccgggtacgataatcaaatggtattggggggatctggcccacaagtttgatgagttgacactgacgaacgaagggggcggtgacactcttacgcgaacggtgccttggtcaatcattcgtgaagtcggcaatagaacgctcccagtgttctatacgctgggatggccgactaatgacaatacccagcgctcacttgcgcagaatgtagttgtggcggccaacaaagtcgtattggaagagccaaggttcgtcaaggcgaccgcatttttggcgtgtaccgacctcaatcgagcgactcgcgaggcgacggtcagggttcctggtaatacagtgtatttccaagagcacatggtcgttcgatgcgaattccgcgtattcagtgacattaccggagacactcagttgggcaatacactggccctaagctcgttgccgctgacgcccgatatggtttccaacggtttcgacataaaga

SEQ ID NO: 202319 - DNA, 241 bp, Unknown
  Bacterial polypeptide expressing nucleotide sequence isolated from the Sargasso Sea
gaagcgaaaaaactggcaggcgaacttgcggaaaaagcacaaaagggagaagatttcgccaatctggcccgtatgaactccgatggaccctcagcaccgaaaggagggttgcttggaaccttcggccgcggtcagatggtccctcccttcgaagaagccgcctttgcactcaaagtcggggaagtcagcggagttgtagaaacccctttcggttttcatgtcatcaaacgtgaccggtgaa

SEQ ID NO: 202320 - DNA, 768 bp, Unknown
  Bacterial polypeptide expressing nucleotide sequence isolated from the Sargasso Sea
gatgactattgtgaagcgcaaaaacaaattacaagttcgaaaagccgtatttccagtggcaggttttggaacaagatttttaccagctacaaaagctatgccaaaagaacttttgcccgtagttgataagcctctaattcaatacgcggctgaagaagcaattgctgcgggtatcgatacactcatttttgtaacagggcgtaataaacgcgctatcgaagatcactttgataacaatcaagaactcgaaatggctttgcgtgctcgtggcaaagaaaaacaagctaatatggtgaaaaatattttaccagctggtgtggaatgtatttttgtccgtcaaccagaacaactagggttggggcatgcggtgctctgtgcagaacgcgctgttggtcgagacccatttgcggttctgcttgctgatgattttttgaccaaagatggtgatggcgtgaccgcagatttggttcgtaattttgaacgatctgggaaatcgcaacttagtgttatggaagtgaatgactcagatatatcaaagtatggggttatagttccaaatggagaacctggaagtgttctaggcttgattgaaaagcctagcgctgacactgccccttcaaacttagcaagtattggccgttatattctaaatccagatattttcgatatattgcgaaatcaaccagtcggtattggtggagaggttcagttggcagatgcaattaatattcaagcggcaaataacgatgttgaagccgtgactttaaa

SEQ ID NO: 202321 - DNA, 862 bp, Unknown
  Bacterial polypeptide expressing nucleotide sequence isolated from the Sargasso Sea
ggcaatagaatgacatatgtagcgcagtcagctgccgcttcattcaatccagcccatcgtttaataaatcagacaactgaatcaacaatcagggctggcctaaaaaaacagaatgaggcatttgatgaggcacgcgctctttatgatgctctaaatcttcctaatccatcaacaattggcgaaagatatccgcaccaggtttcgggaggtcagcttcagcgaataatgactgctatggccatgtcccctaatcctgatttaattgtatttgatgagcccaccactgcactagatgtaactacccaagttgaggttcttgcggcaatgcgcgatatcgtaaaaacctatggaacagcggcaatatatataacacacgatctttcagtcgtagcgcaaatggccgatagaattaaggttttaagatatggtgaagaagttgaagaagcgatgacacgaaaaatgttaaagtctccaaaagaagattataccaaaagcctctggtctgttcgatctattcaaaagcctgagaaaaaaagcaaagacatcatattagaggtcaaaaatgtagatgcgttctatggaagttttcatgtattgaaaaatataaatataaaattacccttgggtcggactgtggcattggtcggtgaaagcggatcagggaaatcaacggttgcccgcgtaattactggattgcttgaaccaaagagaggttcagtaaagttcaaaaataatgggttgcctccctctttaaagggtagaactaaagaccagcttcaaaaaattcaaatgatctatcagatggctgatgttgctatgaatcctaaacagacggtttatgatattatcagtcgtcctgcta

SEQ ID NO: 202322 - DNA, 376 bp, Unknown
  Bacterial polypeptide expressing nucleotide sequence isolated from the Sargasso Sea
cactacacaagatatgcaagatgttgagtttacagtggaaaataaaaaactttggatgcttcaaaatagatctggaaaaaggacagcaaagtcagcagttaaaattgcagtagatatggtaaaagaaaaattaatttccagaaaggaagctattttgagaattgatcctaattctttggacacacttctccatccaactttagatgaaaaaagtgaaattaaggtaatagcaaaaggattgcccgcatccccaggtgcggttagtggaaaggtagttttctcatcagaagaggcagaaagacttaatggcatgatgcaaaatactattttagttagagtcgaaacatcaccagaagatatacatgggatgcatgca

SEQ ID NO: 202323 - DNA, 82 bp, Unknown
  Bacterial polypeptide expressing nucleotide sequence isolated from the Sargasso Sea
gatgaaaataaagaaagcagtttttccagtagccggttttggtaccaggtttttaccagcaaccaaatcaaccccaaaagaa

SEQ ID NO: 202324 - DNA, 871 bp, Unknown
  Bacterial polypeptide expressing nucleotide sequence isolated from the Sargasso Sea
cacttagcaatttctagggcaattacgttgattgaatcaggagatgacattgatgataagctttttagtaaaatatatccatatactcataatacgattaaattaggagtcacgggtccgcctggagcaggtaaaagcaccctaacggatcaattaattcgtctttatttaaatcaaaataagagcgttggtgttatagccgttgacccatcgagtcctttttcaggtggagcgcttcttggagatagagtaaggatgaataattatttatggaacgacaatgttttcattcggagtatggggtcacaaggtaatttaggtggtctaaataaaaaagcacaagaagctggagatgtattagctgcaagtggaaaagatattgtgatatatgagaccgttggcgttgggcaaggagagcatgatattgcaaaagctgctgatttaaccatagttttgttagttcctgaatctggtgatgacattcaattaatgaaagcgggtttaatagagattgcagacctttttgtagtaaataaatcagatagaaatggatctgaaaaactagcccaatcaataaaaagcgtgttacatatatttaaaaataaagataattttgaaccaccggtatttaaggtctctgcagataggggtaacggtgttgaagagttatttaatggaattggcaattttttagataacgaagcccataagctttatttaaaaaataaaaaaataagcaggtataaggatagagtgcttaatattatacaaaatcgtttaataggtagcttttggacaaatagcaatattgaaagacttgaatcaattattaatgatctcaaaaatttcagaattcttcaccatatcaaat

SEQ ID NO: 202325 - DNA, 721 bp, Unknown
  Bacterial polypeptide expressing nucleotide sequence isolated from the Sargasso Sea
aatgcagaactcaaaaaacaaagataacgaaaatattaatttagatattttaaaaagattaaactacatctacaaatcaataatttctgaggacaaaactctagagtactcaaaaaaaattaataaacttattaatcattataaaaaatcagaagttaaaaatgaaacaaaaggtacatggtctgaaaacacaattttactaatcacatatgcagacagtattaataaaggtatatcaggtaaaacccttaataattttggaactttctataaaaaatatcttaaaaaatttataaatagtattcattttcttccattttttccgtctagtggagatggtggtttttctgtcaaaaatcattttgaagtggatgaaacttttggaacatgggaagatataaaatatttatcaaaaaatgctaacataatgactgatttagttttaaatcacgcatcttcaaaaggtctatggtataaaaattttttaaaagaaaaaagaccgggcaaaaattatttttatattgttgatgaagattatgaccgtagtaaagttgttagaccacgtgaccataatcttctttcagagataaaatttttaaatgaaaagaagtttttatggtgtacttttagtcatgaccaaattgatttaaattttaaaaatcctgaagttttattagaatttattaatctaatacttacacttgcatcttatggaatcaaa

SEQ ID NO: 202326 - DNA, 853 bp, Unknown
  Bacterial polypeptide expressing nucleotide sequence isolated from the Sargasso Sea
aatgattttagctttagtatttgcagtttcagtaattggatctgcttctgctaaaacattaaaaatccaacttacttttcctaaaacatcatacgatggacaaatcgtaaaaatgtggactgacagagtaacaaaattaactcgaggtgagttaaaatttgagcttctttcaaaaggtgaagttgttggtatgaaagaaacactagaagctgttgacaaaggtctagtagatggtggtgcagcatggactcactactggtcaaactatcacccagctgcgatgttatttggatcgccagttgctggtggaggaattggtttaagtactaaatcttggttagcatggtatttcgataatggtggtaaagaattatacgaccaattatggagcgaaatgggaatgaatgttaaaggtttcgtgatggcatcatcaggacctgaagcattaggttggtttaaagagccaattaaaaacatggatgatttcagaaaatacagattcagaactcctccaggaattccaggacaaacatacaaagatatcggaattgcatcagtatctttatcaggtggtgatatattaccagcacttgaaaaaggaactatcgatgctgctgaatggtgttgtccaaaaccagactcagtttttggttttcaaaaagttcttaaaaactactatctacaaggattacaccaaaacgtagtaaatggtgatatctatattaatggagatgtttacaattctttaactgaccatcaaaaatatgcaatggaagttgcgtctgaagcgatgatcactagaaacatcactaatagagctgtagaaaatggtaaagcgctaatcgatcttact

SEQ ID NO: 202327 - DNA, 967 bp, Unknown
  Bacterial polypeptide expressing nucleotide sequence isolated from the Sargasso Sea
gcagtagcaagagctgctatgtcaagcggagttgctagaaagaatattgaaaattttgatatatattcagaacaacttaaacaaagattggatccatctgtaactatcatgcaaggaattaactcaaaaattaaaaaaaataaaaaaagagttgtgtttgcagatggagaagatgaaaatacacttaaagctgcaatagcttttaaaaatagcaatctaggaataccaatcattgttgcgaaagaaaaagttgttaaagaaaggttaaaagaaattggatatgcggaaaattttgacattgaaattgtgaattcaactaaaaaagataaaagagaaaaatatgtaaactttttgtttaaaaaattgcaaagagaagaaggcttattagagagagattgtgatcgaatggtaagaaatgatagagtgatatggggttcatgtatggtagcatgtggagatgcagatgcaatggtaacaggaaatactagaagatatgcccagtctcttcaaaagattaaaaaagttgttgaaccaaggcctggtgaaataatgtttgggttaaatatggtagtaaataaagggaaaactgtatttattggagatactagcgttcatgaatacccaacatcagaacaattagctgaaatagctatttcagccgcaagggtagtaagactttttggtttcgatcctaaagttgcttttctttctcattcaacttttggacaaccattaacaagcagaacaaaacacattagagatgctgttgaaattttaaaaaataaagaagttgattttaaatttgatggagacatgcagccagatgtagctttaaataatgaatatgcagatctttatcctttttcagaaattgtcggtaaagcgaatatattaattatgccaggacaacatagtgcaactatttctcataaaatgatgaagtcattgggtggcgctaaggtgattg

SEQ ID NO: 202328 - DNA, 616 bp, Unknown
  Bacterial polypeptide expressing nucleotide sequence isolated from the Sargasso Sea
aatgatagttaaacctcaagcacttgataaaattaacgataattctaatttttttttattttatggtaaaaatgaaggtttaaagtctgaatgcataaaaaaagtattaaaaataagtaaaaaacacaacatttttaaatacgatgaaaaacaaattcaagatgaaaaagaagttttttttgaaaatacattgtcaaattctttatttgagaatgaaaaaactatcatcattaatcactcatcagataaaatacatgatatagtaaaggaattaattgatagagatattaaaaatattaaaattttaattaattctggtgctcttgaaaaaaaatcaaagctgagatctttatttgaaaaagataaaaatctagtttgtgtacctacttatcttgataccgatgaaactttagtcaagttaggaatatattttttccaaaaatataaaatttcaatatcacatatgaacattaatttaatagtaagtaaatgtagcggggacagacttaatctagaaaatgaattagaaaaaataagaatttttgcaaagaaaaaagggaagatatctacagaagaaatattaaaattgataaatcttagtgaaaatcacaccttt

SEQ ID NO: 202329 - DNA, 667 bp, Unknown
  Bacterial polypeptide expressing nucleotide sequence isolated from the Sargasso Sea
tagtagtgagcattctgatgaaacaattaatttgacaggatattcatctgaatctttagtacatgatggcttacaaagacaatatttaatgtatttacccagctcttatcaagaaaataataattacccattagtgataaacttccacggttttgaaggacagataaatcaatatgcaacctatgcggatatgagatcactcgctgattcagagaatttcattttagtctatcctcagggggcagatctagatggatctccccattggaatgcagcgcttctaggcggcgacaataaaagtgatatagatgacttgggatttattgaatcattaattttaaaattatcctccagaaatctaattgatttagaaagagtatatatggtaggatattcaaatggtggaatgatgagttatgcgatggcatgtcataaaagtaatttaattgcagctatcgcttctatatcagggacaatgttatatatttcaaattgtgaacctaaccgatcaatacctctattaaacattcatggcacagcagatccaacattaccatacaatggaaatgattattataattccgttgatgctgctcttaatttttggaacactaataataattccgatcctacacccaactcaatattattaaatactaatctaaac

SEQ ID NO: 202330 - DNA, 457 bp, Unknown
  Bacterial polypeptide expressing nucleotide sequence isolated from the Sargasso Sea
atgggattagaagataaaataaaggaatcaataattttagcaatgaaagctaaagataaaactaggcttgaagctttaagggccgttaaatcagctattttattagaaaaaacaaaggctggaaacaaggaaaatttagatgaaaatcaaattataaagttattacagaagcttgtcaagcaaagaaatgaaagtgcaaaaatttataaagaacaaaatagagatgaattagctgaaattgaggatagtcaatcgaaaattatttcagaatatttaccagatcaacttaatgaagaagagctaataactattatagatgaagttataaaatcaacaggtgctgagtcaatcaaggatatgggtaaagttattggagcaactaatgcaaaggttcttggaaaagctgaaggaagagttgtagctgacttagtaaaatcaaaattaaattccttataaa

SEQ ID NO: 202331 - DNA, 529 bp, Unknown
  Bacterial polypeptide expressing nucleotide sequence isolated from the Sargasso Sea
aatggatttagaaaaattttttcaaaatcaaaataaaaagaagcaagttaaaattttaacatgcggatctgtggatgatggaaagtcgactttattaggcagactgttatacgattctcaaaatgtatttgttgatcaaatggatcaagttaagattgaaagtgaaaaatacggaactcaaggaaaagatatagacctagctttgttaatcgatggcttacaagcagagcgcgaacaaggtattacaattgatgttgcataccgtttctttgaaacaccaaaatgtaaatttattgttgccgatacgcctggacatgaacaatatacacgtaatatggcaacaggtgcttctaattctgatgttgctatcattttaattgatgcacaaaaaggtgttttggagcaaacaaaaagacatagttttattgttaatcttttgggtattcagcatgttgttgttgcaattaacaaaatggatttagtaaattatgatgaacatatctttaataaaatcgtcacagaatataaa

SEQ ID NO: 202332 - DNA, 751 bp, Unknown
  Bacterial polypeptide expressing nucleotide sequence isolated from the Sargasso Sea
ttgggcaaggagaaattagaatctcagatgatcgaagcctacaaagagggattaagagaacttgaaaaaggtgatgttatttatgctgcacgaaaatttaatgaagcagaattactttatccgcaatctgaatgggcttcaaaagcgattttaatgtcagcttatgccttttattctcaaaattattatgaaagatcagttactgaacttgagagattcatatctaaatacccaaagcataaaaatttagattatgcatattttttattagctatgaattattatgagaacatagttgatgaaaaaaaagacctagagcctctattattatcaaaagaaaaatttgaatatataatcacaaattacccaggtacagattttgcccaagatgctgcttataaaattggtttgataaaggatgtattggcatcaaaagaaatgcatataggtaaatattatattaagagaaagaaatgggttgctgcaatcaatagatttaaaacagttgtggaggattatgacactacagtttatgtagaggaagcgctgcataggcttgtagagacatattataaaattgggcttgagcaagaagctcaaaaatatgcaaacgtgcttggttataattatcaatcaagtatgtggtatgaacaatcatataaagtttttaataaaaattatggaacctcaattgaaattaaaaaagataaaaaatcggttctaaagaggtttaaaaatatctttaaatgat

SEQ ID NO: 202333 - DNA, 523 bp, Unknown
  Bacterial polypeptide expressing nucleotide sequence isolated from the Sargasso Sea
aattacggttccaaccccagtcaatacagacaagactcccgacctttcctatgttagatcagcatctaggagcgtaatggaagaaatcgatccagaaagggggacaatcgtagtcctggagagcactgtctatccgggtgtgactcgaaaggaacttggcctaatatgctcggatctgggtatagaaatcggagaacacgtccaaatagcatattctcccgagagaataaatcccggcgatccattgcattctgctagctccgttgacaggattgtgggctgtgatgaccctgagatagggcaatatctggccgaagtctattctaatattacttctgccaaatcatcatttgtcggcccaatcgaagttgctgaggcggccaaacttattgagaatgtccagcgagacatcgacatagccttcgtgaacgaacttgctacggtattgccactaatgggtattgatgtggaacaggtactttcagcagccgcaactaagtggaatttccatcggcatactcct

SEQ ID NO: 202334 - DNA, 910 bp, Unknown
  Bacterial polypeptide expressing nucleotide sequence isolated from the Sargasso Sea
cattgcttcgggaggcattgcggccatcatgtctgggctcataccctccattgcatcgggaggcatcgccgccatcatatcagcatccataccgcccatggcatcaggaggcattgcggccatcatgtccgggcttataccacccattgcatcgggaggcatcgccgccatcatatcagcatccataccgcccatggcatcaggaggcattgcggccatcatgtccgggcttataccacccatcgcatcaggaggcattgcggccatcatatccggacccataccttccatgcaatcgggaggcattgcagccatcatatcagcatccataccgcccatggcatcaggaggcatcgccgccatcatatcagcatccataccgcccatggcatcaggaggcattgcggccatcatgtccgggcttataccacccattgcatcgggaggcatcgccgccatcatatcagcatccataccgcccatggcatcaggaggcattgcggccatcatgtccgggcttataccacccattgcatcgggaggcatcgccgccatcatatcagcatccataccgcccatggcatcaggaggcattgcggccatcatgtccggacccataccttccatgcaatcgggaggcattgcggccatcatatcagcatccataccacccattgcatcaggaggcattgccgccatcatatccgggcccataccttccatcgctgttggcggcattgcggccatcatgtcagcatccataccgcccatggcatcagggggcatcgctgccatcatatccgggcccataccttccattgctgttggtggcattgcggccatcatatcagcatccataccttccattgcgtctggcggcattgcggccatcatatctgcatccataccg

SEQ ID NO: 202335 - DNA, 415 bp, Unknown
  Bacterial polypeptide expressing nucleotide sequence isolated from the Sargasso Sea
gttaaagaattagataatttaagaaaagaattaagagaaaaagacattttatttaaaataacaaaaaatagaattacaaaaattgccttaaaagactctccttgtaaagaattagaaaaatactttaaaggaccaacagctgcagcaatgtcttctgatccaattacctcagctaaaattttaactaaatttgcgaaatctaataaaaacttaaaaattgtagctggattcatggatggcaaggttttggaccaaaaggaagtggctataattgccgctctacctactcttgaagaagcaagggctaaaatagtgggaattttagcttccccagctcaaaaattactaagtattttacttgcaccaggctcaaaaattgctaatttaacgcgcgcaaagagtttaaaaaaataat

SEQ ID NO: 202336 - DNA, 328 bp, Unknown
  Bacterial polypeptide expressing nucleotide sequence isolated from the Sargasso Sea
atgaatctaaataacaataaatttaaacctgggctatattgtgttgctacaccaattggtaatatgggcgatatttcattcagagctattaaaatacttcaggtttctgatttaattttatgcgaagatacgagagttacaaaaaaaattcttcaaaaatttgaaataaatacaaaactcctttcaaaccataaatttaatgaaaataaaaatttagagaagactattgaaatactaaaaaatgataaaatagtttcactagtttctgatgctggaacacctgctgtttcagaccctggaagaatattagttaaagagtgtggttaaa

SEQ ID NO: 202337 - DNA, 292 bp, Unknown
  Bacterial polypeptide expressing nucleotide sequence isolated from the Sargasso Sea
tatgaaaaaagcttattgggttggagtagttaatgtaaaaaatcatactgaatataaaaaatatactgatatagcaggttcagcattaaaaggttttgatgctaaaattttaagtagaggaggcaaaattaaaaatttagagggagattctatgaatagaatagttataattgaatttctatctatggatcatgctgacgcattttataagtctgatgaatatcaaaaaggtcttaagtatcttaatgcagaagttgcagatcgttttttaaatcttgctgaagctatataa

SEQ ID NO: 202338 - DNA, 965 bp, Unknown
  Bacterial polypeptide expressing nucleotide sequence isolated from the Sargasso Sea
aaagacggcggcacggttgtgtccagtggtagcccggttgaggtggcaacgccatacgcgcacaccgacctggataagttaaaatttacgcagtcagctgatgtgatgtacctggtgcatcctgattttgcgccgcgcaagattacgcgcaccagccatacagcctggactattgctgaggtagatttgctgcgcggccctatgggcgaagataacacgacagcaaccactttgctcgcaagtgggcggactggaacggttacaattacggcgagcgcaaacacttttgctagcactgatgttggccggctagttaaagttcacgagggttttgctaaaatcactgtgttcactgacgcgcagaacgtaaatgcaactgtgcaagaaaacacagacggtcgcaccgagcttatgccaagctacaatgcaaccacgatttcagcgcatgagggtgacccatcagccactggcttagagcacaatgaccgctttcaagattcagctggtcagtttgttacccagggtttcaaagttggcatgaaggtgacagtcactggatttacgaccgccaacaacaacgaaacttcagcaatcattgttaaagtaacggacgacacattgctgctagcgccgtcgtcagatctaacagatgaggctgctggtgacagcgtgacaatcagcggcgacctaactgctagcacagactgggcattgggcgcgttttcagccaccacaggccacccttctgctgttgctttctatgaacagcgcctggtgtttgcttcgacgactgagcagccgcaaacgctgtttttctctgtgggtggcagttttgaggatttcggtgccggcgtcgatgctgatgacgcattgacctacaccctgggctcaaaccaggtaaatattattagatatttgcaagcaggtcgcgttttgcttgttggcacgtctggtggtgagtttgt

SEQ ID NO: 202339 - DNA, 475 bp, Unknown
  Bacterial polypeptide expressing nucleotide sequence isolated from the Sargasso Sea
cttggttcaaggaaaatttggcgagttctttgttaatttttctgcaaagcatatgctaaacccaaatacataccatttaatcaagaacgtaaccttgccaacagatgatggtagtacgcaaatcgaccacatcatcgtttcgaagttcggtgtattcgtagttgaaaccaaaaacatgaagggatggatatttggaaaccccaaacaaaggatgtggacacaaaagctctacaaacattcaagcaaatttcaaaatccattgcatcagaactataagcatgtacaaacacttgtatcggtattgggacttaatgatgatcaagtgcattccgtcattgttttcgttggtgatagtaagttcaaaacagaattgcctgaaaacgtaaccaacggtttgagttacgtgaagtacataaaatcaaaaaaatcgccagttctcacgtctatgcaaattataaaaatcaaggatgaatag

SEQ ID NO: 202340 - DNA, 424 bp, Unknown
  Bacterial polypeptide expressing nucleotide sequence isolated from the Sargasso Sea
aatggatttgaaagcttttttcgaaaaacaaaataacaaaaaacaattgaaaatattaacatgtggatcagttgatgatggtaaatctacattacttggcaggcttatgtatgattctaaaaatatttatagtgatcagctgacccaaactcagaaagaaagtgagaagtatggaacacaaggaaaaaaagttgatcttgctttattaattgatggacttcaagctgaaagagaacagggaataactattgatgttgcctatcgttattttgagactgaaaaatgcaagtttattcttgccgacacgcccggtcacgaagagtacacaagaaatatggctacaggagcatcaaattctgatgtagcaattatattaatagatgcttcaaaagggatattagatcaaacaaagagacacacattt

SEQ ID NO: 202341 - DNA, 919 bp, Unknown
  Bacterial polypeptide expressing nucleotide sequence isolated from the Sargasso Sea
gattcaaaaaaaatgaaacctgtacggataaatacaagaaaacaatttttagaaaacctagataatcctgactttgattttgcagatgtaaaaggacaggagaacatcaaaagagccatggagattgcagcagctggggggcataatttgatattaattggaccaccaggcgctggaaaaactatgcttgctaaaaggttctcatcaattttgccaccaatgacgcttcatgaagcccttgaaacaacaaaaatacattcagtagctggaaaattagggagtaagcatggattagtagcacaaaggccttttagaagccctcatcacactatttcagatgtagcactaattggaggaggtacaaatccccaacctggagaagtttcaatggcacataacggtgttttatttctagatgagttaccagaatttaaacgaactgttttagaagtacttcgacagcctttagaggataggcatgtttcaatttccagagccaaattttcagtgaattatccagcgagtttaatgcttgttgcaagtatgaatccatgtccttgtggatattataatcatccggataaagaatgtatttgtcctggtggttccgttcaaaaatacctaaataaaatttctgggcccttattggatagaatagatctacatgttgaagtaacacctgtttcatttgacgaactttctaattccaaacctggtgaaaaaagcactttaattagagagcgagtaatcaaagctcgagaaattcaaactagcaggtataagcactccaaaaaaacacactctaatgctcaaatgaattcttcacaacttgaaaattcctgtttgctaagtaaagaatgtaaatcattactcaaaaacgcaatgaacaaacttgacttatcggcgagagcgtacaatc

SEQ ID NO: 202342 - DNA, 388 bp, Unknown
  Bacterial polypeptide expressing nucleotide sequence isolated from the Sargasso Sea
cttgaaggaaggacagatcagtgatccggtggattcgccttttggcttcatcatcttccaccgtgttccccttgatgtgatcacggccagccacattctgatttctttcaaaggcgcatcgcgttctgaccagaaccgtagcagggacgaagcgaaaaaactggcagacgaacttgcggaaaaagcacaaaagggagaagatttcgccaatctggcccgaatgaattccgatggaccctcagcaccgaaaggagggttgcttggaaccttcggacgcggacagatggttccccccttcgaagaagccgcctttgcactcaaagtcggggaagtcagcggagtcgtagaaacccctttcggttttcatgttatcaaacgtgatcggtga

SEQ ID NO: 202343 - DNA, 321 bp, Unknown
  Bacterial polypeptide expressing nucleotide sequence isolated from the Sargasso Sea
tggggttttcacccaaaggcgacaagaaatttgaaggtgatggcaaaacaccagaaggaaaatattatatagaccgcaagaatcccaacagtcagtattatctatctttaggaatttcttatcctaacgacaacgatagaaaagaagcagcaaagttagggaaatcacctgggggtgatatatttattcatggccgtgacaagtcaccaaaatggtggaagcgcgattggacattcggttgtatagcgatacgaaatcatgaaatggacgaaatttaccgggctgtggctattggtacaccaatttttattcttccataaa

SEQ ID NO: 202344 - DNA, 349 bp, Unknown
  Bacterial polypeptide expressing nucleotide sequence isolated from the Sargasso Sea
atgatcaagaaatgcctgttccccgctgccggttacggcacgcgcttcctgcctgctaccaaggcaatgcccaaggaaatgttgccggtggtgaacaagccactgattcaatacggggttgaagaggcactcgaggctggcctcaaccagatctccatcgtcaccggtcgcggcaagcgtgcgctggaagaccattttgacgtgagctacgagctcgaacaccagatcaagggcaccgacaaggagaagtacctggttggcatccgtcgtctgatcgacgagtgcagcttctcctacacccgccaggtcgaaatgaaaggcctgggccacgccatcctctgcggtcagc

SEQ ID NO: 202345 - DNA, 862 bp, Unknown
  Bacterial polypeptide expressing nucleotide sequence isolated from the Sargasso Sea
tgacagagtaacaaaattaactcgaggtgagttaaaatttgagcttctttcaaaaggtgaagttgttggtatgaaagaaacactagaagctgttgacaaaggtctagtagatggtggtgcagcatggactcactactggtcaaactatcacccagctgcgatgttatttggatcgccagttgctggtggaggaattggtttaagtactaaatcttggttagcatggtatttcgataatggtggtaaagaattatacgaccaattatggagcgaaatgggaatgaatgttaaaggtttcgtgatggcatcatcaggacctgaagcattaggttggtttaaagagccaattaaaaacatggatgatttcagaaaatacagattcagaactcctccaggaattccaggacaaacatacaaagatatcggaattgcatcagtatctttatcaggtggtgatatattaccagcacttgaaaaaggaactatcgatgctgctgaatggtgttgtccaaaaccagactcagtttttggttttcaaaaagttcttaaaaactactatctacaaggattacaccaaaatgtagtaaatggtgatatctatattaatggagatgtttacaattctttaactgaccatcaaaaatatgcaatggaagttgcgtctgaagcgatgatcactagaaacatcactaatagagctgtagaaaatggtaaagcgctaatcgatcttactgaaaatcacggtgtaaaactttgggatacaccagctgattatttcactgagtacatgaacgctgctcaagcaactcttaaaaagaatgctgcatcaaatgctttctttaaagagtttatgagcacatga

SEQ ID NO: 202346 - DNA, 334 bp, Unknown
  Bacterial polypeptide expressing nucleotide sequence isolated from the Sargasso Sea
ttctagaataatagaatcaattaaagaaataccaaacaaggtatgtgtaattggtatcactggaccaccaggtgctggaaaaagtactgtgacaaattgtattataaaaatcttcagagaaaaaggctctagggttggaataattgcggtagatcctagcagcccttttaatggtggtgctgtattaggggacaggataagaatgcaagatcatgcattagacaatgaagtgtttataaggagtattggtagtcgaggcgatttaggagggctatctaattgtgcaagtggaataattagactttttgatatatttgggatgaatatagtaatt

SEQ ID NO: 202347 - DNA, 915 bp, Unknown
  Bacterial polypeptide expressing nucleotide sequence isolated from the Sargasso Sea
tctcaaggaactaggaaagttggacgaagcagaggccagctataaccaagcgatattgttcaagcctgactatgccagagctttgcataacagaagtggtttactatttgataaagcagagtatgaagccgccttgagggatgctgacgcatgtaacttaaaaagagctaaagtgctttctttaatatcgctttatgctttggggcgtatagaggaaatttataaaaggcttgaaaatctgtctaaagttgatgaggaggatatcgatattgccgctttcgcagcctttatatctgaagtagagaaaaaacccacgaaatacaatttttgccccaaccctatcgactttgtacatactgctaatctgtcatctcatgtaagcgaattagatgcctatgtagcaggggtaattgaggagctgaataagatagagagtatatgggagccttctgggaaatctactgtaggcggctttcaatcactcgtaagtataaatttattcgaaaacccatctgagagaatcgctcagctaaagtcaattctgattactgagatagaggcttattatctgaaatttcagaatgaaccgtgctcttatatacagagatttccttccaaaaataatcttcacgggtggactgttactttaaaacatcaaggacatcaggatgcacatattcaccgccttggatggttaagtggggtaatttatttaaaagttgttccatctctagggaaagacgagggtgcaattgaattcagcttgaatggtcaaagataccatgacgctaattcatctaagttaacatttcaaccaaaggtaggcgatatagtttttttcccttcgtcgctacatcataggactattcctttcacaacggatgcggataggattattatttcttttgacttaac

SEQ ID NO: 202348 - DNA, 715 bp, Unknown
  Bacterial polypeptide expressing nucleotide sequence isolated from the Sargasso Sea
atggtaaataaaacagatccatttggcacagcctattcgttgcataaagtaaatgaaaaaaatccgataatatttatacatggagttggtttgaccaaagaaatttgggaacctcaaatcaatttttttaaaaattataatactcttacatacgacttattaggtcatggaaaaacacctttaaaaaaatctaaagttagttttgaagattttactaaacaattagtaaaattaactaaagaattgaatattacaaaatttcatttagtaggtttttcattaggagctttaattgctagggatttcgcttctaagcattgcgataagttaatttcgttaatattacttggctcaatatataaaagaactgaagaccaaaaaagagttgttagaaataggttcgaggtagctaaaatgaacaggccagcttcaaagcaggctgctctgagaaggtggctgtcagttgatttttcaaaaaaaaatcctgatatttataaaaaaatatactctattttagaaaaaaataagcgtttagattttttaaaatgttatgaaattttcgttaactatactgatgatgataaaatgttaaaaaaaattaatgttaatacacttttagctactggggaaaatgatgtcggatctactcccgaaatgtctagaaatttaagtaaaatgattcagagaagcaagtttattgaaataaagaaaggaa

SEQ ID NO: 202349 - DNA, 823 bp, Unknown
  Bacterial polypeptide expressing nucleotide sequence isolated from the Sargasso Sea
tttgccggatggtcaagtgcgcagagacgtgccgacgcaagggaacgaggggcgcatcatcggtcgcggcgggtcgaagattcgcgagttgcaggatcgattccgcactcgaatcaccatgaaccgtcccgcggcgttggcagaagtcgttggtatgttggaacacgtgaacgattgcgccgacgagatcactcgcatcgtcgaggatggtaacattcgcgaagcggcggagcgcgccggtcaaccggtggccaccggcgcgtacagctcgtacggcggcggcggcggcggtggattcggtggtggcggtggcggtggcggtggcttcagcggtcacatggaaagcgtcccgtgcgaaggtcaagaaggccgcatcatcggccgcggcggcgagaacatccgtcgcgtcgaatcgcaaaccggtacccgcatcaaaatgaaccgcgtcgccaacgttgccgaggtgtacggtacgccgcaacaatgcgccgaagcgatccgaatgattcaagaatacattcacaccgcgccgaaccgaggtggtggtggtgctagtttcggccaaggcgggtacggccagggcgggtacggcggcgggtaccaacagcaaggtggctacggtggaggttacggtcagcaaggcggttatggtggtggataccaacagcaaggctacggtcaacagggcggctacggtcagcaagcctacggtgcgcccgcggccggcgccggcgccggcggtcctcttccgcacggttgggaagaagtcaaccccggtaacggaggaccggtttactactggaacaccgtgaccaacgtgacg

SEQ ID NO: 202350 - DNA, 847 bp, Unknown
  Bacterial polypeptide expressing nucleotide sequence isolated from the Sargasso Sea
tgtctggcgggacctatgtattacatagaaaatggtttaaacatgaaatggttggcgattgttttttcagtctgcctattaatgatgtgcttaggtacaggtaatatgcctcagattagtagtatttctgttgttttacttgatacctttaatatacctaagatagcaactggactcgttctttctgttcttgtttggttagtaattattggagggattaaaagaatagctcaaatagcaagtaaattagttcctttcatggctttctggtacgtagtaggagggttagcagtaattattagtaattatgaaaatattattccttcctttcaatctatctttatccatatttttaccccaactgcagcagttggaggttttcttggagctagtgtagcagcggcacttacaagaggtgtaaacagaggcttgtattctaatgaagctggtcaaggttcagcgcctatagctcatgcgtcatcaaaaaccgaaaatccaatagaagagggtatggtttcaattcttgaaccttttatagatacaataattatatgcactcttacaggtctagttatcttgtcttcaggtgtatggaatcagaaatttgagaataaatttgaagctagcgctatggtttttgtagatggaacattctctgaagttaatcaagaagatgcaactcaactaagggattactattacggtaacaattctgaaattgaatataacggaacaattgaggtagttgatggagtgttaaatttaaataaagtaacacttcttcacaatagatcgatagctgaaaatacacttgtttatctatctcaagacaatactgtattctcag

SEQ ID NO: 202351 - DNA, 751 bp, Unknown
  Bacterial polypeptide expressing nucleotide sequence isolated from the Sargasso Sea
aaaaagaataagagaagactttttaagaatattgagatatgtcagatttttccttaattatagtaaaacaaaacatcaatcgaatatcaaaaaaattattagacaaaatataaatggcgttgctaaattatcaaaagagagattgcttactgaattagaaaaactattactttctagaggttttattaatttatccaaggacgaattttgcaaagaaataatattacttatatttccgcaattaaaaaatttaaatacctttaaacatattaacaaatacaacaaaagtttgatttctaaaaaagactttatttttttattgtctttattattaattgatgaaactgataattcagattattttttatacaaatttaatctttctaattatgccaaaaataaaattaattttttaaaaaaaatatactgtaagccaatagataaaaatactttttcaaaaaaaaatttacaaaaggtattatattattatggtaattcatatttagaagatatgattgattttaagttatttagatcaaataaaataaatacaaaactaattgaattaaaagaatattttaagaaaaaagaaagacctttatttccaataaaagcaaatatcataatggaaaaatacaatataaaggaaggaaaagaacttggtgacaagttaaagaatctggaaaacttatgggtagaaaatagttttaaaattaatgataaagatgtggataatgttttttcaaattaa

SEQ ID NO: 202352 - DNA, 510 bp, Unknown
  Bacterial polypeptide expressing nucleotide sequence isolated from the Sargasso Sea
tttgtaaagcttacaacgcagatttcgatggcgatcaaatggctgtgcacgttccgctaactttagaagctcaacttgaatgccgtgccttgcttatggcaagtaacaatattctttctccttcaaatggtaggccaatcatagatccatcccaagatgttgtgttaggaatttactatatgacaagagaaaaaattaatgcaaaaggtgagggatctatatttgcagacgttaaagaagtgtccagagcttttgaaacaggtgcagttgaacttcaagcaaaagttaaagtaaggataaaagatagagaaggtcaaactgaacttaaagatactacagttggaagagcattactttatcaaatctctccagatggattaaatttccaacattttaataagactttaacgagcaaaggcatttccgatctaataaacacttgttacatgagattgtggtttgaaagatactgtaatttttgcagatcagctcatgtatcaaggttatgaa

SEQ ID NO: 202353 - DNA, 943 bp, Unknown
  Bacterial polypeptide expressing nucleotide sequence isolated from the Sargasso Sea
ccaagtagagcagctatgttgagtggaaaatatccttcacaagtgggtctcagagattttttgatgttgaatgacaattatgaaaatcaaggcataaatccaaatacagtattgtggccaaagcttctgaaagatcacggttatgtaaccggcctaatcggaaaatggcatctcggtacagatgaaaatagaaaaccaaccaatatgggatttgagcatttcattggttatgatcaggatctctctccgtatgaccccaagctcagtgttcagggtcaagatatggtaataaagggacatacttccgaaatattcacaacctatgctaagaattttatctctgaaaataaagataataaatttgcattggttgtagcgtttcgcgaacctcaaatgccttgggagggtgttccagagattgatcttgatgcggttaaaaatatagatcctgaagtaccagattttgaaggtgtaaataaagaatggttaaagaagattactcgagataattatgcgtctgtccatgctcttgatagatccattggcgaaatttatgatcacctctcagataacgatttattgagcaagactataattttctatgtaggcgatcacggcatactcattgggcaccataatgcattcggaagaggggcgattggtgttatttcaggagataaagttgtaggttatgaggggattgcaaatctttatgaggaagcgataaaaatcccatttattcttcatctccctgaaaataaaagagatggtcttgtcagtaaagtcccagtatcaaatattgatattttccctaccattttatcctatcttggcttggatgttccgaaagatttggagattgaagggaaagatattcttcggttggttgaaaatgaggctgaatcaatgcatcgatctatttatgctcaatatagtatgagaa

SEQ ID NO: 202354 - DNA, 367 bp, Unknown
  Bacterial polypeptide expressing nucleotide sequence isolated from the Sargasso Sea
atgattaaaagtaatgaagcctataagtccatcagtgaggttgctgaaatgttaaatttaataaaccccaaaactggaaaaatttcaactcacaccttgagattttgggaacaggaattcgtacaaattaaacctaaagtatttgcaggaaaaaggagatattatgataataaaactattgaaatattaaaaaaaattaaatttttgcttaaagataaaggtatgactgtaaaaggagctaaaaaatacttgtcaggtcaagaaacttatcttgacgaaacagtcaatacaactataaacacaaaaaatattttgaaatctaagttaagtaaaattaaaaaaattgttaaggaactaaaaaaatagc

SEQ ID NO: 202355 - DNA, 458 bp, Unknown
  Bacterial polypeptide expressing nucleotide sequence isolated from the Sargasso Sea
tctgcaagattcgcagcacgcgaagtttttttacactgatatcgtgactgagatcagcggcaaaatcactccggaaaacctggctgcacgtctttacatggtgccggttccgaccttcgtgcgcaaccaggctcgcaacatcgcgtccgtgacttcgaacgctccgctgctgctttgtgggcctcctggtgctggaaaaaccgaaaatgcgaaacaaactgcaatgctccacgggcgagaatccgaacgcatcaatttctcgggcagcacgacggttgagcatctcttcggaagccgcattcctgtgatggagctagacacgagtgacggagacccgcgaaaaggcaagaagggcaagggtgacgcagccgcaccgaagatgcgtcgtgtgtttcgctggcaggatggtgttttgctggaagctctgcgtggaaacaaatggatcattcttgacgagc

SEQ ID NO: 202356 - DNA, 721 bp, Unknown
  Bacterial polypeptide expressing nucleotide sequence isolated from the Sargasso Sea
ttaccctattagttttttatggaatcaaattagccctaatggcacagtatggtctttgggaataggggaaaatgataggttgtattatcttacaccatcaggattaaattattatgatttgaaacctggatccaatcctgttgtaagtgagaatttatatccatatttccctaatatttcttttggaactggatcaaaaatcaatattgattttcaaggtaatgtctgggctagctcaagtagtcaaggtgtctatgttttacaagaaaacacgtcttattggccgaatttagaaggttttaacagcctaaatagtgatttgctatcagatgaaataagagatatcgattttgatcacaaaagaaatttagcatatatagctactagcaatggagtaagtgtattaaaaattccttttggtataccaaaaaatgattttacgaatgtaaaaattttcccaagtccttattatgtgccatcaaataatccgatgatcatagatggtattatatatgaatcatcttttaaggtaatgactctaaatggcaaagtaataagggaagtaacatctaaaggagcttcgaaagatggtcaacagttaaaatgggatggtagaaatagcaaaggtaattatgttgctacaggggtatacctcctgatgatttataatcaagatggtaaaaatactatcgaaaaaattacggttatcaataaaagctaa

SEQ ID NO: 202357 - DNA, 443 bp, Unknown
  Bacterial polypeptide expressing nucleotide sequence isolated from the Sargasso Sea
attgaaaaaaagaaaaaaaaaaactaagatttttatagctgtagatggtggtagtgcttcggggaaaacgacggctgcagaatttttaagttcttactataatattaattttttatctagtggtagactttataggtattgtgctttaaaaattattaataataaaaacaattataacaaattatttattaataagattataaaatctttaaaagatacgagtttaaaaaatagtaaattatataataaagaagtaaccaaaaagtcatcagaaattgctaaagttaaatatataagagagtctttgaaaaagtttcaattaaaattttataaaaatttagatggagctataattgaaggaagagatataggaacaaaaataatgcctaatgcagatttaaaattattctttgtatgcagtgcaaaagaaaaggctagaagaa

SEQ ID NO: 202358 - DNA, 797 bp, Unknown
  Bacterial polypeptide expressing nucleotide sequence isolated from the Sargasso Sea
ccaacatccagcgcagcaacggctgatttttgaagaattagtttcgcagcagttgtcgatgctgcaattacgccagcaatgccgggtacaacaaggccgcagttttgttgtagatgaaacccagaatcaaaagtttttagcggctttgccttttgcgccaacagctgcccagctgcgggtcattcacgaaattcgccacgatttaagccaaaatgaacccatgttacgtttagtgcaaggggatgtaggttctggtaaaacgctggtggcagcactatcggctttgactgtgttgagccgtggcgctcaggtcgccttaatggccccgacagagctgttagcagaacaacatgccaacactttcaaagcctggctggagcctctgggttatcagattgcctggctggcgggtaaagcttcagtcaaacaaaagcagttgcagctctcagccatccaaagcggagaagcgcaaatggtgattggcactcatgccttgtttcagcaacaagtacaatttcaacaactggctttagtgatcatcgatgagcaacacagatttggtgtacatcagcggctggagctaagggaaaaaggcgcagataccggcttttatccgcaccagttggtgatgacagccactcctatcccccgcactttagccatgacagcttacgccgacttagatacctcggtgattgatgaactgccgccaggtcgcactcctgtcactactgtggtgctgcctgatagccggcgcgccgaggtgacagaacgggtgcgtcaggctgtacagaatg

SEQ ID NO: 202359 - DNA, 313 bp, Unknown
  Bacterial polypeptide expressing nucleotide sequence isolated from the Sargasso Sea
attgaataaaaaacattttttagagaaattattaaaatctgacattagatctgtagctaaactaataactttaatagaaaacgaagaccctatagctgaatcacttttgaaaaatatttggaataaaacgggaaattcatatattataggaataacaggacctcctggggctgggaaatctaccattgttgattttctagctaaatttctggctgataaaggaaaaaaagtagcaatccttgcagttgatcctacaagtcctttctcaggaggtgcagtacttggtgatcgtctccgtatgtcaaatgcacaa

SEQ ID NO: 202360 - DNA, 267 bp, Unknown
  Bacterial polypeptide expressing nucleotide sequence isolated from the Sargasso Sea
gatgaaaattaaaaaagcagtatttcctgtagcagggtttggcacaagatttttgccagcaacaaaatcaactccgaaagaaatgttgcctgttgtggacaaaccacttattcagtatgcagtagaggaagcagctgagattggggtaaaagaattcatcttcataacccatcatgcaaaaagttcaatagagcaacactttaaaaagaatgagggccttttcaatatgcttatcaaccaaggaaaagaagatttggctaattcata

SEQ ID NO: 202361 - DNA, 649 bp, Unknown
  Bacterial polypeptide expressing nucleotide sequence isolated from the Sargasso Sea
gggtggtccaagaattaaaagagaactagataaatcaaatattcaaacaaagtttatcaaaggtttaagagtaacagatgaaaaaattataaaaatagttgaaaaggtgttaattgaatttaatgaggatatagtttcctctttaagggtaaaaggattcaatgcagtgtctttaaatacaaaagaaaataatgttatcgaggttatgcccgaagcgaaggaactaggatttgttggaatacctaacaaaattaatgttgaaaaaataaaagataaaattaataaaaagttaattcctgtaatatctcctcttggtttagacaataataatcaaacatataacataaatggagataatgccgccggagcaatcgcaaaatccctgaaatctagaaggttgcttcttatgacaaatgttgaaggggtactagataaaaacaaaaaattaatacatgaaatttcgtcatcaaagatcatagatatgatcaaagatggtactataacagagggaatgatacctaaaataaatacatgtttagatgcaataaataatggtgtaacagccgctgccataatcgatggtagaaaaaaacattctgtattatttgaaattttttccgataaaggttcaggaacactaattagataa

SEQ ID NO: 202362 - DNA, 637 bp, Unknown
  Bacterial polypeptide expressing nucleotide sequence isolated from the Sargasso Sea
cctgaatcgagttttagttcatgcacatggaaccggcactccccaaaacagggttactgaatcacatattctatccagtcttgccaatgcatttggtattgcagctatgccagtgactgcaattaagtcccatttagcacactcattggcagcggccggaggagatcaactaacctccatgctaggttcatggcaactggatattgtcccgggaattacatccacccctgaacttgcggagaatgtttataaatctaatttaaattttttactcaagaatcaacagatagaaaaaacagaatatgactttgcaatattaaatgcgaaaggcttcggaggtaataatggcacttccctgatcatgtcacccttcaaaaccatcgaaattctcaagcaaaaacatactgaaaaaaaatggaaatcatttaaaaaagttcaagagaatataatcattgaattagaaaattttgataatgaactaagatctaagccaccccttgcaaggtataaatttggagaaggagtgattgatggtgaatctgaactagagttctcaaatacagacttgattattaaatctaacaatcaaaaaattagtattaaatctgagctaccatacaaaaaattccttaagtaa

SEQ ID NO: 202363 - DNA, 405 bp, Unknown
  Bacterial polypeptide expressing nucleotide sequence isolated from the Sargasso Sea
tatgtctggctatgttttagctattgaccaaggaacttcatcaactagagcatttttgttcgatgcgaaacaccgtatcgcagcacacgaaaaaattgagctcaagtcgcattttcctcaatcaggctgggttgagtgcaatcccgaggagatttgggcaacgacacttttggcgtgcaataaagcaatggcgaaaataaatatctcacctgaaaaaattgctgcaatgggaattacaaaccaaagagaatcagcggttatttgggaccgccggagtgggaaagctatttatcctgccattatttggcaagaccgacgaacttccaaaatatgcgccgatatgaaaaaaaataattttgaaaaatttgttactgagaaaactgggctactactggatccttattt

SEQ ID NO: 202364 - DNA, 559 bp, Unknown
  Bacterial polypeptide expressing nucleotide sequence isolated from the Sargasso Sea
actggcttataatagtcaggaagataataaaaataaaccaaagggtttcgacgactttgagctaaagctcggagacactttacgtggcgagcgagccactatgggaaagtgtgtcgtagaggttcaaaacgaactcaaaattaaggctgcttatatctcagcaatagaaaattgtgacccacttgcatttgacacaccaggttttgttgccgggtatgtccgttcttacgcacgatacttaaatttagatcccgacgaagtattttcaaaattctgttcggaaagtggcttttctaccgttcacggcatgtcagataaagcttcttcggtaaaagaaaaatctaattctgtcttgttaccttccgataattttattgatggtgaagagcttttcaacaaatcccccacggctatattagacagctcctctaaaacctttgataaaattgagcctggtgcgattggttcaatagctgcattgatctgtatagtgtgtggaataggctatggcggattgacattatttaatcaaatgcaaactgttaaaatatcaccttct

SEQ ID NO: 202365 - DNA, 634 bp, Unknown
  Bacterial polypeptide expressing nucleotide sequence isolated from the Sargasso Sea
ctcaggaaaaagcacagtagcgaacgcagtaattaatttaattgatgaaccaggtaaagtttcaaatggtacaattacgttagccgatatagatatcaataaagatactagtaaggttattaattatagaggaaaaaaaattggtctaatatttcaggatccacaaacttctttaaatccaatattaacaattggtgagcagttaatagagactatacaaactcatattagtttaagtaaagaagaggctaaaaaaagatcaattaatttactaaaagaagttggcattaaagatgctgaaagtagatttgataattaccctcatcaattctcaggaggtatgagacaaagagttgtgatctcgcttgctctatgctgtgaacctgaactattaattgcggatgagccgacaacagctcttgatgtttctatacaatcacaaattcttgatctcattaaaagattaacgcgagaaaggaatcttgcagtaattttaattacacatgatatgggagttattgctgagacaactaacagggttgctgtaatgaaaaatggaaatctagttgaacttggtccaactaaagaagttttaactaatcctaaggaaatttatactaaaagtttggtaagt

SEQ ID NO: 202366 - DNA, 853 bp, Unknown
  Bacterial polypeptide expressing nucleotide sequence isolated from the Sargasso Sea
cttactttaaggggttcaggtactggtaattatggacaagctgtcccattgtttaaaggtgttgtaatgcagatgagtcacttcaataagttggaagaatttgattcagatacaggttttgtaaaagtacagtctggctgtgttatgggagatttgaataaacaattagagaaatatgggagggaattgaggttgctgcctagtacttggaaaactgcaacaattggaggttttattgcaggcggatcaggaggtattggttcaattaggtggggattcttaagagatccaggaaatcttattggcttagaggcggtaacaataaatgaaaaacctgaattattaaggtttgatgctgaagaatccgaacctttaaatcatgcttatgggactaacggaataattacttctttaatacttgctactgatatcaaacgtaagtggtattcaatagttatcgactgtattgaatttgaaaaaacaattgaaatattaaaaactcttaccagcgcagcaattgatctgaaactaggagcaattcttgaagaagaaattgtagatcaaatgccaaaatggtttaaaagtaatgctagaagtcacaagatattaattcaatctacttttggaggaacaaaaacgatcgagttgatttgtaaaaaattcaaagttgaatttaccctccttggtgaagaagaaaaactcgttaatggaatttctgaagtcgtatggaatcatacaactcttcatatgaggtctaaggataaaaattggacttatttacagatgcttttgccacttaataatgaaattgaattgattaattttctgaggaaaaaatggggtagaaacgttc

SEQ ID NO: 202367 - DNA, 928 bp, Unknown
  Bacterial polypeptide expressing nucleotide sequence isolated from the Sargasso Sea
tattccttctgatttaccagagtggataccaaataaaattatactagaaaataattggcctacattttctaaagcacttaagtctattcacattccaaatacaatgattgaagttgataacagaagtttatacttacagagattaagctttgatgaagtttttgcaaatcaattaggaatgcaaatttataaaaaaaagtaccaaattttaaatgtaaataaaaaagaaagaaaatcaaaatatttttataaatgtttaaaaaatttaaattttaatcttactcattcacaaaatgaatgcattgaagatctatattcagatctttgttcaaaaactcaaatgaaaaggattttacaaggagatgttggaagtggaaaaacaatcgttgctattgcagcaattctaaatgtgattgaaaactccaaacaagctgcattaatggcaccaactgaattattatctactcaacattataaatttattaaaaatttcacggaaaatcttaatattgaagtagctcttttaacgtcaaaaatagataagaatgaaaggatttccatattagataagatttcaaatggttatgtagatattgttattggaacccattcattaatttctgatagagtcacatttaataatttagggattgtagttattgatgaacaacataaatttggagtgatacaaagaagcaaggtccttgctaaaggagaaaacgtgcatttgttactcctaactgctacaccaataccgagaagtttatctatgacaatgtatggagatctagacctaagcgaaatcaaagagaaaccaaaaaatagaaaaaaaattataactagggttttaccattggaaaaatatgaaaatgtaaaattggcaatcgctagagcacttgaaaatgaagaaaaaatttattggggtatg

SEQ ID NO: 202368 - DNA, 658 bp, Unknown
  Bacterial polypeptide expressing nucleotide sequence isolated from the Sargasso Sea
aatgaagaactcagataataatattaatgataatattaatttagatgttttaaaaagattaaactatatttataggtcaattatatctgctgacaaaactcttgattattcaaaaaaaattaatcaactaattaatctttataaatcaaaaaatatttcttccgatgttaatgagccctggtctgaaaaaactactttactgattacatacgcagataatgttaaaaatgggctgtatggaaaaacaataagtgattttatttcattttataataaatttttttctttattcatagacagcattcattttttacctttttttccatcaagtggagatggaggtttttctgtaaaaaatcatgaagctatagacccagcatttggaacttgggatgaaataaaaacattatcaaaaaatgctaatgttatgacagatttggtcttaaatcacgcgtcttctgaagggaagtggtttaaaaattttcttttgaacaaaaatccaggtaaagactatttttttacaattaataataattacgattatagtaatgttattagaccacgagatcacgatcttgttaaaaagattaaaatattaaatgataccaaaaatttatggtgtacattcagttatgatcaaattgatttagattttaga

SEQ ID NO: 202369 - DNA, 718 bp, Unknown
  Bacterial polypeptide expressing nucleotide sequence isolated from the Sargasso Sea
ccgcggcgaccgggagcacccctccagcctgggccagttgtgcatcaagggggccaccgtcggcgacaccctggccaggggccgcctgcgccaacccctgttccgcagcaagctcacagacgactttgcaccaatcagctgggacgacgctctcaacacaatcaccggccagatccaggcgagcgtggccaggcgcggcaacgccgatggcatcgccatgtacggctccgggcagttccacaccgaggattactacctggcccagaaactgctgaaaggcgccctgggcaccaacaatttcgatgccaactcgcggctgtgcatgagctcagccgtggccggctacagccgcagcctgggttccgatggccccccctgcagctatgaggacctcgaccactgcacggtggcttttctgatcggcaccaacaccgccgagtgccatccagtgctgttccagcggctgctgaagcggaaacgcaagaaccccggcagcgtcacgatcgtggtggtggatccccgtcgcaccgacaccgccaaggccgccgatattcatttgccgattgcccctggcagcgacctggccatgctgcatggcattgctcacctggtgctgcgggacaacggccaggacccggccttcatcgacgaccacaccgagaactacgacgccttcttcgacgtggccgcccgctggacccccaggcgagtggccctg

SEQ ID NO: 202370 - DNA, 691 bp, Unknown
  Bacterial polypeptide expressing nucleotide sequence isolated from the Sargasso Sea
ggaagggaattgaggttacttcctagtacttggaaaactgcaactattggaggttttattgcaggtggatcaggaggtattgggtccgttaggtggggatttttaagagatccaggaaatcttattggtttagaggcagtaacgatgaatgaaaaacctgcattattaaaatttgatgctgaagaatccgaacctctaaatcatgcttatgggactaatggaataattacttctttgttacttgctactgatattaaacgtaagtggtattcaatagttatcgactgtattgaatttgaaaaaacaatagaaatattaaaaactcttacgagtgcagcaattgatctgaaactaggagcaattcttgaagaagaaattgtagatcaaatgccaaaatggtttaaaagtaattctagaagtcacaagatattaattcaatctactcttggagggacaaaaacaatcgagctaatttgtaaaaagttcaaagttgaatctaccctccttggggaagaagaaaaactcgtcaatggaatttctgaagtcgtatggaatcatacaactcttcatatgaggtctagggataaaaattggacgtatttacagatgcttttgccacttaataatgaactagaattgattaattttttgagaaaaaaatggggtagaaaagttctttggcatttagagg

SEQ ID NO: 202371 - DNA, 753 bp, Unknown
  Bacterial polypeptide expressing nucleotide sequence isolated from the Sargasso Sea
aatgacttttcttaaaataagtaatttgagtgtcgactacaaaatgagaaaagaaactgtaaatgctgcaaagaatataaatatagacattaaaaaaggtgaaatagttggattagtcggtgagtctggttctggaaaaagtactgtcgctaatgccattgtaaacttaattgatgaaccaggtaaagtttcaagtggatcaatttctatgggagaaacaaatatcagcgaaaatccagaaacaattgttcagtatcgaggaaaaaaaattggattaatatttcaagatcctcaaacctctttaaatccaattttaacaattggtgaacagcttatagaaacaatacagactcatttaaatttaagttcagatgatgcaaaaaataaagcaattaatctattaaaagaggtagggatcaaggatgccgaaaaaaggttttataattaccctcaccaattttctggtggaatgaggcaaagagttgttatttctcttgctttatgttgcgagcctgaattattaattgcagatgaaccaacaacagcactagacgtttctattcagtctcaaattctcgaattaataaaaagattaacaaaagagagaaacttagctgtaatacttattactcacgatatgggagttatcgctgaaactacagatagagtagctgtaatgaaaaatggagacttagttgaaataggtttaaccaaacagatattggttgagcccaaggaaaatacacaaaaagt

SEQ ID NO: 202372 - DNA, 496 bp, Unknown
  Bacterial polypeptide expressing nucleotide sequence isolated from the Sargasso Sea
atggatatagaaaaattttttcaagatcaaaataaaaaaaaacaagttaaaattttaatatgtggatcagtagatgatggtaaatcaactctattaggcaaattactttacgactctcaaaatgtttttctagatcaaatggatcaagcaaaaattgagagtaagaaatatggtacacaaggtaaggaaatagacctagcattactaatagatggcttacaagcagaacgtgaacaaggaattaccattgatgtcgcttatcgcttttttgagacttctaaatgtaaatttattgttgccgataccccaggacatgaacaatatactcgaaatatggcaacaggtgcttctaattctgatgtagctattattttagttgattcacaaaaaggtgttttagagcaaacaaaaaggcatagttttattgttaatcttttaggtattcagaatgttgttgtggcaattaacaaaatggatttagtaaattatgatgaaa

SEQ ID NO: 202373 - DNA, 694 bp, Unknown
  Bacterial polypeptide expressing nucleotide sequence isolated from the Sargasso Sea
tacgtcgccggttccaccgtcgtgtacggtcacctcggcaagaccgggggccaatccttcctccgcggccacgacgacgacgtcacgtgcatggcggtctcccactccgggaagctcatcgcgaccggccagacgggcgtcaacgcggacgtcgtgctctgggacgccgtcaacggcaaagaactgttcaggctgtcggagcacgacgagggcatcgcgtgcctcgccttctcccccgacgacaggctcctcgtgtcgtgcggcattcacgcggacggcaagatcttcgcgtgggacacggagacgggctgcatcgtcgcgaacggcgccttgtccccgagggagaccaacgccatcgcgttcgcgcccaaaattcaacgcaacggaacgtactacaccttcgggaccgcgggcaaagaagaggtggtcatctggggttgcgacgccggccgagggctcatcggaggccagaagtgcggcaccggcaacaccaagcggtacttcacgtcgtgtatcttcagcccggactcgcaggagctctacgcgggatcgaagagcggagacatatccacgttaaacacgcaggggtgcgtcctccggacctggtctccgtgctgcaagggcgcggcgcaggtgttcatgcccgtggacgggggccggtactatctcgtcggcggcggcgacggcagcgttg

SEQ ID NO: 202374 - DNA, 895 bp, Unknown
  Bacterial polypeptide expressing nucleotide sequence isolated from the Sargasso Sea
gctatgtcccctaatcctgatttaattgtgtttgatgagcctaccactgcactagatgtaactacccaggttgaggttcttgccgcaatgcgtgatatcgttaaaacctatggcacagcagcaatttatataacacatgacctttccgtcgttgcgcaaatggcggataggattaaggttttgagatatggtgaagaagttgaggaagcaatgacacgaaaaatgttaaagtctccaaaagaagattatacaaaaagcctttggtctgttcgatctattcaaaagcccgagaaaaaaagtaaagacattattttagaggtcaaaaatgtagatgcgttctatggaagttttcatgtgttgaaaaatattaatataaaattgcccttgggccggacggtggcattggtaggtgaaagtgggtcagggaaatcaacggtggctcgcgtgattactggattactggagccaaaaataggttctgtaaaattcaaaaatcgtgaattgcctccatctctgaagggaagaactaaagaccaacttcaaaaaattcaaatgatctatcagatggctgatgttgcaatgaaccctaagcagaccgtttatgatattatcagtcggcctgctagcttttttgctggcttaacaggtgctaatttacgaaaaagagtaattgaactcttagagcaaatagatctagatgaaagttttatagacagatatccaagtgaactatctggggggcaaaaacaacgcatatgtatagcaagggctttagccgctaatccagaggtagtaatatgcgatgaggtgacttcagcattggatcagatcgtccaagagggaattcttaagcttttaggacgattgcagaaagacttgaatctctcctatattt

SEQ ID NO: 202375 - DNA, 797 bp, Unknown
  Bacterial polypeptide expressing nucleotide sequence isolated from the Sargasso Sea
tattgaatatcaaacaagaaaagaaactatttatgcaagtaaaaatgtttcattcaatctccaaaggggagaaattattggtattgttggtgaatcagggtcaggcaaatcaactgtagctaatgcaattataaatttgatagataaaccagggataattaccaatggttcaataaggcttgatgacagagaactacataatgatacagatgtaataaaaagcattagaggtaaaaaaattggctttatttttcaagatcctcaaacatctcttaatccattatttaaaataagagatcagttgattgaaacaatacaaactcattcagacctcaattacaaagaagcagaaagtaagtccattaacttactgagggaagtagggatagaaaatcctaaaaaaagaattaatgattatcctcatcagtttagtggaggaatgagacaaagagtagttattgcacttgcaataagttgtgaacctgacttgattatagctgatgaaccaactactgctcttgatgtaagtatccaatataaaatattacaactattaaagaagctcactgtagaaagaaatttaggtattataattattactcatgatatgggtgtaattgcagaaactactgacagggtaattgtcatgcgacatggcattatagttgaacaagggaaaaccaaggatgtattgttaaaacccaaatctttggagtgtaaaagtttagtaatgtctgttcctccaacaaataaaaaaattgatagatttaagttgctaagtccagaaggaaaacaaa

SEQ ID NO: 202376 - DNA, 739 bp, Unknown
  Bacterial polypeptide expressing nucleotide sequence isolated from the Sargasso Sea
attggcacaacccaaatcggttgtgccgaatgtccacatacgaaacccgttcaagcgggggaatgtgtcggtacccaaaaaggtggaagccgtccttgctcctgctgccgcaccgtcgacgcaaacacaagtggcgggggttgctgccttgattgcctatcaaaagcttgtatccgaagtcttcaaagcgaccaacgtcaagttccctgccatgttgggagcttgtatgtcgctctttgccattcttctcggaactgaggctgttaatccatccttggctcaatccatctttgatgggttgacacctggagccaaccttttggcaaaatggcttcccatgttcttcgcccctgccttgacgctgttgcccctgtcccctccaattggaagtgctaccgaagtcgccaaggttttcttgactgtagttattggatgggtttactctcttattaccactgcattctgtgtcttggccttgcgcaaggcgcagggatctgtgtcgcagggagccgtcagcaaacctcccgctgcggcaggcaagccctttagtcaagaaactctgtccttctttaccaaggcttttgtcgttacgggggcaatcagtatcatggctacgcgtacaggatttgagtatgcgcaaccaattcagactgtctttatgacatgctatacaattgcactctatgtgtttgccgctcgtcttccgacgggctttgtcaagcttgtgcatcctctcgtc

SEQ ID NO: 202377 - DNA, 673 bp, Unknown
  Bacterial polypeptide expressing nucleotide sequence isolated from the Sargasso Sea
aatgaaattagataaattaaatttagatggaaaaaaaagctcaattgaagttttagataagattttttcagcaaaaattaatcataaacttgtaagtagtgttttatataagacaaatgctaattacaaaggtagacatgctaaaacaaaacaacaaaatgaggtatctggacctacatctaaaatttatgctcaaaaaggaacaggtaatgcaagacatgctagtaaaaaagcaccaatttttgttggtggtggtatagcacatggtcccaaaggtcagttggcttacaaaaccagaaaattaaataaaagtgaaaaaaaacaaagtattgcatcattgattactgaaaaaacgcttaataaggatttagtagttttgaacgattttaataatgaaattaaaaaaacaaaagaaatgagtttaattttaaaaaaatttgagattcttaattctttaattattttagataaaacctcaaaagaaaaaattgaaaaatcaataagaaatattccaaatattaaagttacagacataaatcactttagtgcattcgatattattaagtttaaaaaaattgtttttactgaaagttcagtaaaagaattagaaaaaaaggtatgcttaaaatggaaaaaatacatttatacgataaaatcttgtcacctttgctaa

SEQ ID NO: 202378 - DNA, 458 bp, Unknown
  Bacterial polypeptide expressing nucleotide sequence isolated from the Sargasso Sea
aatggatttagaaaccttttttaaaaatcaaaatgaaaaaaaacagttaaaaatcttaacttgtggttctgttgatgatggtaagtcaactttacttggtagacttatgtatgattctaaaaatatttatagtgatcaactaagtcaaacacagactgaaagtgaaaagtatggaacacaaggaaaaaaaattgatctggcattattaattgatggccttcaagctgaaagagaacaaggaataacaatagatgtagcataccgttattttgagactgaaaattgtaagttcattgttgcagacacccctggtcatgaggagtacacaagaaacatggcaactggagcttcaaattctgatataggtataatattggtagatgctacaaagggaattttagatcaaacaaaaagacacacttttatattatcacttcttggaattgaaaatataattg

SEQ ID NO: 202379 - DNA, 895 bp, Unknown
  Bacterial polypeptide expressing nucleotide sequence isolated from the Sargasso Sea
atgattttagctttagtatttgcagtttcagtaattggatctgcttctgctaaaacattaaaaatccaacttacttttcctaaaacatcatacgatggacaaatcgtaaaaatgtggactgacagagtaacaaaattaactcgtggtgagttaaaatttgagcttctttcaaaaggtgaagttgttggtatgaaagaaacactagaagctgttgataaaggtctagtagatggtggtgcagcatggactcactactggtcaaactatcacccagctgcgatgctatttggatcgccagttgctggtggaggaattggtttaagtactaaatcttggttagcatggtatttcgataatggtggtaaagaattatacgaccaattatggagcgaaatgggaatgaatgttaaaggtttcgtgatggcatcatcaggacctgaagcattaggttggttcaaagagccaattaaaaacatggatgatttcagaaaatacagattcagaactcctccaggaattccaggacaaacatataaggatatcggaattgcatcagtatctttatcaggtggtgatatattaccagcacttgaaaaaggaactatcgatgctgctgaatggtgctgtccaaaaccagactcagtttttggttttcaaaaagttcttaaaaactactatctacaaggattacaccaaaacgttgtaaatggtgatatctatattaatggagatatttataattctttaactgatcatcaaaaatatgcaatggaagttgcgtctgaagcgatgatcactagaaacatcactaatagagctgtagaaaatggtaaagcgttaatcgatcttactgaaaatcatggtgtaaaactttgggatacaccagctgattatt

SEQ ID NO: 202380 - DNA, 523 bp, Unknown
  Bacterial polypeptide expressing nucleotide sequence isolated from the Sargasso Sea
tggcatcaggattcgacctacaccgcgaatcgacccgaaggaaggcatcaccgtctggattgccctgagcgaggccagttccgaaagcggatgcatgcagatgattcccggaagtcaccataatggcatcctggaacaccatgaccgtttcggggaaaacaacatcctcacccgggggcagacgattgaaggcatcgaaaaggagcgtgctgttgatgtgacactcaaacccgggcagatctcactgcatcatgtcaggaccgtccacagttccactccaaaccggagcgatgaccggcgtatcgggcttgcactgcaatccttcattgccgcctcggtgaaacagaccctgggagaggattacgctttgtcggtgctgggacaggacccgtttcagcactttctccgcgcccgcagaccccgatccgataatgaaccggaggggatcgcctttcgagaagccgccaatcaaaggctctccgacatcctctatcatggatccgagttgaaacgggattattga

SEQ ID NO: 202381 - DNA, 649 bp, Unknown
  Bacterial polypeptide expressing nucleotide sequence isolated from the Sargasso Sea
tcaagtttctgttgttggagaaagctttgccaaagctgatgtatatgtttcaaatcatgtgtcatggctcgatatattggtaatacaaactttgttagacgtggtgttcgttgctaaatctgaagttaaatcatggcctggctttggctttttggcgaagattgctgatactgtttttatcgatcgtcgagtgatggctgctaaaagccagcaaaaagaaatggctagccatctatctttaaaaaaaacactttacttttttccagaaggtacaagtagtaatggtttaagcgttttaccttttaaatcttctctatttgagtctatgactcggataaaagcacacaatgcgaacgctattatgatttgtccaattacgctaaaataccaccagccgactggtcggtcgcaagatttttttggatggtggggtgacatgtctttggccacgaatatagttcgggtagttgcttttggcgcatcaggccgacttgaagttattttccaccgtgcgtttgatgcgacgttgataggagatcgaaaaaaaattgctaacctttctgagcttatggtcagagagggtttaaatgatatagcgtctgcgaccactataaaaaatctggttctcagaaagaaagataagtcctag

SEQ ID NO: 202382 - DNA, 796 bp, Unknown
  Bacterial polypeptide expressing nucleotide sequence isolated from the Sargasso Sea
gaattattaaaatttgatgctgaagaatctgaacctctgaatcatgcttatgggactaatggaataattacttctctattacttgctactgatatcaaacgtaagtggtattcactagttatcaactgtattgaatttgaaaaaacaatagaaatattaaaaactcttaccagcgcagcaattgatttgaaacttggagcaattcttgaagaagaaattgtagatcaaatgccaaagtggtttaaaactaattctagaagtcataagatattaattcaatctactcttggaggaataaaaaccatcgagctaatttgtaaaaaattcaaagttgaatctaccctccttggggaagaagaaaaactcgtcaatggaatttctgaagtcgtatggaatcacacaactcttcatatgaggtctaaggataaaaattggacgtatttacagatgcttttgccacttaatgatgaacttgaattaattaattttttgagaaaaaaatggggtaaaaaagttctttggcatttagaggcagtttctcaacaaggatcaccacgattagcggctttgcctgtattaaggtggaatgggatagatgaattgaatgaaataatggaagattgcaagaaacttggtgcgtttatttttaatcctcatgttttaactgtcgaaggaggaggtctcggagtggtagatgcagatcaagtaaaagcgaaattaagatttgatcctaaagggctattaaatccaggaaaattggaaggttgggaagtaaaagaacaatttaaaatttaat

SEQ ID NO: 202383 - DNA, 709 bp, Unknown
  Bacterial polypeptide expressing nucleotide sequence isolated from the Sargasso Sea
actgatataaaacgtaagtggtactcgataataatcgactgtgaagagtttaaaaagacaatcgaaatattaaaaatatttaccactgcagcaattgacttgaagcttggcgcaattcttgagaaggaaattgtagatcaaatgccttcctggtttaaaggtaaatctaaaagtcacaagattttgattcaatcaacgcttgggggggtaaaaactattgaattaatttgcaaaaaatatgaagtaaattcttttcttcttggagaagaagataaattaacaaatggaatctctgaagtagtgtggaatcatacaacccttcatatgagagcaaaggacaaaaactggacatatttacagatgcttttacctctagataaggaattcgaattaattaattctttgagaaaaaaatgggataagaatattctttggcatattgaagctgttgctcaacaaggagtccctagattggctgctttgcctgtaataaaatggcatagttcagatcaaataaaccaaataattgataattgcaagaaactgggagcaattatttttaatccacatgtattaactgttgagggaggtggattaggagttattgattctgatcaagtaaaagcaaaattaaaatttgatccaaaaggtttattaaatcctgggaaattgcaagggtgggaaataaaagatgagtttaatatttaaa

SEQ ID NO: 202384 - DNA, 557 bp, Unknown
  Bacterial polypeptide expressing nucleotide sequence isolated from the Sargasso Sea
aatgattaaaataggcataactggctctttggcctctggaaaatctacggtagcaagaatttttgccggaactaagtacccattatttaatgcagatctacaagtaagcaagatctataggcaaaaaatgtttgctaataaaatctttaaagtatttaggttaaacaataaaaaaaatattaaatttaaaataaaaaatattattaagaaaaataagggagaaataaataaattagaaaaaataatacatccacttattagaaatcaaattaaaatttttacaagaaaaaataaaaagaaaaaatttattttctttgaaataccgctacttattgagagcaaacttatgaaaaattatgatgtgattatatttgtaaattctacgagaaaaataagactaaagagacacctcaaaaggggtaagaacaaagaaatgtttaatttactagataaaaggcaacttccaccccaaaaaaaaattaagttttctgattatgttatcaacaataacgggtctttaaaaaaattgaaaataaaaattaaatctataaaaaata

SEQ ID NO: 202385 - DNA, 735 bp, Unknown
  Bacterial polypeptide expressing nucleotide sequence isolated from the Sargasso Sea
aaataaaaccttttgattcaaattttcattttaatgaaagagttcaagaagttatagaagataaaggaaattggttagtaaaaacaaataagagtaaacagtttttagctcccaatataattatagctggaggagtaggttcctttgaaccaagaaaattatctttaaaagaattagaaaagtttgaagaaaaaagtgttttttattcaattaataaaaaagatttattaaaaaataaaaaaattacaatatttggaggtggagactcagctcttgactgggccttagagctttctaaaaattccaccgtaacacttgttcataggcgaaatgaatttagaggagcccctcatacattaagtgagatagaaaagcttaaaaaatctggaaaaatttcaataaaaaccccttatcaaatacattctgtaaataaaggtgaagctcttagttcaattgagataaaaaatgatgatgaaaaaatcgaaaaaataaacactgacataatacttggtttttttggtttaattatgcagcttggtccgattgctgaatggggtttgaatatgacaaaaaaaacaatagaggttaatactgaaaattttcaaactaataagcctggcatatttgcaatcggagatatgtgtaattatccaggaaaattaaaactaattttatctggatttcatgaagcagctttagcatcagttgaatgttttaaaagaggcaaggcctaaa

SEQ ID NO: 202386 - DNA, 774 bp, Unknown
  Bacterial polypeptide expressing nucleotide sequence isolated from the Sargasso Sea
ggccagtctattgctcagaaaacctacatcgcattacgtcgagctggctggcttgtttccccattaattgaaggcgaaattggaaacatacgatttatcggcttggattgggcgacagtgccttttacaagtccatacacaacaactcaatcaacgagtgattcagatactattgacctgagacagcgactgtatgttcattctgagacagcagaacaattggaattttctctaccaatagaaattgatgacaccttgcccctggcaacggtcattggagacgttggtgttatccagacgattctgcgacgaagtgatttgagtagactattgatctcctcgagccagccgatgaatcagattccgcttaatcagataaccaataaattgataatacagtctgcacaacaaacggctgacttatcacagttaacccaaagctttcatatgaatttaacggcatttagcttactcagttttacggtcggtttattcattgtttacagcacagtaggactaaccttcgaacaacgaaatggtctaatccaagtactgcgagtactaggggttccccttcgaaaagttattataattcttatcgttgaagctctattaatcgcgaccgttagcgcagtcttgggcatattaatcggttatcttatcgcggcaagccttttgcccgatgtagccgccaccttacgaggactttatggcgcacagataccatcaagtttgactttgcagggcgactggtggctttcagggattgggatg

SEQ ID NO: 202387 - DNA, 457 bp, Unknown
  Bacterial polypeptide expressing nucleotide sequence isolated from the Sargasso Sea
tatgggattagaagataaaataaaggaatcaataattttagcaatgaaagctaaagataaaactaggcttgaagctttaagggccgttaaatcagctattttattagaaaaaacaaaggctggaaacaaggaaaatttagatgaaaatcaaattataaagttattacagaagcttgtcaagcaaagaaatgaaagtgcaaaaatttataaagaacaaaatagagatgaattagctgaaattgaggatagtcaatcgaaaattatttcagaatatttaccagatcaacttaatgaagaagagctaataactattatagatgaagttataaaatcaacaggtgctgagtcaatcaaggatatgggtaaagttattggagcaactaatgcaaaggttcttggaaaagctgaaggaagagttgtagctgacttagtaaaatcaaaattaaattccttataa

SEQ ID NO: 202388 - DNA, 796 bp, Unknown
  Bacterial polypeptide expressing nucleotide sequence isolated from the Sargasso Sea
aatgacatcaaatacttttaaatttatagaaaaatttagggaagttaaaaacttagagataattgaaagccaatctgacataaaaaggctatcaaaagatttttataactactctccaattcttactgaaaaattagatgaatgtattgctgatttggtggtaagaccctgtgatcacaaagcagtaaaggaagtagcagaaatttgttggggattttctatcccacttactttaaggggttcaggtacaggtaattatggacaagctgtcccattgtttaaaggagttgtaatgcagatgagtcactttaataagttagaagaatttgatccagatacaggttttgtaaaagtacagtctggctgtgtgatgggagatttgaataaccaattagagaaatatgggagggaattgaggttgcttcctagtacttggaaaactgcaacaattggaggttttattgcgggtggatcaggaggtattggttcaattaggtggggatttttaagagatccaggaaatcttattggtttagaggcagtaacgatgaatgaaaaacctgaattattaaaatttgatgctgaagaatccgaacctctaaatcatgcttatgggactaatggaataattacttctttaatacttgctactgatatcaaacgtaagtggtattcaatagttatcggctgtattgagtttgaaaaaacaatagaaatattaaaaactctcaccagcgcagcaattgatctgaaactaggagcaattcttgaagatgaaattgtagatcaaatgcca

SEQ ID NO: 202389 - DNA, 757 bp, Unknown
  Bacterial polypeptide expressing nucleotide sequence isolated from the Sargasso Sea
gcagactttgatggtgaccagatggcagtccatgtcccattaacattggaggcgcagcttgaagccagggctttaatgatgtcaactaataatattctatccccagcagatggatcacctatcattaatcctactcaagacgtggtacttggtctctactacatgacaagagataacgctaacgcttctggtggcggaagaacatttagtaatgctgatgaggttttaagagcatacgaaacagaaaatttagaaattcattcacctgtaaaagtaagaattactcatgaaaatggtgagacatcaattgaagaaaccacagttgggcgtattttaatatggagaataactcccgctgaagttggctttaaaaacattaataccgttttaaacaagaaaacagtatcaaaattagttgatacctcatatagaaaagcaggacttaagaagacagtaatatttgcagaccaactaatgtatcttggttttgatttttcaactaggtctggttcttcaattggtgtaaatgattttgttatacctgaagaaaaagcaagcatcattgattcatcagaaaaagaagtaaaagcaattgaaaaacaatttgactctggtctagtaacaagaggagaaagatacaataaggtaatcgatatttggtcaagagctaacgaacaggttgcaaaagcaatgatggaaaaaattagttcagaaactgttaaaaatcctgatggagaaaatgtagatcagtcatctt

SEQ ID NO: 202390 - DNA, 944 bp, Unknown
  Bacterial polypeptide expressing nucleotide sequence isolated from the Sargasso Sea
tatggcaacccacgcagcaggtgttgtaataccagcccaaaatttagccgagtttgttcctttatacaaagatccttcatcaagttcgttattaccttcgacccaatttgatatgtatacttcagaaaatgccggcttagtaaaatttgatttacttggcttaaaaaccttaaccgttataaataaaacaatatcactgcttaaagaaaaaagaattaaactggatataagcaaaattaaacttgatgatcagaaaatttttgagcttttaagtttaggtcatacagttggattatttcagttagagagtgcaggaatgagagatgctttagttaatatgaaacctaacaagtttgaggatattatagctctcgttgctttatatagacctggaccaatgagcaatatttctatttataatcaatgcaagcatggagaaaaaaaaccagactatttacatcagaaacttaagaaaattttagagcctacctatggtgttattatttaccaagagcaagttatgcaaatagcacaagagctatctggatttactgctggagaagcagatattttgagaaaggcaatgggaaaaaagaaaagtgctatattagataaacaaaaagaaaaatttgtaaacggagcagtaaaaaatggaataaccaaagaaaccgcaatatttatttttggcaaaatagaaccttttgcacagtatggatttaacaaaagtcatgcagctgcatacgctatgattgcttatcaaacagcttatcttaaaacatattatcctaatgaatttatagctgcctctatgtcaaatgagctatccaacacagataagttgagtgaattttatgaagaattaaaaagattaaaaataaaagtttcacgtccttgtattaatttctgttttgcagagtttattccagaaaaaatacattatatta

SEQ ID NO: 202391 - DNA, 751 bp, Unknown
  Bacterial polypeptide expressing nucleotide sequence isolated from the Sargasso Sea
atatattgctgttccagcagagcaaccatttttttctttcaatgattggttcattagttcaactgaggttaaaaaaggaactttaaaagaaaccgagcatttcacactaaagtttaattataatgacataagttctttagaggaactgtataagaaatacccagatcaaattgctggtgtaattttggaacctgcaacttccttaattccatgtatttctggatgtcaaaaaataaactcatgtagagagtgtcctgacaatggaaataatttcttaaatcaggttcgagctctaacaaagaaacataaaagtgtatttattttagatgaaatgattacaggttttagatggcatttaaaaggagctcagtatttttataatgtagatcccgacttatgtacttttggaaaagcaatggcaaatggttttgctgtagctgcactttgtggtaaagagaagattatgtccttagggtcaattcgaaatattggtgctgaaagagtattccttacctctacaactcatggagcagaaatgagttcattaggtgcttttattaaaacaattgagatactaaaaagagataatgtaatacaacatatttgggattatggctcaaccttgattaaagaagcaaattctatttcaaaaaagcatggtttgtctaaaaatattatttttaatggtttaggatgttctcctaattatttaataatggataatcaagggaataattctcttagcttgaga

SEQ ID NO: 202392 - DNA, 917 bp, Unknown
  Bacterial polypeptide expressing nucleotide sequence isolated from the Sargasso Sea
aagaatagcaggtaaagccagaaaaaatgattttatttccatttctgagttaatgactggtattgagaatagagttttttcaagaaaagaagtatcccaactaatcttcaaggagtctcataaatcattgaagattggaattacaggtcctcctggtgcaggtaaaagctcattaatgaacaagcttattcctcaaataaggaaagaaaatttatcggtaggagtaattgcaattgatccttcaagcccaattactggcggttcttttctgggagatagagtaagaattaataatgctgtaaatgatgataatgtttttgtaagaagtatgggatctagagcagagcttggtggagtaactgagttagcagaagattttagtgatattttggcatttagtgggaaagatataatttttatagaaaccgttggagtaggacaatctgaatacagtgtgtccgaaattacagatcttactactttagtttttgtacctgaatctggagatgaaattcaacttctaaaagctgggattttagaactagccgatgtatttgttgttaataagtcagatagaaaagattctaatctattagtaaaatctataaataatattttatcatcaactaaaaaagactcaaagaaaattccaattttcaaaacaagctgtaaaacggatgagggtattgaagatttttcaaaagctattacttcatacttcaaatccatgaaagacaataaagatatacaagaaaagcaagttttaagatataatcgaagaataaaatcaatagttgaaaaagatattttaagtcaattttggaatgaggaaagaacagctcttttagatggtattgataaagcctcaatgaaaacaaagtcaccatatgagattgttgatgaaatcaaggaaaaaa

SEQ ID NO: 202393 - DNA, 616 bp, Unknown
  Bacterial polypeptide expressing nucleotide sequence isolated from the Sargasso Sea
attgaatattctactaatagtcattttagttatttgctatttaattgggtcagtacaaaatggtattttgctaagtaaaattttttataaattagatataagaaattttggatcaaaaagtactggagcaactaatgttaatagagttttgggtgtaaagcctggaataatagtacttatattagatattcttaagggcttgattccaattctaatattaagaatatttttggacaatgagattattccaatattagcttcatgctcaattgttattggacattgcttccctctttatcataaatttaagggaggaaaaggggtcgcgactggttttggaagtgtaattcttcatttaccaataattattgtggtgctaattccttctcttcctataatttatatttctaagtatgtttctttgggttcagttatagggtcatttctctcaataattctgattctatatttagtgttaacaaataatattagtggtgattatttatatataggtctgataatcccttcaataattttgtttaagcattatcaaaatataaaaaggttaattaataaaactgaaagtaaaattagtttcacaaatggatcaaaataa

SEQ ID NO: 202394 - DNA, 583 bp, Unknown
  Bacterial polypeptide expressing nucleotide sequence isolated from the Sargasso Sea
tggttttcatagtgcattttttattaggttttctgatttacctataggaattggtataaaaacaatatcatatattattgatgataattctgctttaggtatgggtttagatattggatataataaaacttttaataaatcttcttttggatttgtcattaaaaattttccttcatctggattaatatggaatactgggactatagaaggtaccaccccttcattctcattagggatacatcacccaatgaaaccatttaaacaacactcaattattattcatgctgttgggagtattgaagggtcattctcaaatgccaatttagaatcagattttaaatctggtattttttcacttgatggatcttttgggtttgaaggtagctataacgataaaatcatgattcgattcggtaaaaatactgttaataatcttacaggagggattgggttgcaatgggaagttatgggacttgattattgttttttaagtacatctaataatattgatataaaaaatcatcatttaatttctttgaaactttctattgattggattatatcaaaatttcttaaaaagtaa

SEQ ID NO: 202395 - DNA, 907 bp, Unknown
  Bacterial polypeptide expressing nucleotide sequence isolated from the Sargasso Sea
ctgaggtcatccatccatgctacgtgcagttatggtgccacggaggattttgtgaaatatcacgacaaagtgaaaccggcgtcccctgcctccaacattagctggaggcggcggcggcaaatttatgatgagaagaaactagagctcccctccaaggagattagcaggccatcctcaagtgacctcctgtggaggggtcaggggggtcatcctggaacaaggaacggtgacaacctaacaagcttgtatatgcgcagattccaatctgttcaacacaacgaccattttcaaacctatctaaagcaacggaaaaatagattgaaatctttcataacagtaaagcaacaaagatcttcatccttttggtcggatactactttccgcaaagtcccctccttgcaagcaatgtcagaggtgtcccatttattgtcttctctcacctccgatccccacttctctggctcagattccagtcactattatagtggaacttcccggttgatttctggagacagcagcaccccttcctcatcatctcaccattccagcattcttggtccaaatatatcacaatcattcaatgacacaatacgaccaaaaagtgacagtgacagtgatggtcatgatggtgataacgatgcttctgataatgatgatcatgatggcaatgataatgcctctgacaatgaacagggcagcgatggtgatggtcatcagggtgagaaaggtgaaaatgatggtcattttgatcatatgttgaatttgtccattggtgatgatgacattgatccagaggaggtgagtgataatggtgatgatgatcagttgggagcagttggcttatcagggggggccggacgctcgcgctcctcctcctcctctccccggccactccgattggtcagcc

SEQ ID NO: 202396 - DNA, 841 bp, Unknown
  Bacterial polypeptide expressing nucleotide sequence isolated from the Sargasso Sea
ctgcggaccagggagaccgtcgagacgcagcttccaggggccgaacggcttgttggtgctttgtcacccgcaccctgcaaggagttcggaccgtcttcgcgtcaggctgcgctccaggatgccaaggcgaaagccggggagacgaagcaacggagaaccagccaccccgtcgttgatgagaaggtgccggtgtgggacgtccgacctacccggacggctgggaccgggggatccttcggaggccaagggtccgagtccgatggcgaccccctgcaacgactcctccagcgtcaagccctcggcagcggggcacttgggacacctgccgctgatgccccccgaccgctgcggctggccgggggcccggttggaggactcacgagggttcaggcaatggatgctgaccagcttgtgcgggcctccaggtcagacgggggttcggcgtggggcctcgcaacagctgaagagctgctccagccgctctcgctggaggggcgcccaatctccgaggcggtcatggaaacgctcgcgcggagcgtcgcgttgagcacaaaccgcacctacccaacggcgtggaacgattggcggatcttctgcgatgtccgccaggagagccccgtcatcgttggaggccacacggaggagtccagacgcgacgaggaccggctcctccagttcagcgtgtacctcgcggattcgttggcgagggcggccggcacggtgaagaacaagctgatgggggttcggcacgcgcatgtcatcaacggcttggaggacccgctgatcgggaagaaccgggtgtggcttttcttctttgcgctgaaaaatgccaagaagttga

SEQ ID NO: 202397 - DNA, 802 bp, Unknown
  Bacterial polypeptide expressing nucleotide sequence isolated from the Sargasso Sea
gttccgcttggtaaagtttcaggtgaattgaattacaaagataaatctattataatgaatgacataaattctttctggaatcaaaactttataaaggctagcggtagaattccagttgatttagatctacattcaatcgatatttcaaaattctatgaaaaagggaagcttgagttaaatacttcaggaaaattcgaaactgctgtttttttaaccgagtatctttctgatattgattctattgctggagatataagcatagatttatctattaaaagagaccgtagtaaatattatagagatggtaaaatagttgttaataatggtcaaatctataccgtcttaatggatgagccagtacgaaaattcaatgtcgatgctattttaaaaaataatcttttagaaattaatcgcttcaatggatctttgaatgattctcaaaataggaaaaaagatgatctcacaaacttgttcataagcggaggaattgattttgaaagatttttcatgcctagatataatttaaatattaatggagatgatatcttttatagatctttgaatagcgatatggaaggttatggagatattcaaatttcactgactggaagagataccattgatatagcaggaaaaatttctgcaaaaaatggtgccatttatactgaatttattaataatgactctgaatctataaaagatagaaacaaaagaacgtttacgaattactctatacgattcccgatcgaaaacaccttttctataagaaattctcaaatcgatgcaaaggtatctggagaga

SEQ ID NO: 202398 - DNA, 370 bp, Unknown
  Bacterial polypeptide expressing nucleotide sequence isolated from the Sargasso Sea
atgattaataaaaaaaatgacgcatataaaactattagtgaagttgctgaattattaaatttaataaatgctaaaactggtaaaatttccacacacacacttagattttgggaaaaagaatttaaacaaattaaacccaaaatctttgctggaaatagacgttattacgatcttaaaactattgaaattttaaagaaaattaaatttttactcaaagataaaggaatgactattaagggtgtcaaaaaattcttattaaatgatgaatcaaaacttgacgaaacattcaatacatctataaacacaaaaaatattttgaaatcaaaattaagtaaaatttcaaaaatagttaaagaattaaaaaaatagt

SEQ ID NO: 202399 - DNA, 622 bp, Unknown
  Bacterial polypeptide expressing nucleotide sequence isolated from the Sargasso Sea
atggatagtttaacttttgatacaacacaaattttcagaaataatcatgatccattagattgcccaagatatcacacagctttcaatacatacaatataattcccaaaaattgttttagttgtttcaaggtccaggttaatgtttttaatgtagttgacttaatcaaattacattttttatttgataatataacttttgttaaaaatattaaaaaatgcatggttgaaaaaagaaaagatatagatggaaattataaaggttttatttattgtaaaaccgttgatgaagctgaaactttaaaagttcaaatagagcaactaataaataaatctttgaagattgatcacaaaaccattattaaaagaggttgttcagaattcactttaaaatatcctgattataaaatcactgatagcaaatcaaaatccttttttaaatataaagatgaatggcaaaaaaaggaaaatattattaacgaattttatcctaaaaatatatctagtgagttgaatccacatgataccttaaaaggtaattctttaaatgatatgattacaattaaaaattggatcaattatgccgagtctatcaatgactatagttttaaaaaattaacttaaa

SEQ ID NO: 202400 - DNA, 1084 bp, Unknown
  Bacterial polypeptide expressing nucleotide sequence isolated from the Sargasso Sea
caaaatgtatttgttgatcaaatggatcaagcaaaaattgaaagtgaaaaatatggaacccaaggaaaagatatagacttagctttattaattgacggcttacaagcggagcgcgaacaaggaattacaattgatgttgcataccgtttctttgaaacagcaaaatgtaaatttattgttgccgatacaccagggcatgaacaatatacgcgtaatatggcaacaggtgcttctaattctgacgtagctatcatcttaattgatgcacaaaaaggtgttttagagcaaacaaaaagacatagttttattgttaatctcttaggcattcaatatgttgttgtggcaattaacaaaatggatttagtaaattatgatgaaaatatttttaataaaatcgtttcagaatataaagaattaataaagaattttaattttatttctaccaagtatattcccctatcagctctaaaaggagataatgttttttcatcttttgataatactcaatggtattcaggcccttcccttattgaaactttagaaaactttcaaattgaagaagagggcatgaacaatgcatttagcatgccagtacaatgggtgaatagatctagttcagattttcgcggatatgctggaactatcacttctggtaaaatatctaaaggagatgtaatcacaactgcctcatcgaattctcatacttctattaagaatatttatggacccaatggagagttggatgacgcgtttactaatcaggcagtaacattaacattacaagatgaattagatatttctcgaggagatatcattcttaaacaagataataaggaaattatcaaagctgatcagtttgcagctcatcttgtttggatggatcaagatgcaatgttaccagagcgaaattatatctttcgttttaataacacttatatcaatggacaaataaccgatctagttcatagtattaatgttaattcttatgaagaaatagcaaccaaaaaattaaagttaaatgacattgcgtattgtaaaatagcattaactaaaatgcacagtattgctccttataaaaacaatc

SEQ ID NO: 202401 - DNA, 791 bp, Unknown
  Bacterial polypeptide expressing nucleotide sequence isolated from the Sargasso Sea
tactggaccacctggtgcaggcaagagtaccattaccaatatacttatagaaattattttagataataataaaactgttggtgtagtggctgtggacccaacaagcccattctctggtggatctttgttgggagatcgaatcagaatgaatcaatacgcatgggatgagagagtctttattagaagtatgggtaaccagggtgatctgggaggcttagctagtaaatcgcaagacgttggtgatatcctttcagcaagtgggaaggattttgtcctttatgaaactgtaggtgttggacagagtgagcatgatatagtgaaagcagctgatctgtgtgtggtcgttctggttcctgaatcaggtgatgaaattcaaatgatgaaagcaggtcttattgagatagctgatttgtttgtaatcaataaatcagatcgagatggggcaaatagactctcttcaattttaaaaaatattatccataattttactaaaataggcaagctagagcctccagtgtttaataccgttgcaacagagaggataggagtctctgagctattcaaaggcatggaatcgcatatggaattgatgttggaaactggacacttagagcgcagaagattagacagatatcgccagagggtaatgagtcaagttcgagagaaacttgaaaaaggattttggactggtctcaaattacaagatctaaaagaaatgacagctaaaattgatgagatagatatggtaccccatatgatggcgaataggttaatggataaaactaaataat

SEQ ID NO: 202402 - DNA, 1045 bp, Unknown
  Bacterial polypeptide expressing nucleotide sequence isolated from the Sargasso Sea
aatgtctagtgtaaatttaatagaatcaaaaggtgttttgcgcaacaactggaacatagaagttgaagactatgttattgcatgtgagtgggctgaagacggaaatatacttctagttggagatgttgcaggaggagttaatgctttagatagcaaaactggaaagacgttgtggcaaaaaagcagcattcatgatggaaatttacttgccatgagggtaagtcccaatggtaaattatttgcgacttcgggacaggatggatgcattttaatcggtgaaacttctaaaggttcagtaattgaaacaatagaacttggtcgaggttgggttgagcatctagaatggtcaaaagatggcatgtctttagcagcatcaatctctaagaatgtatatatttttgactgcaaaggtaaagaaaaatggaaatcggaacagcattctagtactgtgagcgcaatagcatggtcaagtaatgatgagcttgcaaccgcatgttatagcaaggtagctttctatgatgttattgaaaataaaacaaagcaaacgcttcaatggaaaggatcacttatatcaatgaaacttagcgctgatggagatattgttgcttgtggaagtcaagataatacagttcacttttggcgtcgatcaactggacaagattcgatgatgtcggggtatccaggaaaaccaagcagtattgcttttgactcttctggaaaactgcttgcgacgggtggatctgaaattataacggtttggagttttgaaaatgatggtccagagggaacaactccaggacaactctatcatcatcaatcttttgtttctgacttttcatttgctccccaaggaaagcgactagcttcaggagcaagagatggttcgatagcagtttggggattaaagaatgatggtcatggtggatctataggcacttctcagatgagtgatcaagttagctcaattgcctggagaaaagattcaagagctctagcggccggagacgcaaggggtttagtcatcacatggaaagtaaaaacgtaa

SEQ ID NO: 202403 - DNA, 1363 bp, Unknown
  Bacterial polypeptide expressing nucleotide sequence isolated from the Sargasso Sea
aaccaaatatttattaattataaaaagcgaaaaacattaataatttgtggcattggtggcaatggaggagatggttttatactagcccaagagttattgaataaaaaatgggatacagatgtaattataataggtaataaaaatttattaaaaggagatgctcttaaagcattcaatcaattaaaaattaaaccaaaaaaatttgaagatattaatttaaataaggttgatttatttgtagatgcattatttggaataggattatctcgaaaaattaataataaaaccatagaaatattaaaaattatagataagcataaggcgcctatagtaagtgtagatattccaagtggaatagattccaatacaggacaaatacttgggtatgctccatattgtgatttagtaattactttttccactcttaaatatggacatattctagttccaggatcagagaaatataataaaattaaagttgaaaatatcggaataaaaaaatcagttattaatagtattacacctaaaatatatattaataatccttctctatggcttcaaagtattcaatggccaaaaattgatgatcacaaatattcaagaggctatagtttaatagtaggtggctcaaaaaatatgactggtgccggaagactagcagcaatatctgctcaaagagcaggaagcggaatagtttgtgttgcatctgaaaaagaagcagaacaaatttatttcacaacattaatatctcagattgtaaaaagttataaaaatattaaagaatttgatgaaattattttagacaaaagaattgattcatttttgataggacctggactaaatttaaaccaatactcaatcaataagataaaatctttatttaaaactaataagaatatagtagtagatgctggagctatttctaattttaaaggaaaattaaatactttaaaggatataatatatggaaaaaacgcggttataactcctcatgaaggagaactaagatctatcctgccaaaccttaaaggtaattttattgataaagctcttaaagctgcctctgagttaaactgtatagttgttttaaaaggcgcaacaactgtaattgcctctcctgataataaggctatagttaattgtgctggagcaaaatggttagccacagccggaagcggtgatgttttagcaggaattatatgtgggacattatcaaataagatggatagtttcttagcttctgcctttagtgtctggatgcattcagaaattggtaattatctaggaccagggttagtagcagaagatataccagaaaatataaatttaatctataaaaaactattaaaaacaaatatataaa

SEQ ID NO: 202404 - DNA, 991 bp, Unknown
  Bacterial polypeptide expressing nucleotide sequence isolated from the Sargasso Sea
gatgcccaatagatattcatctctcgctcttacactctggctctgtggtgttagtcaccatgccattgccgatacggtatttctgaacaatggcgataaaattaccggtgagattaaagcgctagatgagcaaaatctggtaatcaaacctagctacgcccccaaaatcactatcgaacgcagcgcggttcgcagctttgaaacccgtgagccacagccctggagcatcaatcgctcaatcaaggaggtaatggttcaagcttctgaattagatagctttgtgctgatagacgatcagcagaccccgatcagcgagttaatctattcggaactcttgagtgactcggattggcactacagcggcagtgtagaggccgccatcgatgtcacccataacagtaaaaacactcaaaagctgcatgctaagggcgatgtgaccgccgaaaccttaaactggcgtcataacctcaagagtgaagtccgctacgagaccgaagacaaaactactaagcgtaataccctcgaagcccattacagcctcgactatttgatcagtgaccattggttcttgcggcaagaggattattatcaggaggataagctcaacctcgatattcgcagctactacgccgcattgggtccgggctatcgtttttggggtgtcaaccgcgacaaactcgactttgtactcacctacaaccacttctggttagattatcaagtgtttacctatgaactaaatgcttgggcggcaaccatcaactacaagcaatattggttcgacggtgtgttagagacctatgcggatttacaaatagccttccccgatattcccaccatcgaatatatttctgactcgacgtttggacttaaatacctgctgacacaacagatttacctctcattcaaatacgatatcaatgagactaaatccgctgtgcagcattcgcgggatatttcctacagcctaggtttaggggttaacttctaa

SEQ ID NO: 202405 - DNA, 2233 bp, Unknown
  Bacterial polypeptide expressing nucleotide sequence isolated from the Sargasso Sea
atgtctgacggcccccgcagtgttcgcagccagtgcccctactgcggtgtgggctgcggtcttgagctgctgcctccggccgtgaagggtcaagccgtgaagcgggatgcagaaggcaacccgatgtggaccgcccgcggcgaccgggagcacccctccagccttggccaggtgtgcatcaagggggccaccgtcggcgaaaccctggccaggggtcgactgcgacaaccgttgttccgcagcaagctcacggacgactttgcaccgatcagctgggacgacgccctcgacaaaatcaccggacagatccaggcgagcgtggcccgccgcggcaatgccgatggcatcgccatgtacggctccgggcagtttcacaccgaggattactacctggcccagaaactgctgaaaggcgccctgggcaccaacaatttcgatgccaactcgcggctgtgcatgagctcagcggtggccggctacacccgcagcctgggttccgatggcccgccctgcagctacgaggatctggatcactgcacggtggcctttctgatcggtaccaacaccgccgaatgccacccggtgctgttccagcggctgctgaagcggaaacgcaagaaccccggcagcgtcaagattgtggtggtggacccacgccgcaccgacaccgccaaggcggccgatattcacttgccgattgccccgggcagcgacctggccctgctgcatggcatcgcccacctggtgctgcgggacaacggccaggatccagccttcatcgacgaccacaccgagaactacgacgcgttcttcgacgtggccgcccgctggaccccaagacgggttgccctgttctgcaacatccccgagaaacgtctgcgggacgtggcggctctgtttcaccggcgccaaaaggtgctgagtttgtggtcgatgggggtgaaccagcgccgagaaggaacggccgtggtgcaaggcctgatcaatctgcatctgctcaccggccagatcggcaaagaaggggcaggtcccttctccctgaccggccaacccaatgccatgggcggccgcgaagccggaggcctggcacacctgctgccgggctatcgcttggtggccaaccctgagcaccgcgccgaggtggaacaggcctggcagctccctgctggccaaatcgccgccaagccggggcttgccgcgtggcagcaggtggaagcgatggaacgcggtgaccttgatctctggtgggtggccgccaccaacccgctggtgagcatgccggacctggatcgggtcaaacaggccatgggcaactgcccgttggtggtggtgagcgaggcctacgccgattcagaaacgtcccactacgcccacctgctgctgccagctgcccaatggagtgagaaggccggcgccatgaccaattccgagcggcgtgtgaccttctgtcctgcctaccgcctccgcttcggggagagccgtccggactgggaggtgttcgcggacgtgggtcgccggttgggttacaccgatcagttccgcttcgattcggctgccgaggtgtacgccgaattcacccgactcacccagggacgcctctgtgacgtcagtggcctcagccacgaactgcttgagcaagcggggccgcagcaatggccttatccccttggtaacaagccagacacaacatcaaagcgtctgtacaccgaccaccagttcgcaacccccagcggccgggcccgtttcagcaccgaccagcccttaggcctggcagaacccccctgcgacacctacccattggtgctgaccgtcggtcgatacctggggcagtggcacacgatgacccggaccgggaaagtggagcggctgatgaaacagcaccctgagccattgctggagattcatccaagcgatgcccaggaactacaactgcgcaacggcgagctggctgcgatcagctcacgccgcggccacctcacggccacggtgaaggtcaccgatcgcatccgctgcggaactgtgttcctgccgatgcactggggattcactcaggagaaggcttgcgaagccaacacgctgatgcatgacgatgcctgcccggtgtccaagcaaccggaactgaaagcctgcgctgtgatcgtggcgccggcggtctccgtggtgaaaccggtggagcaggagaaaggacgcctggaggcactgcggcgcctgctcaccccagcacttcgctgaa

SEQ ID NO: 202406 - DNA, 946 bp, Unknown
  Bacterial polypeptide expressing nucleotide sequence isolated from the Sargasso Sea
atgtatcgatctcttgtccatgggatattagaaaatgaccatggatcgatatcaaaagcagttacgctaatcgaaaatggcggggctgaaacaggaccgctcttaaatgatatatataaatctacagtagaatcattacgtattggtattacaggaccgccaggtgcaggtaagagtactattacaaatgcgttaattgacatttttctagaaaataaaaaaactgtaggggttatagcggtcgatccaacgagtcccttttctggtggctccttattaggagataggattcgaatgaatcattatgcatgggatgaaagggtttttgttcggagtatgggtagtcatggtgaactcggtggattggcaagaaaatcacaagatgtcggagatgtcttagctgctagtggaaaggatattgtgctctacgagactgtaggcgtggggcaaagcgagcatgatatcgtaaaagcagcagatgtttcaatagtagttctggtccctgaatccggtgatgaagtacaaatgatgaaggcaggcttaatagaaatagctgacctattcattattaataaatcagatcgtgatggggcagatcgtctatcatcaatgttaaagaatgttttacatagttttaatccagaaggaaaaatagagccacctatcttcaatacagtgggcactgaaggagtaggtattaaagaactttataaaggaatctttgatcatgtggatagcatgatcggtctgggtcaattggacaaacgtagattggcaagataccgtcaaagagtttcagctctagtcagggagactctggaagattcattctggacagatgataaaaaagaactcctttataaggtgaccaaaacatctgaccgtattacagatgcaccgcatatcatggctgaggccttattaggtaatacagatgaagaatgaa

SEQ ID NO: 202407 - DNA, 961 bp, Unknown
  Bacterial polypeptide expressing nucleotide sequence isolated from the Sargasso Sea
gcaatgaaaagagaccataaagatttaattaaagggctagtttcaaacgacagggtttgcttatcgaaacttattagccagatagagagtaactcctcatatatttttaaagttataaactctgtaaaaaagattccaaataaagtttatacattaggtataactggtccacctggggcagggaaaagtaccctaacaaaccaaataattaaaaaatttagaggtatggatttaaaaattggtgttatagctattgatccaagtagtccatttactggcggggctgttttaggtgacagagttagaatgcaagagcattcattagataactcagtatttattagaagtgttggcagtagaggagatttaggaggattatcgagttcaacaagctctatgattaaattatttgatatttttggtatggatatcgtaataattgaaacggttggggttggacagactgagcttgatataattaaaatttctgattgtgttttggtaacccttgtccccgaggctggtgatggaatacaagcaatgaaagctggacttatggaaattggagatttattcgtggttaataaggccgatagagggggtgctgataaacttgcccgtgaaattgattacatgtgctcgctgaagcatgatagttcaataagaaaaaccaaggttttaacctctgaagcagaaaatggaataggcatagacgacttagttgaagaagtattagcttttaagcaatatgaggaatcaaatgggcttttattaaagaaaaggaataaaagaaaggtttcagagttgaatgccatgattgacaagaggttaagaaatgaattggaaaaaacccaagaaactgctacatttaaagaattaatgaataaattagaaaatggattattagaacctgaattgttagttgaaaagattattaatctaataaaaaaaaataattgag

SEQ ID NO: 202408 - DNA, 1924 bp, Unknown
  Bacterial polypeptide expressing nucleotide sequence isolated from the Sargasso Sea
catggatatttacagcagcttcgcgaaccgcttcgaaaaaacgcgagaggaagagctctcgctggaggagtatctcgcgctctgcaagaacgatccatccgcgtacgcgacggctggtgaacgcatgctggaagcaatcggggaacctgaacacatcgatacccgcaacgacccgcgcctgtcgcggatctttgcgaacaaggtcatcaaggtctatcccgcattccgtgagttctacggaatggaggaggtgatcgagcaggtggtcgcctacttccgacacgctgcgcaagggctcgaagagaagaagcagatcctctatctgcttggcccggtgggcggcggcaagtcctcgatcgccgagcgtctgaagcaactgatggagcgcgtgccgttctattcgctgaagggttcgcccgtcaacgaatcgccgctcggtctgttcgactacgacgaagacggtccgatcctcgaggaacagtacggcattccgcgccgctacctgaagaacatcctgagtccgtgggccgtcaagcggctgcacgaatacaacggcgatatccgccagttccgcgtggtgcggcgctatccgtcgatcctgcggcaggtcggcatcgcgaagacggagccgggtgacgagaacaaccaggacatctcgtcgctggtcggcaaggtcgacatccgcaagctcgaacagtacgcgcaggacgacgccgatgcgtacagctactcgggtggcctgtgcctggcgaaccaggggctgctcgagttcgtcgaaatgttcaaggcgccgatcaaggtgttgcacccgctgctcaccgccacgcaggaaggcaacttcaagggcaccgagggcttcggcgcgattccgttcgacgggatcatcctcgcgcactcgaacgagtcggagtggaaggcgttccgcaacaaccgcaacaacgaggcactgctcgaccggatcttcgtcgtgaaggtgccttactgcctgcgcgtatcggaagagaccaagatctacgagaagctgatccgcaactcgtcgctggccgaggccgtctgcgctccgggcacgctgaagatgatgtcgcagttctcggtgctgtcgcgcctgcacgagccggagaattcgagcctgttctcgaagatgcaggtgtatgacggcgagaacctcaaggacaccgatccgaaggcgaagtcgtaccaggaataccgcgactacgcgggcgtggacgaagggatgacgggcgtgtcgacacgcttcgcgttcaagatcctgtcgcgcgtgttcaacttcgattcgagcgaggtcgcggcgaaccccgtgcacctgatgtacgtgctcgaacagcagatcgaacgcgagcagttcccgccggaaaccgagcagaagtacctgtccttcgtgaaggacgtgctcgcgtctcgctacgcggaattcatcggcaaggagatccagacggcctacctcgaatcgtattcggagtacggccagaacatcttcgaccgctacgtcacgtatgcggacttctggatccaggatcaggaattccgcgatcacgacacgggcgagagcttcgaccgcgccgcgctgaacgcggagctggagaagatcgagaagccggccggcatcagtaatccgaaggattatcgcaacgagatcgtgaacttcgtgttgcgtgcacgggcggcgaatgccggcaagaaccctgtgtggacgagctacgagaagttgcgcgtcgtgatcgagaagaagatgttctcgaacaccgaggaactgttgccggtgatttcgttcaacgccaagggttcggcggaggagcagcgcaagcatgaggactttgtgaaccggatggtcgcgaagggctatacgccgaagcaggtgaggctgctttgcgactggtacctgcgcgtgcgcaagtcgtcatga

SEQ ID NO: 202409 - DNA, 900 bp, Unknown
  Bacterial polypeptide expressing nucleotide sequence isolated from the Sargasso Sea
aatggataaatttctaatccaaaatttagaagctaataatcaacgtgatttatctcgattaataacagaaattgaaaatacagatgtagaaaaaagtgtggatcttgataaactttttcgtaaaactaatcatgcaattcgaataggtattactggtccccctggagctggaaaaagttctatcacaaatgaattaattaaaaattttattaagactaatcataaggtaggtgtaatcgctattgatcctacaagtccattttcaggcggatctttgttgggagatagagttagaatgaatcaataccataacaatgagaatatttttattcgaagtatgagtactcagggacaacttggcggattatcaagaaaggcgcaggacataggagatattttagctattgcaggaaaagatataattatttatgaaactgttggtgttggacagggagagtatgatatagtaaatgttgcagatttaacaattattgtattagttcctgaagcaggagatgaagtacaattaatgaaagctggactaatagagattggtgatttatttattgttaataaatctgatagaaagggggcaaaacaattaacagaaaaattgaaatcaataattaatattaataaagaaattaatcgacctatttttaatactactgcaaaagaaggtaaaggaattgaagaattgttcaaggggattatgaataagtatgaagaattagatgcaactggtcatatcttaaaaaggcaaaaaatccgttatagattacgtgttaaaaaaattattcaagagaaaatattaaataaattttggacgaaaaaaaagattacgaaattaaatagtgctacagaatcaataaatgacttaaaaaaatctccaattattac

SEQ ID NO: 202410 - DNA, 1108 bp, Unknown
  Bacterial polypeptide expressing nucleotide sequence isolated from the Sargasso Sea
actggatcgagctgaacgaagcgttcgccgcgcaatcgctggcggtgatgcgcgatctcggcctcgacccgtcgaaggtcaacccgatgggcggcgcgatcgcgctcggccacccgctcggcgcgaccggcgcgatccgcgcggcgaccgtcgtgcacggcctgcgccgccgcaacctgaagtacgggatggtcacgatgtgcgtcggcaccggcatgggtgcggcgggcatcatcgaacgcctgtaagcggagcacgacgacaagctgcgacggtgcgcgggccacgagctcgcgcaccgttttttcattccgatagaggaaagtcaaaggagacggttgtggccgaaattcaagtggaacgcgccgatggcgtggtgacgatcacgatcgcgcgcccggcgaagaagaacgcgctgacggcggcgatgtaccagacgatggccgacgcactcgccgaagcgcaggaagacaaggcggttcgcgtgatcctgctgcgcggtggcgacggcaacttcacctcagggaacgatctcgaggatttcctgaagtcgccgccgaaggacgacaccgccccggtgttccagtttctcgcgcggatcagcagcgcgagcaagccgatcgtggccgcggtgccgggcctggcgatcggcgtcggcgtgacgatgctgctgcactgcgatctggtctacgcggccgacaccgcgacgttctcgctgccgttcacgcagctcgggctgtgcccggaagccgcgtcgagcgtgctgctgccgcgtctggccggccatcaggtcgcggccgagaagctgctgctcggcgaagcgttcgacgcgctggaagcgcaccggatcggtatcgtcaaccgcgtgctgccggcggccgagctcgacgcgttcgcggcgaagcaggcggcaaagctcgcggcgctgccggcggcatcgctgcgtgtgacgaaggcgctgctgaaggatacgggcggcgtggcggtgcaggcgcggatggccgaggaagcgggccacttcgccacgatgctgcgcgcgccggaagcgcgcgaggcgatgacggcgttcttcgagaagcgcaagccggatttccgtcagttcgactga

SEQ ID NO: 202411 - DNA, 1639 bp, Unknown
  Bacterial polypeptide expressing nucleotide sequence isolated from the Sargasso Sea
accaaaaaatattaccatgattgatagaaaaggagttgtctacaaaggaagagatggcttaaaagaatggaaacttccttttgcaattaacacaaaaaacagaacactcagtgacgctattagtaataccgatgtttttttaggtttatcttctgcaggtcttataaaaaaagatatggttaaaaaaatgtcaaaaaatccgataatttttgcttgtgcaaatcctgatcctgaaataactcctgaagaaatagaagaggttagaaaagatgcaattattgcaacaggaagatctgtctatccaaaccaagtaaataacctgataggttttccatatatatttagaggagctctagatgtaagagcaaaaacaattaatgaagaaatgaaaatagcagctgtaaaatctattgctaaattagctagagagagagtgccggatgaagttgctgctgcaatgggaggcgaaagaccagtatatggcaaagaatatattattccgtcaacgtttgaccctagattaataagcgtaataccattagcagtcgcaaaagcagcaattaaaagtggagttgcaagaagaaaaattgaaaattttgaaatttattctgaccagcttaaacaaagattagatccatcagtaacaattatgcaaggtattaattctcaaataaagaaaaatcaaaaaagagttgtttttgctgatggtgaagatgaaaatacacttaaagctgcaatagcttttcaaaaaagcggttttggaattccaattttggtcgcaaaagaaaaagtggttaaacaaaggttaaaagaaattggatatagcgaaaactttaatattcaaataataaattctacgaataaggaaaaaagagaaaaatataaaaaatatatatttgaaaaacttcatagggagaagggtttcctagaaagagattgcgatagacttgtaagaaatgacagagttgtgtggggttcttgtatggtgtcatgtggtgatgcagatgcaatggttacaggtaatacaagacgatatggccaatcacttcaaaaagttctaagaattgttaaatctagaccaggtgaaataatgtttggactaaatatggttgtaaataaaggtagaacagtatttatcggcgatacaactgtacatgaatatccttcatctgagcagttggctgaaattgccttatcagcagcaagagtggtaaggctttttggttttgatccaaaagtagcttttctttcacattcaacttttggtcaacctataaccagtagaacaaaacatatcagagacgcagttgaaattttaaaaaaaaagaaagtagattttaaatttgatggggatatgcagcccgatgttgctcttagtgaagaatataaagacttgtatccattatctgaaatagttggtaatgcaaacgtgctgattatgcctggtcagcacagtgctgcaatatcatataaaataatgaagactcttggtggagcaaaagtaattggtccacttttaataggtttgggtgaagccattgaaattgcacctttaaggtcttccacgtctgatattttaaatttggcgtctgtagctgcctactcagctggaattattgattatagtataaaaaattaa

SEQ ID NO: 202412 - DNA, 1153 bp, Unknown
  Bacterial polypeptide expressing nucleotide sequence isolated from the Sargasso Sea
tttgtggaaattttctatcccacttactttaaggggttcaggtacaggtaattatggacaagctgtcccattgtttaaaggagttgtaatgcagatgagtcactttaataagttagaagaatttcatccagatacaggttttgtaaaagtacagtctggctgtgttatgggagatttgaacaaacaattagagaaatatgggagggaattgaggttgcttcctagtacttggaaaactgcaactattggaggttttatttcaggtggatcaggaggtattggttcaattaggtggggatttttaagagatccaggaaatcttattggcttagaggcagtaacaatgaatgaaaaacctgaattattaaaatttgatgctgaagaatccgaacctctaaatcatgcttatgggactaatggaataattacttctttactacttgctactgatatcaaacgtaagtggtattcaattgttatcaactgtattgaatttgaaaaaacaatagaaatattaaaaactctcaccaccgcagcaattgatctgaaactaggaacaattcttgaagaagaaattgtagatcaaatgccaaaatggtttaaaagtaatgctagaagtcacaagatattaattcaatctacttttggaggaacaaaaacgatcgagttgatttgcaaaaaattcaaagttgaatttaccctccttggggaagaagaaaaactcgttaatggaatttctgaagtcgtatggaatcatacaactcttcatatgaggtctaaagataaaaattggacttatttacagatgcttttgccacttaatagtgaactagagttgattaattttctgaggaaaaaatggggtagaaaagttctttggcatttagaagcagtttctcaacaaggatcaccgcgattagcggctttacctgtattaaggtggaatgggatagatgaattaaatgaaataatggaagattgtaagaaacttggggcgtttatttttaatccccatgttttaactgtcgaaggtggaggcctaggagtggttgacgcagatcaagtaaaagcgaaattaaaatttgatcccaaggggctattaaatcctgggaaattggaaggttgggaagtaaaagaacaatttaatatttaa

SEQ ID NO: 202413 - DNA, 1357 bp, Unknown
  Bacterial polypeptide expressing nucleotide sequence isolated from the Sargasso Sea
aatgacatctaatactcttaaatttttagacaaatttagggaagtcaaaaacttagagattattgaaagccaatccgatgtaaaaagactttcaaaagatttctataactactctccaatccttactgaaaaattagacgaatgtattgctgatttggtggtaagacctagtgataacgaagctgtaaagaaagtagcagaaatttgttgggaattttctattccaattactttaaggggttcaggtacaggtaattatggacaagctgtcccattgtttaaaggagttgtaatgcagatgagtcactttaataagttagaagaatttgatccagatacaggttttgtaaaagtacagtctggctgtgttatgggagatttgaataaacaattagagaaatatggaagggaattgaggttacttcctagtacttggaaaactgcaactattggaggttttattgcaggtggatcaggaggtattgggtccgttaggtggggatttttaagagatccaggaaatcttattggtttagaggcagtaacgatgaatgaaaaacctgcattattaaaatttgatgctgaagaatccgaacctctaaatcatgcttatgggactaatggaataattacttctttgttacttgctactgatattaaacgtaagtggtattcaatagttatcgactgtattgaatttgaaaaaacaatagaaatattaaaaactcttacgagtgcagcaattgatctgaaactaggagcaattcttgaagaagaaattgtagatcaaatgccaaaatggtttaaaagtaattctagaagtcacaagatattaattcaatctactcttggagggacaaaaacaatcgagctaatttgtaaaaagttcaaagttgaatctaccctccttggggaagaagaaaaactcgtcaatggaatttctgaagtcgtatggaatcatacaactcttcatatgaggtctagggataaaaattggacgtatttacagatgcttttgccacttaataatgaactagaattgattaattttttgagaaaaaaatggggtagaaaagttctttggcatttagaggcagtttctcaacaaggatcaccgcgattagctgccttgcctgtattaaagtggaatgggatagatgaattaaacgaaataatggaagattgtaagaaccttggtgcatttatttttaatccccatgttttaactgtcgagggtggaggtctaggagtggttgacgcagatcaagtaaaagcgaaattaaaatttgatcctaaagggctactaaatcctggaaaattggaaggttggaaagtaaaggaacaatataatatttaa

SEQ ID NO: 202414 - DNA, 1483 bp, Unknown
  Bacterial polypeptide expressing nucleotide sequence isolated from the Sargasso Sea
aatgataaaaattaaaactgctctattaagtgtttatgataaaaccggcataattgagcttgcacagtatttagctaaaaataatattgaaatactttcttcaggaggtacggctaaacatctaatagaaaatggtattaaagtaactgaagtatcagattacacaggctctgctgaaatgttcgatggtagagttaaaactttacatcctaagattcacgcaggcattcttgctcgtggtaaaaaagatcaaatagagttagaaaaatttggggctaaaaagatagatctagttgtagtcaatctataccctttttcagaagaagtggctaaagattcttcagaacaagaaatcatagaaaaaatagatattggtggtcccgctatgctcagggcagcagcaaaaaactttgaacatacgattgcagttgctgagcctgaaaaatataaagaaataaatgttgagggaatgcatatagaaagttcacgagaattagcaaaaaggatttttgatttaataagtaaatatgattgggatattggtggatggttcggtggagaaggtattccagaaaaggttgatctgaggtatggagagaaccctcatcaagaagcaaatcttcttatagatgaaatgtcgccaatagatttcagcaatcctttgcaaggcaagcagatttcttataacaatgtagctgatgctctttcagcttgggcatgcgtaaatgaatttgaagaaccagctgtatgtattgttaaacatacaaatccttgtggtgtagcaaccgatcaaaatttaaataaagcttatgaaaaagcattttctacagatccaacttcagcttttggaggtgttattgctttaaatactacggttgatagtgaagtcatgcatagaatgattgagaatcaatttattgaagttttgatagcgccagattttgatgatgcttcacttaaagtcctatctaaaaaaccaaatataagggcattggtaggcaaagagattgcatctgaccaagaagaaatgaaatttattacaggagtagtcttgaatcaaaaaacagacaatgcagatttttctaacatggatttaaaaactgtgacagaaatcaaaccaagcaaaagtgagcttgaagatttaatttttgctattaaagttgccaagcatgtgaaatcaaatgcaattgttattgctaaaaatcaaatgactctcggtattggcgctggacagatgagtagagtggtgagcacaaagatagcattcatgaaagcagaagaagaaggtcttgatgtcagtaattgcgttttggcttctgatgctttcttcccttttcgagataatattgatttagctgctgaaaaaggtgtaaaacatatcatacagccaggcggttcagtcaaagacgatgaggttactgaagcagcagatgaacataagatatctatgactatgactggaattagacactttaagcattaa

SEQ ID NO: 202415 - DNA, 1336 bp, Unknown
  Bacterial polypeptide expressing nucleotide sequence isolated from the Sargasso Sea
aatgacctttctaaaaataaataacttaagcattgactataaaatgaggaaagaaacagtaaatgctgccaaaaacataaatatagatattaacaaaggtgaaatagttggaatagttggcgagtctgggtcgggaaaaagtaccgtagctaacgctatagtaaacttgattgatgagccaggtaaaatttcaagtgggtcaatatttatgggtgaaacaaatatcagtgaaaatccagaaactatagttcaatacagaggaaaaaaaataggattgatatttcaagatccacaaacttctttaaatccaatacttactgtaggagaacaactcatagaaacaatacaaactcatttaaatataagtacaattgaagcaaaaaataaagcgatcaatctattgaaagaggtaggtataaaagaagcagaaaaaagatttagcaattatcctcatcaattttctggaggtatgagacaaagagttgtaatttctctagctttgtgttgtgaaccagaattactaattgcagacgaacctactacagcactggatgtttcaatacaatcccaaattcttgaattaataaaaaagttaaccaaggagagaaatttagcagttatacttataactcatgatatgggtgtaattgcagaaactacagatagagtagctgtaatgaaaaatggagatctggtggagattggtccaacaaagcaagttttagtagaaccaaaagaaaaatatacaaaaagtctagttagctcagtgccaccaacaaataaaaaaatatcaaggtttacaattattgaaaaagagaatttaaataatcaaaataataatatcaaaatattaaacagatggtctaaaaaaagtattgtagatcaaaacttagttaaaatccaaaatttgagcaaatcttttgatgatagttttttcacagaaaatacaaaaaattcagtaatggcagtagacgatgtttcttttgatatcaaggaaggtaaatcatttggtctagttggtgagagcggtagtggtaaaactactatagcaaaaatggttgtgaatttatttaaaccaagttctggggatatattttttgataatgtaaatgttactaagatcaaaaaaaataaagatttattaaaatttagaagacaaattcaaatgatatttcaagacccattttcctctttaaatggtaggttaaaagtaaaagaaattattgcagaacctattaaacttcataacccaaatataaaatctatggatttagacaattatatttacgatttgttagagtctgtagaattaagtcaacaatcggcgataagatat

SEQ ID NO: 202416 - DNA, 1312 bp, Unknown
  Bacterial polypeptide expressing nucleotide sequence isolated from the Sargasso Sea
atgacttttcttaaaataagtaatttgagtgtcgactataaaatgagaaaagaaacagtaaatgctgcaaaaaacattagtatagacattaaaaaaggcgaaattgttggattagttggggagtctggttctggaaaaagtactgtagctaatgcaattgtaaatttaattgatgaaccaggtaaagtttcaagtggatcaatattgatgggagaaacaaatatcagcgaaaatccagaaacaattgtccagtatcgaggaaaaaaaattggattaatatttcaagatcctcaaacctctttaaatccaattttaacaattggtgaacagcttatagaaacaatacaaactcatttaaatttaagttcagaggatgcaaaaaataaagcaattaatctattaaaagaagttgggatcaaggatgccgaaaaaaggttttataattaccctcaccaattttctggtggtatgagacaaagagttgttatttctcttgctttatgttgcgaacccgaattattaattgcagatgaaccaacaacagcactagacgtttctattcagtctcaaattctagaattaattaaaagactaacaaaagagagaaacttagctgtaatacttattacccacgatatgggagttatcgctgaaactacagatagagtggctgtaatgaaaaatggagacttagttgaactaggtttaaccaaacagatattggttgagcctaaggaaaaatacacaaaaagcctagttagctctgtaccaccgactaataaaaaaatatctagatttacaataattgaaaaagagaacgttaataatcaaaataataacattaaaatattaaacaggtggtctaaaaagataattgttgatcaaaatttaatagaaattaaaaacttgagtaaatcttttgatgatagttttttcactgagaatacaaagaattctgtaatggctgtagatgatgtctcactaaatataaaagaaggacagtcttttggcttagttggtgaaagtggaagtggcaaaacaacaatagcaaaaatggttgttaatttgtttaagcctagttctggagatatttattttgatagtgttaatgttaccaaaattaaaaaaaataaagatctacttaaatttagaaaacaaattcaaatgatatttcaggatccattttcctcgttaaatggaagactaaaagtaaaggaaattattgcagaacctattaaacttcataatccagatataaaatctagcgatttagacagttatatctatgatttattagagtctgttgaattaa

SEQ ID NO: 202417 - DNA, 1177 bp, Unknown
  Bacterial polypeptide expressing nucleotide sequence isolated from the Sargasso Sea
ttggaagttaatactgaaacaaaagatgcttggtctgaaagcacaatattactaatcacatatgcagacagtatcagtaaaggtatttcaggcaaaagccttaacaactttggaacattctacaaaaaatatcttaaaaaatttataaatagtattcattttcttccgttttttccgtcaagtggagatggcggtttctctgtcaaaaatcattttgaagtagatgaaacctacggcacatgggatgatatcaaagagttgtcaaaaaatgctaacataatgactgatttagttttaaatcacgcatcttctgaaggtcaatggtataaaaattttttaaaagagaaaaggccgggcaaaaattatttttatattgtagataaagattatgactgtagtaaggttgtaagaccacgtgaccataatctactttcagagataaaatttttaaatgaaaaaaagtttttatggtgtacttttagtcatgatcaaattgatttaaattttaaaaatcctgaagttttattagaatttattaatctaatactcacattttcatcgtatggaatcaaaatttttcgattagacgcagttgcatttatttggaaaaagtctggaacgacttgtctaaatctaacgcaaactcacgaaattattaaattattaagagatattgtagatcaactagagaagaatataataattgttactgaaaccaatttaccaaaacaagaaaatttaagttattttggcaagaatgatgaggctcactgggtatataactttccattaccacctttaattataaatacttttctatttgaggattcaagagcccttacaaaatggagcatgaaaatgccacccgctcagataggaaacgcctatcttaactttatttcatcacatgatggcattgggatgagacctgctgaaggtgtattaactgataaagaaataaaaaaaatgcttcaaagactaaagaaaaatggaagccagttttcaatgagaaaattatctaatggtgaagaaaaagtgtatgaggctaatatttcattatttgatgctctgaaatttaccgataatgatgaaaaaggaaaatttgacttaaaaagatttattgctgctcattgtataattttagcaattgagggagttccagcttttttattttaat

SEQ ID NO: 202418 - DNA, 580 bp, Unknown
  Bacterial polypeptide expressing nucleotide sequence isolated from the Sargasso Sea
tggagcagacagagttatgttgatggatttgcatgcaggtcaagtccaaggatttttttcagctacggttgacgaattaacagcactacctattctggctagatattttattgaaaaaaaacttgatgacatcgttgtagtttctcctgatattggagggactaaaagagcaagagattttgctaacaagctaggggctcctttagcaattattgaaaaaagaagaattggaaacaaagatactgttgaatctctaaatattattggagatgttaaaggtcaatcagctgttttatttgatgatgaaataaatactggtggaactatgttagctggatctgttttgttgaaagaaaatggtgttaaggatgtttatgttgctgcaacacatggagttttccccgaagattctatagaaaaaatagtaaattcaaaagaaatcaaagaagttgttgttaccaattctctaccaataaattacaaaagtgaaaagcttaagattttatctatttcagaactgttgggtgaagcaattaagagaactaataggggagactctgtaggagcactatttctttag

SEQ ID NO: 202419 - DNA, 1654 bp, Unknown
  Bacterial polypeptide expressing nucleotide sequence isolated from the Sargasso Sea
gatgattatatcagctgcagcaacaggtctacatgcttggcttgtaagacctgctttagatgaagttttgataaaaggaaataaagaaatgctgtttctaattcctattgctattataattgttactctttgcaaaggtatttcgacttatactcattctttccaaatgagtaaggttgctcattcagtaattgctaaacttcaaacgcatatgtttgaaaagttaatgtatttgaatttaagctattttaatgaatctaagtcaggaaatttaatttcaagacttattaatgatacctactatttaagattggcaatagtaaaatctgtaacagctgtaatcaaagatattttagttattatctttttgctagcaaatatgttttatcaaagttggtcattaacactttttgcgttttttgcattccccttagcaatttggccaataaaaaaaattggtaaaagtattagaaaaattacatatgaaattcaaaatgaaattgcaaaattttctaatgttttagctgagagtattaaaggaattcgtcaagttaaggcatacaacagagaagagtatgaaaagaaaagagcatttgaaactattaatttcattaagaaattttttatacgatcagcctttgtgagcaatagattaagtcctctaatggaatttatagggagtttagctgttgctgtttctatctatgctggtggagtttttgttttgaatgaaagcatgacaacaggccaattcatgagttttcttgtaagtcttcttttggcataccagcctgtaaaagctcttggtaatttaaatataagtgttcaggaaggtctagcaggtgctgaaagaatatttttattactggatacgccgttagaaaaatcagaaaaacatgaagttagtagcaatattaaattaaatggaaatatagaatttaaagatgttaatttttcttatagtgagcaaaaaattcttaataatataaatttaacaatagattcagggaaaaaaactgcttttgtaggaatgtcagggagtggaaaatcgactttaattaatttattattgagattttatgatcattataagggaacaattaaaattgatcaaaaagatattaaatcattgtcgttatttgacttaagagaaaacatttccttaattactcaagaaactcttttatttaatgagagtatattagataatatcagatatggaaatatgtcatctaatgatgatgaaattcaagcaattgcagatatttcaggtgtaagtaaatttgcaaatcagttacctgataagctaaatacaattgttggagaaagtggtattaaactatcaggaggacaaagacaaagaatagcaattgcaagagctctaatcaaagatgctcctatacttattatggatgaagcaacgtcttcattagataaccttactgaaaaggaaatacaatcagctcttgatgaattaatgaaagataaaacaaccattattattgcccatagactaagtactatacaaaatgctgatgtgatttttacattagaaaaaggtataatagaaagtaatggcgatcatgaatatttaattaaaaattctgcagtttacaaaaaattacaattgcaagaagactataatgacaattaa

SEQ ID NO: 202420 - DNA, 449 bp, Unknown
  Bacterial polypeptide expressing nucleotide sequence isolated from the Sargasso Sea
tgctaattgcactaaagctggatgtaatatgattatttgtgatgggcgccctatgagtctattattaaagttaaatcagcaagaagctaagtttagttggtttaaagctaacgaaaaacctctaaattcaagaaaacaatggatatctggagctctacaagtaaaaggaaaaattactatagatcaaggcgcatcagaagccattaaaaaaggtttttctattttatcagcaggcattattaaaactgaaggtaattatgaaaaaggcgacttaattcaaataattgatgaaaatgaaacctttgttggaaaaggtttaactcactttaataattctgaggttgaattaattaaaggttctaagagtaataatattgaaactatattaggttatagaggtaaagatgaagtcattcatagagatgatctagtatttgaaataaaataag

SEQ ID NO: 202421 - DNA, 1606 bp, Unknown
  Bacterial polypeptide expressing nucleotide sequence isolated from the Sargasso Sea
atgcgacccgtatcgggctccgcttttgtttgggacgacgcccaccgaaccgcgccgccccggaaaaacggacacggccctgtttccagttttcctgtttcaggcagccgccgcttcccgccgcgcgttcgcgaacgggcggaacatcatcgcgatcaggaacgcgccgagaccgatcgcaaacgagccgagatacagccagccgtagctgccgaacgtatcgacgatcaggccaccggcgacggggcccgcggccatcccgaggctgccggccatcgcgcagccgccgatcacggtgcccatcatccgcagcgggaagttctcgcgcgcgagcaccgaatacagcggcatcacgcccgcgtagatgaagccgaacacgacggcgaccgcgtagaacccgtcgagcgtgcgcacgaagtaatacccgagcgcacccagcgcctgcgcgagcagcccggccaccagcatgcgcttcgcgccgaggcggtcgcccaggatcccgaacgcgatccggccgcccatgccggcaagcccttcgacgctgtagatcgacaccgcgacgatcagcgggatcccgcacgtcaccgcgtagctgaccgtatggaagatcgggcccgagtgcgtcgcgcagcagaagaagttggtcagcagcagcacgacgaactgcggcgagcgcagcgcatccgcgaccgacatcgccgcggggtcgccggcaggcgccgacaccgcgggagccgcctgcgcgccgtcgagcgcgggcgcccggcgcaccagcagcgacaccggaaccatcacgacggccgccagcgccgcaaccagcagcatcgacgtgcgccagtcgcgcaccgacacgagccacgcggccagcggggccatcgtcatcggcgccatccccatgccggccgacacgagcgacaccgcgaggctgcggtgcgtgtcgaaccagcccgtcacgcacgccatcatcggcgcgaatatcgcagccgtcgcgccgccgacggcgagaccgaaggtgagctggaacgcgagcagcgacggcgcgcggctcgccagcgccaggcttgccgacaacaggacggcgcccgtcatgacgaccgggcgcgtgccgatgcggtccgacaagctgccccacgccatgctcgcgaaggccatcgcgatgaagccgagcgtcatcgcgccggaaatgccggtcatcgaccagcccgtgtcgcgcgcgatcgcgcgcaggaacaccggcagcgaaaacatcgcgccgatcgcgatgcagcccatcaggccgcccgcggcgacgatgacccagcggtatcgggagtccggcatggggtacctccttgtcgtgatgacgatcctcgggaaccgggcgccacctgcttcgcgcaatgcccagtcgacatggatacgacgggcgacgcatcgggaaatcgacatgcgcggcacacgcaacgtcgaactttcattgtccgccgatcggctccgcccgcaacgggcggaccgggccgtcaccgcacgccggatcgaccgttcggtccgcccctgccccgcgcctttccggaatcgggaaagtcgaaatcagaaatagttggttggaccgcgcgatccggctgac

SEQ ID NO: 202422 - DNA, 836 bp, Unknown
  Bacterial polypeptide expressing nucleotide sequence isolated from the Sargasso Sea
tcttattggtttagaggcagtaacgatgaatgaaaaacctgaattattaaaatttgatgctgaagaatccgaacctctaaatcatgcttatggaactaatggaataattacttctttactacttgctactgatatcaaacgtaagtggtattcaatagttatcgactgtattgaatttgaaaaaacaatagaaatattaaaaactctcaccagcgcagcaattgatctgaaactaggagcaattcttgaagatgaaattgtagatcaaatgccaaaatggcttaaaagtaatgatagaagtcacaagattttgattcaagctacttttggaggaacaaaaacgatcgagttgatttgtaaaaaattcaaagttgaatttaccctcattggggaagaagaaaaactcgttaatggaatttctgaagtcgtatggaatcatacaactcttcatatgaggtccaaggataaaaattggacttatttacagatgcttttgccacttaataatgaactagaattgatcaattttctgagaaaaaaatggggtagaaaagttctttggcatttagaggcagtttctcaacaaggatcaccgcgattagcggctttaccagtattaaggtggaatgggatagatgagttaaatgaaataatggaagattgtaaaaaacttggggcttttatttttaatccccatgttttaactgtcgaaggaggaggcctaggagtagttgacgcagatcaagtaaaagcgaaattaaaatttgatcctaaagggctattgaatcctggaaaattggaaggttgggaagtaaaggaacaatttaatatttaac

SEQ ID NO: 202423 - DNA, 598 bp, Unknown
  Bacterial polypeptide expressing nucleotide sequence isolated from the Sargasso Sea
ctggcaattgtcagaaataaagaccacctagtattctttctttccctaatattatccatcagcctgctgttaaataatcaaaatccaaggatgggtattattagaggcaaggcagccgaaattatttcatttttatcctctccaatgacattgatgaaatcacttatttttttagaagaggaaaatcaacttttgcgcgaaaaaaccttggcactctctctgcaggtcgaatcaatgcttaatctgcaaaaagaaaatgatgaactgctaagcatgttagattttaaacgtgaaacaaaattattgatcaagccagccagagtcgtaaataaaggattgcaacctaacttggtctccatagtaattgatgggggtaagatcgacggtattaagaaagaccaagctgtattaactccaaaaggcgtgataggtaaaaccattgaagcaggagaaaaagcatctattgtacagcttattactgattctaattacagaataagtgttagaatattgcctagtggagcgacaggtatattaagaatgataaaaggtaatactggacaaataagagaggtacaaaaaaatgtcgaaaattaat

SEQ ID NO: 202424 - DNA, 1072 bp, Unknown
  Bacterial polypeptide expressing nucleotide sequence isolated from the Sargasso Sea
aatgattttagctttagtttttgcggtttctttaattaatactgcttctgctaaaactttaaaaatccaacttacttttcctaaaacttcttacgatggtcaaatcgtaaagatgtggactgatagagttactcaattaactcgaggagagttagtatttgaacttttatcaaaaggtgaagttgttggtatgaaagaaacactagaagctgttgacaaaggtttagttgatggtggtgctgcttggacacactactggtctaactaccacccagctgctatgttgttcggttcacctgttgcaggtggaggaatcggattatcaactaaatcatggttagcatggtattttgataatggtggaaaagagttatacgacagactttgggatgaaatgggtatgaatgtgaaaggtttcgtgatggcgtcatctggacctgaggcattgggttggttcaaagagccaattacaagcatggatgatttcagaaaatatagatttagaactcctccaggaatcccaggacaaacttataaagatattggtattgcatctgtgtctttatcaggtggtgatattttaccagcacttgaaaaaggaactatcgatgctgctgaatggtgttgtccaaagccagactcagtttttggtttccaaaaagttctaaaaaattactacctacaaggtttacatcaaaacgtagttaatggtgatatttacattaatggcgatgtatataattctctaactgatcatcaaaaatatgcaatggaagttgcatctgaagcgatgattactagaaatatcacaaacagagctgtagaaaatggaaaagcattgattgatcttactgaaaatcacggtgtaaaattatgggatacgccagctgattatttcacggagtatatgaatgctgctcaagcaactcttaaaaagaacgctgcagaaaatgctttctttaaagaagtgtatgatcatatgacagcgcatgcgaaaatagttgtgccatttatttctcagatggaaacatctgatgcatctattggtactgcatttgcaaaacaacaataa

SEQ ID NO: 202425 - DNA, 1126 bp, Unknown
  Bacterial polypeptide expressing nucleotide sequence isolated from the Sargasso Sea
ttggagcaaggccctgatggtctagtctactgtgcaattcgtggttcccgtgtattttcatcaaacccaccaagatggagcggtggagtgattgttcttgatgtggatgaccctactaatatttctgtgattgatacaacttttcttagttatcatacaacatcaggtaattcgattccttatcaggtgactttagatattgagtttgacattgatggtaatttatggatagcgaatccatattgtatcaatggcaataacccaatccatgttaggtcgccagatggcatatggaaacattttggttcttcagaaacctcaactcgtataagtcaatcgcctggttcaatcgtttttgatagctggggtaggacatgggtctcagcattccaggctgaagaggccaatttagggatataccctaacggtggtatatcaatgttgagttatgagggccagccctatgatccatttagctttaattgggatataatcaacagtagtggcacagtttggtctttaggaatgggtattaatgatagggtgtactatcttacgccttcagggttgaactattatgatattgatggcggttatgatcctgttattagagagaatccttattcatattttccaaatatctcatttggtaatggtgccggaatttcaatcgataaacaaggtaatatttggacctattcccctagtcagggtgtacatgttcttttagaaaatacgtcctattggcctgatattaatggctttagaacaaataatagccctcttttatcggatgagataagagatattgattttaacgaaaaattgaatcttgcatatatagctactagtaaaggagttaatgttctgagagtcccatttggtgtccctaaaactagctataaaaatataaaagtatttcctagccctttttatctaccttctgataaaccaatgaaagtagatggcttgttatacgggtcttcaatgatggttacaacgttggatggtaagattgttcggcatattcgatcccaagggcttgaaattgatggagatcaattatcctgggatggtagagataggaaggtgattatgtgtccacaggtgtatatctgctgttaat

SEQ ID NO: 202426 - DNA, 768 bp, Unknown
  Bacterial polypeptide expressing nucleotide sequence isolated from the Sargasso Sea
tatgtcgtcaaagaatttgaaagaaattgcagataaagccagaaaaaatgattttatttccatctctgagttaatgactggtattgaaactagagttttttcaagaaaagaagtgtctcaaataatcttcaaggagtctcataaatcattaaagattggaattacaggtcctcctggcgctggaaaaagttcactaatgaacaagcttattccactgattaggaaagaaaatttatcggttggagtaattgcaattgatccttcaagcccaattactggaggctcttttttaggagatagagtaagaattaataatgctgtaaatgatgataatgtttttataaggagtatgggatctcgagcagagcttggcggagtaactgagctagcagaagattttagtgatattttagcgtttagtggaaaagatattatttttatagaaactgttggagtaggacaatccgagtacagtgtgtctgaaatcactgatttgactactttagtttttgttcctgaatcaggagatgaaattcaacttcttaaagctggaattttagaactagctgatatatttgttgtcaataagtcagatagaaaagattctaatctattagtaaaatctataaataatattttatcatcaacaaaaaaagactcaaagaaaattccaatttttaaaacaagctgtaaaacagatgttggtattgaggaattttcaaaagctattagttcatactataaatccatgaaagacaataaagatat

SEQ ID NO: 202427 - DNA, 730 bp, Unknown
  Bacterial polypeptide expressing nucleotide sequence isolated from the Sargasso Sea
aatgaatttagaaaatttttttgaaaatcaaaataaaaaaaaacagttaaaaatattaacatgtggttcagttgatgatggtaaatcaacattacttgggaggctcatgtatgattctaaaaatatttatagtgatcaattaagccaaaccaaggctgaaagtgaaaagtatggaacacaaggaaaagaaattgatcttgcattattaattgatggtcttcaagctgagagagagcaaggaataacaattgatgtagcttatcgttattttgagactgcaaaatgtaagtttattattgcagatactcctggccatgaagagtatacaagaaatatggcaacaggagcatcaaattcagatgtaggaatcatattagtagatgcttcaaaaggtatattagatcaaacaaaaagacacacttttattttatcacttcttggaattgaaaatataattgtaacaattaataaaatggatttaattgattatgatgaaaaaaaatatcaagaaataatcaaatcctttagattaatttctaataaatttaattttaaaatagaacaatttattccaatctctgctctgaatggtgacaatgtatttactaaaaataaaaatataatttggtataaaggtaagacattaattgagaaacttgagcagataactttagttgatgtagaagaagatgttttttctatgcctgttcagtgggtaaatagattaagc

SEQ ID NO: 202428 - DNA, 1372 bp, Unknown
  Bacterial polypeptide expressing nucleotide sequence isolated from the Sargasso Sea
gatgacacacacagccccaaccaacaccacattacccaacgcagagcttgcgcagcaggatattggctcacagagcactgcaccagaaagcattgcatcagaccattttgtatcggagaaggttgtgcctgaaacaagcacattactaacgcaggcgtttgatctcaatagccagatccgttcacaatttccgacattaacccaaatgttgggcgattatcccctgtgttatctcgataccgcggccaccagccaaaagccgcagtgtgtgttagaggcaatggcacaatattaccaatacgacaatgccaatgtgcaccgcgcagcgcaccagttatcggcgcgcgccacttctagctacgagaaggtgcgcgatcaattgcaggtatttatcaatgccaaacgccgtgaagaaatcattttcacccacggtaccactgagtccatcaacttagtcgcgtttggcttaacgccacaacttaaatcaggcgatctgattttgatcgacagcgccgcccaccacgccaacattgttccgtggcaagaattggccaaacgcacgggcgctatcattaaaccgattccgctgactcaagattgccgacttgatctaaatgcctaccaagccttgctcgaactgaaacccaaggttgtcgccctgtgccatgtatccaacgccttaggtacggtaaatccggtggtggagttagttcgccaagcaaaagcccaggggacactcaccttagtcgatggcgcgcaggccgtggcacatttaagtgttgatatggccgccatcgattgtgatttttatgtgttttctggccacaagatgtacggcccgacgggcattggcgtgctttatggccgtttcgagatactcgatacccttacaccgctgcttacgggcggcgaaatgatcaaacgcgtcagttttgatggcaccgaatttggcagtttgcctaatcgcttagaggctggcacaccgccgatcagtgcagtgattggtcttggcgccgctatccgctttttgcaacaacacctcacgtcagaggttaaagcccatgaagctgaactgcttcagtatttgcaaaaccaactacgcgtccttggcgatgtgcatctgtatggcgcgcatcgcgataatattggcaccgtcgcttttaaccttgccgatgaacatcatcaggatgtgggcattttattagatcaacaaggcgttgcagttcgctgcggccatcactgcgccatgcccttaatgcaaacccttaaccttaaaggctgttgccgcgcctcaattggtatctacaccaataaaaccgatatcgaccgctttattgccgccttggcctcagttaaagaattgctactctaa

SEQ ID NO: 202429 - DNA, 1165 bp, Unknown
  Bacterial polypeptide expressing nucleotide sequence isolated from the Sargasso Sea
atgacatcaaatagtcttcaatttatagacaaatttagggaagtttacaacttagagattattgaaagccaatctgacataaaaagactttcaaaagatttttataactactctccaattcttactgaaaaattagacgaatgtatcgctgatttggtggtaagacctaaagatcataacgcggtgaagaaagtagcagaaatttgttgggaattatctatcccacttactttaaggggttcaggtacaggtaattatggacaagctgtcccattgtttaaaggagttgtaatgcagatgagtcactttaataagttagaagaatttgatccagatacaggttttgtaaaagtacagtctggttgtgtaatgggagatttgaataaacaattagagaaatatgggagggaattaaggttgcttcccagtacttggaaaactgcaacaattggaggttttgttgcaggtggatcaggaggtattgggtccattaggtggggatttttaagagatccaggaaatcttattggtttagaggcagtaacgatgaatgaaaaacctgcattattaaagtttgatgctgaagaatccgaacctttaaatcatgcttatgggacaaatggaataattacttctttattacttgctactgatatcaaacgaaagtggtattcgatagttatcaactgcattgaatttgaaaaaacaatagaaatattaaaaactctcacgagcgcagcaattgatctgaaactaggagcaattcttgaagaagaaattgtagatcaaatgccaaaatggtttaaaagtaaatctagaagtcacaagatattaattcaatctactcttggaggaataaaaaccatcgagctaatttgtaaaaaatttaaagttgaatctatcctacttggggaagaagaaaatcttgtgaatggaatttctgaagtcgtatggaatcatacaactcttcatatgaggtctagggataaaaattggacttatttacagatgcttttgccacttaataatgaactagagttaattaattttttgagaaaaaaatggggtaaaaaagttctttggcatttagaggcagtttctcaacaaggatcaccaagattagcggctttgcctgtattaaagtggaatggggcagaagaattaa

SEQ ID NO: 202430 - DNA, 1828 bp, Unknown
  Bacterial polypeptide expressing nucleotide sequence isolated from the Sargasso Sea
tttgtttggctcaaacgaaaccagagtgtggatttcagatgttagcactaagtcagatgataatagtggtgctaagaccattggtcttggtagttatgacaactattatacgcaccaaggctggttaaccgaagatcacagatatttcattgttaatgatgagttagatgagtctaataatgcttataataataccagaaccttaatttggaatgtggaagatttaaataatccagtagtacataaaacgtactttggcccaacaccagctattgatcataataattatattattggaaataatgtatacatgtcccattatacagctggattgagagtgatggacatttcagatatttctaatccaactgaatcagcttattttgatgtgtatccatcgagtaataatacttcgtttgatggtacttggagtaatttcccatattatggcagtggaagtattgttgttacaggcatagatgaaggtttgtttgttgttagtcctagcggaagtggacctgcacctgcaccggaggtaacttatacgattcctagcgatggaaatgttactttgaattggcaagatttaatttgtatatcttcctgtacagtaaatatttatagatcgctagagcctggatttaccccagattcttcaaacttattaacaagtgtaaactatccaacatttgaatttacagattctaacttggatgagaatattttttattattatagactttcagtaactagtaatggacaagaaagcttgtttactgatgaaattcaagtaaagcctgtgtttgttcctaatcaagcaccaacaatagatacaccagatgatgttcaattctttgaagataacagatatgatgttgtattaactggtattagttacggaaatgatattaatcctcaaaatattactatagatgcaacttctgataatgacgatttattttcagatgtttctatagattatgatccagcagctgatccaatacttttatcattaattccaaatcaagataaatatggtacatcattaattactttaactgttaaagatgatggtggaactgttggtggcggtgttgattcaactgtggtttcatttaacgctgaagtattaccagtcaatgatgcgcctgcaagtttcagtactgttggagaatattttatttcagatggagaatatataacaggaatagattttagaactttatatataaccccagaaaatgtaaatgattcattaaggtttgtgtggaatgccacaacagatatagatggtgatgatgtttcttatcgaatgataggatatcaagggctagaattcttatcaatggatgaaagcgagtatatcacagataattataaaacttgggccttgaaagatttggctgctcaaacggatacagttacagtgcttgaagggttttggaatgttattgcgagcgacggttcattatcacgttcagcatctcttttaaacggtcaaatgagaattgatggaagacagcttattcctgatattttagcaataagacagagttatcctaatccatttactaattttactactattgaatatgatgttccctcagagcaaaacgtggtaataagaattttcaatatcagaggtcaaactataagaactcttgtaaacgaagacaaaaatgcaggatactatacagttatttgggatggtacgaatgagaatggcgatgaagtaagttcaggtgtctatttttgtcaaatgtatactccaaaaaatccaaatggcgggcagtttgtcaaagccaaaaaaatggttaaaattagataa

SEQ ID NO: 202431 - DNA, 1738 bp, Unknown
  Bacterial polypeptide expressing nucleotide sequence isolated from the Sargasso Sea
atgaaagcaatcttggttacggcttgcccggcgggcattgccaccagctttctcgctgcaaaacggatagaacagcaggccaaactggctggctgggagcttaccctcgacgtcggctccagcgtgcagccccgccaggtaccggacaaggcgcagattgccgcggccgacctggtgctggttgtcgccagtgccccggtggatctcgccgcctatgacggcaagcgggtctatcagggcagcatggatcttgccttgcaggatccggccgccttgctggacgccgccgccagcggcgccagcctctatcgccatcaagccgcctccgccgttgccaatgctgccgccaaaccggccgctgctggcaagcgcatcgtggcagtgaccgcctgcccgaccggggtggctcacacctttatgtcggcagaagcgctggagaccatggccaagcaattgggtcatcagatccgcgtcgagactcaaggctcggttggtgcccagaacgccctgactgccgaggagattgccgccgccgatctggtgttcctcgccaccgacatcgaagtagacatggcccgtttcgacggcaagccggtctatcgcaccagcacaggtgcggcgctcaagaaaacccgtgccgagctcgacaaggcctggagcgaggcgaaaacctatcgccacagcggcgccagccagcccaagaaagaagagaaggcaggcccctacaagcacctgctgaccggtgtctccttcatgctgcccatggtggtggcgggcggcctcatcatcgcgctctcgttcgtgttcgggatcgaggcgttcaaggtggaaggcaccctggccgcggccctgatgaagatcggtggcggctccgcctttgccctgatgatcccggtactggccggctacattgcctactccatcgctgaccgtccgggcctcgcccccggcatgatcggcggcatgctggcaagctcgctgggtgccggtttcctcggcggcatcgtggccggtttcctggccggttacagcgccaagtacctgagcgacaaggtgcgcctgccggtgaccctggaagcgctcaagcccatcctgatcattccgctgtttgccagcctgtttaccggcctggtgatgatctacgtggtgggtggtccggtggccggcatcatgaatgccatgaccaccttcctcaacaacatgggctccgccaacgctgtgctgctgggtgtcatcatcggcgccatgatgtgcttcgacatggggggcccggtcaacaaggcggcctacgccttcggggtcggcctgctggcctccaaaacctacgcccccatggcagccgtgatggccgccggtatggtgccggcgctggggatggggatcgccaccttcctggcccgtaccaagttcatcaaggcggagcaggaagcgggcaaagcctccttcgtgctgggtctgtgcttcatctccgagggggccatcccgtttgccgccaaggatccgatgcgggtcatcccggcctgcatggtcggcggcgccctgaccggtgcgctctccatgctgttcggctgtgaactgatggcgccccacggcggtctgttcgtgctgttcatcccgcacgccatcagcaacgttatgatgtatatcgtggcgattgcggcaggctcgctgctgaccggcgtctcctacgccatgctcaagcgcggtgaagagcaggccaagctggccacggcataag

SEQ ID NO: 202432 - DNA, 685 bp, Unknown
  Bacterial polypeptide expressing nucleotide sequence isolated from the Sargasso Sea
ttggagcggcttgatcttctctcgaagaccgggttgcagacaggtgctaattccgagattacacgtcttcgggatcgggcgggcagtgagagagggccgaggttgggtttagcggaggctttgatcgagcggggctatacgatagacgggatcaatctcggctgggggctttttcgggacgagggagcctgggaccaagagattcttcgtgttacgtatccgtttccttatcgggagctgattagtagagcggccgaggattgggggataagtccttacgtgatggcggcgattattaggcaggagtcggcattcaaggccgatatcgtaagccatgcgggtgccatcggattgatgcaagtgatgcctccaactggggcagaacttgcccgcacccatgggcctgaagggtttaccccagagtcgcttacgcgaccggaagtaaatctccacctcgggtcggcattttttgtcgcgatgagtcggcgttatgaccatgagcttcctttcgttctctcggcctacaatgccggaccgacgcgagccacgcgttggcggcgttatcctgaggcttccgatctggttcggtttacggagcggatcccattctcagagactcgcggatacgtgaagaacgtaagacgtaatctggctatataccgggctctttatggacaggactgac

SEQ ID NO: 202433 - DNA, 457 bp, Unknown
  Bacterial polypeptide expressing nucleotide sequence isolated from the Sargasso Sea
atgggattagaagataaaataaaggaatcaataattttagcaatgaaagctaaagacaaaactagacttgaagctttaagggccgttaaatcagctattttattagaaaaaacaaaggctggaaacaaggaaattttagatgaaaatcaaatcataaagttattacagaagcttgtcaagcaaagaaatgaaagtgcaaaaatttataaagaacaaaatagagatgaattagctgaaattgaggatagtcaatcgaaaattatttcagaatatttaccagatcaacttaatgaagaagagctaataactattatagatgaagtcataatatcaacaggtgccgagtcaatcaaggatatgggtaaagttattggagcaactaatgtaaaggttcttggaagagctgaaggaagagttgtagctgacttagtaaaatcaaaattaaattccttataaa

SEQ ID NO: 202434 - DNA, 917 bp, Unknown
  Bacterial polypeptide expressing nucleotide sequence isolated from the Sargasso Sea
gatgaaacataatgaaaaggatttaatagatggaatcaattctggaagtagagtttctctttcaagattaatcagtttagttgaaagtgataaatctgcgatttttagaatatccaatttgctaaaaaagaaagctaaatcaacctatgttgttggtataactggtcctcctggtgcaggaaaaagcactttgacaaatagattgatacaaaattttagatcaaaaaaattatctgtaggtgttcttgcagttgacccaagtagtccttttacaggtggagcagttctaggcgatagaatccgaatgcaagagcatgctttagatgatcaagttttcatccgaagcattggaagtaggggtgacttaggtggtttatcaaattctacatctgcaataatcaaactgtttgatagctttggaatggatattgtaatcattgagactgttggtgttgggcaaaccgaattagatataatcaagatatcagattgtgtacttgtaactttagtgccagaagctggagatggggttcaagcaatgaaagctggattaatggagattggagatgtatttatagtaaataaagctgatagaggtggagccgataaattagcaagagaaattgactatatgatttcacttaaacatacaaatagttcatggaataccaaggtaatattagctgaggcagaaaacaatgttgggattgatgaaattgttgagcaaatagaatcattcaagtcctatgaagaacaaaataaattattagaagctaagagaaataaacgaaagattacagagattgaatcattgctattacagaaagttaaacttgaagtggaacaactaaaaaaaagggaagaaattataaatatcatttcggatgcatcatcaggcaaaattaaaactgaagaag

SEQ ID NO: 202435 - DNA, 2329 bp, Unknown
  Bacterial polypeptide expressing nucleotide sequence isolated from the Sargasso Sea
ctcgatctctctggcatcacgcaatcttttgaggtgcgcgccagcgtcaccgatctggcgggcaactcggccttggacggggcgccgctgatcggccagagcgagacgctcacgctgtccgaagccggactggccaatggccctgtcaccgcgaccggcagcctcaataccggcgccgggattgatggcagcctgcaggtcaccttcgccgctgaccagagcggccttgaagggctgaagcttaccagccatggagttgcactcgattacgtctggggcggccagaccctgaccgccactgccggtggtgtcactgtctttaccttgaccctcaacaataacggcagctatcgcatcgtctggagccagagcctggatcaccccgagagcaaggggcagaccctgcttaacactcaggaaaccttgagtctgccgttcaacctcgagtaccgcgacagcgacggtgatctggtgacagcgccgctggtgatcaatctgctggacagcaatccgccgagtttcgagatcccggccattaccctcgtcgaggatgactttaccaacggcgccgccgtgatcggggagagccgcttcgtggttggccacaccgccgatcccctgctggccgattcgctggtgttcagcaaccagagcgacaccctggcgaccctcaatggctcgggtctggccagcgacggccatccgcttgtcttcgaatttgccgatgatcgcacccttctgggctactacccgggcagcaatggtcagcgggttgaggtgttgcgcgcccagctgctggccgaacagcagggcagcgatgtgggcggccgggtggtagtcaccctcaccggctcgctcgatcatcagggcagcgacagcctctcgctggggttgcaggtgagcgccaacgagattgatggcgacaccaccagcgctaacctgttcctgaccatcgacgacggcagggatccttcgcttggtttcgacaagggcgtttcgttgcaagaagggggcaaccagcgcatcgatggtcaactgccggtcacggtaggcagtgatcgcctggtctctctcacttttgaggcgagccagccggtcctggcgggcctcaccagcggcggcaagccgaccagctatcaggtgaacggcaatctcctcaccctgctggacgcagagggcaagggcatcctgaccgtcaccctggatctcgatggcaagtaccatcttgagctcaaaggcgtgctggatcagccggtggccaccgacagcatcaagctgggcctgcaggtagtgggccgcgattttgacggggaccagagcaacctcggcaccctcaacatcaccatcatcgacggcgtcttgccgcaggttgaccctgtttccctgaccctcaccgaagacagcgactggcagctgggccagacccttggcggtgaactcgccatcacggcgggcagcgacccgctggtgagcatcgcgtttgatgccagccagccgggcctgcaggggctcagctcgggccagcagagcgtgacgatcacggtggccgatcatcttatcgaggggcgtactcccgatggccagctggtgtttgagctgactctcggcaacgacggaaaatacagctttgccctgcatcaaccgctggatcagggcagtgcagatgcgctgctgacggcggggttgaccctgaccgacagcgacggcgacaaggtctcctccaccattaccgtggcggtaggtgatggcgccaacccgaccatttccgccgtcaccggcaccgccatcaccgagatggcgcaaggggaggcggcagcggtcagcaccatgagcttcgtggtgacccacggcagcgatgctctcgaccctgcctccctcggttttgacatcgccaccatccagagcaccctgaccggactcaccagccacggcagcctgatcagcttctccctcgatggcaacggccagctggtcggcaccacggcggatggccgcgagatcctgcgcgccgagctgagcctgatcgagcacagcggcaactggagcgtgagcgctagggtgaccctgacgggcgagctggatcatcaagggagcgaatccctcaacctgccgctggcggtcaccctggccgacaaggatggcgatcgcatcggtaccacgctgccgctcaccatcgcggatggtaaggcgccaagctttatcccgggcactggcgtgaccttggatgaggggaacctcaccggcagcaacagtctgagccaaaccggtcactttgacgtgcaagccgggtcggatcgggtggtcgaggtggcctttgcggatgctaacg

SEQ ID NO: 202436 - DNA, 933 bp, Unknown
  Bacterial polypeptide expressing nucleotide sequence isolated from the Sargasso Sea
ttgctgcaggtaccgcatatacgacccacgatattgagatgatgcttttctacattttttattcaatgtttgggttcaaaagagtgatggatctagcttgggcggcaggcgattctcaaaccagagggtttttgattggtgcaacgtctggcagaacaacgcttgcaggggaaggattacaacaccaagatggtcaaggattaattatggcctcaatgataccaaattgtatttcatatgatccaacttatgcttacgaaatggctacgattattgaagatggaattaaaagaatgcatactaacaaagaaaatattttttattacataactgctctaaacgaaaattataagcatccagaaatacctaaacatgttaaaaaagaagatattttaaaaggtatgtatttatttaaagagtttagaaaaaaaggtaaggcaatagttcaactttttggttctggttcaatattaaatgaaaccattaaagctgcaaaaatattaagcgaagattttggaattgatagtgacgtttggagtattacatcttactcagaaatacaaagaaatggcgctgaaatattgagatggaatcaactacatccagataaaaaaccaaaaaaaacatatattcaaaaatgtcttaaaggtagatcaggaccaattattgcagcaagtgattatataagatctcatatagatcaaatacgcccctatgttgaaaatagtttttatacacttggaactgatggatatggaagaagtgataccagaaaagaattaagaaaattttttgaggttaataaaaaatcaattgttgtaaatactctaagtgctttatccaaagaacaaaaaatagctagtaaagtagtaaatgatgcaataaaaaaatataaaattgatccagaaaagccatatccaataaagttataaa

SEQ ID NO: 202437 - DNA, 838 bp, Unknown
  Bacterial polypeptide expressing nucleotide sequence isolated from the Sargasso Sea
actgaaaaagaaagccaaatcaacctatgttgttggtataactggtcctcctggtgcaggaaaaagtactttgacaaatagattgatacaaaattttagatcaaaaaaattatctgtaggtgttcttgcagttgacccaagtagtccttttacagggggagcagttctaggcgatagaattcgaatgcaagagcatgcattagatgatcaagtttttatccgaagcattggaagtaggggtgacttaggtggtttatcaaattctacatctgcaataatcaaactgtttgatagctttggaatggatattgtaattattgagactgttggtgttggacaaactgaattagatataatcaagatatcagattgtgtacttgtaactttagtgccagaagctggagatggggttcaggcaatgaaagctggattaatggaaattggagatgtatttatagtaaataaagctgatagaggtggagccgataagttggcaagagaaattgactatatgatttcacttaaacatacaaatagttcatggaataccaaggtaatattagctgaggctgaaaacaatgttgggattgatgaaattgttcagcaaatagaatcattcaagtcctatgaagaacaaaataaattactagaagctaagagaaataaacgaaaggttacagagattgagtcattactattgcaaaaggttaaacttgaagtggaagaactaaaaaaaagggaagaaattataaatatcatatcggatgcatcatcaggcaaaattaaaaccgaagaagcagtaaatttgatttttaaatttttcaaaaatggatcctaa

SEQ ID NO: 202438 - DNA, 1522 bp, Unknown
  Bacterial polypeptide expressing nucleotide sequence isolated from the Sargasso Sea
aatggaaacttttacagctattttagattttctaacttattggcttgttgatcagtactggtttccagcttttttaattggtactggtatcttttttactatttacttaggttttccacaaataaaatactttaggcacggttggagggttcttacaggtaaatatgttaaggaagacactgaaggcgacacaacgccgttccaagctttgaccaccgctttatctggaactgttggtactggaaatataggtggtgtagctctagctatatttctgggaggaccggcagcaatattttggatgtgggtaaccgcttttcttggaatgactactaaatttgtagaggtcacgctttctcataaatacagagaaaaattacccgatggaagtatgtctggcggacccatgtattacatagaaaatggcttaaacatgaaatggttagctattgttttttctgtttgtttattattaatgtgtttaggtacaggtaatatgcctcagattagtagtatttctgtggtcctgcttgatacattcaatatacccaaagtagcaacaggactagtcctttcggtacttgtttggttggtgattattggtggtattaaaagaattgcacaaatcgcaagtaaattagtcccgtttatggccttttggtacatagtgggtgggttagcagtgattattagtaattatgaaaacataattccctcgcttcaatcaatctttgttcatatctttactccaactgctgctgttggaggctttcttggtgccagcgtggctgctgcactgacgagaggagtcaatagggggttatattcaaatgaagctggtcaaggctctgctccaatagctcacgcttcatctaaaactgagaatcctatagaagaaggtatggtctctattcttgaaccttttatagacacaataattatatgcaccctaacagggttagttattctttcatctggagtatggaatcagaaatttgaaaataaatttgaggctagtgcaatggtttttgttgaagggaagtttattgaaactagtcaagaagacgctatagaccttagaaattactattatggaaataacgatgaaatagaatatacaggtccaattgaagtaattgatggaagaattaatttagagaaagtaactcttcttcacaatagatcaattgcggaaaataccattgtttatttatctagtgataattctttattttcggggttattagaaattaagaatggaagtgtaaaaaacacaggagactatgtcataaggggtaaatccttgcttcttggcgctgatttaactggtaaagcatttactaagagtatttttggagattttggacaatacatagtagcaattgggctcttattattcgccttctcaacagtaattgcctggtcatactacggagacagagcaacagtacacctttttggagaaggttgggtgttttggtatagagttatttatgtagcagcctttttacagcctcagtaa

SEQ ID NO: 202439 - DNA, 1051 bp, Unknown
  Bacterial polypeptide expressing nucleotide sequence isolated from the Sargasso Sea
atgatcaattttataaaacaaattgcagggatgttttccaccgacatatctattgatttaggtacagcaaatacactcatctacatgaaaggaaaaggtattgttttagatgaaccatcagttgtagtcgtcagagacgagcaaggtgcaaataaaagagttgaggctgtcgggaatgaagctaagaatatgcttggcaggacacctgtcgggctaacagcaattagaccactaaaagacggcgtgatttcagatttcacaatttgtgaaaaaatgttgcaacactttatcaaaaaagttcacaagagtgcctggtttaggccaagtcccagagtcttaatatgtgtcccatgtggggctacacaagttgaaagaagagcaataagggaatcggcctcaggtgcaggggcaagagtcgtccatttaattgatgaaccaatggctgctgcagtgggtgcaggtatgccgctcgatgagccaagagggtatatggtttgtgacattggcggcggaacgtctgaggtagctacaatatccttaaacggtattgtctatgcttcatctactagaataggtggggatactttctcagaggctcttattagttatgttagaagaaattatggatgtgttataggagaccctactgctgaaaaaataaaacatgaaataggatcagcttatccaagtagtgatttattagaaatagaggtgaagggtactaatttagcagcaggtgtccctcaatcatttacgattaacagtaatgagacgttagaagccttacaggaggcacttcaaggtattgtagctgctgtcaagactgctctcgaaaacacacctcctgagcttggagcagatattcacgagagaggtatggtgcttacaggtggtggtgcgcttctaaaagaccttgacatgctaatcaaagaagaaacgggaatgaatgttgtcgtagcagaggacccgcttagttgtgtagcacgaggtggtggtaaagtcttagagataatcgatgagaaaggggtagaatttctctcaatggattagg

SEQ ID NO: 202440 - DNA, 1272 bp, Unknown
  Bacterial polypeptide expressing nucleotide sequence isolated from the Sargasso Sea
aaactataaatgaagaaatgaaaatagctgcagcaaacgcaatagcttatttagcaagagaaagagttccggatgaagtagtggctgcaatgggtggggaaaggccaacatatggaaaagattatattattccttcaacatttgatccaagattaattagtgtaataccagttgcagtagctaaagcagctatagctagtggtgtagcaagaaaaaaaattaaagattttgaaatttacaaggaagaattaaagcaacgacttgatccttcagttacaattatgcaaggtattaattctcaaataaaaaaaacacaaaaaagaattgtttttgctgatggagaagatgaaaacactttaaaagcagctattgcatttaaaaacaccaaattaggaattccaatattggttggaaaaaaagaaaaaataaaagaacaacttaaaaatattggttatagtgaaaactttaatattgaaataactaactctacagataaagaaaaaagagagaaatatgtaaactttttatttaaaaaaatgcagagggaacagggtcttttagaaagagattgtgacagaatgataagaaatgatagggtaatttgggcttcttgcatggtttcatgtggagatgctgatggtgcggtaactggtaatacaagaagatatggagtttcattagaaaaagtaaaaaaagtaatagagccaagaccaggagagataatgtttggtttaaatatgattgttaaaaaaggtaaaactgtttttattggtgatacaagtgttcatgaatatcctagctcggaacaactagctaaaatagctatatcatctgcaagagttgtaagattatttggttttgatcctaaagtagcttttttatctcactcaacatttggacaaccattaactagtagaacaaaacatatcagggatgcagttgatatattaaaaaaaaagaaagttgattttaaatttgatggagacatgcagccagatgtagctttagataaagaatattctgatttatatccatcttcaaaaatagttggtaatgcaaatatattaataatgcctggacaacatagtgcagcaatttcatataaaataatgaaaacactgggtggggcaaaagtaatcggacctttactgattggattgggtcaggcaatagagattgtgcctcttagatgttctacttctgatatattaaatttagcttctatagctgcatactcagctggtgttattgattataataaaacaaattagt

SEQ ID NO: 202441 - DNA, 904 bp, Unknown
  Bacterial polypeptide expressing nucleotide sequence isolated from the Sargasso Sea
gatgaaatttttagaagtaagcaacttagatattgaatatcaaacaagaaaagaaacaatttatgcaagtaaaaatgtttcattcaatctccaaagaggagaaattattggtattgttggtgaatcagggtctggaaaatcaactgtagcgaacgcaattataaacttaatagataaaccagggataattaccaatggttcaataaagcttgatggcggagaacttcataatgatacagatataataaaaaatatcaggggtaaaaaaattggctttatttttcaagatcctcaaacttctcttaatccattatttaaaataagagatcagttgattgaaacaatacaaactcattcagacctcaatttcaaagaagcagaaagtaagtcaataaacttgcttagggaagtagggatagaaaatccagagaaaagaattaatgattacccccaccagtttagtggaggaatgagacaaagagtagttattgcacttgcaataagttgtgaacctgacttgattatagctgatgaaccaactactgctcttgatgtaagcatccaatataaaattttacaactattaaagaagctcactgtagaaagaaatttaggtattataattataacccatgatatgggtgtaattgcagaaactactgacagagttattgtcatgcgacatggcattatagttgaacaagggaaaaccaatgatgtattgttaaaacccaaatcattggagtgtaaaagtttagtaatgtctgttcctccgacaaataaaaaaattgaaagatttaagttattaagcccagaaggaaggcaaataaagagtagttctataaaacttacaaataacattataaaaaattgggccaagagagaaacttccaccaaaaaaatt

SEQ ID NO: 202442 - DNA, 1141 bp, Unknown
  Bacterial polypeptide expressing nucleotide sequence isolated from the Sargasso Sea
ttgactacaaacgaaccagatcaatcaaattcagaagtaatttcacgagatccagtatccttacctctagtagtaactgttggtgatttagctgaaatacttcaagagtcacaagttgatgtagttaaatccttgatgaaattaggcgtaatggcttctgttaacgaagaagttgatttttctacagcagcaagagtagctcaatcatttgaaattccagtattaaagcctaaagagtctgtagataataaaaatgctttaaatgtgggatcttctatagatacttctgataaaaatactggagaaaaaagagctcctgtaataacagtattaggacatgttgatcatggtaaaacaacacttctagacgctattagaaaaactaatatagttgaaaaagaagaaggtggtattactcaaaaaataggtgcatatcaggtcaaacaccaaggatctgagataacttttatagatacacctgggcatgaagctttttcctctatgagagtgtctggaacaagtgtaactgatatagtaattttagtagttgctgctgacgatggattaatgccccaaactattgagtcaataaatcatgctaagaatgcaaatgttccaattataattgcaatcaataagtgtgatttagaaggtgcggatgtagataaagtaaaaggccaacttactgagcacgagcttattgtcgaagattatggaggtgaagtcctttctgttgaagtatctgcactaaaaggagaaggaataaatgaactattagaatctatttctctattatcagaaataagtgaacttgaatcaaactcaaatctttctggaaaaggtgtaataattgaatcttataacgatcctaaaaaaggatctatttctacagtcctagtaaaatcaggttcatttaaacaaggtgatattatagtttctggaacaaattcaggaaaaatcagacagatgatagatggttatgggaaacaaacaaaatcagctaaaccttcaacaccaattcaaataatgggtataggtggaattaatgaaattggtgaaattgtagaagttgtttctagtgaaaaagaagcaaaaaaaatgatacagaaattatcaagatctaatcaaaagcaaaataata

SEQ ID NO: 202443 - DNA, 433 bp, Unknown
  Bacterial polypeptide expressing nucleotide sequence isolated from the Sargasso Sea
atgtgtgattacaatggccatatgaatgttacttactattacaaattatttgattcagtttattcatctttttatatcgaaaaacttggatttgataacgaatatttaaaatctggtttttctacatttactcttgaggatagcatcagatatttaagagaatttaaactcaatgataaggttcgcccgttttttgagcttcacaatgctaacgaaaagatgatgcattttgttggagtcttattaaatgaaaataatgaaatagcagcaattttcgaaacagttttgggacatgtaaatttaaaaattagaaaaataactgcattcagtgatgaaaagtgtacgtttctgcaaaactacataaaacaaaacaagtctaatgaagaccttcctttccaaatacgattaaaaattaaatctttaagaaattaat

SEQ ID NO: 202444 - DNA, 2816 bp, Unknown
  Bacterial polypeptide expressing nucleotide sequence isolated from the Sargasso Sea
tatgatacgaataatagattttgccttaaaaaaagccaaaacaacccttttgattgctttcatggtaatcatagctggctcatatgcaagacaagaaataccaatagctgcatctccaaatgtgcaactaccattcataacagtatcagtttttttagatggtgcttcaccgagtgatacctcaagactaattgctaggccactagaaaataggcttaaaagtgtaactggtgttaaaaatattcgctcaacaagttatttgagttatgcaagaatttttttagaatttgaagttggctttgatatagatcaagctctcgttgatgttaaacaaggggtagaagaaacaaaataccaattaccccttggtgctgaagatcctcaaatagaagaatatagcgaggctagctttccagtaatgaatatcagcattgtgggaggaagttctgtaaggcagaaggtattctacgcaagggagctcaaagacagaatagaaccaatagaacaaatacttgaagtgagaatgactggcgcacctgaagaggttcttgaaggtgttattgataagtcaaaaatggaatcatatggtgtaaccctttcagatatttataactcggttgcaagtaataatgtgattattccgggtggaaaacaagatactggaagaggaagctttaatattgaagtaccaagcattattgagtcagctaaagatgtttatagcattcccgtaaaggtatcaaaagatgcgattgttacgcttggcgatattgcaacaatcaaaagaacatttaaagattttacatcttatgcaagagtaaatggtcaagatgctgtcacactagaaatttcattaagagaaagtgctaatgctatagatgcatctaatgcgataagagatattcttagtaattttaaaaatgaacttccagaaaatttatcaattgtaatttctaatgatgacaccgtttatgcaagtttgatggtgaaagagttgaatggcaatattattgctgctgttgttctaataatggttcttgtaatagctagcatgggtactagagtttcaatgttagtaggtttatcgattcccttctgttttttgatgacatatttaattttatatagtcttaatatggaagttaattttctcgtaatgatgggtttacttcttggaatgggaatgctgattgatgggtctatcgtaattacagaatatgcagataaaaaaattgcggagggtttatctcgagcagaaggttatgctctcgcatcaaaaagaatgttttatccgatagtcgcatctacaggaaccacacttgctgcctttatcccaataatgttctggcctggctttactggtcaatttatgagatatctaccgataacaattttctttgtattatctgcgtcattgttttattcattaattgtgattccagttttaggttcgtattttggtcaaaaagaatctgcattgaataataatgaggaacaaacctctatttttgtgaggctaacagaatggtatggaaaatatatcaaacgttttgttgaaaacccattagaaacttttttagctgtggtttctgttttactgatcattatcatgagttacgctttttctgggaaaggaacaatatatttcgctattgttgatcctgtccaagcaaatataactgtcaaagcaagaggtaacttttcagcacttgaaacgaaagagattattgagcaggttgaagaacgttttttagaagtagaaggaattaaaaatgtttatcttcgctctggaacaaactggtggcaatcaggcgcagatagaattggtggcggtttcatagaaactttagaaccatcacaaagagacattagcggctttgaaatcatggatcgacttaaagcatctacaaaagatcttccaggaattactgttgaagttgaagcagatattggcggtccttcttttgattcaccaattgagttagatgtttttggtaatactgaaagtgaggttaataatgcagttgctaaaattgaaaactatatgcgaaatgaaatgagtggtttaaataatatcttttcttctaaagcctacccttctgtggaatggagtgttgacgttgataaacaaaaggcggcacaacttggtgtgagcgtgagtgatgttggcgctcttgttcaaatgctaaccaatggatttaaggttggtgagtatcgtcctgatgatgctaaagatgaagttgaaattagagctagatttcctgattctgatagaacaattacaggtattagagatttaaatgtcgttactaaacaaggcacagtaccagtaagttcttttgttaatgttgctcctaaagaaaatagagaaacggttaatagaaaaaatggaaaatattttcaagaagttggagctggctcagatgatgactcaaaggtaaatcaaaagattgaagaattagaatcatggcttcaaaaaacagatcttggatatggaatatcatatcaatttagtggtatggctgaagaaacagaagaagttaataattttatgattatagctggattaactgctgtatttatgatgttgctgatgttaattactcagttcaatagtttttatcaatcattgattattttatcttcagtaacaatttcttttgttggagttttgcttggtctattgattacgggtaaatcttttagtacaactatgacaggaatttcaattgtcactcttgctggcattgtggttaataataatatcgtacttatagatacatttaataaattaaaagaagaggctcctcatttaa

SEQ ID NO: 202445 - DNA, 1288 bp, Unknown
  Bacterial polypeptide expressing nucleotide sequence isolated from the Sargasso Sea
atacaaaaaaatccaagtttttttgaaaaattaaaaaaagattatagtgaaaaaactttaatagaaactggtttattctacttagatgagaaaaaaaaaatttatgtcgaaagatttagaggtcgattaatatttccaattaataacatctcaggtcaacctattgctttaggtggaagagtaattgaaaatttagattacctagccaaatatataaattcacctgagacaaatttttttaaaaaaggatcaaatttatataatttggatctagcaagaaaactttctaataaaattgatcatatttatttggttgaaggatacatggatgttgtaggtcttagtaaaaatggaattgataatgtggtagcaaatcttggtacatctttaacagacaaacaaattttaactttaaatcaattttttgatgatatcataatatgttttgatggtgatgaaagtggatataaagctgctgtaagagcggcagaaaattcgattaaggaattaagacccgagaaacaaatatcatttttattcctaccagataaagaagatccagacagttatgtaaataaaaatggtaaagcaaattttatagattttacaaagcagagcaaattatcaattcatcaatttatttttagtcattataaaaaacaaaccaataacaacccttcatctatggctatttttgaaaaaaaacttagaaatatcgcaaatacaattaaagatgattttataaaaaaatatgttctggaatactttttagcaaaaattgctgagttaactccacattctaactataataataaaaaattttattctaaaaaaacaaaatctttagaaagtacaaaaaaatattttaatgaaagtcagtctttgactggagtagaattaaaggagttttctttattatacttgttgataaataacctagaattgttgcaagcaaatatacatttgattgaaaatattaaattatttactgagttaaataaaaaaatattagaaatgataattgaaaaattaaaatctggcatacaaattacggttcaagatcttaacttggatattcaattaactgaaaaaataaacaaatttgctccaataaaacatattctaaaaaatcagtctgatgatgatcaaaaaataatagaattattagaggatatctctagggatttaatgaattatgatcttgagttcagaattcaggaattagaatcgaagttttcagtggatatgagtgagtctacatttaatgagttaaaagagctcaaaaaaa

SEQ ID NO: 202446 - DNA, 670 bp, Unknown
  Bacterial polypeptide expressing nucleotide sequence isolated from the Sargasso Sea
atgcccaaagcaaataacttttttcgcgaaaaaaatgtccataaagttaatattccgggaatagtactggctggtggacaatcgactagaatgggtggcatagataaaggtttaatcagtctaggtaggtatactttattagagcacgtaatagctcgtttaaaaccgcaggtttcaacaattgtattgaatgcgaacggcgacaagagtcgatttgccggcttttccataccaattttctcagactcaatccaggggtttctgggtcctctggccggagtattagctggctttgagtgggctgagcagaatggatatgaaaaaattgtaacagtggctgctgacacacctttcttccctaaaactttggtagaacgacttgacacagaattgaacgagaaaagtgcagatatagcgttggcatgcacttcgaaaggttcaggcactaaattaacccgacacccaactttcgggttatggtctgtttccctcaaagaagatttaaaaaaatctttgttggccgggactaggaagatagtactttggacagaaaagcaaaagaccgtagaggttatatttgatgagactgattctgagactttttacaatataaatactcaagatgacttgttgactatgaaagaaaagcttcagaggatttcaacatgaa

SEQ ID NO: 202447 - DNA, 1297 bp, Unknown
  Bacterial polypeptide expressing nucleotide sequence isolated from the Sargasso Sea
taggggagcattagatgtaagagcgaagacaattaacgaggagatgaaaactgctgcagcagacgcaattgcaaaacttgcaagagaaattgtgcctgaagaagtggctgctgcaatgggaggtgaaacaccttcttatggaaaagaatacattattccctctacatttgatccacgtttaattagtgttattccagttgcagtagcgagggccgcgatgtcaagtggagttgcaagaaagaatattgaaaattttgatatatattctgagcaacttaaacaaagattggatccatctgtaactattatgcaaggaattaactcgaaaattaaaaaaaataaaaaaagagttgtatttgcagatggggaagacgaaaatacacttaaagctgcaattgcttttaaaaatagtaatctaggaacaccaatcatagttgcgaaagaaaaagttgtcaaagagaggttaaaagaaattggatatggcgaaaattttgatattgaaattgtgaattcaactaaaaaagacaaaagagaaaaatatgtaaactttttgtttaaaaaactgcaaagagaagaaggcttattagagagagattgtgatcgaatggtaagaaatgatagagtaatatggggttcttgtatggtggcgtgtggagatgcagatgcaatggtaactggaaatacaagaagatatgcccaatctcttcaaaagattaaaaaagttgttgaaccaaggcctggtgaaataatgtttgggttaaatatggttgtaaataaaagaaaaactgtgtttattggtgatactagcgtacatgaatatccgacatcggagcaattggctgaaatagcgatttcagctgcaagggtagtaagactttttggtttcgatcctaaagttgccttcctttctcattcaacttttggccaaccattaactagtagaacaaagcacattagagatgcagttgaaattttaaaaaataaaaaagttgattttaaatttgatggagacatgcagccagatgtagctttaaataatgaatatgcagatctttatcctttttcagaaattgtcggtaaagcaaatatattaattatgccaggacaacatagtgcaactatttctcataaaatgatgaagtctttgggtggcgctaaggtgattggtcctttgttaattggtttggggcaaccaattgaaattgctccattaagatcctctacttcagatattttaaatttagcttctgtagcggcttattccgcgggagttattaattataaaaaaccaaattaa

SEQ ID NO: 202448 - DNA, 1354 bp, Unknown
  Bacterial polypeptide expressing nucleotide sequence isolated from the Sargasso Sea
aatgatatcaaaacttaaatttatagacaaatttagagaagtcaaaaacttagagatcattgaaaataaatccgatgtaaaaagactttcaaaagatttttataactactctccaatccttactgaaaaattagacgaatgtattgctgatttggtggtaagacctagtgatcacaaagcggtaaaggaagtagcagaaatttgttgggaattatctatcccacttactttaaggggttcaggtacaggtaattatggacaagctgtcccattatttaaaggagttgtaatgcagatgagtcaatttaataagttagaagaatttgatccagatacaggctttgtaaaagtacagtctggctgtgttatgggagatttgaataaacaattagagaaatatgggagggaattgaggttacttcctagtacttggaaaactgcaacaattggaggctttattgcaggtggatcaggaggcattggttccattaggtggggatttttaagagatccaggaaatcttataggtatagaggcagtaacaatgaatgaaaaacctgcattgttgaaatttgatgctgaagaatccgaacctctaaatcatgcttatgggactaatggaataattacttctttattactttctactgatatcaaacgtaagtggtactcattagttatagactgtattgaatttgaaaaaacaatagaaatattaaaaactcttactagcgcagcaattgatctgaaattaggagcaattcttgaagaagaaattgtagatcaaatgccaaaatggtttaaaggcaaatctagaagtcacaagatattaattcaatctactcttggaggaataaaaaccatcgatctaatttgtaaaaaatttaaagttgaatctaccctacttggggaagaagaaaagctcgtgaatggaatttctgaagtcgtatggaatcatacaactcttcatatgaggtctagggataaaaattggacgtatttacagatgcttttgccacttaataatgaactagaattaattaattttttgagaaaaaaatggggtaaaaaagttctttggcatttagaggcagtttctcaacaaggatcaccgcgattagcggctttgcctgtattaaagtggaatggggcagaagaattaaaagaaataatggaagattgcaagaaacttggtgcgtttatttttaatcctcatgttttaacagttgaaggaggaggtctcggagtggtggatgcagatcaagtaaaagcgaaattaagatttgatcctaaagggctattaaatccaggaaaattggaaggttgggaagtaaaagaacaatttaaaatttaa

SEQ ID NO: 202449 - DNA, 1396 bp, Unknown
  Bacterial polypeptide expressing nucleotide sequence isolated from the Sargasso Sea
gttgacaaccacagatccagatcagactaatgaagagattaaatctccagtctctttacctttgataataacagttggagatttagcagaaaccttgtctgaatctcaagttgatgtaataaaagcactaatgaaattaggtgttatggcatctgtaaatcaagaagttgatttttcagttgctgctagagttgctcaatcatttgaaataccagttctaaaaccaaaagaagcagtagataattctacagcacttaatgtaggctcttcaatcgatgtaaatgatgataatcaaggagaaaaaagagcacctgtaataacagtattaggtcatgttgatcatggaaaaactactcttctagattctataagaaaaacgaatgtagttgatggagagtatggaggaataacacaaaaaattggtgcatatcaagtaaaacacaaaggttctgagatgacatttattgatactcctggtcatgaagctttttcttcaatgagagtatctggaacaagtgttacagatattgtagttttagtagttgctgctgatgatggtttgatgccacaaacaattgaatcaattaatcacgcaaaaaatgcaaaggttccaatgataattgcaattaataaatgtgatttagaaggagcagatattgatagagtaaagagtcaattaactgagcatgaaataatagttgaagattatggtggtgaggttttatcggtacaagtttcagctcttaaaggagatggtatagatgaattactcgaatctatatccttagtatcagaaataaatgaacttgaatcaaattcaaaaacatctggaaaaggtgtcataatagagtcatataatgaccctaaaaaaggatcaatatcaactgtgcttgttaagtccggaacatttaaacaaggtgatattttggtatctggaaataattctggtaagattcgtcagatggttgatggatatactaatgaaattaaatctgcaaaaccttcaactcctatacaaattatgggtatgtcagatataaataatattggagatgtcgtagaagttgtaaaagatgagaaacaagctagaaagattattcaacaaagaaatagggaaaagcaaacaaaaaattctaaaattactaccttatcccaagtagtaaaaagagctaaagcttctaaagataaagaaataaatatagtcattaagactggttctaatggagcattaaccgctgttgaacaagttgtaagcgatttaactagcgaagaaatacaagtaaaaataatatcaggatctgttggagctgtaacagagtcagatgtgatgcttgcctcaagtgctgaggatagtataattgtagctttccaaacgatagtcaaaatggtgcagtaa

SEQ ID NO: 202450 - DNA, 397 bp, Unknown
  Bacterial polypeptide expressing nucleotide sequence isolated from the Sargasso Sea
aatggataaagttctaatccaaaatttagaagctaataatcaacgtgatttatctcgattaataacagaaattgaaaatacagatgtagaaaaaagtgtggatcttgataaactttttcgtaaaactaatcatgcaattcgaataggtattactggtccccctggagctggaaaaagttctatcacaaatgaattaattaaaaattttattaagactaatcataaggtaggtgtaatcgctattgatcctacaagtccattttcaggcggatctttattgggagatagagttagaatgaatcaataccataataatgagaatatttttattcgaagcatgagtactcagggacaacttggcggattatcaagaaaggcgcaggatataggagatatt

SEQ ID NO: 202451 - DNA, 1441 bp, Unknown
  Bacterial polypeptide expressing nucleotide sequence isolated from the Sargasso Sea
atggaaaccctaaccggaattttagattttcttacctattggttagttgaccagtattggtttccagcctttttaataggtacaggtatattttttaccatttatttaggatttccacaaataaagtattttaagcacggttggagaatcctttcaggtaaatatgttaaggaagatacagaaggagacactactccttttcaagccttaaccacggcattatctggaacagtaggaactggaaatataggtggagttgctcttgcaatatttttaggaggtccagctgccatcttctggatgtgggtaactgctttcttgggtatgaccacaaaatttgttgaggtaacactatcgcataaatacagagaaaaattaccagatggaagtatgtcaggtggccccatgtactacattgaaaacggtttaaatatgaaatggctagcagttgtcttctctgtatgtttattaatgatgtgcttaggaacaggaaatatgcctcaaattagtagtatttctgttgtacttctagatacttttagtattccaaaaattgttacaggactagtactttctgttcttgtttggttagtaataattggaggtattaagcgaatagctcaaatagctagtaaattagtaccttttatggccttttggtacatagtaggtggtttagcagtaatcataagcaattatgaaaatataattccttcccttcaatctatattcattcatattttcacccctacagcagctgttggaggatttctaggtgctagtgttgcagcagctcttactagaggtgttaatagaggtttatattcaaacgaagcaggtcaaggatctgcacctatagctcatgcttcgtcaaaaacagaaaatcccatagaagaaggcatggtatcgatactagaaccttttatagatacaataattatatgtaccttgactggtttagttattctttcctcaggggtttggaatcaaaagtttgaaaataaatttgaagcaagtgctatggtttttgttgatgggtcatttgttgagacaagccaggaagatgcatctttattaagggattattattatggaaataattccaatatagaatacacgggtactttaaatgttactgacggaaagataaatctagagaaagtaactcttcttcataataggtcaattgcagaaaataccattatttatttatctaaagataattctttattttctggggttttagaaattgaaggaggaaaaattacaaacataggtgattttgctttaagaggagaatctttactccttggtgctgttcttacaggcaaagcttttactaagagtatttttggagattttggacaatacatagtagcgattggactcttattattcgctttctcaactgtaattgcctggtcatactatggagacaggg

SEQ ID NO: 202452 - DNA, 1054 bp, Unknown
  Bacterial polypeptide expressing nucleotide sequence isolated from the Sargasso Sea
cactttaataagttagaagaatttgatccagatacaggttttgtaaaagtacagtctggctgtgtgatgggagatttgaataaacaattagagaaatatgggagggaattgaggttgcttcctagtacttggaaaactgcaacaattggaggttttattgcaggtggatcaggaggtattggttcaattaggtggggatttttaagagatccaggaaatcttattggtttagaggcagtaacgatgaatgaaaaacctgaattattaaaatttgatgctgaagaatccgaacctctaaatcatgcttatgggactaatggaataattacttctttactacttgctactgatatcaaacgtaagtggtattcaatagttatcgactgtattgaatttgaaaaaacaatagaaatattaaaaactctcaccagcgcagcaattgatctgaaattaggagcaattcttgaagaagaaattgtagatcaaatgccaaaatggtttaaaagtaattctagaagtcacaagatattaattcaatctacttttggaggaacaaaaacgatcgagttgatttgtaaaaaattcaaagttaaatctaccctgcttggggaagaagaaaatctagtgaatggaatttctgaagtcgtatggaatcatacaactcttcatatgaggtctaaggataaaaattggacttatttacagatgcttttgccacttaataatgaactagaattgattaattttctgagaaaaaaatggggtagaaaagttctttggcatttagaggcagtttctcaacaaggatcaccgcgattagcggctttacctgtattaaggtggaatgggataaatgaattaaatgaaataatggaagattgtaagaaacttggggcgtttatttttaatccccacgttttaactgtcgaagggggaggcctaggagtggttgatgcggatcaagtaaaagcgaaattaaaatttgatcctaaagggctattaaatcctggaaaattggaaggttgggaagtaaaggaacaatttaatatttaac

SEQ ID NO: 202453 - DNA, 1177 bp, Unknown
  Bacterial polypeptide expressing nucleotide sequence isolated from the Sargasso Sea
atggattattcattcaaaacttttttaaaacatacagctaaagatttctataatcagtctgtaaatcctccagttgttagagcatctacaattttgtttaagtctcttaatgacattagaaaaactcaaaaaaaacacttaaaagatcctactggaggccattttgattatggaaggcaaggaacttcgacaacacatgcattatcaaaaattttaactaaatttgaggaatcatatcatgttttcctaacaccaactggttttggttccgtttttcttgcaatgtttagtgtagtaagaccaggagatgaaattttagtttctgatccagtatacagtcccacgagaatactaactcaggattttttcaaagattttaatattaaagccatattttataatccaagagatttgtccactttaaaaaaaaatatgacaaaaaaaacaaagttaatatttgttgaaaatccaggcagtaacacatttgaatttcaagatctctcaaaaataatttctattgcaaaaaaaaataaaatttttacagctatggataatacatggggaacgccatattttctaaaacctattaaattaggatttgatatggctattgtatcagcaactaaatattattctggacactcagatgtaatggggggaagtttagcagtcaataaaagggtatttaaatatgttcaaagagcagaaaaaatttctggtttaagaatgggaccggatgatgcttatttaataattagaggtcttagaactttagatacgagattagatagacacgagttaaatactaaaaaaattgcttcctttttaagtaaacataaaaagattacagttttgtatccttataaaaaaggaactaaagactataagatgtggaaaaaatattataaaggctcctcaggtctaatgggtcttaaaatcaaatctagaaataaaagctccatagatagatttgttaactctttaagattgtttggatatggttatagttggggaggttttgaaagtttggcattgcaccaaaaaattaaagagcaaggaaaaagaaaatacttgaatttatcaaaagatgaacacattgttagattacatattggcttagaagaccctaaagatttaataaaagacttaaaaaattcattgaaatttataaaatgag

SEQ ID NO: 202454 - DNA, 982 bp, Unknown
  Bacterial polypeptide expressing nucleotide sequence isolated from the Sargasso Sea
atgcaagacgtgccccaggaaaaccagcgaacaaccaaaacccacgccgaccagctcaaccggcagtgttactgcatcacccttgaccgaaaagcgctcactgacagcctccagaagcagttttcagacactgggaacgaggcgccggccactcccgagatccatcatttcttttcaaatacaccggtttttgtaccccaggcggacatcgcgacgatggagcggatcgttcaggcgatcgaatcggctgccgagcttccgtcctaccgggaaagagctctgtcctgggcgccggacatcgccggttttgatccaggccccatcggggccttcatgggctacgactttcacctgggcgagaacgggcctcagctgatcgaaatcaacaccaacgccggcggcgcatttctgaacacggtattggcccgggcacaacaccgatgctgtgacccgtcccagcagaccgctggcaccaaccgggcactggatgggttcgaggacgcagtgtttgccatgttccagcaggaatggcaacggcaaggtggcgactcgacgcccggttgcctggccattgtggacgataccccagaatcccagtttatgttcccggaattccaactggcccagcagttattccaggccagaggcatagagaccttgatcctcgacccatcggagcttgagtatgttgatggtgccctgagcgcccacggcaagcctatcgacatggtgtacaaccgcctggtggattttgccttggaggccccggctcttggggcgctgaggcgcgcctacctcgacggcgcggcggtcgtcacgcccaatccacgcgcccatgcgcttatggccgacaaacggaacctgatcctgctatctgatgcccaaaccctgcgcgactggggcctgagtgaaaccgaggcaggatttctggatagagctgtaccgaagacccggctggtttcagcaagtgatgaggcggagt

SEQ ID NO: 202455 - DNA, 2401 bp, Unknown
  Bacterial polypeptide expressing nucleotide sequence isolated from the Sargasso Sea
catgagcggctgctttcactgtggtgagccggtacccgccggcagccgctatgccctcgagataaaaggcatagttcaacccatgtgctgccccggttgtcaggcggtggcagaaaccattctggagtgcggcctggccagctactacgagcaccgcaccgcccctggcaccaagggcgagctggtgcccgcagagctcgccgccctcacccactacgacttggccgaagtgcagcaggacttcgtcaccgacagcgccaccggcagccacaaggtgcgcgagatccagttgacggtggaaggcttgacctgcgccgcctgtgcctggctcatcgaacgccatctgggcaatctggccgggctgcactacatcaacgtcaacaccaccacccaccgggcccgcatcaagtgggatccggaccagctatctttgagcgatatcctcaagggctttgccaagatcggctatcgcgcctaccccttccagactcaccagcaggaagcactctacgccaaagaggtgcgcagctacatgttccggctggcactggcggggctcggctccatgcaggtgatgatgtgcgcggtggcgctctacatggacctcttcatcagtgtcgaagaggagttcatggtctacttcaagtggataagtctgctgctctccacccccatcatgatctactcggcccagcccttctacgtgggtgcctggcgcagcctcaagcaggggcacctctccatggacgtgtcggtgtcgctggcgctgatcggtgccttcgtcgcctccatgtgggccaccgtgttcaataccggtgaggtctattacgactccatcaccatgttcgtcttcttcctgctactagggcgcttcctcgagctgcgggccagacgcaaggcctccgagtcgagctccaacctggcgcggctggtgcccatcatggccacccggctcgatgaggagggtgaacacgaggtggccgccaagacgctgcaggtgggcgaccgggtgcgggtgctggcgggtgccaccctgccggcggatggcatcatcctgcttgggcaggccagcctcaacgaatccatgctgaccggcgaacagctgccgctgctcaagcaggtgggggatgccgtctacgccggcaccatcaacaccgacgcccccctcgaaattcgggtcagccatcgcatcgaagagtcgcgcctggcccagatcatgcggctgcaggatcacgcgctggacgacaaaccggccattgcccagatggcggacgtgctatcccgccacttcattctggtgctgctgttcatcgccgctggcgtctggaccttctggcacttccatcagccggagcaggccttctgggtcaccctggcggtgctggtggcgacctgcccctgcgccctgtcgctggccacccctaccgcgctcacctcggctaccgcccgcctgacccgcgccggcatcctgctgcgccgcggccacgtgctggacgtgctgacccgggccaaccgcatcgtgatggacaagaccggcaccctgaccacgggcaacatcagcctgaccagcacggaggctctgggcaatctcgacgcggcgcgctgccttgccattgcccgcgccctggaggcctattccgagcaccccatcgcccgcgcctttcgcagcaataccgcagaggacgccgtgctgctggcggccagcaaggtgacccccgtcatcggacacggtatcgaaggggtgatcgagggtcgccactatcgcctcggcagtgcccgctggctcggcatcagcgatgcccacgcagcgcaagcggacgggctggtcatctatctggccgacgaggatcgggcgctcgcccgtttcctgctgaccgacaccctgcgccccgatgcgaaggcgctgatccaggccttcaaggctgctggcctcaagaccaccatcctcaccggcgacagctcggcccaggccgacgaggtagcccgcgagctgggggtcgacgagctggtcaagggcgtcacgccggatggcaagctggcctacctcaaggaacacgaggcccgcggcgacatcagcatcatggtgggtgatggcatcaacgacgcccctgtgctggccggtgcccacgcctccttcgccatggccggcggtaccgatctggccaagaacagcgccgatgccatcttgctggccgacgatctctcccgcctgctggatgcccgcgccctggcgctgcgcacccgcaagatcatcaaggaaaacttcgcctggtccatcggttacaacctgctggtgctgccgctggcggcgagcggctggctgcccccctacgtggcggcggcgggcatgtcattgagctccctcatcgtggtcaccaactccatgcggctcaaccgctga

SEQ ID NO: 202456 - DNA, 943 bp, Unknown
  Bacterial polypeptide expressing nucleotide sequence isolated from the Sargasso Sea
tatgtcgacaaagaaattgaaagaaatagcaggtaaagccaaaaaaaatgatttcatttccatttcagagcttatgactggaattgaaaataaagttttctctagaaaagaagtttcaaaacatatttttaaagaatctcataaatctttaaaaattggtataaccggtcctcctggagctggaaagagctcattaatgaacaagcttatacctcttatcagaaaagaaaacttgtcagttggagtaattgctatcgatccatcaagtccaattactggaggttccttcctgggagatagagttagaattaataatgctgttaatgatgaaaatgtttttgtaagaagcatgggatctagagcagagctcggcggtgtaacagaattagcagaagactttagtgatattttagcttttagtggcaaagatataatttttatcgaaactgttggagttggtcaatcggaatacagtgtatctgaaataactgacttaactactttagtatttgttcctgaatctggagatgaaattcagcttttaaaagctggaatcttagaattagcagacatttttgttgttaacaagtcagatagaaaagattcaaatttattagtcaaatcaattaataatattttatcttcaacaaaaaaagattctaagaagattccaatttttaaaactagctgtaagactgatgaaggattagaagagtttgccaacgctattgtttcatattttaagtcaatgaaagacaataaagagattcaaggaaagcaaattttaagatacaatagaagaattaagtcaattatagaaaaagatgttttagaacaattttggaacaatcaaagattaacacttttagataaaattgataaatcctcaattaaaaagaaatctccttatgagtttgttgatgaaataaagggtaaagaatga

SEQ ID NO: 202457 - DNA, 481 bp, Unknown
  Bacterial polypeptide expressing nucleotide sequence isolated from the Sargasso Sea
atgcttatcgctactaagagtagcagaataaatatttcggaagaaaaaaaaacaaaagctatagcaaaaatatttgcaaaaaatatcaaagctggcgatgtattattttttaaaggtgagttaggagtaggaaaaacaacttttataaaatatttaattaattttttacaagaagataaaaaatatccaattaccgaaatacccagtcccacttttaacttggtaaatgaatatcagataggctcattaattttaaaacattatgatctttatagaatcaataatgaaaaagaattaaatagtattggtatttttgaatataattctgaacaaataacattaattgaatggccagacataattaaacaaaataaaataaaaaatataattaatttacattttgaatatgacgaagattataataatagatttcttaatgtttcatcagataataaaattatttttttagatgaactttaat

SEQ ID NO: 202458 - DNA, 685 bp, Unknown
  Bacterial polypeptide expressing nucleotide sequence isolated from the Sargasso Sea
atgaaaaaaatcacttcaatgattttagctttagtttttgcggtatctttaattagtactgcttctgctaaaactttaaaaatccaacttacttttcctaaaacttcttacgatggtcaaatcgtaaagatgtggactgatagagttactcaattaactcgaggagagttagtatttgaacttttatcaaaaggtgaagttgttggtatgaaagaaacactagaagctgttgacaaaggtttagttgatggtggtgctgcttggacacactactggtctaactaccacccagctgctatgttgttcggttcacctgttgcaggtggaggaatcggattatcaactaaatcatggttagcatggtattttgataacggtggaaaacagttatacgacagactttgggatgaaatgggtatgaatgttaaaggttttgtgatggcttcatctggacctgaggcattaggttggttcaaagagccaattacaagcatggatgatttcagaaaatacagattcagaactcctccaggaattccaggacaaacttataaagacattggtgttgcatcagtttctatgtcaggtggagatattttacctgcacttgaaaaaggaactatcgatgctgctgaatggtgttgtccaaagccagactcagtttttgtttcaaaaaagttctaaa

SEQ ID NO: 202459 - DNA, 349 bp, Unknown
  Bacterial polypeptide expressing nucleotide sequence isolated from the Sargasso Sea
attggcttctggcaaactaatttatgatgatcaatgtgcatcttgtcatggtattaatttgcaaggtcaagaggggtggcaagatgaattagtagatggtttaagattagctcctccacataatgaagaaggacatacttggcaccacacagattaccatctttttatgcttactaaatatggtatcgaagaatttttaagtatggattatccaaataatatgccagcttataaaaatttactttctaatgatcagattatttctgttttatcctatataaaaagtaaatggccaagtcatatacgcattaagcatgatcaactaaataaagtattcaaggaaaattaa

SEQ ID NO: 202460 - DNA, 949 bp, Unknown
  Bacterial polypeptide expressing nucleotide sequence isolated from the Sargasso Sea
atggttgactctaaccaaaatgatgttattaatcgcatcttaaaaaacgatcaccgtgctatatcaaaagttatttctcaaatcgagtttgaaaccgatacaaataatgctctctatagcagactttatcctcatacaaataattgtctcaagattggtatcactggaccgcctggcgctggaaaaagcaccttaactgatcaattaatcaataaatatctgagcgataacaaaagcgttggtgtcgtagcaattgatccttcaagcccattttcaggaggagccttacttggggatagggtaaggatgaataattatctatggaatgagaatgtttttattaggagtatggggtcacaaggtaatttgggcggtttgaataataaagcacaagatgtaggcgatgtactagctgccagtggaaaagaaataattatttatgaaactgttggtgttggacaaggcgagcatgatatagcgaaagctgcagatttaacaatagttatgcttgttcctgaatcaggagatgacgtgcaattaatgaaagctggcttaattgaaattgctgatttatttattgttaataaatcggatagggaaggatccgatagattagctcaatctatccgtaatgttttgcatatttttaagaataaagacaatcatgaacctcctgtattcaaagtttcagccaacaatgggaacggcattaaagaactttatgctggaataacagagattataaatgaaatgaaaaataaagacttcatagaacaaaaaagaatagctagatacaaagatcgagttttaaatcttgttcaagaatctttgatcagcaatttttggactgataagaagttaaaaaaacttgaagcaattattaaaggattagaggtttcagactcttctcctcatgaaactgctgagaaaatattgaatcaatcatgaa

SEQ ID NO: 202461 - DNA, 919 bp, Unknown
  Bacterial polypeptide expressing nucleotide sequence isolated from the Sargasso Sea
cgacgcgtcggcgaagaagaagtttaccgacatctccgccgcgtacgaggtgctgagcgataaggagaaacgatcgatatacgatcggtacggggaggagggcgtggcgcgacacgaacagggcggcggacgcggcggcggcgggggcgcgcaggatatcttttcgcagtttttcggcggtggattcggtggatttggacacggggaacccgaggagccggagacaccgaaagcgccgacgataaaggttgatttggtgatgagcgtcgaggagacgtatctcggcgcgcgcgtcccggtgcgcagggaaaagatggtgaccaaggcggcgagagggacgagaaagtgtaattgtcgacaaaaactcgtgacgagacaggttggaccgggtatgtatcaacaatactccgaagagacgtgtgaagattgtccaaacgtgaaattggtgcgcgagagggcggatttgaacgtcgaagtggacccggggacgccggtgggacacgaaattttattcttcgaggagggcgacgcgatgatcgatggcgatcccggtgatttggtgttcgtcgtcaagacgagggacgacgagaagaatcgaatcaaacgcgtcggggcgagcgatctgcacatgacgtacgagatcacgctcatcgaggcgctcaacggattttctaaaattttcaaacactacgacggacacgaggtgaagattgaacgcgacggcgtcaccgtgccgttcgataagatgacccttcgcggggaaggtttgccgaaacacaaccaattcaaaaagttcggtgatctgttcatcacgtttcaagtacagtttccggactcgctgaacaaggcgcaacgagacgccgtagccaagactttcgcgaagaccacgtttcttcccgtcggtgacgtcaaaccgtga

SEQ ID NO: 202462 - DNA, 223 bp, Unknown
  Bacterial polypeptide expressing nucleotide sequence isolated from the Sargasso Sea
catggcgaatcagaatgacgcagttctagaagcgctgtcgttggctatagctgttcgaataccgattttactttggggccctcccggagctgggaaaagttcagcggtaacagcgatgtgtgaatcggccggttttccttatgaggtagtaatagcaagcattcgagagcccagtgacttcagtggactacctgtcgtgggagaagagggggtaacgttcgct

SEQ ID NO: 202463 - DNA, 1120 bp, Unknown
  Bacterial polypeptide expressing nucleotide sequence isolated from the Sargasso Sea
aatgcatatagcagaaggagtaaaagaacatgtgatggagacaggtgcttcaataattaatgcacaaaaatctggcgaaacttttcaagagcctagtttgttcacagaaaatagtatgctcaaagaatctgcagtttgggactgtgttacctgcggtgcatgcatggaagaatgcccagttatggttgaacatgttgactctattgttgatatgcgtagatatctagtaatggaacaagctagtatgcctgaaggggctgaaggtgttctattaaacatggaacaaagaggacatccatggagtggaaatcaaacttccaaaactgaatggatggagggattagatattccaacatttgaagaggaaaaagaatctgaagttcttttatgggtaggatgtacttccgcattaaacgaagcaaatcaaaaggcacctagagctatggcttctatattacgtgttgctggtattaaatttgctgtactaggaaatgaagaaggttgtactggagatcctgctagaagaattggaaatgaatacctataccaaatgatggctgaacagaatattcaaaccttaaatcaatattcattcaaaaaaattgtaactctatgtccacattgttttaacaacatcaaaaacgaatatccgcaacttggcggtaattacaaagtttatcattacactgaatttgtggatgaattaattcaagatggaaaactaaaaccggttaaaagtgttgatattagtatgacttaccatgattcttgttatctaggaagacataacaaagtttatgatgcaccaagaaatatttccaaggctattccaggactagaacttcacgagatggaaagaaattgcgaaagaggattctgttgtggtgcaggtggtggacacatgtggatggaagatagcggaggtcaaagaattaatcatatgagaattgatcaatttcttgataccgaaggtgaaacattgggtgtttcttgtccattttgttatcaaatgttcgctgaaggaatacaatcaaaaggtgttcaagaaagtaaacaaaccaaagaccttgtagaaattatagctgaaagtgttgtaccaaaagaagaagaagaaaaataa

SEQ ID NO: 202464 - DNA, 859 bp, Unknown
  Bacterial polypeptide expressing nucleotide sequence isolated from the Sargasso Sea
tctgccaaggtgggcagttaaaccatttgctaagccttacgttgcaggtgaaaaaattcaagatgttacaaatgtagttaaaaatcttaatcataacggtttctctgcgacaattgatattttaggggaatttgtagactctaaggaagaagccattgaggtacgcaatcagtattcaaaattaattaaagcaattgctgagcttaagcttgatagcactatatcggttaagctcacacatcttggcttagaattagactattttttttgtaaaaaagagatgcataaactagttgagtatgcaaaaaagtttgatgtgggaatcgctattgatatggaaagctctaagtacaccgaaagcatatatcaaatctatcaagacgtatcaactgtttattcaaaagttggtgcggtaactcaagcatatctttatcgcagtatcaatgatataaagaagcttgatagctccaatttaaatttgcgaatatgtaagggcatatacaatgaaccctctacaattgcaattaaaaataaagaaaaaataaatgagaattttgaaaaattggtgcatacaacctataatcaaaatggatatatttgcatcgcaacacatgatctagatctaatttcaagacttgaattatggataaataaaaatagtattcctttagacaggtttgaatttcaagttttgtacggtgtcccaatgaaaaatactctgaatcgattgaaatcaaaggggattaaattaacagtttatgttccatttggaaaatcatggtttgattattcaatgcgtagacttaaagagaatccaaaaatcatttcatatgtattaaagaatcttttcaagaaataa

SEQ ID NO: 202465 - DNA, 1662 bp, Unknown
  Bacterial polypeptide expressing nucleotide sequence isolated from the Sargasso Sea
gcttctttcaagataatccatatgtggatataatagttcatggtgagggtgagtttacattcaaggatatacttttagaaaacttaaagcctaaagatgagcaagactggacatctgttgctggttgttctgttcctttagaagatgggacaacctttgtcacccccaacagagatcgtatcccggacattaatggtatgccaagtccttatctaaatgggttgtttgacgaaattgctaaggactgtccatatgttcttgaggctactttagagactacaagaggctgtccttatcaatgcacattttgtgaaatcggaacaaaatactatcaaagagttaagtggcaagacttggaaaaagtttacaaagaaattgactggatgtctgatcataaagttgcttttgtttacaatgccgattcaaactttggtttactgccaaaccacctggaggttacaaaatattttgtcaaaaagaaaaaagaaacaggatatcctgataagcacaggtgtgattgggctaaaaacaaggcagacaaagttttagagcttgctaaactttttactgactctggtatggataaagggattacggttgctttgcaatctagaaatcctgacacgcttaaagccgttaagagaagaaacctagatgatggaaaactaggggagttcttaaaaatgtataacgaggcaaaagtaccagcttatgttgagttaattttaggattgccagaggaaacccttgagacatttatccaaggcatatctgatgttattgagctagatcaacataactacattggtatatatgccatgactgctttgcctaatactccctttggaatgcagtcttatatagatgagtatgaactggaaataattagcacttttcaggctttcaaccattacgacatttcaggtgataatgaacttgagcgagaaaaaatggttgttggtcacaaaaaactgacatttgaagactataaaaatatgcactattttaggtgggctgttatgtctgggcactatttgggtcttacacaatttattagtaggtttttgagatctgagcataatgtttcgtacaaaaaattctatgaaagtctgttaaagtattgttatgataacccaaatagttttttaggtaatgaattaaaacaaacaatgattaatttagagggctctttgggggctactcaaccttggggaagaattattgacgaagttagagaaaactttggttgggactttgaagaggccacagccataaacgtttgtctgcacaaagagaaatactacctagaaatactagatcttatgaatagatatcttaaggtagagatagaacaggatgttttagatgatcttatgacctatcagaagatcggtgtccttgatccaaccatagcatacccagtaagaaaatcattcaaatataacattcatgatgttattactagaaaatcaaaacttagaaaatacaaaaatgaaattgagtttaatgccaaaaattacaatggtgatttatatgagtggggcaaggaaaccctgtggtggggtcgtcgtgtcggggcttgtaaaacaaaaagaacaaaaataacaagaaagtataaagcgactgatgtacttaatcctcttagtggattcaaaagataat

SEQ ID NO: 202466 - DNA, 1003 bp, Unknown
  Bacterial polypeptide expressing nucleotide sequence isolated from the Sargasso Sea
tttggttgaggaagtagcaagtttcgatcaaccgtggtcaatggcatttcttccagatggcaattttttagtaacagagaaaccaggaaaaatgtttttgatgaatcaagctggagaaacactttctgaaatctctggagtgccagaagttgcttatggaggtcaaggtggacttggtgacgtagccattcatccagattttaatgaaaataaaactgtttatgtgagttttgcggaggaaggcaaaaatgatacgcgaggcgctgttgttatcaaggcaacactcgatctcactgaggaaggaggcgcacttactaacttggagtacatttggagacaagttccaaaagttacaggtagaggtcattatgctcatcgaatggcgttttctgaagacggttatttatttatttcgtcaggagatcgccagaagtttgatcctgctcaagatatgacatccaatatgggaaaaataattcgattgaatgatgatggcagtataccaacggacaatcctttttataacgatggcgttgttgctgcagaggtttggtcgcttggtcatcgaaacccacttggtatagattttgatgcagatggcaagttgtggaatattgaaatgggaccgagagggggcgatgagctaaatttggttcttaaaggcgaagattacggctacccaactgtatcaaatggtatacattataatggcagcaacattcctaatcacgatacacgacccgaatttgaagagccaaaagaatggtggggcgatggatattccatcccagtaatttctccaagctcttttgttatctatcagggtgatttgttttacgactggcaagggagcggctttatttctggcttatcatcagaatctttaatcagagttcaatttgatggcgattcggcaaaagaaattgaaagatttgacatgggcagaagaattcgttcagtagaagaggggcctgatggtgcgttatggttgttggaagattat

SEQ ID NO: 202467 - DNA, 550 bp, Unknown
  Bacterial polypeptide expressing nucleotide sequence isolated from the Sargasso Sea
atgacttttttaaaaataaataatttgagtgtcgactataaaatgagaaaagaaactgtaaatgctgcaaaaaatatcaatattgatataaaaaaaggtgaaattgttggattagtcggagagtctggttccggaaaaagcactgtcgctaatgccattgtaaatttaattgatgaaccaggtaaagtttcaagtggatcaatattgatgggagaaactaatatcagcgaaaatccagaaacaattgttcagtatcgaggaaaaaaaattggattaatatttcaagatcctcaaacttctttaaatccaattttaaccattggtgaacagcttatagaaacaatacaaactcatttaaatttaagttcagatagtgcaaaaaataaagcaattaatttattaaaagaagtggggatcaaagatgcagaaaataggttttataattatccccaccaattttctggtggaatgaggcaaagagttgttatttctcttgctttatgttgcgagcctgaattattaattgcagatgaaccaacaacagcactag

SEQ ID NO: 202468 - DNA, 943 bp, Unknown
  Bacterial polypeptide expressing nucleotide sequence isolated from the Sargasso Sea
atgaatcagttcaattataaagatatttttaataataatcatgttgctatttctcgagctatatcgctgattgaaaataatgatgctactgtagaagaattttataaagctatctatgagaaatcaaatttttcaataagaattggtattactggtccacctggagcgggaaagagtacattagttgaccaattaattagtcactttgttgagagcgaaaagtctgttggcgtaatagcggttgatccaagtagtcctttcactggtggtgctctacttggtgacagagtaaggatgagcaaatattcggacaatgagaatgtttacattcgaagtatggggaatagaggtgatttgggtggattatcaaaaatggcgcaagaagctggcgatgtattgtcagcaagtggaaaagatgtagtaatctatgaaacagtaggagtaggtcaggctgagcatgacatagtaaatgccgcagattacacaatggtggttcttgtccctgagtctggggatgaggttcagttaatgaaggcaggtattatagaaattgcagatatatttatcataaacaagtcagataggccaggggcaaagcgtatttctagatcattatctgatattttgcataataattcaaaaaaagacagtattattcctagggtcatgaactcaactgcgagcattggtgaaggcatttccgagatttttgagcaaatgatttctgatctgaaaattaatagcgataatggtacattggataagcgtcgcctctatcgatacaaaaatcggataaaaaatttaattattaaaagactgaaaaatgaattttggactgctgatagagaaaagcttttcactgagataacccaatctatcgattcaatagaaatcccgcctgataacattgttgatagactaatatctgactttgatcattgat

SEQ ID NO: 202469 - DNA, 1687 bp, Unknown
  Bacterial polypeptide expressing nucleotide sequence isolated from the Sargasso Sea
atgaccatagattttgtgacactgctacatcaaagcgactccctgctgctgttcgtggtactggccttcggcctgctgctcggtaaagtcaggttcggcaacttccagatcggcaacaccatcggcgtgctctttaccgccctgctgttcggccagatgggcttcgaattcaccgccaccacggagaacgtcggcttcatgctgttcatcttctgcgtggggatcgaagcgggaccgcacttcttcagcgtcttcctgcgtgacggcatccactacatcaccctcaccctggtgatcctgctgaccgccctcttcctcaccgtggggctggccaagttcttcaacctggggccgggcatggccgccggcatcctggccggctcgctcacctcgaccccagcgctggtgggcgcgcaggatgccctgcgcagcggcctgctcaacctgccccatcagaccgacatgcagtcggtgctcgacaacatgggcatcggctatgcactgacctatctggtggggctggtcggcctgatgctggtggtgcgctacctgccttcgctggcacggctcgacctcaacaccgaggcgcagaagatcgcccgcgagcgcggcctctccgacaacgagagccgcaagacctacctgcccatcatccgtgcctaccgggtcggcccggagctggcggcctggatcggtggccgtaccctgcgcgagaccggcatctacccccacaccggctgctacgtggaacggatccgccgcaacggcatcctggcgagcccggatggcgacgccgtcattcaggaaggggacgagatcgccctggtgggctaccccgagagccacgagaagctcgacgtcaactaccgcaacggcaaggaggtgttcgaccgcaacctgctggacctgcagatcgtcaccgaagagatagtggtgaaaaacgatgcggtggtgggtcgtcatctggtggagctcaacctcaccgagaagggctgcttcctcaaccgggtggtgcgctcccagatcgagatgccgttcgatcgcaacatcatgctgcaaaagggcgacgtgctgcagatcagtggcgagaagcagcgagtcaagctgctggccaacaagatcggcttcatcagcatccatagccagaccacggatctggtggccttcaccaccttcttcgtgctggggctgctgataggctccgtctccctggtgttcggccagctggagtttgggctgggcaacgccgtcggcctgctgctggcggggatcctgatgggatacctgcgcgccaaccaccccacggtcggctatgtgccgccgggcgccctgcgtctggccaaggatctcggtctggccgtgttcatggtgagcaccggcctcaaagccggcggcggcattctggatcacctgagccaggtcggtgccgtggtgctcttctccggcatgctggtgaccaccctgccagtgctggtaggctacctgttcggggtctgggtgctgaagatgaacccggccctgctgctcggcgccatcacgggggcccgcacctgcgccccggccatggacgtggtgaacgaggcggccaacagctccatcccggcgctcggctatgccggcacctatgcggtggccaacgtcatgctgactctggcgggctcttttatcatcggcttctggttctaac

SEQ ID NO: 202470 - DNA, 1477 bp, Unknown
  Bacterial polypeptide expressing nucleotide sequence isolated from the Sargasso Sea
gatcgtcacagtgtggcaatgggtgagacgtttatgttgatgattaccatcgattccacaaaagcacccatgccagatctgtccgtgttgaatggcgattttcaagtggtgtccacggcgcaaagcagtcaggtcagcattatcaacgatcaaagctcgagtgagaaaacctggcacattgaattgttgcctcgtcatcttgggcaggcaaccgtaccggcgttatccagccagggtgagcgtacagcgccgattgctatgaccataacgaaaacgccacaagtaacagcggcatcccggcacggaggagaggcttcgcccattcacgtagaagcacgtttggcacatgcccgtaccattgttggcgcacaatcggtttataccgtggatttagtcacgtcggtggatttagcgcaagcggaactgcatccaccgaaggtaaaaggggccacattgagaatggtgggtaaggacgagcagtttacacgtaccggtcaaaatggcgttgaaaaagtgttacgtcgacattatgtagtgacgccgcaacaggcagggacggtgaccatcgatcctgccctggtggtggcgtacgtaccggactcacgtccacgctctgatgatccgtttgcgatgcctttttcttcgccatttacacagcccactcggcgagtggtggtgcaaagccaaccggtgtcgttgcaggtacaaaaagcaaaatcgacagatggctggctgcctgcttggcagttgtcattgaaacaaacctggtctaagccgctgagtgattggcgcgtcggtgatccgattacgcggcacattaccttggaggcgcaaggggttgcggttgagtcgttgcctgacattacctcggtctcgttgtcaggcatgaacgtgtatccggataagccacaacaagcacaagacttctcgggcgagcatacaaccgcgtcagtgtcacggcagtttgcgtatgtgcccacgcaggcggggacggtgtcgttgcctgcgatgacggttcgctggtggaacatgacaaaaaaacgttttgagcaagcccgcttggcagcacaacaggtgaccattttgccggcattgaatgctccggcgacaccccccgcgacggcgaaaacgccacttgtgggatcgtctgccgcttcggcggtgaccgtgccgcaggccgctgtggcgagtacggccgtgttgccgacgaaaggaaaagccgcgtatttgcagcacagatggccgttgtggttttggttgtttatggtggcgatgttgttgtggttgacgacgttgtggctgtggtggcgcggtcggcgacggaaccgggtttctgtcacgggagagctcaccgcttctgaatccgcattgaagcaagcgtgcatgtccaacgatgtgaaagcgatacaggcgggattgctcggcttggggcaacgctggtttcgtttgccggttgaagcgggtttggtgacgctgg

SEQ ID NO: 202471 - DNA, 352 bp, Unknown
  Bacterial polypeptide expressing nucleotide sequence isolated from the Sargasso Sea
ggtttagggcttgcaaaagaactcttgaaactatttttccatttgtgcgctacaaaaggaacagctgaatacattaaaaaacatggcatgaggtgtaagattattaataaggtaagtagtggttcacctcatatcgttgatgttcttgactccaaaaaaatagctttagtaattaatactggcggaggtaacaccgaacatagattaaacgatgctattgctttaagaagggcaacacttaaaaataaagtgccctactgcacaaatatgtcaacagcacttgcatgtattgagggtattaaatcacttaaaacaaaaaaattagaggtgacgtctctacaaaatatttaat

SEQ ID NO: 202472 - DNA, 1202 bp, Unknown
  Bacterial polypeptide expressing nucleotide sequence isolated from the Sargasso Sea
gatgaaatttttagaagtaaacaacttagatattgaatatcaaacaagaaaagaaactatttatgcaagtaaaaatgtttcattcaatctccaaaggggagaaattattggtattgttggtgaatcagggtcaggcaaatcaactgtagctaatgcaattataaatttgatagataaaccagggataattaccaatggttcaataaggcttgatggcagagaactacataatgatacagatgtaataaaaagcattagaggtaaaaaaattggctttatttttcaagatcctcaaacatctcttaatccattatttaaaataagagatcagttgattgaaacaatacaaactcattcagacctcaattacaaagaagcagaaagtaagtccattaacttactgagggaagtagggatagaaaatcctgaaaaaagaattaatgattatcctcatcagtttagtggaggaatgagacaaagagtagttattgcacttgcaataagttgtgaacctgacttgattatagctgatgaaccaactactgctcttgatgtaagtatccaatataaaatattacaactattaaagaagctcactgtagaaagaaatttaggtattataattataactcatgatatgggtgtaattgcagaaactactcacagagttatagtcatgcgacatggcattatagttgaacaagggaaaaccaaggatgtattgttaaaacccaaatcattggagtgtaaaagtttagtaatgtctgttcctccgacaaataaaaaaattgaaagatttaaattattaagcccagaaggaaagcaaataaagagtagttctataaaacttacaaataacattataaaaaattgggctaagagagaaacatccaccaaaaaattattaaattttattaaagtgagcaaaatatttgatgaaggttcaattctctcttccaaaaacaaagtttcaaatgtaaaggctttagacaatgtttcattcgaagtttttgaaggggaatcttttggattagttggtgagtctggttcaggaaaatcaacaattgctaaaattattagtagcttaatccatccttcatcaggggaaatctattttgataatatctctctctttgaccccaagaataaagtaattaagaataaattcaggggtcaaattcaaatgatttttcaggacccat

SEQ ID NO: 202473 - DNA, 262 bp, Unknown
  Bacterial polypeptide expressing nucleotide sequence isolated from the Sargasso Sea
atgaccgaggcaacgacgcagacgttactcgcgtctgctttaaatggagatcgcttcagcctggcccgccttcttagccacatagaacgagacccgagcgcggaagccgagatacgtgccagtctcgccagcatgaagactgaatcggtagtgattgggtttactgggccgccaggtgcaggcaagtcttcgctcattagcgcgctgctgcctcacacaaccgactcctttgacaagaccgcggttctggccgtggacccca

SEQ ID NO: 202474 - DNA, 2401 bp, Unknown
  Bacterial polypeptide expressing nucleotide sequence isolated from the Sargasso Sea
tatggaagatattatattttcaggaacatcgaataaaccagcaaaaaatttatcagaagtagccattacaatcgacaattcaaaaaaagaaggtcctggaaaatatttagaaatggatgagatagtaattaaaagaaaaattgaacgtgaaaaaggatcaaaatattttattaatgataaagaagttagagcaagagacgttcaaactttttttgctgacttatctactggtgcccattctccatcgattataagccaaggaaagattggcatgattgttactgcaaaaccacatgagagaaaatctgttttggaggaagctgccggaatttctgggatccatattagaagacatgaagcagaaacaagattaaatgctgcagaaaataatctaaaaagagctgacgaattaaaaaaacaacaagaaaagcaacttgaaaatttaaaaaaacaagctgaggaagcaacgagatatagagaaatatctgaaaaaattaaaaaagttgaagcaggacttttttatttgaaacttcaagatattgaaaacgaaacctctcaagtaaaggtcaagctttcggcgatcgataacgatgttaattcaataaaaaaagatattgaacataataaagatttagtagaggaagaaaataaaaaacttgagccacttaaagacaaaaaaattgaaaattcatcatcaattcaaaaaattaatttagagatttccagtctgaatgaaaaagaaaaaagggtaaaagatttaaacgtaaaactaataaataatattaaaacaattcaatcagatctcgaaagggagaaaagcatatctttagatgcatcattgaatgaaaagagaatcttggaagaaaaaaatgagcttttaaaaactgaaaggcaattatttgatatagaaaaaaaatcagagatagacctagatttgtcaagaagcgaactaaaagatcatcagattaaacttgatgaatttgtagagaaaaaactagaaactattgacttaaaagaacagcttaaaatttttattaaaattgatgaaataaataaatctgcaataaaaaatttagaggactctaagttagatgagacaaactcaagtttaaaaaaaattaatgagctcatagaaaatcaaatagaaaatattgaagttatagataggaatgatttgagtataaatataaaaggacttattgaaaatataacattatcacaagaaagatatgcatcttcatttggtaaaaaccaaacgattagaagtgactcaattaaaagaaaggaaagaataaaaaatattgatcaagaattggaaaactggaaagacctaaaagtcaattcagaaaaaatgattttggaattaagtaaaagagtcgaaaaagttgaattagagttaaaagaaaatcaaaagaatcccgaacagatcgcaattaacaagggacaaaatattcaaaaacttgaaaatactgaaaaacaaaatattgatttggacttagaaattgaaaaagttgaggctaattatattgaggctaataataaattaaaaagtatagaagaaaaatctgttgtattgagagaaaataaagcaaggtttgaagctactattgagggaattgatcaaagaaaaatggatcttatatacttagtaaaaaatgaattaaaattagaaaatattaacaatttattatctttctctgacctaaatggtttgcctaaactaccatcggtcaatgaacaagaagaaaaattgaataatttcaaaaaagatagagagtctttgggctctgtaaatttaagagccgatgtagaaactgaaaaatatagaaaaaccatcaaaaaaatggaagaagatagagctgatcttgtttctgcaattgttaaattgaagtccagtattaacgaattaaatcaaaaaggaagagaaagacttctagatgcttttaataaagtaaacagaaagtttaatgaagtttttacaaaactttttaacggtggaaatgcaaagcttgaactagtcgactctgaagatcctttagaagctggattagaaatgttggtttcaccacctgggaaaaggttacaatcaatcactcttttatctggtggcgagcaggccttaactgctatttctctgatatttgcaatttttcttactaatccttcgccaatatgtatcttggatgaagtagatgcaccactcgatgatgcaaatgtaactagattttgctctttattagatcaactaatatcaattacaaaaactaaatttataataattacacatcacgcacttactatgtccaaaatgaataggctttatggtgtaacaatgccagaaaaaggtgttagtaagcttgtagctgttgacttacaaaaagctgaagagttagtagcttaa

SEQ ID NO: 202475 - DNA, 922 bp, Unknown
  Bacterial polypeptide expressing nucleotide sequence isolated from the Sargasso Sea
gttaaaatttgaacttttatcaaaaggtgaagttgttggaatgaaagaaacactagaagccgttgacaaaggtctagtagatggtggtgcagcatggactcactactggtcaaactatcacccagctgcgatgttatttggttcgccagttgctggtggaggaattggtttaagcactaaatcttggttagcttggtacttcgacaatggtggtaaagagttatacgaccaattgtggaccgaaatgggaatgaatgttaaaggtttcgtgatggcatcatctggaccagaggcattaggttggtttaaagagccgatcaagaatatggatgatttcagaaaatacagattcagaactcctccaggaattccaggacaaacatacaaagatatcggaattgcatcagtatctttatcaggtggtgatattttaccagcgcttgaaaaaggaacaattgatgctgcagagtggtgttgtccaaaaccagactcagtatttggtttccaaaaagttcttaaaaactattatctacaaggtcttcaccaaaacgttgtaaatggagacatttacataaatggtgatgtttataattctttaactgatcatcaaaaatatgcaatggaagttgcatctgaagctatgatcacaagaaatattacaaacagagctgtagaaaatggaaaagcgttaattgatcttactcaaaatcatggtgtaaaactatgggatacaccagctgattatttcactgagtacatgaacgctgctcaagctactcttaaaaagaatgcagcagaaaatgctttctttaaacaagtttacgagcacatgactgagcacgcaaaagttgtagtaccttttattgcacaaatggaaacatctgatgcatcaattggatctgcatttgcagcacaacaataa

SEQ ID NO: 202476 - DNA, 307 bp, Unknown
  Bacterial polypeptide expressing nucleotide sequence isolated from the Sargasso Sea
atgaatagcaaaaattcttttaattctgagcagattatagatattgataataaaatttataagtattttgatttaaataaagcagctcagcaatacggacttaatcttctgaaagttccaatatcattaaagattttattagaaaacttaatgagaaatgaagatggagaaagcatcaataaagatatgatatcgtctgtatttaaaacattaactaataaaaacgatgaaaatcaagagatttcattttttccaacaagagtactgatgcaagatttactggagttccggctgttgctgatttagc

SEQ ID NO: 202477 - DNA, 1333 bp, Unknown
  Bacterial polypeptide expressing nucleotide sequence isolated from the Sargasso Sea
gatgcagaaagaccatctcgcgctgcaccccggcccggccgaagccaccgtcactgacacgcgcagcacgcctgccgtcacgcggcgcggtgcgatcgcggcggccgtgatcggcaactggctggaatttttcgatttcaccgtgtacggcttcttcgcggtgctgatcggcaagctgttcttcccgtcgagcgacccgaccacgtcgctgctgctgtcggtcgcgacgttcgcggccggcttcttcacgcggccgctcggcagcgtcgtgctcggcgtctatgcggaccgcaaggggcgcaaggccgcgctgaacctgacgatcatgctgatggcgctcggcacgggcctgatcgcgatcgcgccgacctatgcgcaggtcggcgtggccgcgccgctgctggtcgtgttcgcgcgcttgctgcagggcttctcgcagggcggcgaattcggcgcggcgacatcgacgctgctcgaacagggcggcacgtcgcgccgcgcgttccgcgcgagctggcagctcgcgacgcagggcggcgccgcgctgatgggctcgggcttcgcggcgctgttgtcgaacacgatgacgaaggacgcgctggaaggctggggctggcggttaccgtttctcgtcggcgtgctgatcgcgccggtcgggatgttcttgcgccggcggctcgcggacgacgcgcccggcgaccgccatcacggcatcgaacgcggcgtgctgcacgagctgttctcgaagcacacgcgcacggtgctgctgctgatgctcacggtgatgggcggcacggtgtcgacctacatcctgacgttctacatgccgacctatgcgatccacacgctcggcctgccgatgaagctgtcgatgttcgtcggcgtcgcatcgggctgcgtgatgctggtcacgtgcccgctgttcggctggttgtcggacaggctcggcagccggcgcctgccgatcttcgtcggccgcggcgtgctggtcgcgctgctgttccccgcgttctggctgatgaaccatcacccgacgctgtcggtgatcctgccgctgaccgcgctgatgctgctgttctattcgctcggctcggcgtcggaaatggcgctgatgtgcgagtcgttgccgcgccacgtgcgcgcgaccggcatctcgatcgcgtatgcgctcgcggtgacgatcttcggcggcaccgcgcagctgatcgcgacgtggctcgtgaagacgaccggcagcaagctcgcgccggccggctacgtggccgcgtgcgtggtgctgtcgctgatcgcggtggcgatgctgcgcgagacggcgcgggattcgatggactga

SEQ ID NO: 202478 - DNA, 946 bp, Unknown
  Bacterial polypeptide expressing nucleotide sequence isolated from the Sargasso Sea
atgccaaaccccttcgaattactaagaacagagatggatgaacttgtagttggccactcagatgttaaaacagcccttctattaggtattataagcagagaacacatctacattcaagggcctcctggaacggcaaaaacaatgttatcagaaatagtatctaaatccgcagaacttaatttctttttttatcaaatgcacagagacacaaggctttcagagttagttggggacttagttatttcaagagaagatacaaaaaacggggaaattataagacaaaatatcataaaaggtggaatattaacctctgaaatatgtttacttgatgatatctctagagctccaggggaatctctaaatgtattgttaagaattctcaatgagagaaaatatggtgatgaggaaataccacttcttactgcaattgctactagtaacccaacagctgatgaatattacaatgaacctctagatcctgctaatctcgacaggtttgtcatacaaataaattctaatggtctttcttatagcaaggaatgggatgatgttaaaaaaatagttagtctttattctgcaaagaatgattctaatggacatattgagaagataggtaaggacgtcctcgatgaaagctatgaaaaattagaaaatgtaattgtctcatcagaggttcaagaagggttggttagttttatttcctggctaattgatgaccagagactaaatgaatctaattcagtaatatccgatagaacttttttagttaaatctatcaaaattatcaaagccaatgctgttctagatggaaggtcagaagctaacctagaagatttgaaggctttaaagtatattcttgcttttagggttcctgaggaagtgttaaagatggctgaagaaaagcttgaatctcttcaagcccaaaaaaaaaagaccaagaaataga

SEQ ID NO: 202479 - DNA, 2920 bp, Unknown
  Bacterial polypeptide expressing nucleotide sequence isolated from the Sargasso Sea
atggcgagtaacaacgtagcccaatttgccgcggaactgaaaatgcctgctggtgtgctgctcgaacagctgcaggcggcgggcgtccagaaagcgagtgaagacgatgcgctgtccgaaacggacaaggcgcgtctgctcgatcatttgcgcaagtcgcacggcgcaaccgacggcgacaagcgcaagatcacgctgacccgcaagcatacgtcggagatcaagcaatctgacgcgacgggcaaggctcgcaccattcaggtcgaggtccgcaagaagcgtacgttcgtcaagcgcgacgacgtgagcgagggtgcggaacagggtcaggcgcaggtcgccgaagcggacgacgatgcggatctgaagcgtcgcgaagaagaagcgcgccgcgaggccgagctgctcgagaagcaggcgcaggagcttcgcgagcgtcaggaacgtctcgagcgcgaggaagcagagcgccgcgcccgcgaggaagcggccgaagccgagcgtcgtcgcgccgaggaagaggcagcggcgaagcgtgctgcggccgaagctgcggcggcacagcagcaggcagccgcacagcaggctgccgcagccgagcagcaggaggcagcgagcacgcagtccgcgcaggacgaagcacgcgcagccgccgaacgtgcggctcagcgtgaagcggcgaagaaggctgaagatgctgcccgcgaggcggcggacaaggcgcgcgccgagcaggaagagatcagcaagcgtcgcgcggcggcagaagccgaagcgcgtgcgattcgcgaaatgatgaacacgccgcgcaaggccgtggtcaaggcagtcgagccgccgaagccggtcgagccgccgaagccggccgaagcgaagggtacgctgcacaagccggcgaagccggaaggtgcgcaggcgcgtccggccgtgaagaagccggccggtgctgcagcgccggctacgactgcgccggcaggcgcgggcgaccgcaacaagaagccgggcgcaggcaagggcggctggcaggacgacgcatcgaagcgtcgcggcatcaagacgcgcggcgattcgagcggcggcgtcgaccgcggctggcgcggcggcccgaagggtcgcggccgtcaccaggacagctccacgttccaggcgccgaccgagccgatcgtccgtgaagtgcacgtgccggaaaccgtgtcggttgccgatctcgcgcacaagatgtcggtgaaggcctccgaagtcatcaaggtgatgatgaagatgggccagatggtcacgatcaaccaggtgctggaccaggaaacggcgatgatcatcgtcgaggaactgggccaccgcgcggttgccgcgaagctggacgatccggaagcgctgctcgtcgaaggcgaaacgggtaccgatgcggagcaactgccgcgtccgccggtcgtcacggtcatgggtcacgtcgaccacggcaagacctcgctgctcgaccacatccgccgcgcgaaggttgccgctggcgaagcgggcggcattacgcagcacatcggcgcataccatgtcgaaacgccgcgcggcgtcatcacgttcctcgatacgccgggtcacgaagcgttcacggcaatgcgtgcacgcggcgcgaaggcgaccgacatcgtggtgctggtggtggcagccgacgacggtgtgatgccgcagacgaaggaagccatcgcgcacgcgaaggcaggcggcgtgccgatcgtcgtcgcgatcaacaagatcgacaagccggacgcgaatctcgatcgcgtcaagcaggaactggtcgcggaaggcgtcgtgccggaagagtacggcggcgattcgccgttcgtgccggtttcggcgaagacgggcgcgggtatcgacgatctgctcgagaacgtgctgctgcaagccgaagtgctggaactgaaggcaccggtcgaggcgccggccaagggcatcgtgatcgaagcgaagctcgacaagggcaagggcccggtcgcgacgatcctggtgcagtccggtacgctgaaccgaggcgacgtcgtgctggcgggtacggcctacggccgcgtgcgcgcgatgctcgacgagaacggcaagccgacgaaggaagctggcccgtcgatcccggtcgaaatccagggtctgtcggaagtgccgggcgcgggcgaagaagtgatcgtgctgccggacgagcgcaaggcgcgagaaatcgcactgttccgccagggcaagttccgcgacgtcaagcttgcgaagcagcaggccgcgaagctggaaagcatgctcgagcagatgggcgaaggcgaagtgcagaacctgccgctcatcatcaaggcggacgtgcagggctcgcaggaagcactcgttcaatcgctgctcaagctgtcgaccgacgaagtgcgcgtgcagatcgtgcacagcgcggtgggcggcatcagcgaaaacgacgtcaacctcgcaacggcatcgaaggctgtcatcatcggcttcaacacgcgtgcggatgcacaggcgcgcaagctggccgaatcgaatggcatcgacatccgttactacaacatcatctatgacgcagtggatgaggtgaaggcggcgatgtcgggcatgctggcgccggagaagcgcgaagtcatcaccggcatggtcgaggtgcgccaggtcttcaaggtaccgaagatcggtgcagtcgccggctgtatggtgacggacggtgtcgtcaagcgctcgtcgtcggtgcgcgtgctgcgcaacaacgtcgtgatcttcacgggcgaactcgaatcgctgaagcgcttcaaggacgacgtgaaggaagtgaagcaaggcttcgagtgcggtatgtcggtgaagaatttcaacgatatcgtcgaaggcgaccagttcgaagtcttcgaagtgaccgaagtcgcgcgtacgctgtaac

SEQ ID NO: 202480 - DNA, 1072 bp, Unknown
  Bacterial polypeptide expressing nucleotide sequence isolated from the Sargasso Sea
aatgaataaaataaaaattttttccaaatctcagttttcattattgtggtggtcaggttcgatatcaagttttggagattgggcaactctctttgcgtctgtagctttagcgagttacataggcacagagactggaaattcagagctaacagcagttgttcccttggtagctaggataattcctgcattactttcctcatttgctggtttaattgctgatagatttgataaaaaattcgttatgattttttgtgatcttacaaggatggttttagttttatttttattttttgcggataatttatattttatttttataattaattttttctcagagattttttcattgataaggcagccatctagagaggctgtcgttcctgagattatagactctgagaatcttgtaaaagcaaattcactttttgcaattggaacatacgcaacattacctatagcctctttattgttgggtttttttagcgacctcgacacttttaatgtcgttaatgaatttggaaatgggtggagcggttcgataatttttttactagacaccattacatttttgctttctgcatacttattgtattttctaaaaaataaaaatgtaaatacagcaagcagtaatcctccattttctattaagaattttcaagaaggtattaactacttttttaaaaccaaaaatattaggaatatagctttttcaatttcatcttgtttaattggtgcaggaacgttatttattctaggccatacatttttgacagtagatttaggttttagtgaaagctcatttggtttcatgattgcttcctttggaacaggaataatatttagtatgctaactcttagttattttgttacaacgtttaatagaataaattttctcataggctcttgcatgataattacaggaatttccttattttcagcatttagatccgtagattttgttgtaatcttattatcaattttcatatccggagttggtacgggtggggtttaccttctaactataagttacttgcaagcttctactaatcctgaactccgaggaagagttttt

SEQ ID NO: 202481 - DNA, 631 bp, Unknown
  Bacterial polypeptide expressing nucleotide sequence isolated from the Sargasso Sea
atttacagaagtagtttggtattacccaggaacagactcttcttataatgacaaatatgtagtatttaattatggagaatcaggcagacaacctggaggtatttggtacacaggagtaaatacttattctattagaactagctttattgatgcaaccgtttatcctaaaccttatgctactcaattcaatagctcatcttctggtacttttccagatgtagtaggagctacaggattaggtcaaagtgtttattttgagcatgaagtaggaaccgatcaattaaatcctgatggtaccacaactactcttacttcttatgcaacttcatttgattttcctattaacacgcaacaaggaactggagaatatttcctagctatgagaagatttttaccagactttaaaactttaactggtacagctaaagtaactgtaggagttaagaattatccttctcaatcaatgactagtagtacatatagtccctttagtgtgacttcaagttctactaaatttgatacaagagcaagaggaagatatgctaatattaaaattgaaaatgaaagctcgggtgaaaactggagatatggaacgtttcaagtagatgtccaagcggatgggagaagataa

SEQ ID NO: 202482 - DNA, 1027 bp, Unknown
  Bacterial polypeptide expressing nucleotide sequence isolated from the Sargasso Sea
atgaataatataaaaattttttccaaatctcagttttcattattgtggtggtcaggatcgatatcaagttttggagattgggcaactctctttgcgtctgtagctttagcaagttacataggtacagagagtggaaattcagaactaacagcagttgttcccttggtagctagaataattcctgcactactttcctcatttgctggtttaatagctgatagatttgataaaaaattagtgatgattttttgtgatcttacaagaatggtcttagttttatttttattttttgcggataatttatattttatttttataattaattttttctcagagattttttcattaataagacagccatctagagaggccgtggttcctgagattatagactctgagaatcttgtaaaagcaaattcactttttgcaattggaacatacgcaacattacctctagcttcattattgttgggtttttttagcgatgtcgaaacctttaatgtcgttaatgaatttggaaatggatggagtggttcgataatttttttactcgacaccattacattcttgctttctgcatacttattgtattttctaaaaaataaaaatgtaaatacagcaagtagtaatcctccattttctataaagaattttcaagaaggtattaactacttttttaaaaccaaaaatattaggaacatagctttttcaatttcttcttgtttaattggtgcaggaacattattcattctaggccacacatttttgactatagatttaggttttagtgaaagctcgtttggtttcatgattgcttcctttggaacaggaataatatttagtatgctaactcttagttattttgttacaacgtttaacagaataaattttctcataggctcatgcatgataattacaggaatttccctattttcagcatttagatcagtagattttgttgtaatcttattatcaattttcatatctggagttggaacgggtggggtttatcttctaactataagtt

SEQ ID NO: 202483 - DNA, 860 bp, Unknown
  Bacterial polypeptide expressing nucleotide sequence isolated from the Sargasso Sea
aatgaaaaaaatcacttcaatgattttagctttagtatttgcagtttcagtaattggatctgcttctgctaaaacattaaaaatccaacttacttttcctaaaacatcatacgatggacaaatcgtaaaaatgtggactgacagagtaacaaaactaactcgtggagagttaaaatttgagcttctttcaaaaggtgaagttgttggtatgaaagaaacactagaagctgttgacaaaggtctagtagatggtggtgcagcatggactcactactggtcaaactatcacccagctgcgatgttatttggatcgccagttgctggtggaggaattggtttaagcactaaatcttggttagcttggtatttcgataatggtggtaaagaattatacgaccaattatggagcgaaatgggaatgaatgttaaaggtttcgtgatggcatcatcaggacctgaagcattaggttggtttaaagagccaattaaaaacatggatgatttcagaaaatacagattcagaactcctccaggaattccaggacaaacatacaaagatataggaattgcatcagtatctttatcaggtggagatattttaccagcacttgaaaaaggaactattgatgctgctgaatggtgttgtccaaaaccagactcagtttttggttttcaaaaagttcttaaaaactactatctacaaggattacaccaaaacgtagtaaatggtgatatctatattaatggagatgtttacaattctttaactgaccatcaaaaatatgcaatggaagttgcgtctgaagcgatgatcactagaaacatcactaatagagctgtagaaaatggtaaagcgttaa

SEQ ID NO: 202484 - DNA, 1090 bp, Unknown
  Bacterial polypeptide expressing nucleotide sequence isolated from the Sargasso Sea
aatgaaaaaaatcacttcaatgattttagctttagtatttgcagtttcagtaattggatctgcttctgctaaaacattaaaaatccaacttacttttcctaaaacatcatacgatggacaaatcgtaaaaatgtggactgacagagtaacaaaattaactcgtggagagttaaaatttgagcttctctcaaaaggtgaagttgttggtatgaaagaaacactagaagctgttgacaaaggtctagtagatggtggtgcagcatggactcactactggtcaaactatcacccagctgcgatgttatttggatcgccagttgctggtggaggaattggtttaagtactaaatcttggttagcatggtatttcgataatggtggtaaagaattatacgaccaattatggagcgaaatgggaatgaatgttaaaggtttcgtgatggcatcatcaggacctgaagcattaggttggtttaaagagccaattaagaacatggatgatttcagaaaatacaggttcagaactcctccaggaattccagggcaaacatacaaagatatcggaattgcatcagtatctttatcaggtggtgatattttaccagcacttgaaaaaggaacaattgatgctgcagagtggtgttgtccaaaaccagactcagtatttggtttccaaaaagttcttaaaaactactatctacaaggtcttcaccaaaacgttgtaaatggagacatttacataaatggagatgtttataattctttaactgatcatcaaaaatatgcaatggaagttgcatctgaagctatgatcacaagaaatatcacaaacagagctgtagaaaatggaaaagcgctaattgatctaactcaaaatcatggtgtaaaactttgggatacaccagctgattacttcactgagtacatgaacgctgctcaagctacgcttaaaaagaatgcagcagaaaatgctttctttaagcaagtttacgatcatatgactgagcacgcaaaagttgtagtaccttttattgcacaaatggaaacatctgatgcatcaattggatctgcatttgcggcacaacaataa

SEQ ID NO: 202485 - DNA, 319 bp, Unknown
  Bacterial polypeptide expressing nucleotide sequence isolated from the Sargasso Sea
aatgtcctctcttgttcgtaaagcaatatttccggtcggtggtcttggtacacgatttctgccggcaacgaaggcgatgccaaaagagatgctgccagtggtcgacaaaccactcattcagtatgctgttgaagaagctgctgcggccggtattgaggaatttatcttcgttaccggtcgtggaaagtctgcaatagaggatcatttcgacgtttcctatgagctggaacagacccttggtgagcggggacgtgatgatgttcttgggacgattcgtgctattggacttgaaccgggacagatttcttatactcgccaa

SEQ ID NO: 202486 - DNA, 163 bp, Unknown
  Bacterial polypeptide expressing nucleotide sequence isolated from the Sargasso Sea
atgggcggaggaaactcgaaggaacggcgaccgagatcggtgatcatcatcttcggcccgcccggggccgggaaaggtgcgcgtcgtcgtcgtcgtcgtcggtcgtcgtcgtctcgaacgcgacgatcgacacgtgtgatcgcgaggcgcgcgagagactgac

SEQ ID NO: 202487 - DNA, 396 bp, Unknown
  Bacterial polypeptide expressing nucleotide sequence isolated from the Sargasso Sea
aatgactaaaattgcaattactggatcgttagcatcaggcaaatcaacagtggcaaaacttatgtctcgccaacgctacccaatcttcgatgcagataagtcagtaaaagatttgtatgtaaaaagaagttttaaaaaaaaggttaaaataaaatttaattttaaaaatactgataaaataaaaaataaaattaaaaatttgataaaaaaagacaaaaaaacactgaaaaaacttgaacttatcattcacccttttgtcagaagagaaatgaaggcatttatgaaatctaaaaaaaaaattaaaattaaaatttttgaaattccacttttgattgaaagcaatcttcagaaatattttgatattattgtatttgttggtgcgaaaaaaaaaataga

SEQ ID NO: 202488 - DNA, 241 bp, Unknown
  Bacterial polypeptide expressing nucleotide sequence isolated from the Sargasso Sea
atgatcaagaaagccattttccctgtcggaggccttggcacccggtttctcccagccacaaaggccatgcccaaggaaatgcttccggtggtcgacaagccactgatccagtacgcggtcgaagaggctgccgaggctggcatcgaggaattcattttcgttaccgggcgcaacaagacagccatcaaggatcacttcgaccactccttcgaactcgaggcaacctgtccacaaaaggcaa

SEQ ID NO: 202489 - DNA, 565 bp, Unknown
  Bacterial polypeptide expressing nucleotide sequence isolated from the Sargasso Sea
atgattaatataggcgtaacaggttctttagcatcaggcaaatctactgttgctaagattttggccaatcgtaagcataaaatatttaatgctgacgaagctgtttctgatttgtataaaaaaaaagaatttaaaaaaaaaataatcaaagaattcaatctagttaattcaaaaaatataaaaaaaaaaataaaaaatcttattaaaaaagataaaaaaaaattaaaaaaactggaaactattattcatcctataataagaatgaaaatgaaaacgcttatgcgtcataaaaaaagaggaaaaattataatttttgacattccacttttaattgaaagcaaattaggaaaatatttcgatgtaatcatttttgtgggatcaaaaaaaaaaataagactaaaaaggtatctccgtaaaaaagggacaaagcagatattcacaattttggataaaaggcaggcaaaatcgaataaaaaaattaaaaattgtgattatataatttataataatagatcacttaaagttttgagaaaaaaagtaaaacttctaatgaaaagaatatgaa

SEQ ID NO: 202490 - DNA, 522 bp, Unknown
  Bacterial polypeptide expressing nucleotide sequence isolated from the Sargasso Sea
aatgtctaaaaagataaaaaaaataagaaaggcaatttttcctgttggtggtttagggacccgcttcctaccagcaactaaaacaattccaaaagaaatgcttccaattttagataaacctctagttcaatatgcagttgaagaagctttggaggctggcatagaagagattatttttgttactggaagaggtaaaagcgctattgaagattactttgatcactcaattgaattagaaaaaaatcttaaaggccaaaataaaagtagaactcttaagtatattcaaaacatgatattaaatcctggttcagtttcatttgtaagacagcaaaaccctttaggtcttggtcatgcagtttggtgcgctagaaacttcatcgctaatgaacctgtagcaattcttttagctgatgatttaattgatgctaaacctggatgcatgaaacaaatgatagatgattggaaaggtggaaatatggttgccactatggaagttacagctcaagaaacatcttcatatgg

SEQ ID NO: 202491 - DNA, 484 bp, Unknown
  Bacterial polypeptide expressing nucleotide sequence isolated from the Sargasso Sea
atgaaaattaaaaaagctatttttccggtcggtggtttgggcacacgttttttgccagctactaaatccatgcctaaagaaatgttaccagttgttgataaaccacttattcaatatgctgttgaagaagctgcaaatgctgggattgaacagtttatttttgttacaagtcgtggcaaatctgccatagaaaaccattttgatcattcttatgaacttgaaaatacattagctaaaaaaggcaaaaataaaaccttaacagttgctcaagaaatgctcaaaataccaggaagctttgcttatgttaggcaacaagaacctgcaggattaggccatgctatatggtgtgctagacatttaataaatgatgaaccttttgctgtcattttggctgatgatttggttgctggtaattctctaattggaaatatgatcaataattatacgggtggaaatatttggcaattagaatgtagaaaaaaat

SEQ ID NO: 202492 - DNA, 325 bp, Unknown
  Bacterial polypeptide expressing nucleotide sequence isolated from the Sargasso Sea
aatgataaaaataggtattacaggttcattagcatctggcaagtctacagtagcaaagattatttcttctgggaagtatcctctttataatgctgatagagctgttcagaaaatctatcagacgaataattttcaagccaaagtttttaaaaaatttaaaattaaaagtaaaaaaaatataaaaaataaaataaaaaagattatatctttagacaaaaattctttaaaagagatagaaaaaataattcaccctcttgtgagaaaacaaatgagcaaatttactaaaaaaaataaagggaaaaaatttttaattttcgaaatacca

SEQ ID NO: 202493 - DNA, 468 bp, Unknown
  Bacterial polypeptide expressing nucleotide sequence isolated from the Sargasso Sea
aatgatcaaatcaaatactataaacacatatttaaaaaatcaagcctctcttgacttattgaggtttattacatgtggatctgttgatgatggaaaaagcacactcattgggagaatgctttatgagtctcagatgatatttgatgatcaagttgcctctttaaaaaatgactcgaaaaaatatggaacccaaggtgaggatattgattttgcattactagttgatggtttatcagctgagagagaacaaggtattacgattgatgtagcttatcgatttttctctagtagtaaaagaaagttcattgttgcagatacacctggacacgaacaatacactagaaatatggcaaccggtgcttcaacagctgatatggccatcttactagttgatgctcgaaatggtatactcacacagactaagagacattcttttattgtttctcttcttggaattcaaaatattgt

SEQ ID NO: 202494 - DNA, 565 bp, Unknown
  Bacterial polypeptide expressing nucleotide sequence isolated from the Sargasso Sea
atgattaaaataggaattaccggatcaattgcatctggcaaatctactgttgcaaagatgtttgctggaaaaaagtatcctttatttaatgcggaccacgaagttaataagatttatcagaggaattcttttaaaaataaaatttgcagaaagtttgattttaaaaacaaaaaaaatattaaaagtaaaataaaaaaaataataaaaaaaaataaaaaatatataaaagaattagaaaaaattattcatcctcttgttcgaaaagaactaagaagattttcggtaagaaataaaagaaaaactcttctcttttttgagattccacttttgatagaaagcaaattaatgaaaaattttaatataataatatttgtaaattcaaataaagctttaagattaaaaagatatacaaaaagaggaaagaatgtaaaaatttttaatttattagataaaagacaactatcaactggaaaaaaaattaaattctgcgactatgttattaacaacaacagatccttaaaaaacttgaaaaaaaacgttgaggttattaaaaataaattatgaa

SEQ ID NO: 202495 - DNA, 778 bp, Unknown
  Bacterial polypeptide expressing nucleotide sequence isolated from the Sargasso Sea
ccgagaaacaacggaaacaacacacgcgaacaacgggaaacaatgggaacgacaaacgcgaacaacggtaaaaaatgggaacaatgcacgcgaacaacgggaaacaacgggaacaacgcacgcgaacaacgggaaacaacgggaacaacgcacgcgaacaacgggaaacaacgggaacaacgcacgcgaacaacgggaaacaacgggaacgggacaaaagcatgcgaacaacggggaacaatgggaacaatgcacgcgaacaagtggaaagaacgggaacaacgcacgcgaacaacgggaaacaacgggaacagcgcacgcgaacaacgggaaacaacgagaacaacgcacgcgaacaacgggatacaacgggaacaaagcatgcgaacaacgcgaaacaatgagaacaatgcacttgaacaaagggaaacaaagggaacaacgcacgcgaacaacgggaaacaactggaacaacgcacgcgaacaacgggaaacaacgggaacaacacacgcgaacaacgggaaacaatgggaacgacaagcgcgaaaaacggtcaaaatgggaacaatgcaacgcacgcgaacaacgggaaacaacgggaacaacgcaggcgaacaacgggacacaacgagaacaacgcacgcgcacaacgggaaacaacgggaatgggaccaaagcatgcgaacaacgggaaacaatgggaacaatgcacgcgaacaagggaaaacaacgggaacaacgcacccgaacaacgggaaacaacgggaacaacgcaca

SEQ ID NO: 202496 - DNA, 718 bp, Unknown
  Bacterial polypeptide expressing nucleotide sequence isolated from the Sargasso Sea
ttgagtgataaaaaaattctagaggttaaaaatttaaaagttttttatgaatcatctggttcattttttactaataaaaatattgttaaggccgttaatgggatagatattaatattaaccaaggagagacatttgggttggttggtgagagcggttctggaaaaagcacagttgcaaaagcaatactaaatcttgtgaatataaattctggcgaaataaagttagaaaaagaaaatttaactgaattaaaaggttcaaaattaagaagtaagcaaaaagaaattggagctatattccaggacccttatagttctcttaatccaagaatgaaggttagagatattattgcagagcctttgcgtgttcaaggaaaaaaagatgttgatgaagatgtaaaaaatttactacaaatagttggccttgatagtagaatggatgataggcttcctcatgaatttagtggtgggcaaaggcaaagaattggtatagctagagcggtatctactaatccaaagttaataatttgtgatgagcctgtatcagcactagatgtttctgttcaagctcaaattttgaatttattaaaggatttgcaaaagaagttaaatatttcatacctatttattgctcatgatttatcagttgttaaatatcttagcttaaagattggagtgatgtatctaggaaaaattgtagaaatggcagatagtgaggtga

SEQ ID NO: 202497 - DNA, 676 bp, Unknown
  Bacterial polypeptide expressing nucleotide sequence isolated from the Sargasso Sea
atggggtgcaattctaaaggggaccttctaaaaaactacgggccacggaaaaaaacagaaaccagggggaagattcgggagaccacaacgggagaccacgggccacggaaaaaagtggaaaccaggaggaagattcgggagaccacaacaggagaccataacgggagaccacaccgggagaccacaacgggagaccacgggccacggaaaaaagtgaaaaccaaagggaagattcgggagaccacaacgggagaccacaacgggagaccaccacgggagaccacaacgggaggccacgggccacggaacaaagtggaaaccagggggaagattcgggagaccacaacgggagaccacaacgggagaccacaacgggaggccacgggccacggaacaaagtggaaaccagggggaagatttgggagaccacaacgggagaccacaacgggagaccacaacgggagaccacaacgggagaccaccgggccacggaaaaaagtggaaaccagggggaagattcgggagactacaacgggagaccacaacgggagaccacgagccatggaaaaatgtggaaaccagggggacgattcgggagaccctaacgggagaccacaacgggagaccacgggccacggaaaaatgtggaaaccagggggaagattcgggagaccac

SEQ ID NO: 202498 - DNA, 822 bp, Unknown
  Bacterial polypeptide expressing nucleotide sequence isolated from the Sargasso Sea
aacctcccacggacgccaagtaggcccgtcgctgacgaggggggatctgggtttagaggccgcaactgagatcggtgatccggctgaaggttggggctttccgtggcgtccggtaaaagaagacccgcctttatatgcgcagaaaaatcccaggcccactcgccaaaatcgcagagcaattcgccgtccgcttttccctattcaaataccagatcaaaagccaagcaaaccgcgatggctactgttcggcttagcatccatcatcactctcgtcggcataactctgatgttgataactattaggcaagtggacatagaggtcggcggaatcgaggacggcgtagcactccaaccgagctcaattcagggcacgcaaatctatttttcggttaatggcgcaaatgctcgctccgctcagctactacttgacgaattccctgttagcggggtgcaacgctacggaaatcagatcgtttgggttgttccaccacttaccgagggtgagcattcgctcaaactcgttgttcagagacgcctatacggtcaagtatcgcgctctatagatttcacggtcgatgacacccctccgatgatcagcctgccaaaggtgttagatcctgtcccgatgaacgaaccggtaacaattgcgggcagttcggaaccgggcgcgaccttagttgtcggtggagttccaatcgaaacacaagatggttctttcgtgttggagctagatgagccaccagccggtcccgtatctgtattggcaatagacagggctggcaacacgaacacgttcaacatgattattccaatttcctaccc

SEQ ID NO: 202499 - DNA, 934 bp, Unknown
  Bacterial polypeptide expressing nucleotide sequence isolated from the Sargasso Sea
ccgtggtcgcttacccctcacgggcaacaagttgggccttcgctggcaaaagatgaggtgacctcagctggggagactgtagataccgaccctgctgagggttggggctttccttggcgacctgttaagaaagatccgcctgtctatgccagcaaccttcctcgaccaactcgacaaaatcgcagggccgtgcgacggcctctgtttccaatccaggtaccaaatcaacctccgagtcgtcctcgctgggggctaatggccattgcttctctcgccaccattatcggtgttgtcttgatgctgatcactattcgtcaagtcgatatcgagataggcggtatcgaggatggagtggcgctgcaacctagttcaatcgaaggaaccgagatttcatttactgtgagcggcgcaaacgctcgctctgcgcaactgcttcttgatgacttccctgttagcggagttcaacgttacggcaaccgcattgtctgggttgtgccaccgcttaccgagggtgatcattctctggaactagttgttgaccgtcgcttatacggaacaacatctcgcgctatcggtttcagtgtcgacggcactcctcctctaatcgggttaccagatgttctagagccagtccctatggatgagcccgttaccatcgctggaacatcagaaccaggagcgactctcgttgtcggaggggtaccaatcgaaacccgagacggctcttttgttctcgaactcgaagaacccccagcgggccccgtctctgtattggctatagatcgcgctgggaatacaagtactttcaacatgattatcccaattgcgtatccgagaactcaaggcgttcacgtaagcgcagctgcttgggctcaagacggccttaagagctccgtgctggaattaattcgtgctgggaaagtaactgctgtcg

SEQ ID NO: 202500 - DNA, 1160 bp, Unknown
  Bacterial polypeptide expressing nucleotide sequence isolated from the Sargasso Sea
actggtatttgcactatctcttgctagaggtatatttagctattttcatgtatatcaaggtgaaaaaattggccaatatttagcatttgatcttaggaaatcttattttaacaaattgcaaaaactttcctttaaatttcacgattcacaacatacaggtgacctaattactaaaggaataattgacattgaaggaagtagaatgtttgttaatacaggagtgcttagattagtttttcttacaatatttatccttactggcgcatatttagtaatttcagtagatttatggctaggcttgctttctctgtcttttgttccttttattgcattcatatcatctttttccagacttaaattaagaaaaaattggtacagattacaagaacagcttggagtattgactagagtgatggatgaaaatttatcaggggttagattagtaagatcttttatgaagcaaaaatatgagttagaaaaattcaatattgcttccaatgttgttaagaagacaacttttaggcaaataattataagaagtttctctatatctttgaatactttagcttttctagtttctatgagtttagtggtttattttggttctatagcagtactcgaatcaaaaataacattaggagaattaacttcattaattgcttttatgagtattttacaagggccagtgagacaaattggaatgttagtaaattctttctctcgagcttctgcaacgtctacaaggttgtttgaaacattagatcatcaagaagatgtaattaatattgagggtcaaagatttaatgaacctgtaaaagagttagttgtgaataacttatctttttcttacgagtcaaagaaggttttgaaaaatataaattttatagcaaaccctaatcattcaattggaatagttgggcctccaggagctggcaaaacaactctttctaggcttcttcctagattttataatcctgatcaaggagagattttattaaatggtaaaaatatttcaaccctagatcttactgatctaagaaaatctgttaatttagttgatcaagataattttttattttcagatacttttaccgaaaatataagatatggtgatcccaaagcaaaaaaagataaggtaacctgtcaacagaaaaagctca

SEQ ID NO: 202501 - DNA, 457 bp, Unknown
  Bacterial polypeptide expressing nucleotide sequence isolated from the Sargasso Sea
tatgggattagaagataaaataaaggaatcaataattttagcaatgaaagctaaagataaaactaggcttgaagctttaagagctgttaaatcagctattttgttagaaaaaacaaaggctggaaataaggaaattctagatgaaaatcaaattataaagttattacagaagcttgtcaagcaaagaaatgaaagtgcaaaaatttataaagaacaaaatagagatgaattagctgaaattgagaatagtcaatcgaaaattatttcagaatatttaccagatcaacttaatgaagaagagctaataactattatagatgaagttataatatcaacaaatgctgagtcaatcaaggatatgggtaaagttattggagcaactaatgcaaaggttcttggaagagctgaaggaagagttgtagctgacttagtaaaatcaaaattaaattccttataa

SEQ ID NO: 202502 - DNA, 340 bp, Unknown
  Bacterial polypeptide expressing nucleotide sequence isolated from the Sargasso Sea
atgcttaaaataggaattactggctcattagcatctggaaagtctacggtagctaaaattatttcttttaagaaatatccactttttgatgcagataaagctgtaaagaaaatttatcaaacaaaaaattttaaaactaaggttttaaaaaaattcagactaaaaaataaaaaaaatataaaaaataaaattaaaaaaattgtttcaaaaaacagaaggtctctaaaagacttagaaaaaattattcatcctcttgttagaaaggaaataagaaggttttcaaaaataaataaaagaaaaaaattcttattttttgaaataccacttctcattgaaagta

SEQ ID NO: 202503 - DNA, 1543 bp, Unknown
  Bacterial polypeptide expressing nucleotide sequence isolated from the Sargasso Sea
aatgttaggtttttttaaaattataaatctcattcctgcaatcagagcattaattgctgaggagagtctattaccaaaaaatagccataataaaataccttttgctctaaaatttctcaaatatatattatttgtaaaacacaataaaaataaagatttatcattaaccttaaaaaaacttggcccaacatggataaaacttggacaattcttatcaacaagaccagatatcattggcatagaactttctgataaacttaaaaatcttcaagataaagttgaacctttcccaaagtcaaaaacaatagaaattcttaaaaacgaattcaaagaagaatatttggacacttttattgatataatgccctcaaaaactgcagcttcaattgctcaagtacataaggggacaataaaattaaacaacaaggaatatgatgtagcaatcaaaattttaaggccaaatattgaaagagaaataaaaaaagatctaggaaaattttttatcgcagcaagtcttttagaaaaactttctaaagaagcaaaaagacttagattaacggaagttgtacaaaccttagctgaaagcctcagtatggaaattgatttaagattagaggctgcggcacaatcagaaattaaagataatattattaatgacgaatattttgatgtcccaaatatatactgggatcttacaagaaagaatatactaatatctgagtgggttaatggaataccagcaaaaaatataaacaaaattgtcgaggaaggccttgatactaaaaaaattggaaaaaatattttaaaaatatttttaactacatctattcgtgatggcttatttcatgcagatatgcatcagggaaacctttttatagaaaaaaatgaaaaaattatagctgtagattttggcatagttggttatttagattttgaaagcaaacaatatttgaataatattttacttggtttcattaatagagattataacaaaattgctaaagttcattttgaagcaggttatgtgcctgaaacagaggatcaaaataaatttgcacaagcattacgatctatcggagagcccatccaaggaaaagatgctaatgatatatctattggaaacttactcacacaactttttgaaatcaccaatcaatttaatatgaaaacacaaccacaattactactactccaaaaaacaatggtagttgttgagggtgtggcaagagagtatgatccaaatttgaatatatggactgagtcagaaccaatattaaatgacttaaataaattagactttactaataagttcaatttttcttcggatgaagtaataaatcgggctaaagaagcaattataaatcttcccaataacatcgaaggagttaagaaaaatatcaatcaaatgggaaaaatgatagattaccaaggagtaaaaattcatccagatagcctaaatactataaataaaggtaacaataacctattgttttacattattatttttcttttattattgctaattgttatagcaattttttaa

SEQ ID NO: 202504 - DNA, 838 bp, Unknown
  Bacterial polypeptide expressing nucleotide sequence isolated from the Sargasso Sea
gttgcgggcgcttgggcggagcgcgaccgttcgctctccggcctctccccgctcgtctcacctcgcgccagcggggtcgggatcgggcggcgggacggggcgtcggacgagcgaagctccagcgcgaggccagcaacccgctgctgcgcacgccggcgtggcgccgcttccgcttgacttgcctcacctcgcgccaacggggtcgagacggagtgtcgggttggacttgcgggcgcttgggcagagcgcgaccgttcgctctccggcctctccccgctcgtctcacctcgcgccagcggggtcgggattgggcggcgggacggggcgtcggacgagcgaagctccagcgcgacgccagcaacaagctgctgtgcacgtcggcgtagcgccgcctccgcccagcctcgcttgcttcgcatcggcggggtcgagacggggcgtcgagttggagttaggggcacttgggcagtgcgcgaccgctcgctctccggcctctccccgctcgtctcacctcgcgccagcggggtcgggattgggcggtgggacggggcgtcggacgagcgaagctccagcgcgaggccagcaatccgctgctgcgcacgccggcgtggcgccgcttccgcctgacttccctcacctcgctccggcggggtcgggacggagtgtcgggttggacttgcgggcgcttgggcagagcgcgaccgttcgctctccggcctctccccgctcgtctcacctcgcgtcagcggggtcgggattgggcggcgggacggggcgtcggacgagcgaagctccagcgcgaggccagcaaccagctgctgcgcacgccggggggcgc

SEQ ID NO: 202505 - DNA, 178 bp, Unknown
  Bacterial polypeptide expressing nucleotide sequence isolated from the Sargasso Sea
tatggcacaaaaatttacaattttatttgatcttgacggtactctaattgatactgcaccagatttaatgaatgcacataactatgttatgaataaatatggttatgaaactaaatctacagaagatattagaaaacttgtaggcaaaggatctgcttcattaattggaagatctgta

SEQ ID NO: 202506 - DNA, 937 bp, Unknown
  Bacterial polypeptide expressing nucleotide sequence isolated from the Sargasso Sea
aacaacctttgacggccgaccgctggcaatgcaagggaaggccgacaaggccttggtggcggccgccacggcatctttcgtcggcggcaccatatcagtggttctgttcaccgcctttgcgccacccttggcggaagtggccctcgcctttgggccgcccgaggaattcgccttgatgatgctggctttcgcgacttttattggtcttggtggtgacgacattccgaagacctttttctccatcttcatcggcctggtattgagcgctgtcggtcttgatgtggtcagcggtgagccgcgcctcatctttatggacctgtcgggcttcatgcatggcatcaacttcctggtcctggccattggcatctatggtattggcgagatgctgtggactgtggagacgtcgcgcggcgacgtatcaatgagcagggcgactgtgagcgtcgcaagggtcttcaccacgttgaaagaactccttggtacttggaaaaccatgatcatgggctcattcctgggctatttcgtggggatcttgcccgctgccggcgcgacgcctggttcgctcatggcctacggtgtggcgaagaccatcaccaaggaaccagagtcttatggtaaagggaacatcgacggcgttgttgcgccggaagctgcgaacaatgcggcgtcgacgggttccatgctccctatgctgacgcttggcattcctggttcgcctacgacggcgatattactgggtggcatggtcatctggggtctggagccgggaccgctccttttcacggagcataaggaatttgtctggggtctgattgccagcctatatgcagccaacttcttctcactgatcatcaatatcgccttcatcccggccttcgtcgcggtgctcaagatgccgtttacgatcctggcgccggtgatctttggctctgcgtag

SEQ ID NO: 202507 - DNA, 748 bp, Unknown
  Bacterial polypeptide expressing nucleotide sequence isolated from the Sargasso Sea
ttgtctattaagcgtttcatttacaacagatttgattggttttgctttgttaataatattagtttcatttcattattttgtaaggaacccaaaaaggcaaatagtgtgaaagctgtttttgtattattagattctttaaataggaaagctctagaggtttattctaataaaacaaatattagaactccaaattttaaaaggtttcaaaaaaaatgtattacatttgataatcattatgtaggaagtctcccatgcattccagcaaggcgagatctacatactggaaggataaatttcttacatagaagttggggaccattagaacctttcgatgagtcttttcctgagcttatgaaaaataacggtgtttattcacatataattaccgaccatcaccattactttgctgatggtggagcaacataccaccaaagatattcttcatgggagttagttagagggcaggctatcgatagatggaaagcagaggtaaagccagacattgaagatttaaaaaagaagtatcatagtattcaacatcacagaaaaaattatatgattaatcgcgagtacatcaataaagaagatgaatattgcacaccacaagtattttcattagccgaggactttttggataaaaataaaaatcatgataattggtttcttcagattgaatgctttgatccacatgaaccatttcatgctcccgatagatttagaaagctttatccaaatgattatgatggcc

SEQ ID NO: 202508 - DNA, 415 bp, Unknown
  Bacterial polypeptide expressing nucleotide sequence isolated from the Sargasso Sea
aatggtaggggttagctcaattaaaaaagaaatttctacaaatattaaaagaagaccttcaactattgtaatgaagtatatgcaagaatttggttacagggttataccggtgaatccattttctgctggggaaaaggttcatggtgagattgtagttgccaaattaaatgatattaaaataccagtagatatagttgatgtctttcgtccttcaaaagaagccacagcggtagccgaagaagcaataaaaattggagcaaaagttttttggctccaatatggtattgaaaatgatgaagcaaaaaaaaatgtagagtcaaaaaatattttttatgtttcaaacaaatgtattaaacaagagtaccaaagattatttttaaaagttagtcctgtatttcctgctttaaaaaattaa

SEQ ID NO: 202509 - DNA, 970 bp, Unknown
  Bacterial polypeptide expressing nucleotide sequence isolated from the Sargasso Sea
ttcagagtacgtgaacccaaagacggcgaagagtcttatgacggtggttacccagatgaagaattcccagagcaagtgcatggtcacttcgccgctgaaattggctggacgattggaccgactattcttatggcagcaatagcaatattcagtgtgggagcgttacttagccttgacgacgttgaggcagcccctgacgaagctgtatatcctgaaatggaagtgcttgttgtcggacagcagtggtggtgggaattccagtattatctcgatggcgttgatggtgctgagcaaccagatttcgttactgctaatgaaattgttgtcccagttgggcaagatattcggattcataccacatcccgagacgtgctccatagtttctggataccacgcctgaacggcaagaaagactctgtccctggaagaacatccccatgggtgcttcaatcaaatgagattggcagatttgcaggtcagtgcactgagttttgcggtttaagtcatgcatacatgcgtatgtatgccgtatctctgactcaagaaaatttccaaatatgggttgataatcaaatgagaacacgggaacccctccaagaaggtgacgaaaactatgaaggggagcaagtgttccttttaaattgtgcccgatgccatgtcattaatggagttacttcgagagatatttccgggagcgttcaattagactccatggctttgtacggaaatatagaagaatacagaaaccattccgatggaacgctttcgcaagggaaatacaccggatccgcgaatctaacatcaggagcagctccgaatctcacacactttgctacaagaagtagctattcgggttcatttttccagctgtaccctgatgcccaagagatggctgatgctggaaactaccttgaccttgcaggaagtgactatgccaggggaacgctcgaagcgtggttgcggaattctc

SEQ ID NO: 202510 - DNA, 790 bp, Unknown
  Bacterial polypeptide expressing nucleotide sequence isolated from the Sargasso Sea
cagacctcccaccccgaagagtcgaagaggtaccagtaccaccacccgaccgagacctggcaccgacagccgaactacgccgatttcgccgaagcccacgatgaggagggagcgagccgaaaagcggccaagaagaacatccaccaggaactgctagacgagcgtgtccagatccgggagtacttcggcgaacggggagtcaccctgacggccgaggaagcgaaggatgtccagattctgtaccgatccggagttgagatggaggacgcggtagcgcaagtcctggccgagaaggagccagcgacgaagccgaccgcagaccaagacgacacggacaacagcggttctgaggacgaagacgacgcagcatccgctgcggacgccgctcctaaggcccagccgaagacccagccgaagccccagccgaagaagaagggcaagggcaagggcaagggcaagggcaacggggcgcagaaggccaagcaggggtctgtcgagcaagcgctgacagagctgaaggaggagggcaaggcgaagaaggccaagtccgccgagaaggcccagaagagcgcgtccaaagaagagcggaaagcagcggcaatcgagaggagggccgccgcgaagaagaaggccgcagccgagaagaaggaggcggctgagaaggccgcagccgagaagaaggcggcggctgagaaggccgcagccgagaagaaggcggcggctgagaaggaggccgcagccgcaaagaagaaggcggcggccgagaagaaggcccagggggcttggggaa

SEQ ID NO: 202511 - DNA, 478 bp, Unknown
  Bacterial polypeptide expressing nucleotide sequence isolated from the Sargasso Sea
ctgaagtatcaccgtgaagattacccgcattggagtgatctggatggcaatggtctcaatacgcgccacgacttactcgctacacaatccacggttaaaccaagttttagccgtgatggtaaaaccgtgactcggggaagatgggtgtcaccttggacggggcaaatctatctcgatccctttgcgctcgatgtggatcacactgtaccgcttggctatgcccatgcccgaggcggtaaatattgggatcgctatcagcgtgagatgttcgcaaacgatgtgagaaatctgcaggtagtcgaaaagggattgaataaagaaaaaggatctgcggggatcaccgagtggttaccgcccaccaatcagtgtcagtatatcttgcgattttaccggatcatgaaaacgtatcatctaaaatatttcactaaagaagaaccacgggcgctggcgctggtagctcagtgtcaaagggggtaaa

SEQ ID NO: 202512 - DNA, 496 bp, Unknown
  Bacterial polypeptide expressing nucleotide sequence isolated from the Sargasso Sea
atgccgcattgaagggtgtgacctggttttgatgcttggtgacaatttttaccctgaaggcttaaaaaccctggatgatccgttattcaccaaaggcttcctggatatctatcgtgaactcaaaatctcttttttcacggttttgggaaaccatgatgtcaaagggaatgttcaggctcagctttatcaaagccggttccaccgtttctggagtatgccgaattacagttattcttttgaaacagggccggttcgttttcacgccatcaatacaaactgtcatttgaatgagtggtaccaactttatcaatcttttgatgagccttcgatggacaacttaggaaaaccctggaacgtcgttttcggccatcacccatttattcccagggaggtcatgggaataccgatttggttcagcaattcatctggaatttactgtttgagcagaaagccgatttttatctttcgggtcacgaccatcatctcaacgtcctga

SEQ ID NO: 202513 - DNA, 775 bp, Unknown
  Bacterial polypeptide expressing nucleotide sequence isolated from the Sargasso Sea
catgctcgccattaacgaacaagacggtcgtattgtgggtgtcgttccagcggtaaaattaacatcgtggatactaggtgaaaggctatgcgcccttccttattgtgatgtaggttttcctttggctgactcgcctgatattgaagcctatttactcgctcatttaaaagaaaagcacgttaacgcgaagtactttgaagttcggagttgtcatgcgcaacaaaccgcagacaatagctttctagcgggtaaaaaagtgcaaatgcgcttaccgttacctgacagtagcgacattttgcttaaatcgtttaaatcgaaattgcgcagccaaataaaaaaagccgataagaatggattaacgtctaaaggcggtaactctcctgaacttgtaagtgatttttacacagtgtacgtgacaaatatgcgtgatctcggttcacctgcacatagtttagaatggtttttaaacatagcgcgtggctacaatactgcttgctatattagtgtggtttaccacgacgacgcgccaataggcgcaggcattgtgcttaagaataacaacaaagcatctataccgtgggcgtcaacagtgcgcgaatttaataagttagcgcctaatatgaagctttattggaatgtactggcacattgcgcagacaatggtattcgcgaatttgactttggacgcagcacgttcaatgaaggtacatttaaattcaaaaaacaatggggcgcagagccttatcttctcgattggtatcactatccgcgaagc

SEQ ID NO: 202514 - DNA, 508 bp, Unknown
  Bacterial polypeptide expressing nucleotide sequence isolated from the Sargasso Sea
catggcacaagtgacagtagagcaattggcggagacggtgggagcatcggtggaccggctgctctcgcaaatgaaggatgcgggcttgccgcatgccggggccgatgaggcggtatctgaagaggacaaacagacactgctcatgcacctgaaaaaaagtcatggtgagcgggctgctgcccccaaaaagattactctaaagcgtaagtcggtcagtacgctgcgtgccggcggcgcaggtaagcggacggtcagcgtcgaggtgcgcaagaagcgaacctacgttaagcgagaggatgcagaaggcgcagagccagaagccgacatcagcgctgacgtggctgtggaatcggcggatcaggtggcggcacctgagccgatcgttgctgaagtagcagccccggcagatacggtatctgacactgatgatcccgaattgctcagacagcgcgcggcctcccgccggaaagcagaggaacaggcgcgacaactggagcttgaagccact

SEQ ID NO: 202515 - DNA, 682 bp, Unknown
  Bacterial polypeptide expressing nucleotide sequence isolated from the Sargasso Sea
gaacactttaagtatattaatgaacaagcttgtttgcttgcaataaaagcaaaagatctatcaaaaaaaaatgtactaattgcaggaagtttacctagtcaaagtgatacttatgtagaagatcagcgtaactctaatgaaattgaaaaagattttttagatcaagcaaccataattaatccttacatagattttttttatttagatgttttatctagcggtaaagaattagatattgcatctaatgtagctgctaaacttaaaaaacctattttagcaggtgttcatttaaaaaaaaattgccttcttccttcaggtgaagctattacagaagttgttcaaaaatataaaaatgaaaattggcttggtttaataggtgcttgtgtgtcacctgaaatagttgagaaatctattgaagaactaaaagaaattaatttaccttttggatttaaagctaatttatgggaaattgaagaacccgggcctcaaaggactttcaatacggctaaatatgatgagattggaacaaatccaaatatagcatttggaaaaagagacaaatatgacccaaaattattttatgaattttctgaaaaaatcaaagaaaaaggtgcaactattcttggtgggtgttgtgaaactacaccttcgcatattgaggcaatagcaaaacttaaatagt

SEQ ID NO: 202516 - DNA, 545 bp, Unknown
  Bacterial polypeptide expressing nucleotide sequence isolated from the Sargasso Sea
tgaattgggttatgagatttatactttttgtaaaaaaacaaattgtgaaaaattatggagtgacattttagaagttggtaaaaaatatggtttaaagatttctagtatgcaagctatgaatataaggagaattgaagcgggtatcttagattgtggcagtgattttagtatatatgacaatccatatgaggttggattaggtaattttattgaactaaagaaaaaattttttattggaaaagataaattagtaaatttgccaaagcataaactactatttggatttatatcaactgctattattccaaaaggtggatttatcatgcatgacgctaaaaaaagatctgtaggtatggtcacaacaggtacatattctccacaattcaaatctggaataggttatgtgaaattttcaaaaaaaatagaatgggaaggtaagaaattttttgtaaaaaacgaagagaacaatttttatgaatgtgaaattaaagacctacccttttttgataaaagtaaaaatttacccagagaaattttaatttaat

SEQ ID NO: 202517 - DNA, 673 bp, Unknown
  Bacterial polypeptide expressing nucleotide sequence isolated from the Sargasso Sea
atgcaagatattaatacctttctattcgacctagatggaacactggtagattctgtgccagatttagcgaaagccctgaacctgatgctaagtgaatacaacctgccaacctatgaggaggcgaaagtaaggcactgggtgggcaatggcgctcgggttctggttgaaagaggtttgagcggtaatacaaaaattaaccacgcttttaaccaagtagaagttgatatcgcgctagacaaatttcttttctgttacagaacattagaaaccaaaagcaccgtgctttacgacggtgttgccgccacactcaaaactcttaaagcgcatggctgtactcttgcgttagtaacaaataaaccttcagagtttatagaaccaatccttacatcgttttcattgttgcccttgttttcaattaccattggcggtgacacgcttttagagaagaaaccctctcctttaccgcttatgcatgcctgtgaaaaattgggcgttttaccctctgaatgcgtaatggtaggcgattctaagaatgatattcttgccgctaaagccgcgaatataaaaagtataggccttacctatgggtacaattacggtgaaagtattgcgacctaccagcctgactgggtgttcgatagctttagcgacattctgtcgttgcgcgcttaaa

SEQ ID NO: 202518 - DNA, 703 bp, Unknown
  Bacterial polypeptide expressing nucleotide sequence isolated from the Sargasso Sea
caaatttccaaacttaaaatcgatagaggtatgtatgtaaccgctttaacccatgagggaaatacttttatggatggtattttatttaggttatcagagaagtgtttttggtttgtgcagcctgatggtgatatgcatacctggcttttagcgcacaaacaaaatcataaaattgaaatcaatgagcctaattcaagagttttacaaattcagggacccaattcctataagatattgaatcagttaacagaaggtgaaatagattcaaaatttagttattttagtgcgggattttttaagattaattcacaactcgtttatatatcaagaactggttggactggtgaattgggttatgagatttatactttttgcaaaaaaacaaattataaaaaattatggagtgatattttagaaagtggtaaaaattatgatttaaaaatttctagtatgcaagctatgaatataagaagaattgaagctggtatcttagattgtggtagtgattttagtatatatgacaatccatatgaagttggattaggtaattttattgacctaaagaaaaaatttttcattggaaaagataaattagtaaatttaccaaagcataaactactatttggatttatatcaaatgctattattccaaaaggaggatttataatatatgatactaaaaaaaaacctgttggtttggtta

SEQ ID NO: 202519 - DNA, 334 bp, Unknown
  Bacterial polypeptide expressing nucleotide sequence isolated from the Sargasso Sea
acactagttgcgatgggtagagcaatagataatttgccagaacacccagattacttattggtcgatggcaaccatcttcctaagactaattttgaggagaagtgtgtcgtacgtggagacagtatatcatactcgatagcagctgcatctgtaattgcaaaagtgaagagagataagttgatgtctgaacttagtttagaatacccgggctacggttgggagactaatgcgggatacggaacaaaaacccatcaagaggccctactaatacatggtgttacaaaacaccatcgtaaaagcttttcacctattcgcaatatgttgactaaataga

SEQ ID NO: 202520 - DNA, 639 bp, Unknown
  Bacterial polypeptide expressing nucleotide sequence isolated from the Sargasso Sea
taagggttttaattaccacttttacaaaaaaagatgctgaaaaaattactgactttttaaatgaaaatcaaataaattcaagatatatgcactcagatatcgaaacattggagagaattgagttgatcaaagaacttagaattggaaattttgatgttttagttggaataaatcttttaagagagggattagatattcctgagtgtggattagttgcaattttggatgctgataaagaaggctacttaagatctcaagtttcattaatacaaacaattggtagggcagctagaaatattaatggacgtgccattctttatgctgattttaaaactaaatcaattgaaaaagctttagaagaaacaaccagaagaagaattaaacaaataaactttaacaaaataaataggattgagccaaagtctacatctagaaaaattgaagaattaattgataaaggtgagaataaaagaaaaaaagtcatggacattgaaggtactaaagaaaaaactattaccgagctaaaaaaagaaatgttagagtgtgctgaaaatttaaattttgaagaagctgcaacaatcagagataaaataaaaatattagaggaaaaagaattgggaattaatgaaaagttttaaa

SEQ ID NO: 202521 - DNA, 745 bp, Unknown
  Bacterial polypeptide expressing nucleotide sequence isolated from the Sargasso Sea
cttgcttgatgttgggagggctacaaatgtaagacttcatcaaataaatactaattattcagatataaaaaatatatttatttctcattttcactttgatcatattatcgggttgcctgatcttttattaacatctagattatggcagaacgataataaaattaatatatatggcccaaaaggtataaagaaacactgtaaaggcattattgcattatatattgatgatcaaacttatcgtgaaaaattaggtaagattttaagtgaaaatatggaatgttccttgaatagaaaactaagcttagattctaagattaatatagagcctttcttggttaatcatggtcatatagaagagtcatatggctataagattagtataaataacaagaaaattgtgtattctggagatactagttactctgaaaaattagtagagatgagtaaaggagcagacctacttatacatgaaatcgcccatgcatcagacttactgcaaaaaaagaatccaagattgaaaaaaataatggattcccacacaacaatatctgagttagttaatatattaaataaaactagaccaaaattaactgtattaacacatgcgttaattttcttcgagacagaagaaaatattttaaatagaattaaggaagattatgacggagaagttatctttgctaaagacctgatgtctattgacgtaggtaaagagatatatatttttaaccacataagcaaatga

SEQ ID NO: 202522 - DNA, 496 bp, Unknown
  Bacterial polypeptide expressing nucleotide sequence isolated from the Sargasso Sea
atgaaattcttaaaattaatcccaattttatttatattttttggaaatgttccttacaaaaatgaagttcatgcagaaataaagaatccagaagacttcagggtactctcaaatgagagtaaaaagctttccatctcaaacgttgaatattttataaaagaaggtgataaatatattaaaaatggggattttgaaaaagctaaggaattctacttagacgctagaaaattagcaaagcaacttgcgtctttttattccgacctaaattcatcgttcaaaggaattgatgcgagaataccaaatgaaatgcaaagaaaaggtaagcaaacattacaaattttggcagaatcaaatgagagattagcctccttctatataaaaactgataagcctgaggttgcagtaccattacttgttgaaacaattaggataatgtcacctaatagccctgaaggtaaagaagcttatgaaaaattgatccaactaggattataga

SEQ ID NO: 202523 - DNA, 421 bp, Unknown
  Bacterial polypeptide expressing nucleotide sequence isolated from the Sargasso Sea
atgcaaaaacttacaattctttttgatttagatggtactcttgtagactctgcaccagatctaatgaacgctcacaattatgtaatgaataaatttggatatgaaacaaaaactaaagaagatattcgaaacctagctggcaagggtgcatcggtaatgatcggtagatccatttggggacaagccaaaaaagaatttagtaaagttattgatgaaaaaattaaaaaacaaatggttaaagaatttattgattattatggaaagaatattgccattgaaagtaaattaataaagggagtaaaagaatttttagaatggtctaaaaaaaataaaattcaaatgggtatatgtaccaacaaacaagaacatcttgctattaacttattaaaagaaataaaaatatatgattattttgagtatg

SEQ ID NO: 202524 - DNA, 629 bp, Unknown
  Bacterial polypeptide expressing nucleotide sequence isolated from the Sargasso Sea
cttgggacaatataaagccattataagctcatcaaataccgttaatgacaccatagatattgctttagatcaaacaaatcctaaatttattactaaaataactttaaaacctataaactcacttgaatctgttgaaattagaagagaaatcaaacttataaacaatagcatagataagaaaacatacaatgtttctaaagacatgtcattaagaggaggaacagcaaatgatgtgcttagaagattaccaggtattgaattagatgaaagtggcaacattagcctcagaggagatggatctgtaaaccttcttattaatgggaatcaaagttctttaagtggcattaacggaagcacccttttggatggactacctgcgagtgcaattgaaaaagtagaaattataaataacccatctgcaaagtatgaccctgatggaaattcaggaattattaatattgttttatcgaaaaaaaaagaacaaggtcttaatatcatcagcaacttaaatctaggcagtggagatttgaataatggaaatgtaattgacggtaatattagcgctaattattggagtggtaaactttatttaaatacttcatacagctctagacatttaagaggataca

SEQ ID NO: 202525 - DNA, 886 bp, Unknown
  Bacterial polypeptide expressing nucleotide sequence isolated from the Sargasso Sea
tatgaaaaagaatattaatctcggggtgataggtatcgatcatggtcatatctttgacatgttggatgagatgttaaaagaaggatgtaagtgtgaatatttttggactgaaggtgatccattaactctaaaagaattcaattcaaaatatccaaatattaaaagaaaagaaaataaaaaagagatattaaatgactcatcaatagatatgattttaatatcctcgatccctgttgatagagctgatcattcaatagatgctttaaaagctgggaaagatgttatggtagataaaccaggctgtactaccttagatcaattaaataatttgaaaaacactgttaaagaaactggaaagatatggtctgtaaatttttctgaaagatttcacgttgctgcagttgctaaagctgaagaattagtaaatgaaggcaaaataggaaaagtaaaacaaacgattggaactggtccccatagacaaggtaattatgaaagacctgattggttttataatcgtcaaagttatggaggaatcattgccgatattggttctcaccaaattcatcaatttttagtttttacaaattcaaatcaggcaaaaattaaccatgcattagtagaaaatacgacaaagaaagatatgcctggttttcaagattttggtgaagtgaaccttactggtaatggtgggcatggttatattcgtctggattggtttactccagatgcccttccaacctggggagatggaagattgttaatcctcggagacaaaggttttattgaaataagaaaatatacagacttagcaaaatcagaaaaaggtaatcatttatttttagcaaataatgatgaggtgaagcatattgattgttctaatgttaaa

SEQ ID NO: 202526 - DNA, 640 bp, Unknown
  Bacterial polypeptide expressing nucleotide sequence isolated from the Sargasso Sea
cctgctcgggtatcaactccacgaagagggggttgctcatggatgtttacctctagaggaagatcttccaatcgctcccatccaaactgaaaaaaagggagtggtcaaattcggggtgattggagacaccgggaccgccaacctggaccagcaagaggtagccgattcattggccaaaatatgccgcaaggatgggtgtgacctggttttgatgcttggtgataatttttaccctgaaggcttaaaaaccctggaagaccctttatttaccaaggctttcctggatatctatcgtgaactcaaaatcccttttttcccggttttggggaaccatgatgtcaaaggaaatgttcaggctcagctttatcaaagccggttccaccgtttctggagtatgccgaattacagttattcttttgaaacagggccggttcgttttcacgccatcaatacaaactgtcatctgaatgcctggtaccgactttatcaatcttttgatgagccttcgatggacaactcaggaaaactgtggaacgtcgttttcggccatcaccctgtatattcccagggaagtcatggagataccgatttaatccagcaattcatctggaatctactgtttgagcagaaagtcgatttt

SEQ ID NO: 202527 - DNA, 256 bp, Unknown
  Bacterial polypeptide expressing nucleotide sequence isolated from the Sargasso Sea
tatgagcgaaaaacgcattacggaagagaaccgctacgcaggcctggcgttagccgaagaggagctggtggcgcgggtcgcctggtgttactaccacgatggattgacgcagaacgatattggcgagcgcctggggctgccgcggttaaagatctcccgcctgctggagaaaggtcgccagtccggggtgatccgcgtgcagatcaactcccgctatgaacggtgtctggcgctggaaaccgagctgcaacagcgt

SEQ ID NO: 202528 - DNA, 645 bp, Unknown
  Bacterial polypeptide expressing nucleotide sequence isolated from the Sargasso Sea
cctgcgtgaagatgcggccgtgatcgatgagctacaggatatgctctacgccaatggcgatcgcgcgcttctggtcgtgctgcaggggatggacacgtctggcaagtccggcgtcatccgcaatgtctttgccctgaccagcccccttggcctgcaggtcgaggcgttcaaggccccctccaagacagagctggcgcatgactatctctggcgcatccatgaggcggtgccccgaaagggccggatcggcatttttgaccgctcccattatgaggatgtgctggtggtcaaggtgcgcggctttgcccccgctgatgtggtcgagcagcgctatgaacagatcaatgcgtttgaaaaacaccttagcgagaacaaggtgacagtgctgaaattcatgctccatgtcggctttgaggaacaaggcatccgcctgcaggagcggattacagaggcgcataaacgctggaagttcaatcccggcgaccttgaagatcgtaagctctggccagatttcatggatgcctatgagaccgcggtcgagcgctgctcaaccgatcatgcgccgtggtatgtggtgcccgccgacagccgcacccgccgcaatgcgatgatcgcgcgcgtggtacgcggcgcgctggaggatat

SEQ ID NO: 202529 - DNA, 830 bp, Unknown
  Bacterial polypeptide expressing nucleotide sequence isolated from the Sargasso Sea
caagaaagacaagtagcagcagaagaagctgaacaagaaagattagcagcagaaagattagctgaacaagaaagacaagcagcagaaaaagctgaacaagaaagattagcagcagaaaaagctgaacaagaaagattagcagcagaaaaagctgaacaagaaagacaagtagcagcagaagaagctgaacaagaaagattagcagcagaaagattagctgaacaagaaagacaagcagcagcacaagctgaacaagaaagattagcagcagaagaacaagaaagattagcagcagcacaagctgaacaagaaagattagcagcagaaaaagctgaacaagaaagattagcagcagaaaaagctgaacaagaaagaaaagcagcagaaaaagctgaacaagaaagattagcagcagaagaagctgaacaagaaagattagcagcagctgaagaagcagaacaagaaagattagcagcagaaaaagctgaacaagaaagattagctgaacaagaaagacaagcagcagcacaatctgaacaagaaagacaagaaagacaagctgaacaaaaaagattagcagcagaaaaagcagcagcagaaaaagcagcagcagaagaaccagcagcaaaagaaccaggaccaggactagcagcagaaccagaaagagaaccagaaccaggaccaggagcaccagaaacacaagtagaaccaccagcagaacagcaacaacctaaatcagaagcagaagaaccagtagtaataccagaactagcagcaaaactaaacaagttattagatgaatttaaaaatattaataaaaaattaatatt

SEQ ID NO: 202530 - DNA, 799 bp, Unknown
  Bacterial polypeptide expressing nucleotide sequence isolated from the Sargasso Sea
gggagggctgaggcggagagagctcccttggctcccatgtcccatataagggaagacggggccgtagcagcggagacggcggaggcggagagggcggaggcggagagggtggaggcagaaagggtggaggccttgagggctgcggcggacagggcggctcaggcagagagggctgcggcagagagggcagcagcggaaaaggcagcggcggagagggcggcggagagggcggcgtcggtgaaggcggagatggagagggcggaggcggagagggcggaggcggaaagggcggagagggcggaggcggagagggcggaggcggagagggcggagatggagagagtggaggcggagagggcggaggcggagagggcggaggcggagagggcggctgatgcggagagggcggaggcggagaaggtggcgaaggcggtggcagagcatgaggagaaggtggcggcggagaatgccgcggcggagaaagcggcggcggagaaggtggcggcgacggcagagaatgcggcagcagagagggccgagacaaaacatgagtcagcggtgtcgggacccacagcaccacaccttgcacctgcgccggccccggcgtctcagtccccggcatcgcggcagagtggcaccccgcagactcggttgtctcgtgcagagcagtcgatcgaggcgacgatcaaggccgctttttgcgaagcggatgggttggactcgattgggaaaggggatgaagcgatccgggtacgtgccctcgccctcgagtctgcgagcgagcagctccgccgggcct

SEQ ID NO: 202531 - DNA, 418 bp, Unknown
  Bacterial polypeptide expressing nucleotide sequence isolated from the Sargasso Sea
atgcaaaaacttacaattctttttgatttagatggtactcttgtagactcagctccagatttaatgaatgcacacaatcacgtaatgaaaaaatttggatatgaaacaaaaactacagaagatattcgaaatcttgctggcaagggtgcatcagtaatgatcggcaggtctatatggggacaagcaaaaaaagaatttagtaaggtaattgatgaaaaaataaaaaaacaaatggtcaaagagtttattgattattatggaaaaaatattgctatagaaagcaaattaataaaaggtgtaaaagagtttttagaatggtcaaaaaaaaataatattcaaatgggtatatgcactaacaaacaagaacatttggctattaatttattaaaggaaattaaaatatacgattactttgagt

SEQ ID NO: 202532 - DNA, 617 bp, Unknown
  Bacterial polypeptide expressing nucleotide sequence isolated from the Sargasso Sea
tatgaaatatatatttgatttaatagtaataggaggcgggcacgccggtgttgaagccgcacttgtagcaaaaagatctgggctagatgttgctttagtaaccctagacaaaaccaaaacaggaagaatgtcatgcaacccagcaattggcggcattggaaaatcacacctaaccaaagagatagatgctctgggtgggtatatggcagaagcaaccgacctttcaggaatacaatttagaacccttaacaaaaagaaaggcccagcagttcaagcaacaagagctcaaacagataaaaatctttatgaaaaagcaattcaagaaaaaataaagaaagagaacattcaggttttcgatgatgaaattaaagattttgcaacaaaaaaaacaatcatagaaaaagcaatttcagaaaacaacgagtatgtagcaaaagcctttgttttaacaaccggaacatttttaaatggagcaattttgatagggcacacaaaacaagaggggggaagaatagatgaaaaaaaatctactggactagaaaaatttttcgaaaacaacgaacttcagctaggcagacttaaaacaggaacaccaccaagactttcagccaaaacaa

SEQ ID NO: 202533 - DNA, 517 bp, Unknown
  Bacterial polypeptide expressing nucleotide sequence isolated from the Sargasso Sea
ttggtatcctgctcggttatcaactccacgaagagggggttgctcatggatgttttcctctataaggaagatctttcaatcgctcccatccaaactgaaaaaaagggagtggtcaaattcggggtgattggagacaccgggaccgccaacctggaccagcaggaggtagccgactcattggccaaaatttgccgcattgaagggtgtgatctggttttgatgcttggtgataatttttaccctgaaggattaaaaaccctggaagatccgttattcaccagagctttcctagatatctatcgtgaactcgaagtcccttttttcccggttttggggaaccatgatgtcaaagggaatattcaggctcagctttatcaaagccggttccaccgtttctggattatgccgaattacagttattcttttgaaacagggccggttcgttttcacgccatcaatacaaactgtcatctgaatgcctggtaccgactttatcaatcttttgatgagcattcga

SEQ ID NO: 202534 - DNA, 443 bp, Unknown
  Bacterial polypeptide expressing nucleotide sequence isolated from the Sargasso Sea
agcagaagatccagatagtgatatttcactttatttgaattgtccgggaggattagttacttctgggatggcgatctatgatacaattcagtatctcaagcccgatgtgcagactatttgcattggtcaggcaactagtatgggggctgtccttttagccgcaggtgcagttggcaaaagacaggcattgcctcatgctagaatcatgattcatcaaattatgggcggtttttcggggcaagcagaagatatagatattcaagccaaagaaattattagaatgacagatgttttaaatgaagttctggcacatcataccggacgtaaaatagagcagattgctgaagatacccagcgtgatttttatttttcaagtgatgaagccaaagaatacggtattatagacgatgttatgcaaaacagaaaattaaaagctgtatgaa

SEQ ID NO: 202535 - DNA, 547 bp, Unknown
  Bacterial polypeptide expressing nucleotide sequence isolated from the Sargasso Sea
tttgaagatataataaaagatgatttttataatcaagcaaaattaatagacccattctttgactttttttattttgacgttttgagcagtattaaggagataaatgttgcaacccaaagtattgaagaatttaacaaaccttatttgataggggtacatatttctgaaggcactaaattacctagtggtgaaaaaatttcagatctaatagataaattaaaaaatcaaaaattacttggcgttatactgtcttgtgtttcccctgaaaactataaattaaatttaaatgaaatcaaaagcttaggagttccatttggattcaaattaaatggatacttaaaaactgcaccattatctaataataacaaaactagtaataaaaatgatttcttacaaccaaatgagtttttaggcaaaagaaaggatttatctcctaataaaatgctagagtttgtaaaagagtttaaaaacactggagctacaattttaggtgggtgttgtgaaactactccagcacatattaaatcatttgcatcacttaagtaat

SEQ ID NO: 202536 - DNA, 880 bp, Unknown
  Bacterial polypeptide expressing nucleotide sequence isolated from the Sargasso Sea
attccctagaggtatagcaatagataagaatggaaatatctatattggagatggatcaaattacctgatccgaaaaataacatcagcgggtgtggttaccaccttagcaggcagcggttctagggggtctgcaaatggaaccggtacatcggcatcgtttaaaagtcccggtgcggttgcagtcgacaatgatgggaacgtatatgtagcggatggagataatcacctgatccgaaagataacacctgttggtgtggttaccaccttagcaggcagcggctctagcggctctgcaaatgcaaccggtacatcggcatcatttaattatccctatgggattgcagtcgacaatgatgggaacgtatatgttgcggatacagataatcacctgatccgaaagataacacctgttggtgtggttaccaccttagcaggcagcggctcagcgggcgctgcaaatgcaaccggtacatcagcatcatttagattccctagaggtatagcaatagataagaatggaaatatctatgttacagatttaggtaatcacctgatccgaaagataacacctggtggtgtggttaccaccttagcaggcatcagcggttctagcggctctgcaaatggaaccagtacatcggcatcatttaacgatcccactgacagtgcagtggacaatgatgggaacgtatatgttgcggattatggtaatcacctgatccgaaagataacacctggtggtgtggttaccaccttagcaggcatcagcggttctgatggctctgcaaatggaaccggttcatcggcattatttaacaatccccgtgcggttgcagtcgacaatgatgggaacgtatatgttgcggattatggtaatcac

SEQ ID NO: 202537 - DNA, 477 bp, Unknown
  Bacterial polypeptide expressing nucleotide sequence isolated from the Sargasso Sea
catggaaacgctgtcgaccgaaaaatcctttggcggtgtccagggggtctatcgccacgcctcgtctgtgaccggatgcgacatgacctttgctgtctatctgccgccacaggccgaacatggtccagtgccggtgttgtggtatctgtcgggcctcacctgcacccatgccaacgtcatggagaagggcgaataccggcgtgtcgcggcggagcttgggattgccatcatctgtcccgacaccagcccgcgtggcgatgaggtgccggacgaggatgactggcagttcggatccggcgccggattttatgttgatgcgacgctcgctccctatgatgcgaattaccggatgtacagctatgttcttgaggagctgccggcggtgatcgcggcgaatttcccggtcgacatgtcgcgcgaggggattttcggccattcgatgggggggcatggcgcgctggtgatggcgcttcgcaa

SEQ ID NO: 202538 - DNA, 775 bp, Unknown
  Bacterial polypeptide expressing nucleotide sequence isolated from the Sargasso Sea
cgatggtagtcatatgttatttatagcagcaggaatgggtggtggtacaggaactggcgcagctcctgtaattgcaaaacttgcaagagaaaaaggtattttaacagttggtgttgttacaaaaccatttcattttgaaggaactcaaagaatgaaattagctgaaaaaggaatagaagaacttcagcaatatgttgatacattattaactatacccaatcaaaatctatttagaattgccaatgaaaaaacaacattctcagatgcatttaagatggcgagcacttctgcctgtggtgcctgttcggcgttgcaaggagcgaccaggttgcgtcgtgcctgcgcaacccggttcacggcatcgcggtgggcgtcatgctgcttgcctgcgtgctggccgcgcggctgcatgcggcagccttcgaacgcacgccggacgccggcacctgcccggttcagtgcggggcctagcgccgccgctcgacagcgtcggcggatgccgcatgcacccgcccccagcgcttcgcctgcgcgatcgcgatacggatcgcgctgccttcggcacgccctcgtcgcagcaacgcgttggcgatctcgatcgccttgccgcgcaccggcggcggcaggttccgcatcgacggcggatagcgttcgtcatcccacggcacggtggccccctctcgtacccgcgtgccgatcccgacatccctgtccgtggctcgcgcagcaggatcccagccattgtgcgacccccatgacgttctgccgggcgtga

SEQ ID NO: 202539 - DNA, 530 bp, Unknown
  Bacterial polypeptide expressing nucleotide sequence isolated from the Sargasso Sea
cctggtcgctggagcgggtggactcggaagttgggcaatccatgcactctgtgggggcgtggctgactctgggtccgacggcgagggactcaggctgttggtcgtagatcccgatatgagcgtcgagaggcacaacctcaaccggcaagtgctctattccgaagaggacataggcctccccaaggcgaccactgctgcaggaaagatcaggggggccctccccggggccaccgtagttccactcgtggacaagctaggtctcgtccacctccaggtgatgggcgagccggacggatgtccagcccagtccgaaccattacaggtggaggagatcgacttacctgggggttttgccacaaatttggtggtaaacgagcctgtggacaatgtcttggaggaagtattctccgaaatggcggttgctctggcctgcgtagataatctgcgagccaggtccctattgggggcgattgcagcgaaggccggagtgcccatgattaatgcaggggcccagggattcaatggccaac

SEQ ID NO: 202540 - DNA, 393 bp, Unknown
  Bacterial polypeptide expressing nucleotide sequence isolated from the Sargasso Sea
tatggacaagaaaaagtatctagaaaattattttaacgatttaagaaatataataaattttgataatgaaaaaattaaaaatttggtagctgtaagcgatattcttttaaaaactaataacttaggaaaaaaaacaataatatttggtaatggtggaagtgcagcaatcgcaagtcattttagtgtagatttaacaaaaaacgctagagtgagatgtgtaaactacaacgagtcagatcttcttacttgtttttcaaatgattttggttacgaaaagtgggttgaaaaatgtattgaatactatggagatgaaaaagatgttgctattcttatttcagcaggtggaaattctcaaaatatgttaaatggagctaaaaaagcaaaagaaaaaaa

SEQ ID NO: 202541 - DNA, 912 bp, Unknown
  Bacterial polypeptide expressing nucleotide sequence isolated from the Sargasso Sea
atgaaggttgtacagatataaattatatagaatatgatactttagcgactctagatgatgggtcatgtgttaccctaatagtggagggttgtacagactcattatatttagagtatgactctactgctaataccgatgatggatcatgtagcacattgaaagttgaaggttgtacagatataaattatcaagaatatgatgcaacagcaaatgtttcaaatcaagatctttgtttgacttctaatatttcaggctgtacagattccaccgcatttaattataatgcaattgcgactgtagatgatggttcgtgtataccagttgtagttgggtgtcttaactctttagcaacaaattataattcatctgcgaataccgatgatggatcatgtaccttcaatgaaggttgtacagatataaattatatagaatatgatactttagcgactcaagatgatggatcatgtgttaccctaatagtggagggttgtacagactcattatatttagagtatgactctactgctaataccgatgatggatcatgtagctcattgaaagttgaaggttgtacagatataaattatcaagaatatgatgcaacagcaaatgtttcaaatcaagatctttgtttgacttctaatatttcaggctgtacagattccaccgcatttaattataatgcaattgcgactgtagatgatggttcgtgtataccagttgtagttgggtgtcttaactctttagcaacaaattataattcatctgcgaataccgatgatggatcatgtaccttcaatgaaggttgtacagatataaattatatagaatatgatactttagcgactcaagatgatggatcatgtgttaccctaatagtggagggttgtactaatttatcagcaaaataat

SEQ ID NO: 202542 - DNA, 945 bp, Unknown
  Bacterial polypeptide expressing nucleotide sequence isolated from the Sargasso Sea
ttcaagcagcctggttcgggctataatgaaacgatggagactggtgttaaggcggcaatggctggtggatatacgacagtatgcttaatgtcagatgatgaaatgccattagatagtcctgaaaatattgagcatattgctgaaaaatcagcaaatttaccaatatctatattgcctgtagggtctttgtctgttaatcatgaaggcaaagagctatgtgaatttagtcaaatggttaaaaaaggagcaatagcattttcagacaatgagtctcctgtccataatagtcaatttttaagatatgctttagagtattctaagatgaacaatgtccccgtaattaattattctagagataatgatttaagtgcgggaggtgttgttaatgaaagtattttatcaacaaaactgggcttaaaaggtttccctgacatatctgaagcaattattgtatttagagatttgacaatagcagaaaaagtaaatgccaggattcatttggccatggtaagtactaagaagtctatatctataattagagatttccagaaaaaaggtgtgcaggctactgcagatgtcactcctcatcatatatttttcaatgaaaatgcaatatctaattataattccaatgccaaagtatatccccctttaagatctgaagaagatagaaaagagatgattaaagctataaggaataaggtggtcacgtgtatttgttcagatcataacccgcattcttctgaggataaagagaaagatattaagcatgctccttttggaacagttagtctagaatcagcgtttagtgcaatctatacagaattatcaaataataaattcagtatttctgatatcattaaattatttactcaaggccctaaagaggctatgaatttaaatgttgaaatgatagaagagggaaataatgcaaacctaactgta

SEQ ID NO: 202543 - DNA, 558 bp, Unknown
  Bacterial polypeptide expressing nucleotide sequence isolated from the Sargasso Sea
tatgggaactgttggggccgattgtttttctgttaacctagacaattacattggcaactctagtgtcattgtaaaatttgaaagttataatgcaggtactaatgggaataatctttttattgacaatattaatattgatggaaccgcaaacgctgcaccaccaacagctgattttaacgcaaactctactgctatttgcgaaggtggaacagttcaattcaacgacctatcttttacaggtgtaacatcttgggattgggattttggcgatggaaatacatctacaattcaaaatccatctcacacatactctagctcaggaacttattccgttacactcactgttaccaattcagttggaactgacacatacactctaacaaactatattacagtgtcaattttagatgatgcaacaattaacccagtatcttcattgtgtgtttcagatccatctataacccttagcgctgctaattctggtggtttatggtctgggaatggagtaaattccaatggggtttttaatccttcaagtgcaggaactggtacgcatac

SEQ ID NO: 202544 - DNA, 826 bp, Unknown
  Bacterial polypeptide expressing nucleotide sequence isolated from the Sargasso Sea
tacagaaaatagaaatactggtttaggttggcaatctggattatcattaacatcaggtgctcaaaacacttttgtcggtgctaattgtgcttcatctgctacgacaggaaattataatacagcacttggagacactgctttaggtacatgtacaacaggagaaaataatactgctgttggtaagagtgcattagctgcaagtacaacatcctctaataatactgctgttggttataatacattagttgcaaacacaacaggagctgcaaacgctgctgttggtgcttatgcattagatgcaaatacaacaggtaattataactctgctcttggtaataatgcattaggtgcaatcacaactggagataataacactgctcttggatatcaagcattatcaacagtaacaacgacttctgggagtactgcagttggttatcaggcagcaaaagtaaatgcaatggcatctatgactgctgttggttatcaggcagcagtcgcaaatacaacaggaaataataatactgctattggttatcaagcattagatgcaaataccacaggacatactcatactgctgttggttctggtgcattaggtgcaaatacaactggaagtcatagcactgctgttggttatcttgcattaggtgcaaatgatgctggtgttggtaacgttgctgttggttatgctgcattagatgcaaacacaactgcatcttataacactgctgttggttataatgcattaactgataatacaacaggtgctaataatacttgcattggtgaaagtgctggagctaatataacaacaggtggttat

SEQ ID NO: 202545 - DNA, 176 bp, Unknown
  Bacterial polypeptide expressing nucleotide sequence isolated from the Sargasso Sea
aatgaccatacaaaaaaaagattccatcatttttgaccttgatggcacgctcgtcgacagcgctccagacctgcacgcttgtgcgaatcgacttttgagtaaatataatcagccatcaatttctttaaaagaaagtcaaagttttattggggatggtgttcgaaattttgtgaaat

SEQ ID NO: 202546 - DNA, 598 bp, Unknown
  Bacterial polypeptide expressing nucleotide sequence isolated from the Sargasso Sea
atgtcttggaatccagataataaagataaagatccatggggtaaccgaggaaatgatcaaggtccccccgatttggatgaagtggtaaaaaaaatgcaagatggtatcgggaagatctttggtggcggtggttcaggggggaagacttcacctgaagggaagggggccacggtggtcttggtaggcatattgctactcctactcttgggctacgaaatggtttatcgtattgaccccgcggaacgcggagtggtgatgcgttttgggaaatatgtgacatccttgcaaccaggtccccatatacggtttcctagaccaattgagcaagtggtcaaggttaatgtggagagaatacaaactatcacttctgaatcctcaatgttgacgggtgatgaaaacattgtcgatgtggaggtcgctgttcaatatagaataaaagatgctaccaattatctgttcaaaatagctgatccagatgtttcggttaatagggtaactgagtctgccattcgagatattataggccaaagcaccctaaccttcgtgatcacagagggacgagcgcaaattgcaactgatgctcagaaactaatacaag

SEQ ID NO: 202547 - DNA, 559 bp, Unknown
  Bacterial polypeptide expressing nucleotide sequence isolated from the Sargasso Sea
gtgacaggaaaatcaggtcgattttcagagcaagttattgtccatttttctaaaaaaatcagagagaagatttcaattaatgataaaatattaatcaaatcatttggggtaggactaaaaataaacaactttaaagatgtattctgtaaaagcttatctcctcaactttttaataaaatgaatattaaaaataaaaataataagatgataatacctgttacacacataattccagaacatctaattggagctggatcaggactaacaagtgagtctggttcgcttcatattcaaacaactgatagctctgaaatgaaaaaatataaattggataaaataaagcttggagatattatctatatagaaaattatgacagtagctaccaacatggttttttaagaaatgcttgggctgttggtataattggacaaactaatgggcctcgagctggttacggaccaggtataacaattttgatgtcatcaaaaaaaaataatgcaaaagcaaagctagagtctagcgctaacataattaattatattaaatttattaagtaaa

SEQ ID NO: 202548 - DNA, 510 bp, Unknown
  Bacterial polypeptide expressing nucleotide sequence isolated from the Sargasso Sea
gttgcacaggaagagtcttaaaaattgcagaaaagtttccaaatcatggcaggagtgcattgacaatcggaacattttatggaataaaattgttaagaagaaaagtggcaataagacttttcgattagcctgcaagaatggccactcaaagatggtagagatgctcattcagaaacctgaaaaattcaaaattgatctgaatgctaaagatggggatggaaatacagcttttcttgttgcctgcaagaatggtcattcaaaaatagttgagatgctcatgcagaaatctgttgagttcaacattgatctgaatgccaaaagtaaaattggcaggacagcttttcatttggcctgttataatggtaattcaaagatagctgagatgctcatgcagaagtctgctgagcttaatattgatctgaatgccaaagatggatttggcggcaagacagcttttcatttggcttgtagttatggtcaatccaagatagcagagatgctcatgcagaa

SEQ ID NO: 202549 - DNA, 196 bp, Unknown
  Bacterial polypeptide expressing nucleotide sequence isolated from the Sargasso Sea
ttggtcagatctgtaaacaaaattgtgtcaaatgtgatcttcgatttggacggaactctagttgatagtgctccgtcattatgtaaagcggcaaatcacctattgcaaaagttgggtcgccgcagcgtatcagttgaaaagtatcaaacttttattggcaaagggtatgtacaaaccaagttgagcagcttttaga

SEQ ID NO: 202550 - DNA, 862 bp, Unknown
  Bacterial polypeptide expressing nucleotide sequence isolated from the Sargasso Sea
aatgccaacaattttacaattaagaagaggtactacggccgagaatgctgcctatacaggtgcagctggcgaaattacggtagatacaactctaaacaaagtgttactacacgatggttctactgcaggcggtaataccacggttggtagcttacaaggaaatattcaattaggtaagacggctgcaggcgaaatagatacgtcttcaggaaatcttactatagactcagctggtggaacaattacgttagacgataacgtaaccatttcaggaaacttaacagtttcaggaacaactacaactgtagattcaacaactgtaaacattcaaaatgcttttgtatttgaaggtgcaacagatgacgcacacgaaactacattaacaacgattgatcctacaggagatagaacaatatctttacctaacgtatcaggtacattaccagttcttgcagctgcttcaacaacacaaattacatcaacaccagaagaaataaatctagtggatggtggtacaacagcaggaacaactgctgtcgcaggtggcgatggtatcgtaaccaatgataatggaacaatgcgtcaaacaacggttgatacatttgatacatatctttctgctacaacaaaaactttaacgaacaaaacattaacaagtgctgtattaaatactggcgtttcaggtagtgctgtattagatgaagacaatatggcttcagatagtgctacgcaacttgcaactcaacaatctattaaagcatatgttgactcacaaaacacagcacaagatttagatttaactactgactctggaacaattgacgttgctttaggctcaaaaacattaacaaatcgctgggtg

SEQ ID NO: 202551 - DNA, 823 bp, Unknown
  Bacterial polypeptide expressing nucleotide sequence isolated from the Sargasso Sea
tggtaatgtatggtttgtagaatcaaatgttggtcaaattgcaaaatttaatccaatgtctgaaatatttacagaatttgaaaatgaattgtggcctgatggtgcacgtacaatgtcttgggggatggattactcttctgatggtacaatgtggtatactgatggaagttttgatacaatttggcgttttgacacaatcaatgaaacgtatgatgcaatagcatttcctccttctgaagtaggctcattgcctcaacaacttgccatacacggttcaaatatcatagtaaatgactttactgggagcaaaattactttctttgatttatctcacaatattgatgagatagaatattctagtattgtagcaccaattcctaattccttcacaggggattttgctatcgactctgaaaataatttatggtatacaaattgggtcccagatacaactggattgttattgaaatttaacattgaacaatacaaacaggattcctatttggcaagtaccggaatggacattccacttgaaggttattttgatgtatatgactttccaactgatcttactactgcaaatggattatctgtagatgaaaatgataatgtttggatagtagacacttcaagtagcttctttttcaaatttgatcctaacgaagaaacatttacaaaatttatcacatccacacctcaaaagtctgcttatggaaactctactggaataataaaatctccaatttctagaccatactggtctgaaacagacataaaaggaaatctaatcttcaatgaacaaacctctaatcaacttgcagtt

SEQ ID NO: 202552 - DNA, 783 bp, Unknown
  Bacterial polypeptide expressing nucleotide sequence isolated from the Sargasso Sea
tatgacatctgcagacaaattcggtgtaatattctcaatcgcttttgctgcagcaatgatcgctttaatgggtggacttctacaagcagatacagctccagcagcaccaagtgttgcagcccctgcacaaacatactctccaccaccagctcctgcagcagcccctgcaccaacgcctagcatggccccacaggcagctcctcaaacttcctcaagtgagaatttgaaatataccattagaggcggtatagttgattctatttctcaagatgaacatcacaatgcagtaaaaattatgatggactcaagacttgatggacaattaacaattactgtaaccgatgatgcaattactccatttgaagatggagcatactttgtaacaattgacggtgaagaagttgaattcactcaagttggtaaaagattaacaattgattttatggcaaattctcaaaaaataatgatttttggtgaaggttataaatctggaggaggccactcaatgggtcactcagaagattctaaagaacatgaagctatgatggcagcagagaaagaagctgaagaaaaagcagcacatgaagctatgatggcagagaaagccgcagcagacaaagccgcagcagacaaagccgcagcagacaaagccgcagcagacaaagccgcagcagacaaagccgcagcagacaaagccgcagcagacaaagccgcagcagacaaagccgcagcagagaaagccgcagcagagaaagcagccgctgaagcagcagccgcaaaggc

SEQ ID NO: 202553 - DNA, 1948 bp, Unknown
  Bacterial polypeptide expressing nucleotide sequence isolated from the Sargasso Sea
cctgttcgcctgtcagcccggcaatgaaggccagcccttcgtactgaccctggctcacatgaacgacactcactcccagtttgacccggtcaacgccgagctgaaagggcccatctttggcaagcagggggagaccgacaccctctacacccgcttcggcggctatccgcgcctgctcaccatggcgaaatccttccaggccgatgcgctggccaagaaccagccgatcctgctgctgcacggcggcgatgcctggcagggcagcggctacttcaagctcaacgaggggatggccaacgccgagctgctgagccagttcggcctcgacgccatggccctcggcaaccacgaattcgatctcgacaaccagaagctcgcccgcttcattcagggggtcaacttcccggtgctggccgccaacctggacacccgcgacgatccggatctgcgccacgccgccaatctcaagcccttcgtcatctacgccttcgacggcaaccagaagagcccggtcagcgatctcaacaacctgccccagggcaaacagctggtcgccgtgatggggctggtgctggaggacatggccaacatctcccccaacgtcggcaagctacgctttggcaacgaaatcacctcggcccaggcgacggtggacctgctgcgccagcacggcatcaaccagatcgtggcgctcacccacatcggcaaccagcgggatctggcgctggccgccaaggtgaacggcatcgacgccatcgtcggcggtcactcccacagcctgctcggcgattttcgcaacatcggctggggcaacaccggcgagtacgcggcgcttgtcaccaacccggacggggtcggcatgacctgcgtggtgcaggccggctcctacgcccaggccatcgggctggctcaggtgagcttcgatgcccagggccgggtcatcgcctgcaagggccagaaccagctgctggccagccgcgacttcttcgccgatcccgcccgcaaccaggcactggacgaggcccgcggcaagcaggcagccaagttcatcgacgcccagcccaacctggtgaccgtggatgaggatccccgcctgcgcggcatcatcgacagccactacaagcccgccctcgagcaggccttcggccccgtcatcgccaccctgccggccgccctgcaaaatgcccgtcgtcccggcgacaacggcagcgacagccacggctccgacgtcgccccgctggtggccgagggtcagtactactgggccaataccccggcggtgcaggcgctgaccggcggcccggtccacttcgccctgctggcggtgggaggtgtgcgcgccgatctgccggccggcgagctgcgtgaaggggatgcggcgctcaccctgctgccattcaagaaccagctctcggtgctcaccctgaccggcgccgaggtgcgcgccctcttgaccgagaccatcaccgccaccctgcccgccagcgcccacgccggcaagttcccctacggcggtcacctgcgctacaccttcaccgaaaccacgccgggcaagcgcggcgccctgacccagctgcagtggcaggacgctgacggccagtggcaggatctggtggatgcgacgcgctaccgggtggtgatgaacgcctacagcgccaacggcaacgacggctggcaggcgctcgcccgcgcccaagcacagcacgccgaacgccaggatctcgcctggcaggatggcaaattgacggcgttcccggtcgagcgggtggagcagagcggcgatcagctgagcgcccgctatgccgccggccatcagcttgactgcaaggcgagcggcatggattgcggcaccgacgccgcctccttcgtgcagtatgtgcgcgaacagcgcccgaccctgacggcactggcgcaagagacggtcaccctggtgcgggccgcccaataa

SEQ ID NO: 202554 - DNA, 2473 bp, Unknown
  Bacterial polypeptide expressing nucleotide sequence isolated from the Sargasso Sea
atgtcagtatcaccacctatatttcgtttatcacttattgcactcgcctgcctcagtgctttaccacataccgcttttgccgatgacacaccttctgctcgcgatcaaaacatcgaacgcataacggtatacggcagacaaaactccgtagtgaaaaactctgggcttgcgactaagtcagatatgtccttgatggaaacccctgcggcggtagttatcgttgaccaagagctgattaacagccaaggagtcgacaatcttcaagacttaattcgtaatatcagcggggtgactcaagcaggcaataactatggcattggggataacttagtgattcgcggcctcggtgcaaactacacctatgacggcatgtatggcggagctggccttggtaacacctttaaccccactcgctctttaaccaatgtggaatccgttgaggtcttaaaaggcccagcaacaggactctacggtatgggcagcgcgggcggtgtgatcaacctgattgaaaagaaaccgcaatttgagtccaaacacaaattcaccactgaagttggccagtgggatacctactcgctagccatcgatagcacgggtggaatcaccgatgatcttgcgtaccgcttagtcgccaaaaccgcccgcagtgaaggttaccgagatttaggcgccgaccgtgatgaagtgttcggctcactcaagtgggtattaagtgatagccaagatctgatgctgtcaggtgcgtatatcaaagacgccattgccgttgactccatcggccatccaatccgtatctacaatgccgattctgtcggcggtaaaaccgcgggcgaagtcacttggcaagatttgattaacgatcctaaggggctaggcatccagctaaccgacgagcagcgtcagcaattggcggcgtcactcgccagcggtgatggtttaactccctactccttcggtgacgcgggattaatttctcccatggcaaaagataatgaaggtgaagaattaagattcaagctaacccacaatatctactttaccgataatctgttcctcaaccagcagttgcaatatcgcgactacaccacaggttttgcccgccaaacaggggcttataactatgtgtattggaagcgtaaaatcaagattggtggcgtaccgactgatgtgattaacgaagatccccgcgcgccactggttgaaaatggtgtgctctatccctttgccgccagacgtcaggaataccgccaactcgatgccgaagaaacctcatggcagtattttgctgatctgcgctatgacttccaaatcggcaatatcgacaacgaattgctggtgaatgctaactacgaagaccgcgatattcgcctcgagcaattctcgatttacgatgcggaccaagtcattaaaaacaaacaaggcgaagtgatttatcgtggttcgctaccgtacatttacgatatccgcaatccaaattggggaacgggtaaatttgaggactacgatccgctcaaaaccgccaactacaataaaaaagtcagcgcttggggcttaggcgtgcaacatgtaggctatttaggttatggctttaccacccgtgttggcgtggcctttaacgaaatcaaacagagctatgagcacttaggtgtggatgagcgctacagcgcgagtcaagcgagccccactccagaggaagatagcaaagataacggcgtgacctacaacttgggcttaacttatatgcccattgatgatttatcatttttcgtcaatcactcaaagggccgcaccgcctatagcattttaggttctatcacgggggaaaataccgaccgcgaagactcagaatccgttagtaacgatctcggcatgcgctttaaagcctttgatgatcaaatgttggcatcactagtgttctttaaaagctcacgcactaatgtgccttacaacaacccagactataacgctggcgtgtcaggtgccgatgtgcccgtgtacttttacgatggtagcgaagatacccaaggggtcgagttggatctcaatgcccacttaaacgataactggcgcatcaacctcaacggcatgtatcaagacgctagggataaacaaaacccgaatgacaaagccaactacgacacccgccaaaaaggtgtgccctatgttaccgccagtgcttgggtgacctatggtgcagactggtttgccttatccagccccattgatctgagtttaggcgccaagtatgtggatgatagaagcacgcactcaacagactttggcatccctgatggatatgtgccgagctacaccttagtggactctgccatcagctacgccaccgactcttggaagttacaattgaatatcaataacctattcaataaagactattacagcaaagcgatgttcctcggcggcatgccaggcgaagagcgtaatgtgaaactgcaatatagctacagcttctaag

SEQ ID NO: 202555 - DNA, 742 bp, Unknown
  Bacterial polypeptide expressing nucleotide sequence isolated from the Sargasso Sea
aatgaattccatttatataatcatttgcattgtaacgtattttttatttctatatgtgatatcttttctgactggtaaaaatgatgcaaatgaatccttttttttagggaataaatcttcaccttggtatatagtagcatttgggatgataggaacatcgctctctggtgtcacttttatatctgtccctggttgggtagaatcaagtcaattcagttacatgcaaatggttttagggtacatgttaggatatgcatttataggtacggtattaatgcctctgtattataaattaaatctcacatccatttatacatatctagaagaacggtttggaaagctatcatacaaaacaggttctatgttttttattatttcaagaactgttggagcatcttttcgattatatatcgttgcgagggtattgcatttaagtatttttgaaaactggggtgcccctttttttcttactgtgcttataacgatttcactgatatggctttatacttttcgtggtggaataaaaaccattatttggactgacactttgcagacattctttatgttattagccttaataatttcagtttttttgattggaaaagatctcggcttgaattacgctaatattattccttttattagtcaaagtgagtattcaaaaatatttttttggcaaggagaccagcattttctccgtagattttttacgggggcttttatagcaattgtgatgaccggc

SEQ ID NO: 202556 - DNA, 1012 bp, Unknown
  Bacterial polypeptide expressing nucleotide sequence isolated from the Sargasso Sea
tatgaaaaaaacacttaaacttggggtaatcggaatagatcatggtcatatttttgatatgctagatgaaatgatcaaagaaggttgtagctgtaattgcttttggacagatggaaatcctttaactcttcaagaatttaataaaaaatatccaaatataaaaagaaaagaaaataaagaggaaatattaaatgattcatctgttgatatggttttaatatcttcgatccctgtagatagagctggtcattcaatagatgccttaaaagctggtaaagatgttatggtagataagcctggatgtactaccttagatcagttaaataatttgaaaaaaactgttaaagaaactggaaagatctggtctgtaaatttttctgaaagatttcacgttgctgcagttgctaaagctgaagaattagtcaatgagggaaaaattggtaaagtaaagcaaacgattggtacaggtccccatagacagggtaattatgaaagacctgattggttttataatcgtcaaagttatggaggaattattaccgatattggttctcaccaaattcatcaatttttagtttttacaaactcaaatcaggcaaaaatcaaccatgcattagtagaaaatacgacaaagaaagatatgcctggttttcaagattttggtgaagtgaaccttactggtaatggtgggcatggttatattcgcctggattggtttactccagatgcccttccaacctggggagatggaagattgttaatccttggagacaaaggttttattgaaataagaaaatatacagacttagcaaaatcagaaaaaggtaatcatttatttttagcaaataatgatgaggtgaagcatattgattgttctaatgttaaactaccctactttagtaatttaattactgatgttttaaacagaacagaaactgcatgtcctcaagaaattacttacctttcaatggaacttgctattaaagctcaagagcaagctgaaaaaaaatga

SEQ ID NO: 202557 - DNA, 1228 bp, Unknown
  Bacterial polypeptide expressing nucleotide sequence isolated from the Sargasso Sea
tatgtttttattattattatttttaataacttttagtcaattatcagctaacccacaaaagaattatcaaagttttaatgatggtcaatcatttattaaaaatcaaattcaaaaaaaaattaataagaacaaagctaaaaatgtgattgttatcgttggtgatggttatggcattactacaaactatattaacagattgaatcaaggacaaataaatggtggacttggagatgaatttgttttaccacacgaagaattagaccatttggctttaataaaaacttacactactaatggacaaaccccagattctgcaggaacatcaacagcaatacatagtggtattaaaactaaatctggaattattggattaacagatagttctatacgtggcgattgcatgtccaaaagaactgaggtggaaagtattagtgatatatttaaaaaattagataagagtgttggagttgttacaaatactagaattacgcacgcaactcccgcggcattatatgcccactcgtttgacaggaattgggaagatgactccaaagttcctaaagattgttcacaagatgatatagctttgcagttgatcaattctgatattgatcttgcattaggtggtggcaaaagacatttcttacctttagaaattgtcagtcaaaaaggaaaaagaaccgattcaagaaacctgattgaggaatttaaaaatagcgggggaatttatcttaataatgaaaatgacttccaaaactataaaattaatactaaaaaaagattaatcggtctttttgctgattcgcattttccttatttagcaaaggaagaaaacaaaccttctcttttagatttatcaaatttagctattgaatatcttaataaaaacaaaaatggttattacctattaatagaggccggaagaattgatcacggacatcatgcaggaaaactaaattacgttctcagacaaacccaacaattcaataaacttattcaaaatataattcaaaaagtaaatctacaagaaacgttgttaatcgttaccgctgaccatgctcattctcttggtgtcaatgggtattgtggaagaggatcaaaagtaaatggtatatgttatagaattaaccccaaagaatctaaacatccaagtaaacctaatttaggtttagacgggaaacctttttcagtttgtaactacctgaatgggacctggaagtgtttttga

SEQ ID NO: 202558 - DNA, 2173 bp, Unknown
  Bacterial polypeptide expressing nucleotide sequence isolated from the Sargasso Sea
tatggagaatacttatcaagatttaattacagatattcagagtaaaaatccaaaaattagtgaaaaacttgaaggtggtaaaaaattcaaaattaaatctgattttaaacctgctggagatcaaccagaggctataagaaaattagttcaaagcgctaacaaaggagaatttaatcaagttcttcttggagtaacaggatcaggaaaaacctttactatggctaaggtaatagaagcaacaaacagaccagcattaattttagctccaaacaaaacactcgctgctcagctttatggtgaaatgaaaggtttttttccagataacgctgttgaatattttgtttcatattatgattattatacacctgaagcatatgttccgagatcagatacatatatcgaaaaagaagcctctattaatgagcagatagatagaatgagacactcggctacaaggtctcttttggaaagagatgatgttttaattgttgctagcgtttcttgtatttatggacttggttcagtcgaagcctatagcaaaatgaccttaactcttgaaagaaataacgattataatcgagaacaattaataaaatcacttgtagcccttcagtataaaagaaatgatcagaatttttatagaggaacattcagagcgagaggtgaatacttagaaatttttccttctcatttagaagatagagcgtggagattaagtttatttggagacaagcttgaaaaaattgaagaatttgacccattaacaggtgaccaggttagagaattaaacctagttaaagtttatgctaacagccactacataacccctaaaccaacaatagagcaagctataataaaaattagaaaagaactagagtctactttaaaaaaacataagtctgaaaataaattactagaagcacaaagattagaagaaagaactaaatttgatttagaaatgatagaagcaacaggaacttgtgctggtattgaaaattactctagatttttatctggaagaaagcctggcgaacctccgcctactctatttgagtattttccagacaatactttaatatttgttgatgaatgtcacgtaactgttcctcaattaaatggaatgtttaaaggggatagatcaagaaaaagcacacttgcagaatatggatttagacttccttcttgtatggataatagaccccttaagtttgaagaatgggatctaatgagaactcaaactgtatttgtttcggctactcctggaccttgggaattagaacaaaccaaaggaaagtttattgatcaagtaattagacccactggattaattgatccaccggtagaagttaaacctgcaaaaaaccaagtggatgacttaatgcacgaatgcaaaaaaacaattgaaaaaaatcatagagttcttgttacaactttaactaaaaaaatggctgaagatttaactgaatatcttcatgaaaatggaattaaagttaggtacttgcattctgatatagacactcttgaaagaatagaaatcatgagagatttgagattgggtgtttttgatgttttagttggaattaacttattaagagaaggacttgacatacctgaatgtgcattggttggaatattagatgcagataaagaaggatttttaagatctgaaacttcattgattcaaacaattggtagagctgctagaaacttagatggaaaggtaattctttacgctgataaagaaactaaaagtataaaaaaagctatcaaagaaacagagagaagaagaaatattcaattagcttataataaaaaaaataaaattagtgctacttcaattaaaaaagaaataagtgatattttagaaagtgtttatgaaaaagactatgtaaaaataggaactggagccaatgtaggtggaaatctaaaaaaacatattaaagctttgaataaacaaatgaaggaagcggcaggtaatttggaatttgaagaagctgcaaaaataagagatgaaattagaaaacttgaaagtaccgaattagaagttacacttaatccaaaagtaaaaaaatatagcaaaaataacaaaatgtaccctaaaggaagatctactatggggatgccaggaacaagggctcaaaaaggaaaaaaaaagtggaagcaaataaaataa

SEQ ID NO: 202559 - DNA, 1012 bp, Unknown
  Bacterial polypeptide expressing nucleotide sequence isolated from the Sargasso Sea
tatgactaaaactataaatcttggagtattgggtattgatcatggtcatatcttcgacatgcttgatgagatgcttaaagagggatgtagttgtaattatttttggaccgaaggatctccattaacattagatgaatttagcaaaaaatatcctcaaataaaaagagtagataataaaaatgatattttaaatgataataccattgatatggttttaatttcatccattcctaaagatagggcaaatctatctatagacgcaatgagagctggaaaagatgtcatggtcgataagccaggatgtacaacacttgagcaacttaataatctaaaacaaacagttaaggagacaggaaaaatttggtcaattaatttttcagaaagatttcatgtagccgctgttacaaaagctgaagagctagtcgctgaaggtaaaatcggtaaagttaaacaaacaattggtacaggtccccacaggcaaggtaattatgaaagaccagattggttttatgatcgtgatagttacggtggaataataacagatataggctcacatcaaattcatcaatttttaatatttacaaattcaaatgaagctaaagtaaatcatgcgttagttgaaaatacgactaggaaagaatttgctggttttcaagattttggtgaagttaatcttactggaaatggtggtcatggatatgttcgtttagattggtttactcctgatgcgcttcctacttggggagatggaaggttatttatactaggtgataaaggttttattgaaattagaaagtacacagacctagctaaatctgaaaaaggaaatcaactatttttggcaaataataacgaagttaaacatattgactgctcgaatgaaaatctcccctactttgctaatttaattcaagatgttttgaatagaactgatactgcttgtccgcaagaacttacttacttatcaatggaactagcaattaaagctcaagaattagcagaaaaaaaatga

SEQ ID NO: 202560 - DNA, 1816 bp, Unknown
  Bacterial polypeptide expressing nucleotide sequence isolated from the Sargasso Sea
tatgaaatatatatttgatttaatagtaatagggggcgggcatgcaggtgttgaagcagcccttgtggcaaaaagatccggacttaacgttgccctaattacgctagacaaaacaaagacaggaagaatgtcatgcaacccagccattggtggtattggaaaatctcatcttgctaaagagatagatgcattaggtggatatatggcagaagcaacagacctggcaggaatacaattccgaaccctcaacaaaaaaaaggggccggcagttcaagcaacgagagctcagacggacaaaattctttatgaaaaagcaatacaagaaaaactaaagaaagagaaaatagaaattttcgatgacgaaataaaggactttaggacacacagaacgagaatagaaaaagctatatcagaaaacaacgagtatgaagcaaaagcatttgttttaaccacaggaacatttctgaacggcacgattttaatagggcacacaaaacaggaggggggaagaatagatgaaaaaaaatcaactggactagaaaagttttttgaaaaacaggagcttacgctaggcagactgaaaacaggaaccccaccaagactttcatcaaaaaccatcaactactctttactagagcctcaaccaggagaggaaacagaagcctacatgtcgtatttagggaaaaaaaacaaacacccaaaacaaacatgctgctacataacccaaaccaatgaaaacacccacgaaatcatagaaaaaaacataaagaaatcagccatgtactcaggactaataagcggagtggggccaagatattgtccgtccattgaggacaaaatagtcaggttctcagaaaaaaaacaccaccaaatttttgttgagcccgaaggtctagagtcagactgggtgtatccaaatggagtctcaacaagcctgccaaaagaagttcaagaggaatacattcacacaataaaaggtttcgaaaaagcagaaatattacaatacggctatgcggttgaatatgattatatcgacccaagaaacctaaacataacactagcaacaaagaaaaaccctaacttgtttttagcaggacagataaatggaactacaggatatgaagaggcaggagcacaaggaatcgttgcgggaattaatgcaagcctctatgtaaaaaatgaagaaccctggataccccaaagacagaacagctacatgggggtccttgtagacgatctaacaaggctgggggtaagcgagccctaccgaatgttcacatctagagctgagcaccgccttttgttaagacaagacaacgccgacgaaagaatgtttgagatagcaaagaaatttaacatcataagtaaagaaagagaggagatttttctaaagaaacaaaaagagaaggaaaaaattaagaaaaaactacaagaaactaaaataatggtttcaggcctaaaaaaaacagcagaagagctttgtaagagaaacgattttacagaagaggaagtaaaaaaaataacaaaactaaaagaaaaaaactttacagaagtatattttgatattagatattctggatacatagacaaacaacagagagagctagataaaatgaaaaatctagaagaatatagtttgggcttggtttttgattataaagaagtcgttggtttgtcaggcgagcttcaagaaaggcttaacaaagaaaaaccaaaaaacctttttgaggcctcaagcatagagggcataacaccagcagccttgaatgttctcaccattcacctaaagaaaattgatgcaattagagctacctaa

SEQ ID NO: 202561 - DNA, 1769 bp, Unknown
  Bacterial polypeptide expressing nucleotide sequence isolated from the Sargasso Sea
gttgtgctggccggcctgggccaatggagagcggcagtcacagcctcttgatctttttcagcaagcggagagcttgcctgatggctttgccgatcacttcttcggtgttccgctggcggtgcgtattctgttggatggacagcagcttggggaaggcgagattgtgctgggcaaagataccagcgtgcaattattgacattgacggacagctacgagtccgagttgagcgagcgagatcgccaacactggagccagattttatccagtccccatcaactggggccttgtcagcaaaaatgcgaggacggtgttctggcgctggaatacagcctggaaaactcccagctatccgtcttgaccgccaacgtggagaagggacgactgtcgacccgctaccattccctgcccgaggggggcagttacggcgctttgctgcgccatcagttgaacctcagccaaggagaaggcgaacagcgtagtggtcgctacaacttgacggcgcagggcagcatgggcgagtggagtccattgctggagggcgagttaagtcaatctggtgacggtcaggggacgctgcaccatattcagcaactctatgccgagcatgagggggctggtcgtttctatcgattggggtatttctcgccttatgcccagggattggttcgtcagccggcactgtttggtggacgtacccctaccgtactgggggtgatgctgggtgattccgataccttgttgattgagcaagggcaggctagcgcgactcctgtttacgtgacgccgagtcgccccggtatggttgaaatataccgggatggacagctcatcaattcgcagcaagtgatcgccgggttacaggcgctggatacccgagtgctgccagccggtatctacgaagttgagttacgggtattggaagatggtcaagtcaccgagcggcgacgtgagacgatctacaagccgatgaattggcagaatccggacgagacttggcggtttaacctgtttgccggtcagcagacccgcttgctcagcaattgggatgagagtgacgtcagcagcttgagcagcggggtcatggtcaatcatctgctggcaccttccgtcatcgtcggcgcatccagccaatatatcgatgaacgttggcaaaacggtctgtcagcggattggggcctgactgagcagtggcgactgcttggcaacctgatgaccacccaaggaataggacatggcttcgatctgcaactgctccatcactatggttccggcagtctggtcgttggccatcagcggcaatatttgagtcagagcgaggcgtctgacagcaatacggcccaaagcacactctcgctgcagcagcgcctcagtgacagccactctgccaacctttatgtgtcgcatcaaccaggctacgggaccggtgctgacctaggatggcgttataacggcgagttgttcagccagaacatgagctggagcctgacggtgtttgaccggccaggcagcatcagcactgcctatgcccgtgatcggggcggcatgctttccctgagcatgaacctgggtggtgagcgcagcctgctggccatcggtgtcggcagccggacatcccgctccggtgggcaggaacgcaatggatccctcagttatcagcagttgctggaatggggggcgttgcaaagtatcggcgccagtttgacgtccgatagctacggggttgggacggctggatatgcccgctttgaaggggagcaactgagtggtg

SEQ ID NO: 202562 - DNA, 586 bp, Unknown
  Bacterial polypeptide expressing nucleotide sequence isolated from the Sargasso Sea
ttgctcgtaggagcagggaatgcaccttctatagaagaaaggggagactcgaagaaaggcgaaaccttagttgctacttgttcagcctgccatggcattgacggtaatagtttggccggtttatggccctctattgctggtcagaattataaatatcttttaaagcaattaaggcttgttaagtcgggtgataggcaaatagatcaaatgataggacaactagataatttgagtgatcaggatttgaaagatatagcatctttttattctattcaaaataacactataggaaaggtagaagaggataaactcgagctaggaaaaaagttatattatgctggcaatctagaaaaaggaattcctgcttgcacggcttgccattctcctcgaggtcttggtaatggtcctgctgcttaccctctattaagtggtcaacagcccgattacgtagaaaaggctttaaaagattatcgttcgggagaaagacttaatgatgatccttcaaaaattatgatagctatagcttataagctcgatgatactgaaatagaagctctttcaagttttgtccacggtcttcactaaa

SEQ ID NO: 202563 - DNA, 1042 bp, Unknown
  Bacterial polypeptide expressing nucleotide sequence isolated from the Sargasso Sea
cctgttagtgggaatctttattattcttcatgttggatctcgttggcttggaaccgcttttcacttggccgagcgtgaagttgcagagtggtctatgcctacagctagcctaattgcaccgttgttttttggctggagtggtttggaaactgggatccatgtcacctggtggcttgcaatgggtctgattgttttatttttaccttatttcccatacagcaagcatatacatatttttctcgctccaatgaatctagcatttgctagtcgtgaggcaaatgggaagctgatggagccagtcgagagttcaaatccaggagcatcaaatctggatgagcttccatggaaaaatatatttgattcctacgtctgtatcatgtgcacgcgttgccatgaagtttgtccagctcatgagtctggtactcctttgagtccctctgcacttgaaataaacaaacgttatttcataaacgaaaactcgtctgaactggcaggggggaaattaaaattagatctgctccatgaagctatttcaaatgacgcagtttggtcctgcactacctgtatggcatgcgttgaagtttgtccggttggaaatgagccgatgcaggatataattcagatacgacgtaaactggtattcgatgctaatatgccggatgaactatcagatgctcttcgcagtctggatgaacaggggaactcttttggggaatcatcaagaaaacgaactcggtggacccgtgatcttgactttcagatcaaggacgcttccaaggaagctgttgaatacctctggtacgtaggtgattttgcttctttcaatcaaaactgtacagaaaagactcgaaaatttgcaaaagtactgaatgctgctggtgtagattttggaattctaatgaaagatgagaaatctgcaggcaacgatgctcgaagagttggggaagagggccttttcgatgcactcgctgaagataatatccaaacactggaaaattgtgatttccagcatatccctgactaccgatccgcatacgtataa

SEQ ID NO: 202564 - DNA, 2118 bp, Unknown
  Bacterial polypeptide expressing nucleotide sequence isolated from the Sargasso Sea
agaagatcttggtaaattccctgatttaaacgtggcagagtctctgcaacgtattacaggtgtagctatcgaccgaagtggcggtgaaggtcaagccgtaacaattcgtggttttggtccacagtttaatacggttcttgtaaacggtcgccaaattgcgactgatagtgcagggcgagaattcaattttgatgtgttagcggctgaccaaattacaggtgctgatatttataaaagtaatagcgctttacttcaggaaggcggtattggtggtacggttaacgtaacaactgcacgtccttttgactttggtggcttgcatgtaattggttcagttaaaggcatgtacgaaagcctttctgaagaagtatctccgtcggcatcatttttagtaagcaatacatttaacgacgataagttgggtgtactttttgctattactaatcagcagcgtaaacttcaaaataaccaaattttgacagccggttggcgcggtggccaaacaatttctaacccacaagacggtgtgttatttgataatgcatacattccacgtaactgggaccaagttgttgatgagcaagaccgtgagcgtactaacgcaagcctagtgcttcaatatgcaccatcggatgacattacagtaacggttgatggtttgatttcgaagtttgaagttgattcaacagttcgcgaccttgcatcttggtttgaaccagatcgtgtaggcagtgcaacaattgatgaagcaacaggtacactattaacgtttagccaagatgtaggtttaggtgcgccaagtggtaaccctgcaagtgactttgtatctcatacacgtaactctcgtgatgtaactaacaaagcatttggtattaatgttgattggcaagtaaacgagtcattaaaagcgaaatttgatgtatctcgctcaacagctgaaaatgatcgtgctggtcgagatcgttttaacgtagtgggtattattaacagctacagctttgatggcacaggcggtgttccaactgttcagcatgatggttttgataatggctctcttccagatccaagccttgctcgccttcattacaacgaaatgggtaaccagtttaccaacgaagacgaaattacagaagcgaaagccgattttgaatacgtaccagataaaggcccagtagagcgcattaactttggtgcttatcgtcaagagcgtgaaaagtctagcttccaaatttttggtagccaatgtcagttttgtggttacggcactgaagcgcctactgatgtaattgattttgaagcataccaagcaaataactacttccctggcttaattgacacattctacacctacgacggtgataaaatgcttgattacctagcggatcagggtttccctgttacacctacactgcaaaataaccgttacacaattaacgaagatatcactagcttatacatggacttcactataggttttgacctagctgatatgcctgtaacggttaacatgggtgcgcgttactcagagacagatattgatgtgtctgcagttcaaagttttgtaacagacgtagtacctacatctgatgcaacgttatttgctaacgtatttggtcctgcaacaaacattacacaaggtacaagttactcaaacttattaccttctttgaatgtgaagcttgagcttcaagaaaatatggtattacgttttgcagcgtacgacagtattactcgtccaacaatgtcgcagttatcgcctgcaacaacgtttaacgaacctcgtcgtcaaaacttaacggcaagtggcggtaacccagcacttaagccattccaatctgaaaactgggatatttcttacgagtggtactacaacgatgctaacttatttagctttgcggtattcagtaaagaagttgacgactttattgttacgttaacaggtgcagaaacttacaccatgtctgaccgtaacggccctgattttgcgtgtactacatgtacagaccaaacagatgaagaacttgttggtagctcagaagtttacactgtaacgcgtccacaaaatggtgagtcagcaacagttacgggttacgaaattggtgtaactcatatgtttga

SEQ ID NO: 202565 - DNA, 1290 bp, Unknown
  Bacterial polypeptide expressing nucleotide sequence isolated from the Sargasso Sea
tttggttgtcagtggttttatacatagtgtgtatgctgaggagatttctgcacttgaggaattaactgtatcagcaagaccaattggtttacaaagcgcagagaatctttctttacctatcagtattttagatggcttggatcttagaaatagtcaggactcgaccataggagaaacgctatcaaacattccaggcgtaacaacggatcgttttagtccattagccagcagaccggtaattagagggcttgcgggatcaagagtacttattttagaaaatggggttggagcaatggatgttaccactattagtgcagatcatgctgtaactattgaacccattcaagctgaaacaatagagatatttagaggtccttcaactttactttatggtagtgaggcatcaggcggattaattaatgttgtgacgaatcgtattccagaaattgttcctgaatttagaaatacttttcactctagttatggcgataatcaaaatgagaaattattttcaatacaaagcgagggtggtcaggataaatgggcatatcatcttgatagcactaaacgtcatgcaagagaatactctagcagtaaaaagcagattgaaaatagtgattatgaaacattcaattttaatgttgggacttcttatgttgacacctggggattcttaggcgctagcatcggatacttcgagtctacacatggtgttccactcaatcctgatgacccttctgagctgccatttttagaaacagagcaaaaccgttttgatctatctggtaaaattattgaaccatggtctggagtagaagttgttacactgcaagccggttataatgattacactcatacggagtttgaagatgtcggggaagctgggacagtatttgataatgaggaattcagcactcgtattgaagttactcatgcacaagttggcaaactaaagggtgcgtttggaacacagtttggttttagaaatctgagcgctgtcggcgaagaggcgtttattcccaaaactaaaacgaatagcgtagctgcatttattctagaagaaataactcttactgattcgacatatctggaaattggcggacgttatgagcataaagaagacaatccaaataatgcttcagaagttaccaatgatatgtttagtatttctacaggattaaattggaattctgatcaaatatgtcactgggtatcaatattggtcgaagccaacgtggtccgtcagcagatgtatttgttgcaaatggtcctcatgtcgcaacaagaaca

SEQ ID NO: 202566 - DNA, 1489 bp, Unknown
  Bacterial polypeptide expressing nucleotide sequence isolated from the Sargasso Sea
aatgatagataaatccttaagattgattcttggaaatcaacttttccccttagagatccaaaaaatagaggatacagaaactatttttatgtgtgaggactcaggtctttgcacctatgaaaaacatcataagtctaaaattgcattattttttaatgcaatgagatcgtttagagactctttggagagatcaaaaataaaaaatatttattatgattttaataatagatttaatgatacttttattgagaaattagctgacgagatcaggaaaaataactttaccaaaattaagttttttgaaatagaagacaagccttttgaaaaagaaatacttggactagtcaacgaattagaaattaaatatgaaattttaaaaactcccatgttcattgatacaaggcaatcatttaaagaatatataggggataaaacttttatattacaagctaactattacaagaaagttagaaaagagatggatcttcttttagaagatggaaagcctttgggtggtaaatggagctttgatgatgaaaatagaaaaaagcttcctaaaggttacataattccagaacttccaactatcaaaaaacgagatgattctgaagaaatttctaattttataaatactgaatttaaagatcatccagggataataaataatattttcccttttacttctgaacaagctttagattggcttaatgttttttttgatgagcgttttaaagattttgggccatacgaagatgctatttttatgggcgagcattttcaacttcattctgcgttaagtagttcaatgaaccttgggattattactccacagcaagtagtaactgaggcaagaaattatgctgaggaaaatgatatacctctgaacagcttagaaggatttataagacaaatcattggttggagagaatttataagaggcatttatcaaaacttctctgaaaaaatgattgatgctaattattggaatcatcaaagaaaactatccgatgcatggtatacaggagaaacaggtatagaacctctagatgatgccataaaaggcgcacaagagtttgggtatactcatcacataaatagacttatggttttagctagcataatgaatatgtcaagaatccatccatcagagatttataaatggtttatggaaatgtttgttgattcttctgagtgggttatggttccaaatgtttttggtatgggaacattcgctgatggaggaatatttgctaccaagccatatatttgtggatcaagttatatattaaggatgtcaaattttaaaaagggagattggtgtgaaattgtcgatggcctttattggaaatttattgaagacaataaagaattctttgcttcaaatccacgtctatcgctaatgataagagctcttgataaacttgataaggataggaaactaagaatttttaaggccgctgatatttttattgaggaaaaaactctttga

SEQ ID NO: 202567 - DNA, 1240 bp, Unknown
  Bacterial polypeptide expressing nucleotide sequence isolated from the Sargasso Sea
atgaactacgagaagtccagaaattttgcagattttctagaccaacaggacgggctaagtgaataccgtgagcaattcaattacccaaaagatagcagtggcaaagaactgatctatttctgtggtaattcattaggacttcagccaaaaacagtttcttcttatttagaaaaagagttgtccgtttgggcagaaaagggtgtgattggccaggaaacccgatggatagcatttcatgaaaggctcgaaaagtccactgcaaaactagttggcgccttgccgtcagaggtagtggtaatgaatgccctgacagtgaatattcattttctattggtctcattttatcagcccagtgaaaaaagatataagatcatgattgaaaaagacgcgtttccttcagatcattatgctatacaaagtcagataagatttcacggatatgatcctgaacaggccttggtggagcttgtaccgaggaaagatgaaaagatcttgcgtaatgatgatattctttcttctattcaagaccatggggatcaactgtcactgatctatttaggcggtgtaaattattacacaggccaagcatttgatatgggagagatttccaaggcgggtaaagcacaaggagccattgttggattcaatctagctcatagcgttggcaatctaccattaaggttgcatgattgggatatagatttttctgcttggtgtacatataagtacctttgtgccggcccaggaagcccctcgggtgtttttattcatgaacgtcatcatgactgggatggtcctaggtttcttggttggtggggccataataaagattcaagattccaaatgccatcggtctttgatccgatcttgacctctgaaggatggcaggtcagtaatgcgccagttatgggtatggctccattattagcctctatggagatctatgataaagttgggatgaatgctattcgtagtaaaggtaaagagttatcatcttatatggagtatttaataaaagaatatatcgcagaggttgatatcattacacctaaagctagaggttgtcaactttctattgtagttccaggtggtaaagatgtatttgattatcttgcaagacaaggtgtagtatgtgattggcgtaatcctgatgtcattcgtgttgcacctcatccattattcaatacatttactgaagtatttgaatttgttaaaatattaaagaaagccattgcctgat

SEQ ID NO: 202568 - DNA, 1465 bp, Unknown
  Bacterial polypeptide expressing nucleotide sequence isolated from the Sargasso Sea
actgtcaattagcctattttcagtactttttatagctacgtttattacatatgacacacaatttgctcaaaaaataattgatcaatcttatcaatatatagttagtgtttttggtccctcctatttaatacttacattattttgttttttcttcctaatttttctttgtatttctagatttggagactacaggctaggtggagatgatgctgagactgaatttaattatctaagttggattggcatgttattttgttcaggtattggaggaggtattatttattggtcaggagtcgaatggtcctattacgtaggaaatccaccatttaatatagagccgtattcacaacaatcattttcattagctactgcttacggtttatttcattggggaattagcgcttggtcgatatacggtattccagctatagcgctttcaatagccttctataagtataaactcaattcccttagattaagctccagtctaagcggattaggaatttcaaatatagaaaccactagctttggtcgctttatagatttaatttttatattagcgacagttggggctgctgggggaacaattggttcctacatacctatgctctcatcaggatttacagaaatattcaatttaaacaatggtttatacttagatattctagttatttgtttatgtgtatctctttttggttatagtgtttataaaggtttagataaaggaattagaaacttaagtaattttaatcttatgttggcattactttttctattaataatcgtcttttcaacaaatttcttaggtttgcttgaaacttctttttcgggtcttgtgttttctgtagtaaatttttgggatatgagcacacttggaattaatgaagagtctaaatttgcagaagaatggactatcttttattgggcttggtgggttgcttttgggccactggtaggactttttatagctagaatctctaaaggaagaacaattaggcaagtagttttaggaatgctgttttttggaactttaggaacttggcttttctatatgattttaggcggctttgccatgaatttagaactttctggagaattcagtgtattacaaagcatgaattcagttggtcatgcagatacggctattgctgtagtaaagaacttgccctttgaaatactcatggttttcatcttttgtttaataactataatttttgtaaccacatcgtacgattccatgtcgtatgtgatctcttatcatgttatgaaaacttctaatgcaaataaagagccaggaaaaaaattacgtttattttgggcaattatattaggcatacttcctgctgctctggttttatattctgatcatagtgtagcattagatattattttgattacttcactacccttaatgctaatttatccattaatggctatatctatctatcgagaattaatacaataa

SEQ ID NO: 202569 - DNA, 1363 bp, Unknown
  Bacterial polypeptide expressing nucleotide sequence isolated from the Sargasso Sea
ctggccggtgatcaccatgtgcacacccattacagcgtgaaatgggataattcggtttttccgccagcgccgattttaggtggcgatgctaaatattcgatcccgctaaatgcccaaatggcttcacattatggcttaagctggatggtcattactgatcacggtgggccaaaccgcgccaaactggcgttggagcaggcttatcctgaacttgtggcttcacgtaaagctttaccccacattctgcaattttacggcatggagtttgatgtgccgggcaatagccctggtggtcgccatgccagttttattatgccgcacagggcaacagaagcagagcagttgtaccaaatagaaagccgctacaacggccgtcagggtgtaccaccagggccggaaaaagccgaagatgcttttatgctgcaagccttaaaagccatgaatgaattaccggataaacctttgctgttggtcaatcacccggcacgtttagccactggttttcggcagtacaataaagtgactccagcgcaattacgtgactggcaggatacagcgcccgatgtggtcataggtatgacaggtgctgaaggccatcaggctgcgactttaaatccggatggcagcacagacccaaatgccattcgcggcgaatacccggattatccgactatgggcggctacgaccagatgacagcccgtttaggtggggtgtgggatagtttactcagcgaaggccggaattggtgggtgacaggtgtgtccgacagccatggtcattacactgatggctgggccgacttctggcctggtcaatacgccaaaacttatgtctatgcggataaaaactacgacagcatttttgcagcactcaaagccggtcaggtttttgtgactacaggcgatttaatagatgctttgtttgtcgaagtggcagtaaaaaactctgctaaaactgccacagcgggtcagacgctcacagtaaaacctgatgatgagcttgtgctgcgggtacgttttcgcgatccagatagcaacaacggcggcggttataacccagaagttgaacgggtggatgtgattcagggggtgatcataggcccggcttcagagcgaaatacagacgaagcaccaaataccaaagtcgctaaacgtttttatgcaaaagattggagtagcaaagaaggctatagcagctttgagttgccgctcggtaaagtcagcactagccagtatctgcgcctacgtggcaccaacaataaaaacgagttggaaccagaacctgatgccaaaggcgaaaacccgtggtccgatttatggttctacagcaatccagtctttattcaagtggatcagaactaag

SEQ ID NO: 202570 - DNA, 841 bp, Unknown
  Bacterial polypeptide expressing nucleotide sequence isolated from the Sargasso Sea
gatgttaaatctgtcgtggaactatttaccattttatttaagtgggcgaatgggtattgagactctgccagaagataccaagatgctgttagattacagcccagacattgaaatttatggtcgtttagccgagcctgaatacagtgatttcgaaaaaacactctgtggctcagctggatttaacgctgcacagcttacgtcccatggtgtaaatacctgcccgaacaccgttgtgcatgaaatagggcatgtgtacttggccgatcatgacctagcgcaccgcaataccgataatatcgctaaatttaaacgtgctactgattccccttgtgatggcggttatacggtaatgacttggcaatcatctccggacaccaaactgtattattcatcccctgaagtgattgtaaatggtagtgtttgtggcgatgaaagcctgagttttgttgtgtctcgtaacggcgatttatcaaagtcagcgtcggtgaaagtgttcattgataacgcggtaacactgctggattcagattttattgatgtgaagtttgccgccggtgaaagcactaaatctgttgtagtaagcatcatagacaatgcctcaaccgctgaaaacagtagtttagtggcggaacttgttaccccaagactattgaaggtgacgggcagtacgatggcgatcactatcaacaatgacgatgtactacctgtggtgactccgccgactacctcgactactccaaccaccccaacaacaccagagccggaatcatctagtggtggcgggtcattagggtatatcagtctcgttttcctcgccttagctagacgattacgaaaataa

SEQ ID NO: 202571 - DNA, 970 bp, Unknown
  Bacterial polypeptide expressing nucleotide sequence isolated from the Sargasso Sea
gatgttaaatctgtcgtggaactatttaccattttatttaagtgggcgaatgggtattgagactctgccagaagataccaagatgctgttagattacagcccagacattgaaatttatggtcgtttagccgagcctgaatacagtgatttcgaaaaaacactctgtggctcagctggatttaacgctgcacagcttacgtcccatggtgtaaatacctgcccgaacaccgttgtgcatgaaatagggcatgtgtacttggccgatcatgacctagcacaccgcaataccgataatatcgctaaatttaaacgtgctactgcttccccttgtgatggcggttatacggtaatgacttggcaatcatctcccgacaccaaactgtattattcatcccctgaagtgattgtaaatggtagtgtttgtggcgatgaaagcaccatgaataacgcaaaacagatcagtcttgcggctccattcgtggccaacatcatggatgaaatggatgtcattggtgacgtatggttgggggatactccggtaatcgtgtccgaaagcgatgaaagcctgagttttgttgtgtctcgtaacggcgatttatcaaagtcagcgtcggtgaaagtgttcattgataacgcggtaacactgctggattcagattttattgatgtgaagtttgccgccggtgaaagcactaaatctgttgtagtaagcatcatagacaatgcctcaaccgctgaaaacagtagtttagtggcggaacttgttaccccaagactattgaaggtgacgggcagtacgatggcgatcactatcaacaatgacgatgtactacctgtggtgactccgccgactacctcgactactccaaccaccccaacaacaccagagccggaatcatctagtggtggcgggtcattagggtatatcagtctcgttttcctcgccttagctagacgattacgaaaataa

SEQ ID NO: 202572 - DNA, 2098 bp, Unknown
  Bacterial polypeptide expressing nucleotide sequence isolated from the Sargasso Sea
attgttcctcgaagaagcgggggacatggaggatcaaatcgaggaaagcctgcttctcctcgagaacgacccttctaaccaggaagcggtcaacacggctttccggggctttcatacgatcaaaggcggtgcgggaatgatcgggttcgaggaactccagcaatacacccatcaggtcgagtcccttctctcagacgtgagaggaggtgaaaaatcgaccagtccggaattgatctcggccctcctgggttcgatcgattgcctcagaagtttctgcaaagacctggagggaatcgaaagttatgaccaggagggagtcgctgcaagcctcgaggagatccaaaaattatcaggaacttccgtatacactggagaaccccaaactgaagtggatctcgagccaactaatcccattgagatatccgaatcaaatgaatccggattttcccggtttttgatcgaattgcgttttccggaagagctgcttcaggaaggaggtgatcctttactgttgctcaaggatcttcatgaactgggggaatgcattgtcaccgcacatgtgcattcgatcccccaacttgaaatcctggatccctcaaaactctacatccattggagtgtcctgctcaacacggagaagtcagaggaagaactggaaaacgtgctgatgttttttcttgaggaagagggagtgacaatccgaagaattcaaggtcctcccaaagaaacgaaggccaaacaaaaaatcaaccagggcgaggatcaacctgttcaggaagatgcacaggagaccaaagatcttccatcaaaacagaacaaggaaacggttcagcctcaaacccaaaagattgaaaaacctgcccagcctagacctcaggtgcagaaaaaaaaagacagcggggggtcgattcatgtttcgaatttcaaactcgacaagttgatgaacctcgtgggagaaaccgtcatcaaccaggcgaggctgaaagagcttggacaggaattcagaatcctgaaccgtaaactgggagaccggtatcagcagatcatcgacgattccgatatcgtggttcgtgaacttcaggaccaggtgatgaacatccgcatggtccccatcaaaggtgcatttcttccgctccagaggattgtccgggattacagtgtcaaatcaggaaagaagatcaaactcgagatttccggtggagagacggaactggataaaaccgtttctgaaaaactgggaggccccttaaagcacctgatccgaaatgcgatggaccacggcattgaacttcaggaagaaagggcgaagaacggaaaaactcccgaaggaaaaatcgaactcaaggcctttcacagcgaagggcatgtcttcatcgaagttcaggatgatggggcaggaatcgatgcggaaaaaatcaaagacattgcacgatccaaacagttgcttgatgacgaaacggaactttcggaagaagaagcatttcaattgcttttcctcccgggcttttcgaccagtgaaagcatttccgacatttcaggaagaggagttgggatggatgcggttcgtcaggacatcgaatccctccgtggggtgattttcatcaagagtgaattgggtcaaggctcgacctttcagattaaattgccgctcaccctggcgatcatcgaagggatgctggttcagatagaaaaccagatcttcaccatccccttactgtctgttctggaaaccctcaaaaccctcggacatcagcacaagaccctccaaaaacaaggggaggtgatcgaactccgtggggaatatctgccgaaactgaatctatcccggattttcaacctccagaaggttgaccctcctaatcttgatccgctggttgtggtggtagaacaggcgggagaacgttatggattgctggtggataaaattctagaccaacagcaggttgtgatcaaaagtatggaagagaatttcttccagattccaggaattgcaggagcgaccattttgggtgacgggggtgtctccctgatccttgatttaccaggcctgctgaagatcgcccttcaaaacagacaagaacccttggagctgtcatga

SEQ ID NO: 202573 - DNA, 1288 bp, Unknown
  Bacterial polypeptide expressing nucleotide sequence isolated from the Sargasso Sea
aatgaaatatatatttgatttaatagtaatagggggtgggcacgctggtgttgaggccgcgcttgtagcaaaaaggtctggactagatgttgctttggtaactttagacaaaaccaaaacaggaagaatgtcatgcaacccagcaattggcggcattggaaaatcacacctaactaaagagatagacgctctgggcgggtacatggcagaagcaaccgacctttcaggaatacaatttagaactcttaacaaaaagaaaggcccagcagttcaagcaacaagagcacaaacagacaaaaacctttatgaaaaagcaattcaagaaaaaataaagaaagagaacattcaggtttttgatgatgaaattaaagattttgcaacaaaaaaaacaatcatagaaaaagcaatttcagaaaaaaacgagtatgtggctaaagcctttgttttaacaacaggaacatttttaaatggagccattttgatagggcacacaaagcaagaagggggaaggatagacgaaaaaaaatccactggactagaaaaatttttcgaaaacaaccaacttcagttaggcagactcaaaacaggaacaccaccaagactttcatctaaaacaattaactatgaaattctaacaccccaaccaggagacgaagcggaagcttatatgtcatttttgggagaaaaaaacaaacaccccaaacaaacgaactgctacataacccaaaccaacgaaaaaacacacaaaataatagaagacaacattaaaaaatctgccatgtattcaggcctgataagcggagtgggcccaaggtattgcccctctatagaagacaaaatagtaaggtttgcagaaaaaaaacaccaccaaatatttgttgagcctgaaggattaggttcagactgggtgtacccaaacggaatatcaacaagcctaccaaaagaagttcaggaagagtatatacggtcaataaaggggtttgaaagtgcagaaattttacagttcggctatgcagtcgagtatgactatatagacccaagaaacctacacaaaactttagccacgaaaaaaaacccaaaccttttcttggcgggacaaataaacgggacaacaggctatgaggaagcaggagctcaaggcatggtagcaggaataaacgcaagcctttatgtaaaaaaagaagactgctggatacctcaaagacaaaatagctacatgggcgttcttgtagacgacctaacaagactaggagttagtgaaccgtacagaatgttcacatcaagagca

SEQ ID NO: 202574 - DNA, 895 bp, Unknown
  Bacterial polypeptide expressing nucleotide sequence isolated from the Sargasso Sea
atgctcgaactattgtcgtcgcatgcctgccatggcggcgagcagcgcatctatcgtcacgactcgcagaccgtcggtctgccgatgcgtttctcggtgtatctgccgccgcaggccttgcaggccaacgcgaatgtgcccgcgctgttctatctcgcgggcctgacctgcacggaagaaacctttccggtcaaggcgggcgcgcagcgcttcgcggcgcagcacggtatcgcgctgatcgcgccggacaccagtccgcgcggtgcgggcgtgccgggcgaaagtgcagcatgggacttcggcgtgggtgcgggcttttacgtcgacgcgacccagcagccgtgggcgaaacattaccggatgtactcgtacgtgcgcgacgaattgcgcgaaacggtgctcgcgaatctgccggtggacggcgcgcgtctgggcattttcgggcattcgatgggcggtcatggcgcgttgatgctggcgctgcgcaacccggagatctaccgctcggtgtcggcgttcgcgccgatcgcggcgccttcacagtgcccgtggggcgtgaaagcgttcagcggatatctgggtgaagaccgggaagggtggcgcaagtacgactcgagcgaactcgtcgctcacgcgtcgcgcaagttcaaggaagggattctggtcgatcaggggctggcggatcagttccttgccgagcagttgaacccggatgtgttcgaagcggcctgcaaagccgcggggcagccgctgacattgcgccgtcacgcaggctacgaccacggctactacttcatctctacgttcattgaagaccacatcgcgcatcacgcgagggtgctcaacgccgccgcaacagactcccgccatacaccaccgccgacagcaccgtgat

SEQ ID NO: 202575 - DNA, 1267 bp, Unknown
  Bacterial polypeptide expressing nucleotide sequence isolated from the Sargasso Sea
gatgaataatatatttgatttagtagtaataggaggaggtcacgcaggagtggaagctgtgcttgctggaaaacgcatgggccacaatgttgcactaattacattagacaaaactaaaacagggcgcatgtcttgcaacccagccataggaggtatcggtaaaacacatctggcaaaagagatagatgctcttggcggctatatggcagaagcaactgatttgtcgggcattcaatttagaactcttaataagaagaaggggccggctgttcaggcaacaagagctcaggctgacaaagagctttacgaaaaaactattcaagcgaagcttgaaaaagagcaaattgatgtgttcgaagacgaggttatagattttgaagaaaagaatggtgagatttttgctgctgttggtaaaaataaagaatacaaagctaaagcatttgtgctcacaacaggaacatttttgaatggagcgattttaattggaaacatcaaaagagaaggaggcaggatagatgaaaaaaaagcttcaggcttagaaaatttttttgaaaaacaagaccttatgctggggcgccttaaaactggcacaccacccagacttgcaaaagagaccataaattttgaagccctggaagaacaaccaggagaccaagaagtttgttatatgtcttttttagaaaacaaaaatgctcacccgaaacaagtttcctgctttatcactaaaacaaacaagaaaactcacaacatcattaaaaaaaatataaaaaaatctgccatgtattccgggcttattagtggtgttgggcccagatattgtccttcaatagaagacaagataatgaggttttcatcaaaagacagccaccagatattcgtggaaccagagggcttagaaagtaattgggtttatccaaacggcatttctacgagccttccaggagaagtgcaagaagaatacattaggtctatcgagggctttgaaaatgcaaaaatactgcagcaaggctatgctgttgagtacgactacattgacccaagaaacctcgaaaagacccttagattaaaaaactttaaaaacctctttttggccggacagatcaacggcacaacaggttacgaagaagcaggtgcacaaggaatggttgcaggcataaacgcctccctgttggttcagaaaaaaacagaatggattccccaaagacagaacagctatatgggtgtgttggtggacgatctaacaaggtttggcgtaagtgagccctat

SEQ ID NO: 202576 - DNA, 869 bp, Unknown
  Bacterial polypeptide expressing nucleotide sequence isolated from the Sargasso Sea
aaatccactttgtgtgggacttgacccatacctagataaaattccccctctatttcaaaatggtacaatgaagcccagtgacccgcgaacagcccccgcagttgagacgtttttaagggctgtgatcgatgtaatagttggcaaggtagcgataatcaaacctcagtcagcgttttttgagcagctcggatggagaggcattaaggctttggatgctattatacaatatgctcgcgacaaagatattttagttcttatggatgctaaacgaggagacattggtactacagcaaaggcatacgcagagacctatcttagcaaggaggctttactaccttccgatgctttgacagttaatccatttctaggcaaagatacgctagagccatatctaaccgaagttaaggacaataatcgaggccttttcattttagtcaaaacaagtaatccaggttctggggattaccaaaatgtgcttgttaaggatatacctctttacgaatttatagggaattcattacgttcaattgcctctgaatttgttggatcagctactggctggtcttcgatagggattgtggttggggcaacctatccagaacaagcagatcgactccgcgaaatactcccgaatgtaccgtttcttatcccaggttacggtgcacaaggcggtgcagccgatgatgccgttacagcgtttgtaaaagggagtaacggttatgaaggtgggatagttaattcatcacggggaatactattttctgatggaagttacacctcgaacccaaaaatctgggagtcaactctttgcacgtccgttcaacacgctgttgatggtttaatcgacgcactagcgcgaaagccctaga

SEQ ID NO: 202577 - DNA, 640 bp, Unknown
  Bacterial polypeptide expressing nucleotide sequence isolated from the Sargasso Sea
atgggaaaaggaatagtggagcaaaaacaagaacttatagaaataaatatatctatagaacaaagagataaggatgttattaacgcatcaaagatagttaatgaaaatataaataaagtggttgaaattgctaagtctttaggaattaaggaagacgatattgtaacaaaagaattcagtatatctcctgtagaaagatggattcagaaaaaagatgagtatggtgaatggggagaaagtgaaataattgcttatgaggtaaataattcaatattattgtcatcagaaaaaatagatgtaataacagaatttattaatcaatctactgtacaaacaggaaatacacttagaataaatcatataaattttagtgcaaaagatcaaaaagaaaataaaattgaatcaagagaaaaagccatagaagatgctctatacaaagcttccttctatgagaaaagactagaaataaaattaggagatattattcattttcaagaactttcaggaccatctgttaatcaaaatgataaaaatctacctatgatgaggatggctgctgaagctatgccgtccgcatcaatctatgctggagattcagaaattattacagaaatttatttagggtttaagataaattaat

SEQ ID NO: 202578 - DNA, 745 bp, Unknown
  Bacterial polypeptide expressing nucleotide sequence isolated from the Sargasso Sea
tagcactgataaattttcagatattggtgcaagtgggttccaaagcaatataaatactttagctgcaaatgatgtagtacccgactgtagctcactaactgataaattttgtccaagccgaaaaatctctattggtgaagtgtcgtatatagtagataaattagtatcaaaatcattaataggttcaaatttatttgacgcttctcctttccaagcaggttgggagtcaagtggaggagaggtagaagatgctgcctctactgctgtttcaaaccctaattcaggaaatgatgcttgtacaggcaaagataattcaaatgcaaaattggatagtactttggatattcaaagatttctttcagataatggatttaatcctggcccaatagatggtgttagtggtagtaagaccaaagcagcaattaaagcatttcaaacaaaaaatggacttctctctgatggtattgttggaagcaaaactaaggctgcaatgcgctcttatacaggttgtgaagcagctaatacctgtaaggcaagagataatacaggagcaaacttagactctgtatctgatatacagacatatttatcaaataatggatttaatccgggaattattgatggaaaaatgggctcatatacaagagaagcaattaaagcatttcaaagaaaagttggacttattcctgatggtgtagttggtagcagaacaaaatcttctatgcgttcttatactggttgctaa

SEQ ID NO: 202579 - DNA, 1012 bp, Unknown
  Bacterial polypeptide expressing nucleotide sequence isolated from the Sargasso Sea
tatgaaaaaaaaacttaaccttggagttattggaatagatcatgggcatattttcgatatgttggatgaaatgattaaagaaggttgtagctgtaattacttttggacagatggggatcctttaactcttcaagaatttaataaaaaatatccaaatattaaaagaaaagaaaataaaaaggaaatattaaacgactcatctattgatatgattttaatatcttcgatccctgtaaatagagctggtcattcaatagatgcattaaaagctgggaaagatgttatggtagacaaaccagggtgtactaccctagatcagttaaataagttgaaaaatactgttaaagaaactggaaagatctggtctataaatttttctgaaagatttcacgttgctgcagttgctaaagcagaagaattagtaaatgaaggcaaaataggaaaagtaaaacaaactattggtacaggtcctcataggcaaggaaactacgaaagacctgattggttttataatcgtcaaagttatggaggaattattaccgatattgggtctcaccaaattcatcaatttttagtttttacaaattcagatcaggcaaaaatcaaccatgcattagtagaaaatacgacaaagaaagataagcctggttttcaagattttggtgaagtgaaccttactggtaatggtggacacggatatgttcgcctggattggtttactccagatgcccttccaacctggggagatggaagattattaatccttggagataaaggttacatagaaattagaaaatatacagatttagcaaaatctgaaaaaggtaatcatttatatttagcaaataatgatgaagtgaaacatattgattgttctaatgttaagctaccctactttagtaatttaattaatgatgttttaaacagaacagaaactgcatgtcctcaagttcttacttatttttcaatggaacttgctattaaagctcaagagcaagctgaaaaaaaatga

SEQ ID NO: 202580 - DNA, 949 bp, Unknown
  Bacterial polypeptide expressing nucleotide sequence isolated from the Sargasso Sea
tatgtatagaaaagcaattattttaggaattaagggaactaaactcaccaatgatgaaaaactcatacttaaacatggaaaaccatggggaattatattattttcaagaaatatttcaaatcttacccaattatcttctttaataaaggatataaaatttataattaaagataaaaattatcctatcattattgacgaagaaggtggtaaggtttctagacttaaaaaaatcatcgatttaagtttattcagtcaaaattattttgcaaacatttataaaaaagataaaaaaaacttctatcatatttataaaatatatatagatactgtttcaaatatttttaataaagttggaatcaatataaatacggtcccagttttagatatttatagaagctcaagtcacagtataattggaaataggtccttttctaatgaccctaaaatagttaccgaaatgggcaatcattgcattgccttatttaggaaaaataagatagctacagtaatgaagcatattcctggacacggtatggcaaaatcagacagtcattataaaacttctataataacatcaaataaaaaggaccttattaataaagactttaagccttttaaaaattgccgaacttttttcgctatgacagctcatttgatttataaatctttcgatgaaaaatatacggcaactcattcatcgattattattaatgaagttataagaaatactatcggttttaagggaattctcatatccgatgatatttcaatgaaggcattaaaatttagtttaaaggaaaatgcaattaaagctctagactcaggatgcaatctagtattgcattgtaatggaaatactggggaaatgagaaagttattaaaaatagtaccaacaatagacaaatttacacaaaaaaaaacatcacttttttataattttttaggatag

SEQ ID NO: 202581 - DNA, 478 bp, Unknown; identical to SEQ ID NO: 202511
  Bacterial polypeptide expressing nucleotide sequence isolated from the Sargasso Sea

SEQ ID NO: 202582 - DNA, 1012 bp, Unknown
  Bacterial polypeptide expressing nucleotide sequence isolated from the Sargasso Sea
tatgaaaaaagtacttaaccttggggtaatcggaatagatcatggtcatattttcgatatgctagatgaaatgattaaagaaggttgtagctgtaattatttttggacagatggggatcctttaactcttcaagaatttaataaaaaatatccaaatattaaaagaaaagaaaataaagaggaaatattaaatgactcatctattgatatgattttaatatcttcaatccctatagatagagctggtcattcaatagatgcattaaaagctgggaaagatgttatggtagataaaccaggatgtactaccttaaatcagttaaataatttgaaaaatactgttaaaaaaactggaaagatctggtctataaatttttctgaaagatttcatgttgctgcagttgctaaagctgaagaattagtaaatgaaggcaaaattggaaaagtaaaacaaacgattggtacaggtccgcataggcaaggtaactatgaaagacctgattggttttataatcgtcaaagctatggaggaattattaccgatattggttctcaccaaattcatcaatttttagtttttacaaactcaaatcaggcaaaaatcaatcatgcattagtagaaaacaccacaaagaaagatatgcctggttttcaagattttggtgaagttaaccttactggtaatggcgggcatggttatattcgcctagattggtttactccagatgctcttccaacctggggagatggaagattgttaatccttggagacaaaggttttatcgaaataagaaaatatacagacttagcaaaatcagaaaaaggtaatcatttatttttagcaaataatgatgaggtgaagcatattgattgttctaatgttaaactaccctactttagtaatttaattaatgatgttttaaacagaacagaaactgcatgtcctcaagaaattacttacctttcaatggaactttctattaaagctcaagagcaagctgaaaaaaaatga

SEQ ID NO: 202583 - DNA, 781 bp, Unknown
  Bacterial polypeptide expressing nucleotide sequence isolated from the Sargasso Sea
tttgaatataaagataaataaaaatacaaaaacgcctaaaatagaagctgctctttttgatctagacggaactttactaaattcaaaagaacagattcctgtatctattcaaaataaaatcaaagagatttctaaaattattcctgtttcaataatttcagggagaatattttcttcagttttggaatattctgagcaactaggtttaatttctcctcaaatttctgataacggagcaataatttttgatccaaagttagataataaaattatttttagaaaatctttagatagtgatattgcttataaagtttttgagttattagataaaaataagtttgagtatttttctagtgctgaaggtagaactatgaataacaccatgagtaataaaacatcttcaaatgtaaacattattacatgtttttatgaggatgctagaccctatttggaatcatctgatttcattgatacttctaaaatatctcttgttcattcttcaggtagtatggaagaggaatacattagttttatgccaaaagatgtgaacaaaggagtagcattgaaaaaatattcaagattacttggtatagatcaatcaaagatttttgcaattggagatggaatgaatgatttagaaatgcttgaagaagcaggtatttcggttgcgatgggcaattccgtaaaagaagtatttgaagttagtaagtatgcaacaaataaatatgaagataatggaactgaaattgtactagattggataattagaggtttatcttag

SEQ ID NO: 202584 - DNA, 670 bp, Unknown
  Bacterial polypeptide expressing nucleotide sequence isolated from the Sargasso Sea
catgaaagaaaaggataccatcatttttgatcttgatggcacgcttgtagacagcgctccagacctgcacgcatgtgcgaatcgacttttgaaaagatatcaccaacccacaatttcacttaagcaaagtcaaaaatttattggggacggtgttcgacaattcgttaaattggcctggcttcaatcaaatagggagatggatgaaagccaattaacaaagttacaagatgaatttttgctagattatcaaaatcaaccagcacaactgagtgaaacttatccaggagtacgtgaaactttagatcagctctcgcattttggatacaaaatggcagtctgcaccaataaacctcaaatcgcagctgaaactcttctaaaaaatcttggtttaagagactatttttcgcaaatagccggcggagatttctatagtgtgaaaaaaccgaacaagttacacttgttaaacttattaaacgatctgggaaaatccacatcctcagcagtcatgattggtgacaatgagcacgatgccgatacttcaaaagctgcagagacaatgtttattatgtgcacctacggttatgcccgcattcctctgaaagatattcactttgattttaaaatagacaagtttagtgaactgctcaccctagaagtgtttagaagataa

SEQ ID NO: 202585 - DNA, 1264 bp, Unknown
  Bacterial polypeptide expressing nucleotide sequence isolated from the Sargasso Sea
cggtattaacgcgcggtttgatggtaaaatattctacgataatattatagcatttaactgccctccgggggtgtcctgttatgatggacacgctggaaacgattattatatgccaacaaacgctcctattttagctgctgcagatggatatgttgtctggtctgctttttcccctggagctgatccgtgtcccggcggaatatctcctaatggagatttaggtcttattattatttatcactataatgattactttacctgttatcttcatttaagcccgccgctaaatgttgctgttggggaaaccgttgccgctggtgatactattggatttaatggaatgaccgggtgcgcaacgtctcctcatttacactttgaagttcgaaaggaaaactatttttttgatcaacaattaccgtgggttgttgacccttatggttggtggggaaactatgaagatccaattattagtttgcgcggacatgaaagcgtatggctttggaaatctgattggatcgttgatgatggagaccttgggtttcaacgatttcatggggcaaactgggcctatagaaatacgggatacaatgatgattcatggactgctccagctgctaacgatgaagatgatagttttcattatgcaatatggacgcctgagcttgctggaagcggggaatataatattgatgtgtatattccaaatatttccaatttagttactgctgcacaatatgaaatcattataaaagacagcgccgggataaacacaaaaaatattgtaacggtcgaccaaacaataaattcaaatagtttttctaccattgcgaccgttgatcttcaggcaggttcaaactgtgctgtaatactaagagatatagtagactctacatcaacagggttgtatgtgtcttttgatgctgtccgttttgtaaacactcaacaggtcggaataggcggtgaagataatcagtccatgacacccaaccgtatagttgtatacccatcctacccaaaccctttcaattctagcaccacaattctctacgaagtgctacaagaaaacatggtggaggtgtctatatttgatatatcgggtaatcatgtttatacgctgacaaatgagttgaagtctcctggaaaatattctgttctgtggggtggtgaaggcaacaacaaccaggtcgttccatccgggttatattattgtgtcgttacagcaaacgggtttcgtgatacccaaaagattgtgttgttaaaataa

SEQ ID NO: 202586 - DNA, 673 bp, Unknown
  Bacterial polypeptide expressing nucleotide sequence isolated from the Sargasso Sea
aatgcaagaaattaataccttttttttcgatttagacggaaccttggtagattctgttcctgatttggcaacagcgttaaaccaaacattaaacgactaccaattaccaacgtataacgagcagacaattagacactgggttggaaatggtgctcgtgttctggtggaacgcggattgagcggcaacgcaaagatcagacaccattacacatcaaacgagattgatgccgctttagaaaaatttctgttctattaccgaacgctagaaactaaaagtacagtgctgtacgacggcgtgttctcaacacttcacgcgctaaaagaacaagggttcacgctagcattaatcactaataaaccttcggaatttattgagcctatcctttcatcgttctcaatattctcgttgttttcgcttaccattggcggtgatagtttaccggaaaaaaagccttcttcccttccccttctgcacgcctgtgaaaagcttggtgtttcgccctcacagtgtgtaatggttggagattctaaaaatgacattgttgccgctaaagccgcgaacataaagagtatagggcttacctacgggtataactatggtgagagcatcgcaaaatataaacctaactgggttttcgacgactttgaagagatattaacgttcgcttcttaa

SEQ ID NO: 202587 - DNA, 1012 bp, Unknown
  Bacterial polypeptide expressing nucleotide sequence isolated from the Sargasso Sea
tatgactaaaactataaatcttggagtattgggtatagatcatggtcatatcttcgacatgcttgatgagatgcttaaagagggatgtagttgtaattatttttggacaaaagggtctccgttaactttagatgaatttagtaaaaaatatcctaaaattaaaagagtagataataaaagtgatattttaaatgatgatacaattgatattattttaatttcatcaattcccaaagatagagcaaatctatctatggacgcaatgaaagctggaaaagatgtaatggttgacaagccaggatgtacaacgctcgagcaacttaataatctaaaacaaatagttaaggagacaggaaaaatttggtcaattaatttttcagaaagatttcatgtagcagctgttgcaaaagcagaagaactagttgctgaaggtaaaattggtaaagtaaaacaaacaattggcactggtccacataggcaaggtaattatgaaagacctaattggttttatgatcgtaatagttatggtggaataataacagatataggctcacatcaaattcaccaatttttagtatttacaaattcaagtgaagctaaaataaatcattcgttagttgaaaatacgactaaaaaagattttgctggttttcaagattttggggaagttaatcttactggaaatggtggtcatggatatgttcgtttagattggtttactcctgatgcactttctacttggggagatggaaggttatttatcctgggtgataaaggttttattgaaattagaaaatacacagatttagcaaaatctgaaaaaggaaatcagttatatttagcaaataatgacgaagttaaacatattgactgttcaaatgtaaaactcccctactttgctaatttaattcaagatgttttgaatagaactgatactgcttgttcgcaagaacttacttacttatcaatggaactagcaattaaagctcaagaattagcagaaaaaaaatga

SEQ ID NO: 202588 - DNA, 1106 bp, Unknown
  Bacterial polypeptide expressing nucleotide sequence isolated from the Sargasso Sea
ttataacctcggcatcaaagagttgcgcagcctgctgggtgacaaagcgatgttgacgctgatcgtctttgccttcacgatttcggtttattcttccgcgaccgtcctgccgggttcgctgcatctggcgccgattgctattgccgatatggaccagtcgcagttgtcgaaccggattgtgaacagcttttatcgcccatggtttttaccgccggagatgatcaccgctgatgagatggatgccggactggacgccgggcgctacaccttcgccgtgaacattccacctgattttcagcgtgatgtgctggccgggcgacagccggatatacaggttaacgtcgatgccacgcggatgagccaggcctttaccggcaacagctatatccagaatatcatcagcggcgaggtgaacagctttgtggcgcgttaccgtgacaatagtgagccgccggtggcgttggaaatgcgtatgcgctttaaccctaatctggaacctgcccgctttggcgcggtgatggcgattatcaacaacatcaccatgctggcgatcgtgcttaccgggtcggcgctaattcgcgagcgcgagcacgggaccatagaacatctgctggtgatgccggtgacgccgtttgagatcatgatggcaaaaatctggtcgatgggtctggtggtgctggtggtttccggtctgtcgctgatgctgatggtaaaaggcgtgctcggcgtaccgattgaaggttcgataccactgtttatgctgggcgtggcgctgagcctgttcgccaccacctcgatcggcatttttatgggcacgctggcgcgctctatgccgcaactggggttactgatgattctggtactgctgccgctacagatgctctctggtggttctacaccgcgtgaaagcatgccgcaggcggtgcaggacataatgctgactatgccaactacccattttgtcagcctcgcgcaggcgatactttaccgcggcgcagggtttggcatcgtctggccgcagttcctgacgctgttggcgattggcagcgcgttcttcctgatagcgctgctgcgctttagaaagacgattggcacgatggcgtaat

SEQ ID NO: 202589 - DNA, 1612 bp, Unknown
  Bacterial polypeptide expressing nucleotide sequence isolated from the Sargasso Sea
atgctttctcgacgttatctggcaatgtggtgcgcagtcattctgctcgcagcctgtgcggcgctcgccgcggcgcatcacatttcgtggttctggatcatcgtgccggtggcgctcgtcgcgctgggcctgttcgatctgacgcagcaacgccacgcgattctgcgcaactatccgctgtggggccacttccgctttctgttcgaattcatccgcccggaaatccgccagtatttcgtcgaggacgacaccgacgagaaaccgttctctcgcgcgcaacgcagcatcgtgtatcagcgtgcgaagaacgacgtcgatagccgcccgtacggcaccgaactcgatgtcaaagccgtcgcacacgaatggatcagccactcgctcgcgccgaccacgatcgccagccacgatttccgtatcgtcgtcgggcccgaccgggcgcagccttattcgatgtcgatcttcaacgtctccgcgatgagcttcggttcgttgtcggcgaacgcgatcatggcgctgaacctcggcgcgaagaaaggcaatttcgcgcacgacacgggcgaaggctcgatgtcgaaataccaccgcgagcatggcggcgacatcatctgggaaatcgcttcgggttacttcggctgccgcaacgacgacggcaccttcagcgcggagaagttcgcgaagcaggccgccgagccgcaagtgaagatgatcgaagtgaagctctcgcaaggtgcgaagcccggtcacggcggcgtgctgccggccgccaagatcacacccgagatcgcggaaacgcgcggcgtgccgatgggccgcgattgcatctcgcccgccacccactccgaattctcatcgccgcgcagcctgctcgaattcgtcgaccgcttgcgcacactgtccggtggcaagccgaccggcttcaagctgtgcatcgggcatccgtgggaattcttcggcattgcgaaagcgatgctggaaacgggcattctgccggacttcatcgtggtcgacggcgcggaaggcggcacgggtgcggcgccgctggaattcaccgaccacgtcggcgtaccgttgcaggaaggcttgctgctggtccacaacacgctggtcggcatcggtttgcgtcagcgcatccgcatcggcgcgagcggcaagatgatcacggcgttcgacatcacgaagacgctggcgatcggcgcggattgggtcaacgcggcgcgtggcttcatgttcgcggtcggttgtattcaggcgcagacctgccacaccggccgctgcccgacgggcgtcgcgacgcaagacccggtgcgccaacgtgcgctggtcgtgccggacaaggccgatcgcgtgttcaacttccatcacaacacgctgcatgcgctgaaggaaatcattcaggcggcggggctcaagcatccggcggaactgcgcgcgcatcacatcgtgcggcgcgtgtcgtcgcatgaggtgcagttgatgtccgagctgctgaagtatctcgatccgaacgatctgctgaacggcaactatcgctacacgctgtatgaaaaatactggcccatggcgcaaagcgattcgtttgcgccgaaggttgaattggccgcgacgtagg

SEQ ID NO: 202590 - DNA, 1455 bp, Unknown
  Bacterial polypeptide expressing nucleotide sequence isolated from the Sargasso Sea
tttgcttaatgctgtaactgccattgttttaattattattacattctcaatcctcggtggcattatatcttcatttacagaagacgattcaatagatagcaatgggaaaatcttatggtttaagccaacaggcgttgttgttgactctgttgtaaactcagcaccatcatttgattcccttttattgggagatacttcgactgagcaacatgaattaaaagatcttttaaaagtcttgaatagtgcagctgaagatgagtctttagcagctgtttatgtaaatgtatccgaattaggaatgtactatgcttctgcttttgaaattgcaaatgctgttaaaaatataagagataatggtaaaagagttatcgcttatgcagaaaactttggcaatcaagcatatttaattagttctcaagctgacacagtaatggtaaatgaatatggctcagtttctgcttttggttttgcaagaaaaagagagttctataaagacttatatgaaaatataaatttaaattttaatgtttttgttgctggtgattttaagagtgggccagagccctatacaagaaattcaatgtctgaagaggataaattagcatggaatgaatttgctaatcctctatggcttaagatgacgcagatgatggaatctggaagaaatttgaatgatggtactattcaagattatggagataaattatgggaaatgtctatagacaatcctgaaattgctcaaattgctttagagcttggtatggtagatatggttgtatcaagagaagatctaaggcattggatgtataaacagtttccaaatgaaaataatgataagaacgaactacctgattcaatttcgatatacgaatatctatctcttgtagatgaagaacaaaatagttctgaaaataaaattgcaattgtgaatgttgagggcacgattgtaactggagaggcttcctataatgtcgcagggtcagatacgattgtaaagaatataagaaatgcaattaaagatacttctgtaaaagcattagtactaagagttaatagcccaggtggagatgtatgggcaagtgaactaattacaaatgccttagatgaatttaaatcatctggcagaccaatagtaacttcgatgggagatatagctgcatctggaggagtttgggttactactttatcagatgagatatgggcaaaaaatgaaacaataactggctcaattggtgtttatggaataatacctactcttgatggtatttatgagtgggctggaattcaagttgatggcgttacttctacaaaagctggcgaatgggatgaaagacttccaatgcctgaatacgttaccacagcaattcaagcaggtattgatcatacttacaataaatttgtttcaaaagttgcagaaaatagaatggttcctgataaagaaatattatcaatcgc

SEQ ID NO: 202591 - DNA, 1270 bp, Unknown
  Bacterial polypeptide expressing nucleotide sequence isolated from the Sargasso Sea
ttggacgctatatcgacaagcgcactcctcattttcttgctggtgcttattctcatctcagcctacttttcgggctcagaaaccgccatgatgacccttaaccgttatcgcttaagacatctcgcctccaacggtcacaaaggggcgcagcgtgcactgcaacttctcgatcgtccagataagctgattggtgtgatcctcatcggcaacaacctcgttaatatcctagcggcccaggtcgctaccattataggcatgcgtttatacggcgagatgggcttagccattgccactggtgtattaaccctgttagtactggtctttgccgaagtgacccccaaaaccttggcagcgctgcaccctgaacctatcgccttcccctccagttttttactgcgctggttactcgtgattctgtcgccattagtgcgcatcatgaacatcatcacctcatccttgttgcgcctgattggggtgcattcggtcaagactaatgaggccctcagccaagaggagcttcgcaccgtagtgcatgaggctggcgcccttattccccgccaccaggaaatgctgttatcgattctcgatttagaaaaagtcaccgtcgaagacattatggtgccgcgctcggatatttacgcgattaacgtcaacgatgactttaagtttatcaatcgccaagtgatccaaagcccacatactcgagtgttggtttaccgcgataccattgacgatgctgttggttttattcatctgcgtgacgcactgcgcctacaatcaaaagagcagttcagtaaatcctcattgctgcgcgccgtcaaagagctctactttattcctgaaggcacaccactcaatgtgcaattagccaattttcagcacaacaaagaacgtattggcctcgtcgtggatgaatacggtgacatccaaggactggtaacactcgaagatatcctcgaagagattgtcggcgacttcactacctcaatgttaccaaccgcgagtgaagagattaaccaacaacaggatgggagttatttgattgatgccagtatcaccatccgagacttgaacaaagagatgaaatgggatttcccaaccgatggtcctaaaaccctcaatggcctgattttagagtatttggaggacatcccctccgaaaacacgagcctacgccttgctggctacccgctagaagtcattgaagtcgctgacaatatggtcaaaacagtgcgaattatcccacagcattatcaaccaccccgctaac

SEQ ID NO: 202592 - DNA, 682 bp, Unknown
  Bacterial polypeptide expressing nucleotide sequence isolated from the Sargasso Sea
atgaattatttacagcaagaacggctggacgccttaagtgttaactatgtgttggggggcatgaggggaaaagccagacaaagatttcagcggctattgatgcaacagcagcaggcacgtgagtcagtatggcgctgggaacaacatctgaatccactggcagagtccctgactgcggtagaacctgatgagagtctatggcaaaaactgcaacaacgcctcggctggcaaaaagcagatgtggtgcaactcaagcctaaaggtagttggttgcatccggcaaattgggtggctgtggccgctgctgccagcctggctctggtgttattgctgccacctctggctacagcaccagtggagctggctgtgatccaaaccaaagaggcaaaagcattgtggttagtttcaaaacaaggtgacacagtggtactgcaagccagtgctgctgtgcttgccgatcctgcgcatgattatgaactctggatgctaccgacctctggtcagtcccctatctcgttgggattattgccacaaagcggcaaagttagttatccatggccaaaagctgctacaggtttagtggtagctgtccttgcggttagtttagaacctaaaggcggctcacctacaggacagccgaccggagctgtgctgcataccagcgaattgatgacactctaat

SEQ ID NO: 202593 - DNA, 4360 bp, Unknown
  Bacterial polypeptide expressing nucleotide sequence isolated from the Sargasso Sea
tttgaaagcagtttggcacagaggtgctgttgatgcagatggtaaaacgggtgatggagccggaatacatgttgaaattccgaaagacttttttatagaaaaaatacaagttaccggacacgattatgataattctgaaatctgtgtaggaatgatttttttacctagaaatgactactcagcgcaagagagttgtaaaacaatagttgagagtgaactaactaaaaataattttagtatatatggttggcgacaagtgccagtaaattcaaaagttttaggggaaaaagctcttcaaaccatgccagaaattatacaagttctttttaaacctaatgatccaaatttattagataagaacttagagagaaaaatttatgaaataagaaagagaattgaaaataaagcttttgatgcctcattgaataatttttatatttgttcaatcagttcaaaatctataatttataaagggctatatttagcagagtctatatctgacttttatttagatcttagagattcaagatttatttcaagatatgcaatttttcatcaaagattttcaacaaacaccgcaccgagctggagtttagctcaaccatttagggccatagcgcacaatggtgagataaatacttataaaggtaataaaaactggatgaaagttcacgaacaagaaatgagtagcccacttttcgaggacatagaaaatttaaaaccagtaatccaaaaaggtgtctctgactctgcagctttagataatgtatttgaattattaaataaatcaggccaatctgcaccattagctaaattaatgctagtaccggatgcatggtcaaaaaaaaataagacattatcaaaaagtcatcagcaattatttaattttttaaatagcacaatggaaccatgggatggacctgctgctattgctgctacagacaatgaatgggttatagctgcaaatgatagaaatggtcttagacctttgagatatgcaattacaaaagataaaatggtcttcgcaggctcagaaacaggaatgattgatttaaatgaaaaaaaaattttaactaagggaagacttggtcctggagaaattatcggggttagaattgaaaaaggtaaagttttttctaatagtcaaataaaagattatttggctaaagaatttaaacacttcaattctcaaataattgatctagatgaaaaattatcaatttccaatgaaaaacataattttgatggcgaaagcttaaggagaagacaatatactttcggaataagtttagaggatctagaacttatcttacatccaatggcagaagatgcaaaagaagcaacaggttccatgggtgatgatacccctttagcagtgttatctgataagtatagaccactttaccatttttttagacaaaattttagccaagtaactaatccaccaattgactctttaagagaaaataaagtgatgagtttaaaaactagatttggaaatttaggtaacattcttgattttgatactttaactaaagagaatatttatgttttaaatagtcctattctatcaaattcacaatttaataagttcactaatttttttggtaaaaattcagtaactattgattgttcattttcacaagatgacaatttagaaaattctattaacaggatccaaaaagaatctgaaattgcagtaagacaaggtattacccaattgattttaagtgacaaaaatctctcatctgagagattgccaatgccaatgttattatgtgttggagccataaacacatttttaatacaaaaaaaattaagaggttatgtttctataaatgttcagtctggagaggctatagatactcattcgtttgcaacattaattggagttggagcaactacagtaaatccatatctggctttcgatagtttatatcaaagatatgaaaaaaaactttttggccaatttagttttgatgagtgtgtacaacgctacattaattcagttaatgcaggtttattgaagataatgtcaaaaatggggatttcagttttaagttcttacagaggtggatgtaattttgagacagtaggattgagtagaacagttgtaaatgaatactttcctggagttacctcgaaaatttcaggcattggtttagttggaattgaaaaaaaaataagagaaattcataaagaagcatttgaaagtacagaaactatattgccaattggaggtatttatagatataggaaaaacggagaaacacatcaatatcaaggaaagctaattcatttattacaaagtgctgtaggctcaaattcatatgaagcatataaaaaatatgctgatggtatatataatttaccaccaataaatttgagggatctagttgattttagaaaaaaaaaattgggcccatcaattaacttatcagaagttgaaccaatagaaaaaatattaaaaagatttggtagtggaagcatgtcccacggtgctttatctaaagaagcgcatgaaacacttgctattggaatgaatagaattaaaggagcttcttgtagtggtgaaggtggagaagatgcagaaagatttaaagtgatggatagtggtgatagtgcaaattctagagttaaacaaattgcatctgctagatttggtgtgactgtaaattacttgaataattgtaatgaaatagaaattaaaatggcacaaggcgctaaaccaggggaaggcggtcagttacctggctttaaagtaacaaaggaaattgcaagactacgacattccacaccaggagtaacactaatttctccacctccacaccacgatatttactcgatagaagatttggcacaactgatttatgatttgaagcaaacaaatccaaaagcacgagttggcgttaagttagtcgcatcatcaggaatcggaaccatcgctgcaggtgtagctaaagcgaaagcagatattattttaatttcgggtcataatggaggaacaggcgcaactcctcaaacaagtgtcaaatatgttggaataccttgggagatgggtctcactgaggcaaatcaggttttaacattaaacaatttaagacacaaagttacattgagaactgatggtggtattaaaactggaagagatgttgttattgctgcaatgatgggagcagaagaatatggagttgctacaacagctctagtggcaatgggatgtataatggtaagacagtgccactcaaatacttgtccagtaggtgtttgtacacaagatgaaaaattaagagaaaaatttaccggtactccagacaaggttgtaaatttattcacttttattgcatctgaagtaagagaaattttagctgaattaggttttaaatcattaaatgatattattggaagaactgatttattaatgcaagttaataaagcttcaccaaatttagatgatttggatttaaatccattatttgttcaggcagacccaggaaataataaaagatactgcgagtcattggagatcaataaagtaccagaaacattagatcaggaaatttggccagaaatagaaaaatctttagataattcagaaaaagttgagaaagaatttattatcaaaaatacaaacagggcagttggtacaagaatttcacatcatctttacaaaaagtatggttacgaaaaacttgatgaaaattttcttacattaaatttcaaaggctctgcgggtcagtcatttggtgctttttcatcaaaaggactaaaattaaatcttaaaggtgatgcaaatgattatgtcggcaagggattgtcaggcgctacaatctcgataaaactttcggatgaaagtaatttaatctctaatgaaaatacaatcatcggaaatacagttctgtatggagctacttcaggtaaactttttgctgcgggtcaagcaggtgatagatttgctgtaagaaattctggtgcaactacagttattgagggttgtgactcaaatggttgtgagtatatgactggaggaacagtggtcattttaggaaatgtcggtgacaactttgcagctggcatgaccggaggtatggcatttatctatgataaatctaatgagtttgaaaaaaaagtaaatccagattcagttgtttggcaaaatgttgagacagattattggacaagttatttaaaagaattaattttagaacattcaaaggagacaggatcgttgatatcaaaaaatatttttgaaaattttgaagttgaaattaaaaattttgttcaggtttgtccaaaagagatgattaataaacttaaaaatccaattacatttaagtctaagattaaagaagttagttaa

SEQ ID NO: 202594 - DNA, 369 bp, Unknown
  Bacterial polypeptide expressing nucleotide sequence isolated from the Sargasso Sea
catgaaagcgtatacgtattcttctgttgcacttgcagtcacgatttctcttctagctggatgtggaggcggctctggctcgtctaatacccctcctgtggtgacaacgcctaccacgccaacgacacctgtaacaacagagccagaatgggaagcgggggtgtatgaaccgcaatctcaatatctagcgaaatgtgagactcctagaagcggtattgatccttttactaatagggcatacccagatacacaaggtaccgccatggatgaaaagctgtggctacgtacttggactaatgacacttacttgtggtacgacaaagtagatgacaatgaccctgcaaatttctcagtgttgggatattttga

SEQ ID NO: 202595 - DNA, 1099 bp, Unknown
  Bacterial polypeptide expressing nucleotide sequence isolated from the Sargasso Sea
gatgaacgtgatgaatattaaacggatcgctgcagctatctcctgcagtttaatgacggttgtagcccacgctgcagtcttacccgcaacccaaactgacagtcagtggtttaaagacagtgcagccaatgttgcggctaaagcgcaggttgaaactaagaaaacagctaaaaacgtgattctttttgtcggcgacggcatgagtatttcaaccttaactgccgcccgaattctgcaaggacagcagcaaacgggtaatcaaggcggtgaagaaaacttcttaagtttcgagcagtttcctcacacggcgttagtgaaaacctataacactaaccagcaaacgcccgactccgcaggtaccatgaccgccatggcgactggggtgaaaaccaaagccggtatcatctcgatttctgacaccagtttacgtggtaactgtttgtcttcgaaaggtaatgaactcgtttctctggtcgaccttgccaatgctaaaggcttatcgactgggattgtcacgaccgcccgtttaactcatgccactcctgcggcagcttacgctaaatcaccagagcgtgattgggaaggcgattttaacctgcctgccgaagccgttgcgaatggctgtaccgatatcgccagccaactggtgatgcgagatgaagccaactcactcagcgtggcactgggtggcggtcgcagctacttcttaccaaaagaagtcactgacggtgagaacaaagccggtaaacgtaaagacggcaaagacctgactaaagcgtgggtcgaaaacttcagcaaagcggcttacgtgtgggacaaaaaaggcttcgatgctatcgatgccgccaataccgatcacttacttggtctctttaacccatcccatatggaatacgaagcagaccgcgccgatgacgttggtggtgagccatcactttcagaaatgaccgcgaaatccctcgagattttaaagaaaaacgataagggcttcctgctgatcgtggaatcgggtcgtatcgaccatggacaccatgcgggcaacgctagccgcgccttgaccgatgcggttgagttatctaacgccgtgaaagccgcagtg

SEQ ID NO: 202596 - DNA, 1570 bp, Unknown
  Bacterial polypeptide expressing nucleotide sequence isolated from the Sargasso Sea
tgttggttatcaagcattagatgcagttacaacaggaactaataatactgctgttggttatcaatcattaagtgcatgtacaggtgatagtaatactgctgtgggtcggttgtcactggaacaatgcataactggagatcataatactgctgttggtcggtatgcaatcggagcattaacaacaggaaataaaaatgtagcaataggtgattatgcattagatgcagtcacaacaggaaattattgtgttgctcttggttatcaggcattaagtgcaaacaccgcaagtaataacgttgctgttggtaatgatgcattattattaaacacaacaggtcaggatgttgttgctgttggtattaatgcactggatgcaaacacaacaggttctcagaatactgctttaggttcttttgcattaagtgcaaacacaactgcagattataatactgctgttggtgctcaagcaatggaagcaagctcaacaggtgcacagaatgttgctgttggttatcaagcactacatgatcttacaactggtagttataatgttgctcttggtatgtatgcaaatgagaacggtactacatgtaatggtgcaattgctattggtcatggtgcattaaaaaatcctacagatggaagttatgcagttgctattggttttgaagcaatgaagtctactaccacaggaacaaataatacaatggttggttatagagttggacataataatacaacaggaggaaataatacaggtcttggacatggtgctttatatagcattactgaagcatcttataatactgctatagggcaaaatgcttgttcttcaatcacagatggaggtgcaaataacactgctgttggtgctggtgctttaacatacgttactgatggtgataataacgttgctgttggttatgatgcattaaaagcagacacaacaggttctaataatactgctgttggtaaagatactttacttgtaaacacaacaggagagagaaatgttgctgttggtttatttgcaggtaaagctgttacaacaggtaataataatgctttcattggttataatactggtactgcttcttctccttctggaaatattacaactgaaagtaattatgtagtcttaggtgatgataatattgctaatcttatgtgtgctgatacatcaattagttcttctgatgcaagagataagacagatatagaagactttaatcatggattatcatggattaataaactaagacctgttacttatagatgggataaacgttcttggtataatgatgaccctaatactcctctagatgagagtgttcgtgatggaagtaagaaaacatctcctcttcatataggttttcttgcacaagaacatttagaagttgagaaagctcatggatttggtgatggtcgagataatatgcttattactaatttgactgaagatggggaaaggtatggtcttaaatatgaaagattagttcctgtccttgtcaatgcaatcaaggaactctctgctgaagtagagcaacttaaatcccaaataaataactag

SEQ ID NO: 202597 - DNA, 2473 bp, Unknown
  Bacterial polypeptide expressing nucleotide sequence isolated from the Sargasso Sea
aatgccagtattacagcctgtatttcgcttatcacttattgcactcgcctgcctcagtgctttaccacacacagcctacgccgatgacacaccttcagctcgcgatgaaaacgtcgaacgcataacggtatacggcagacaaaactctgtggtgaaaaactcaggacttgcgactaagtcagatatgtccttaatggaaacccctgcggcggttgttatcgttgaccaggagctgattaacagccaaggagtcgacaatctgcaagacttgattcgcaatatcagcggggtgactcaagcaggcaataactacggcattggggataacttggttattcgcggtcttggcgcaaactatacctatgacggcatgtatggcggtgccggccttggcaacacctttaaccccactcgctccctaaccaatgtggaatccgttgaggttttaaaggggccagcgactggactttacggcatgggcagcgcgggcggcgtgatcaacctgattgaaaagaaaccgcaatttgagtccaaacacaaaatcaccactgaagttggccagtgggatacctactctttcgccatcgacagtacgagtggaatcacagatgatcttgcttatcgtttagtcgccaaaaccgcccgcagtgaaggctaccgagatttaggcgccgaccgtgatgaagtgttcggctcactcaagtgggtattaagtgatagccaagatctgatgctatcaggcgcgtatatcaaagacgccattgccgttgactccatcggccatccaatccgtatctacaatgccgattctgtcggcggtaaaaccgctggcgaagtcacttggcaagatttgataaacgatcctaatggtcaaggcatacaactgaccgacgagcagcgtcagcaattggcggcgtcactcgctagcggtgatggcttaactccttattccttcggtgacgcgggattaatttctcccatggcaaaggataatgaaggtgaagaattaagattcaagctgacccacaatatctactttaccgataatctgttcctcaaccagcagttgcaatatcgcgactacaccacaggttttgcccgccaaacaggggcttacaactatgtgtattggaagcgtaaaatcaagattggtggcgtaccgactgatgtgattaacgaagatccccgcgcgccactggttgaaaatggtgtgctctatccctttgccgccagacgtcaggaataccgccagctcgatgccgaagaaacctcgtggcagtattttgccgatctacgttacgacttccaaatcggcaatatcgacaacgaattgctggtgaatgctaactacgaagaccgcgatattcgcctcgagcaattctcgatttacgatgcagaccaagtcattaaaaacaaacaaggcgaagtgatttaccgtgggtcgctgccatacatttaccatatccgcaatccaaactggggaacgggtaaatttgccgactacgatccgctcaaaaccgccaactacaataaaaaagtcagcgcttggggcttaggcgtgcaacatgtgggttatttaggttatggctttaccacccgtgtgggcgtggcctttaacgaaatcaaacagagctatgagcacttaggtgtggatgagcgctacagcgcgagtcaagccagccccactcctgaggaagatagcaaagataacggtgtgacctacaacttgggcttaacctatatgcccattgacgatttatcgtttttcgtcaatcactcaaagggccgcaccgcctatagcatcttaggctcaatcacaggggaaaataccgaccgcgaagactcagaatccgtcagtaacgatctcggtatgcgctttaaagcctttgatgatcaaatgttggcctcactggtgttctttaaaagctcacgcacaaatgtgccttacaccaacccagactataacgctggtgtgtcaggtgccgaggtgccggtgtacttttacgatggcagcgaagatacccaaggggtcgagttggatctcaatgcccatctaaacgataactggcgcatcaatcttaacggcatgtatcaggatgcgagggataaacaaaacccgaatgacaaagccaactacgacagccgtcaaaaaggtgtgccctatgtgacagccagtgcttgggtaacctatggtgcagactggtttgccttatcaagccctattgagctgagtttaggtgccaagtatgtggatgatagaagcacacactcaagctcatttggtatccctgatggttatgtgccgagctacaccttagtggattctgccatcagctatgccaccgactcctggaagttacaattgaatatcaacaacctattcaataaagactattacagtaaggccatgttcctcggtggtatgccgggcgaagagcgtaatgtgaagctgcaatatagctacagtttctaa

SEQ ID NO: 202598 - DNA, 1801 bp, Unknown
  Bacterial polypeptide expressing nucleotide sequence isolated from the Sargasso Sea
actggttcaggtaattcgggttttggatatgactcacttcaagcgaacacagcaggagattacaatactgcagttggttaccaagctctaaatgggaatattacaggaagcaataacactgcttttggttataaatctattttctctaatcaaacggcatcaggtttaaccgcaattggttatcaggccctctactccaatacaacgggtgattacaacaccgctgtcggttaccaagctctcaatgccaacaccacaggcaaggaaaataccgccacgggttacctagcactttattccaatacgacaggagaatacaacactgccatgggttatcaaacactctataccaacacctctggcggatacaatacagcttttggacagagagcgctcaataaaaatgaaactggaaactataacactgcagttggtatgtatgctttgtatgaaaatcagaccggctctaacaattctgctattggccagttagctatgagactaaataccactggcagttataacaatgcttttggtaaatattctctttactctaataccatagggatctcaaacaatgcagtcggttataaatcgctttactcaaacacagaaggaaattacaacactgctgttggccatttctctctatacagcaataccacggctgaaaaaaatactgccattggatataaatctctttataccaattcgaccggagagtttaatactgcaagcggttatgaatcactctacaagaacaccagcggaaaggacaatactgcttcgggttatcaagccatgtattccaacaccacaggttcttacaacaccgcttcgggtgttctagccctcagtgcaaacaccaccggcaattacaacactgctactggacttgaagcgctctactccaacaccaccggtgatagcaacaccgcctcaggtcttcaagtcctccactccaacaccaccggtgatagcaacactgcctcaggtgttcaagctcttttcagcaacaccacaggatctcaaaacactgctactggtgttaaagctctttacagcaacaccacaggagattacaacaccgcctcgggttacagggctctttataaaaacaccaccggcatcaggaacaccgcctcgggttatcaagcgctttactccaataccactggcaaggaaaatacctcctcgggttacagggctctttataaaaataccaccggcatcaggaacaccgcctcgggttatgtctctctctactcgaataccaccggaaaatataacactgcctcgggttacagggctctttataagaacaccaccggtagttataacaatgcccttggttcgaatgtcctttataacaacaccactggtgattctaacaatgcgatgggttataaagccctttacagcaacaccactggagattacaacaccgcgagtggacattttgccctctacaagaacaccaccggagattacaataccgcttctggttcatactctctctactccaacaccaccggttattacaacaccgcttcgggttatcgagccctttatagcaatactacaggagttagaaacagtgctatgggtttagatgctctctactccaacactacaggatctcaaaacactgctataggtatgagtgctctctactccaacaccacaggttcttacaataccgcttcgggttattacgctctttataaaaacaccacaggttttaaaaacactgctttgggtcagctagccctcggtttgaacaccaccggttcttacaata

SEQ ID NO: 202599 - DNA, 586 bp, Unknown
  Bacterial polypeptide expressing nucleotide sequence isolated from the Sargasso Sea
tatgtcaaaaaccacccctaaaggatcacacttggaagcgctactcgcctcaacctttacggttgccatcgccgaaattggcgataaaactcaactgcttgccctattactcgctgcaagatttaaaaataaaaccgcgattatcttggggattttactctcaaccctgtttaaccattttgccgctgcttggcttggccaatgggcgattaactgggtaagcccagatgtagcacgctacttggttgccgcctccttctttgcgattgcgctatgggtgttaatccccgataaagtagacgccgaagaaagccgtttctataagatggggccttttatcgcgacctttattctgttctttattgccgaaatgggcgacaaaacccagatcgcgactgtcgtattagccgctaaatacgatgccttagccatggtggttgcaggtaccactttgggtatgttgctggcgaacgtcccagtggttattgcagggcattttagtgccgaaaaactaccgatgaagtggatccatagaggttgtgcgattttattcgccctattaggtgtcgcaacgctagtgctttaa

SEQ ID NO: 202600 - DNA, 886 bp, Unknown
  Bacterial polypeptide expressing nucleotide sequence isolated from the Sargasso Sea
atgaatgaatttattataacttttagagagtgcttagaagcttcattaattattggaattatttacaccattttagataaaaataatttaatagctgaaaaaaaagttctttggtatggcgttgctgcatctattggcgcaagtgcaattgttggagtccttcttacatcaataaatgatagagtgggtaatacttcttacgaaaaactttttgaagctattttcatgtatataactgctggtattctattttatgtaattttttggttagcaaaacatgttagtgatcgaaaagaaatagaaaaatcagtcaaagaagctatagctggttcaggttttgcgcttttccttttggttttcttttcaattttaagggaaggttttgaaacagctttatttcttattgccagtgtaacgaataccggaagtttctcttatttaggtttttcgataggtgcaatattagctattttcatcggctatgcagttgtagtgcagggaaagaaggtaaatctaagatcattttttaaggctacaactttattgctagttttatttgcttctggaatgattgcgtatggaacacatgaatttgaatcctacttagttaaaaatgaaacaattgataaaaataatgtgccgagagtttggaatatccttcagccaaaatcttcattggataataatgaaaatgaaatattttatacctatgatgaatccaaaggaaaatattaccatttgctacatgataaagggaatgttggtgtattcatgaagggtttctttgggtacaacagtgatccaaattatgtagaacttatactgtggattctttcaatgttatttgggattaggatgtggtcgtcattttatagggctagttgaa

SEQ ID NO: 202601 - DNA, 619 bp, Unknown
  Bacterial polypeptide expressing nucleotide sequence isolated from the Sargasso Sea
gttgattgcgcttgtgggtcccccgaattcgggcaagaccacactgttcaatcgcttgacgggactaagacagaaggtcgcgaactatccgggtgtgactgtcgagaagcacctcggcatggtgaaccttgacgatgggcgccaagtgtcacttgtcgacttaccgggagtccacggtttctcggcacgcaccttagacgaacgcgttacccgggacgttttagaggggaaaatcgaaggcatgcgttcccctgacgcattgattctgatcgtggatgttacccggctcgaagcgcagctaatgctcgttgagccagttttagatatggatcttccaacgctactcgtgctcaatatggttgatgagcttgaggcccgcggtggatcgatcgaccaagaggctctagcggaacgcttgggcgtcgatgtagtgcgaactagtgcgaggaccggaagaggggtggaggaggtcctagcctatctgcgcgacctagctgacggagacacctcagttgagaacatcgagcgagagttatctaatttcgccggctctcagcctctgcctgtaatcgatgccttcgctgcgcgtcggaggctggttcgcagtgtagttcaggat

SEQ ID NO: 202602 - DNA, 1459 bp, Unknown
  Bacterial polypeptide expressing nucleotide sequence isolated from the Sargasso Sea
cgaaatggcgccggcaagtcgaccctgatgagcatcatctacggtttctaccacgtcgacaaaggcgagatgttcatcgacggcaacccgttcaaaccccatggctcacaagatgcgattgccgcaggcgtgggcatggtgcaccagcacttcatgctggtgaacaacttcacggttttggaaaacgtcattctcggcgcggaaaacggctggcacctgggcaagagcctggcggcggccgaaaagctgctgggcgagctggcacgggactatggtctcgaagtgccgctgcacgagaaggtcgaggatctgccggtaggcctgcaacagcgggtcgagatcctcaaggcgctctatcgcggcgcccgcatcctgatcctggacgagccgaccggggtactgaccccgcaagaggcggatcacctgttcgaggtgctaaagaagctgcgcgatcagggcgccaccatcatcctcatcacccacaagctgcgcgagatcctggccatcacggatcaggtctccatcatgcgccggggtgaaatggtggcccacgtcgccaccaaggataccgacaaggagcagctggccgaactgatggtgggccgcaaggtgcgcctcaaggtcgacaaggggccaacccagccgggcgacgccaagctcaaggtcgatggcctcagctatgtggacgatgccaaggtggagcgggtcaaatccgtcagcttcgaggtgcgggccggtgaagtggtcggcatcgccggcgtttccggcaacggccagtccgagctgctcagcttgctcggcggcatcctcaagcccagcaagggcagcttcaccatcaccggcggcggtcaggcccacgaggtgagcgtgagccacccggccgacccggagcgggtgcgcaacttcggtctcggccacgtgccggaagacagacacaagatgggtctcatcaaccgcttcgaggcgaaagaggccttcatcctcggctatcaccgccgtccccagtacaacaagggctggctgcagaacaaagaggcgatcctgcaggattgccaggccaagatggacaagtgggacgtgcgcccgccccatcccgagcacaagaccgccaacttctccggcggcaaccagcagaagctggtgatcgcccgggaagtggagcaggacccggatgtgctgctgatcggccagccgacccgcggggtcgacatcggtgccatcgagtatatccaccagcagatcatcgccatgcgcgacaagggcaaagccgtgctgctggtatcggtggagctggacgagatcatgagcctctctgaccgcatcctggtcatcgccgacggtcgcatcgtcggtgagctggatgccgccaaggcggatgaacgcaccatcggtctgatgatggcgaacatagttcctgacgaggtggcggccagccaatcacaaggagccacatcatgaa

SEQ ID NO: 202603 - DNA, 437 bp, Unknown
  Bacterial polypeptide expressing nucleotide sequence isolated from the Sargasso Sea
attgtacattcaattaagaaatcaattaattccatcaaaaaatactttattatataagcccatctacataattcttttttacctattacttttttctgaagttatattttctcaaattaactcaagatatgatacattcgattggattgtctatagaaaacccggtattatcaaatcgtttaccgaagggatttcatatgtttatattgctacagaaactgcaggtatatttcgatactctctatacggaaatcaatttgaatatccaataactcgcgcacaaggtttatcgagtaatagtactactgcgatccattttgataaaaaaactgggattttatgggttgcaacagataagactatagattatagttttaatgcggaaggaaattggatttcaagaagtttagataactataatttgctatcaggagtat

SEQ ID NO: 202604 - DNA, 1033 bp, Unknown
  Bacterial polypeptide expressing nucleotide sequence isolated from the Sargasso Sea
tatgcatatcacacacaacacttttgttaatacaattgacaacgtgagatttgtacgtgatggtaataacgctcactttaccaataatctttatgtgaattctatgtcacagggtcaaaccagaaacgctggaaatacctccatcgctctgaatagcccaggtggacatggtaaaatgaccaccaaataccagtgggaatgtgcagacagcaccatgctcgcgaatggtacttgctgggataacaatgccagaaacattcactttgagaataacgcttggtatgatacacaggagctacttgacctgatggcctggaatggtgatgatggttggtgctgggcccttcaaggcgcagacggaactgactcaacagatgccgatggtaacgttgtacagctatgtgatacaatgttagcagtatctgcccaaagcagatggatggatgactctaccactgctcagatggctaacggtgtttctgagaccaataacatccacgctgatgatctaggctgggccttagatcctgcgtatatcaacgctcagatactaagaagtaaagactggcttgataatggaaagcatgacacatacacgactcatttctggatgcatcaggctgataactcacacatacttgtagagtggccacttcctatggactttagctactccacaacgtctgctgcttacactcatgcctctggtggtttccctgttggaaacttgaatgtattcccagataaaaaagctgagtggctagcacagttatcaacagatactgaaggtagcacgctgaacccaactgagtttacactatctcagaattatccaaatccattcaacccatctactgagatatcctttacactttatcaatcagataatgtagagctatcgatctacaacatgcttggtcaaaaagtaagaacacttaccaatgagatcaagaatgctggaactcatactctcaagtggaatggtcttgacgaaatgaggacaaagcgtatcaacaggtatctatctatatag

SEQ ID NO: 202605 - DNA, 1597 bp, Unknown
  Bacterial polypeptide expressing nucleotide sequence isolated from the Sargasso Sea
gcgagcgtcatgtgttgttttagatggcgatcttaactatgttgggaatgctattgatacagtaggtcatatcaatcgtacattagaggtgacagacaatggtgaagatatgctgattggttccacatggaacggacatggattcactcactggaacagtacagttcctggcgttatccaacatacatttgtagacacatttggtgtttttgatgaggtgcctggatgttggtatcccatcggtagtgctatgggtgctgactcagcctacgtagcatggtgcgatgattatgctgatactacttttggaacaactgctttgtgggtaagctcattggatttttctccagatcaaagtgaattacttgtaggtgctttgaccgctggttggggtggccctttaggtggtacaaactgggtatttgagatggaagaccttacatttcctgttgaccttgtcggtaattggcatgactgggaagacactggcgaaggagtgaccgatggtcctcgtggtgccgcctgggatgctgatggcaatatctatctcgctgatttttatagcaatggtatctttcactacgcgtatagcgctgatgatgatgatgatatggaagaaccatacacttatagttctaccctattagattttggtgatacccttggaggtgttgttcaaggttctgatggagcctggcagaattcccctcatggtgttgtcgttgcgcctgatggtcatgtctgggtcaatgtctatggtggacatggtcgtatggagatcttggcaagtggtgacacggttcactataaagggatctacgtattagaccctgcaacaggtcaacatgcagatttttcaccaattgagatcttgacatttcctgatggaacatcagactcactgaccgctgagagtgcaagctcaggtggtggtcgtggtatcgagatcgatcatgatggtaatattttaagttcacattacaagactctatacaagatcaattacatgaccggtgaaggtatggccatgtgggttggcgaaagctcacttacagaagcagtatctgatgccaatggtaatatctttgttagttatgttcttgctggcgagcgtccatgtgttgttttagatggcgatcttaactatgttgggaatgctattgatacagtaggtcatatcaatcgtgcattagaggtgacagacaatggtgaggatatgtatatcggttccacatggaacgggcatggtgttactcactggaacagtacagttcctggcgttatccaacattcatttgtagacacatttggtgtttttgatgaggtgcctggatgttggtatcccatcggtagtgctatgggtgctgactcagcctacgtagcatggtgtgatgattatgctgatactacttttggaactactgctttgtgggtaagctcattggatttttctccagatcaaagcgaattacttgtaggtgctttgaccgctggttggggtggccctttaggtggtacaaactgggtatttgagatggaagacctgacatttcctgttgaccttgtcggtaattggcatgactgggaagacactggc

SEQ ID NO: 202606 - DNA, 1921 bp, Unknown
  Bacterial polypeptide expressing nucleotide sequence isolated from the Sargasso Sea
atttctctttcaaattataaagaaattgaatcatctgaagagatcatgcctagcgaaaggatagatcatacttttgtatatgaaagactggatgcaacaataggagatggctcattccgattaaaaacgatggttagtggtaatcaagtttctgaaataaaacattatataaaaatacccgaaactttcacaaggcgctttgaagaaatgcgttcagcaaataatacaattgcttctactgccagcatggcaatgttcttattatatggatttggtggagttattattggtctttttttaatgatgagaaaacgatgggtagtctggaaacaagcaatactatggggaacttttgttgcagtgtttggcgcattaggtgaaattaatttttggcctttaatgtggatgtattatccaactgcattatcacaacaaagtttttttattcaaaatactttttcaatggtagcaaatacattgctaatgagcatcatttattcattatcatttatggcagcagaaactctaacaagaagagcattcccgcaacaaatcaacttttggaaattatggtccaaaggtgcatcaaattccatccaggtactagggcgtacggttggcggatatctcatagttgggtttgatcttgcctttgtcataactttttatcttctaacaaagaaaatgtttggatggtgggatcccgcatcaactttatttgatcctgatgtgattgcaacccctttcccttggatatcatcagttagcagggcgttaggtgctggattttgggaagaatgccttttccgagctgttccaatagctggcgctgcacttattggcgatcgattaggtcgaagaaagcaatggataattattggatttgtgattcaatcgttgatttttgcagcagctcatgcaaattacccttcatatccagcatatgctcgattagttgaactgattattccatcgattatttttggtttgctatatttacaatttggactattaccagctattatttctcactttatctataatgctttgttaatgtctataccaatattttcatctacggcgccaggtatatggtttgatcaattaatggtgtttgttttgtgtcttattccggtctggatattaataattggaagaattaaagaaaaaaactgggttgaacttgataataaattctacaatagttcatttaaagctcttccattaagaaaggctagatcaagaaaaagctctattaagatatcaaaatacagttctaataataaaaaaattatgattgcatttggtgtgttaggaattgttttattaatactattcaagacagatatcaatgctcctggtctagaattaaatcgaaataaagcaataactattgcagagaaatatttatcagataatggaattgaattaggtgatgaatggaataggttgatttctgttaatccttctggcccaggaaaacaaaatagatttgtttggcaaactactgatgaagaaatatataattttttaatgggtgattatattgacacaccggggttttctgtacgatttgcaaaatttgatggggatttaaatgaaagagctgaagaatatattgttgatttaaattataaaggaattcctaagcgtataaatcacaagattccagaaaatcaaaaggggtcagaattaatcgaagaagaagcaaggcaacttgcattaaatacaattcttaaacattacaatttatcagagagtgttttagaattgatttctgctgaaccatctaaaatgcctgcaagaaccgattgggagtttgtatttaaagatattgctccaaataaaatttatgatggagataagcggttacgtgtaataattaatggagataatattaagactcatgaaaagtttattt

SEQ ID NO: 202607 - DNA, 2107 bp, Unknown
  Bacterial polypeptide expressing nucleotide sequence isolated from the Sargasso Sea
atgataggacttacctccttccagctttttccaatatttgatcaacacccagcacctccaggaagtccgtggtttagaaatgatgatgtcatgtgggatctggtttccgtagactctctgacagagtattatggcacaatagcaaatctggttgagctatttgcctcaggccccttccctctttaccagggcaagacagagagaatctccatggcagagatacactcatatgacccacttgaaggtcttaattcatcaagccatgttgcacctgccttatttaagctaaagtccattgtacaaataatatatgaaaaagactatcgattcgcacagcctccaaaaacccctaccctctcagcatctgccggagatgggtttgtcatgctatcctgggatgatgatgcggacaagctaacaagagacccttttctagggaatgtgaatgattttgaggggtataaactatttaggtctaccgataaatatttttctgatgcagaggtaattacagatggatatggaactcctatgtttctaaaaccgatataccagtgtgaccttgtagatgaataccagggatttactgattatggcttggtaaatggtaccgcttataacctcggagacaacacaggtataaaacactatttcagagatgaaaatgtccaaaatggcagaacatattattacgcaatcgtggcatatgattatggggcccctgaaattggaccaggaatttctccatcagagaataacacagtgatcgatattgatgaatatgataatatacgaggcatagggaaaaacattgctatcgttaccccacaagcagacccagctgggtatgtgaacccggagatattgttagactctctaaataatagaatgtatggatctggtacaattgttcctgaaatatcatccaaagaacagataaggccaggcaatgaataccacgtaaccttcaactttgacactgtatttaatgatcttaatcgacctttgttttacaccaaccccgggtttaaggtactaaataaatcaaccaatcaagaagtgtactatgaaagtcctgtatatgatatcacagggcaaccaaattttagcgggtcgaatcttctatataatgaggaagatctctattggtatatgaacccagttgtcatttctgacgtatttgatggtatccagctgaatattaaccagccgcatacaataccaaccttagactctgcaaataccggttggattggcactagctctggtgatatgaatattacaattacgacgcgagaatcaaaaatagtcccctgggactgtgagatcgttttcacctcagatatgagctatacatctcaggtagaaggcccgttcggtatctatgatgaatttgataatcgtctgtggtttccaaatagaataatcctagggcagtccttccctttttatgtggtaaataaaactattttagatgaaaatgggaattacacactaatggaccttgtcgtacaggactatgctggcccagactgggaattggaccaagagtttaatctcagcaatgacagggtccttgttggtgaattagactcattaaacggatggaaagggacatcttttattatagattttataaatgtagataatgatttttatccacagcctggatcaaggtattccatcagttggaatagaaatttttggagcacagacacattcaaatttgttgtagatagcataaatactgtatctgctgaaaaccttaaaaatgacctagataatatcagagttgttccaaacccgtatgttggtaccaatgcaatggaacaagcggttattaatccatttctgaatcaaccaagaaagataatgttcgcgaacgtgccatcaaattgtgtaatcacaatttttaccccaagcggtgtaaaagttaaaacaataaacaaaaatgattcttccggtggaatggtacactgggaccttctaaatgaagaggggcttgagattgctgctggaatgtatctatatcacgttcagccacactttgctgataaatcactgaacaaatatgaacatgttggaaaatttgcggtaattaaatgaa

SEQ ID NO: 202608 - DNA, 271 bp, Unknown
  Bacterial polypeptide expressing nucleotide sequence isolated from the Sargasso Sea
aaaggagcatgtattacaggttcattacatatgacagttcaaacagcaatgttaatcaaaaccttagttaagttaggtgcaaaagtaagatgggcaagttgtaatgtattttcaacgcaagatcatgcagcagcagcaattgctgatgaaggaattcccgtatatgctattaaaggagaatccttggaagattattggaattttactgataaaatattagattggggaaacggcaagggtcctaatttaatcttagatgatggcgggtgac

SEQ ID NO: 202609 - DNA, 793 bp, Unknown
  Bacterial polypeptide expressing nucleotide sequence isolated from the Sargasso Sea
ccgggggcggttgtgaagaattatgaccgccaacagcagcagcaggccagcgcccgccgcgccgccgagcagcgtgaaaagcaggctcagcagcaggcggaagagctacgtgaaaaacaggccgccgagcaggaacggctgaaacagctggaacaggatcgtctacaggcgcaggaagcggctaaagaggcgaaagaacagcagaaacaggcggaagaagccgcggcgaaagccgccgcagcggccaaagccaaagcggacgcacaggcgaaagaggcgcaggaagctgccgccaaagccgccgctgatgcaaaagcgaaggccgatgcgcaggcgaaagcagccgaagccgctgcggcgaaagcggcggcggatgcgaagaaacaggcggaagcagaagccgcgaaagcggccgcggacgcgcagaagaaagccgaagcggatgcagcgaagaaagctcagcaggacgctgagaagaaagcgcagcagcaggcagagaaaaaagcgcagcaggaagcggcgaaacaggccgctgctgaaaaagctgccgccgaaaaagcggcagaaaaagccgccgcgcagaaagccgctgctgagaaagcggcagccgagaaagccgccgcagcggaaaaagccgccgccgagaaagccgcggcagccaaagctgcagcagcagagaaggccgccgcagacaaagcggcgaaagccgccgccgctaaggcagcagccgccaagaaagccgctgcggccaaagaggcaaacggcgttgacgatctgctcggcgacctgagct

SEQ ID NO: 202610 - DNA, 553 bp, Unknown
  Bacterial polypeptide expressing nucleotide sequence isolated from the Sargasso Sea
ttgatccaacacatcaatgctcttcaaatgaaaatagacatcaatgcaggcaacattacaagtaatgcagctgccatttcaagcaacgatggtgatattgccaacaatgcagccgacattgcaagcaacgatgatggtattgccaacaatgcggccgacattgcaagaaacgatgatggtattgccaaaaatgcggccgacattgcaagcaacgatgatggtattgccaataatgtggccaacattgcaagcaacgatgatggtattgccaacaatgtggccaacattgcaagcaatgatgatggtattgccaacaatgtggccaagattgcaagcaacaaagatggtattgccgacaatgcggccaacattgcaagcaacgatgatggtattgccaagaatgtggccaacattgcaagcaaccatgatgctattgccaacaatatggccaacatcgttgcaagcaacaattatgttattgccaagaatgcagcaagcaatgatgatggtattgccaacaacaattcaggcaatatgtttgcaccagacatag

SEQ ID NO: 202611 - DNA, 613 bp, Unknown
  Bacterial polypeptide expressing nucleotide sequence isolated from the Sargasso Sea
attgggcgaagactccggatatccgtcggattgtcagatatccggcggagactccggatatccgtcggattgtcagatatctggcggagactccggatatccgtcggatagtcggatatccggcggagactccggatatccgtcggagtgtcagatatccggcggagactccggatatccgtcggattgtcagatatccggcggagactccggatttccgtcggattgtcagatatccggcggagactccggatatccgtcggattgtcggatatccggcggagactccggatatccgtccgattgtcagatacccggcggagactccggatatccgtcggattgtcagatatccggcggaggctccgaatatccgtcggattgtcagatatccggcggagactccggatatccgtcggattgtcagatatccggcggagactccggatatccgtcggattgtcggatatccggcggagactctggatatccgtcggattgtaggatatccggcggagactccggaaatccgtcggattgtcggatatccggcggagactccggatatccgtcggattgtcagatatccggcggagactccggatatccgtag

SEQ ID NO: 202612 - DNA, 931 bp, Unknown
  Bacterial polypeptide expressing nucleotide sequence isolated from the Sargasso Sea
aaagaaaccgattccatcgatgatgatgatacaactcttgatgaagaagaaccagaagattcacctaaaccatcggattcaattgaagagaccggattagaaacatcatctgctgtcaatcaatcactcgaccttgttccgattgacacatcaaaagacacatcaaaagacacatcaaaagacacatcaaaagacacatcaaaagacacatcaaaagacacatcaaaagacacatcaaaagacacatcaaaagacacatctaaggacgtaattgatgaagtattagacaagttgtctcaacagaataatgaaaatactggtccgaaacatgatgtatcaaatccagtatcaaatctttcttcagaatccgattcgacccatttcccttctttatcagatgatccaagtgaatctcaagtgaaagaaaacacagcaaatattgtggttcatgacataactttacctgtggatgttgaaacaggtgattctcaattggccttacccccacctcaacccgcaaaagaaccagtatatgacaatgcgaatccgataaaagatgatacaaaagacacagtatctacagaaaaagctgagaaaatgaaaaccttgctaaccttagcatctgatgtcaaaggaaaacccgatataagtgttgtaaaaaaagaagaaatacaatctccaactagctcaatcccatcattttcacttactggactctatcctcaaatgaaaacagaaactcctacaactcctacaactcctacaactcctacaactcctacaactcctacaactcccgtgacaagtactacaaaccccccgagcactacaaatcctgtgacaagtactacaaatcatgtgacaaatcctgtgacaaatcctgtgacaaatcctgtgacgacgagtactacaaatcctggacaagcactac

SEQ ID NO: 202613 - DNA, 835 bp, Unknown
  Bacterial polypeptide expressing nucleotide sequence isolated from the Sargasso Sea
agtcataccaggcattccaccagcagccggatcacccattccaggcattccaggtccagtcataccaggcattccaccagcagccggatcacccattccaggcattccaggtccagtcataccaggcattccaccagcagccggatcacccattccaggcattccaccagcagctggatcacccataccaggcattccaccagcagctggatcacccataccaggcattccaccagcagctggatcacccataccaggcattccaccagcagccggatcacccattccaggcattccaggtccagtcataccaggcattccacctgtagctggatcacccattccaggcatcccaggtccagtcataccaggcattccaccagcagctggatcacccattccaggcattccaggtccagtcataccaggcattccacctgtagccggatctgtaggcgcaggtgcgccaccagcagctccaggcattggtgccatctgcattcctgcagcggcattatttggatcaaattcaaagtttttcggaccaaagtccattcctctatcagctatatctgatgaggctgcgtcaactaaattatcaaacattcctccaccgaaaggatcacccattccaggtgctccacccattggatccccaaatggatcactcgcgaacggatcagcaaaaggatcagcaaatccaaatgtatccataggcattggaggctcaaatggagcagtcataggtccagtcataggagccatagctccaggtcccataggtcctggcattccaccaggtccaggtattccagggtcaccatccattccaaac

SEQ ID NO: 202614 - DNA, 675 bp, Unknown
  Bacterial polypeptide expressing nucleotide sequence isolated from the Sargasso Sea
tctgtatgcacagtccagtgagataggagttttatatcaatttaaaagttcttcaggattagtatggaagacttttggacaagataaagttcagcctaaatatgaaggtgaggtctccaatgggtctcctgatgggtttggtgttttatcgtacccgttttcttatggtaaaagtgtggtaggtgaatggaaaattggtaaggagtggttcacagagcattacaacaaagaaggaactcttcttggaaagtatattaaaggggagtggatactgaagtggggtgttttgtttcatcacagtaaaaaaggcggtatagaagggtggtatgagattggagatgaaaaaaaggatagaaaatatattggtgatataacaaatcttcaaccaaatggtcagggaacagagacttcacctgaaggagaaaaatatgaaggtgaatggaaggatggtaaaaaggagggtcaaggaaaattcattcaagttgatggttcaaagtatgtaggtgaatggataaatggagaaaggaatggttatggaaccctcacttcaactaacggcacaaagtatgtaggcaaatggaaagatggggaaaaaaacggtcagggaatttttacttcatctggcggttcaaggtatgtaggtgaatggataaatggagaaaggaatggttatgg

SEQ ID NO: 202615 - DNA, 802 bp, Unknown
  Bacterial polypeptide expressing nucleotide sequence isolated from the Sargasso Sea
agtgataatctttcggttagtacttttactattgatactaccggaccaacgctgagtgaggtcacggcaataactactccatcgagtgataattcatctagttacacattttcctcagacgattcaggaaccatcacatatgggggaagttgcagcagttcaacttcttctgcctcttcgggcaacaatactataacctttaatgctctggcagacggatcatacagcgactgcaccattatagttactgacaatgcaagtaatgcaagcaacaccttaacggtaagtacttttgtaatcgatacaacaggtccaactctgaacgaggtcacggctgtatcaaccccaagtgataccagtacacctagttatacattttactcaaacgaggcagggaccatcacatatggaggaagctgcagcagttcaacttcttctgcctctgcttcaaacaatgccataacttttacagccttggatgatggcacatacgacaactgcacaattgcagttactgattcttcaggcaatacaagtgacaacctttcggtaacctcatttactatcgctgtaccccctgtgcttgcagaggtgacagcagtttcaactcccaccagtgacaacactccggattatactttcagttctaacgagtcaggaacaatcagctatggaggggcctgcggcagttcatcttcatcttcagctatatccggaaacaacacagtcaccctgacacagtcagacaactccaccgcattagatgatggcacatacgacaactgcaccattgcagttactg

SEQ ID NO: 202616 - DNA, 563 bp, Unknown
  Bacterial polypeptide expressing nucleotide sequence isolated from the Sargasso Sea
aaacaccattcgccccagccgccactgcggcgcgtgccaggacgggcgcatactctccattcccgctggacttatcgccgtcaccaccgggcatctgcaccgaatgcgtggcatcgaaaaccaccggccagccaaactcccgcatgatcggcatggaacgcatgtcagacaccagattgttgtagccgaaggtcgtcccgcggtcggttacaaacaacatcttccctccagccgcttcggccttcttcaccacttgccccatttcctgtggcgaaaggaattggccttttttcaaatttacaatcaccgaggtgcgcgcggccacctcgatcaaatctgtttggcgacagagaaacgccggaatctggatcacgtccaccacctccgctgcagcgcgtgcctgcgcttcgtcatgaatatccgtcaataccggcacattcactttttcgcggacggttttcaaaatttgcagccccttttccaatcccggcccccggcgacttttaccggaagtccggttcgccttatcatagctggccttaaaaatataggttacccctagc

SEQ ID NO: 202617 - DNA, 1243 bp, Unknown
  Bacterial polypeptide expressing nucleotide sequence isolated from the Sargasso Sea
ttggaagaatgtgcgtatgaagctgaaggtgtctgggtgacatttcgggtagacatgtcctatgaaatcattaacgaagaagatggtgtacatatcgctggttctttccagggatgggatcctgctttaacggtaatgtctgatgaagatgatgatatggtttatgaactgatgtatgatattcttgaacctgctggaacaacgattgagtacaaatttgttaatggaaatgcctggggagatgatgaaggaatagcggcgaatcgttctcttgttgtccctagcgaagacactgtattaacagtagtatgttttggaagttttcaaccatgtcctgatcctccagattccgttacggttacctttgtagtcgatatgagcaatgaagaagtttcagcaaatggggttcatattgctggttccatgcaaggatgggatcctgctgcaagtgaaatgacggatgcagatggcgatggcaagtatgaaattgaattccagcttgctacaggaacatcagttgcatataagtttgtcaatggaaatgcctggggcagtgaagaaactgtaccagacgattgtgtaacagatggaaatcgtacgttagacgttccaaattttgatagaccatatgaagtctgctatggtagttgtgaggcatgtcctgctcctgctgtttatgcagatgtagttcttactgttgttgatgaaggtaatggatttgaagatgttgaatttaaaggggaattctcagcatgggatttggtacaagcgtatgatgatggaacaaatggtgatgagacagcagatgatggtgtatggacagcagtaattgaaaatgttcttggccctgaaacttacgaatggggcgctattgaaaatgatggttctgaatggggaatttggttattagatattataggtttaccaaaccaagagtttactgtgggagaagatggaactgttagtggatcaaccagtatgactattccagatcaagggtctctgattacgaaaacagttgtattctctgttgacatgacagaatggcttgatgaagatggcgcaacaggaatgcctgtatttagcgttgctcgtggtgataccatgcaggttcgtggaggttttaatggctggaactgtgatgatccaacagattgtgtgctaactcgaacacctggaacaaatatattcagccttgctgttgcagtagaaggttatattgataacgataacgaatacaaat

SEQ ID NO: 202618 - DNA, 2473 bp, Unknown
  Bacterial polypeptide expressing nucleotide sequence isolated from the Sargasso Sea
atgattttgcctacgcaggcttatgaattgaagctggcgccgcatccggcgcctttctcgatcctgaagttcaccgggatggaccgcgtgagccagctttatcgatacgagatcgaattcacaagcccggcggcggggattccgatggaccaggtgctggggcggccggcaaagttcattgctgatccggtcgatccggacatgaattacctgcggaagatgttcggagagaatgcggcgcagttcagtgcaaaaccgatggcctatacggttcacggtgtcatcacgcagttcggcgagcttgagacgtcggcggacgagacgcgctaccgggtcgtgctggaaccgacgctggcggatctcgatcgtggcgtgaccagccggctgtttcagaagcagtcggtcgaggagatcgtgaccgacacgctgcggcattacgggtatcgcgcgggtgtcgattttcagtttcagttgcgtgggcagtacaagcgtcgggagtacgtgacgcagtatcacgagacgacgttcgccttcattcagcgcatttgtgcggaagaggggatctggtttcgctgggagcagaagaaggatcgcgcggtggtcgtgttcggcgacgatctggatgcgtatgcgcgcaagcagcgcacggtgccatatcggcgtgactcggggctcgaaagtgttggcgccgatgcgatcaaggcgctcgggcgagagatgaagcgtgtgccggaggccgtgcggttgcatgactacaaccatcggcaggccggggtatcgctgctggtcgaggaaaacacggcgcgcgacgacaagacgacgaatgccgtcgattaccactggggcgagcattacgagacgcccgaagaggggaagcgggttgctcggttgaggcatgaagcgtatctggccgagcagattacattcaaggggacgggcaatccgttctggctcgaagcgggcgaggtgatgcgggtcgagcccaatccggtcgacgcgaagcacggggttttcgttacgttggtcgagtcgcacggcgggcggaacgagtcgtaccagttgtcgttcgaggggattccgtcggatcgtgtgtggcgcacgtcggtggcttcggtttcgcggccggtggtcgacgggattctgccggcgcggattacgtcgccgggcaactacaagtatgcgtatctgaccgaacagggctggtacgtgatcaagctgccgttcgatctcgatgaatggagcccgggtgggacgagccggccggtgcggtttgcgaagccctatagcggtgacaactacgggcatcactttccgttgattgatggggcggaggtggccattgtctttaccgacggccatccagacaggcccgtgatgattggggccatgcatgacagcctgcatccggacctcgtcaacaacctgaaccatacccgcaacattgttcgcaccgcagcccagaacgaaatgcggatggaggacaaggaaggcgtcgagcacattcatctgacgacgccgttccagaccagcgagctcaaccttggccacatggtcgacgagaaccgcaaggaacgtgggcagggagcagaactgcgctcggacggtccagttgcggtgcgaggtaagggtgtatttataacggcgaaggtccaaagtgccgcagatggaaaacaactcgccatggatgatggcgtgtcgcaactgcaaggcgcacatcagctcactcagtcgcttgcctccgcagcggatgccgcaggtgccatcacggccgacgtttccgaacaacaaacgaccagtgctgagctgaaagatctcaattcacccgcagtattcgtcactgctccggcggccatcggtctcgcgacaaacagtggcatacagttggccgcgcgaaacagcatagcggcaacagctggcaaagatctttcggtcagcatactcagacgcctgactgctgctgttggggagtcgatttcgctctttgctcagaagctcggcatcaaactcgttgccaatcgcggtccggtggacattcaggcacaaaacgacgctatgtctttgctctccaaaggggacatgacgatatcaagcgtcggcggaaccacgaaaatccagtccgggcaggcgattgttctcgagtccggtggcgcatttatccgcatagccgacggaaatgtcacgattggcgggcccggtgatcttatcctcaaggtgatcaccatgcagaaacagggcgcgtcgtctctcagcgattcgattcctacgcccccgggtccaagcagtctctacgacgagcagtttacgttggtcgataagaataccggcaagatcatgccgcacacgccttataaaatcgagtcggcctccggtgaaatgatcgaaggtgttagtgatgaattggggcggactgttcgcgtagcttcggccaaagccgagggtctcaaaatcttcaagggaggaattgatgagtaac

SEQ ID NO: 202619 - DNA, 1708 bp, Unknown
  Bacterial polypeptide expressing nucleotide sequence isolated from the Sargasso Sea
cagaggtactgcagtatcaactccaccactgatagcaccccggattataccttctcttcaactgaagctggaataatcagctatggaggggcctgcgggagttcatcctcatcttctgcgatatccggaaacaacacagtcaccctaacacagtctgacaactccaccgcattagatgatggatcatacgacaactgcaccatcgcggtgaccgacaataacagtaacacaagtaacaacctctctgttagttccttcaccattggtgcaagtactcctgcccttacacagatcacggcagttaccacaccaaccagtgataccacacctgattacaccttctattcgactctggctggtacaatcaactacactggaagctgcagcagcagttctaatacttctgcaaccgccgataacaatactgtaacattcaatgctttgagtgaaggaacctactccgactgcaagatcagcgtgaccgccacctccagtggtttgactagcgacaacctctcggtggataacttcactatcgacactactgccccaacattggcagaagtgacagtagtcacaaccccagccaatgactccactccagattatactttttcctcagatgaggcaggaacaatcacatatgggggaagctgcagcagttcagatacttcagcagatgctgataacaatactgtaaccttaaacatcctctcagatggaacttacagcgactgcacaattttagtgactgacaatgcaagcaatgcgagcagttccttgtcggttacctctttcaccatagacacaactgctccaacagtaagtgaggttacagctgtaactacaccatcgaacgataatacatcaagttataccttctcctcaaacgaggcagggacaatctcatatgggggaagctgcagcagttcaacttcttctgcatcttcgggcaacaatgccataactttcaatgccctgccggacggaacttacagcaactgcactattatagttactgacaatgcaagtaatgcaagcaacaccttaacggcaagcacttttattatcgacacgactgctccaactctgagcgaagtcacggcagtatccacaccaacaagcgacactacaccgaattatacattttcctcaaatgaggcaggaaccatcacatatggagggagttgcagcagttcaacttcttccgcatctgcttcagacaatacagtaactttcagcaccctgagtgtgggcagttacagtgactgcaccatcagtgtctcagatagttctagcaatgcaagcaacgccctttcagtaagttctttcactattgaaacaactgcaccgactgtatcttccacatcaccttctgacaaccagagttcggttggagtaagtgacaatatatctgtcactttctcagagtcaatggataacactacggtaacttcgaacacttcaaataccagctgctcggggacacttcaattgtcttcagatgatttcagtagttgttttcagatgtcttcatcatatgcagatagttctgataacattacattttacctagatccgtcattgactttgctatattcaacgacgtacaaaataagaattacgacttcagtctcagacattgcaggcaatactatggcaaatcagtactcacagacgtatggattaccacgactaccacaactcc

SEQ ID NO: 202620 - DNA, 788 bp, Unknown
  Bacterial polypeptide expressing nucleotide sequence isolated from the Sargasso Sea
agaatatcaaaatatattaacattaaattctaatcatgctgtaactatagttggatgtggtgaagtaactcaaggttattataatgaaggaaaccgtgacgataaacatgaagaagaatttccaattggtactaaatattggattataaaaaatagctggggtccaacatggggtgaaccatatgatggaggtgtttttggaactggtggatattttagattaaaaagatattcatctgatgaaaaattaactgatagtaatacatcacctggtccgtcaccggggaatccgaggggttggcgttctacaaatagtttagggagtcatgcttttcaacaagatttatttgattacgtcggtagaaccggaccattaagaattaatttattagcagtttctataactataaggaaaactcttatcccatattcccctttaacgcaatctattggtggatgtactgatataggacaagtatgtgaagttgtaaaagatgatgataagtatggtggagagagttgcagggcttccaccggcaattcttctgattgtaagctcactccgaccgacacttctgcaaatccacccatagttggaaagtgcactacagtagcgaacaatgccacttgcacctacattccggaacactttgaacattattataaaacagggttatgccttagggataatatcgatcaaaataaattaaaatgttatcctcaagaagaactagaagaaggtatagtagaaaaacaaccgtgcacagaaaacagatacgataggcgtc

SEQ ID NO: 202621 - DNA, 367 bp, Unknown
  Bacterial polypeptide expressing nucleotide sequence isolated from the Sargasso Sea
gcaccactagaggaaaagtcttgcaatactaatatacgtgtaacaggatttaaaaagattaaacaaaccgatgatgatttatttaaagcacttcaacaaggacctgtatctgttggaatagatgcaagtggtctacaattttatgatagcgggatttatgaaccatcacaagtagtccatctcgaccatgctgttttactagtaggagctggtataacagacgatggaacaaaatactggattattaaaaattcctgggggacaacatggggagaatgtggatattttagattaaaacgatatcctgactgtataaagtattctcttggtatatgcaggttagcttcacgtccagacgttgagtaat

SEQ ID NO: 202622 - DNA, 434 bp, Unknown
  Bacterial polypeptide expressing nucleotide sequence isolated from the Sargasso Sea
tattgacaatgtatctgagcaatatgaccaatcaaaaactccaaataatatagctctaccattatatggtcgcattgcagctggtcttccaatagaggcattacgcgacgaaactgagacaattgatgtacctcaaagtttgctgtctactggagactattatgctcttgaagtagcaggtgattctatgattgatgctggaatatttgatggtgacattgctataatacaacgtgctgagtccgctgataatggcacaattgtagttgcattaattgatgatacagaggttacattaaagcgtattcggcgaaaaggagagtctattgcgttagaacctgaaaatcctaatcatgaaactcgtatatttggtcctggaagagtcaatgtacaagggcgtattgctggcataattcgtaagtatgattgctagt

SEQ ID NO: 202623 - DNA, 919 bp, Unknown
  Bacterial polypeptide expressing nucleotide sequence isolated from the Sargasso Sea
tgtccagactatacatcaaaaataagggaagaggtttttaaattaaaagctaagccaattgatattgagttagacagatctggatggaatccaattagggacatttcttgttgtctcaaattaatttcaattctgaaaagaataaaagttaattatgttttagcctattattgtaaaccagtaatttatgggttaattgcctcttattttgcaaatattaaaaatagatttgctttgattgaaggtcttggatttgcatttacgaaagatccaaataaattatcttataagagatttatattgaaatttattcttctatttctttataaaatttcactattatttgcgaagaaagttttttttctaaataaagatgatagagaagagtttgtgaaatatagtctagtaagaaaatcgaagactaagattactggtccaataggtttggacctttcaaattggaaatatttaccttatagagagacaggaaaaattatgtttcttttcgtagggagatttcttaaagaaaagggattgtatgaattcgctaattcagcaaaaaaaattaaaacaaattttccccaatgtgaatttataatattaggctcacctgataataatcctggtggaatatcaaatgaaactattaaatcttgggaaagtgagggttttataaaaaatcctggtttttgcgaggtcttaccttggctggaaaagacaagtgtttttgtattgccttcttatagagagggatttccaagaagtactcaagaggctatgatagttggcaggccggttataactacgaatgtaccaggatgtagagaaactgtaatagatggcaaaaatggtttcttagtacctcctggtgacaatattgcattggagagagcaatgatgaaatttattgaggatccaa

SEQ ID NO: 202624 - DNA, 813 bp, Unknown
  Bacterial polypeptide expressing nucleotide sequence isolated from the Sargasso Sea
gaatgggtggactcgctggtgtttccatttgtacagatgaaccgcctaaatttataataatagaatacatgaatggtggtgattctaaaccaaaggttcttgttggtaaggggttgacttttgattctggtggtatttctattaagccagcagcaaaaatggatgaaatgaaatatgatatgtgtggttcagccgttgtattgggcgtgtttaaatcgcttgcacttctgcaacctaaagtaaatgttgttggaataattccctcaacagaaaacctaagtggtgggaaagcatataagccaggtgacgttttaactgcatacaacgggaaaaccattgaagtattaaatacagatgcagagggtcgtgttattctagcggatggattatcgtacgcatccaaacattatgaccctgaatatatccttgattttgccacactcactggagcagttttgattgctttaggtcatattgcaactggaataatgggtacagataatggtttaatggataagataaaaacttcctccaaaactactggtgaaaaagtttgggaattacctttgtggaaagaatactgtaaacaggttgagagtgacatagctgatgtgaaaaatattggtgcaccaatgcaggcgggcacaattgcaggtgctgcatttttaaaagaattcgttggtggaaatataccatgggctcattttgacattgctggaacagcctggggtgttaaacccgacagtacacatcctaagggaagtgcaactggctggggtattcgacttgttttagatatgttggatatttaat

SEQ ID NO: 202625 - DNA, 789 bp, Unknown
  Bacterial polypeptide expressing nucleotide sequence isolated from the Sargasso Sea
aaaaataccacaagttagtagaggaaactcataaagacttcgttaaagctggagcagaagtaattgtaactacgacttttacaactaggaagacaagattaagagataatggcattgaagataagtttaaaagtttaaatataaaagcaggagaaattgcacaaaaagtaaaaaaaaattatccaaatattttaatagctggaggtttgccgcctcaaaattttacatatgaggcagatgaaagatctaaagatgaaatttattcgaattttaaagaacaagcaaaattattaaatccttttattgattttttttattttgatgtactgagcagtattaatgaaatagaaattgcaattgaagctattagtgaatttgaaaaaccatatttaattggagttcatatttcagaaggcagtgaattaccaagtggtgaaaaaatatctgatgttaataaaattaaaaaagataaattacttggaattatattagcttgtgtttctccagaaaattatgagcttaattcagaggaattaaaaaaattgaatgtaccttttggatttaaaattaatggttttttaacaacaaagcctaaaactggttatatgacttcatataaaaaatctaaatctggtaatccaaatgagtttctcggacaaagaagagatttaaatccagagaatttagcaattttagcatcaaaatttaaaaaaaatggagcaacgatattaggtggatgttgcgagataggacctcgacatattttggcgctttctaaaatcaagtaac

SEQ ID NO: 202626 - DNA, 312 bp, Unknown
  Bacterial polypeptide expressing nucleotide sequence isolated from the Sargasso Sea
tgatggcaaacaatgcccaccgtccgtactttatgcatggcctgagccactggctgggactcgatgtccatgatgtcggccactacgatgtcgatcgctcgcgtctccttgagccgggcatggtgttgaccgttgagccgggtctctacattgccgtcgacgccgatgtgccgccacagtatcgcggcattggcgtgcgtattgaagacgatatcgtcatcaccgaagacggcaatgaaaacctcaccgccggcgtggtgaaaaaagctgatgatattgaggcgctgatggcggcggcacggcggtcatgag

SEQ ID NO: 202627 - DNA, 412 bp, Unknown
  Bacterial polypeptide expressing nucleotide sequence isolated from the Sargasso Sea
tagtatcaatactaatgttaatgaaaatgaaaaatatcttccatttcttggcagaattgctgctggtaacccaattgaagctattacaagaagttttgagcagatttcagtacctaattatcttgttaacaataaagacgaacatttcactcttgaagttactggagactcaatgattgatgctggaatttatgatggtgatattgttgtcataagaaaaacagaaattgctaaatctggtgatattgtagtagctttgatagaccaaaatgaagttactctaaaaaggttcagatctttaaaaaattctatagccctagaacccgctaacaacaattataaaattaggttattcggagaggatagagtgaaaattcaaggtaggttggtaggattgataagaaaattctaa

SEQ ID NO: 202628 - DNA, 646 bp, Unknown
  Bacterial polypeptide expressing nucleotide sequence isolated from the Sargasso Sea
gatggatggcgggctagtcgacattggccacgacaaccagcaaggcggtttccatttcgataacgaaagccctcagcagcgcttctggctggagccctacgccatcgccacggctctggtcactaacgcacagatggaggccttcatcgctgatgggggctaccgcaacgccagcctctggatggcggaaggttggggtctagtgcaagagcaaggctgggacgcgcctcgttactggcatccagagggcctggaattcaccttgcgggggatgcaaccgcgactgcctcaggccccggtgcgtcacctcagctggtttgaagccgaggcgcttgcccgctggctagaggccaggctccccagcgaagcggaatgggaatgtgcagccaaggcccatcgaaagcagcaccagtggttcggctccctctggcaatggacctccagcgcctatggcccttatcgcggattccgtcctgcccctggcgcggttggtgaatacaacggcaagttcatgagctcccagatggtcttgcgcggcagcagcttcctgacacccaaaggccatgaacggctgagttatcgcaacttctttgggccgcactgccgctggcaacctgcgggcctgcggttagcacgggatctgtga

SEQ ID NO: 202629 - DNA, 1030 bp, Unknown
  Bacterial polypeptide expressing nucleotide sequence isolated from the Sargasso Sea
ctggccgccgtgcgccaacgcagcatcgccctgattgcaccactggaacctgaggatctggtcttgcaaggaatggccgatgccagccctccgaaatggcatctgggccacaccacctggttctttgaaaccttcgtgctggcgccccatagggcgggatggcaagccatgccggagccctggccaacgctcttcaactcctattacgaagcagccggaccccgtcatcccaggccgcagcgaggcctgctgagccgaccgacgattggtgaagtactgcactggcgcgagcgtgtcgatgctgagctgcagcaatggctccatcacgattcgccggccgatgaggtccttgatttgatcgagttgggcctgcagcacgagcagcagcaccaggagctgctgctcatggacctactcgacgggttccatcgcaatccaatggcaccggcctacagcctcgaggccccagacgctccactgacagaggagcagcaaccatggctcgccatcgatgctgggctggtgacaatcgggcacgacgcccggcagaacgccttccatttcgataacgagtccccgcagcagcgctgctggctcgagccctatgccattgctgcagggctcgtctccaacgcaacaatggaagccttcatcgacgatggcggctaccgcacagccagtctttggatggccgagggctgggccctggcgcaggagcagggttggcaagctcctcgttactggcgccccgatggcctggaattcaccctgaagggacagcagccgcgccaagcgcaggcgccagtgcgtcacctgagctggtttgaagccgatgcattggcgcgctggctggaggcaaggctgcccagcgaggcggagtgggaatgggccgccagaagccacggcgagggacaccagtggttcggctcgctgtggcaatggaccaccagtgcctatgccccttatcgcggcttccgtcctgccgccggggcggtgggtgaatacaacggcaaattcatgagctcccaga

SEQ ID NO: 202630 - DNA, 379 bp, Unknown
  Bacterial polypeptide expressing nucleotide sequence isolated from the Sargasso Sea
acatattgttcatattacaaattattcgggtattatagcgaatagtgaaacacaattagaaaaggctgttcaaatacaacctgtatctgttgcgatccaagcaaatcttcaaacctttcaattatataaatcgggtatatataatgacacaaattgttcagatgaattagatcacggggtattacttgttggatatggatatgataaaaaatataaaatgaaatactggattattaaaaatagctggggggaatcatggggggaacaaggatacatgagaatgattaaagatatagatgatccatcaggtctatgtggtattgcgatggatccaagtatcccaatcattaatcattcattatcctgggttgaaatttga

SEQ ID NO: 202631 - DNA, 863 bp, Unknown
  Bacterial polypeptide expressing nucleotide sequence isolated from the Sargasso Sea
actcacaagttagattacatatctgaccttggagtagatgcgatatggctttcgcctatttttacgtctcccatgaaagacatgggatatgacgtgagtgattataaaaatatagatcctttatttgggaatttagaagattttgatgaattaattgagaaagctagtaaaaaagaacttaaggtaataatagatcaagtcctttcccatagttcagaccagatagctttatttcaagaaagtagaaaaagccaaacttcgtcaaaatctgattggtatgtatgggccgatccaaaagaagatggctctcctcccaataattggttatctatgtttggaggctcggcgtgggaatgggagcctcttagagatcagtattacctgcataactttttacctagtcaaccagatttcaattttcataatttagaggtgcaggattggttgctagattcgtctaaattttggttagaacgcggagtaaaaggcttcagattagataccgttaactactactttcatgataataaattaagagacaatcctcctagtccaattaactttgaacgtccccctactaatctctattacatgcaaaaccagatacactcaatcaaccaaaaagaaaatttaaaatttatagaaaggttcagaaatttgcttgatgaataccctgaaactacttgtgtaggagagattggtgattctcataggggtctagaaataatgagcgaatacacaaaaggcaaaagactacatatggcatatagcttcgaactattaggagataagttctcacctgaacatatgattaaaactttagaaggtttttttaatcttaaagacgattcatggccttgctg

SEQ ID NO: 202632 - DNA, 572 bp, Unknown
  Bacterial polypeptide expressing nucleotide sequence isolated from the Sargasso Sea
aatgtattatagaaacggtggtggaagaagagattttaatattaatccaacaggatccacaaacagtgccagaaaaggttatggaagtgatgaattaggtgatgtacacagaattgctcctatggttaaacttctttggcagttacccactcaaagaaatataatatttgaattgaaggcagcatggcacgatatgaattacaatcaaagttattctggtatatcaacagctgactttaatgcagatccaatgcaacaatatgttgcacttcaatttggggaatacaacactgaacaatttacttactatggaaaagtaagagcagaactcaatagtaacatttcaaatacatttacactttattataattactttacaagagactggtttaaatttgataaggccggtggcgatgctggtgatgagtttaactctaaagcttacactggatctggaaggaatatagctaaaggcctggctacaggtgcggttacgtatgtaaacaatgaccgtcaatatggagcttatggtgttatgaatgaaacagatttctcattcaataccaactttt

SEQ ID NO: 202633 - DNA, 1669 bp, Unknown
  Bacterial polypeptide expressing nucleotide sequence isolated from the Sargasso Sea
atgagacaactctttccttaccttttcctttctcttctattaagttgtagccaagaagaaatctgtcttgatgctgatctagtcctgactaattctaaaatatataccttagacactgaaaataatattgctgaatcggtagctataaaagatgattccataatctttgttggtacagacgaagaggctaaatcatataaatgtaatgcaaaagtgataaatttatctaatgcttttatttatcccggatttattgattctcatgtccatctaaaggccactggctatagagaattatctttgaatcttcagggctctaagagcttaaaagagatgcttactagtgttcagatttatgctaatagtttagaggcaggagagtgggttataggaagaggttggatagaaaaaaaatggcctgaaggaaggtttcctacaatagaagagcttgatcaaatttctaaagataaacccattttacttgagagagctgacggacatgctgttattgttaactcttatgctctttctttagctaacattaaccaagcaacacaagatccttttggaggcaagatcaatagagataaagaaggtaatccaaatggtgttttggtagataaagcatctttacttgttgagaatctagtccctaagaagacttataaacaagaaaaactagctttagaggctggcttagatgtaaatgcaagaatgggctggactcaagttcatgatgctggttcaccgttaaaagattttgagattctaaaaactatagaagaagaagataaactgcccatccgcgttcacctgtatgtagagaacactaaggatgcgcagacttttcttgatataggaccatttcttgatgaccaatactggttaactgccagaggtataaagctagtggctgatggcgctattggttctagaggagctgtatttttcagaaaatatgaagactacgacacacaaggacttctaatacttaaaaaagaagatactatgcctacgttaatcaaagctttaaagaaaggaattcaaatagaaacgcatgctattggagatctaggaaataaaattgtattagattggtatgaagaagcttttcaagcaatagaaaacgaagataggctcataaatactccacgttggagaatagagcattcacagaacgtaagaccagaagatcaaattaggttcagagatttagaagttatcgcttcaatgcaaccttcgcatgctatcggggatcttcatttcgcgcataaaagattaggatatgaaaggttaagtaatgcatacccatggagaaacctattagatttaggagtggttattgcaggaggttcagatgcgccagttgaaataggagatcctagaatagaatttaaagcggctattagcagaaaggatctggacggatttcatgatgtagggtggcaccttgaacaagccgttacaagagaagaggcattaaaaatgtttactatttgggcctcttatgctgtttttgaagaagatattaaaggaagtatcgaagtagggaagttagccgattttacaattttctctaaggacttaatgactatacctgaagaagaaattatgtcttcagaagttctgatgacaatagttgatggaagggttgtatattctagataaa

SEQ ID NO: 202634 - DNA, 418 bp, Unknown
  Bacterial polypeptide expressing nucleotide sequence isolated from the Sargasso Sea
cctggtgaccggtgccggtggcgtgttcaagcagatcctggtggattccggtgtcggtgccgcccttggcaacatgctggcggactccggcctgcccatcgtcgcgctggccttcattctggcggccgcagtgcgggtcattcagggttccgccaccgtcgccatgctgactgcctgcggtctggtgctgccgatgctggaaccgctcggcctgaacggcgcccagctggcggcggtcaccatcgccatcggcggcggggccatcgtgctctcccacgtcaatgactccggcttctggctggccaaccgctacctcggcctcaccgagaagcagaccctgcagacctggaccgtgatggagaccatcataggcaccaccggcggcgtgatggcgatgatcatctacagcttcctctga

SEQ ID NO: 202635 - DNA, 418 bp, Unknown
  Bacterial polypeptide expressing nucleotide sequence isolated from the Sargasso Sea
tatgaccgtacattgtgacgtcgtaagtgccgaggaaaaaatctattcgggcctggtggagatgctgatcgccaccggtaccgaaggtgagcttggcatccagtatggccatgctccgttactgtccgagctgaagcccggcgcagtgcggatcatcaagcagggtggcagtgaggagattctgtacgtatccggtggttacctggaagtacagcccaatctggttaccctgatggccgacaccgccgttcgtgcaaaggatgtggacgaagcagcggccctggaagcccagaagcaagccgagaaggcactggcgaacaagacaggcgagttcgagtactcgcgtgctgctgccgagctggccgaagctgccgctcagctgcgcaccatccagaagctgcgcaagcacctgcgttaa

SEQ ID NO: 202636 - DNA, 893 bp, Unknown
  Bacterial polypeptide expressing nucleotide sequence isolated from the Sargasso Sea
cggcgtgctggcaacgacagcgatgtcgacggcaacgccctcaaggtgactggtatcctgagcggcaccagcgggacggccacggccgtgaacgccagtggcgacaccgtgctgaccaacagctacggcacgctgaccatccgggctgacggcagctacagcttcaatgccaatggggcggatgcgcagaaactggcggccggtcagctggcgaacgtggtgttcacctacaccgcgaccgacggcaccgagagccggaccagcaccctgaccatcaccatcaccggcaccaacgatgcaccggtgctgcaggctgatgtgggggcggtcaacgaagacgcgatcctgaccgtcgatgcggccagcggcgtgctggccaacgacagcgatgtcgacggcaacgccctcaaggtgactggtatcctgagcggcaccagcgggacggccacggccgtgaacgccagtggcgacaccgtgctgaccaacagctacggcacgctgaccatccgggctgacggcagctacagcttcaatgccaatggggcggatgcgcagaaactggcggccggtcagctggcgaacgtggtgttcacctacaccgcgaccgacggcaccgagagccggaccagcaccctgaccatcaccatcaccggcaccaacgatgcaccggtgctgcaggctgatgtgggggcggtcaacgaagacgcgatcctgaccgtcgatgcggccagcggcgtgctggccaacgacagcgatgtcgacggcaacgccctccaggtgactggtatcctgagcggcaccagcgggacggccacggccgtgaacgccagtggcgacaccgtgctgaccaacagctacggcacgctgaccatccgggctgacggcagctacag

SEQ ID NO: 202637 - DNA, 937 bp, Unknown
  Bacterial polypeptide expressing nucleotide sequence isolated from the Sargasso Sea
gacgcgatcctgaccgtcgatgcggccagcggcgtgctggccaacgacagcgatgtcgacggcaacgccctcaaggtgactggtatcctgagcggcaccagcgggacggccacggccgtgaacgccagtggcgacaccgtgctgaccaacagctacggcacgctgaccatccgggctgacggcagctacagcttcaatgccaatggggcggatgcgcagaaactggcggccggtcagctggcgaacgtggtgttcacctacaccgcgaccgacggcaccgagagccggaccagcaccctgaccatcaccatcaccggcaccaacgatgcaccggtgctgcaggctgatgtgggggcggtcaacgaagacgcgatcctgaccgtcgatgcggccagcggcgtgctggccaacgacagcgatgtcgacggcaacgccctccaggtgactggtatcctgagcggcaccagcgggacggccacggccgtgaacgccagtggcgacaccgtgctgaccaacagctacggcacgctgaccatccgggctgacggcagctacagcttcaatgccaatggggcggatgcgcagaaactggcggccggtcagctggcgaacgtggtgttcacctacaccgcgaccgacggcaccgagagccggaccagcaccctgaccatcaccatcaccggcaccaacgatgcaccggtgctgcaggctgatgtgggggcggtcaacgaagacgcgatcctgaccgtcgatgcggccagcggcgtgctggccaacgacagcgatgtcgacggcaacgccctcaaggtgactggtatcctgagcggcaccagcgggacggccacggccgtgaacgccagtggcgacaccgtgctgaccaacagctacggcacgctgaccatccgggctgacggcagctacagcttcaatgccaatg

SEQ ID NO: 202638 - DNA, 966 bp, Unknown
  Bacterial polypeptide expressing nucleotide sequence isolated from the Sargasso Sea
caggtgactggtatcctgagcggcaccagcgggacggccacggccgtgaacgccagtgtcgacaccgtgctgaccaacagctacggcacgctgaccatccgggctgacggcagctacagcttcaatgccaatggagcggatgcgcagaaactggcggccggtcagctggcgaacgtggtgttcacctacaccgcgaccgacggcaccgagagccggaccagcaccctgaccatcaccatcaccggcaccaacgatgcaccggtgctgcaggctgatgtgggggcggtcaacgaagacgcgatcctgaccgtcgatgcggccagcggcgtgctggccaacgacagcgatgtcgacggcaacgccctcaaggtgactggtatcctgagcggcaccagcgggacggccacggccgtgaacgccagtggcgacaccgtgctgaccaacagctacggcacgctgaccatccgggctgacggcagctacagcttcaatgccaatggggcggatgcgcagaaactggcggccggtcagctggcgaacgtggtgttcacctacaccgcgaccgacggcaccgagagccggaccagcaccctgaccatcaccatcaccggcaccaacgatgcaccggtgctgcaggctgatgtgggggcggtcaacgaagacgcgatcctgaccgtcgatgcggccagcggcgtgctggccaacgacagcgatgtcgacggcaacgccctcaaggtgactggtatcctgagcggcaccagcgggacggccacggccgtgaacgccagtggcgacaccgtgctgaccaacagctacggcacgctgaccatccgggctgacggcagctacagcttcaatgccaatggggcggatgcgcagaaactggcggccggtcagctggcgaacgtggtgttcacctacaccgcgaccgacggcaccgagagccggaccagcaccctgaccatc

SEQ ID NO: 202639 - DNA, 752 bp, Unknown
  Bacterial polypeptide expressing nucleotide sequence isolated from the Sargasso Sea
actggatgatcaaaaacacttgattgggtttgaaaatggtatctatgacttgaacaaaagtgtatttcggggtggattgccatcggattatgtcagtttatctacacaactgaatctccctgtcccgaaatcaatgatacccattggtatagaagatattctagagattgtgaaagaagtagaaaattatgatgaactgaatgatggattgaatgactttttggagaaagtattccctactgatggagtaagagaatatacaatgcgttttctatccagttgtttgtccggtgaagtaagagaagaaaagttctacttctggactggttcaggtggtaatggtaaatcaaagttagttgatttaattgaaatggctctcggtgattacagtcgttcaatggatgttggttatctaactacaaagaaaggtagttcatcttcagcatctcctgaacttgagagtattaaacatgcaaggtttgtttggatgtcagaacctgaaagaacagatacaatctatgttggtaagttgaagcttatgtctggtggagataagatgactacaagaggattgtataaggagacgacccagttcaagccccaattcaagattattcttatgtgccatgagctccctaagttgggaggggatgatggaggtatttggcgtcgtattgaggttgttgaatacatttccaagtttacagatgatccccgccccagtcctgcgaatccacaccagtacaaagcgg

SEQ ID NO: 202640 - DNA, 923 bp, Unknown
  Bacterial polypeptide expressing nucleotide sequence isolated from the Sargasso Sea
accgttacagaagggttgggatctgacggttcagcttcatttgatctttctcttacttctggcacatcagttccaaatggaagtgttacacttgttaccgttagaggtttgccagacgaacttgcttttaataaaggtgctaaactagataatggtgattggcttttagtagaagaagatatctatgaagacccaaaagcaacgcctcttgttcaatccgatttaaaacttattgcagttgatgatgattactcaggaagtttttctttatcaagttgggctgtaacgactgacctacttggtggaactggttcgtcaatatcacaatcaacttatttagtgggcacagttcaagcgcaaaccgatagttctaatttatttgctgtaacttcaggtgtaactggcgatgaagatgatggtcgagatgaaggcacatcaggtattccattaactataagatatgctctagatgattctgatggcagtgaagctataaaaatacaactcaaagttcacaatgatgacattaattcaccaaccagtaactcagatgctgataagcttaagtttacttatttagatggttctacaactaagacacttgatgttactagtgcttcttcagaaggtgattataaaatttttgaattgacgggattgtcatcttttgatgatccaaaagttacaacattaaatgttattcctgcaaaagattatgcttcttcatcaactaatcaatttttagaagtgcatgttttagctgttctcactgatggcactgatacaaaaacagaatcagttggcccaattcagattaatgtagaagaaaaagctgatgcagttgaaatgggttatcattcattaactaataagaatgataatgatgtaaacacaacatcaattttttcaaaaacagactcaac

SEQ ID NO: 202641 - DNA, 809 bp, Unknown
  Bacterial polypeptide expressing nucleotide sequence isolated from the Sargasso Sea
gatggagcagcgccgctgccaatcgagcgcggattacgtcgcgcgccgcggctgcatgcacatggtgtttttaggaaaccctggcaccgggaagacggcggtcgctcagttggtcgcgtgcgtgctggccgagattggcgtgcttcggaagggccatctcgtggtcgcgaagaaggcggatctattgggcagatactcaaatcacgtcagccgcaacacgcgcgcgattgtcgagtccgcgattggtggcgtcctgctgcttgatgaggcgtacgctcttcttcagggtgaggctgagctcggccgtgaggtattgaacgtgctggtcgatctctgctacgcgcataaggacgacctcgtggtcatactcgctgggtacacgcacacaatggccgatttattcgaggcgaaccctggtctggcctcccgcttccctcacaagtttgcctttgacgattatacagtggacgagctctattctatcgccaacggaatgctcgttcaagcgagctttgtgtgtgcggacgaggaggcacgcaacgcattgaagcggctcgtcacgcctatcgcgtgcgagactccgtgcggcaatgcaaggtcggtcgagaataggattgcggcggcgatcaccgcgcaatcgtcacggctacgctacgagcagcagcggcggcggcgtcagcagggaggtgagccgccgccaacagagagggagcacagcggcgacgagagatcggccgcggatctcttcgagctgacatcggcagactttgatgaggcgagggaggtggccgatcgcgcgtcggcggtgc

SEQ ID NO: 202642 - DNA, 874 bp, Unknown
  Bacterial polypeptide expressing nucleotide sequence isolated from the Sargasso Sea
aacaatcttgttgaattgggattcgcagaagcatctgatcaagttgaaatatcaacaatcactaacgatgcacctacagtattcccacttggtgaaacaatcgtaacttggactgcaaccgactcttcaggcaactccgcctctgcaactcaaactataactgtagttgacacaactgcccctgtcataatcactcctgagaatgtaacatcaaatgcaacttcaaaattaaataatattgtagaactagaacaaatttcagtaattgattctatcagtaccgttcaaatcacaaataatgctccttcatactatgaatttggtgaaacaatcgtaacttggactgcaaccgactcttcaggcaactccgcttcagccactcaaactataactgtagttgacacaactgcccctgtcataactacccctcaaaacatcattgtagatgctgtaaatactgaaactttgcttgaaattggattggcaactatagatgatatcattgatgatagtccaattattactaacgatgcacctacagtattcccacttggtgaaacaatcgtaacttggactgcaactgataaatttggaaacacatcctcatccttacaaacaatttctgtccaaacatgcggtaatgatcctttatcatacaatctgattgttggttctgaagaagatgacatactaattggcactgcattatctgacttaatttttgcaaatggtggagatgatattatttctggtgataaaggaaatgattgtattcttgcaggtgatggtgatgatataatttttggaaatcaaggtaatgatcatatttctggtcaaggaggtaatgacatcattaaaggtcaatcaggtgaag

SEQ ID NO: 202643 - DNA, 739 bp, Unknown
  Bacterial polypeptide expressing nucleotide sequence isolated from the Sargasso Sea
accgtcgatgcggccagcggcgtgctggccaacgacagcgatgtcgacggcaacgccctcaaggtgactggtatcctgagcggcaccagcgggacggccacggccgtgaacgccagtggcgacaccgtgctgaccaacagctacggcacgctgaccatccgggctgacggcagctacagcttcaatgccaatggggcggatgcgcagaaactggcggccggtcagctggcgaacgtggtgttcacctacaccgcgaccgacggcaccgagagccggaccagcaccctgaccatcaccatcaccggcaccaacgatgcaccggtgctgcaggctgatgtgggggcggtcaacgaagacgcgatcctgaccgtcgatgcggccagcggcgtgctggccaacgacagcgatgtcgacggcaacgccctcaaggtgactggtatcctgagcggcaccagcgggacggccacggccgtgaacgccagtggcgacaccgtgctgaccaacagctacggcacgctgaccatccgggctgacggcagctacagcttcaatgccaatggggcggatgcgcagaaactggcggccggtcagctggcgaacgtggtgttcacctacaccgcgaccgacggcaccgagagccggaccagcaccctgaccatcaccatcaccggcaccaacgatgcaccggtgctgcaggctgatgtgggggcggtcaacgaagacgcgatcctgaccgtcg

SEQ ID NO: 202644 - DNA, 762 bp, Unknown
  Bacterial polypeptide expressing nucleotide sequence isolated from the Sargasso Sea
ctagaacttaattctgactctactgaatcactcactttacctcccgtaactccaattcctaatgattttcaaaaaccaaccatcttagttcctgaagatgtattggtacaagccactggaccattaactgatgtaaatataggtgaagccttagcaactgacgaaagtggaatatcctctctttctaataatgcaccttcctcatttcctttaggaattaacactataatctggactgcagttgatggtgcaggaaatatggcaatagcctctcaaacggttactattcaagatacaattcctccaaaaatttctccattagagcatattacactagaagcaaaatcatctgaacgtaatcttgtaaatattggcattccagaaatttctgacgaagttggtgtatcctccatcactaacgatgcaccagaagtattcccacttggtgagaccatagtaacctggactgcaactgatgtaattggtaatgtatctaccctaagtcaatctattcaactaattgataccattccacctcgaattgcatttactgataacattactcttgaagcatcaagcctatctgaaaatacaattgaattaatagttccagaacattctgacgaagttggtgtatcctccatcactaacgatgcaccagaagtattcccacttggtgagaccatagtaacctggactgcaactgactcttcagataacgtatcattaatgactcaaactatcacatttgtagatgaaaca

SEQ ID NO: 202645 - DNA, 708 bp, Unknown
  Bacterial polypeptide expressing nucleotide sequence isolated from the Sargasso Sea
cctgcaaacagaaattactcctgaatctgaaaaaattgaagatatcaaaactccattacaacctgtaattcctattccaaatgatttccaaaaacctttaattttagttcctgaagatatcttggtggaggcaactggaccattaacttctattgatattggcgaggcaatggcaactgatgaaagtggaatttattctctaacaaataatgctccatcatcatttcctctaggaattaacactataatctggaccgctgtagatggtgccggaaatatggccattgcttctcaaacaatcacaattcaagattctacttccccaaaaatttctgccatggatgatatttctctagaagcaaaatcatctagtcaaaatctggtaacattgactattcctgaaatatatgatgaagtaggtgtaatgtcagtcactaacgatgcaccagaagtattcccacttggtgaaacaatcgtaacttggactgccactgacgttataggaaacatctcaaatcttagccaatcgattattttggtagattcaactgctcctcgtattgcattttctgaagatctaattattgaggcatctagtttagaacaaaatacccttgaattagtgactccagaaacatcagacgatgttgaaatatcatcagtcactaacgatgcaccagaagtattcccacttggtgaaaacatcgt

SEQ ID NO: 202646 - DNA, 732 bp, Unknown
  Bacterial polypeptide expressing nucleotide sequence isolated from the Sargasso Sea
ggatgcgcagaaactggcggccggtcagctggcgaacgtggtgttcacctacaccgcgaccgacggcaccgagagccggaccagcaccctgaccatcaccatcaccggcaccaacgatgcaccggtgctgcaggctgatgtgggggcggtcaacgaagacgcgatcctgaccgtcgatgcggccagcggcgtgctggccaacgacagcgatgtcgacggcaacgccctccaggtgactggtatcctgagcggcaccagcgggacggccacggccgtgaacgccagtggcgacaccgtgctgaccaacagctacggcacgctgaccatccgggctgacggcagctacagcttcaatgccaatggggcggatgcgcagaaactggcggccggtcagctggcgaacgtggtgttcacctacaccgcgaccgacggcaccgagagccggaccagcaccctgaccatcaccatcaccggcaccaacgatgcaccggtgctgcaggctgatgtgggggcggtcaacgaagacgcgatcctgaccgtcgatgcggccagcggcgtgctggccaacgacagcgatgtcgacggcaacgccctccaggtgactggtatcctgagcggcaccagcgggacggccacggccgtgaacgccagtggcgacaccgtgctgaccaacagctacggcacgctgaccatccgggctgacggcagctacagcttcaatgccaatggggc

SEQ ID NO: 202647 - DNA, 700 bp, Unknown
  Bacterial polypeptide expressing nucleotide sequence isolated from the Sargasso Sea
gatggagggtttggttctacaggtaagtagtatggctagaaaaaagaataatgagtcaggatatactacaagacggaaggctttaaagccaaaaacggaaaatcaaacagagtacatcagaatcatatcagaaaatgatgtaactttttgcacaggaccagcgggtactggtaaaacagcagtagcagttggtttagcttgtgattatttattagataaaagagttgagaagataattgttactagacctgtaattgaatcaggtagaggactaggtttcttgcccggaacttttgaagaaaagatacatccttatcttgttcctgtattagaagaaatgcaatacagactaaatagcaatagggttcaagcttatagagaagaaggcaagattgaagttgttcctttggaatacatgagagggcgaaactttcataactgctttatgatattagatgaagctcaaaacgctacgtttgaacaattaaaaatgttcataactaggattggttgggattcaaaagctgtcatcaatggagatattgagcaaaccgacttggctaataaagaccgtggaggtcttgaagagtttttagaacgtcttgaaggaattcaaggggttggtattgctgaacttacagaagatgatataattagaaacaagattatttctcgcattttagacgcgctttacgattaa

SEQ ID NO: 202648 - DNA, 853 bp, Unknown
  Bacterial polypeptide expressing nucleotide sequence isolated from the Sargasso Sea
ccgagtcgcctgccgaggaccaccaacctccgagtcacctggcgtggacggaccgacctccgagtcgcctgccgtggacgaacggaccaccgagtcacctggcgtggacgaaccgacctccgagtcgcctgccgaggaccaactaacctccgagtcgcctgccgtggacggaccgacctccgagtcgcctgccgtggacgaacggaccaccgagtcacctggcgtggacgaaccgacatccgagtcgcctgccgtggatgaaccgacctccgagtcgccttccgtggacggaccgacctccgagtcgcctggcatggacgaaccgacctccgagtcgcctgccgtggacggaccgacctccgagtcgcctgccgtggacggaccgacctccgagtcgcctggcatggacgaaccgacctccgagtcgcctggcgtggacgaaccgacctccgagtcgcctggcgtggacgaaccgacctccgagtcgcctggcgtggaccaaccaacctccgagtcgcctggcgtggacggaccgacctccgagtcgcctgccgtggacgaacggaccaccgagtcacctggcgtggacggaccgacctccgagtcgcctggcgtggacgaaccgacctccgagtcacctggcgtggacgaaccgacctccgagttacctggcgtggacggaccgacctccgagtcgcctggcgtggacgaaccgacctccgagtcacctggcgtggacgaaccgacctccgagttacctggcgtggacgaaccgacctccttgtcgcctggcgtggacggaccgacctccttgtcgcctggcgtggacggaccgacctccgagtcgcctggc

SEQ ID NO: 202649 - DNA, 787 bp, Unknown
  Bacterial polypeptide expressing nucleotide sequence isolated from the Sargasso Sea
ctgcaaacagaaattactcctgaatctgaaaaaattgaagatatcaaaactccattacaacctgtaattcctattccaaatgatttccaaaaacctgtaattttagttcctgaagatatcttagtggaggcaactggaccattaacctccatagatattggcgaggcaatggcaactgatgaaagtggaatttattctctaacaaataatgctccatcatcattccctctaggaattaacactataatctggaccgctgttgatggtgctggaaatatggctattgcttctcaaacagtcacaatccaagattctacttccccaaaaatttctgccatggatgatatttctctagaagcaaaatcatccagtcaaaatctggtaacattgactattcctgaaatatatgatgaagtaggtgtaatgtcagtcactaacgatgcaccagaagtattcccacttggtgaaacaatcgtaacttggaccgcaactgacgttataggaaacatctcaaatcttagtcaatcaattattttgatagattcaactgctcctcgtattgcattttctgaagatctaattattgaggcatctagtttagaacaaaatacccttgaattagtgactccagaaacatcagacgatgttgaaatatcatcagtcactaacgatgcaccagaagtattcccactcggtgaaacaatcgtaacttggactgcaacagactcttcaggcaactcttcatcacaatcttatacaattacttttgttgatacacattattccc

SEQ ID NO: 202650 - DNA, 863 bp, Unknown
  Bacterial polypeptide expressing nucleotide sequence isolated from the Sargasso Sea
tttgattacccatagtgttgagaggataggagagatgtcttgcaacccagccataggggggattggtaaaagccatctagccaaagaagtcgatgctcttggtggtttaatggccagagcggccgacaaggcaggcattcactacagggtgcttaattcaaccaaaggccaagcagtaagggcaacaagagtccaaaccgacagagacttgtacagacaggctatacaggaactaattaatgggcagcgaaacttaacagtgattgaatcttcagttgaagacgtaattattgaacaagaagaggttcgctcaattcttactgacaaaggagaggtcatagtcgcagacaggctggttcttacgacaggaacctttttggggggtgtgatgcataccgggctggaacaaaaacccgggggcagagttggcgacccctcgagcataaaacttgccgaaagacttagaaagcttcctttgcccgtaggaaggttgaagacgggaacaccacctaggttacataaagacaccatagactggtcgaagctctctcctcaaccaggagacctgcccacaccccttttgtcttacgtttccagcaacaaggacagaccaaaacaggtagagtgcttcatgaccaggacaaacaaagagacgcacaaaataataaggggctctttagataagtctccaatgtattctggcatcattgaaggggttggcccacgatattgtccttctatagaagacaaggttgtgaggttctcagaaagagactcccatcagatttttgcagaacctgagggccttaattcggacttaatttatccaaacggaatatctacaagcctaccaaaagaggctc

SEQ ID NO: 202651 - DNA, 599 bp, Unknown
  Bacterial polypeptide expressing nucleotide sequence isolated from the Sargasso Sea
gatgtcagcgcaagaaatcgtcactccccaaccagtcgaagctgaagttattatcgaaacccgcggattatctcgcgtttacccaggcgttatcgccttagataacgtcgactatcgggtgtatcgaaataaagtcaacgttctgatcggagaaaatggtgcgggcaaatccaccatgatgaaaatgcttgccggtgtcgaaaccccttcctccggacaaattattctcgagggttctcccgtttcattaaactcgactcaccaggctgaaaaacagggtatcagcattattttccaggagctgaatttattcccgaatatgaatgtcatggataatattttcatggctaatgagtttttccagaaaggaaggatcaacgaaaaataccaatacgaactggctaaatcactgctggaacggctggagctcgatgttgatccctatactccgcttggcgaactgggtattggccatcagcagctggtcgaaattgcgcgcgccctgtccaaagatactcgcgtattgattatggatgagcccacctccgccctcagccagtctgaagtcaaagtcctgttcaatgttatcggacagctta

SEQ ID NO: 202652 - DNA, 610 bp, Unknown
  Bacterial polypeptide expressing nucleotide sequence isolated from the Sargasso Sea
ctgaccaacagctacggcacgctgaccatccgggctgacggcagctacagcttcaatgccaatggggcggatgcgcagaaactggcggccggtcagctggcgaacgtggtgttcacctacaccgcgaccgacggcaccgagagccggaccagcaccctgaccatcaccatcaccggcaccaacgatgcaccggtgctgcaggctgatgtgggggcggtcaacgaagacgcgatcctgaccgtcgatgcggccagcggcgtgctggccaacgacagcgatgtcgacggcaacgccctccaggtgactggtatcctgagcggcaccagcgggacggccacggccgtgaacgccagtggcgacaccgtgctgaccaacagctacggcacgctgaccatccgggctgacggcagctacagcttcaatgccaatggggcggatgcgcagaaactggcggccggtcagctggcgaacgtggtgttcacctacaccgcgaccgacggcaccgagagccggaccagcaccctgaccatcaccatcaccggcaccaacgatgcaccggtgctgcaggctgatgtgggggcggtcaacgaagacgcgatcctgaccgtcg

SEQ ID NO: 202653 - DNA, 861 bp, Unknown
  Bacterial polypeptide expressing nucleotide sequence isolated from the Sargasso Sea
gcacatcgcgtttgaatacaccatcaccgatggcctgaacagcgccacaggcggcgtgaccgggactgttacgccggtcaacgacgcggccgtcattaccggcaccgacaccggcggcgtggtggaagacgagaccaacccgaccctgaccgagacgggcaccctgagcgtcaccgacgtggacggcgccgacgaggccaagttcctggctggcaacggcgtggccagcactggcgcactgggcagcctgaccatcaccgaaggcggtacctggacctacaacgtcgacaacagcaaggtgcagtacctgggcgagggcgagaccaaggtcgagacctttgtggtcaagtccgtggacggcaccgagcacaccgtcaccatcaccatcaccggcaccaacgatgcaccggtgctgcaggctgatgtgggggcggtcaacgaagacgcgatcctgaccgtcgatgcggccagcggcgtgctggccaacgacagcgatgtcgacggcaacgccctcaaggtgactggtatcctgagcggcaccagcgggacggccacggccgtgaacgccagtggcgacaccgtgctgaccaacagctacggcacgctgaccatccgggctgacggcagctacagcttcaatgccaatggggcggatgcgcagaaactggcggccggtcagctggcgaacgtggtgttcacctacaccgcgaccgacggcaccgagagccggaccagcaccctgaccatcaccatcaccggcaccaacgatgcaccggtgctgcaggctgatgtgggggcggtcaacgaagacgcgatcctgaccgtcgatgcggccagcggcgtgctggccaacgacagcga

SEQ ID NO: 202654 - DNA, 847 bp, Unknown
  Bacterial polypeptide expressing nucleotide sequence isolated from the Sargasso Sea
gctgaccaacagctacggcacgctgaccatccgggctgacggcagctacagcttcaatgccaatggggcggatgcgcagaaactggcggccggtcagctggcgaacgtggtgttcacctacaccgcgaccgacggcaccgagagccggaccagcaccctgaccatcaccatcaccggcaccaacgatgcaccggtgctgcaggctgatgtgggggcggtcaacgaagacgcgatcctgaccgtcgatgcggccagcggcgtgctggccaacgacagcgatgtcgacggcaacgccctccaggtgactggtatcctgagcggcaccagcgggacggccacggccgtgaacgccagtggcgacaccgtgctgaccaacagctacggcacgctgaccatccgggctgacggcagctacagcttcaatgccaatggggcggatgcgcagaaactggcggccggtcagctggcgaacgtggtgttcacctacaccgcgaccgacggcaccgagagccggaccagcaccctgaccatcaccatcaccggcaccaacgatgcaccggtgctgcaggctgatgtgggggcggtcaacgaagacgcgatcctgaccgtcgatgcggccagcggcgtgctggccaacgacagcgatgtcgacggcaacgccctcaaggtgactggtatcctgagcggcaccagcgggacggccacggccgtgaacgccagtggcgacaccgtgctgaccaacagctacggcacgctgaccatccgggctgacggcagctacagcttcaatgccaatggggcggatgcgcagaaactggcggccggtcagctggcgaacgtggtgttc

SEQ ID NO: 202655 - DNA, 943 bp, Unknown
  Bacterial polypeptide expressing nucleotide sequence isolated from the Sargasso Sea
tatgtactataaatccagtgatggcaggcgtttaagcatagtagggtctggcataggtttatctgtgtcccgggctttagttgaagctatgtcgggccatatcaagcttgaaagttcagtaggtaaaggtagtacttttattatgtcgttgcctgcagagcttacatcagctcctgctgcactgccacaagcccagtatccggctttaaccattttactggtagaggatgtgccgctaaacgctgagatagcgataaacttattagagcaacgtggtcatcaggtgattttggcagaaacaggtgaagacgctttagctttgctggaaaccgaagatgatatagatctggtgcttttagatatgcaattgccggatatgtccggcgaccaggtcgcacgttttatccgtgctgaaccttctttggccagattacctgtggtggtattaagtgccaacgtacgtaaagccgagcagcaactaaaagatgtgcgggttgatggtgctttagcaaaacctattaataccaataagttggatcagattttacatcagctgtttggcgctcctgctccaaaagaaatcacagccgaaaaagctcttgatcagcaaattcttgatcagcaaaccctggatgattatctgcagtctttaggcaaagccactatgttacgcagcgtgcagttgtttgttcagttgctgcctggttacatcaataagatggtggaaactgcagtacagcaagacgtgactgaatttcaggaagctgcacacaaactcaaaggcgcagctgcttctgttggcttgttgtgggtgcaacatcaggcaaagttaatggagcaggcaactgagctgcatggcatggaaaagcagttgatcaatttccatataacaatagagcggcacttggctactctgcaagaatatatagaagcctgggcttaa

SEQ ID NO: 202656 - DNA, 956 bp, Unknown
  Bacterial polypeptide expressing nucleotide sequence isolated from the Sargasso Sea
gagttttgcttctattgaagtgctatccaatgtagacctcaatctctataatggcgaaattcatgcattgcttggtgaaaatggggcggggaaatcaacatttgctaaaattctagccggcgtgtatcgaccaactagaggttcaataaaaattaaagataaggcagttgaaataccatcccctatcatagctcaagatcttggaatagccttaatccaccaggagccaatttcatttcctcatctttcagttgctgaaaatctagtcatgggtcaaaaagataacggtcttttgggttggatcaactgggctgaaatgataggtcatgcccgtgaacaaatgaaaatacttggagtagaaatagatgtaaatcggccaatgcaagggttatcgattgccgatcagcagatggttgagatcgcaagggctatagcttcggacgctagactgattattatggacgagcctacggcgccattaacacccaaggaagttgaaactctttttacaattgctaagcgtcttaaagaagaaggtcgaactattatattcatatcgcacagacttgaggaagttcgaatgatctgtgacagagtaaccatttttcgtgatggagaaagaataacgactgaaacaatagataaactttccgatgaagatgtaattcgtcttatgattggtcgtcctcttggaaaatatatgaggaagcacaagacaacgataggagatgtagctctctcagtaaacaatctcacattagaaggcgcattcaatgatataagtttcgaagttagaaagggcgaaattgttggaataggtggattagttggcgcaggaagaacagacgtcgcgcgtgctgtttttgggatcgtccctgcccaaagaggaacaataaaaatcaatgagacaccagtcgtaatatctagccctgccgacgctatacaactaggtgttg

SEQ ID NO: 202657 - DNA, 952 bp, Unknown
  Bacterial polypeptide expressing nucleotide sequence isolated from the Sargasso Sea
  misc_feature (19)..(19): n is a, c, g, or t
ctcaaggtgactggtatcntgagcggcaccagcgggacggccacggccgtgaacgccagtggcgacaccgtgctgaccaacagctacggcacgctgaccatccgggctgacggcagctacagcttcaatgccaatggggcggatgcgcagaaactggcggccggtcagctggcgaacgtggtgttcacctacaccgcgaccgacggcaccgagagccggaccagcaccctgaccatcaccatcaccggcaccaacgatgcaccggtgctgcaggctgatgtgggggcggtcaacgaagacgcgatcctgaccgtcgatgcggccagcggcgtgctggccaacgacagcgatgtcgacggcaacgccctcaaggtgactggtatcctgagcggcaccagcgggacggccacggccgtgaacgccagtggcgacaccgtgctgaccaacagctacggcacgctgaccatccgggctgacggcagctacagcttcaatgccaatggggcggatgcgcagaaactggcggccggtcagctggcgaacgtggtgttcacctacaccgcgaccgacggcaccgagagccggaccagcaccctgaccatcaccatcaccggcaccaacgatgcaccggtgctgcaggctgatgtgggggcggtcaacgaagacgcgatcctgaccgtcgatgcggccagcggcgtgctggccaacgacagcgatgtcgacggcaacgccctccaggtgactggtatcctgagcggcaccagcgggacggccacggccgtgaacgccagtggcgacaccgtgctgaccaacagctacggcacgctgaccatccgggctgacggcagctacagcttcaatgccaatggggcggatgcgcagaaactggcggccggtcagctggcgaacgtggtgttcacctacaccgcgaccgacggcaccgagagccgac

SEQ ID NO: 202658 - DNA, 835 bp, Unknown
  Bacterial polypeptide expressing nucleotide sequence isolated from the Sargasso Sea
agcggatgcgcagaaactggcggccggtcagctggcgaacgtggtgttcacctacaccgcgaccgacggcaccgagagccggaccagcaccctgaccatcaccatcaccggcaccaacgatgcaccggtgctgcaggctgatgtgggggcggtcaacgaagacgcgatcctgaccgtcgatgcggccagcggcgtgctggccaacgacagcgatgtcgacggcaacgccctcaaggtgactggtatcctgagcggcaccagcgggacggccacggccgtgaacgccagtggcgacaccgtgctgaccaacagctacggcacgctgaccatccgggctgacggcagctacagcttcaatgccaatggggcggatgcgcagaaactggcggccggtcagctggcgaacgtggtgttcacctacaccgcgaccgacggcaccgagagccggaccagcaccctgaccatcaccatcaccggcaccaacgatgcaccggtgctgcaggctgatgtgggggcggtcaacgaagacgcgatcctgaccgtcgatgcggccagcggcgtgctggccaacgacagcgatgtcgacggcaacgccctcaaggtgactggtatcctgagcggcaccagcgggacggccacggccgtgaacgccagtggcgacaccgtgctgaccaacagctacggcacgctgaccatccgggctgacggcagctacagcttcaatgccaatggggcggatgcgcagaaactggctgccggtcagctggcgaacgtggtgttcacctacaccgcgaccgacggcaccgagagccggaccagcaccctgaccatcacc

SEQ ID NO: 202659 - DNA, 721 bp, Unknown
  Bacterial polypeptide expressing nucleotide sequence isolated from the Sargasso Sea
aaactttttaatgaggatgaaactgaattatttgaagcagcaaacaaacaaaatgcatttacattttggaaccatccttatagaaaacaagaaccatatggtgtggtgaaacctatggatattcacaaagagcttatcagaaaaggacttcttcatggaatagaggttgttaatagaaataagttatcagtagatgcgcttcaaatagcattagattacaatttgacaattatgggaaattctgatattcatggaataatagattgggaatatgaagtgaataatggaggacatcgccctgtcacgcttgtgtttacgaaagaaaaaaacactaatgggataagagaagcgttatttaatagacaaactgttgtttggcataaaaatacgttaattggtagaaaagagtggttgttgccattgattaatgcaagcttagaagttgtctctttagaatacaaaaccaatgtatcagcatataaacgagatttggcttttgtaacaatcaaaaatcattctgatgtaagatttatattaaaaaataagagtaaatttgattttttcacgaatagcgacgtgatagaaataccggcaaatgagagtatagaattagaggtaattacaaaagggaagttagagatgtttaatctcaattttgaggtacagaatgctatttttgctcctcgaaaacatcctgttattagtttgaagattaaataat

SEQ ID NO: 202660 - DNA, 913 bp, Unknown
  Bacterial polypeptide expressing nucleotide sequence isolated from the Sargasso Sea
acagaaggacctactactcccgggctatgtcgaggagtggacgaaagcacacccgggaggtggagatgtggtcggcgtcaccggggacggaacgaacgacgccccggccttgcgcgccgccgacgtgggcctcgccatgggcagcggcaccgatgtggcgaaaagcgcagcggacattgtgatcctcgacgacaagttctcgtccatagtcggcgccatcaagtggggacgctgcgtgtacgacaacatccgcaagttcatccagttccagctcaccgtcaacgtcgtggctcttctcgtcgtcttcatcggcgcggcgacccagaagggaacccccctgaacgcggtgcaaatgctctgggtgaatctcatcatggacacgatgggggccctagcccttggcacagaacagcccaccgacgagctcctgaagcgccccccctacaagcgagatgctcttctcatctcttggcccatgatgcgcaacatccttgtgcagagcggcttccagctcatcgtgctattcctgctcctttacctcggcgcagactggtatggcgtcgaagagggtacacactgccagacctttggcaagcaacacggcggctctgaccggtggtggtgggacgaggatgggaacaagaacaagaacggagggaccgtcggatgtccctcgttcctcaacggggagctcaaggatgggtccgacgttccgtccgacctctcatgctcgagcaagagtgggtcgtgttacgatgagaaatactcgggcttcgatgaagtgaatggctacacctacgaagaggcctgcctcgcgtgcacggaatacgactacacccactttacgatcatcttcaacgcctttgtcttttgccaggtcttcaacgagttcaatgcccgatccatcctcaac

SEQ ID NO: 202661 - DNA, 744 bp, Unknown
  Bacterial polypeptide expressing nucleotide sequence isolated from the Sargasso Sea
accggcaccaacgatgcaccggtgctgcaggctgatgtgggggcggtcaacgaagacgcgatcctgaccgtcgatgcggccagcggcgtgctggccaacgacagcgatgtcgacggcaacgccctcaaggtgactggtatcctgagcggcaccagcgggacggccacggccgtgaacgccagtggcgacaccgtgctgaccaacagctacggcacgctgaccatccgggctgacggcagctacagcttcaatgccaatggggcggatgcgcagaaactggcggccggtcagctggcgaacgtggtgttcacctacaccgcgaccgacggcaccgagagccggaccagcaccctgaccatcaccatcaccggcaccaacgatgcaccggtgctgcaggctgatgtgggggcggtcaacgaagacgcgatcctgaccgtcgatgcggccagcggcgtgctggccaacgacagcgatgtcgacggcaacgccctcaaggtgactggtatcctgagcggcaccagcgggacggccacggccgtgaacgccagtggcgacaccgtgctgaccaacagctacggcacgctgaccatccgggctgacggcagctacagcttcaatgccaatggggcggatgcgcagaaactggcggccggtcagctggcgaacgtggtgttcacctacaccgcgaccgacggcaccaagagccggaccagcaccctgaccatcaccatcaccggcaccaac

SEQ ID NO: 202662 - DNA, 610 bp, Unknown; identical to SEQ ID NO: 202652
  Bacterial polypeptide expressing nucleotide sequence isolated from the Sargasso Sea

SEQ ID NO: 202663 - DNA, 868 bp, Unknown
  Bacterial polypeptide expressing nucleotide sequence isolated from the Sargasso Sea
accgtcgatgcggccagcggcgtgctggccaacgacagcgatgtcgacggcaacgccctccaggtgactggtatcctgagcggcaccagcgggacggccacggccgtgaacgccagtggcgacaccgtgctgaccaacagctacggcacgctgaccatccgggctgacggcagctacagcttcaatgccaatggggcggatgcgcagaaactggcggccggtcagctggcgaacgtggtgttcacctacaccgcgaccgacggcaccgagagccggaccagcaccctgaccatcaccatcaccggcaccaacgatgcaccggtgctgcaggctgatgtgggggcggtcaacgaagacgcgatcctgaccgtcgatgcggccagcggcgtgctggccaacgacagcgatgtcgacggcaacgccctcaaggtgactggtatcctgagcggcaccagcgggacggccacggccgtgaacgccagtggcgacaccgtgctgaccaacagctacggcacgctgaccatccgggctgacggcagctacagcttcaatgccaatggggcggatgcgcagaaactggcggccggtcagctggcgaacgtggtgttcacctacaccgcgaccgacggcaccgagagccggaccagcaccctgaccatcaccatcaccggcaccaacgatgcaccggtgctgcaggctgatgtgggggcggtcaacgaagacgcgatcctgaccgtcgatgcggccagcggcgtgctggccaacgacagcgatgtcgacggcaacgccctcaaggtgactggtatcctgagcggcaccagcgggacggccacggccgtgaacgccagtggcgacaccgtgctgacca

SEQ ID NO: 202664 - DNA, 649 bp, Unknown
  Bacterial polypeptide expressing nucleotide sequence isolated from the Sargasso Sea
ctgaccaacagctacggcacgctgaccatccgggctgacggcagctacagcttcaatgccaatggggcggatgcgcagaaactggcggccggtcagctggcgaacgtggtgttcacctacaccgcgaccgacggcaccgagagccggaccagcaccctgaccatcaccatcaccggcaccaacgatgcaccggtgctgcaggctgatgtgggggcggtcaacgaagacgcgatcctgaccgtcgatgcggccagcggcgtgctggccaacgacagcgatgtcgacggcaacgccctcaaggtgactggtatcctgagcggcaccagcgggacggccacggccgtgaacgccagtggcgacaccgtgctgaccaacagctacggcacgctgaccatccgggctgacggcagctacagcttcaatgccaatggggcggatgcgcagaaactggcggccggtcagctggcgaacgtggtgttcacctacaccgcgaccgacggcaccgagagccggaccagcaccctgaccatcaccatcaccggcaccaacgatgcaccggtgctgcaggctgatgtgggggcggtcaacgaagacgcgatcctgaccgtcgatgcggccagcggcgtgctggccaacgacagcgatgtcg

SEQ ID NO: 202665 - DNA, 956 bp, Unknown
  Bacterial polypeptide expressing nucleotide sequence isolated from the Sargasso Sea
tcaaatcagcaatgaactatcaattattgacattttagtaaatggtttagattcaccatctataagttatcagaaacaatctattgaaataatatcaagcaataacagttgtgattttgaaatttctctagaagactcagaaatttataagatccatcatatagatactttggattataaaaaatacacatttcgtaatcctattatttataaagatcaagaaagctttagattaaaaatttcaaccatacaaagtaactcctgtccttcttttcagcattatgtaaatttaaccgtagacaagtatccaactaaacacagcttgatccctgcaaatattagtgaattaaaatcaaatttttttgaagtaagcgatattggttttgatggaataattataaatgaaactttttctgcaacagaatgttatccaacccccaatgattgtgaagcatatgaaaatcaagtttttggacaagatgcacacaatattattcagggtgattttaatggagatggatatgaggattttgcagttgcatgggctttatttcctcatactattgatccagatcaaaaagttaatgcaccaataaatatttacctaaataatggcaaaggtcgatttgaagaggatttgaatatctattcagacaataatcaaccaacacatccctttgcttataggatgattgctgaggatttaaacgacgatgggatagatgatatatttgctggctctatgggtatacagtttaggtcagaagattattccgaaaattatattaatccataccctcatttattacttctatcaaatcctgaaggaaagtttgctgatgcttctaatcaaatagaagataaaaatgacggcaaaggtcaacttttgtattttgctcacgatgccagtgctggagaccctgatggtgatggcgatatcgacatatatgcatgta

SEQ ID NO: 202666 - DNA, 1561 bp, Unknown
  Bacterial polypeptide expressing nucleotide sequence isolated from the Sargasso Sea
atgagtgaagacgcaacgtcaccgctgtcatcgcgttccggtacgccgcaaccgtttcttgaggttgtcggcgtgcacaagcgtttcaccggcgtgcatgccttgcgcggggtgagcctgtcgttcgagcgcggtcagatttatcacctgctcggcgaaaacggctgcggcaagagcaccctgatcaagatcatctccggcgcgcagccgcccgacgaaggtgagctcgtgatcgaaggcgttcggcatgcgcggctttccgcgctggaatcgctcgcggcgggcatcgagaccgtctatcaggatctctcgctgctgcccaacatgaacgtggcggaaaacgttgcacttaccgccgagctggccacgcacgcaggccggctcgcgcggaccttcgaccgccgggcgctcgcgcgcacggcagcgcgagcgctggaatcggtgggcctgcctggcgatgcgcaatttcaggcgaccctgatcgagcaattgccgcttgccacgcgccagctcgttgccattgcgcgcgcgattgcgagcgaggcaaagttcgtcatcatggacgagcccaccacctcgctcacgcagaaggaggtcgacaatctgatcgccgtgctcgcgaatctgcgcgcgcagggtgtgacggtgctgttcgtcagccacaagctcgacgaatgctacgcgatcggcggcgaagtcatcgtgctgcgcgacgggcagaaaatggcgcaggggccgatcgcgcaattcaccaaagcgcagatcagcgagctgatgacagggcgccacctgtcgaacgagcgctatcgtgaaggcgcgttcagccaggaggtcgtgctcgacgtgcgcggcttcacgggtataggccaattcagcaacgtgtcgttcgcgctccatggcggcgagattctcggcatcaccggtctgctcgattcggggcgcaacgaacttgctcgtgcactggcaggtgttgcgccggcgcaatcgggacaggtgatgctcgacggcaaggcgatttccttgcgtactccctcgcacgcgaaacatcatcgcattggctacgtgccggaagaccgcctgaacgaagggctgtttctcgacaagccgatccgcgacaacgtgattaccgcaatgatctcgagcctgagggaccgcttcggccagatcgaccgcacgcgcgcgcaagcgcttgccgaacagacggtgaaggatttgcagatcgcgacacccggtgtcgacaaacccgtgcagtcgctctcgggcggcaatcagcagcgcgtgctgattggccgctggctcgccatcgatccacgcgtgctgattctgcatgggccgacggttggcgtcgacgtcggctcgaaagacattatctaccgcatcatgcaacgcctgtcgcaacgcggcatcggcatcattctgatcagcgacgacctgcccgagttgctgcagaactgcgaccgcatcctgatgatgaagaaggggcgcgtggcaagcgaatatcaggccgacatgctgagcgaagccgacctgtatcgcgcattgctttcggaagccgcataaa

SEQ ID NO: 202667 - DNA, 1978 bp, Unknown
  Bacterial polypeptide expressing nucleotide sequence isolated from the Sargasso Sea
tgttacagacaccatagtcaaagatgctaatgcacctgcagtcagttcagtgggtattgcggacggacgctataaagccggtgaaacagttagctttacgctcacctttactgaagccttggtcctatcaagtgcgaattcaaactacagcctgaccatagatgtaggcgggaccactcgtcaggcggtattaactggccatgcaggtgcagttttaaccttcagctatacggtgcaggctggtgaggatactacgggtacaggtgtttcagtcgccagtgatgggttgtccctgcttaacggcgctaccattaaagatgcaggcaacaatgatgcaactctaaatttcactggtgttgctaacagtgccgcgcaggtagataccactgctccggtgattgcagtggtgacagacccggctcaggctgtatttgtcaatgcggcaaattaccagattaaaggtactcacagcgaaattggcctgacgattaacctctatacagacacaggcaacgatggcacagcagatggtggagtattagttagtgccatagttgatactgctggcaactggagcttgctgcaacctttaaccgctgactcggcacataattatgtggttgtagctgaagatgcagcaggcaatatctcagctgctgtagatgtgcccactattacggaagattccatagctccaggcgctgcggtgattaccagtccggctgcggctttagctgtgaatacagtcaaccaggtgattagcgggactcatgcagaagatggtgtcacagtcgagttgtttgccgataccgataacgatggagttgctgataacagtacagtgttggcaaacgctgtagtgggatctgccgccacaggcacttggtcactgactgcatctcttactcagaatgtggcaaataattttgtagttgttgttaaagacaaagctggcaatatatctactgtgacagatgttccaactattactcaggattccgtagctcctgttgtgacagtaacaacactggcaacagcggactctacccctgctttggctggtactgtaaacgacaatactgccactttgagcctggtggtgaatgggcaaacctatgtaccgaccaatagtggtaatggcaactgggctttggccgataatcaaatttcggcactgactgatggcgtgtacgacgtttctgttagtgctacagatgcgcaaggcaatataggcactgatgcttccgttaatgaactgacgatcgacttattgccaccatcaggctatagcgtagtgattcagcaaagccgcattgatgctgcaaatcagaatgctatgagttttgtgtttgctggtgctgaggttggctcaacttacacttacgtgattagtgacggcacgaattctgtgacaggcacagctgtggtgacggcagccaatcagcagattggatctattaacgtgacaggtctggcagaaggcactttacaactcagcgtgagtctgaccgatacagttggaaatacaggggcggctgccacagcgacagtcgtgaaactctacaacgcgactccggtgatttcaggcactgccgccacttcagtcaatgaagacagctcatatagctttacacctgctgctactgatgcagatacgggtactactttcacgttcagtatcagtaataaaccagtgtgggcaacctttaatactgcgactggtgcgctgagcggaacaccaggtaatgagcatgtaggcattacctcaggcatagtgatcagcgtcagcgatggcactgcaacagcgtcacttcctgcttttgctatcacagtggttaacaccaatgatgcacctgtcgttagctcagctgcagttacagttgccactcagggggccgcgtacagctacagctttgcaggcactgatgtggatgtgggggataccttaacccgctcagtgttgaccaaaccagcctgg

SEQ ID NO: 202668 - DNA, 1753 bp, Unknown
  Bacterial polypeptide expressing nucleotide sequence isolated from the Sargasso Sea
gtgctttggcctatggtgttgggggctttgctgttttctgcctctataactccggcctttttactcagcggtttttatttagtccgtcatctggatgaagcgctgttttatttgcaggattcaatacggcaggaaaagttgctgaatcagaatatgcaggaaaccattcgccaactgaactttgaaattgaagaacggaaaaaggcctttcaggcgaaacgccgcgctgtagatgagttaaggcgtgaaattactgaacgccgcaaaacccagcaagagctggaagaacaaagtttattaatccgttctatagtcgacagctcgcctgatttattctactaccgcgatgaaactggtcgttttgtcagctgtaataagatgtttgaagtcataatggggaaatcggcgaaagagttgataggccattatccggccgaactctatgatgctgaatccactcctatcgctattttgaccgatcaggaaatctccgccagccgtgaagaactgacattagatgtggattatcagacacctgatggccgcatgttgtggtttgaaatgcgcaaagtgccattttttgataaacaaggccgctatattggcttgcttgggtttggccgggatatcacctcccgtaaactcgctgaacaggcattggaaaaagcttatcaggataaaggtaagtttatcgccaccttaagccatgaactgcgtacgccattaaacggtattgtaggtttaacccgacgtttattggaaagtccgttgtcgactgagcaacgcagttggagcaataccatattcagcagtgctgaaacgctaggtaatatttttaatgatattatcgacttagataaaattgaccgacaagatttagacattgtttatcagtcggtgcagctttgcgactttgtgcatgatatctgtaattttgcccacttaatctgtcagcaaaaaggtttaacctttattgaacctgaagcagtacctgatcagttgtatgttcgtctggaccctaccagagtgcggcaggtgttatggaacttaattaataacgcggtgaaattcacagcccgtggttctgtgcagcttggggtttctttaagcactgataatccgccagaacttagtttcagtgtcactgataccgggataggtattatcgaagctgagcagcaacgcatttttgatatgtactataaatccagcgacggcaggcgtttaagtattgttggctcgggcataggtttatctgtatcgcgggccttagttgaagcgatgtccggtcatatcaaacttgaaagcaccgtgggtaagggcagtatttttattgtgtctttgcctgcacaactgacctccgctcctgtcgcagtgccgcaggttgtgtatccagctttaactgtcttgctggttgaagatgtaccattgaatgctgaaattgctattaatttgcttgagcaacgggggcatcaagtgattttggcggaaacaggcgaagatgctctggctctacttgatactgaagacgatatagatctggtgcttttggatatgcagctcccggatatgtctggcgatcaggtcgcacgatttattcgcactgagtctgcgttagccagactacctatagtggtattaagtgcaaacgtgcgtaaggctgagcagcagttaagagatgtccgggtggatggggctctggctaagcctattataccaacatgctggatcagattttacaccagttgttcgg

SEQ ID NO: 202669 - DNA, 1466 bp, Unknown
  Bacterial polypeptide expressing nucleotide sequence isolated from the Sargasso Sea
gatatcggaatgataacccaaaacccccgatactctcttcacccaatgctcagagtgggagatcagatttctaacgtttttagggctcataataaggttagctcgaaagaagcttggtctcacgcagttgatatgttgaaattagttgggataaatgatcctgaaaggagagtaaaagcatatgctcatgagttgtcttcaggaatggctcaaagagttctaattgcgatggcgctttcttcttcaccaaaactattactagcagatgaaccaacttcaggtctagatgttacaattcaagctcaatttttagatcagatgtgggatgcatgtcgccagactaaatcagcagttttattagtaacacaagacctaggtatagttgcaaattattgtgatagagtattgatcatgtatgaaggtcagatagttgaagattcagatgtgtttacattttttaaatcaccaaaacacgactacagtaaaagaattcttcagctgcagagagaggctcaggaagcaggtgatgcagtagcaactaatattgatcaaaaatctgatgcactaatgaaggtaaattcattaattaaagaattccctattaggggttctaaatcacgagttcacgcagttgataatgcaacttttgaattgagatcaggagagtgtctaggtctggtgggtgagtctggttcgggtaagaccacaattggcaggtgtgttttaagactagaacagcctacatcaggagaaataatttttagagacgaaagattagatactctctctctcaaagattttcaagaaaagagatctaatcttcaaatagtttttcaagaccctttagattctctgaacccacgttggacagttgaacaagtacttaaagagccacttgatttacacaccaagatgacagagcaagaaaaaatgtctcgaatttctgaattacttaatttagttggtctagaggcttcaatgagacaggctttgccaagagaaatgagtgctggtaggcagcagagaacatcaatagctagagcaatagcttcaaatcctgattttattgtcttggatgaacctacctcagctttaaccccagaaactacggcagaaataattagattattaatggatttatcaactagtcttggtatttcctatttatttatttctcatgacttaaccactattaaatatatatgtcacagagtggtggtgctttatctgggtcaaatagttgaagttggcacgaaggagcaggtcttcaatgatccaaaacacccatattcaagagctcttctagctgcacatttatttccagatacttctgatagaagagttgatcgagatgtaagagagtcattagagggtgagatcccaagtcctgtaacagaaaatttaccaaaaggttgttatctttatggcagatgttctcatcaacttgatcagtgtagggatatgaa

SEQ ID NO: 202670 - DNA, 1135 bp, Unknown
  Bacterial polypeptide expressing nucleotide sequence isolated from the Sargasso Sea
aatgcgatatatttatatattttttactcttttgatctcttcatgtggttcaggagggacatctcaaatcagcaatgaactatcaattattgacattatagtaaacggtttagtttcaccatcaataagttatcagaaacagtctattgaaataatatcaagcaataacagttgtaattttgaaatttcactggaagattctgacatttataatattcatcatattaatactttggattataaaaaatatacatttcgtaatcctattatttataaagatcaagaaagctttagattaaaaatttcaaccatacaaagtaactcctgtccttcttttcagcattatgtaaatctaaccgtagacaagtatccaactaaatacagcttgatccctgaaaatattagtgaattaaaatcaaatttttttgaagtaagcgatattggttttgatggaataattataaatgaaactttttctgcaacagaatgttatccaacccccaatgattgtgaaacatatgaaaatcaagtttttggacaagatgcacacaatattattcagggtgattttaatggagatggatatgaagattttgcagttgcatgggcattatttccacatactattgatccaggtcaaaaagttaatgcaccaataaatatttacctaaataatggtaaaggtagatttgaagaggatttgaatatctattcagacaataatcaaccaacacatccctttgcttatagaatgattgctgaggatttaaacgacgatggaatagatgatatttttgctggttctatgggtatacagtttaggtcagaagattattccgaaaattatattaatccatatcctcatttattacttctatcaaatcctcatggaaagtttgatgatgcttctaatcaaatagaagataaaaatgatggcaagggccaactctgtaattttgctcatgatgccagtgctggagaccctgatggagatggcgatatcgacatatatgcatgtaacattcttaacattaatgatggtttaggaaattttaagattcacgaatatataaatcttgattggcaaagagaaaatcaattcggaaatccaatgacctcactgtggcagatctaa

SEQ ID NO: 202671 - DNA, 952 bp, Unknown
  Bacterial polypeptide expressing nucleotide sequence isolated from the Sargasso Sea
gaatttggattcgcagaagcatctgatcaggttgaaatatcaacaatcactaacgatgcacctaccgtattcccacttggtgaaacaatcgtaacttggaccgcaaccgacttttcaggcaactctgcctccgcaactcaaaccataactgtagttgatacaactgctccggtagtagaaaatcttgattcattaacatttgaagcaacagctcaaaatgctaatttggttgaaatacctttgattactgcatctgataatactgaaatcatatccatcactaacgatgcacctgttttgtttgaatttggaaccactatcataaattggtctgttgttgatattattggcaatcaatctgttgtagaacaacaaattgagataatcgacacaactctaccaacaatcacatctcctgttgatgtggaagttgaagcaacatccatggaaaacaatcttgttgaatttggattcgcagaagcatctgatcaggttgaaatatcaacaatcactaacgatgcacctaccgtattcccacttggtgaaacaatcgtaacttggaccgcaactgactcttcaggcaactctgcctctgcaactcaaaccataaccgtagttgatacaactgcccctgtcataattactcctgagaatgtaacctctaatgcaacttcaaaattaaataatattgtagaactagaacaaatttcagtaattgattctatcagtaccgttcaaatcacaaataatgctccttcatactatgaatttggtgaaacaatcgtaacctggaccgcaactgactcttcaggcaactctgcctctgcaactcaaactataactgtagttgatacaactgcccctgtcataactacccctcaaaacatcattgtagatgctgtaaatactgaaactttgcttgaaattggattggcaactatagatgatatta

SEQ ID NO: 202672 - DNA, 709 bp, Unknown
  Bacterial polypeptide expressing nucleotide sequence isolated from the Sargasso Sea
tggactgcaactgactcttcaggcaatacctcttcaataactcaaactataatatttgttgatgaaacatcccctctcataactactaatgatcaaattcttgaagcaactatctctggaggtactgatcttacaattgaaatgccaattgtagatgatattcaaaatacaaacattaccaacgatgcaccagaagtattcccacttggtgaaacaatcgtaacctggactgcaactgactcttcaggtaactccgcatctgcaactcaaacagttactgttgtagatactacatctccagttctgattgcacctgaatccatggaaattgaggcacgtggattagttacaaatattgaagattttggtaatatcgttgcagaagatatttctggaattgcagctatcaccaacgatgcaccagaagtattcccacttggtgaaacaatcgtaacctggactgcaactgatgattacggtaattcagtttctaacactcaatctattatgattattgatactacttctccttccatttctgctccatctgatttacaaattgaggcaaatcacattgaacaaaatattgttgatctaacaggtgttcgtgtatctgatcaagtagaagtatcatctattaccaacgatgcaccagaagtgttcccacttggtgaaacaatcgtaacctggactgcaactgactcttcag

SEQ ID NO: 202673 - DNA, 751 bp, Unknown
  Bacterial polypeptide expressing nucleotide sequence isolated from the Sargasso Sea
cgtccactgactgtaaccgacgggcaggtaaccgtcacacagaccttcacaatcacggtggcgaacaccaacgatgctcctacaatcgactccacagcagtcacgagcgtcgatgaggacagcgcttactcgtacacagctacaggtgcggacgtcgacagcggcgacacgctcacactgagcgcttctgcgccatcatggctgacattcacgccttccactggcgtgctcgctggtactccaaccaacgacgaggtcggatcccacagcgtgaccatcacggtcaccgacgctgcgggcgcgactggcacacagacgttctcaatcacagtggctaacaccaacgacgccccttcaatcacaagcactgcacctacgtcagtggatgaggacagcgcatacagctacaccgttacaacctcagatgtggatgtcggggactcagtctctctgactggcaccaccataccaagctggatggcgttcgatgcagagacaggagtcctttccggaactccgtccaacagcgatgtaggatcccacagcgtaacgataactgctgaagatgacgcaggagcaacagctactgacacattcagtatcacggttgctaacaccaacgacgcaccgacaatcgactccacagcagtcacgagcgtcgatgaggacagcgcttactcgtacacagctacaggtgcggacgtcgacagcggcgacacgctcacactgagcgcttctgcgccatcatggc

SEQ ID NO: 202674 - DNA, 879 bp, Unknown
  Bacterial polypeptide expressing nucleotide sequence isolated from the Sargasso Sea
gcaactcaaacagttactgttgtagatactacatctccaacaattgaacaacctgagaatgtgatatttgaagcagaaaaccaatcaaataacatacttgaattaccaatgattgtattatttgataatactgaaataatatctattaccaacgatgcaccctcatcatttgaatttggaaaaacaactgttacatggactgtagttgatattgttggtaatacatcaacaatgtctcaagaagtgcacataatagatactacatctccaacaatctctgcaccatcaaatgttcaagttgaggccacttctatggaaaatacaattgtagattatgattttgctcaagtctctgatcaagtagaagtatcatctattaccaacgatgcaccagaagtattcccacttggtgaaacaatcgtaacctggactgcaactgactcttcaggtaactccgcatctgcaactcaaacagttactgttgtagatactacatctccaacaattgaacaacctgagaatgtcatttttaatgcaacctcaaaatctaaaaatgttatagatttggaaacagtttctgcacttgattccataagtgatgttaaaatcaataacaatgccccatcttattattcatttggtgaaacaatcgtaacctggactgcaactgactcttcaggtaactccgcatctgcaactcaaacagttactgttgtagacaccactggtccaacacttcatgccccagaaaatatcaccattgatacagtgaccattaacactatgcttgaaattggtttggcttctgttagtgatataattgatgattctccttctattaccaacgatgcaccagaagtattcccacttggtgaaaca

SEQ ID NO: 202675 - DNA, 916 bp, Unknown
  Bacterial polypeptide expressing nucleotide sequence isolated from the Sargasso Sea
tatcgtaacttggactgcaactgactcttcaggtaactccgcatctacaactcaaacaattactgtagtagatactactgttccaataattacaactccttctgatattgagattgaaataattgataattctggtatgaaattagatattggtgcggctacttctgatgatacagttgatctccaacctctaataactaacgatgcaccagaggtattcccacttggtgaaactatcgtaacttggactgcaactgactcttcaggtaactccgcatctgcaactcaaacaattactgtagtagataccactgctccggttttaatctcaccagaatcagttacaagagaagcaatcaacaatgaagctaatcctgttagaattggtatgtctgaagctattgatatagtagaagtatcctccatcactaacgacgcaccagaggtattcccacttggtgaaactatcgtaacttggactgcaactgactcttcaggtaactccgcatctgcaactcaaacaattactgtagtagataccacacttccaaccatctttacaccatcaaatgtgcaagttgaggctacatctatggaaagtacaattgttgattacggctttgctcaagcatctgatcaaatagaagtatcctccatcactaacgacgcaccagaggtattcccacttggtgaaactatcgtaacttggactgcaactgactcttcaggtaactccgcatctgcaactcaaacaattactgtagtagataccactgctccagtcatagaacaacctgaaaatgtaatttcagaagcagaaaatctgtcaaataacacagttgaattacaaatgattgtatcatctgataatactgaaataatctccataactaacgacgcaccttcattcttgaat

SEQ ID NO: 202676 - DNA, 946 bp, Unknown
  Bacterial polypeptide expressing nucleotide sequence isolated from the Sargasso Sea
accctggaccatcaccatcaccggcaccaacgatgcaccggtgctgcaggctgatgtgggggcggtcaacgaagacgcgatcctgaccgtcgatgcggccagcggcgtgctggccaacgacagcgatgtcgacggcaacgccctccaggtgactggtatcctgagcggcaccagcgggacggccacggccgtgaacgccagtggcgacaccgtgctgaccaacagctacggcacgctgaccatccgggctgacggcagctacagcttcaatgccaatggagcggatgcgcagaaactggcggccggtcagctggcgaacgtggtgttcacctacaccgcgaccgacggcaccgagagccggaccagcaccctgaccatcaccatcaccggcaccaacgatgcaccggtgctgcaggctgatgtgggggcggtcaacgaagacgcgatcctgaccgtcgatgcggccagcggcgtgctggccaacgacagcgatgtcgacggcaacgccctcaaggtgactggtatcctgagcggcaccagcgggacggccacggccgtgaacgccagtggcgacaccgtgctgaccaacagctacggcacgctgaccatccgggctgacggcagctacagcttcaatgccaatggggcggatgcgcagaaactggcggccggtcagctggcgaacgtggtgttcacctacaccgcgaccgacggcaccgagagccggaccagcaccctgaccatcaccatcaccggcaccaacgatgcaccggtgctgcaggctgatgtgggggcggtcaacgaagacgcgatcctgaccgtcgatgcggccagcggcgtgctggccaacgacagcgatgtcgacggcaacgccctcaaggtgactggtatcctgagcggcaccagcgggacggccacggccgtgaacgccagtggcgacaccgtg

SEQ ID NO: 202677 - DNA, 917 bp, Unknown
  Bacterial polypeptide expressing nucleotide sequence isolated from the Sargasso Sea
gggctgacggcagctacagcttcatgccatggggcggatgcgcagaaactggcggccggtcagctggcgaacgtggtgttcacctacaccgcgaccgacggcaccgagagccggaccagcaccctgaccatcaccatcaccggcaccaacgatgcaccggtgctgcaggctgatgtgggggcggtcaacgaagacgcgatcctgaccgtcgatgcggccagcggcgtgctggccaacgacagcgatgtcgacggcaacgccctcaaggtgactggtatcctgagcggcaccagcgggacggccacggccgtgaacgccagtggcgacaccgtgctgaccaacagctacggcacgctgaccatccgggctgacggcagctacagcttcaatgccaatggggcggatgcgcagaaactggcggccggtcagctggcgaacgtggtgttcacctacaccgcgaccgacggcaccgagagccggaccagcaccctgaccatcaccatcaccggcaccaacgatgcaccggtgctgcaggctgatgtgggggcggtcaacgaagacgcgatcctgaccgtcgatgcggccagcggcgtgctggccaacgacagcgatgtcgacggcaacgccctcaaggtgactggtatcctgagcggcaccagcgggacggccacggccgtgaacgccagtggcgacaccgtgctgaccaacagctacggcacgctgaccatccgggctgacggcagctacagcttcaatgccaatggggcggatgcgcagaaactggcggccggtcagctggcgaacgtggtgttcacctacaccgcgaccgacggcaccgagagccggaccagcaccctgaccatcaccatcaccggcaccaacgatgcaccggtgctgcaggctgatgtgggggcggt

SEQ ID NO: 202678 - DNA, 742 bp, Unknown
  Bacterial polypeptide expressing nucleotide sequence isolated from the Sargasso Sea
gttgactattgttggtaatcaatcaacattgttacaagaagtggaggttgtcgataccacatctccaacaatcactgccccatcaaatgtccaagttgaagccatctctatggaaaatacaattgttgattatggttttgctcaagcatctgatcaagtagaagtatcatctatcactaacgacgcaccagaggtattcccacttggtgaaactatcgtaacctggactgcaactgactcttcaggcaactccgcatctacaactcaaacaatcactgttgtcgataccacatctccaatcatagaacaacctgagaatgttatctttaacgccacctctaaatctaaaaacgtaattgacttgcaatcactttctgcaactgactctattagtgatctaaaaattactaacgacgcaccatcatactattcatttggtgaaactatcgtaacctggactgcaactgactcttcaggcaactccgcatctacaactcaaacaatcactgttgtcgataccactgctccaaaacttaatgctcctgaaaatatcactattgatactgaaagtattgacactatacttgaaattggcttggcatctgtaagcgatataattgatgattctccttctatcactaacgacgcaccagaggtatttccacttggtgaaactatcgtaacctggactgcaactgacaaatttggtaatatatcatcatcaacacaaataatctctgta

SEQ ID NO: 202679 - DNA, 866 bp, Unknown
  Bacterial polypeptide expressing nucleotide sequence isolated from the Sargasso Sea
ttttcctgtttccagagatatccaaaatgtacaattaactaacgatgcacctgaagtattcccacttggtgaaaccatagtaacatggactgcaactgatacatctggtaactccgcatctgaaactcaaattatttcagttgttgacacaagtttacctaatataatttctccaaatgatgttcaagttgaagcaacctcaattgatgcgaacaatgtagaatttggtatagctgaagcatctgatctagtagaaatttctaccataactaacgatgcacctgaagtattcccacttggtgaaaccatagtaacatggactgcaactgatacatctggtaactccgcatctgcaactcaaattatttcagttgttgatacaaccgcacccgtaattgaacagattgaatctcttaattttgaggcaataagtcaatctgttaacatacttgaattgtcaatgattgatgtttatgataatactaaaattattagcataactaacgatgcacctgaatcatttgaatttggaaatactgttgtaacatggaccgtctctgatatttcaggcaatatgtctacatctaagcaagaaatacatgttatagatacaaccattcctatcataacagtcccaaatgatgttcaagttgaagcaacctcaattgatgcgaacaatgtagaatttggtatagctgaagcatctgatctagtagaaatttctaccataactaacgatgcacctgaagtattcccacttggtgaaaccatagtaacatgggctgcaactgatacatctggtaactccgcatattcaactcaaattatttcagttgttgatacaaccgcacccgtaattgaacagc

SEQ ID NO: 202680 - DNA, 824 bp, Unknown
  Bacterial polypeptide expressing nucleotide sequence isolated from the Sargasso Sea
ttgaagaatgctgaagccgccatcgaggcattcgcgcgccgaggcttgcgtacgctttccatcgcgtacaccgacatcaacaaggcaccgtcggcgcttggtgacgttgctccggaacgagatctcactctgcttggaatcatgggcatcaaggatcccattcgacccgaaacggctgaagccgtgcgcttacttcgcggcgccggtgtgacggtccgtatggtgaccggggacaacgccatcacagcggaggctatcgcgagagaagccggtatcctcgaagacggagatgatggattagtcttggaaggtccagtattccgaaaaatgagcgatgacgagaaggaagcgattgcgatgaagattcgcgtcttggcgcggtcctctccttccgacaaattggttttgtgcaacttgcaaagaaagctcggtgaagtcgtcgccgttactggtgatggcactaacgatgcgccggctctcaaggatgcggacgttggttttgctctcggcatcgcgggtacagaaatcgcaaaggaagcgtgtgatattgtcattcttgacgataacatcaagtcgatggccaaggctgtgctttggggtcgcaacgtctaccagtctattcgcaaattcttgcagtttcaactcgtcgtgaacgtggtcgcggtgagcttaaatctcatcgccgccatcggaggcatcgatgaactcccactcgcggcggtaccgctcctctgggtgaacatgattatggactctatgggtgcgctcgcgctcgccacggagcctccgtctccacaattaatgaagcgtaagccgttcggtag

SEQ ID NO: 202681 - DNA, 907 bp, Unknown
  Bacterial polypeptide expressing nucleotide sequence isolated from the Sargasso Sea
caaactataacggtagttgatacaacttctccagttcttattgcacctgaatcaataatacaagaagcaattaatcatgaagcaaatcctgtaagaataggaatttctgaatatactgacataatggaggtaacatcagtcactaacgatgcaccagaagtattcccacttggtgaaacaatcgtaacttggactgcaaccgacttttcaggcaactccgcctcagcaacccaatctatcacaataatcgacacaactctaccaacaatcacatctcctgttgatgtggaagttgaagcaaaatccatggaaaacaatcttgttgaatttggattcgcagaagcatctgatcaggttgaaatatcaacaatcactaacgatgcacctacagtattcccacttggtgaaacaatcgtaacttggaccgcaacagactcttcaggcaactccgcctcagcaactcaaactataaccgtagttgacacaactgctccggtagtagaaaatcttgattcattaacatttgaagcaacagctcaaaatactaatttggttgaaatacctttgatcactgcatctgataatactgaaattatatccatcactaacgatgcacctgttttgtttgaatttggaacaactatcataaattggtctgttgttgatattattggcaatcaatctgttgtagagcaacaaattgacataatcgacacaactctaccaacaatcacatctcctgttgatgtggaagttgaagcaaaatccatggaaaacaatcttgttgaatttggattcgcagaagcatctgatcaggttgaaatatcaacaatcactaacgatgcacctacagtattcccacttggtgaaacaatcgtaacttggaccgcaacagactcttcaggca

SEQ ID NO: 202682 - DNA, 840 bp, Unknown
  Bacterial polypeptide expressing nucleotide sequence isolated from the Sargasso Sea
tgaaacaatagtaacttggactgcaactgacgattatggtaattcaatatcaaatactcaatcaatcactgttttagatacaatctcacctgtaattatggcaccatctgatttccaacttgaggctagtcatattgaaaataatatcattgatctaattggcgttagagcatcagatgatgttgaagtcatatccatcactaacgatgcaccagaagtattcccacttggtgaaacaatagtaacttggactgcaactgactcttcaggcaactccgcctcagattcacaacaaatttcagttatagataccaccaccccatctatcatcgctccaaatgatattcaagttgaaatatatgataaattaggtgttgaaattgatactggcattcctacatcagatgatgttatcgattctcaacctacagtcactaacgatgcaccagaagtattcccacttggtgaaacaatcgtaatctggaccgcaactgacttttcaggcaactccgcttcagccactcaaaccataactgtagttgacacaacttctccagttcttattgcacctgaatcaataatacaagaagcgattaatcatgaagcaaatcctgtaagaataggaatttctgaatatagcgacataatggaggtaacatcaatcactaacgatgcaccagaagtattcccacttggtgaaacaatcgtaatctggactgcaactgactcttcaggcaactccgcctcagcaacccaatctatcacaataatcgacacaactctaccaacaatcacatctcctgttgatgtggaagttgaagcaacatccatggaaaacaa

SEQ ID NO: 202683 - DNA, 1348 bp, Unknown
  Bacterial polypeptide expressing nucleotide sequence isolated from the Sargasso Sea
tttgactgcaaccgactcttcaggcaactccgcctccgcaactcaaaccataaccgtagttgatacaactgctccggtagtagaaaatcttgattcattaacatttgaagcaacagctcaaaatgctaatttggttgaaatacctttgattactgcatctgataacactgaaatcatatccatcactaacgatgcacctgttttgtttgaatttggaaccactatcataaattggtctgttgttgatattattggcaatcaatctgttgtagagcaacaaattgacataatcgacacaactctaccaacaatcacatctcctgttgatgtggaagttgaagcaacatccatggaaaacaatcttgttgaatttggattcgcagaagcatctgatcaggttgaaatatcaacaatcactaacgatgcacctaccgtattcccacttggtgaaacaatcgtaacttggactgcaaccgactcttcaggcaactctgcctcagcaactcaaaccataaccgtagttgatacaactgcccctgtcataattactcctgagaatgtaacatcaaatgcaacttcaaaattaaataatattgtagaactagaacaaatttcagtaactgattctatcagtaccgttcaaatcacaaataatgctccttcatactatgaatttggtgaaacaatcgtaacttggactgcaactgactcttcaggcaactccgcctcagcaactcaaaccataaccgtagttgatacaactgcccctgtcataactatccctcaaaacatcattgtagatgctgtaaatactgaaactttgcttgaaattggattggcaactatagatgatattattgatgatagtccaattattactaacgatgcacctacagtattcccacttggtgaaacaatcgtaacttggaccgcaactgacaaatttggaaacacatcctcatccttacaaacaatttctgtccaaacatgtggtaatgatcctttatcatacaatctgattgtcggttctgaagaagatgacatactaattggcactgcattgtctgacttaatttttgcaaatggtggagatgatattatttctggtgataaaggaaatgattgtattcttgcaggtgatggtgatgatataatttttggaaatcaaggtaatgatcatatttctggtcaaggaggtaatgacatcattaaaggtcaatcaggtgaagactttgtctttggtggattaggattagatgtgattgatggcggtgatgatattgatacctgcaaagtaatcgatgaacaaaattatgatattgtaataaagtgtgagtcaaatgaataa

SEQ ID NO: 202684 - DNA, 1261 bp, Unknown
  Bacterial polypeptide expressing nucleotide sequence isolated from the Sargasso Sea
tttgcagaagcatctgatcaagttgaagtaatatcaatcactaacgatgcacctacaacattcccacttggcgaaacaatcgtaacatggactgcaactgactcttcaggcaattcatcttcagcaactcaaatcataaccgtggttgacactacagctcctatagtagaaaatcttgattcattaacatttgaagcaacaactcaaaatgataatctgattgaaatacctttgattattgcatctgataatactgaaatcatatcaatcactaacgatgcacctatttcatttgaatttggaaccaccataattaattggtctattactgatattactggtaatcaatctgttgtagaacagcaaattgacataatcgacacaactttgccaacaatcatgactcctgctgatgtagaagttgaagcaacatctatggaaaacaatcttgtagaatttggatttgcagaagcatctgatcaagttgaagtaatatcaatcactaacgatgcacctacaacattcccacttggtgaaaccatcgtaacatggactgcaactgactcttcaggcaattcatcttcagcaactcaaatcataacagtggttgatactacagctccggtcatagtaactcctgagaatgtactctcaaacgcaacttcaaaattaaataatattgtagaattagaacaaatctcggcaactgactctatcagtactgttcaaattacaaataatgctccatcatactatgaatttggtgaaaccatcgtaacatggactgcaactgactcttcaggcaattcatcttcagcaactcaaaccataacagtggttgatactacagctccggtcataactccgcctcaaaacatcattgtagatgctgaaaatactgagaccttccttgaaattggttcggcctctataactgacataattgatgataatccgattatcactaacgatgcaccagaagtattcccacttggtgaaaccatcgtaacttggactgcaactgaccgatttggaaactcatcattctctttacaaacaatctctgttcaaacatgtggcaatgatcctttatcatacaacttgattgttggttcagaacaagatgatatactaattggtactacattatctgatttgatttttggtaatggtggtgatgacattatttctggtgataaaggaaatgactgtattattgctggtgacggtgatgacataatattggaaatcaaggaaatga

SEQ ID NO: 202685 - DNA, 1639 bp, Unknown
  Bacterial polypeptide expressing nucleotide sequence isolated from the Sargasso Sea
aatgacagtgttggcggttatccaatatatcctgaaggaataatctttgatgaagaaaataatttctatattgttgattacagaaataatagaataattcattacaatgaatctggtgttgcactatcaatgtttggtcaaatgggaaatgacaatggacattttaaatttccaaaagatgttgccatatcaaatgacggatatctttttgtcactgatacacaaggtcatcgtatccaaaaattttctactcctctagttcaaagttctataataattgaagaagaacaaaaacttcaaacagaaatttcacctgaatctgaaaaaattgaagataccaaaactccattacagcctataattcctattccaaatgatttccaaaaacctgtgattatggttcctgaagatattctagtagaggcaaccggaccattaacttccataaatattggtgaagccatggcaactgatgaaagtggaatttactcactaacaaataatgccccctcttcatttcctctaggaattaataccataatttggactgctgtcgacggtgctggaaacatggctattgcttctcaaactgtcacaattcaagattccacacctccaaaaatctcttctatcgatgatatatccttagaagcaaaatccacaagccaaaatattgtaacattgaccattcctgaaatatctgatgaggtaggtgtaatgacagtcactaacgatgcaccagaagtattcccacttggcgaaacaatcgtaacatggactgcaactgatgttataggaaatatatcaaatctcagccaatcaattatccttgtagattcaactgctcctcgtattgcattttctgagaatctagttgtagaggcatctagtttagaacaaaatacaattgaattaatcattccagaaacatccgatgacgttgaagtaatatcaatcactaacgatgcaccagaagtattcccacttggtgaaacaatcgtaacatggactgcaactgactcatcaggcaactcttcataccaatcttacacaattacttttattgatactgttattcctgaaattttaatttctgatcaaacatttgaagcaactatttttggtggtacaaacatacctttagagtttccagaaattattgatatccaaaatacagaattaactaacgatgcaccagaagtattcccacttggtgaaacaatcgtaacatggactgcaactgactcttcaggcaattcatcttcagcaactcaaaccataactgtagttgatacaacttctccagttcttattgcacctgaggatctcataatagaagcagaaagtacactaactcaaattgaaaatcttggtgaatttactgctgaagatatatctggaataaccaccgtcactaacgatgcaccagaagtattcccacttggtgaaacaatcgtaacatggactgcaactgatgattacggtaattctatatcgaacactcaatcaattactgttttagatacaatttcgccagtaattatggcaccatccagttttgaaattgaggcaagtcatattgaaaataatattattgatttgattggtgttagagcatccgatgacgttgaagtaatat

SEQ ID NO: 202686 - DNA, 1020 bp, Unknown
  Bacterial polypeptide expressing nucleotide sequence isolated from the Sargasso Sea
tttgaagcaactatcttttggtggtacaaacataccattagaatttccagaaattattgatattcaaaataccgaattaactaacgatgcaccagaagtattcccacttggtgaaacaatcgtaacttggactgcaaccgactcttcaggcaactctgcctcaacaactcaaactataactgtagttgatacaacttctccagttcttattgcacctgaaaatctcataatagaagcagaaagtacattcactcaaattgaaaatcttggtgaatttgttgctgaggatatatctggaataaccacagtcactaacgatgcaccagaagtattcccacttggtgaaacaatcgtaacttggactgcaactgacgattatggtaattcaatatcaaatactcaatcaatcactgttttagatacaatttcacctgtaattatggcaccatctgatttccaacttgaggctagtcatattgaaaataatatcattgatctaattggcgttagagcatcagatgatgttgaagtcatatccatcactaacgatgcaccagaagtattcccacttggtgaaacaatcgtaacttggactgcaacagactcttcaggtaactctgcctcagattcacaacaaatttcagttatagatacaaccattccatctatcatcgttccaaatgatattcaagttgaaatatatgataaattaggtgttgaaattgatattggtattcctacatcagatgatgttatcgattctcaacctacagtcactaacgatgcaccagaagtattcccacttggtgaaacaatcgtaacttggactgcaacagacttttcaggcaactctgcttcagcaactcaaactataactgtagttgatacaacttctccagttcttattgcacctgaatcaataatacaagaagcaattaatcatgaagcaaatcctgtaagaataggaatttctgaatatactgacataatggaggtaacatcaatcactaacgatgcacc

SEQ ID NO: 202687 - DNA, 1365 bp, Unknown
  Bacterial polypeptide expressing nucleotide sequence isolated from the Sargasso Sea
gaaaaaattgaagatatcaaaactccattacaacctgtaattcctattccaaatgatttccaaaaacctgtaattttagttcctgaagatatcttggtggaggcaactggaccattaacttctattgatattggcgaagcaatggcaactgatgaaagtggaatttattctctaacaaataatgctccatcatcattccctctaggaattaacactataatctggaccgctgtagatggtgccggaaatatggccattgcttctcaaacagtcacaatccaagattctacttccccaaaaatttctgccatggatgatatttctctagaagcaaaatcatccagtcaaaatctggtaacattgactattcctgaaatatatgatgaagtaggtgtaatgtcagtcactaacgatgcaccagaagtattcccacttggtgaaacaatcgtaacttggactgccactgacgttataggaaacatctcaaatcttagccaatcgattattttggtagattcaactgctcctcgtattgcattttctgaagatctaattattgaggcatctagtttagaacaaaatacccttgaattagtgactccagaaacatcagacgatgttgaaatatcatcagtcactaacgatgcaccagaagtattcccacttggtgaaacaatcgtaacttggactgcaacagactcttcaggcaattcttcatcacaatcttatacaattacttttgttgatacaattattcctgaaatcttaatctctgatgaaacatttgaagcaactatctttggtggtacaaacataccattagaatttccagaaattattgatattcaaaataccgaattaactaacgatgcaccagaagtattcccacttggtgaaacaatcgtaacttggactgcaacagactcttcaggcaactctgcctcaacaactcaaaccataactgtagttgatacaacttctccagttcttattgcacctgaaaatctcataatagaagcagaaagtacattcactcaaattgaaaatcttggtgaatttgttgctgaggatatatctggaataaccacagtcactaacgatgcaccagaagtattcccacttggtgaaacaatagtaacttggactgcaactgacgattatggtaattcaatatcaaatactcaatcaatcactgttttagatacaatttcacctgtaattatggcaccatctgatttacaacttgaggctagtcatattgaaaataatatcattgatctaattggcgttagagcatcagatgatgttgaagtcatatccatcactaacgatgcaccagaagtattcccacttggtgaaacaatc

SEQ ID NO: 202688 - DNA, 658 bp, Unknown
  Bacterial polypeptide expressing nucleotide sequence isolated from the Sargasso Sea
gcggaacagcagcgagatccatgcggttgtcatcaccggagctggcgacgactggttctcggcagggctgatgaatccggcgatccgcgccgccatgaccaaggacgaggtgattgcctatgtggtcgacggcaaccgcatcttcgacgagctcgaggccctgccacagataaccatcgccgcgatcaacggcaagatcgtcgccggtgcgtccgagctggcgctcgcctgcgatatccggattgcgggagaccattcgagcctgatgctgccggaagccaaatggggcggctttcccggcgccggagcgccacaccgcctgcccatggcggtcggtcacagccatgcgctggagctgatagcgaccggcaaggaaatcgacgccgccgagatgttgcgcatcggatttgtgaaccatctccacccgcaggggaaggtccatgcggcggcagacgcgctggcgcggaccattgccgcgaacggtcccctcgcgacccgcggggccaagcgcatcgcccgggcccggcaggagccggggttccgcgccgcgcgcgagatgtcagacactttgcgccacgcactcgaatggagccacgacgtggatgaaggcatcgcggcagcgaaggaaggccggccggcgaagttcacgggccggtag

SEQ ID NO: 202689 - DNA, 169 bp, Unknown
  Bacterial polypeptide expressing nucleotide sequence isolated from the Sargasso Sea
catgagcaacaagaaccccggaaacttcgccaatgatcgtgagaaggcttctgaagcaggcaagaaaggcggtcagaacagcggtggtaatttcgccaatgaccgtgaaaaagcttccgaggcaggccgcaaaggcggccaaaacagccatggcggaggccgcgcttga

SEQ ID NO: 202690 - DNA, 570 bp, Unknown
  Bacterial polypeptide expressing nucleotide sequence isolated from the Sargasso Sea
tatgattaaagattttattttgccggacattggtgaaggcgttgtcgagtgcgaactcgtcgagtggttggtgcaagagggcgataccattgctgaagatcagcccatcgccgatgtgatgactgacaaagccttagtgcaaattccggcgccttttgcaggagtcgtgaccaagctttattacgccaaaggcgatatcgctaaggtgcatgcaccgctgtatgccgtgcagattgaggctgacgacgccgcgcttgttgcagcgtctcaacctgaagtacaggcatctactcaagcatctgcaaaccaagcctgtgtggcgggtactagcgtggaagagttcctgctgcccgatattggcgaaggcattgtagagtgtgaactggtcgaatggttagtacaagaaggtgatactgtggttgaagaccaacccatcgccgatgtgatgacagataaagccctagtgcaaattcccgccatcaaagcgggtaagattgtcaaattgcactaccgtaagggccagttagctaaagtccatgcgccattatttgcaattgaggttgaaggtgg

SEQ ID NO: 202691 - DNA, 677 bp, Unknown
  Bacterial polypeptide expressing nucleotide sequence isolated from the Sargasso Sea
atccaattttaaagaacaaaattcttttatacctattattattattagtggtcatggaacagttgatatggcagttaatgctattaaaaaaggtgcgtatgattttatagagaaaccttttaatagtgataaacttactattacctgtaaaagagctattgaatctgctctacttataaaagaaaatactaaattaaaatcttttattaatcccaaaacccctttgataggaaaatctaattttattcaagaaataaaaaaaaatattactaaaatttctcaatctaattctcgaattttaatttctggaatggttggtgttggaaagaaactaatagcccaaaaaatacatcaaaattctaaatttaataaatcattatgtacattgattgatttaaaaaatactgaagaaaaagatttagaattatttttttctgattctattaaacaaatatcaaataatattatagctcaatcaaataatacaactttgatcttggaaaatgttgattatttaaatattaattatcaaaaaaaacttttatttttattggaaaataataatttatttaaaaataataatattcatttgaatcaaaaaattatttctactacttcgaaaaatctattagaagaagttaataaaggaaattttattaaaattttatatgatagat

SEQ ID NO: 202692 - DNA, 862 bp, Unknown
  Bacterial polypeptide expressing nucleotide sequence isolated from the Sargasso Sea
tcttataataccaaacgactcacaacaatatacgcctgatgctgcaagaaatagagcatttgttgataaaatagagccaggttctactgctaaaatttttagtatgttatatgctttagaaaatactgagtataaagatgataacagtatatcaataggtgatggttctttgacagttgataagcacactattcatgatgttcatgcaaaagataacaaaatattattttcagatattctgaagctttcaagtaatgtagcaatatcaaaattggcactagattttccaattacaagctacataaataagttaaatgattttggccttggggaaagtaccgctattggttttcctggtgaagtttttggtggtattggccattataatataaagcaaggttccttcgatcaggccgcactttcttatggttatggcatgtctttatctgtactacagttaggccgagcttatttgagaattgctaataacgatagtatgaaacaggtttttttgattaacgataatcatcatgactcaaatgagcaccaccctctagttagtgatgctgcaattaaaagattagtcgcaatgatggagaaagtaactcagaagggaggcactggttatagggcgaatattggtaagataaaagtcgcaggtaaaaccggtaccgcttacatatctaatagtaatggttacagtgagaattttattagctcttttgctggatttgcgccatccttagatccacattatgttgtggttgttgttctttgggagcctaattatgcaaaccactttggtggtaaaagtgctgctccaatttttgcaaatgttatgaaacatttattagtgttttaa

SEQ ID NO: 202693 - DNA, 730 bp, Unknown
  Bacterial polypeptide expressing nucleotide sequence isolated from the Sargasso Sea
gatggtattgaactattatcaaattttaaagaacaaaatcctttaatacctatcattattattagtggtcatggaacagtcgatatggcagttaatgctattaaaaaaggtgcatatgattttatagagaaaccttttaatagcgataaactaactattacttgtaaaagagctattgaatcagctctacttataaaagaaaatactaaattaaaatcccttgttaaccctaaaactcctttaataggaaaatcaaatttcattcaagaaataaagaaaaatattactaaaatttctcagtctaattctcgaattttaatttctggaatggttggtgttggaaaaaaactattagctcaaaatatacatcaaaattctaaatttaataaatcattatgcacatttattgatttaaaaaacactgaagaaaaagatatagaattatttttttctgattctatgaatcaaatatcaaacaatattatagctcaatcaaataatacaactttgatcttagaaaatattgattatttgaatattaattatcaaaaaaaattattatttttattggaaaataataatttatttaaaaataataatattcaattgaatcaaaaaattatttctactactacaaaaaatcttttagaagaagttaataaaggaaattttattaaaattttatatgatagattaagtactatacatattgatattcctcccaattaat

SEQ ID NO: 202694 - DNA, 742 bp, Unknown
  Bacterial polypeptide expressing nucleotide sequence isolated from the Sargasso Sea
gaaggttcttagcaacgtaaacataggactagctcttgttttgttagcttttgttgtccttgctggaccaacatacaacataattatgtcgtatggagagaatttaatttattattttcaggatattattcgtttaagtagttggaatagacctgacgatctgcagtggtatcgtgactggacaatattctattgggcttggtttatttcttggtcaccatttgtaggaatgtttatcgcaaggatatcgaaaggacgaacgattagagaatttctttcagtcgtaatgtttgtccctcttttattttgcacaatatggtttacttctttcggagaaactgcaatttttcaatttcaagaaggaataggtagcttaagtgaaccagtcagtgatatttctcttgttcttttttacatgttagataatctcttattcccagttgtttcaagcatattctctttattcatgttggtgttattctttgtgacttcatctgattcaggttcgttagttatcgataccattacgtcaggtggtaaagataatacgcgcaaaatacaaagagttatgtgggcaattattcaaggactagtcgctacagtattgttagtagctggtggctcatatgctttatcggctatacaatcaggctctatatcgatggctttacctttcgtgtttatcttaattgcagccactataagtttgcttcgaggcgtttatgtagagctatataattag

SEQ ID NO: 202695 - DNA, 284 bp, Unknown
  Bacterial polypeptide expressing nucleotide sequence isolated from the Sargasso Sea
cctgaactccccccactcgtccccaacaactccgcgtttcgcaacgcattgcaccgcccccatgaagatcacccgactcaccacgttcatcgttccgccacgctggtgctttctcaaaatagaaaccgatgaaggcatcaccggctggggggagcctgtgctggaaggccgcgcccacaccgtggccgctgcggtcgatgagttggccgactacctcgtcggcaaagaccctcgccatatcgaagaacattggacagtgctgtaccgcggcggcttctaccggg

SEQ ID NO: 202696 - DNA, 1956 bp, Unknown
  Bacterial polypeptide expressing nucleotide sequence isolated from the Sargasso Sea
atccggcagttttacatcacggcaatcagaacaggaagagagtctgcaactagtggaacaacagcgggcacaataggtcaggctctaaatggtacttatggtgaattaactgtagctgcagatggtagctatagctatgctgcaaccagaagtggagcggacgctttagcggcaggtgtatctgcaattgattactttacctatacagtaagagatcacacaagcagtccaaacgatacagataccgctgaactcgcaataactgttacaggagttggccctttaggagtaaacgatacggcctcagtagatgaaaatgcatcactaaatgctaataatgcatcttcaactggtgttctggcaaatgatgatgataatgctgcttatgatagtgagagtttagctgttacaaatattagctcagactctacagggaatagtgggaacgccactcaaggtgttttaggtacatatggtactctgaccgttgcagctgatggtacttatacttatacggcgaacacagctgcagctgaagccttagatgccggtgactctgaaactgatgtcttcacttacacagttaaagatgatgatgatgtcaattcaagcacagcaaccttaacaatcactgttaacggagtcgatgataatccagttggcaataatgatgcaggtgcaatcaacgaggataaaacccttactgtcagcacaggaagtggagtattatcaaatgatactgatgctgatgctagttcaagtctcacagtgtctgcaatttcgggtggcacagttggtcaagctgtaaatggaacatatggtgttctgactttgagttcagatggtagctatacttatgttgcaaatggcagaagtgaagatggactagctgccgatgccacagcaactgatacatttacttataccgtaagtgatggcgctggaacaactgatacagcagatttagttgtcactgtaacaggtgtaggccctcaagctgttgccgatactggctcagtcaatgaagatgctactttaacagtaaatgaagcatctggtgtaatcagtaatgatgatgacaatgcaagctacgatgttgaaagtttagctataactggcatcactcacggcgttactgggaatagtggtaatgctgcacaagctgttactggaacttacggtgaattaaccatggcggctgatggtagctatgaatatgttgcgaaccaatcagcagctgatgcccttgatcctggtgatcaagttactgatgtatttacatacactcttaaagatgatgccgataaaaatgcaagtactgcaacgttaactattacggtgactggaattaacgatgatattactgccgttaatgatactgatgcggtaaatgctggtgcatcaatctcaagaggtacaagcgatgcacaagagcttgatcaagatgatacagattctgatgctgatgatgttccaggtagtcttactattacagcgatacgaactggacaaaagacaggtagtggcgatacaaaaactcttggccaagaatttacaacaacatacggaacagtcacgatcaacgcagacggatcgtatagttacgctgccaatcgacctgacgcgctcagtctggctaatgaggcaactgtcgttgattactttacatatactgtaacagatcaagctggtgacactgatacaggacaactcgcaataacagtaactggaactactgtggttcctcctacaggaaataatgacacaggatatatccttgaggactctcagcttcaagttactgacggcacatctgcagtaacaggaacagatagtaataataataacgaaagtggagatcattcaggagatgttctccttaatgatactgatccagataatgaccctctaacagtttctgcgatagcaggaggcactctcggaaatgcagtctct

SEQ ID NO: 202697 - DNA, 1375 bp, Unknown
  Bacterial polypeptide expressing nucleotide sequence isolated from the Sargasso Sea
catgaatgaagagcatgggcttcgtcgcggcctgaccaactatggcgacagggatttcgcagcctatttgcgtcgctcttttgcccactcgatgggattaagccgagagatgttggaaaaagcgattattggtattgccatgacgccatcgggttttaacaactgccatcagatgatgcctgatttggtcgaggcggtctctcgaggtgtgttagctgcgggagcattgccgcgtccgtttccgaccacatccttgggcgaggttttcctgagtccgacatcgatggtctaccgcaatctgatgtcgatggacacggaggagatggtgcgagcccaaccgatggatgctgtcgtgctgattggaggctgtgataagaccgtacccgcccaacttatgggcgcggcttcggccgacttgccgtcaattcaactcgtgacaggtcccatgagtactggacaccaccggggtgaacgacttggggcctgcaccgactgcaggcgtttctggagtcgctaccgcgctggcgagataaacaaggatgagatcgatcgggttgagatcaggttggcctcaactgcgggaacctgcgcggtaatgggaacggcctcgacgatggccataattgcagaggtgttgggcatgtcgcttcccggcacagcagcaatcccggccgttgcagcggatagacttgtcgccgccgaggagtcagggaaggcagcggtgagcatgctgaacaacccgatcaagccttccgaaatcattaccgagaaatcagtcgaaaatgcgttgcgcgttcttatggcggtttcgggatccaccaacgcggtgttgcatctggctgccgtagcaggccggcgaggcatccggatcagtgaatcaaggttgaatgatatcagtgaagaaactccggtgctggttgatcttaaacctgtcggcaaaggttatatggaggatttccacgctgcaggtggagtcggtggagtactcagggagctgaaatccctattgcatctcgataccatgaacattttgggtcaaacgcttgaagaccgtttatccgaaccccttgaatgggtggaccgtaaagtgattcgctctttcgatgatccgatttctccccaaggtgggctgatcacactttccggaaacatcgctcctcaaggagcaatatttaaacgtgctgcggcgacgcccagtcttttcgaaagtgagggccgggcagtggttttcgaaaatcttgaggaccttgctaaccgtatagacgaccccgaactcgacatcaccgaaggtgacatcatggttctgaagaacgccgggcctgttgctgcgggaatgcccgaagcaggttacctgccgataccaaagaaactggca

SEQ ID NO: 202698 - DNA, 1597 bp, Unknown
  Bacterial polypeptide expressing nucleotide sequence isolated from the Sargasso Sea
tatgattaaagattttattttgccggacattggtgaaggcgttgtcgagtgcgaactcgttgagtggttggtgcaagagggcgataccattgctgaagaccagcccatcgccgatgtgatgacagacaaagccttagtgcaaattccggcgccttttgcaggagttgtgaccaagctatattacgccaaaggcgatatcgctaaggtgcatgcaccgctttatgccgtgcagattgagtctgacgaagccgcgcctgttgctgcgtctcaacctgaagcacacgcagcgacgcaaacatccgtaagccaagcctgtgtggcgggtactagcgtggaagagttcctgctgcccgatattggcgaaggcattgttgagtgcgaactggtcgaatggttagtccaagaaggcgatactgtggttgaagaccaacccatcgccgatgtgatgacagataaagccctagtgcaaattcccgccatcaaaacgggtaagattgtcaaactgcactaccgtaagggccagttagctaaagtccatgcgccattatttgcgattgaggttgaaggtggcgtcagtgcgccagtcagccatgtacaagaagccagcgccgccgctgtgaataccgctgtaccagcagcttgcgcggcggtgtcctcggagcctgctcgccaaggtaaagccttagccagcccagccgttcgccgtatggcgcgagccttagatatcgatttaagtcgtgtacctggtagtggcaaacatggtcgtgtgtataaggaagacattactcgcttccaagcgcaaggcggcgctgtgcctgccgttgcgccagtggctgctgccccaactgtggctcaatcgacagtatctaccgcagtggcaagcgctgcacggggcgacattgttgagcctattcgtggcgtgaaagccgtgatggcgaaaatgatggtggaatcggtatccaccattccacacttcacctattgcgaagagtttgatttgacagacttagtcgcactgcgtgaaagtatgaaggccaagtactcctccgacgaagttaagctgaccatgatgccattctttatgaaggccatgtcgttagccttaacgcagttccctgtgcttaacagccaagtgaatgcggattgtacggaaatcacctacaaggcgcgtcataacataggtatggcggtcgactctaaggtgggattactggtaccaaacgtcaaggatgtgcaagataagagcatccttgaggtggctgccgagatcactcgcttaaccaatgccgcgcgcagcggccgtgtggcgccagcggatcttaaagaaggcacgatttcgatttcgaatatcggcgccttaggtggcacagtcgcaacgccaattatcaataagccggaagtcgcgattgtcgcattaggtaagttacaaaccttgcctcgctttaatgagaaaggtgaagtggaagcgcgtcagatcatgcaagtgagttggtctggcgatcaccgtgtaatcgatggtggcactattgcccgtttctgtaatctatggaaacaatatcttgagcaaccgcaggatatgctgttagccatgcgttaa

SEQ ID NO: 202699 - DNA, 1597 bp, Unknown
  Bacterial polypeptide expressing nucleotide sequence isolated from the Sargasso Sea
atgattaaagattttattttgccggacattggtgaaggcgttgtcgaatgcgaactcgtcgagtggttggtgcaagagggcgacacgattgtggaagatcaacccatcgccgatgtgatgaccgacaaagccttagtgcaaattccggcgccttttgcaggagtcgtgactaagttgtattacgccaaaggcgatattgctaaggtgcatgcaccgctgtatgccgtgcaggttgagtctgacgaagctgcgcctgcgtctcaacctgaagtacacacagcgactcaaacatccgtaagccaagcctgcgtggcgggtaccagcgtcgaagagttcctgctgcccgatattggcgaaggcattgttgagtgtgaactggtcgaatggctagtccaagaaggcgatacagtggttgaagaccaacccatcgccgatgtgatgactgataaagccttagtgcaaatccccgccatcaaagcgggcaaaattgtcaaattgcactaccgtaagggccagttagctaaggtacatgcaccactatttgcgattgaggttgaaggtagcgttagtgcgcctgtcagccatgcacaggaagcaagcgctgctgtgaataccgctgcaccagccgcttgcgcggcggtgtcctcggagcctgcacgccaaggtaaagccttagccagcccagccgttcgccgtatggcacgtgccttagatatcgatttaagtcgcgtacctggtagtggcaaacatggccgagtatataaggaagacattactcgcttccaagcgcagggcggcgctgtgtctgccgttgcgccagtggctgtagcaccgactcaatcaggtgtgactcaatcaaccgtctctaacgtcgtggcaagttctgcacggggtgacattgtggagcctatccgtggcgtgaaagccgtgatggccaaaatgatggtcgaatcggtatcaaccattccacacttcacctattgcgaagagtttgatttgacagacttagtcgcactgcgtgaaagcatgaaggccaagtattcctccgacgaagttaagctgaccatgatgccattctttatgaaggccatgtcattagccttaacgcagttccctgtgcttaacagccaagtgaatgctgattgtacggaaatcacctacaaggcgcgtcataacattggtatggcagtagattcgaaagtgggattgttagtgcccaatgtgaaggatgtgcaagataagagtattcttgaggtggctgccgagatcacccgcttaaccactgctgcgcgtagcggccgtgtggcaccagcggatcttaaagaaggcacgatttcgatttcgaatattggtgcattgggtggcacagtcgcaacaccaattatcaataagccagaggtggcgattgttgcgcttggtaagttgcaaaccttgccgcgctttaatgcgaaaggtgaagtcgaagcgcgccagatcatgcaagtgagttggtctggcgatcaccgcgttatcgatggcggcaccattgctcgtttctgtaacctttggaaacaataccttgagcaaccgcaggatatgctattagccatgcgttagt

SEQ ID NO: 202700 - DNA, 679 bp, Unknown
  Bacterial polypeptide expressing nucleotide sequence isolated from the Sargasso Sea
actgattcttgcttgcactcccacgaaaatacatgtcattcttgaatgcaaacaggacttcgacgtcagtgactccaagctcaagagggagttcgaagagttcgggcccatcaagaatgcgcgggtggtcaaagatgctgacggcaagtcgcgcggatatgggtttgttgaatttaattcagagtcggacatgaaagaggcttacaaccgtgcagatggaatgaagatcaacgggagacgggttgtggtggatgtcgagcgcggccggacagtcaagaactggaaacctcgccgtcttggaggtgggcttggcggcacacgcaaaggcggcaaggacgtgaacatcacacacagcggacgtgcggataaccctgggggtggataccgcggtggaggtggggaccgcggcggaggatatcgtggtggtggagaccgtggagggtatggtgggggcagctatcgtgataacgatcgcccttcatacagagatggtgggtacagaggtggtggttacagaggtggcggtggccgtgactatgacagcagggaccgtgaccgtgatagggacgaccgtggtggtggacgataccgtgactatgatcgtccatcagacgacgaccggggtcgcgaccgctatgacagacatgaccggtatgatgatagatatgacaggtactaa

SEQ ID NO: 202701 - DNA, 595 bp, Unknown
  Bacterial polypeptide expressing nucleotide sequence isolated from the Sargasso Sea
cttcccttccgcgctgagcaggaggatgtcattgaactgtttgcccagttcggcgaagtcgcgaactgtgcccttcccctcgagcgggataccggtcgtaagcgtggtttcgcatttgtcgagatggcggatgaagctgtcgaagacgcggcgattgaagggcttcagggtgccgagctgatgggccgcccccttcggattaataaagctgagccacggggcagtgctcctcgcggtggcggcggtggttaccgaggtggtggcggtggctacggcggtggtggtggtcgcgatggcggcggtggttatggcggtggcggtggtggttaccgaggcggcggcggtggctacggcggtggtggtggtcgcgatggcggcggtggttatggcggtggtggttaccgaggcggcggtgatgctggtgaccgtccttccggtgcccgtggctgggaagaccgcagctatggcgcccgtgacagcggtggtgagggtggcggcggttatgacgatggccgcagccgccgtcgtcgcggttcatctggtggcggcggtggcggcgatgactattccggttacggaggtgctgagggctgat

SEQ ID NO: 202702 - DNA, 407 bp, Unknown
  Bacterial polypeptide expressing nucleotide sequence isolated from the Sargasso Sea
aatgaaagacgatcaatattcattactaaaagaaaagattaaatcgaacgattttaatagtgtttttgtgcttttagatgaaaacacgcataagtattgcttagaaatttttatcaataaatctgaaatagataattataagaaaatagttatcaaatcaggtgaggaaaataaaaatattgacacatgtattacaatatggaaagaattaaattcacaaaaagcagatagaaaatcactcataattaatctaggaggcggtgtactaactgacattggtgggtttgttgcatcaacctatttaagaggaatagaatttataaatgttcctacaactttacttggaatggtagatgcagcacatggtggaaaaactggaattgattttttgagtttaaaaaaccaaa

SEQ ID NO: 202703 - DNA, 850 bp, Unknown
  Bacterial polypeptide expressing nucleotide sequence isolated from the Sargasso Sea
agcagtacgactacctatacagtaacagctaccaagacctcaacgggttgtacatctactgatgatgttaaggtaacagtaaacaagacagctcccacagcttctattacgaacaatacgggtacatcagagattaattgtaatacaaaatctatcagtgttacagccaaaggcggtggcacatataagtggagtaatagtttaggcaccagcgcaggagctactatcagtgcagcgggaacttacacagtaacagtaactagtagcagtactggatgtacggatactgagagcatcaagattacaaaggatgtgagtgctcccacagcggatgctggcagtgacttcactaagacctgtacatcaaatgcaaacggtaaagcaattggtgcaacagcagtaagcggtgagacctattcatggagtcctacaactggtttaagttcatctacagcagccaacccaacagctgatccaagcagtacgactacctatacagtaacagctaccaagacctcaacgggttgtacatctactgatgatgttaaggtaacagtaaacaagacagctcccacagcttctattacgaacaatacgggtacatcagagctcaattgtaatacaaaatctatcagtgttacagccaaaggcggtggcacatataagtggagtaatagtttaggtaccagcgcaggagctactatcagtgcagcgggaacttacacagtaacagtaacgagtagcagtactggatgtacggatagtgagagcatcaagattacaaaggatgtgagtgctcccacagcggatgctggcagtgacttcactaagacctgtacatcaaatgcaa

SEQ ID NO: 202704 - DNA, 761 bp, Unknown
  Bacterial polypeptide expressing nucleotide sequence isolated from the Sargasso Sea
aaaaattactaccatttcattatctaaacctgaaacctttgatatttcaacaaaggaaaaaattaatttatttaagcagaaaataaaggaacagcttgtagaaaaaaaaattattgataaggatacaccgattgataatattaaaattacattagaatcaccaactggaacaatagaaaattttcagaatagaaaagaacaagaaccaaaaaaattaaaaattacaatatcatcagattcagatattccagaagttgatattatcgaggcagcatttaaagctatgttaaaaactgttgataaaaaaaataaaagaaaaagaagacaactgaaaaatgatctagaaaaaactaagattaatgttaagagtataattcaggaccaggaccagggccaggaccagggccaggaccagggcccgtctcaggataaagaagctgtaataaaaggaacagatataaacctggaaaactcttatgattatggttttgataatgattatggttttgataatgattatggtaataaatatgattatggaaatgaagatgattatggtaatgaatatgattacggtaatgaaggtgattatggtaatgaaggtgattatggtaatgaaggtgattatggtaatgaaggtgattatggtaatgaaggtgattatggtaatgaaggtgattatggtaatgattttggtttaggtaatgattttggtttaggtaatgattttggtttaggtaatgataattctactaaaacgc

SEQ ID NO: 202705 - DNA, 892 bp, Unknown
  Bacterial polypeptide expressing nucleotide sequence isolated from the Sargasso Sea
atatgttaaggtaacagtaaacaagacagctcccacagcttctattacgaacaatacgggtacatcagagctcaattgtaatacaaaatctatcagtgttacagccaaaggcggtggcacatataagtggagtaatagtttaggcaccagtgcaggagctactatcagtgcagcgggaacttacacagtaacagtaacgagtagcagtactggatgtacggatagtgagagcatcaagattacaaaggatgtgagtgctcccacagcggatgctggcagtgacttcactaagacctgtacatcaaatgcaaacggtaaagcaattggtgcaacagcagtaagtggtgagacctattcatggagtcctacaactggtttaagttcatctacagcagccaacccaacggcaaatccaagcagtacgactacctatacagtaacagctaccaagacctcaacgggttgtacatctactgataatgttaaggtaacagtaaacaagacagctcccacagcttctattacgaacaatacgggtacatcagagctcaattgtaatacaaaatctatcagtgttacagccaaaggcggtggcacatataagtggagtaatagtttaggtaccagtgcaggagctactatcagtgcagcgggaacttacacagtaacagtaacgagtagcagtactggatgtacggatagtgagagcatcaagatcacaaaggatgtgagtgctcccacagcagatgctggcagtgactttactaagacctgtacatcaaatgcaaacggtaaagcaattggtgcaacagcagtaagtggtgagacctattcatggagtcctacaactggtttaagttcatctacagcagccaacccaacggctaatcca

SEQ ID NO: 202706 - DNA, 184 bp, Unknown
  Bacterial polypeptide expressing nucleotide sequence isolated from the Sargasso Sea
tatgagtgaatttaattacgatttaggaatattaggcttagggtacgttggacttccattggctatctattcgattgagggcggattaaaagtttttggatatgatataaactctgaaaaagtctcgaaacttaataatggtgaatcaccaattgaggatattagtgatgagactcttaaaaat

SEQ ID NO: 202707 - DNA, 785 bp, Unknown
  Bacterial polypeptide expressing nucleotide sequence isolated from the Sargasso Sea
agctactatcagtgcagcgggaacttacacagtaacagtaacgagtagcagtactggatgtacggatagtgagagcatcaagatcacaaaggatgtgagtgctcccacagcggatgctggcagtgacttcactaagacctgtacatcaaatgcaaacggtaaagcaattggtgcaacagcagtaagcggtgagacctattcatggagtcctacaactggtttaagttcatctacagcagccaacccaacggctgatccaagcagtacgactacctatacagtaacagctaccaagacctcaacgggttgtacatctactgatgatgttaaggtaacagtaaacaagacagctcccacagcttctattacgaacaatacgggtacatcagagattaattgtaatacaaaatctatcagtgttacagccaaaggcggtggcacatataagtggagtaatagtttaggcaccagtgcaggagctactatcagtgcagcgggaacttacacagtaacagtaactagtagcagtactggatgtacggatagtgagagcatcaagatcacaaaggatgtgagtgctcccacagcagatgctggcagtgacttcactaagacctgtacatcaaatgcaaacggtaaagcaattggtgcaacagcagtaagcggtgagacctattcatggagtcctacaactggtttaagttcatctacagcagccaacccaacggcaaatccaagcagtacgactacctatacagtaacagctaccaagacctcaacgggtt

SEQ ID NO: 202708 - DNA, 732 bp, Unknown
  Bacterial polypeptide expressing nucleotide sequence isolated from the Sargasso Sea
cctgcagtcgaacgttgagtttgacgcgtggaagtacatccccgagggcgacgtcgtcaaggtggcagacttcgactggagaccgtacaagagatggtgtgcagtcaacgagtactgggacggcgccgcgtgcagagactgcccggtcgcgacgaggagtcgaggaggcgacgtcacgatgtgttgcgccgccgacgagttctggaacgggcaggcgtgcggggcgtgccccaccggctcgattggcatgcaatacgtcatgtgcacgtgtgctaccgatgagttttggaacggtaccgcctgccagacgtgccccaccggctcgttcagtgcggggggcagtgccaccacgacatcgtgcacatcatgcgaagccgacgagttttggaacggtaccgcctgccagacgtgccccaccggctcgttcagtgcggggggcagtgccaccacgacatcgtgcacatcatgcgaagccgacgagttttggaacggtaccgcctgccagacgtgccccaccggctcgttcagtgcggggggcagtgccaccacgacatcgtgcacatcatgcgaagccgacgagttttggaacggtaccgcctgccagacgtgccccaccggctcgttcagtgcggggggcagtgccaccacgacatcgtgcacatcatgcgaagccgacgagttttggaacggtaccgcctgccagacgtgccccgccggggagtatagccttgg

SEQ ID NO: 202709 - DNA, 979 bp, Unknown
  Bacterial polypeptide expressing nucleotide sequence isolated from the Sargasso Sea
atgcctgagctgcctccttttctcttctacagcctcgaggtgatcggagggatcctgctgctgtttcttggaggagaccagttcgtcaaagggtcggtgacaatcgccaccttgtgccggatcccgcagcttgtgatcggcctcaccgttgttgccttcggcacaagcgccccggagctgtttgtcagtgtcagctcaatcctgcagaacgcagacgatcttgccgttggcaacgtcgtagggagcaacattttcaacattctggtcgtcttgggctgttcggccctggtctttcctctgcgcgtcgagaaccgacttgtgcgtcgcgacatgccggttctgttggccatttcttctgcagcctgggggatggcttccgccggtcggatgacatggcaagcgggcgtggccttgctgatcggcttgatcatcaacaccgtctgggaaatccgaactgcccaggaagaccaccaagagactgatggaacatcagatcttgaacggacgcgctctgggttcaaccggcgtttgacgatcgcgctgcttcagctcgccgtcggcatcactttgctggttctgggctcgaaaacgctggtcagcggagccagctccgcagcggcatttctgaatgtgcccactgctgtgatcggattgacgatcgtcgccacgggcacatccacgccggaactgatcacctcggtcgtggcaaccctgaaggggaagaccgacctcgccgtcggcaatgtcgttggtagttgtctgctcaatcttttgatggttctgggaggctgcgcggctatcagcggtgaagccgggcttcaagtcacgggggaactgatttccgaagatttgccggtcatgatgatcgccaccctggtctgtttgccgattttctggtcacggcgcagcatctccaggattgaaggggggattctgctgaccacttacatcatttacttaactgacaacgtcctgccga

SEQ ID NO: 202710 - DNA, 735 bp, Unknown
  Bacterial polypeptide expressing nucleotide sequence isolated from the Sargasso Sea
aatgcttaaaaaaagaattatcccctgtcttgatgttaaggatggaagagttgttaagggaattaattttgttgatttaatagatgctggaaatccagttgaccaagcaaaattttattcagaaaatggtgcggacgaaatatgttttttggatataagcgcatcattagaaaatagagatactttaattaatattgtcaaaaaaactgctgaggaggtatttattcctcttactgttggtggggggataaaatctattgataatattcaaagcttacttaaggctggcgcagataaggtttctattaattcagcagcaataacagatccaaatataatcaaaaaatcctcgaattattttggaagtcaatgcatagttgttgctgttgatgttaaaaaaaataaaaacagttggttggtatattcccacggcggaacaaagaatactggtattgatgctatagaatggttgcgaaaggttgaacaattaggtgcaggagagattttgttaacctcaatggatagagatggcactaagctgggttttgatctagatattcttgcagaagctaataaaatattaggaataccagttatagcaagtggaggagttggctctattcatcacttttatgaaggtgtaaaagatggcggagcagatgctttgcttgcggcatctgtctttcattttaatgaatttagtataatggaggttaagaattatttaaaaaaaaa

SEQ ID NO: 202711 - DNA, 502 bp, Unknown
  Bacterial polypeptide expressing nucleotide sequence isolated from the Sargasso Sea
aatgtttgataaagttcttattgctaaccgtggtgaaattgcagttagaataaatcgagcctgtcaagaacttggaatttcaactgtagctgttcacagtgaagcagataaagagtctatgcatgtcaggattgccgatgagagtgtttgcattgggcctaatccggttaacaaaagctatttaaatgcacatgccataatttcagcatgtgaaattacaggcgctcaagcagttcatccaggatatggctttctgtctgaaaatgcttcatttgctaaaatgcttgaggatcataaattaacttttattggaccaaagttttctcatatcgaaatgatgggcgataaaattgaagctaaaaaaataatgaaaaaatttggcgtgccaactgttcctggctctgaaggagaagtaaaaagtgagtctgatgcactaacagctagtgatgaaataggataccctgttttgcttaaggcccagtgctggaggtggggcagaggg

SEQ ID NO: 202712 - DNA, 540 bp, Unknown
  Bacterial polypeptide expressing nucleotide sequence isolated from the Sargasso Sea
aatggttgaaaaagttttaattgctaatcgtggagaaatagctttacgaattgtcagaagttgtagagaattaggtattgcaaccgttgcagtttttagcactgtagataaaaaagcattgcatgttcagcttgctgatgaggcggtttgcgttggagattcattaagtaataagagctatttaaatattccaaatatacttgctgctgctacgtcgagaggagttgatgctattcatcctggttatggatttcttgcggaaaatgacaaatttgctgagatgtgtaatgatcacggcatagtttttattggcccatctcctaaagctattagatctatgggagataaatctacggctaaagaaactatggaagcagttggagttccaacagtacctggtagtaaaggcctattatcaaatgttgatgaggcttataaattggcagatgatattggctatccggtaattattaaagcgactgctggaggaggtggaagaggtatgcggttggttgaaaactctgataatctcgaaaaaat

SEQ ID NO: 202713 - DNA, 424 bp, Unknown
  Bacterial polypeptide expressing nucleotide sequence isolated from the Sargasso Sea
ttgcttgtagctaaccgaggcgaaattgcatcgagggtttttaggactgcaaaaaaaatgggcctcagaaccgttgcaatatacaccgaagcagacaggcattcaccctacgtaggcgatgccgatctatctgtaaaaatagaatcatcgtatctcgactcagatgcgattatttctgcagcaaagaagtcaggtgctgaagccattcatccgggctacggattcttatccgagaaccatgaatttgcaatgagggttcaaaatgaggagatcgtctgggttgggcccgatccacagtcaattcaaatcatgggcgataaaattgaagcgaagaaacatgccattaaggccaatttgccaatattggaatcggtcaatgacgcaagctctgttaaaaacataggttatcccttgatgatcaaag

SEQ ID NO: 202714 - DNA, 904 bp, Unknown
  Bacterial polypeptide expressing nucleotide sequence isolated from the Sargasso Sea
atgaaaaaaattctgattgcaaaccgtggggaaattgcctgtagaattatcaatagttgtaaaaaacttaagtttcactcaatagcagtttattctgatatagataaaaacagtaaacatgtaagaaaagccgatgagtcaattcacatcggtgcatcgaaagctcaagaaagctatttaaatgcagataaaataattgaagcagccaaaaaattaaaagctgacgctattcaccctggttatggttttttagctgaaaacgaaaaatttgcccaaaaagtaattgattcaggaattatttggataggacctaaaccaaatacaattgtctcgatgggcaacaaagatatagcaagagatttagctttaaaaagtaatttacctatttgtccaggcttaaataataaggatttagaaaaagaagatttagaaaaaaaatgcaatgaaattggttttcctattctagtaaaagctagcgcaggaggaggcggaataggaatgcaaattgttaatgattatggagaattaattaaatctatagaaaaaacaaaaaatttagctaagaaagctttcggcaacagtgacgtatttttagaaaaatttataaaaaatgcaagacatatagaaatacaaatatttggttttggtaaaaagaaagctgtgcatttttttgaaagagactgttcgatacaaagaagatttcaaaaaattatagaagaaagtccagcaccaaaaatagatgaaaaaatcttaaatgaaatggcgcaaagtgcagttaactttgcaagcaatcaaaattatgaaggagctggaacaatagaatttatatatgatgtggatgaaaaaaaattctactttttagaaatgaatacaagaattcaagtagaacatcctggtaactgaa

SEQ ID NO: 202715 - DNA, 373 bp, Unknown
  Bacterial polypeptide expressing nucleotide sequence isolated from the Sargasso Sea
atgtttaaaaaaattttaatagctaatagaggtgaaatagcagtccgtataattagagcatgtaaagaatgggggatttctactgtagctattcattcagatgttgatagagagagtatgcatgttagattagctgatgaaagtatttgtgtaggacctcaccaaccaacatttagttatttaaatattcccgcaataatgtcagctatcgaactcacaggtgctgaagctgtccatccaggttatggttttttatcagaaaactttgagttcgcaaaaatgttagaagaaaataatataaaatttataggtccttcatctaagttaataaaaatgatgggagacaaaattcaagctaaaaaagtagctaaag

SEQ ID NO: 202716 - DNA, 665 bp, Unknown
  Bacterial polypeptide expressing nucleotide sequence isolated from the Sargasso Sea
catgacggaggcgcgcgcgagcgagacggcgcgaagcgaagagacgcgctcgacgtccccgcgcgcgtcgctcgtcggtggcgatgaggatgggagtgaaaccggacgcgacgtcgccgccggcgcgcgcgaagagacgtcgcgcgcgcgagaggaggacgagagcgaggaggacgagagcgaggacgaggaggacgaggatgagtcgtcctcgtccgaggggtacggtttcggtcgcgaatcgcccgatatgctcgcgttgatgacgagactcgcggcgcaaaagctcggcacgacgacggatgcggtcgagagcgcgccgatcgaacgcgcgctcgaatcgttcgatttgaaaggagtcgcgcagtacattcgttcgggttcggcgaagaatatcgtcgtcatgaccggggcgggcatcagcgtctcggcgggcataccggattttcgcagcgagtcgggattgtacgcgcgactcggcgaatacgatttaccgtacccgcaggcgatattcgagttgaattactttcgacagaaacccgggccgttttataagctcgcggcggatctgtatcctggattgtacgcgccgacgccgacgcaccatttcatcaaattgttgcacgacaagggactgctattgcggtgctttacgcaaaacatag

SEQ ID NO: 202717 - DNA, 1036 bp, Unknown
  Bacterial polypeptide expressing nucleotide sequence isolated from the Sargasso Sea
atagcgaatagaggggaaatagctgtacgcgttataagagcttgtaaagaatggggtattgctacagtggctattcattcagatgtggacagagatggaatgcacgtaagattagctgatgaaagtatttgtgtaggtccccatcaaccgtcgttaagctatttaaatattcctgcaattatgtcagccattgaacttacgggagctgaggctgtgcatcctggatatggttttttgtcagagaactatgaatttgctaaaatattagaagaaaacaatataaaatttataggtccttcatctgatttaattaaaatgatgggagataagattcaagcaaaaaaagttgcaaaagaatatgggcttcctgttatagaaggttcagatggtggaattaaagatttgggagaagcaaaaaaaatatgcgagaatgtaggctttcctgttttaattaaggcatcaggtggtggtggtggaaaaggaatgaaaattgtcaagaagttagatgaatttgagagtctttttttaacagcaaaacaagaagcaaaaaaattttttaataatgatgaagtttatattgaaaaattttttcaaaatccaagacatatagaagttcaggtgctttcgggtaaaaatagaactgtgcatttgcatgagagagattgttctgttcaaagaagacatcaaaaactaatagaagaaactccaagtcctgttttagatgatgtaattagaaaagatctgtttgataaaacagttagtatggttaacaaaattggatatgagggtgctggaacagttgaatttatatacgaggatagaaaattctactttttagagatgaatactagagtacaagttgaacatccagtaaccgagatggtaacaggaattgatataataaaagagcaaatatggattgctttttccggagatacagccctgaaacagagtgatgtaaacccaaggggtcatgctatagaatgtagaattaatgctgaggatccaagtaataattttcaaccttcgccaaggt

SEQ ID NO: 202718 - DNA, 484 bp, Unknown
  Bacterial polypeptide expressing nucleotide sequence isolated from the Sargasso Sea
catggcgaatgtaaccccaatcaaaaaaatattgatcgctaatcgaggcgaaattgctcgtcgcattatgcgcaccgcgcacgacatgggcataagcacagtcgctatatttgccgatggtgattccaacgctcccttcgttcatgaagcggatacagcaatctctcttgaaggcaaaacaacggcagaaacctacttggatgtggataaggtgatcaatgcctgcaaaagaagcggagcagatgctgtccacccaggctacggttttttatctgaaaatgaggactttgcacaggcaatcattgatgctggcattaaatggattggtccttcgcctaaagttatcggtcttatgggagacaagctttcagccaaatcgctgatgcaagaagcaggtgtgccaaccctcccggctatcgaaatccaaaaagacactgatatcaaagcttctgcggctgaaattggctatccagtccttgtaaag

SEQ ID NO: 202719 - DNA, 532 bp, Unknown
  Bacterial polypeptide expressing nucleotide sequence isolated from the Sargasso Sea
aatggttgaaaaagttttaattgctaatcgtggagaaatagctttacgaattgtcagaagttgtagagaactaggtattgcaaccgttgcagtttttagcactgtagataaaaaagcattgcatgttcagcttgctgatgaggcggtttgcgtcggagattcattaagtaataagagttatttaaatattccaaatatacttgctgctgctacatcgagaggagttgatgctattcatcctggttatggatttcttgcggaaaatgataaatttgctgagatgtgtaacgatcacggcatagtttttattggcccatctcctaaagctattagatctatgggagataaatctacagctaaagaaactatggaagcagttggagttccaacagtacctggtagtaaaggtttattatcaaatgttgatgaagcttataaattggcagatgatattggctatccagtaattattaaagcgactgctggaggaggtggaagaggtatgaggttagttgaaaactctgataatctc

SEQ ID NO: 202720 - DNA, 694 bp, Unknown
  Bacterial polypeptide expressing nucleotide sequence isolated from the Sargasso Sea
ctggtggccaaccggggcgagatcgcgtgccgcgtgtttgcgaccgcgcgcaggatggggatcccgacggtggcggtgtactcgtcgcccgacgcgtcgtccaagcacgttcagatggcggacgagtcgaggcacgtggggccggccgcgtcctccgagtcctacctggccatggaccgcatcctcgaggcgtgcgtcgagacgggcgccgacgcggtccaccccggctacgggttcctctcggagaacaccaagttctgcgacctgctcgagaagcacggcgtcaccttcgtggggcccaagcagcacgcgctcgaggtgatgggcgccaagatcgccagcaagcgcatcgccaccgaggcgggcatcaacgtggtgcccggctttgtgggcgaggtgcgcgacgaggcgcacatgctcgagatcgcgcgcgagatcggctacccggtcatgatcaaggcctcggccggcggcggcggcaagggcatgcgcgtggcctacaacgacaccgaggcgcgcgagggctaccacctctccatccaggaggcgcgcgcctcctttggcgacgacgccatgctggtggagaagttcgtggaggagccgcgccacatcgagatccaggtgctggccgactcgcacagcaacgccgtctacctcaacgagcgcgagtgttccatccagaggcgaaccaaaa

SEQ ID NO: 202721 - DNA, 298 bp, Unknown
  Bacterial polypeptide expressing nucleotide sequence isolated from the Sargasso Sea
atgtttaaaaaaattttaattgctaacagaggcgagatagctgtaagaattattagggcatgtaaagaatggggaatttctacagtcgcgattcactcagatgttgacagagatagtatgcatgtaaagttagctgacgaaagtatatgtgttggatctcatcagcctgtaaacagttacttaaatataccagcaatactatctgcaatcgaattaacaaacgctgaagctgttcatccagggtatggttttttatctgaaaattctaattttgcaaaaatattagaagagaaataac

SEQ ID NO: 202722 - DNA, 883 bp, Unknown
  Bacterial polypeptide expressing nucleotide sequence isolated from the Sargasso Sea
aatgtttaaaaaaattttaattgcaaaccgtggggaaattgcagttagaattattagagcatgtaaagaatggggaatacttacagtagctgttcattcagatgtagatagagaaagcatgcatgtaagaatggctgatgaaagtgtatgtattggttctcatcaaccatcaaatagttatttaaatattccagcattaatgtcagcaatagaacttacaaatgctgatgctgttcatcctggctatggttttctctcggaaaatgcaaattttgcaagaattttagaagagaataaaattaattttataggagcatcatcaaaacatattgaaatgatgggtgataaaattcaagcaaaaagaatagctaaggaaaatggattacctgttattgagggctctgaaggaggagtaaaagacgtttctgaggcaaaagaactttgtaaaaaaattggctttcctgtcttaatcaaagcatctggtggtggtggtggaaaaggtatgaaaattgtttataaagaagaggaattcgaaactttattttctaccgcaaaatctgaagcacaaaaatattttggaaatgacgaagtttatattgaaaaattttttcaaaatccaagacatattgaggttcaaatattagctggaaaaaatagagcagttcacttacatgagagagattgttcggttcaaagaaggcatcaaaaacttattgaagaaacaccaagtccagttttaaataatgaaataagaaaagatttatttgaaagaacagtaaaaatggtagctaaaataggctatatgggagctggtaccgttgagtttatatatgaggatggaaaattttatttccttgaaatgaatacaagagttcaagttgaa

SEQ ID NO: 202723 - DNA, 283 bp, Unknown
  Bacterial polypeptide expressing nucleotide sequence isolated from the Sargasso Sea
aatgtttaaaaaaatattaattgcaaatagaggagaaattgccctaaggattttacgtgcttgcagagaattagatataaaaactgttgcaattcattcagaggctgatgccgaagcgatgcatgttagactagcagatgaaagcgtatgtgttggtcctgcaccagcaaagaatagttatttaaatataccttctataattacagcagctactatcactaactctgatgccatacatccaggatatggttttctaagtgaaaatataaatttgcaaaatttt

SEQ ID NO: 202724 - DNA, 443 bp, Unknown
  Bacterial polypeptide expressing nucleotide sequence isolated from the Sargasso Sea
aatgttcgataaaattttaattgctaatcgcggtgaaatagctctgcgagtccatagagcatgcaaagaattaggtatcagaacagttgccgttcactcaacagcggattcagacgcaatgcacgttaggcttgctgatgagagtgtttgtattggacctccaccggcaaatgaatcatatttaaatattccggccataattaccgcagcaacagttacgaatgctgatgctatccaccccggttatggttttctctccgaaaacgcaaatttcgcttcaatcgtagaagagcacgatatctgttttattggcccgaccgctgatcatattgcattaatgggtgataaaatcgcttctaagaataaggtcgatgaactcggtattccggtcgttcccggttccaagggggctatagagaatataaaggacgcacatgcaatgg

SEQ ID NO: 202725 - DNA, 625 bp, Unknown
  Bacterial polypeptide expressing nucleotide sequence isolated from the Sargasso Sea
atgacctttcgtaagctgctgattgccaaccgaggcgagatagcggtacgtattgcccgcgcctgccacgagctgggcgtgcgatccgttgccatctattccgaagcggacaagtattcgctacacgtcaaaaaggccgacgaggcctaccggatcagccaggacccactgtccggctatctgaacccccatcacatcgtcaacctggcggtggaaaccggctgcgatgccctgcacccgggctacgggttcctgtcggaaaatgccgagctggcagccatctgcgaacagaggggcattgcctttgtcggcccgtcggcagacgccatctcagcgatgggcgacaagacccgcgcgcggcagaccgctattgcggcgggcgtgccggtaacaccgggctctgaagacaacctgatcgatgtggaggatgccgtccggcaggccgccaccattggctatccggtcatgctgaaggccacatccgggggcggtggccggggcatccgtcgctgcgataatgaaaaagagttgcgccagaactacgagcgggtgatttccgaagccaccaaggcgtttggcagtgccgaggttttcctcgaaaagtgcatcatcaatccccgccaca

SEQ ID NO: 202726 - DNA, 604 bp, Unknown
  Bacterial polypeptide expressing nucleotide sequence isolated from the Sargasso Sea
atgtttaataaagtcctagtcgcaaatcgtggagaaattgcgcttcgggttattcgagcctgccgcgaaatgggtataaaatctgttgcagttcattcaactgcagatagtgacgccatgcacgtccgtatggcagatgaaagtgtgtgcattggtccagcagcagggacttcaagttatttatctatgcccgcgattatcgccgcatgtgaaattactggagcggaagcaatccatcctgggtacggatttttgtctgaaaatgccaaatttgttcaaatagttgaggatcacgggataaagtttatcggtccaacagcggaacatattcgcataatgggagataaaattacagctaaagaaacaatgagagagctaggtgttccatgtgttccaggatcagatggtggtgttcctgatgtaaatacagcaaaaaagattggaaccgatattggttatccagtgattatcaaagctacggcaggaggtggcggtagaggaatgaaagtcgcgaactctgaatcagaaatggaacaagctttcatgactgcacgagcggaaggaaaagctgcgttggaaacgatgaggtttacatcgagatagt

SEQ ID NO: 202727 - DNA, 713 bp, Unknown
  Bacterial polypeptide expressing nucleotide sequence isolated from the Sargasso Sea
aatgttcaaaaaagttttaatagcaaatagaggtgagattgctgtcagggttataagggcttgcaaagaatggggtattggaactgtagctgttcattcagatgtagatgctgactcgatgcatgtaaggctagccgacgaaagtgtttgtataggatctcatcaaccacaaaatagttatttaaatattgcagctataatgtctgcagttgatgttactggtgctgaagcgatccacccgggatatgggtttttatcagaaaatcataattttgcagaaatagttgaaaaacataaaattaaatttattggacctaaagctgaaataataaaaaaaatgggcgataaaattcaggcaaaaataattgctaaagaaaaaggtttgcctgttattgaaggttctgacggcggggttggagatttaaaacaagctaaacaaatttgtaaaaaaattggatatccagttttaattaaagcatctggtggaggtggtggaaagggaatgaaaatagtggaggatgaaagtaagttaggagaaatgtattcattagcacgtttagaagcaaaaaaatattttggaaatgatgaagtttatattgaaaaatattttaaaaaccctagacatattgaagttcaagtattatcgggaaaaaatagaactgttcaccttaatgaaagagattgtagtgttcaaaggaaacatcaaaaattga

SEQ ID NO: 202728 - DNA, 796 bp, Unknown
  Bacterial polypeptide expressing nucleotide sequence isolated from the Sargasso Sea
atgtttgattcaattttagttgcaaatagaggagaaattgcattaaggataatgaggactgctcaagcaatgggcatccaaactatagcaatttatgttgaagcagataaggatgcgcctcatgttaggtttgctgataaagcaatacttcttccagatggaggatatcttgatatagatgcagttttagatgcagcacaaaaaagtaatgctggcgctattcatccaggttatggtttcttatcagaaaattctgaattcgccaaaagagtcattaaagaaaagattgtttgggttggtccatcccctaaagtcatttctgtaatgggcgataagttaaaagctaaagagcttgctataaaagctagcgttcccactcttccaatgacctcaaatgagaaagaagtcaaaaaaattggatatccacttctaataaaagcagctgcaggtggaggcggaaaaggaatgagggttgttactgataaaaaagatctacaagagtcgcttgaaggtgcgaaaagagaggctttatcaggttttggagatgagagagttttcattgaaagatatgtagaaaaatctcgacatatagaaatccaaattctcggggactctcacggcaatgttattcatcttggtgagagagaatgctcaattcaaagaagacatcaaaaaataattgaggagtctccatctccgagaataactgaagagataagattcgcaatgggtaatgcagcagttgatcttgcaaaaaaaataaaatacgaatctgcaggaactgttgaatttcttt

SEQ ID NO: 202729 - DNA, 607 bp, Unknown
  Bacterial polypeptide expressing nucleotide sequence isolated from the Sargasso Sea
aatgtttaagaaaattttaattgcaaaccgtggggaaattgcagttagaattattagagcatgtaaagagtggggaatatcaacagtagctgttcattcagatgtagatagagaaagtatgcatgtaagaatggccgatgaaagcgtatgtattggttctcatcaaccggcaaatagttatttaaatattccagcattaatgtcggcaatagaacttacaaatgcggatgctgttcatcctggctatggttttctttccgaaaatgcaaattttgcaaaaattttagaggaaaacaaaattaattttattggagcatcatcgaaacatattgaaatgatgggtgataagatccaagcaaaaagaatagctaaagaaaatggattacctgtgattgagggatctgaaggaggtgtaaaagacattattgaagcaaaagaactctgtaaaaaaattggttttcctgtgttaatcaaagcctcaggtggaggtggaggaaagggtatgaaaatagtttataaggaggaagaatttgaaacattgttttcaacagctaaatctgaggcaaaaaaatattttggtaatgatgaagtttacattgaaaaattt

SEQ ID NO: 202730 - DNA, 811 bp, Unknown
  Bacterial polypeptide expressing nucleotide sequence isolated from the Sargasso Sea
atgtttaaaaaaatattaattgcaaatcgtggggaaatagcttgtagagtaatcaaaacagcaaggaaaatgaatattaaaactgttgctgtttattcagatgcggatagatattctgaacatgttcgtctagctgatgaagcctttcacttgggggcctcctctgcgtcagaaagttatttaagatcagatttaattattaaagcgtgtaaggagacaaattgtgacgccttgcatcctggatatgggtttttatcagaaaatgccaattttgttggagatttgaataaagctgggattatttttattggtccctcaaagtcagctatagcttcgatgggtgataaaatcgagtcaaaaaaaattgcacaatctgccaatgtaaatactgttccaggtcacataggtataattaaagataagactgaagcgattaaaattgctgccgaaataggctatccggttatgataaaagcaagtgcaggtggtggcggcaaaggtatgagaattgctttttcaaaagatgaggtgtcagaaagttttgaaagagcagaaagtgaggctttaaatagttttggagataaacgtattttcattgaaaagtttataactgaaccaagacatattgaaattcaaattttagctgataattatggtaatatagtatatttgggtgaaagagaatgctctattcaaagaagaaatcaaaaagttattgaagaagcgccatcaccttttctagacgaacaaactagaaagaaaatgggtgatcaagctgtacaattatctagaaaaagtttgttattcaagt

SEQ ID NO: 202731 - DNA, 450 bp, Unknown
  Bacterial polypeptide expressing nucleotide sequence isolated from the Sargasso Sea
aatgttcaaaaaaatccttattgctaatagaggtgaaattgctttacgtgtacttagagcctgcagagaattaggaataaaaactgtagctattcactccgatgttgatgaaaatgcaatgcatgtaagaatggcagatgaaagtatttgtgtcggaccagcatctgcacaatcaagttatttaaacatacctgcaattataactgctgcgacattaactgatgcagatgcaattcatcccggatatggttttttaagtgaaaatcaaaggtttgcggaaattattgaagaacacaatattaaatttattggcccaaaatcagaacatatcaaaatgatgggtaacaaaattgatgcaaaaaaaataatggatgaaactggagtgccaacagtaaaaggtataaatgacttaagcgatcaaaatacaattgaagaatttataaaaaaagt

SEQ ID NO: 202732 - DNA, 391 bp, Unknown
  Bacterial polypeptide expressing nucleotide sequence isolated from the Sargasso Sea
aatgatcaacaaagtattgattgcaaataggggtgaaatagctctaagagtacttagggcatgtaagaagcttggtattaaaacagtagcagttcattcaacagcggatagacagttagctcatgtaaaacttgcagacgaatctgtatgtattggcggccctaatccacgagaaagctacctcaatatgccatctattataagtgcagctgaactaactaattctgatgctattcatccaggctatggatttttatctgaatctgaaatgtttgcagaaattattgaaaccaataaatttaagtttatagggccatcaagtaaagtgttaaataagatgggggataaaattaaagctaagaatgcaatgaaagactttggtgttccatgc

SEQ ID NO: 202733 - DNA, 307 bp, Unknown
  Bacterial polypeptide expressing nucleotide sequence isolated from the Sargasso Sea
atgttcaataaaattcttatagctaatagaggtgaaattgctgttagggtcttaagggcatgtaaagaacttggaatacagacggtagctgtatattcatctgtagataaaaatgcaatgcatgttaaattagcggatgaaagtgtttgtattggacctgcctcatcactcaaatcttatttaaatattcctgcgataatctctgcttgtgaagtttctggtgcagatgcagtacatccagggtatggttttttatcagaaaattttggctttgttgaaaaacttagaagcaccatggtattaaatt

SEQ ID NO: 202734 - DNA, 520 bp, Unknown
  Bacterial polypeptide expressing nucleotide sequence isolated from the Sargasso Sea
aatgtttgattcaattttagttgcaaatagaggagaaattgcattaaggataatgagaactgctcaagcaatgggcatccaaactattgcaatttatgttgaagcagataaggatgcgcctcatgttaggtttgctgataaagcagtacttcttccagatgggggatatcttgatatagatacagttttagatgcagcacaaaaaagtaatgctggcgctattcatccaggttatggtttcttatcagaaaattctgaattcgctaaaagagtcattaaagaaaagattgtttgggttggtccatcccctaaagtcatttctgtaatgggtgataaattaaaagctaaagagcttgctataaaagctagcgttcccactcttccaatgacctcaaatgaaaaagaagtcaaaaaaattagatatccgcttctaataaaagcagctgcaggtggaggcggaaaaggaatgagagtagttactgataaaaaagatctacaagagtcgcttgaaggtgcgaaa

SEQ ID NO: 202735 - DNA, 406 bp, Unknown
  Bacterial polypeptide expressing nucleotide sequence isolated from the Sargasso Sea
atgtttgattcaattttagttgcaaatagaggagaaattgcattaaggataatgagaaccgctcaagcaatgggcatccaaactattgcaatttatgttgaagcagataaggacgcgcctcatgttaggtttgctgataaagcagtacttcttccagatggaggatatcttgatatagatgcagttttagatgcagcacaaaaaagtaatgctggcgctattcatccaggatatggtttcttatcagaaaattctgaattcgctaaaagagtcattaaagaaaaaattatttgggttggcccctctcctaaagtcatttctgtaatgggtgataaattaaaagctaaagagcttgctataaaagctagcgttcccactcttccaatgacctcagatgaaaaagaag

SEQ ID NO: 202736 - DNA, 424 bp, Unknown
  Bacterial polypeptide expressing nucleotide sequence isolated from the Sargasso Sea
ttgcttgtagcaaaccgaggagaaatcgcctcaagggtgatcaggacagctaaaaagatgggtctgaaaaccgttgcaatttatacagaagcagacaggcattcgccatatgtaatagatgctgatttatcagtaaagatagaatcatcttatcttgattcggatgccattatttctgcagcaaagacaacgggtgccggcgccatacatccgggttatggattcttatctgagaatcatgattttgctacaaagattcaagatgaagggatcatatgggttgggcccaattctgattcgatccaaatcatgggggataaaatagaagcaaagaaacatgccattaagtccgaaatgccaatacttgaatcagtaaatgatgcagcttctgcaaaggatattggataccccattaatgattaag

SEQ ID NO: 202737 - DNA, 568 bp, Unknown
  Bacterial polypeptide expressing nucleotide sequence isolated from the Sargasso Sea
atgttagaaaaagttctgatcgcaaaccgcggtgaaatcgccctgcgtattctccgcgcgtgcaaggagctgggcatcaagaccgttgcggtacattcccaggtagaccgcgacctgatgcacgttcgccttgccgacgaatctgtctgcattggcccaaacagtgccacagacagctacctcaatatcccgaccatcatcagcgccgctgaagtgaccgattcggtgggtatccacccgggttacggtttcctggccgagaatgccgacttcgctgagcaggtcgagaaaagcggtttccgctttatcggcccccgggcagagaccatccgcctgatgggtaacaaggtgtccgccatcgaagccatgaaaaaggccggggtacccaccgttcccggctcagacggcccgctgacggacgacgacgaacgcaccctcaagctggcgaagcagattggctacccggtgatgatcaaggcggcctctggtggtggtggccgaggcatgcaggtggtgcactctgaagccgccctgctgaaagcagtacagatcacccagagcgaagcca

SEQ ID NO: 202738 - DNA, 963 bp, Unknown
  Bacterial polypeptide expressing nucleotide sequence isolated from the Sargasso Sea
gacgatagccaaaaacatgtattccttgcagatgaatcggtatgtataggacctccagaatcactaaaaagctatcttaatattccatcaataatcagtgcagctgaggtcacagacgccatggcgattcatccgggctatggctttttggctgagaatggagattttgctgagcaagttgaacagagcggttatatctttataggtcctaaatctgaaaccatcaatttaatgggtaataagatcagtgcaaaagaggttgtatctgaagtaggtatccagtgtattcctggatcagatggagaattagatgatgatattgagaaagttcataagctggctgaccaaattggttacccagtattaatcaaagctgccgctggaggtggcggcaaagggatgagagttgcacacacaaaaggtgcacttcaacatacaattgatctaacaaaaacagagtcaaaggctgcatttggtgatgatacgatctttttagagaagttactggaagagccaaggcatatagagttccaaattcttgctgatcatcatggtaatgcggtttgtttaggagatagagattgctctatgcagcgaagccatcaaaaaattattgaagaagcgcctgccccaaagatcccgaagaaattaagagaagaaatgtttaaaaaatgcattgccttttgtaaacacattgattacagaggagctggaacattagaattcctttatgaaaatggtgaattttatttcattgaaatgaacaccaggctccaagttgagcatccggtgactgaaatgattactggtgttgacattgtgaaagaacaaataaaaattgcgatgggattgcctctatccattaagcaagaagatattgtagaaaaaggtcatgctattgaatgcagaatcaatgctgaggatccaaaaacatttatgccatcaccaggaatgatagacttg

SEQ ID NO: 202739 - DNA, 748 bp, Unknown
  Bacterial polypeptide expressing nucleotide sequence isolated from the Sargasso Sea
atgtttaacaaaatactaattgcaaatcgcggagagatagccctaagaattatgggaacatgccgccgtatgggaatcaggactgttgcagttttttcagaggcagattcagacgcactacatgttaaagaggcagatgaatcatgctttattggtgaggcagcaccagcgaagtcttaccttcggatcgataaaattctgtatgcagcgaaggaaaaaggttgcgaagcgattcatcccggttatgggttcttgtcagaaaacgatgaatttgcaagtaaatgtttaaattcaggcataacatttataggaccatcggctgaagcaataaaattaatgggggaaaaacacaaagctaaaagtgtaatggagaagtcaggtgttcctgttgtccccggatattttggtgaagagcaaagtacgcaatgccttcttaaggaagcagacaaaataggttacccgttgatggtcaaagctgttctaggcggaggtggaaagggaatgagagtggtacaaaaaaaagaagattttgggagtgctctgctttcggtagaaaatgaagcacgtaaggcctttggtgactcacgagttatgctggagtgtttcgttaaaaagtcccgccatatagaattccaggtacttggtgatcagcatggaaataccgtgcacttgtttgaaagagactgttccgtccagcgccgtcaccagaaaataattgaagaatcaccatcacttttttttgataata

SEQ ID NO: 202740 - DNA, 739 bp, Unknown
  Bacterial polypeptide expressing nucleotide sequence isolated from the Sargasso Sea
aatgtttaaaaaaattttaattgcaaaccgaggggaaattgcggttaggattattagggcttgtaaagaatgggggatatccacagtagcagtacattcagacgtcgacagagatagtatgcatgtgaaattagcagatgaaagtgtctgtataggttctcaccaacctgtaaatagttatttaaatattccagctttgttatcagctattgatttaacgaaagcagaagctgttcatcctggatatggatttttatctgaaaatgtaaaatttgctagaattctagaggagaacaaaattaaatttattggagcctcatcaaaacacattgaaatgatgggtgataaaattcaagcaaaaaaaattgcgaaagaaaatggtttaccaattattgaaggttctgaaggtggtataaaagacatcactgatgccaaagatctttgtaaaaaaattggatttcctgttttgatcaaagcagctggtggaggtggtggaaaaggaatgaaaattgtaaataaggaagaagaatttgaagcgcttttttcaacagcaaaatcagaagcgatgaaatattttggtaatgatgaagtttatattgaaaaattttttcaaaaccccagacatattgaagtacaaatattgtctggaaagaatagaacaattcatttacatgaaagagattgctcagttcaaaggagacaccagaaattaattgaggaaacacctagtccagtttta

SEQ ID NO: 202741 - DNA, 669 bp, Unknown
  Bacterial polypeptide expressing nucleotide sequence isolated from the Sargasso Sea
tttgaacaaaaataagataacaaagctacttattgctaatcgaggcgaaattgctatccgagttatgagagcggctactgaattaggaataaaaactgtagctatctattcccaagaggataaatatgccctgcataggcataaagcagacgagagttataaggtaggaaatgggaaaaatccaatagatgactatttggatattgatgacataattcgaatagcactcggtgccaatgttgacgctatccatcccggctatggttttctatcagagaacccagaactagtagaggcatgtgaccttgctggtataacttttgtaggaccgcccaaaaaggttatggaaaaactcggcagtaaagttgaagcaagaaaattagctgctaaagctaaggttaaagttatgcccgccactaatccattaccaattagtgaggcaaaaataaagttgctagctaaaaaaatttcataccccctaatggttaaagctacttggggagggggtggtaggggcatgcgtgcggtttacaccgaggatgagttaatatcaaatgttaactcagcaagacgggaagccgaagcagcttttggcaatggacagatttatcttgaaaaattggttgttcagcccagacatgtggaagttcaatactgggcgataaatac

SEQ ID NO: 202742 - DNA, 576 bp, Unknown
  Bacterial polypeptide expressing nucleotide sequence isolated from the Sargasso Sea
gctgctcatcgccaatcgtggcgagatcgcgctccgcatcgctcgcgctgcccgtgagctcgacgtgcgcaccgtcgccgtcgtcgctccttctgacgacggccatgcgctgcacgcggtctccactgatgaggtcgtggcggtcgcctcgtacaatgacgcatcggaggtcgtgcgcgcggcgcgcacgacgaattgcgacgcgctgcacccgggctacggcttcctctccgagtcggtgacgctcgcggcggcgtgcgagggcgctggcgtcatgtttgtcggcccgtccacggcggcgctcgcgacgctgggcgacaaggtggcggcgcggtcgctggcgcagtctctcggcgtgccagttgcaccggcgagcgacgagccgtgcggtgacgccgaggccgtgagagccgcgatgcgcacccacggcgttgcctacccgattatgctcaaggctgtgggtggtggcggtggacgcggcatgcgacccgtcgccactgacgccgagctcgatgcggccttcgccgcgtgcgtccgagaagcctcggcctcgggagcctcgggcggcgtgtttgt

SEQ ID NO: 202743 - DNA, 679 bp, Unknown
  Bacterial polypeptide expressing nucleotide sequence isolated from the Sargasso Sea
aatgtataagaaaatactcattgctaatcgtggtgagatagccttgcgagtcataagagcttgtcatgagctaggtttaaaatctgtggcagtttattcatctgcagataaagattctcttcatgtaaaatttgcagatgaagcaatatgtattggacctcccgatagtagagaatcatatttaaatatcccaaatattatttcagctggtgaaataaccaatgcagatgctgtgcatccaggttatgggtttctagctgaaaatgctgatttttcaaatatttgcaaggaaaatggtttctcatttattggcccaacaggagatatcattaatgcaatgggtgataaagctcaagcaaaaaaaactatgaaagaagctggattaccaatcattcctgggaatgaaggtgtcctagataatgtagatgagactaaggtcctagcatcaaaaatcggctatccagttatgcttaaagcttcagctggtggtggtggaagaggtatgcgtttagtaacaaaagaaagtgaattggagcatgcatattctactgctagtggagaagctcaaaatgcttttaataatggagacctctatattgaaaaattcattgaagaacctcgtcatattgaaattcaattattagcggatgcccacggcaatgctgtgagtttgggtgaa

SEQ ID NO: 202744 - DNA, 601 bp, Unknown
  Bacterial polypeptide expressing nucleotide sequence isolated from the Sargasso Sea
atgtttaaaaaaattttaattgcaaaccgtggggaaattgcagtcagaataataagagcttgtaaggaatgggggatttcaacagtagcagttcattctgatgttgatagggaaagtatgcatgtgaaattagcagatgaaagtatatgtattggatcccatcaaccaacaaatagttatcttaatattcctgcacttttgtccgcaattgatcttacaaaagctgaagcggttcatcccggctatggatttttatcagaaaacgcaaactttgcaaaaattttagaagagaataacatcaaatttataggtgcatcctccaaacacataaaaatgatgggagataaaattcatgcaaaaaaaattgcaaaagaaaatggtttaccaattatagaaggttctaatggaggagtaaaagatattactgaagctaaaaatctatgtaaaaagataggttttcctattttgataaaagcagctggaggaggaggtggaaaaggaatgaagattgttcaaaaagaagatgaatttgaaactttgttttctactgcaaaatctgaagctaaaaaatatttcggaaatgatgaggtatacaatgaaa

SEQ ID NO: 202745 - DNA, 796 bp, Unknown
  Bacterial polypeptide expressing nucleotide sequence isolated from the Sargasso Sea
ttgcatgttcgtgaatcagataaagctgtatttattggagagtcttctgcagataaaagttatttaaattataagaaaattgttcaagttgcgatagaaaataaggtagatgcagttcaccctggttatggatttttatctgaaaacccaaattttgctatggaattaaaaaagaaaaaaataaagtttataggcccttctgtattttctatgaaaagcatgtcacttaaaaatgatgcacgcagtatgatggagaaagcaggcgttccagttttacctggattttctgctgacgctctttcttatgaacagattgtaaaaaaatgtaataatattggttttcctcttattattaaagcctctgctggaggtggagggaaaggtatgcatgttataagtaagcgagaagaaataaaatctaaattagctggtgcaaaaagagaggcactaagttcttttgggaacgactctattttaatagaaaaatatttagaaaacccaaggcatattgaagttcaaattttggcagataaccataataatatctatactttgtcagacagagattgcagtatacaaaggcgtcatcaaaaggtcatagaagaagctcccgctccaaatattaagcctgaagtgagaaaagaaatggcattacaagcaaaaaatgttgcaaaaaatatttcctactctggagcaggaactatagagtttctttttgaaaaagatagattttattttatggaaatgaatacgcgtcttcaagtagagcatccagtgactgaattgatattagatc

SEQ ID NO: 202746 - DNA, 286 bp, Unknown
  Bacterial polypeptide expressing nucleotide sequence isolated from the Sargasso Sea
atgacttttcataaattattaattgccaatagaggtgagatagcctgccgtattattaaaactgcacatgagatgggaatctcttgtgtagctgtttataccgaagcagattcaaactcccctttcgttagaatggctgatgaagctgttaagctcagtgatacttacttaaatggtaaagaaattattgatgcagccattaaaactggtgcagaagcaatacacccaggctatggcttcttgtctgaaaatgctaagttctgtagagatgtatcgaaggctaacc

SEQ ID NO: 202747 - DNA, 715 bp, Unknown
  Bacterial polypeptide expressing nucleotide sequence isolated from the Sargasso Sea
aatgacctttcttcgtgagttagttgaatcaggagaaatcaccgaggaacaggcccgtcgacgaatggagaatatgagaaggcgtgccgcggaatccctcaatagtgagcacggagagaggcaccatggcgaacgcgataacgataaaagaggtgaagggatacgcgctcgtttggatgaggcaggtaaaaaacttcgtgagttagttgaatcaggagaaatcaccgaggaacaggcccgtcggcgaatggagaatatgagaaggcgtgccgcggaatccctcaatggtgagcacagcgagagacaacatgatgatcatgagcacagggacagacatcatgatggtcatgagaatggggatagaaaccatgatgggcatgagaatgaggacaggcaccatgatggtcacgagcacaggggcagacatcatgacggtcatgagaatgaggataggaaccatgatgggcatgagcacagggacagacatcatgacggtcatgagaatggggataggcaccatgatgggcatgagcacagggacagacatcatgacggtcatgagaatgaggacaggcaccatgatggtcacgagcacaggggcagacatcatgacggtcatgagaatgaggacaggcaccatgatggtcacgagcacaggggcagacatcatgacggtcatgagaatggggacaggcaccatgatgattatgcaagt

SEQ ID NO: 202748 - DNA, 415 bp, Unknown
  Bacterial polypeptide expressing nucleotide sequence isolated from the Sargasso Sea
aatgaaaaaaatacttattgcaaatagaggagaaatagcttgcagaataattaaaagttgtaaaaagttaaatcttcactcaattgcagtttattctgacgcagatgaaaaaagtaaacatgtaaagctagcaaatgaagcagtacatattggaaactctaaagcacaagaaagttatttatcttcaaaaaatattttaagtgctgctttaaagtataatgccgatgctatccatcctggttatggttttttatcagaaaatgcagaatttgcccaaaatgttattgactctggccttgtctggataggaccaaaaccaaatagtattacttctatgggcaataaagatattgctagagaactggcaataaaaagtaatttgcctatctgtactggattaaaaatgatgaattag

SEQ ID NO: 202749 - DNA, 362 bp, Unknown
  Bacterial polypeptide expressing nucleotide sequence isolated from the Sargasso Sea
aatgataaataaaatattaattgccaatcgtggcgaaattgccgttagaattataagagcttgtaaagaattagatataaaaactgttgcggtacactcaaatgtagatagtgactcaatgcatgtaaaactagccgatgaaagtgtctgcataggacctcacaaccctattaacagttatttaaacatacctaatttagtttctgcactagaaatatcaggtgctgacgcaattcatcctggttacggttttttgtctgaaaattttaagtttgcaaatactttagagcaacacaaaataaaatttattggtccaaaagctgatgtaataaaaaaaatgggagataaaattcaagctaaaa

SEQ ID NO: 202750 - DNA, 262 bp, Unknown
  Bacterial polypeptide expressing nucleotide sequence isolated from the Sargasso Sea
aatgtttaaaaaaattttaatcgcaaaccgtggagaaatagcggttcgtataattagagcctgtaaagaattaaatattcctactgtggctattcattcagatgtagatgtggattcgatgcatgttagattagctgatgaaagtatttgtgtgggttcccacaaaccagaaaatagttatttaaatattgccgctataatgtcagctgctgatgtaactggcgcagatgctattcatccagggtatggatttttatccgaa

SEQ ID NO: 202751 - DNA, 709 bp, Unknown
  Bacterial polypeptide expressing nucleotide sequence isolated from the Sargasso Sea
aatgtttaaaaaaatattaattgcaaaccgtggggaaattgcagttagaataattagagcctgtaaagaatggggaattccaacagtagctgtgcactctgatgttgatagagacagtatgcatgttcgaatggctgatgagagtgtatgcataggatctcatcaaccagcaaatagctatttaaacattccaaacttaatgtcagcaatagagctcactaactctgatgctgttcatcctggttacggatttctatctgaaaattcaaattttgctaaaattcttgaagataataaaataggttttattggtgcttcatctaaacatatagaaatgatgggcgacaaaatacaagcaaaaagaattgcaaaggagaacggattaccagtaatagaaggttcagagggtggcgtgactgagattaaccaagctaaagaattatgtaaaaaaattggttttcctgttttaattaaagcctcaggtggtggtggtggaaagggtatgaaaattgttcatatagaagaagagtttgaaaatctattctctactgcaaaatctgaggctcaaaaatattttggcaatgatgaagtttatattgaaaagttttttcaaaacccaagacatattgaggttcaaatcttagcaggaaaaaataacgttgttcatttacatgaaagagattgctctgttcaaagaagacatcaaaag

SEQ ID NO: 202752 - DNA, 506 bp, Unknown
  Bacterial polypeptide expressing nucleotide sequence isolated from the Sargasso Sea
aatgtttaaaaaaattttaattgcaaatagaggtgaaatagctgttcgaataattagagcttgtaaggaatggggtatagcaacggtagcaatccattcggatgtagatagagatagtatgcatgtaagacttgcagatgaaagtgtttgcataggatcacatcaaccatcaagtagttatctaaatattccagcaatcatgtctgctatagaattaacaaatgctgaagcagtgcatccaggctatggttttttgtcagaaaattcagaatttgcaaaaattttagaagattacaaaattaaatttattggaccatcttcaaaattaataaaaatgatgggagataaaatacaagcaaaattaattgcaaaaaaatatggtctaccagttattgaaggatctgacggtggagtttctgatatagttgaagcaaaaaaaattgtaaagaatattggttaccctattttaataaaagctgctggtggtggtggcggaaaaggtatga

SEQ ID NO: 202753 - DNA, 493 bp, Unknown
  Bacterial polypeptide expressing nucleotide sequence isolated from the Sargasso Sea
atgtttaaaaaaatccttattgcaaataggggtgaaatagctcttagaatattgagggcgtgtagagaattaggaattaaaactgtagctgttcattctgatgctgatgattccgctatgcacgttaaaatggcagatgaaagtatttgtgtaggaccgccatcagctcaatcaagttatcttaatatacctgctataattactgctgcaacattgacaaatgttgatgctatacatcccggttatggttttttaagtgaaaatcaaagatttgctgaaattattgaagaacacaaaataaaatttattggtccaagttctaaacatattaatatgatgggtaataaaatcgaggcaaaaaaaataatggaaaaaaatggaattcctacagtacctggacttaacgatttcactaatgaaaaagttataaaaacttttataaaaaaagttggcctaccaatcattattaaagcagcaagtggtggaggtggca

SEQ ID NO: 202754 - DNA, 604 bp, Unknown
  Bacterial polypeptide expressing nucleotide sequence isolated from the Sargasso Sea
atgtttaaaaaaattttaattgcaaaccgtggggaaattgcagtcagagtaatcagggcttgtaaggagtggggaatttctaccgtagcagtccattcagatgtagatagagagagtatgcatgtcagattagctgatgaaagtgtttgtataggatcacatcagcctgctaatagttatttaaatatacctgcaatcttatcagcagtagatcttactaacgcagaagcagttcatcctggatatggttttttatctgagaatgcaaattttgcaaaaatattagaagaaaataatattaaattcattggtgcttcatcaaaacatatcaaaatgatgggagataaaattcaagcaaaaaaaattgcaaaagaaaatggtctacctgtgattgaaggttctgagggaggtataaaaaatgtttctgaagcaaaacaattatgtaaaaatattggttttccagttttgatcaaagcctctggaggcggaggtggaaaaggaatgaaaattgttcagaaagaagaagattttgaaacacttttttcaacagctaaatctgaggctcaaaaatattttggtaatgatgaagtttatatagaaaaat

SEQ ID NO: 202755 - DNA, 706 bp, Unknown
  Bacterial polypeptide expressing nucleotide sequence isolated from the Sargasso Sea
atgtttaaaaaaatcctgatagcaaatagaggggaaattgccgtgagagtaattagagcttgtaaggaatggggaatatccacagttgcagttcactcggatgtagacagaaatagtatgcatgtaagacttgcagatgaaagtgtttgtattggatcacatcaaccggctaatagttatctaaatattcctgcacttatgtcggcgattgaattaactaatgcagaagctgtacacccaggatatggtttcttatccgaaaatgcaaattttgctaaggtgttagaaaaaaataagattagatttattggagcatcctcaaaacatattgagatgatgggagataaaattcaagcaaaaaaaattgctaaagaaaatggattacctgttattgaaggatcagaaggtggaattgaaaaagtttcagatgctaaaaagttatgtgaaaaaattggttttcctgttttaataaaagcttcaggcggaggtggtggaaaaggaatgaaaatagtaaaaaaacctgaagattttgaaacactgttttcaactgctaagtcagaagcaaaaaaatactttggaaatgataaggtttatatagaaaaattttttgaaaatcctagacacatagaagttcaaattcttgctgggaaaaatcgagttgttcatctccatgaaagagattgttcagtcaaagaaggcatcaaaa

SEQ ID NO: 202756 - DNA, 426 bp, Unknown
  Bacterial polypeptide expressing nucleotide sequence isolated from the Sargasso Sea
aatgtttaaaaaaatattgattgcaaaccgaggagagattgctgtcagaattatcagagcttgcaaagaatggggtatatctacagtcgctgtgcactcagatgtagatagagaaagtatgcatgttaggatggcagatgaaagtgtatgtattggctctcatcaacctataaatagttatttaaatattccagcgttaatgtcagctattgagattactaattctgaggctgtgcatcctggctacggttttctctcagaaaatgcaaattttgcacgtgtacttgaggataataatattaaatttatcggcgcttcatcaaaacatatagaaatgatgggtgacaagattcaagcgaagaaaattgcaaaagaaaatggtttgcctgtaattgaaggttctgaaggtggtgttaaagatataaa

SEQ ID NO: 202757 - DNA, 796 bp, Unknown
  Bacterial polypeptide expressing nucleotide sequence isolated from the Sargasso Sea
atgctagacaaagtcctaattgcaaataggggggaaattgcactcagaattcagagggcgtgtagagagcttggaattaagacagtagcagttcactccacagcggacagtagccaaaaacatgtattccttgcagatgagtcagtatgcattggccctcctgaatcactcaaaagctatctcaatataccttcaataattagtgcggctgaagtcacagatgccatggcgattcatccaggctacggctttttgtcagagaatggagattttgctgagcaagttgaacagagcggctatatcttcataggtccaagatctgagacgatcaatctaatgggcaataaaatcagtgcaaaggaggttgtgtctgaggtaggtatacaatgcattccaggatcagatggtgaactggatactgatattgagaaagttcataagcttgctgatgcaattggttatccagtattgatcaaggctgcagctggtggtggcggtaaaggcatgagagttgcgcatacaaagggagcacttcagcacacaattgatttaacaaagacagaatcaaaagcggcatttggtgatgacacaatctttatggaaaagttactggaagaaccaaggcatatagagttccaagttcttgcagatcatcatggtaatgcagtttgcttgggagatagagattgttctatgcagcgaagccatcagaaaattatagaagaagcccctgctccaaagatcccaaagaagctaagagaagacatgttcgaaaaatgtatcgcttttgtaaaca

SEQ ID NO: 202758 - DNA, 463 bp, Unknown
  Bacterial polypeptide expressing nucleotide sequence isolated from the Sargasso Sea
ctgttcgacaagatcctcatcgccaaccggggcgagatcgcgtgccgcgtgatgagcacggccaagcggctgggcatcaagacggtggccgtgtactcgcagcccgagagccgcgcgcggcacgtgcagatggcggacgaggcgtactgcgtggggcccgcgccgtcgagcgagtcgtacctgaacgtggaacgcatcctcgaggtcatcaagcagagcggggcgcagggcgtgcacccgggctacggcttcctctcggagaacgcggccttctgcgaggccgtggaggcgatgggcgtggccttcatcggtccgccgagcggcgcgatctccgccatgggcgacaagatcgagtccaagcagatcgccatcgacgcgggcatcaacacgatcccgggctaccagggcgtcatcaaggacgaggaggagagcgtcctcatcgcgcgcgacaccgtggggtacc

SEQ ID NO: 202759 - DNA, 598 bp, Unknown
  Bacterial polypeptide expressing nucleotide sequence isolated from the Sargasso Sea
atgtttaaaaaaatattgattgcaaatcgtggtgaaatcgctgttagagtgattagagcatgtaaagaatggggtattcaaacagttgctgttcattcgaatgttgacaaagaaagtatgcatgtaaggctagcagacgaaagtgtttgtattggttcacatcaaccagctaatagttatttaaacataccggctatcatgtctgcaattgagttaactggtgctgaagctgtccaccctggatatggctttttatcagaaaatacagaatttgccaaaattttagaagaaaataaaataaaatttattggtccttcttctaaattaataaaaatgatgggtgataagattgaagcaaaaaaaattgcaaaaaaatatggtttacctgttattgagggttcagaaggtggagtttcagatttaaatcatggaaaagaaatatcaaaaaaaattggcttccctgtacttattaaagctgccggaggtggaggtggaaaaggtatgaaaattgttaatgatgaaaaaaattttgacttatctttttctacagcaaaaacagaggcgttaaaatattttggcaatgatgaagtatatatag

SEQ ID NO: 202760 - DNA, 424 bp, Unknown; identical to SEQ ID NO: 202736
  Bacterial polypeptide expressing nucleotide sequence isolated from the Sargasso Sea

SEQ ID NO: 202761 - DNA, 283 bp, Unknown
  Bacterial polypeptide expressing nucleotide sequence isolated from the Sargasso Sea
aatgataaaaaagatactcatcgcaaatcgtggtgaaatcgcagtcagaataattagagcttgcaaagagctaaatattaagagcgttgctgtttactcatctgcagataaagatgcaatgcatgttcagcttgcggatgaaagtgtttgtattggaccagccaaagctgcggatagctatttaaatataccaagtttattatcagcttatgaattaactggtgcagattcaattcatcctggatatggatttttatcagaaaattatgaattcgttaaaatt

SEQ ID NO: 202762 - DNA, 343 bp, Unknown
  Bacterial polypeptide expressing nucleotide sequence isolated from the Sargasso Sea
aatgtttaaaaaggtattaatcgcaaatagaggtgagattgctgttagagtaattagagcatgcaaagaatggggtattggaacggttgcggttcattcagatgttgactctgactcaatgcatgtgcgattggcagacgaaagtgtttgcataggatctcatcaaccgcaaaatagttatctaaatgttgctgcaataatgtctgctgtagatttgacaggagctgaagctatccatccaggctatggttttttatcagaaattttaaatttgctgatattgttgagaaacatggcgtcaagtttattggtccaagtgcaaatattattaaaaagatgggga

SEQ ID NO: 202763 - DNA, 292 bp, Unknown
  Bacterial polypeptide expressing nucleotide sequence isolated from the Sargasso Sea
aatgtttaaaaaagttttaatagcaaatagaggagaaattgctgtacgggttattagagcttgtaaagaatggggtattggaactgtagctgttcactcagatgtagatgctgactcgatgcatgtgagattagctgacgaaagtgtttgcataggatctcatcaaccacaaaatagttatttaaatatggcggctataatgtctgccgttgatgtaacaggtgctgaagcaatccatccgggatatggatttttatctgaaaattataaatttgctgaaatagtagaaaaa

SEQ ID NO: 202764 - DNA, 385 bp, Unknown
  Bacterial polypeptide expressing nucleotide sequence isolated from the Sargasso Sea
attgctagtagctaaccgaggcgaaattgcatcgagggtttttaggactgcaaaaaaaatgggcctcagaaccgttgcaatatacaccgaagcagacaggcattcaccctacgtaggcgatgccgatctatctgtaaaaatagaatcatcgtatctcgactcagatgcgattatttctgcagcaaagaagtcaggtgctgaagccattcatccgggatacggattcttatccgagaaccatgaatttgcaatgagggttcaaaatgaggagatcgtctgggttgggcccgatccacagtcaattcaaatcatgggcgataaaattgaagcgaagaaacatgccattaaggccaatttgccaatattggaatcggtcaatgacgca

SEQ ID NO: 202765 - DNA, 991 bp, Unknown
  Bacterial polypeptide expressing nucleotide sequence isolated from the Sargasso Sea
tgtctgttcagatgcagacaaatttgccaagcacgtatttttagctgatgagtcatattatttaggtgaaagtacagcagataaatcataccttgataaagaaaaaataattgaagccatgcataaaacgggatctgaagcggtgcatcctggttatgggtttttgtccgaaaatgcttcctttgctaaaatggtagaagacaatggatttgtttttataggcccttcgagtgagtccattaatttgatgggagataaaatttcttccaagaaaatagctgagagagctggagtatcgatagttcctggttttctaggtgaggttatctcaaaagatcatgcgctaggcttagtacaggagataggatttcctgttttaataaaagcatccgcaggtggtggagggaaggggatgcgcgtggtcgaaaatgaagatgatctggagcaagcacttatttcctctcaaaatgaggctgaaaaatcatttggagataaacgtgtctttatagaaaagtttattgttcaacctcgtcatatcgaaatacaaattatttcagataaacacggaaattgtctttacttgggagagagagaatgttcaatccaaagaagaaatcaaaaagtaattgaagaggctccaagttcattcgttgattgtgacttgcgaataaaaatgggtgaacaagctgtaagccttgctagagaggttgattatttttctgctggtacagttgaatttatagtagacaaaaacaagaacttttattttttggaaatgaatactcggcttcaggtagagcaccctgtgacagagttgattactggtcttgatcttgttgagctaatgataaaggtcgcgtatggagataggcttggatttgatcaaaataatgttgaattgaaggggtgggctttagagtgtcgaatttatgctgaggatcctttcagaaatttcttgccttcaacaggacggttaagaacttataaacct

SEQ ID NO: 202766 - DNA, 739 bp, Unknown
  Bacterial polypeptide expressing nucleotide sequence isolated from the Sargasso Sea
atgttttctaaaattttgattgcaaacagaggcgaaatagcatgtagaataattagcacagctaaaaaaatgggcattaagacagtttcagtcttttcagatgctgataaattttccaaacacgtaagactttctgatgaatcaatgtatataggtaaatctgcgtctaacgagagttatttaaatattgatgcaattattaatgctgctaaggaaagcaaagcagaagctattcatcctggttatgggtttttatcagagaatgctgatttcgttgatgccgtaagtaaactaggaatttgttttgttggtccttcaaaaaaagcaatttcattaatgggtgacaaaattgagtcgaagatgctagctaataaggcaaatgtatctactgttccaggttttataggtgaggttagtagttttaagcatgcgcaagagatagcaaactcaattggatatcctgttatgattaaggcatcggctggcggcgggggaaagggtatgagagttgcaagtaatcctgaagaagttcaagatagtcttgaacgagcaaaaagtgaggctcaatcttcttttggagatgatagaatatttatagaaaaattaattcaaaagccaaggcatatagaaatccaaattttagcagacaactttggtaatataattcatttaggtgaaagagaatgtagtattcaaagaagacatcaaaaagttatagaagaggcacctagtccctttt

SEQ ID NO: 202767 - DNA, 282 bp, Unknown
  Bacterial polypeptide expressing nucleotide sequence isolated from the Sargasso Sea
gatgtttaaaaaaatacttatagcgaatagaggtgagatagctgtacgtgttataagagcttgtaaagaatggggcattgcaacagtagctattcattcagatgttgatagagatggaatgcatgtaagattagccgatgaaagtgtttgtgtaggccctcatcaaccatcattaagctatttaaatattcctgcaattatgtcagccatagaactcacaggagctgaagctgttcatcctggatatggttttttatcagagaactatgaatttgcaaaaat

SEQ ID NO: 202768 - DNA, 940 bp, Unknown
  Bacterial polypeptide expressing nucleotide sequence isolated from the Sargasso Sea
tgaaatagcggttagaataaatagagcttgtcaggaacttggaatatctacagtagctatacatagtgaagcagactcagattcaatgcatgttagaatagcagacgaaagtgtctgcataggaccaaatcctgttaataaaagttatttaaatactcattctattattgcagcctgtgaaattactggggcacaagctgtccatcctggatatggattcttatctgaaaattcatcatttgctaaaatgttagaagatcataaattgacatttattgggcccaaatattctcatatagaagctatgggagataaaattcaggcaaaaaaaatcatgaaagaatttggtgtcccgactgtacctggatccgataaagctatcgaaaatgaaaaagatgcaattaatatttctaaagagattggtttccctgtcctaatcaaagcaagtgctggaggtggaggtagaggaatgaaggttgtaagtgatgaaaaagaactttctgattcattgcctattataaaacaagaagcactttctttctttggtaatgacgctgtttatattgaaaaatttattgattcacctagacatatagaagttcaagtaatctgtgacatgcatggaaattttcttcatcttcatgagagagattgctctgttcaaagaagaaatcaaaaagttatagaagaagctcttgctccaggaatagatgaaaaaaagaaagaaaaactcttttcaacttgtattaatgccatgcaaaaaatggggtatttaggtttagggaccttggaatttctatatgaaaatggagaattttactttatggaaatgaatactagacttcaggtagaacaccctattactgaaatgttaacaaggattgatcttgtaagagagcagatttgtgtagcctcagggaaaagatttttcatctcaaga

SEQ ID NO: 202769 - DNA, 847 bp, Unknown
  Bacterial polypeptide expressing nucleotide sequence isolated from the Sargasso Sea
tatgaaacttctggtagccaaccgcggcgaaatcgccatccgcctactgcgcggcgccgccgaactcggcatccccaccgtcgcagtgtattccaaagacgacgttcaatccctacacaccggcaaagcgcatgaggcctacgagattgatggtgttgggcctgccggctatctaaacatcgacaagatcgtcgccatcgccaaagcctccggcgcggacgccgtccacccgggttacggcttccttgctgagaacgcggactttgcgcgacgctgtgaggccgagggcatcaccttcattggtccacgccccgaaaacatcgaactcttcggcgacaaggcccgagccagacaggccgctgtcgctgcagatgtgcccgtcactcgtggtatcgatcgcgcggtgacccgggaggaggcgcaggactttttcgagattcttggctccggccgagcaatgatgatcaaagccattgctggtggcggagggcgcggctccagggtcgtcatggccgcggacgaagtggctcagacctttgagcgctgccaggctgaagcggaactggcgtttggcaatccggacgtgtacgttgaagagttcattacgcgtgcacgccacgtcgaggtgcagatcttaggtgatctgcacggtggcgttgcccacctgggtgagcgcgaatgcagtatccagcggcggttccagaaggtgatcgagattgcacccgcgccagcgctggatgtcgacctccgggacacgatcatagaagccgccgtccgctgcgcagacagcgtgggctactcgaatgccggtacctttgagttcctggtggacgcctccggcgcggca

SEQ ID NO: 202770 - DNA, 775 bp, Unknown
  Bacterial polypeptide expressing nucleotide sequence isolated from the Sargasso Sea
tatgtcactaaaaacctacgccattattacagatgttcacggaaattcatcatctttaaaagaagcaataaaaataattaataaaagagatgatgtagatcaaattatttgtttaggagattattttgctcttgggcctgacccaatgggctgctttaagttgcttgaatcactttctaactgtgtttttcttagaggaaatcacgaacgctaccttattgaaaatctttggacacatgaaaggccaaaccttgaaggaatgtccccggatgatccaatatgcaaagaaatagttcaaaatgaaaaatggaccgcagaaatgattggaaaaagaggtagaaatttttgtaacaagacacgaattgcagaaagacaaattattgataatacactggttgaatttactcatgcatggtatcagagagatgaaatacctcctacgatggatgaagctattgcctggaaaaatcatatatctaaagctaataataaaattaagcgatttatttttgtgcatggacatacccatttgcccagaatagaagaaaaagaaaatttaaaaattttgtgccagggtgcaacggggctaccttttgatcaagacccaagagggtcaattgcttttttaaaaatcggtagggagtttaattgggaaataatccgatatgaatatgatagagaaagatctattgatatgttagaagatatcaagccaccattttataaaaatcttcaaaatactattcgatatgccactatcaggaatgatatttaa

SEQ ID NO: 202771 - DNA, 493 bp, Unknown
  Bacterial polypeptide expressing nucleotide sequence isolated from the Sargasso Sea
atgtttgattcaattttagttgcaaatagaggagaaattgctttaaggataatgagaactgctcaagcaatgggtatccaaactattgcaatttatgttgaagcagataaggatgcgcctcatgttaagtttgctgataaagcagtacttcttccagatggaggatatcttgatatagatgcagttttagatgttgcacaaaaaagtaatgctggcgctattcatccaggttatggtttcttatcagaaaattctgaatttgctgaaagagtcatcaaagaaaagattgtttgggttggtccatcccctaaagtcatttctgtaatgggtgataaattaaaagctaaagagcttgctataaaagctagcgttcccactcttccaatgacctcaaatgaaaaagaagtcaaaaaaattggatatccgcttctaataaaagcagctgcaggtggaggcggaaaaggaatgagagtagttactgataaaaaagatc

SEQ ID NO: 202772 - DNA, 779 bp, Unknown
  Bacterial polypeptide expressing nucleotide sequence isolated from the Sargasso Sea
aatgtttaagaaaattttaattgcaaaccgtggggaaattgcagttagaataattagagcatgtaaagaatggggaatatctacagtagctgttcattcagatgtagatagagatagtatgcatgtcagattagctgatgagagcgtatgtatcggatctcatcaaccagcaaatagttatttaaatattcctgcattaatgtcagcaatagaactcacaaatgcggatgcagttcatcctggctatggttttctctccgaaaatgcaaattttgccagaattttagaacagaacaaaattaattttattggagcctcatcaaaacatattaaaatgatgggtgataagatccaggcaaaaaaaatagctaaagaaaatggattacctgttattgaagggtctgaaggaggtgtaaaagatgtatcagaagcaaaagaactttgtaaaaaaattggttttcctatcttgattaaatcctctggtggaggtggaggtaaaggtatgaaaatagtttataaggaagaagaatttgaaacgttgttttcaacagctaaatctgaggcacaaaaatattttggtaatgatgaagtttatattgaaaaattttttcaaaatccaaggcatattgaagttcaaatattagctggtaaaaatagagtagttcatcttcatgaaagagattgttcagttcaaagaagacatcaaaagttaatagaagaaactcctagtccagttttaaatgatgaaataagaaaagatttatttgaaagaacagtaa

SEQ ID NO: 202773 - DNA, 557 bp, Unknown
  Bacterial polypeptide expressing nucleotide sequence isolated from the Sargasso Sea
tatgtttaaaagaatcttaatagcaaatcgaggcgaaatagcctgtcgagtcatctctacggcgaaaagaatgggaatagaaaccgtagctgtttattcggatgcggatgtgcaatctcctcatgtcggctttgctacgcaggcgtgtcatatagggagttctcgagcaaaagattcttacctttctatagaaaaaattattgaggcagcccgattgacgcaatccgatgccatccaccctggctatgggtttttgtcagaaagagcggaatttgcggacgcttgcgatgatgcggggatagtatttatcggaccgtctgctagtgctattcgagcgatgggggataagtcggccgctaagtctttgatgatggaagcagggttgccgttgaccccaggttatcatggtggagatcagggtacgacctttcttgcggatcaggcgaatcaaataggcttcccggtgcttattaaagcgagtgcaggtggcggtgggaagggtatgcgacgagtggattcactcgaagaatttgacagcgcgttggagtcctgccgtc

SEQ ID NO: 202774 - DNA, 619 bp, Unknown
  Bacterial polypeptide expressing nucleotide sequence isolated from the Sargasso Sea
atgttcaataaaattctaatcgcaaatcgcggagaaattgctttacgagttattcgcgcgtgccgcgaaatggggatcaaatctgtggcagtacactccactgcagatagcgatgcaatgcatgttcgaatggctgacgaaagtgtttgtattggccccgcggcaggaactgcaagctatctatcaatgccggcaataatagctgcatgcgaaattactggagctgaagcaattcatcctggttatggttttttgtctgagaatgcaaaatttgttcaaatagtcgaagatcacagcctagtttttattggcccaacggcagagcacattcgcattatgggagacaaaattacagccaaagacacaatgaaggaccttggtgtgccatgtgtcccgggttcagacggtggcgttcccgacgtaaataccgctaaaaaaattggcgctgaaataggctatcccgtgataattaaggctacagctggaggcggcggccggggaatgaaggttgcaaaaacagaaggtgagatggagcaggcctttatgacggccagagccgagggcaaagcagcctttggaaatgatgaagtttatattgaaaagtatttaacgacgccca

SEQ ID NO: 202775 - DNA, 463 bp, Unknown
  Bacterial polypeptide expressing nucleotide sequence isolated from the Sargasso Sea
atgtttaaaaaaattctcattgccaatagaggagaaattgctgtaagagttattagagcttgcaaggaatggggtatatcaactgtagcaatccattcagatgtagatagagaaagtatgcatgtcaaactagcagacgaaagcgtatgtgttggtccacaccaaccatcaaatagttatttaaatatacctgcaatcatgtcagctatagaattaacaaatgcagaagctgtacatcctggctacggatttttatctgaaaattttaattttgcaaaaatactagaggaaaacaatataaaatttattggaccatcatcaaaattaataaaaatgatgggagataaaattgaagcaaaaaagatagcaaaagaaaatggtttacctgtgatagagggttctgatggaggtgtatcaaatattgaggaagctaaaaaaatctgtaatgaaattggatttccag

SEQ ID NO: 202776 - DNA, 601 bp, Unknown
  Bacterial polypeptide expressing nucleotide sequence isolated from the Sargasso Sea
atgattaaaaaaatattgattgctaatagaggtgaaatcgcttgccgggttattcgtacagcccggaaattaggaatcaaaacaatagcagtttactctgaagtagatcaaaatgcattgcatgttgatatggcaagtgaagctatatgcattggttctgctttagcggctgatagctacttgaacataaattcaatcatggatgctattgaggaaactggtgcagatgctgtgcaccctgggtatggatttctctctgaaaacgcggaatttgcagaacgtttaaatacgtctggtataaccttcataggcccaaaaccgcacgcaattcgtgttatgggcgacaaaatagagtcaaaattatttgcagagaacgcgggtgtaccgactgttcctggccataccgaggcggtgtctgatgttgctgacgcaaaagaaatagcaaatgaggtcggttacccagtcatgcttaaggcctctgctgggggagggggaaaagggatgcgggtggtgcaagaggaaggtcaaatagaggagggattacgagcttgtacagccgaagccactaatagttttggtgatgatcgcgtttttgtggaga

SEQ ID NO: 202777 - DNA, 442 bp, Unknown
  Bacterial polypeptide expressing nucleotide sequence isolated from the Sargasso Sea
atgataaaaaaactcttaattgccaatagaggtgagatagctttacggatattgagagcatgtaaagaattagatatctctacagtagctgcctattcagaatctgatagagatcttatgcatgtaaaaatggcagatgaatctatttgtattggtcctgctgaatcaagcaaaagttacttaaatataccctctttaataagtgcaatggaactttgtggtgctgatggaatccatcctggatatggttttctatctgaaaatggtgattttgcagagcaagtagaaaaaagtgactttcaattcgtaggtccctcttcagaaattataaggttaatgggaaataaagtttctgcaaaaaagtttgctaaagaaatgggacttcctgtggtacctggtacagatagacctataaataaaaatttaaaagaagaagcaatac

SEQ ID NO: 202778 - DNA, 709 bp, Unknown
  Bacterial polypeptide expressing nucleotide sequence isolated from the Sargasso Sea
aatgttcaataaaattcttatagctaatagaggtgaaattgctgttagggttttaagggcatgtaaagaacttggaatacagacggtggctgtatattcgtctgcagataaaaatgcaatgcatgttaaattagcggatgaaagtgtttgcattggacctgcctcatcactcaaatcttatttaaatattcctgcgataatctctgcttgtgaagtttctggtgcagatgcagtacatccagggtatggttttttatccgaaaattttggttttgttgaaaaactagaagcacacggtattaaatttataggcccaaaatctgaacacattaaaatgatgggcgataaaatcttagcaaaagagtcagcaaataatcttggtcttccaattattcctggttctcctggagaaataagcaacacaaaagagggtcttgaagtagcaagtacacttggctacccaataattataaaagcttcatcaggtggtggtggtcgaggaatgataaaagtttttaaagaagaagatttagatgagtctttaaaaaaagcttctactgaagctgaaaaatcttttaatgataagagagtttatattgagaaatatctacaaaatcctaaacatatagaaatacaagtaatcggtgatgagtataataatatagtgcatttaggagagagagatgttcaatgcaaagaagaaatcaaa

SEQ ID NO: 202779 - DNA, 945 bp, Unknown
  Bacterial polypeptide expressing nucleotide sequence isolated from the Sargasso Sea
atcctgggagcagtgccgtcaacttgatgtagacgccgtacaccccggatacggctttttaagcgaaaacgctgatttcgcccgggccgtaattgataacgggatcatttgggtcgggccgaatccagatgtcatctcttctatgggttcaaagatcgccgctcgatccatcgcagcatcagcgggtcttccactgattccaggattcgcagacatagcgcagcaagatgacggaacacttgccgaagctgcgagcgaaatcggttatcccgttctcttaaaggcatctgctggcggcggcggtaaaggaattcgaattgttcattcaccagggcacttcagcgagtctctcaccgaggcccgaacagaagcgatgagatcgtttggtgatgacgcaattattgttgagcgctacatagaacgacctcgccacgttgaggttcaactcatgggcgacaagaatggcgccctgctggagctgggtaccagggattgctcaattcagcggcgctatcagaagctgatcgaagaggcacccgcaccgaacctgaggccagaaacagaggccggtttgcgatcagctgccttagccctaggacgttccatcggctacgacaacgctggaaccgtcgaatttgtggtcgacgtcgataacggcgattacttctttctcgaagtcaacactcgccttcaagttgaacaccctgtcactgagcaggtcacaggacttgatctcgtagagctgcaactagtggccgcgaccggagggtcactaccagtgactcaagaggacgtgacatttcacggccacgcaatcgaagtgcgcatcaatgctgaagatccagcaaataactatgccccacagactggcagggtcgagacaataagaatccctcacgaccaagatggtgtccgctgggatggcgcattcgaccgcgagggcag

SEQ ID NO: 202780 - DNA, 501 bp, Unknown
  Bacterial polypeptide expressing nucleotide sequence isolated from the Sargasso Sea
tatgaaaaaaaaaataaaaaaaatattaatagctaacagaggtgaaattgcaattaggatagcaaaaacctgtagaaagttaaaaatcaaaacagttggcatatattctaagcaagatgaaagttcgttgcatttagattacatggatgaaaagtattttttaagcgatgatccacttaaaggaagttatttagaaaaaaaaaaaatagtaaaaatttgtaaagagttaaaagtagatgctgttcatcctggatatggatttttatcagaaaactatttattttcaagtttgctagaaaaaaataatattatatttataggtcctccagctaaggcagttaaagaaatgggagataaaatttcctcaaaaaaaatagctataaaagctaaagttaattgtattcctggcttaaacaaggaaattaaaaattataatcaagcaataaaaatttctaatgatattggctttcctgtaatgattaaggcttctgcaggaggagg

SEQ ID NO: 202781 - DNA, 614 bp, Unknown
  Bacterial polypeptide expressing nucleotide sequence isolated from the Sargasso Sea
tatgttcaaaaagattttgattgcaaatcgaggagagattgctcttaggataattagaacttgtaaagaaatgggaattaaatcggttgcagtttattctacagcagatgcggaaagtttacatgttaaatttgctgacgaagccgtatgtataggtccctcccaaagtatacattcttatttaaaaccttctaatattattgctgctgctgaaattactaatgctgatgcaatacaccccggatatggttttctatcggaaaattcaaaattttcgaaaatgtgtactgagcatgacataaaattcataggtgcttcaagtgatatgataagtaaaatgggagataagtcttctgcaaaagcaactatgaaaaaagctggagtaccaactataccaggttctgatgggataatacaaaatttgaaaactgctaaaattactgcaaaaaaaataggctaccccattatgttaaaagcctcttcaggaggtggaggtaaaggtatgagagcggttaataatgagattgaacttgagaaatcttgggaaagtgcaaaacaggaatcaatggctgcttttggtgatgacagcatgtatattgaaaaatttattgaag

SEQ ID NO: 202782 - DNA, 778 bp, Unknown
  Bacterial polypeptide expressing nucleotide sequence isolated from the Sargasso Sea
atgtttaaaaaaatattaatcgctaatcgtggagaaattgctgttcgaataattagagcctgtaaagaatggggtatatcaacagtagcagttcattcagatgtcgacaaagagagtatgcatgttaggctagcagatgaaagtatttgtattggttctcatcaaccagcaaatagttatctaaatgtaccagctttaatgtctgcaatagaattaactaaggctgaagctgtacacccaggttatggatttttatccgaaaatgcaaactttgctaaaattttagaagagagtaatattaaatttataggaccatcatcaaaattaatcaagatgatgggtgataaaattcaggctaaaaaaattgcaaaagaatatggtcttccagtaattgaaggttctgatggaggtgtttcaaatattactaaagcaaaagaaatttgtaaaaaaattggattccctgttttaattaaagcagctggaggtggtggtggaaaaggtatgaaaatagcttttgaagaaaaaaattttgaagaattatttctagctgctaaatctgaagctaaaaaatattttgctaacgatgaagtatatattgaaaaattttttcaaaaccctagacatattgaagttcaagttttgtcaggaaaaaatagaacagttcatttgcatgaaagagattgttctgttcaaagaagacaccaaaaacttatagaggaaacacctagtccaatattaagtgatgatttaagaaaagatttattcgaaaaaactgtaa

SEQ ID NO: 202783 - DNA, 886 bp, Unknown
  Bacterial polypeptide expressing nucleotide sequence isolated from the Sargasso Sea
gcagtttattctgatgttgattctgattcaccacatgttttaatggcagatgaagcaatagaaattggtccagcaaatccatcggagagctatttaaattttgataaaatagttaatgcagcgaaggatacaaattcagatgcaatacatcccggttatggtttcctctctgaaaatggtgaatttgctaaatacgttagtgaatccggtctaatcttcatagggccagattcagatacaataaaatcaatgggtgataaagcagaatcaaaacaaatgatgatggaggcgggcgtacctacaattccaggtagtgacggagagcttacaggaaatatagatgccatggctcgtgaaatcggctatccattgatggtgaaagcggctgcaggaggaggtggtaagggaatgcgtattgtaaatcaggctgaggaattggattcagctattgaagctgctaaaaatgaggcaagaaattcgtttgggaatgatacgttaatcattgagaaatatttggataatccaagacatatagaagttcaaatactcggagataagaaaggaaatataattcatctttatgaaagggaatgttctattcagagacggcatcagaaaattattgaagaatctccttccccagcaataacaaataaacttcgtaataagatgggtgaagccgcagttaaggcagcaaaagtagcgaattaccataatgcaggaaccgtagaatttttgtatcaagatggagaattctattttctagagatgaatacacgtttgcaagtagaacacggtgtgacagagatggtttgtggtattgacatcgtaaaatggcaaatacgaattgcagaaggagcgtccttagatatcaaacaaaaagatt

SEQ ID NO: 202784 - DNA, 306 bp, Unknown
  Bacterial polypeptide expressing nucleotide sequence isolated from the Sargasso Sea
aatgtttaaaaaaattcttattgccaatcgtggtgaaatagctcttcgcgtaattagagcctgccatgaactcaatatcaaaacagtagcaatttattctagtgctgatgagttatcgttacatgtaaagtttgctgatgaggctgtatgtataggcccgccttcaagtaaagacagttatttaaacattcctagaatcattgccgctggtgaaatcaccaatgcagatgctatacaccccggttatggattcttatccgagtctgctgaattttccaaaatatgctctgaaaatggatttcattt

SEQ ID NO: 202785 - DNA, 703 bp, Unknown
  Bacterial polypeptide expressing nucleotide sequence isolated from the Sargasso Sea
tatgtcaagagtgttagttgcaaatcgcggtgaaatcgcccgtcggattatcaaagcatgtcatggtttaggttatcaggcggttaccgttcactccgaggtagatgcgcaattggcgcatgttaaagaagctgatcactcaattgaaattggtccagctccagcaaaagagagttatctaaatatccaagctatattggatgctgccataaagatggattgtgattttttacatcctgggtatgggtttttgtctgaaaatgctgaatttgccgaagcggttataaaagctggtattcgttggatcggtccgcgacctgaaacaattaagactatgggagataaagctcgtgctcggtcaatcgtggctgcagtaggcgtaccgatcgttccgggaagtaagaggttagagccaggaatggctaacaggactttggaagcagccagggatatcggtttgccattgctcgttaaggcctccgccggaggcgggggtattggcatgcgacgtgtggactctatcaatgatgtagagaaaatcgtcgaggctacgcaagtgatggccgaaaatgtatttggtgatcgggcagttttcctggaaaaattcattccaaaatcgagacacatagaaatccaaatttttggatttgaggatggcagttgtatccatgtttttgagcgcgagtgctcactgcagcgacgg

SEQ ID NO: 202786 - DNA, 553 bp, Unknown
  Bacterial polypeptide expressing nucleotide sequence isolated from the Sargasso Sea
aatgttcaaaaaaatcttaatcgcaaatcgcggagagattgctgtacgagtaatcagagcgtgtaaagaatggggaatttcaactgtagcagttcattcagatgtagatagagatagtatgcatgtaagattagctgatgaaagtatttgtattggctctcatcaaccaattaatagttatttaaatattcctgctttaatgtcagcaatagaacttactaacgcagaagcagtccatcctggatatggttttttatctgaaaatgttaatttttctagagtattagaagaaaataatattaagtttataggtgcctcatctaaacatattaaaatgatgggagataaaatccaagcaaaaaaaattgcaaaagaaaatggtttacctattattgagggttccgatggaggaataaaagatataaatgaagcaaaacacctttgtaaaaaaattggttatccaatattaattaaagcctctggtggtggtggtggaaaaggaatgaagatcgtttataaagaggaagaatttgagggtctttttcttactgca

SEQ ID NO: 202787 - DNA, 259 bp, Unknown
  Bacterial polypeptide expressing nucleotide sequence isolated from the Sargasso Sea
tatgacttttcataaattattaatagccaacagaggagaaattgcttgtaggataattaaaactgctcatgagatgggaattacttgtgtagctgtttatactgaagccgactctcgctcaccctttgtaaagatggctgatgaagcagttaaactaagcgatacatatcttaatgggaaagagattatcgaggctgcaaagcaaacaggtgcagaagctatccatcctggatatggatttctttctgaaaatgcttag

SEQ ID NO: 202788 - DNA, 721 bp, Unknown
  Bacterial polypeptide expressing nucleotide sequence isolated from the Sargasso Sea
aatgataacaaaactcttaattgccaacagaggagaaattgccttacgtatcttaagagctgcgaaggaattaaagataccgactgttgcagcttactcagaagcagataaagatctaatgcatgtcaaaatggctgatgaatcaatttgtatcggtccagctgactcagcacaaagctatctcaatattcctgccatcatcagtgcaatggagctatcaggagcagatggtgttcatccaggctacggattcttatctgaaaatgcagattttgctgaaaaaattgaaaaaagtggattcgattttgtaggaccctctgcatctgtaattaggatgatggggaataaagtctcggcaaaagaatttgctttacaagctggtctaccaattgttccaggttcaacaggaccaattgaccaggacacgcaaaaaaaagctgaagaaattggatatccagtaataattaaagcggcttcaggaggtggtggcagaggtatgagaattgttcactctcctgaggaattggaaaatgctatagaacttacacaacaggaatctgcagctgcttttggtgattcaacagtatatcttgaaaaatttctagaaagtcctagacatattgaggttcaggttttggcggataggcatggcaatgtagttcatttaggtgatagagattgctctttacaaagaagacaccaaaaggttattgaagaagct

SEQ ID NO: 202789 - DNA, 786 bp, Unknown
  Bacterial polypeptide expressing nucleotide sequence isolated from the Sargasso Sea
tatgttcaaaaaaattctgattgcaaatcgtggagaaattgcagtgagagttataagggcatgcaaagaatggggtatatcgacagttgcaattcattcggatgttgatcgagatagtatgcatgtaagactagcagatgaaagtatttgcgtgggtcctcatcaaccatctaatagttatttaaatattcctgcaataatgtctgcaatagaattaactaattctgaagctgtacatccaggatatggttttttatctgaaaatactgaatttgctaaaatccttgaagataataatattaagttcataggtccatcttcaagtttgataagtaaaatgggagataaaattcaagcaaaaaaaattgctaaacaatatggtttaccagttattgatggttctgagggtggtgtttcagatgttaaagaagctaaaaaattatctaaaaatattggttttccagttttgataaaagctgcaggtggtggcggtggaaaaggaatgaaaatagtaaataatgaaaatgattttgaaaatttatttttaactgcaaaattagaggcaaaaaaattttttggaaatgatgaggtttatattgagaaattttttcaaaatccaagacatattgaggttcaagtattatctggaaaaaatagaactgttcacttacatgaaagagattgctcagtacagagaagacatcaaaaattaatagaggaaaccccaagccctgttttaacagatacagtcagatcagatttatttaacaaaactgtaaagatggt

SEQ ID NO: 202790 - DNA, 805 bp, Unknown
  Bacterial polypeptide expressing nucleotide sequence isolated from the Sargasso Sea
cctggcaagaggaccaggaaggctgagcatgtctccggagtggatgcagggggccccgagcccgtactccaaggtcctggtagccaaccgaggcgagatagcggtccgggtcctgcaggcagccagtgaggcgggcctgtcgagcgtcgcggtgtactccgagtccgactccgggtcgttgcacgtcgagaccgccgacgagtcggtgctcctcgagggggatgggctagaccagacctacctcaacggcagcgcgatcatcgaggcagcccgatcgacgggggcggacgccatccaccccggctacgggttcctctcagagagggctgacttcgcccgagaggtcgagtccgcgggcatccgctggataggcccgtccgcgtacgcgatcgagacgatgggcgacaagatatccgcacgcacgctcatgatcgagtcgggggtcccggtgatccccggggacgagatcccgatagaggagggcgcggaccacctgggggccctggcgagcgccgcggccaaggtgggctacccgctcctgatcaaggccagcgccgggggagggggaaagggaatgaggtccgtttccgtccccaagaacctgcgtagcgagttcgaggccgcggccagggaggcgtcagctgccttcggcgacggcaccgtgtacatcgagaggctcctcaccagcgccaggcacgtcgagatccaggtgctctgcgacgcgcacggcggtgccatccacctcaacgagagggactgctccctgcagcgcaggtaccagaaggtgatcgaggaggccccctct

SEQ ID NO: 202791 - DNA, 574 bp, Unknown
  Bacterial polypeptide expressing nucleotide sequence isolated from the Sargasso Sea
aatgtttaaaaaaatacttatagctaacagaggtgaaatagcagtccgtataataagagcatgtaaagaatggggtatttcaactgtagctattcattcagatgttgatagggagagtatgcatgttagattagctgacgaaagtatttgcgtaggtcctcatcaaccaacctttagttatttaaatattcctgctattatgtcagcaattgaacttacaggagctgaggctgtacatcctggttatggttttttatcagaaaattttgagtttgcaaaaatattagaagaaaatgatataaaatttataggtccttcatctaagttaataaaaatgatgggagacaaaattgaagctaaaaaagtagctaaagaatacgggcttccagtaatagaaggttcagaaggtggtattaaagattttaatgaagcaaaaaaaatatgtcaaaagataggttttccagttttaattaaagcatctggtggtggtggtggaaaaggaatgaaaatcgttactaggttagaagattttgaaactttatttttaacagcaaagcaagaggctaaaaaattt

SEQ ID NO: 202792 - DNA, 502 bp, Unknown
  Bacterial polypeptide expressing nucleotide sequence isolated from the Sargasso Sea
atgttcaaaaaaatactgattgctaatagaggtgaaattgctttgcgtgttcttagagcctgcagagagttaggaataaaaactgtagccattcactctgatgttgatgaaaatgcaatgcatgtaagaatggcagatgaaagtatttgtgtcggaccagcctctgcacaatctagttatttaaacattcccgcaattataactgctgctacgttaactgatgtagatgcaattcatcctggatatggttttttaagtgaaaatcaaaggtttgccgaaattattgaagagcacaatattaaatttattggaccaaaatcagagcatatcaaaatgatgggtaacaaaattgatgcaaaaaaaataatggatgaaactggggtgccaacagtaaaaggtataaatgacttaagcgataaaaataaaattgaaaaatttataaataaagtaaaatatccaattatagtaaaagcagcgagtggtggtggtgaaaaggaatgag

SEQ ID NO: 202793 - DNA, 931 bp, Unknown
  Bacterial polypeptide expressing nucleotide sequence isolated from the Sargasso Sea
atgttcaaaaaaattttaattgcaaaccgtggggaaattgcagtcagaattattagagcatgtaaagaatggggaatatcaacagtagctgttcattcagatgtagatagagatagtatgcatgtacgaatggcagatgaaagtgtttgtgttggctcacatcaacctgcaaatagttatttaaacattcctgcacttatgtcagcaatagaactaacaaattcagatgcggttcatcctggatatggttttctatctgaaaatccaaattttgctagaattttagaagagaataaaattagttttataggtgcatcatctaaacatattgaaatgatgggtgataaaattcaagcaaaaagaatagcaaaagaaaacggtttacctgttattgaaggatctgaaggtggagtaaaggaaattaaagaagcaaaagaactttgtaaaaggattggttttcctattctaataaaagcttcaggtggtggaggtgggaaaggtatgaaaattgttcataaagaagaagaatttgaaacattattttctactgcaaaatctgaagcaaaaaaatattttggaaatgacgaagtttatattgaaaaattttttcaaaacccgagacatatcgaagtacagatattggctgggaaaaatagagctgttcatcttcatgagagagattgttctgttcagagaaggcatcaaaaattaattgaagaaactccaagtcctgttttaaatgatgaaataagaaaagatttatttaaaaaaactgtaaatatggttgaaaaaattggatatatgggagctgggacagttgaatttatatatgaagatggcaaattttattttttggaaatgaatactcgagttcaagtagagcaccctgtaactgaaatggtaacagggattgatattattaaagagcaaa

SEQ ID NO: 202794 - DNA, 268 bp, Unknown
  Bacterial polypeptide expressing nucleotide sequence isolated from the Sargasso Sea
aatgtttaaaaaaatattaattgctaatcgtggagaaatcgcagttcgggttataagagcttgtaaagaatggggaatagctactgttgcagttcattctgatgtagataaaaatagtatgcatgtaagacttgcagatgaaagtgtttgcattggaccccaccaacccgcaaatagctatttaaatataccagcaataatgtcagcaatagaattaacaaaagctgaagctgtacatccagggtacggatttttatctgaaaatttc

SEQ ID NO: 202795 - DNA, 756 bp, Unknown
  Bacterial polypeptide expressing nucleotide sequence isolated from the Sargasso Sea
cctggtagctaaccggggggaaatagcagtcagggtgctgcaagcggccagggaggcgggcctgtcgagcgtcgcggtgtactccgagaccgactccgggtcgctgcacgtcgagaccgccgacgagtcggtgctgctcgagggggaggggctcgaccagacctacctcaacggcagtgccatcatcgaggcagcccggtcgacgggggcggatgctatccaccccggctacgggttcctctccgagagggcggacttcgcccgcgaggtcgagtccgcgggcatccgctggataggcccgtccgcacatgccatcgagacgatgggcgacaagatatccgcacgcacgctcatgatcgattctggggtcccggtgatccccggggacgagataccgatagaggagggggcggaccacctgggagccctggccagcgccgcggccaaggtcggctacccgctcctgatcaaggccagcgccgggggagggggcaagggaatgaggtccgtgtccgtcccgaagaatctgaggagcgagttcgaggcagcggccagggaggcgtcagcggccttcggcgacggcaccgtgtacatcgagaggctcctcactcgcgccaggcacgtggagatccaggtgctttgcgacgcgcacggcggtgccatccacctcaacgagagggactgctccctgcagcgcaggtaccagaaggtgatcgaggaggcgccctcgccggcggtcgaccacgccaccaggca

SEQ ID NO: 202796 - DNA, 592 bp, Unknown
  Bacterial polypeptide expressing nucleotide sequence isolated from the Sargasso Sea
aatgtttaaaaaaatacttatagcgaatagaggtgagatagctgtacgtgttataagagcttgtaaagaatggggtattgcaacagtagctattcattcagatgtggatagagatggaatgcatgtaagattagctgatgaaagtgtttgtgtaggtcctcatcaaccatcgttaagctatttaaatattcctgcaattatgtcggccattgaacttacaggggctgaagctgtgcatcctggatatggttttttgtcagaaaattatgaatttgcaaaaatattagaggaaaataatataaaatttataggcccttcttctgatttaattaaaatgatgggagataagattcaagcaaaaaaagttgcaaaagaatatggacttcctgttatagaaggatcagatggtggaattaaagatttggatgaagcaaaaaaaatatgtgagaatgtaggctttcctgttttaattaaagcatcaggtggtggtggtggaaaaggaatgaaaattgttaataagttagagaaatttgagagtctttttttaacggcaaaacaagaagcaaaaaaattttttaataatgatgaagtt

SEQ ID NO: 202797 - DNA, 788 bp, Unknown
  Bacterial polypeptide expressing nucleotide sequence isolated from the Sargasso Sea
tttgccaccatttcaaggaggcttggctggatttttatcctatgatttatgttctgtgctagaaaatattccctatgagccaagcacagcagcgtttccacttttagccttgggactttatgatgtggtggtgagctttgaccatcagcaaaaaaaagcatggattatttcacatggcacttttgagccagatcttgtaaaacgccagtctaaggccaaagaaagactagagtatattcataataagctttttgatactgcgccggtaaaagtgcaagaaagcacatgggataagctgcctattacacctgcttttagcaaaaaagaatatctagaagccatacagcaggcaaaaaattatattttagaaggcgatatttttgaggtaaatctgacgcaacactttgatgcacagcttccagagggtgtaaaagcttttgatttatattgtcgcttaagaaaactgaaccctgcaccttttgccgcttttttacaattgggctatcaagccattgcctctggttccccagagcgatttttacaattgcaggataatcatcttcaggctaggcccattaagggaacggcgccaagaggtcaaaccaaggcccaagatgcacagtttgcacaacaattacagcaaagcaccaaagatcagagtgaaaatgtgatgattgttgatttaatgcgcaacgatttctctagggtttgtgataaggatagcgtgaaggtgagcaaactatgtggcttggaaagttatgctaatgtgcatcatttagtttcggtgg

SEQ ID NO: 202798 - DNA, 406 bp, Unknown
  Bacterial polypeptide expressing nucleotide sequence isolated from the Sargasso Sea
atgtttaaaaaaatacttatagctaacagaggagaaatagctgtacgtataattagagcttgtaaagaatggggtatttcaactgtggctattcattctgatgtagatagagatagcatgcacgtaagattggctgatgaaagtatttgtgttggtcctcatcaaccaacacttagttatttaaatattccagcaattatgtcggcaattaaactcacaggtgctgaggcagtccatcctggttatggttttttatcagaaaattttgagtttgcaaaaatactagaggaaaatgaaataaaatttataggcccttcatcaaatttaataaaaatgatgggagataaaattgaagctaaaaaagttgcaaaggaatatggacttccagtaattgaaggttctgaag

SEQ ID NO: 202799 - DNA, 823 bp, Unknown
  Bacterial polypeptide expressing nucleotide sequence isolated from the Sargasso Sea
aatgtttaaaaagattttaatagctaatagaggagaaatagcaatgcgccttataaggacttgtaaggagatgggtattcagactgttgccgtatattcaaaagctgatgaggaaagccttcatgttcggtttgcagacgaggcggtttgtattggccctgctagtagtgcagaatcatatttaaaaagtgctaatattattgcagctgctgaaattacaaatgcagatgctattcatccaggatatggttttttatctgaaaacagcaaattttcaaaaatatgccaagagcataaaataaaatttattggggcttctccagaaatgattgataagatgggagataaggcttcagccaaagcaacaatgaaaaaagctggagttccaacaatacctggatctgaagggattgtggatagcctagaagatgcacaaaaaattgctcaaaaaataggataccctattatgttaaaagcaactgcaggaggaggaggaaaaggaatgaggattgtcccaaaggcaaaagacttattgaaagcttgggaagatgcccgtcaagaatctaaagcatcctttgataatgatgatatgtatattgaaaagtttattgagaatccaagacacattgaaatacaaattattggagactcaaaaggagaggcagcgcacttatcagagagagactgttcaattcaaagaagacatcaaaaattaattgaagaaaccccctcgccttttatgacagaaaaactaagaaatgaaatgggggaggcagctgttaaagcagcaaaagcagtcaaatatgaaggggcaggaactata

SEQ ID NO: 202800 - DNA, 901 bp, Unknown
  Bacterial polypeptide expressing nucleotide sequence isolated from the Sargasso Sea
ttacgtgttcttagagcctgcagagaattaggaataaacactgtagctattcactctgatgttgatgaaaatgcaatgcatgtaagaatggcagatgaaagtatttgtgtcggaccagcctctgcacaatctagttatttaaacatacctgcaattataactgctgcaacattaactgatgtagatgcaattcatcctggatatggttttttaagtgaaaatcaaaggtttgccgaaattattgaagaacacaatattaaatttattgggccaaaatccgaacatattagaatgatgggtaacaaaattgatgcaaaaaaaataatggatgaaactggtgtgccaacagtaaaaggtataaatgacttaagcgataaaaataaaattgaagattttataaaaaaagtaaaatacccaattatagtaaaagcagcgagtggtggcggtggaaaaggaatgagaattgtcacagaagaagatgatttaaataaagctatcaatgaagcaaaaattgaagcaaaaaaatcatttaatgatgaaaatgtttatttagaaaaatttttaacatctcctaaacatattgaaattcaagttctttgtgattcatttggaaatgttgttactcttggtgaaagagattgctcaattcaaaggaagcatcaaaaacttattgaagaaagtccaagttcagttctaacaaatgaaaatagagaaaaaatttctgaactttgtagaaaatctatgaaagaaattggatatgaaggtgttggaacattggaatttttatatgaaaataatgaattttattttatggaaatgaatacaagattacaagttgaacacccagtcacagaaatggttactggaatagatcttgttaaggagcaaattctcgttgcta

SEQ ID NO: 202801 - DNA, 563 bp, Unknown
  Bacterial polypeptide expressing nucleotide sequence isolated from the Sargasso Sea
tatgacgtttagcggtgtgttgatcgcgaatcggggagaaattgccatacgtatcgcaagggcagcgcaagatctgggattgcgcacggttgccgtgtattcccaagacgacgccgccagcctgcacacacaggtagcagacgaggcagttcagttggaagggcttggtgcgcgggcttacctcaacatcgagggcgtgattgcagcagctcaagccagcggctgcgatgccattcatcccggctacggtttcttgtctgagcaggccgaatttgccaccgcttgtgcgaatgcgggcattaagttcattggacctacggcagagcacctgggtttgtttggcgacaaggcccgtgcgcgggaagcagccattgctgcaaatgtgccggtactgcagggcattgatcgcgcggtgaccttagcagaggctcaagcattcgtcggccagcatcccggaggcatcatcatcaaggcgctggcaggcggcggtggtcgcggcactcgtgcggtcactaacgcggctgacctggcggaaatttttgcgcgctgtcagtccgaggcga

SEQ ID NO: 202802 - DNA, 586 bp, Unknown
  Bacterial polypeptide expressing nucleotide sequence isolated from the Sargasso Sea
atgtttaacaaaatactaattgcaaatcgtggagagatagccttaagaattatcagcacatgtcgccgtatgggaatcaggactgttgcagtttattcagaggcagattcagatgcgctccacgtcaaagaggcagatgaatcatactttattggcgaggctgcaccagcgatgtcttacctgcgaatcgataaaatactggatgcaacgaaggaaaaaggttgcgaagcgattcatccaggttatggtttcctgtcagaaaacgctgaatttgcaagacaatgcttaaattcaggcataacatttatcggaccatcggctgaagcaataagattaatgggggaaaaacataaagctaaaaatgtgatggagaaggcaggagtcccagtagtccccggatattttggagaagagcaaagtatgcaatgtcttcttaaggaagcagacaaaataggctacccgctgatggttaaagctgttctcggcggaggtggaaagggaatgagagtagtacaaaaaaaagaagattttgggagtgctctggtgacggtagaaaatgaaggtaggaaggcttttggtgactccc

SEQ ID NO: 202803 - DNA, 534 bp, Unknown
  Bacterial polypeptide expressing nucleotide sequence isolated from the Sargasso Sea
aatgtttaaaaaaatacttatagcaaatagaggtgagatagctgttagaattattcgtgcatgtaaagaatggggtattcaaactgttgcaattcattcagatgttgataaagaaagtatgcatgtaaagttggctgatgaaagtctttgtgttggttcaagacagcctgtagacagttatttaaatatcccatccatattatctgctattgaagtgacaaagtcagacgcagttcatcccggttacggttttttatctgagaattataattttgctaaaatattaaaagataataatataaaatttattggtccgtctcctgaaataataaaaatgatgggagataaaattgaagccaaaaatacagcaaaaaaatatgggatacctgttattgaaggctctgagggtggtgtagcaagtttggaaaaaggaaaaaatattgctaaaaaaattggatatcctattttaataaaagctgcaggaggtggtggtgggcaaggcatgaaagttgttaaatctgagaatgaatttga

SEQ ID NO: 202804 - DNA, 607 bp, Unknown
  Bacterial polypeptide expressing nucleotide sequence isolated from the Sargasso Sea
aatggttgaaaaagttttaattgctaatcgtggagaaatagctttacgaattgtcagaagttgtagagaactaggtattgcaaccgttgcagtttttagcactgtagataaaaaagcattgcatgttcagcttgctgatgaggcggtttgcgtaggagattcattaagtaataagagttatttaaatattccaaatatacttgctgctgctacatcgagaggagttgatgctattcatcctggttatggatttcttgcggaaaatgataaatttgctgagatgtgtaatgatcacggcatagtttttattggcccatctcctaaagctattagatctatgggagataaatctacagctaaagaaactatggaagcagttggagttccaacagtacctggtagtaaaggcttgttatcaaatgttgatgaggcttataaattggcagatgatattggctatccggtaattattaaagccactgctggaggaggtggaagaggtatgaggttggttgaaaactctgataatctagaaaaaatgtttaaagcagctcaaggagaagcagaagcagcttttggtaatgatggtttatatatggagaaattt

SEQ ID NO: 202805 - DNA, 802 bp, Unknown
  Bacterial polypeptide expressing nucleotide sequence isolated from the Sargasso Sea
agcacaaaaaagtaatgctggcgctattcatccaggttatggtttcttatcagaaaattctgaattcgctaaaagagtcattaaagaaaagattatttgggttggtccatcccctaaagtcatttctgtaatgggtgataaattaaaagctaaagagcttgctataaaagctagcgttcccactcttccaatgacctcaaatgaaaaagaagtcaaaaaaattggatatccgcttctaataaaagcagctgcaggtggaggcggaaaaggaatgagagtagttactgataaaaaagatctacaagagtcgcttgaaggtgcgaaaagagaggcgttatcaggttttggagatgagagagttttcattgaaagatatgtagaaaaatctcgacatatagaaatccaaattcttggggactctcacggcaatgttattcatcttggtgaaagagaatgctcaatccaaagaagacatcaaaaaataattgaggagtctccatctccgaggataactgaagagataagattcgcaatgggtaatgcagcagttgatcttgcaaaaaaaataaaatacgagtctgcaggaactgttgaatttctttttgatgataagagtggtgaattttggttcctagaggtcaatacaagactgcaagttgagcacccagttacggaagaagttactggaatagatttagtagctgaacaaataaaaattgctagaggtgaagagctacagtactcgcaagaggacattgagtggacaggatcctcaatcgaggctcgtctgtatgctgaaaat

SEQ ID NO: 202806 - DNA, 517 bp, Unknown
  Bacterial polypeptide expressing nucleotide sequence isolated from the Sargasso Sea
tatgtttgataaagttctaattgccaacagaggggagatagccctgcgtgtattgcgtgcgtgcaaggacctaggaattaagactgtagctattcattcctccgcagacaaagacttaatgcatgttcggctggcagacgagtctgtttgcatcggcccgcccaatccaaccgaaagctatatgaatatcccagcaattattagcgccatggaagtaacaaactcggatgccgtccaccctggatacggcttcttatcagagaacgctgacttcgctgaacaagtagagcgaagcggattttcctttattggaccatccgccgaaaccatccggctgatgggtgataaggtttcagcgattaaaattatgagggaagccggcgtaccaacagtacctggctcagatgggcctgtcagtgaccacccggaacacagcatgaaattagcccaggagataggctatccagtcataataaaagcgacagcaggtggcggtggccgcggtatgcgagttgtc

SEQ ID NO: 202807 - DNA, 948 bp, Unknown
  Bacterial polypeptide expressing nucleotide sequence isolated from the Sargasso Sea
aaaaaagtattaattgccaatagaggtgagatagctctccgtgtaatcagaacatgtaaggagatgggcattaaaactgtcgctgtttactcaaaagcagatgaagaaagtctccatgttaaatttgctgatgaagcagtttgtatcggaccagcacctagtagtgaatcttatttaaaaatatcaaatataattgccgctgcagaaatcacaaatgctgatgctatacatccaggatatggattcttatctgaaagtgctaagttttcgaaaatttgtggtgaacataaaataaaatttattggaccatcacccgaaatgatagaaaaaatgggggataaagctacagcagtatcaacgatgcagaaagcaaaagtcccaactattcctggatcaggaggtgctgttgatgatgtcgaaatcgcttttaaaatagcagtcaaaataggatttcccgtcatgataaaagcttctgcaggtggtggtggaaagggaatgagagcagtatttaaacgaaacgattttaaaaagaattggtctagtgctaagcaggaagcaaaagctgcatttggcaatgatgatatgtatattgaaaagcttattcaagaaccacgtcatattgaaattcaaattatagcagatcaatatggaaacgtaagtcatttatctgagagggattgttcaatccaaagaagacatcaaaaattaacagaggaaacaccatccccatttatgataaaaagcctaagaaataaaatgggcaatgctgcagtgaaagctgcaaaatttatagattatgaaggagttggaactgtagagtttctagttgatagtcaaagaaatttttattttatggaaatgaataccagaattcaggttgaacatccgattactgaacaagttattgattatgatttaatccaagaacaaattaaagtcgctgctggg

SEQ ID NO: 202808 - DNA, 413 bp, Unknown
  Bacterial polypeptide expressing nucleotide sequence isolated from the Sargasso Sea
aatgttcaaaaaaatacttattgcaaacagaggtgaaatagctcttcgagttcttagagcatgtagagagctaggaattaaaactgtggctattcattctgatgtagatgaaagcgcaatgcatgtaagaatggctgatgaaagtatttgtgtaggaccagcatctgctcaatcaagttatttaaatattcctgctataattactgcagcaacattaactgacgtagacgcaatacatccagggtatggttttttaagcgaaaatcagagatttgcagaaataattgaagaacataaaataaaatttattggacccaggtcagatcatatcaaaatgatgggtaataagattgatgctaaaaagataatggatgatgctggtgtacccactgttaaaggtttaaatgatttaa

SEQ ID NO: 202809 - DNA, 868 bp, Unknown
  Bacterial polypeptide expressing nucleotide sequence isolated from the Sargasso Sea
atgttcaagaaagtactaatagctaatagaggagaaattgctgtaaggataataagagcatgcaaagaatggggcattggaactgtagcagtacattcagatgtagactcagatgcaatgcatgttcgtttagccgatgagagtgtctgtattggttctcatcagccacaaaatagttatttaaatgtttcatcaattatgtctgctgtagatttaacaggggccgaagctattcatcctggttatggttttctatccgaaaatgctaaatttgcagatattgtaagtaaacatggaataaaatttattggtccaagttcagatataatttcaaaaatgggcgataagattgaagcaaaaaaaattgcaaaaaaatatggattaccgattatacagggatcagagggaggtgtaaaatctgttgaagaagcaaaatctttatgtaaggaaatcgggtatccagtgcttatcaaagcagctggcggtggaggtggaaaaggaatgaaaattgtaaaagaggaaaaatatctcaacgaattatttctcacagctaaaaatgaagcaaaaaaatattttggaaatgatgaattgtacattgaaaaatattttatgcatccaagacatatagaggttcaaataatgtcaggaaaaaataaaactgttcatttaggtgaaagagactgctcagttcaaagaaggcatcaaaaacttatcgaagaaacccctagtccagttttaacacctgaacaaagaaaagatttattagaaaaaacagttaaaatggttgagcaaattggatatgaaggtgcaggcaccgaagagtttatttacgaaaacggaaatttttattttttagaaatgaaccact

SEQ ID NO: 202810 - DNA, 277 bp, Unknown
  Bacterial polypeptide expressing nucleotide sequence isolated from the Sargasso Sea
atgggtattggcaagcttctgatcgccaaccggggtgagatcgctctgcgaatcatccgcagttgccgggaaatgggcatttccacggtggctgtgtacagcacggtggatcgcaacgccttgcacgtgcaattagctgatgaggccgtttgtgtcggtgatccccccagcggccgcagctacttaaatatccccaacatcattgcggcggcgacatcccgtggggcggatgccattcaccccggctatggcttcctcgctgagaacgatcgtttcg

SEQ ID NO: 202811 - DNA, 327 bp, Unknown
  Bacterial polypeptide expressing nucleotide sequence isolated from the Sargasso Sea
aatgtttaaaaaaattttaatagcaaatcgaggggagattgcggttagaataattagagcttgcaaagaatgggggatatctgcagttgctgtacactccgatgttgatagagaaagcatgcatgttaaattggctgatgaaagtgtttgcataggttcttatcaaccattaagtagttatttaaacatccctgctatcatgtctgcaatagaattaactggagcagaagcagtacacccgggttatggatttctgtctgaaaacgcaaattttgcaaaaattttaggagataataaaattaaatttataggaccttcacccaaatt

SEQ ID NO: 202812 - DNA, 362 bp, Unknown
  Bacterial polypeptide expressing nucleotide sequence isolated from the Sargasso Sea
catgttcaaaaaagtacttatagctaatagaggggagatagctgtaagagtaattagagcttgtaaagaatggggtattaaaactgtagcagttcactctgacgttgattcagagtctatgcatgttaggttagcagatgagagtgtttgtataggatctcatcaacctcaaaatagttatttaaatatctcatcaataatgtctgctgtagacttaactggtgctgaagcaattcatcctggttatggtttcttatctgaaaatgcaaaattttctgagattgttaataaacatggaataaaatttgttggtcctagtgcagatataatttcaaaaatgggagataaatttgaggcaaaga

SEQ ID NO: 202813 - DNA, 645 bp, Unknown
  Bacterial polypeptide expressing nucleotide sequence isolated from the Sargasso Sea
aatgtttaagaaaattctaatcgctaatagaggtgaaattgctgtaagagttattagagcttgtaaagaatggggaatttcaactgttgcaattcattctgatgtagacagagaaagtatgcatgtaaaattagctgatgaaagtgtatgtgtaggtccgcaccagccagccaatagttatcttaacattccagcaattatgtcagctattgagctaacaaatgcagaagcagttcaccctggatacggatttttatctgaaaattcaagctttgcaaaaattttagaagaaaataaaattaaatttattggaccatcttcaaatttaataaagatgatgggagataaaattcaagcaaaaaaggttgcgaaagaaaatggattacctgtaattgaaggatccgatggaggtgtatctaatatagaagaggcaaaacaaatttgcaaaagaataggatttccaattcttgtaaaagctgctggtggtggaggtggaagaggaatgaaaattatttacgatgaaggtaaatttgaagagctattcttatctgccaaatcagaggcaaaaaaattttttgcgaacgaagaggtatacatcgaaaaattttttgaagatcctaggcatattgaagttcaagtattatc

SEQ ID NO: 202814 - DNA, 724 bp, Unknown
  Bacterial polypeptide expressing nucleotide sequence isolated from the Sargasso Sea
atgttcaaaaaaatactgattgctaatagaggcgaaattgctttacgtgttcttagggcctgcagagaattaggaataaaaactgtagccattcactctgatgttgatgaaaatgcaatgcatgtaagaatggcagatgaaagtatttgtgtaggaccagcctctgcacaatctagttatttaaatatacctgcaattataactgctgcaacattaactgatgtagatgcaattcatcctggatatggatttttaagtgaaaatcaaaggtttgcagaaattattgaggaacacaatattaaatttattggaccaaaatcagaacatatcaaaatgatgggtaataaaattgacgcaaaaaaaataatggatgaaactggggtgcctacagtaaaaggtataaatgacttaagcgataaaaataaaattgaagaatttataaaaaaagtaaaatacccaattatagtaaaagcagcgagtggtggtggtggaaaagggatgagaattgtcacagaagaagatgatttaaataaagctataaatgaagcaaaaattgaagcaaaaaaatcatttaatgatgaaaatgtttatttagagaaatttttaacatcccctaaacatattgaaattcaagttctttgtgattcatttggaaacgttgttactcttggagaaagagattgctcaattcaaaggaagcatcaaaaacttatgaagaaagtcc

SEQ ID NO: 202815 - DNA, 854 bp, Unknown
  Bacterial polypeptide expressing nucleotide sequence isolated from the Sargasso Sea
aatagctttaagaatattgcgcgcttgcagggaacttgatataaaaactgtagcaattcactctgaagcagatgagaaagcaatgcatgtaagaatggctgatgaaagtgtttgtgttggtcctgcatcagctcagtcaagctatttaaatattccagcaattataacagcagcaactatatccaacgcagatgcaatacatcctggatatggttttttaagtgaaaacaaacgatttgcagaaatcatcgaagaacataatataaaatttatcggtcctaaatcagaacatattgaaatgatgggaaataaaatagctgcaaaaaaaattatgaaagagaataaagtacctactgtaccaggactaaatgatctcacagatatgaaaaaagttttaaaatttatagatgatattaagttacctataataattaaagctgccagtggtggaggtggtaaaggtatgagagtggttaataaaatagaagatctagaagaatctattaatgctgctaaaatagaatcaaaaaaatcatttaatgatgatacagtttatttagaaaaattttttgttaatccaaaacatatagaaatacaagtccttgctgacagcaatggtaatgtcttaacattaggagaaagagattgttctatacaaagaaaacatcaaaaaattattgaagaaagtccaagtattgtcttaactaatgctgaaagagaaaaaattagcaatctatgtgtcaaagcaattaaatcaataaaatatgagggtgtaggtacactagagtttttatatgaaaataataacttttattttatggagatgaatactcgacttcaagttgaacatcctg

SEQ ID NO: 202816 - DNA, 739 bp, Unknown
  Bacterial polypeptide expressing nucleotide sequence isolated from the Sargasso Sea
aatggtaaagaaagtattaatagctaatcgtggagaaattgctcttagaattattagagcttgtagagaattaggtatagaaactgttgcagtgtattctaaagtagatgaaatttccttacatacacgttttgcagacgaagcaatatgtataggtcctaatgaaagctctaaaagttatcttaatattccatctatattggcagcagcagaattgacagcttcagatgctattcatccaggatatggttttttagctgaaaattcaaaatttgcttcaatatgcaaagaaaataatatcaaatttattggttctgatgctgaaataataaatatgatgggaaataaatctcttgctaaagatactatgaaaagtgtaggggttcctgttattcctggaagtgatggtaatgttgacacctatgaagaagcaaaatttttatgttctagcattggttatccagttattataaaagctgtttcaggtggtggaggtaaaggtatgcgattagtaaatgatgaaagtgaattagaaaaatcatttgatatggctaaagttgaggctgatgcagcttttagtgatagtaatgtatatatagaaaaatatttagataaacctcgtcatattgaaattcaaattttatgtgataattttggaaatattatacctcttggagaaagagagtgcagtttacaaagaaggcatcaaaaaatattagaagaatctccaagttgtatt

SEQ ID NO: 202817 - DNA, 413 bp, Unknown
  Bacterial polypeptide expressing nucleotide sequence isolated from the Sargasso Sea
aatgttcaaaaaactacttatagcaaatagaggtgagattgcatgtagaattgcgtccacagcacgtagaatgggtattcgaactgtggccatttattctgatgtggatcgggatggtttgcatttggaagcttgcgatgaggcggttgcgataggtggaacaagttcagccgaatcgtatctagaaatggataaagttctaagcgcggcaatcgaaacagcgagtgacgcgatacaccccggatatgggtttttatccgaaaatccagtatttgcaaaaaaatgtgctgccgcaaaaattatttttgtcgggccgccagcgacagcaattgaggttatggggtctaaatcaaaagccaaaaaacttatgggatcggcaggtgtgccgctggttcctggctatcatggtgagg

SEQ ID NO: 202818 - DNA, 739 bp, Unknown
  Bacterial polypeptide expressing nucleotide sequence isolated from the Sargasso Sea
atgttcaaaaaaattctgattgctaatcgtggagaaattgcggtcagagttatcagggcatgcaaagaatggggtatatcgacagttgcaattcattcggatgttgatcgagatagtatgcatgtaagattagcagatgaaagtatttgcgtgggtcctcatcaaccatctaatagttatttaaacattcctgcaataatgtctgcaatagaattaactaattctgaagctgtacatccaggatatggttttttatctgaaaatgctgaatttgcaaaaatccttgaggataataatattaagtttataggtccatcttcaagtttgataagtaaaatgggagataaaattcaagcaaaaaaaattgctaaaaaatatggtttgccagttattgatggttctgagggtggtgtttcagatattaaagaggctaaaaaattatctaaaaatattggttttccagttctgataaaagcttcaggtggtggcggtggaaaaggtatgaaaatagtaaataatgaaaatgattttgagaatttatttttaactgcaaaattagaggcaaaaaaattttttggaaatgatgaggtttatattgagaaattttttcaaaatccaagacatattgaggttcaagtattatctggaaaaaatagaactgttcatttacatgaaagagattgttcagttcagagaagacatcaaaaattaatagaggaaaccccaagcccagtttaac

SEQ ID NO: 202819 - DNA, 288 bp, Unknown
  Bacterial polypeptide expressing nucleotide sequence isolated from the Sargasso Sea
tatgaaaaaaattctaattgcaaaccgtggggaaattgcctgtagaattatcgatagttgtaaaaaacttaagtttcactcaatagcagtttattctgatatagataaaaacagtaaacatgtaagaaaagctgatgagtcaattcacatcggtgcatcgaaagctcaagaaagctatttaaatgcagataaaataattgaagcagccaaaaaattaaaagctgacgctattcaccctggttatggctttttagcagaaaacgaaaaatttgcccaaaaagtaattga

SEQ ID NO: 202820 - DNA, 376 bp, Unknown
  Bacterial polypeptide expressing nucleotide sequence isolated from the Sargasso Sea
atgtttaaaaaaatattgatagctaacagaggtgaaatagctgttagagtaattagagcctgcaaagaatggggtatcaaaacagttgcagttcattcagatgttgatgctgactctatgcatgtacggttagctgatgaaagtgtttgtatcggttctcataaaccacaaaatagttatcttaatatatcagcaataatgtctgcggtagatttaactggatctgaagctattcatccaggatatgggtttttatcagaaaatccaaaatttgctgagattgtaaataaacacggaattaaatttatagggccaggttcatcaatcataaaaaaaatgggagataaaattgaggcaaaaaaaatgcaaaaaaata

SEQ ID NO: 202821 - DNA, 634 bp, Unknown
  Bacterial polypeptide expressing nucleotide sequence isolated from the Sargasso Sea
atgcttgagagattgctaatcgctaatagaggcgagattgccattcgtattgcgcgcaccgcatcggatatgggtattaaaacggtgagtgtgttttcagaagacgatcatttgtctttgcatacccgtcatagtgagagcgcgatcaatttaggacaagcgggcgttgccgcctatctcaatgcagaaaacttgatccaagtagcaaaggagacaggttgcaatgcaattcacccgggatatggatttctgagcgaatctgccgagttttcaaagctgtgtgctgaagcgggcatacgctttgtgggaccttctcctgctacactcagtcaatttggtgacaaggctcaagcaagaaatctcgcgatagcgagcgaggtgcccgtcttaaagggaactaatcaagcgacaaccctagaagaagcaaacgctttttatgacagtctgggcgtcgggacagccgttatgattaaagcgctggcgggaggcggggggcgcggaatgagacccgtccgtgagaaggctgagttggaggaggcatacgcgagggcgacctctgaagcccaaaaagcttttgggtcgggcgatctttatcttgaagagatgctttatccagcaaaacacgttgaggttc

SEQ ID NO: 202822 - DNA, 756 bp, Unknown
  Bacterial polypeptide expressing nucleotide sequence isolated from the Sargasso Sea
tatgtttaaaaaaatattaattgctaatagaggtgagattgctgttagagttataagagcatgtaaagaatggggaatatcaacagtagctgtgcattcggatgccgataaagaaagcatgcatgtgagattagcagatgaaagtatatgtataggatctcatcaaccagtaaatagttatttaaatattccttcaataatgtctgctatagaattaacaaatgctgatgcggtacacccaggctatggatttttatctgaaaattcaagttttgcaaaaatcctagaagaaaacaatattaaatttataggtccttcttcaaagcttattaaaatgatgggtgataaaattgaagcaaaaaaaattgcaaaggaaaatggactacctgtaattgaggggtctgatggaggagtttctaatataaaagaagctaaagaaatatgtaaaaaaattggatttcctgttttgatcaaagcatctggtggaggcggaggaaaaggaatgaagattgttaatgatgaatctaatttcgaaaacctattctatatggctaaatctgaagcacaaaaatattttggaaatgacgaagtatatatagaaaaattttttcaaaatcctagacatatagaagttcaagttatgtctggaaaaaatagaacagtacacttgcatgaaagagattgttcaattcaaagaagacatcaaaaattaatagaagaaacaccaagcccaatattaaatgatgaaattagaaa

SEQ ID NO: 202823 - DNA, 665 bp, Unknown
  Bacterial polypeptide expressing nucleotide sequence isolated from the Sargasso Sea
attgcttgtagcaaaccgaggagaaatcgcctcaagggtgatcaggacagctaaaaagataggtcttaaaaccgttgcaatttatacagaagcagacaggcattcgccatatgtaatggatgctgatttatcagtaaagatagaatcatcttatcttgattcggatgccattatttctgcagcaaagacaacgggcgccggcgccatacatccgggttacggattcttatctgagaatcatgattttgctacaaagattcaagatgaagggatcatatgggttgggcccaattctgattcgatccaaatcatgggggataaaatagaagcaaagaaacatgccattaaggccgaaatgccaatacttgaatcagcgaatgatgcagcttctgcaaaggatattggatacccattaatgattaaggcagctgccggtggtggtggaaagggcatgcgtattgtcgatgatgaatctcaactcgatgaatcgattaaactagcaaagcaagaagcaatgaatgcatttggagatgatcgaatatttattgaaagatacattgaacgctctagacacatagaggttcagattattgcagacaaacatggcaatgttctccatcttggtgaaagagaatgctcgattcaaaggaggcatcagaagatca

SEQ ID NO: 202824 - DNA, 670 bp, Unknown
  Bacterial polypeptide expressing nucleotide sequence isolated from the Sargasso Sea
tatgtttaagaaaattttaatcgctaacagaggtgagatcgcatgtagagtaattgaaacatgcgataaattgggtattgaaactgtagcagtatatagtgatgctgatagtagggctctacatgtaatgaaggctaaggaagctataaatataggtccagcaccgtcgtctgagtcatatctagttattgaaaaaattataaatgcttgcaaaaaaactggggctgatgctgttcacccaggttatggttttctctcagaaaattcagcatttgtaaatcaacttgaaagagagggaattacttttataggccctccatctgaacctattagagtaatgggtgataaaattgaatcaaagatttttgctgaaaaatcaggtgtaaatataattccaggtcatcaagaaattataaaagactcccaggaggcattggaagtctcaaaaaaaataggttttccagtaatgattaaagcttcagctggtggaggcggaaagggaatgagaattgcaaaagttgaagcagatgtggaagatgcatttaattcatctgtaaatgaagctaaatcaagttttggtgacgatagaatatttattgaaaaatttattgaaaaacctcggcatatagaaattcaagtgttagctgataagcatggaaatgttgttcac

SEQ ID NO: 202825 - DNA, 460 bp, Unknown
  Bacterial polypeptide expressing nucleotide sequence isolated from the Sargasso Sea
atgagtcgaaaacccgctatgtttgaaaaaatcctcattgccaatcgtggcgagatcgcgctccgtattcagcgcgcgtgccgcgaacttggcgtcaagaccgtcgtcgtctattcggaagccgacaaggaagccaagtacgtgaagctcgccgacgaggccgtctgtatcggcccggcaccttcgaatctgagctacctgaacatgccggcgctgatcagcgcggcagaagtgacggacgccgaagcgatccacccgggctacggcttcctgtcggaaaacgccgacttcgccgagcgcgtcgagcagtccggcttcaccttcatcggcccgcgcccggaaaccatccggatgatgggcgacaaggtcacggccaagcagaccatgatcaaaaccggcgtgccctgcgtgccgggttccgaaggcgcgtgccggaagatccgaaagagatcggaaaatg

SEQ ID NO: 202826 - DNA, 841 bp, Unknown
  Bacterial polypeptide expressing nucleotide sequence isolated from the Sargasso Sea
atgtttaagaaaattttgattgccaacagaggcgaaattgctcttagagtgataaggacttgtaaagagatgggcatcaaaacagtagcggtttactctcaagccgatgtcaatgctatgcatgtgagaatggctgatgaaagtgtttgtattgggccagcagaaagttctaaaagttacctttcaataccttcaattatttcagcttgtgaaataactggatgtgaggcagtacacccaggatatggttttttgtctgagaatgcgaaatttgcagaaatattgagtgaccacggcataaaatttattggtccttcagtgaaccacataaatataatgggtgataagataaacgcaaaaaatcaaatggaaaaattcaatgtaccctgtgttcctggttcaagaggagcaattgctgatttagaagaagctcgcctggccgcaaaagaaattgggttccctgttttgttaaaggcagcagctgggggcggaggaattgggatgaaaatcgtatctagcgaccaacaactagaaaagctatttatacaagcgaaatcagaggcaaaaaagagtttcaacgatgatacgatgtatattgagaaataccttgaagcacctagacatatcgaaattcaagtttttggagatggtaaaggaaaagccgttcatttacgtgaaagagattgttctctccaacggagacatcaaaaggttcttgaagaaacacctagtccagcagttgaacacgatgagatagataaaataggtacaatttgttcaaatgccataagtaaaatgaaatatgagggagctggaacaattgaatttctatatgaaaata

SEQ ID NO: 202827 - DNA, 361 bp, Unknown
  Bacterial polypeptide expressing nucleotide sequence isolated from the Sargasso Sea
attgcttgtagcaaaccgaggagaaatcgcctcaagggtgatcaggacagctaaaaagatgggtctgaaaaccgttgcaatttatacagaagcagacaggcattcgccatatgtaatggatgctgatttatcagtaaagatagaatcatcttatcttgattcggatgccattatttctgcagcaaagacaacgggcgccggcgccatacatccgggttacggattcttatctgagaatcatgattttgctacaaagattcaagatgaagggatcatatgggttgggcccaattctgattcgatccaaatcatgggggataaaatagaagcaaagaaacatgccattaaggccgaaatgcaa

SEQ ID NO: 202828 - DNA, 823 bp, Unknown
  Bacterial polypeptide expressing nucleotide sequence isolated from the Sargasso Sea
atgtttaaaaaagttttaattgctaacagaggtgaaatagctgttagagttataagggcttgtaaagaatggggaatcgggacagttgcagttcactctgatgtagatgcggactcaatgcatgtgagattagcagacgagagtgtttgtatagggtctcaccagcctcaaaatagctacttgaatatttcatctatcatgtctgctgtagatctcactggtgccgaagctattcatcctggatatggttttttatcagaaaacgcaaagttttctgaaatagtaaataaacatggaataaaatttattggtccaagtgcagatattatttcaaaaatgggagataaaattgttgctaaaaagattgcaaaaaaatatgggcttcctgttatcgaagggtcagaaggaggcgttaaatctttaagtgaagcaaaatctatatcgaaagaaattggttatccaatattgataaaagctgctggcggaggtggtggaaaaggcatgaagatagtagcggaggaaagtgaattagaaaatttgtttttaactgcgaaaactgaagctaaaaaattcttcggcaacgatgaattatatattgaaaaatactttaaaaatccaagacatatagaagtacaaataatgtcaggtaaaaataaaactgtacatttaggagaaagagattgttcagtacagagaagacatcaaaaattaattgaagaaactccaagtcctgtaattacaaatgaacaaagaaaagatctgttggataaaactgttaaaatggttgaacaaattaattatgagggagccaggtactgttgaa

SEQ ID NO: 202829 - DNA, 499 bp, Unknown
  Bacterial polypeptide expressing nucleotide sequence isolated from the Sargasso Sea
tcaatagctaaaggttatgccatcgatatgattaatgattttctaaaagatcatgataattatctcattgatattggtggtgagttatcagtgaagggatcaaataagggtgaactttggaatataggtcttcaagatccaaaatttatttctaataaacccatatatattatctcaacaaataattggtattcaatagcaacctcaggagaatatagaaattacaaaattaaggataataaaaaaatttcacatactataaatcctaaatcgttaaattccattgaaaataatcttttatcagttactgttattaatgataatgatattcctattactgcatttgctgatgcattagcaacggcatttaatgcaatgggttataaaagtgcatatgattatgcaaataaatcagatattgctgcattgtttgttattgaagaagagggtgatataaatattatcaaaactgaaaaatggtataatttaaacttatgaa

SEQ ID NO: 202830 - DNA, 888 bp, Unknown
  Bacterial polypeptide expressing nucleotide sequence isolated from the Sargasso Sea
acaaacaggtacaaatcagaggcagttgccgccgaagcatctagagccgaggctctcaaggcaaaagaaaaaacaaaggatgatcttagaggggcagaaaagtcttttgataatgcgatgttgcaaagtaaggaagccgatgaaaacttaattaaagctgaagagaccaggaatcaaacacaagcccttgaggtagatgctagagctgccttgtcttcggctgaaggcgaggctaacgcaataagtgcagaagttgctgctttagcaaaaatcctggagcgagacactatggagggtggtcaggtaattgatcgtctccaggttgaacatggttttgaaaaagctctcggtgcagcactagctgatgatttaaggtcaccgcaagtgcaggaagatgggccatcggggtgggtctctctagacgaactgacgattcagcaagatttacctgatggtgtaacccctttgacccatcacgtgtccgtgccagaggttttaaatcgacggatttctcaaattggcctagtcgatgcagatgaagggccgaagttgcagagattgctgaaacctggtcaaaggcttgtttccacagaaggtgacctgtggcgatgggacggcttcagggcttggtctgaagatgcgcctacggcaacgtcattacgtttggagcaattaaatcgactagaagaattaaagcaactcaatgagagagcgaatgtgcaattggaggctgcaaaagcagcacatgaatctttgacaaaaagacttgctactgacactgatagcgataaggctgcaagagatagagtgaaggaagcagatagtgacctgtctgatgctcaaagggcccaaaatcgagctgaggcggagctaagcctagcgataaac

SEQ ID NO: 202831 - DNA, 679 bp, Unknown
  Bacterial polypeptide expressing nucleotide sequence isolated from the Sargasso Sea
atgcagggagccccgagcccgtacaccaaggtgctggtcgccaaccggggcgagatagcggtcagggtcctgcaggcagcaagggagtcgggcctgtcgagcgtcgcggtgtactccgagtccgactccggttcgctccacgtcgagaccgccgacgagtcggtgctcctcgagggggaggggctcgaccagacctacctcaacggcagcgcgatcatcgaggcggcccggtcgacgggggcggacgccatccaccccggctacgggttcctctcagagagggctgacttcgcccgggaggtcgagtccgcgggcatccgctggataggcccgtccgcccacgccatcgagacgatgggcgacaagatatccgcacgcacgctcatgatcgagtcgggggtacccgtcatacccggggacgagataccgatagaggagggggcggaccacctgggagccctggccagcgccgctgccaaggtgggctacccgctcctgatcaaggccagcgccgggggagggggcaagggcatgaggtccgtgtccgtcccgaagaacctgaggagcgagttcgaggcagcggccagggaggcgtcagcggccttcggcgacggcaccgtgtacatcgagaggctcctcacccgcgccaggcacgtggagatccaggtgctttgcgacg

SEQ ID NO: 202832 - DNA, 803 bp, Unknown
  Bacterial polypeptide expressing nucleotide sequence isolated from the Sargasso Sea
atgtaaagaatggggaataggaactgttgctgttcactccgatgttgactctgactcgatgcatgtccgtttagcagatgaaagtgtttgtataggctctcatgaaccaagaaacagctatctaaatatccctgcgataatgtcggctgttgatgttacaggagcccaagctatccatccgggttatggttttttatctgagaattacaaatttgctgaaatagttcaaaaacatggaataaaatttattggtccaggctctgaaattattaaaaagatgggtgataaaatcgaagcaaaaaaaatcgctaaagagaacggtttgccagtcatcgaaggttctgatggtggcgtaaaaaattcaaaagatgcaaaaataatttgcaaaaatataggttacccagtcttaataaaagcttcaggaggaggtggaggaaaaggaatgaaaatagtagaagatgagaataaattagatgaactattttcattagctagattagaagcaaagaaatattttggaaatgatgaggtctatattgaaaaatattttaaaaacccaagacacattgaagttcaagttttgtctggaaagaatagaacagtacatttaaatgaaagagattgttcggttcaaagaaaacatcagaaattaatcgaagaaacacctagtccggttttagatgaaaaaaccagatcagatttattaaacaaaacagtgaaaatggtccaggcaataggatatgagggcgccggtactgtagagtatatttatgaaaatggaaagttttattttctgaaataac

SEQ ID NO: 202833 - DNA, 823 bp, Unknown
  Bacterial polypeptide expressing nucleotide sequence isolated from the Sargasso Sea
aatgtttaaaaaaattttaattgcaaaccgtggggaaattgcagttagaattattagagcttgtaaagaatggggaatccctactgtagctgttcattccgatgtagatagagaaagtatgcatgttagaatggctgatgaaagtgtatgtattggttcacatcaaccagctaatagttatttaaatattccagctttaatgtcagcaatagaacttacaaatgctgatgctgttcatcctggctatggttttctttcagaaaattcaaattttgcaagaattttagaagagaataaaattaattttattggagcttcatcaaaacatattgaaatgatgggtgataaaatccaagctaaaagaatagctaaagaaaatggattacctgttatcgagggttctgaaggaggagtaaaagatgtttctgaagcaaaaaaactttgtaaaaaaattggttttcctgtcttaatcaaagcctcaggtggaggtggaggtaaaggtatgaaaatagtttatgaggaagaagaatttgaaacgttgttttcaactgcaaaatcagaagcacaaaaatactttggtaatgacgaagtttatattgaaaaattttttcaaaatccgagacatattgaggttcaaatattagctggaaaaaatagagtagttcaccttcatgaaagagattgttcagttcaaagaagacatcaaaaattaatagaagaaacaccaagtcctgttataaataatgaaataagaaaagatttatttgagagaacagtaaaaatggtagaaaaaataggctatatgggagctggtactgttgag

SEQ ID NO: 202834 - DNA, 475 bp, Unknown
  Bacterial polypeptide expressing nucleotide sequence isolated from the Sargasso Sea
aatgtttaagaaaattttaatagcaaatcgaggagagattgcagttagaataattagggcatgtaaagaatggggaatttctaccgttgctgtacactctgatgttgacaaagaaagcatgcatgtcaagttagctgacgagagtgtatgtataggttcttatcaaccattaagtagttatttaaatatccctgccataatgtctgcaatagaactaactggagcagaagcggtacacccgggctatggatttctatctgaaaacgcaaattttgcaaaaattttaggagataataaaattaaatttataggaccttcgcccaaattaataaaaatgatgggagacaaaatagaggcaaaaaaaatagcaaagcaacatggtttaccagtaattgaaggatctgagggaggaataagcaatatacaagaggctcaagaaatttgtgacaaaattggcttcccaattctaattaag

SEQ ID NO: 202835 - DNA, 981 bp, Unknown
  Bacterial polypeptide expressing nucleotide sequence isolated from the Sargasso Sea
ttgtgatgaggctatttctcttggaagcgaccctttaaaaggtagttacttaaacataaaaaaaataattgatcttgcaaagaatttaaaaatagacgccgtgcatccaggatacggttttctttcagaaaactacgaatttgctaggaaactacaagcaaaaaatatccattttattggtcctcctcataatgcaataaaagcaatgggtgataaaatagagtctaagaagattgctaaaaaggcaggtgttaattgtatccctggcgtaaataaagaaataaaaaacctatctgaagcaaacgagtacgccgacataataggttttccaataatgatcaaagcttctgcaggtggaggaggtaaaggaatgagaatagcaaaaaataaaaaagattttcaaggcttgataacacttgctaaggaggaggctaaaaatgcattcggcgatgatagagtttttttagaaaaatatattgagataccaagacatatagaaattcaaatattaggagataaatttggtaatattgtatggataggtgatagagaatgttctattcaaagaagacatcaaaaaataatagaggaggctcctagttcatttatagatgatattacaagaaaaaaaatgggtgaacagtcaattcttcttgctaaagaagtaggatattattcagctggaactgtagaatttgttatggataaaaatagaaatttctattttcttgagatgaataccagattacaagtagaacaccctgtaacagaagaaactgcaaatattgaccttgtagaagaaatgattaatgttgctaatggtaaaaaaattaaaataaaacaagaaaatgttcgtataaatggttggtcctttgaatctaggttatgtgcagaaaatcctcttaaggattttttgccttcagccggtagaatatctgcattcagaattcattcaaaagatgttcgacttgactcaggata

SEQ ID NO: 202836 - DNA, 730 bp, Unknown
  Bacterial polypeptide expressing nucleotide sequence isolated from the Sargasso Sea
catggcaagcagatttgaaaagttctctgaaagagcaagaaaagttttgtcactagctcaggaagaggctcaaagatttaatcataattacataggtacagaacatgtgttacttgggttgaccagagttaatgaaggtactgctaccaaagtcttagctggcttaggtgttgatatggagaaagttaaatctgctgttgaatatataattggggaaggagacccttcttctacaggtgatattggattgaccccgagagccaaaaaagttatagagcttgcggttgatgaagctcgtagaatgactcatcaatatataggtactgagcatttacttgttggtttgttaagagaaggggaaggagtagcagcaggtgttttagaaagtttaggtgttaatttagagcaagtacgttccgaaataacaaatataactgaaagaaccactcattctacttcaccttctggatctccacagtctacgagtaaaactcctactctcgaccaattaggaatagaccttactgataaagcccgtgagaacaaactggatcctactgttggcaggcaacaagaaatagaaagagtaactcagattctaagtaggcgaactaaaaataatcccgtgttaattggagaacctggtgttggtaaaacagctatagtggaagggttagcgcaaaaaattgcatccaatgatgtgccgggaaccctacagggaaaaggttag

SEQ ID NO: 202837 - DNA, 469 bp, Unknown
  Bacterial polypeptide expressing nucleotide sequence isolated from the Sargasso Sea
aatgtttaaaaaaattttaatcgcaaatcgtggagaaattgcagtcagaataataagggcttgtaaagaatggggtatttctacagttgctgttcattccgatgtcgatagagaaagtatgcatgttaaattagctgatgaaagtatatgtataggctctcatcaaccagcaaatagctatttaaatatcccagctttactatcagctattgatttaacaaactctgaggcagttcatccaggttatggttttttgtcagaaaatgctaacttcgcaaaaattttagaagaaaataaaattaaatttattggtgcttcttcaaaacacatcgaaatgatgggagataaaatacaagcaaaaaaaattgcaaaagaaaaagggctaccaattattgaaggctctgaaggaggggtaaaaaatgtctctgaggccaaaaactctcaaaacaaattggatttccagttttag

SEQ ID NO: 202838 - DNA, 258 bp, Unknown
  Bacterial polypeptide expressing nucleotide sequence isolated from the Sargasso Sea
tatgctagataaagtacttatagctaaccgtggcgagattgccctacgtattttgagagcctgtaaagaactaggcatcaaaaccgtagccgtgcactctacggcggataaaaacttgaagcacgtgttgctagctgatgaatcaatttgtattggtaaagcatcggcaaccgaaagctaccttaatattcctcgcattattgcggcggccgaggtcacaaattcaatcgctattcaccctggttacggtttcctagc

SEQ ID NO: 202839 - DNA, 958 bp, Unknown
  Bacterial polypeptide expressing nucleotide sequence isolated from the Sargasso Sea
aatggcagatgaaagtatttgtgttggacctgcctctgcacaatcaagttatttaaatattcctgcaattataactgctgccacattaactgatgtagacgcaattcatcctggatatggttttttaagtgaaaatcaaaggtttgcagaaattattgaggaacacaatattaaatttattggaccaaaatcggaacatatcaaaatgatgggtaacaaaattgatgcaaaaaaaataatggatgaaactggggtgccaacagtaaaaggtataaatgacttaagcgataaaaataaaattgaagattttattaaaaaagtaaaatacccaattatagtaaaagcagcgagtggtggtggtggaaaaggaatgagaattgtcacagaagaagatgatttgaataaagctataaatgaagcaaaaattgaagctaaaaaatcatttaatgatgaaaatgtttatttagaaaaatttttaacatcaccaaaacatattgaaattcaagttctttgtgattcatttggaaatgttgttactcttggagaaagagattgctcaattcaaaggaagcatcaaaaacttattgaagaaagtccaagttcagttctcacaaatgaaaatagagaaaaaatttctgaactttgcagaaaatctatgaaagaaattggatatgaaggagttggaacattagaatttttatatgaaaataatgaattttattttatggaaatgaacacaagattacaagttgagcacccagtaacagaaatggttactggaatagatcttgttaaagagcaaattcttgttgctaacggtgaaaaacttacaattaaacaagaggatataaaattaaaaggtagttcaattgaatgtcgaatcaatgctgaacatccagaaaagtttataccttctccaggtaagataacacaatatcatcaacctggcggactaggt

SEQ ID NO: 202840 - DNA, 310 bp, Unknown
  Bacterial polypeptide expressing nucleotide sequence isolated from the Sargasso Sea
aatgtttaaaaaaattttaattgctaatagaggtgaaattgcccttcgagtaataaggacttgtaaggagatgggaataaaaactgtagcagtttactctcaagctgatgttaatgctatgcatgtcagaatggcagatgaaagtgtctgcattggacccgcagagagttcaaaaagttacctttcaattccatcaataatctctgcatgtgaaattaccggaagcgaagctgtccatcctggctatggatttctatcggaaaatgccaggtttgcagaaatattaggagatcatggaataaagtttata

SEQ ID NO: 202841 - DNA, 396 bp, Unknown
  Bacterial polypeptide expressing nucleotide sequence isolated from the Sargasso Sea
aatgaaaaaaattcttattgcaaaccgtggggaaattgcctgtagaattatcgatagttgtaaaaagcttaaatttcagtcaatcgcagtttattctgacatagataaaaacagtaaacatgtaagaaaagctgatgaatcaattcatataggtgcatcgaaagcccaagaaagctatttaaatgtagataaaataattgaagcagccaaaaaattaaaagctgatgctattcatcctggttacggttttttagcagaaaacgaaaaatttgcacaaaaagtaattgattctggaattacttggataggacccaaaccaaatacaattgtctcgatgggtaacaaagacatagcaagagatttagccttaaaaagtaatttaccaatttgtccagg

SEQ ID NO: 202842 - DNA, 694 bp, Unknown
  Bacterial polypeptide expressing nucleotide sequence isolated from the Sargasso Sea
caacgaagatgtgcgaaaaaagaatgccaacattcgctatattacgcccttattcgacggtgagttaacggtaacgggaatggcatacgataacagctggaacggtgccgaccaagtacctgcccgcgctattgaaagcggcctcatcgatcgccttggctctattgacaccgacgttggtggagagtcttcacgctattcactatcggcaaactataccagcgatggcattaatgcttcgttttatgccattgataccgatttaacgcttttttctaactttacctatttcttagataatccagaaacgggagaccagttcgaacaagcagacgaccggcaaatttatggtggcgaaatatttaccacagtaccgctggcggtaaccgatggcagtaccattaccatgggtgctcaatggcgcttcgacgatattgagaatgtaggcctttatcgcacacggaacttgcaacgtgtaggcacgattagagaagacgccataaaaagtagtagctattccttatttgcacagtcaaacatactgcttacagatgcccttagcctatctctcggtggtcgttacgattacttagatgtggatgttacaagcgaccttgcggcaaatagcggtgaagaaagtgatggcctattcacgctaaaagcagcactaaaatacgccgttacggacgacatc

SEQ ID NO: 202843 - DNA, 358 bp, Unknown
  Bacterial polypeptide expressing nucleotide sequence isolated from the Sargasso Sea
aatgctagacaaagtcctaattgcaaataggggtgaaattgcactcagaattcaaagggcctgtagagagctaggcataaagacagtagcagttcactccactgcagatgatagccaaaaacatgtattccttgcagatgaatcggtatgtataggacctcctgaatcactaaaaagctatctcaatattccatcaataatcagtgcagctgaggtcacagacgccatggcgattcatccaggctatggcttcttagcagagaatggagattttgccgagcaagttgaacagagcggttatatctttatagggccaaaatctgagaccatcaatttaatgggtaataaaatcagtgca

SEQ ID NO: 202844 - DNA, 660 bp, Unknown
  Bacterial polypeptide expressing nucleotide sequence isolated from the Sargasso Sea
tatgtttaagaaaatcttgatcgcaaatcgcggagaaatagcttgtagagttattcagacctgtaaaaaaatgtttatcaagaccgtggcaatttattcagatgcagatgaaaatgctttacatgctgacctcgctgatgaagccatttgtattggtggatcaagctctgcagaaagttatcttgtaatagaaaagatcattgatgcttgcaaaaaaaccaaagcggatgcagtccaccccggttatggtttcctttctgagaatgaagagtttgctaaagcactcgaagaaaacagcattgcttttataggccccaatcacaaagcaattgtgagcatgggagataagattgagtcgaaaaagattgctgaagaagcaagtgtcaatgtcatccctggttatacgaaagcaataaaagatgaaaaagaagctgtcaatattgcaaaagaaattggctatccagtgatgcttaaagcaagtgctggtggtggcggtaagggaatgagggtcgtgaataatgatgatgaatgcattgatggctttcaaagggcaaagaatgagagcaaggccagctttggagacgacagaatttttgcagaaaaatttatcacagaaccgcatcacatagaaattcaaattcttgcaaataaaaaaggcaa

SEQ ID NO: 202845 - DNA, 620 bp, Unknown
  Bacterial polypeptide expressing nucleotide sequence isolated from the Sargasso Sea
tctgagccaacctgttactaaagatggtaaagggagaatcaacgtgtcgaagcaaaaaaatgtgctcatcgcgaaccgaggagaaattgcggttcgtattgcccgagcagcaaaaggcctgggaattaatccgatttcgatttttgcgccagccgactctgattctctccacacgaaattgacaccaagagccgtcgaactgactggaaaggcgacagaccccgtctctgcctatctagatttagagcagattgtgtcaatcgctaaggaaaatgagtgcgagctcgtacaccccggttatggtttcctctctgaaaacgcggtgttcgcgaaaaaatgtagcgaacaaggaatagaatttattgggcctgagcatagagtgcttgagttattcggagataaagtccaggcaagacagctagcggagtctctctccataccaaccattccaggcagcaaagatgctctcgactcagttggggccgccaaggaagttgctcgagcaattggttatcccatcatgctcaaggcttcctcaggaggcgggggtcgaggtatgagagccgtagctaatgaaaaagagatggaagaggcctttgagcgctgcgctagcgaagcaa

SEQ ID NO: 202846 - DNA, 401 bp, Unknown
  Bacterial polypeptide expressing nucleotide sequence isolated from the Sargasso Sea
tatgaaaaaaattctgattgcaaaccgtggggaaattgcctgtagaattatcaatagttgtaaaaaacttaagtttcactcaatagcagtttattctgatatagataaaaacagtaaacatgtaagaaaagccgatgagtcaattcacatcggtgcatcgaaagctcaagaaagctatttaaatgcagataaaataattgaagcagccaaaaaaataaaagctgatgctattcaccctggttatggttttttagctgaaaacgaaaaatttgcccaaaaagtaattgattcaggaattatttggataggacctaaaccaaatacaattgtctcaatgggtaacaaagatatagcaagagatttagctttaaaaagtaatttacctatttgtccaggcttaa

SEQ ID NO: 202847 - DNA, 824 bp, Unknown
  Bacterial polypeptide expressing nucleotide sequence isolated from the Sargasso Sea
aaggtgattgatgctgtgcggcaatctggagccgaagccgttcacccgggatacggatttctctctgaaaatgctgcattcgcggatgcacttgaagccgaaggtattgtttttattggccccagaaacagagcaatcgcagcgatgggtgataagattgaatcaaagaaactagctgcagaagctggcgtcaatactgtaccaggttacgttggtatcttggcagacgatattgaagccgtgaaagtagctggcgacatcgggtatcctgtgatgattaaagcctcagccggcggcggtggtaaaggaatgcgggtggcgtataacgaaacagaggtcaaggaaggttttaagtcagcagtaaatgaagctatttctagttttggtgacgaccgcgtttttatagaaaaatttgttgaaaaaccgcggcatatagaaattcaaattattgcagattcaagaggcaatacactatatttgggtgagagggaatgctctatacaacgtcgacatcaaaaagttgtcgaagaggccccaagtccatttctcgaccctgaaactcggaaattgatgggtgaacaatcagttttgcttgcaaaagcagttgattattgttctgcaggaacggttgaatttattgttgataagaacaaagacttttattttttggagatgaacacgcgcctccaggttgaacatcctgtaaccgagtgtatcacaggattagaccttgttgaattaatgatcagagtagcctccggagaagagctgccgtttaggcaggctgatgtgacattgaaaggctgggcaattgaaacacgtat

SEQ ID NO: 202848 - DNA, 916 bp, Unknown
  Bacterial polypeptide expressing nucleotide sequence isolated from the Sargasso Sea
atatatcgacgaggataaaaaatcaccacatgttaattttgctgatcatgctatcaaaatccaaactaattacatggatatggacgctattattaatatagcaaaaagttatagcattgacgcaatacatcctggctatggttttttgtctgaaaatgcttcatttgccagaagagttcagtcaaataaaattatatggatcggtcctactccaaccgttataaaaaaaatgggggataagttgcaagcaaaagagatagcaaagaaagttaatattccaactcttgataccgttgaaaaagtttcgcttgcaaaaaaaattggctttccattgatgattaaagctgctgcaggaggtggtggtaagggaatgaggattgtaaaggattctgcaagtttaaaagatgctgcctcagcagcaaaaagagaagcactatctggatttggagatgacagaatattttttgagagatacattgaaaaatcaaggcatattgaagttcaaatcttaggagatgataaaaatgttgtacatcttggagagagagaatgttcaattcaaaggagacatcaaaaaattattgaagaatcaccatcgaggagattatcagaggagcttagattaaatatatgtgaagatgcaaaacgaatagctcaggcaataaaatatacatctgctggcacagttgaattcttgcttgatgataaaactggtgaatattggtttctggaagtaaatacaagattacaagttgagcatcctgtaacagaagaagtaactggaatagatatcgtccaagaacaaattaatattgctaataaaaaatctatttcatttttaaataatgatgacgctgaccttggtcattcatttggacattctattgaggttagaatttatgcagaaaatccagaa

SEQ ID NO: 202849 - DNA, 418 bp, Unknown
  Bacterial polypeptide expressing nucleotide sequence isolated from the Sargasso Sea
atgttcaaaaaaatattaatagcaaatagaggcgaaattgctgtaagaattattagagcttgcaaagaatggggtatttctacagttgcaattcattcaaatgttgatcgtgaaagtatgcatgtcaaattagctgatgaaagtatttgtgtaggttcacaccaacctgcaaatagttacttaaatataccagctatactttcagcaattgaattaactaattccgaagcagttcatccaggttatggtttcttatctgaaaattttaattttgcgaaaattttagaagataataaaattaaatttatcggcccctcttcaaatttaataaaaaaaatgggagacaaaatacaagctaaaataatagctaaggaaaatggattacccatcatagaaggctcagaaggaggaataaaag

SEQ ID NO: 202850 - DNA, 472 bp, Unknown
  Bacterial polypeptide expressing nucleotide sequence isolated from the Sargasso Sea
aatgttcaacaaaatcctgattgctaaccggggcgaaatcgcctgccggattatccagaccgcccaccgcatgggtatccgctgcgtggcagtctactcagacgccgacgccaacgcccggcacgtagccatggcagacgaggccttcaacatcggcccggccgccagcgctgacagctacctgaaagccgacaccatcatcgacattgccaggcagagtggcgcccgggccattcacccaggctacggcttcctgtctgaaaacaccggctttgccgaagcctgcgaagccaacggcatcgtgttcatcggcccgccctcttcggccatcgccgccatgggctccaagtccgccgccaaggcgattatgaagaaagccggtgtgcccctggtgccgggctaccacggcaaagaccagtcgccggacctgctgcgggccgaggctgagaaatgcggcttcccgctgctgctg

SEQ ID NO: 202851 - DNA, 526 bp, Unknown
  Bacterial polypeptide expressing nucleotide sequence isolated from the Sargasso Sea
tatgctagataaagtacttattgctaaccgtggtgagattgccctgcgtattttgagagcctgtaaagaactaggcatcaaaaccgtagcagtgcactctactgcggataaaaacttgaagcacgtgttgctggctgacgaatcgatttgtattggtaaagcatcggcaaccgaaagctacctgaacattcctcgcattattgctgctgcagaagtcactaactctattgcaattcacccaggttacggtttcctagcggaaaacgcagactttgctgaagcggtagaaaaaagcggctttattttcattggccctaaagctgaaactatcaaccttatgggtgacaaagtttctgctatcaacgccatgaaaaaagcaggcgtaccgtgtgtacccggttctgacggcccgctaactgacgacgtagagcgcaacaaagccattgctaagcgcattggttacccaatcatcgtcaaagctgcgggcggcggcggtggtcgtggtatgcgcgtggtgcgcagcgaa

SEQ ID NO: 202852 - DNA, 698 bp, Unknown
  Bacterial polypeptide expressing nucleotide sequence isolated from the Sargasso Sea
catgattgagaaagtactaatagcaaacagaggtgaaattgctcttcgtgtaatgaagacatgtaaaactctgggaattaaaactgtagccgtatattctgatgaggatgtaaactcacttcacgtaaaaaccgctgatgagtcatactacataggtgaggctgctcctgcaaagagctatctaaatcaagaaaaaatccttgaagtaatgttatcttctggaactgatgctattcatcctggatatggattcctttcagaaaatgatgactttgcacgtttatgtgaaaagaacaaaatcaactttattggaccatctgcagattcaatgaatctttgtggagataaaatgcgttgtaaagctgcaatgctaaaagctgaagttccaactgtacctggaagtccaggaattgtagatgatgcagaacaagcagaaaaaattgcaaatgaaatcggctatcctgtattattgaaatctgtctatggtggaggaggtcgtggaattagattagttactaatgataaagaattgaaagaaggttttgcaactgttacttctgaatctatagctgctgttggaaaatctgcaataattgttgaaaaattcctagaaaaaacacgacacattgaataccaaatgtgtagagacaaacatggtaatgctgtgcatctatttgaaagagagtgttctattcaaa

SEQ ID NO: 202853 - DNA, 840 bp, Unknown
  Bacterial polypeptide expressing nucleotide sequence isolated from the Sargasso Sea
aagaggccatgtagatgctgtacatcctggttatggttttttgtcggaaaatgcaacttttacaaaattattaaagcaaaatgacattgtttttataggtccatcattttcagcaattcatgctatgggagataaaataaaatcgaaagagatagctaagtcagcaaaggtaaatattgtacctggctttatgggtgagattaatgattcaaagcacgctataaagatttcgaaagaaattggtttccctattatgattaaagctagtgcaggtggtggtggaaaaggaatgcgtatagcttatgatgaaaaagatgttgaagaaagtttcaacagagcatctagtgaagcaaaaaaaagctttggtgagggaagaatgtttatagaaaaatatgttcaaaatcctagacatattgaaattcaaataatagctgataatcatggaaatatagtttcacttggagaaagagagtgttccattcaaagaagaaatcaaaaagttatagaagaagcaccatcatcatttctagatgatatattaagaaaagaaatgtcaactcaatctataaaactatctgctaaggtaggttatactagcgcaggcacagtcgagtttattgttgataataacagaaatttttattttctagagatgaatactagattacaggttgaacatcctgttacagaattaattactggcattgatttagttgaagaaatgataaaaatagcagctggagaaaagttatcatttactcaaaaagatataaagttaaaaggttggtctttagaaagcagaatttacgctgaagatccttacaaagatttcctgccttc

SEQ ID NO: 202854 - DNA, 416 bp, Unknown
  Bacterial polypeptide expressing nucleotide sequence isolated from the Sargasso Sea
aatgctagacaaagtcctaattgcaaataggggtgaaattgcactcagaattcaaagggcctgtagagagcttggtataaaaacagtagcagttcactcgactgcagacgaaagtcaaaaacatgtattccttgcagatgaatcggtatgtatagggcctccagaatcactaaagagctatctcaatattccatcaataatcagtgcagctgaggtcacagacgccatggcgattcatccgggctatggctttttggctgagaatggagattttgctgagaaagttgaacagagtggttatatctttataggtcctaaatctgaaaccatcaatttaatgggtaataagatcagtgcaaaagaggttgtatctgaagtaggtatccagtgtattcctggatcaaatggagaattag

SEQ ID NO: 202855 - DNA, 901 bp, Unknown
  Bacterial polypeptide expressing nucleotide sequence isolated from the Sargasso Sea
gcaatcggagcaaactcagcatctacaggtgcttttacaacaactacagcgagtacaaaagtagatattactggatcagctggtttagtcttgcaaaatgatgagacaattacaaattcaacagatgggaccgtattaattaatggagttgtggctgcaggtgatggaggtggtgctggtgtattccaatcaaatggtgattttgatgttacaatccaaacaggtaactctacaaccggtacaatcacaatgacagatggttctaatggtaatattgctttgacaccaaatggcagcggagaggttgatatttcaaaggtagatattgatgcaggtgcgatagatggtacagcaatcggagcaaactcagcatctacaggtgcttttagtacactttcagcaagtggcgcaacagatataaataatacactcaatatcaataacactgtatcattagatggctcagcaaatgagcttagattttatgaggggagtaattatgtaggatttgaggcaccttctttaagtggtgatcagatttgggttttacctactgcagatggtaattccaatcaggttttatcaacaaacgggagtgggactttaagctgggctgatgtgagcgcatctactgtaactgtttcagataacgaaaatacaagtgaaaccaatgcattaattttcacatcaggtggtgatttagatgggggtagtatgggcctagaatcagatggtgatgctacatataatccatcaacaggtgtaattggagcaacaggatttagcggggccaccattacagcgagtacaaaagtagatattactggatcagctggtttagtcttgcaaaatgatgagacaattacaaattcaacagatgggaccgtattaattaatggag

SEQ ID NO: 202856 - DNA, 361 bp, Unknown
  Bacterial polypeptide expressing nucleotide sequence isolated from the Sargasso Sea
atgtttaacaaagtcttaattgctaaccgaggtgaaatcgccctgcgtattttgcgggcatgcaaggatttaggtgttaaaacagtcgctattcattcttcggcagataaagacttgatgcacgtcagactggcagatgagtcagtttgtattgggccacccaatcctaccgagagctacctaaacgcacctgcaatcataagcgccatggaagtcacgaattcagacgctgtccatcctgggtatggatttttgtccgaaaattcagattttgctgaacaagtagagcgaagtggttttaccttcatcgggccgtcaccggagaccattcgcctgatgggagataaggttccgccatcga

SEQ ID NO: 202857 - DNA, 682 bp, Unknown
  Bacterial polypeptide expressing nucleotide sequence isolated from the Sargasso Sea
atgttcaaaaaaattttaatcgccaacagaggcgaaattgcattaagagttttaagagcttgtagagaactaggaataaaaactgtagctattcattctgaggtagatgaaggtgcaatgcatgtgaggatggctgatgaaagtatatgtgtagggccagcatctgcacaatctagttatttaaatattccagcgatcattacagctgcaactcttacaaatgttgatgggattcatccaggatatggttttttaagcgaaaaccagagatttgctgaaattattgaagaacataatattaagtttatcggacctcattccaatcatattaaaattatgggtaataaaattgatgctaaaaaaatcatggatgaaaacaatgttccaacagtacctggattaaatgatatttccgataaaaactatattgataactttattaaaaatgttgatttcccaataattgttaaggctgcaagtggaggtggaggtaagggaatgagagttgtaacaaaatctaatgaaattttaaatgctattacctcagctaaagcagaggccaaaaaatcttttaatgatgataatgtttatttagaaaaatatttaacaacgccaaaacatatagaaatacaaatccttgcagatatgcacggaaatgtagtgactttaggtgagcgtgatg

SEQ ID NO: 202858 - DNA, 701 bp, Unknown
  Bacterial polypeptide expressing nucleotide sequence isolated from the Sargasso Sea
aatggttgaaaaagttttaattgctaatcgtggagaaatagctttacgaattgtcagaagttgtagagaactaggtattgcaaccgttgcagtttttagcactgtagataaaaaagcattgcatgttcagcttgctgatgaggcggtttgcgttggagattcattaagtaataagagttatttaaatattccaaatatacttgctgctgctacatcgagaggagttgatgctattcatcctggttatggatttcttgcggaaaatgataaatttgctgagatgtgcaacgatcacggcatagtttttattggcccatcgcccaaagctattagatctatgggagataaatctacagctaaagaaactatggaagcagtgggagttccaacagtaccgggtagtaaaggcttgttatcaaatgttgatgaggcttataaattggcagatggtataggctatccggtaattattaaagcgactgctggaggaggtggaagaggtatgaggttggttgaaaactctgataatctcgaaaaaatgtttaaagcagctcaaggtgaagcagaagcagcttttggtaatgatggtttatatatggagaaatttataaagaagccaagacatgtagaaattcaaattttggccgacaggtctggtaatgttgttcatttaggagagcgagattgttcagttcaaagaa

SEQ ID NO: 202859 - DNA, 439 bp, Unknown
  Bacterial polypeptide expressing nucleotide sequence isolated from the Sargasso Sea
aatgttaaaaaaagtattaatagccaatagaggtgaaatagctctaagaataattagagcatgtaaggatttaggaatatcaactgtggcaattcattctactgctgatacaaattcaatgcatgtaagaatggcagatgaaagtatttgtattggaccacctaaagctagtgatagttacttatcaataccaaatattattgctgcttgtgaagttactggagcagatgcagttcatccaggatacggatttctttcagaaaatcctaagtttgctcaaattttgtcagatcataaaattacatatattggtccatccgcccatcatattaaattaatgggagataaaataaccgcaaaaaaaacaatggaagatctcggggttccttgtgttccaggatctaatggaataattaataatttatcagaagcaaaatga

SEQ ID NO: 202860 - DNA, 933 bp, Unknown
  Bacterial polypeptide expressing nucleotide sequence isolated from the Sargasso Sea
aatgggagctaaagcctatttagatatcggtaatattatttccatcgctaaagactgcaactgtgatgcaatacacccggggtacgggtttttatcggaaaatagcgagttcgcagagaaatgctcacagaacaacatcgaatttattggtccgagccagtctctattagccttgttcggggacaaagcacgagcaagacaagcggcaattgaagctggagttcccattgtccagggcactgagaaagcgagctccctagaagactgccaagaattttttaagtcactaggtgataacgccgcaatcatgatcaaggccctggcgggaggtggtggaaggggcacccggatcgtcacaaagcttgaagagctcgaggaggcttatcttcggtgtcagtcagaagcaaaaaacgctttcggcaacgacgagctatatgttgaagagcttattcaacatgctagacacatagaaattcagattatcggtgaccgcgaaggaaatatcctcgcgatcggagacagagaatgtagcgttcagagaagacaccagaaaatcatagaaatcgcgccttcttttgatctacccgaaaaaactcggctagctatacaggaagctgcagagaaactagctaaatccgttggctattatagtttgggtacctttgaatttttagtcgactcaaagagcaatggacaagaaagatttgcttttatagaggcaaacgctcgattacaagttgagcacacggtcactgaagaagtaactggtgtcgatttagtccaatcccaaatcgagatcgcgaacggcacatccttgaaagaactagaactcgacgagacacctcaagcaattggctacgctatacaagctcgaataaacatggagacaatcgaatcagatggcaccgtaaagcctaccactggagagctaaa

SEQ ID NO: 202861 - DNA, 586 bp, Unknown
  Bacterial polypeptide expressing nucleotide sequence isolated from the Sargasso Sea
tatgtttaagaaaatcttgatcgcaaatcgcggagaaatagcttgtagagttattcagacctgtaaaaaaatgggtatcaaaaccgtggcaatttattcagatgcagatgaaaatgctttacatgctgacctcgctgatgaagccatttgcattggtggatcaagctctgcagaaagttaccttgtaatagaaaagatcattgatgcttgcaaaaaaaccaaagcggatgcagttcaccccggttatggtttcctttctgagaatgaggagtttgctaaaacgctcgaagaaaacagcattgcttttataggccccaatcacaaagcaattgtgagcatgggagataagattgagtcgaaaaagattgctgaagaagcaagtgtaaatgtcatccctggttatacgaaagcaataaaagatgaaaaagaagctgtcaaaattgcaaaagaaattggctatccagtgatgctgaaagcaagtgctggtggtggtggcaagggaatgagagttgtgaataatgatgatgaatgcgttgatggctttcaaagggcaaagaatgagagtaaggccagctttggagacgac

SEQ ID NO: 202862 - DNA, 364 bp, Unknown
  Bacterial polypeptide expressing nucleotide sequence isolated from the Sargasso Sea
gatgcctgtagaaaagcttctcattgccaatcgcggcgagatcgcaatacgaatagctcgagccgctgaggaacttggcattccgagcgtggcgatttacagcaccgatgatcattcttcgttgcacaccaaaatggcttcagagtcacatgcactagaagggtctggagtatccgcttacctgaatattgagcacattgtcgatactgcgatagcgactggatgcgatgcagtgcatcccggctatgggttccttgccgaaaacgccgactttgctgccgctctggagaacgcagggttaacttttgtgggtccggaggcaagccaattggcgttatttggcaacaaagtttcagctcgagaa

SEQ ID NO: 202863 - DNA, 308 bp, Unknown
  Bacterial polypeptide expressing nucleotide sequence isolated from the Sargasso Sea
aatgtttaaaaaaatattgatagcaaaccgaggtgagattgctgtaagaatagttagagcctgtaaagaatggggtattcaaactgtagcaattcactccaatgtcgataaagatagtatgcatgtaaggttggctgatgaaagtgtttgcattggttctcatcaaccttcaagcagttatttaaatatacccgcaataatgtcagcaattgaattgacaaatgctgaagcagttcatccaggttatggttttttgtcggaaaatgctaactttgcaaaaattcttgaagaaaacaaaataaaattta

SEQ ID NO: 202864 - DNA, 362 bp, Unknown
  Bacterial polypeptide expressing nucleotide sequence isolated from the Sargasso Sea
tatgattaaaaaaattcttattgccaatcgcggtgaaatagcttgcagggttatcaaaactgcaaagcaattaggtattaaaactgtagctgttttctctgaagcagacaaggattcattgttcgttagtcaggctgatgagtcgtattgtataggtaaaccagaaccaagtgaatcttatctaaatataaataaaataatatctatagcgaagaaatcaaaatcagatgcaattcatccaggatatggatttttgtcagaaaatgaagagtttgtaaaaaaacttaagaaagaaaaaattattttcattgggccaaatcccaaagcaataaaaaaaatgggtgataagattgaatctaaaa

SEQ ID NO: 202865 - DNA, 864 bp, Unknown
  Bacterial polypeptide expressing nucleotide sequence isolated from the Sargasso Sea
aatgtttaaaaaaattttaattgcaaaccgtggggaaattgcagttagaataattagagcatgtaaagaatggggaattcatactgttgctgttcattccgatgtagatagagaaagtatgcatgttagaatggcagatgaaagtgtatgtattggttctcatcaaccagcaaatagttatttaaatattccagcattaatgtcagcaatagaacttacaaatgcagatgctgttcatcctggctatggttttctctctgaaaatgcaaattttgcaagaatattggaagagaacaaaattaattttattggagcctcatcaaaacatattgaaatgatgggtgataaaatccaagcaaaaagaatagctaaagaaaatggattgccagttattgaaggttctgaaggaggtgtaaaagatgtttctgaagcaaaagaactttgtaaaaaaattggttttcctgtcttaatcaaagcttcaggtggaggtggaggtaaaggcatgaaaatagtctataaagaagaagaatttgaagcgttgttttcaactgcaaaatcagaagcacaaaaatactttggtaatgacgaagtttatattgaaaaattttttcaaaatccaagacatattgaggttcaaatattagctggaaaaaatagagcagttcatctacatgagagagattgctcggttcaaagaaggcatcaaaagttaatagaggagacaccgagtccagttttaaatgatgaagtaagaaaagatttatttgaaaggacagtaaaaatggtcgctaaaataggttatatgggagctggtactgttgagtttatatatgaagatggaaaattttatttccttgaaatgaa

SEQ ID NO: 202866 - DNA, 297 bp, Unknown
  Bacterial polypeptide expressing nucleotide sequence isolated from the Sargasso Sea
aatgtttaaaaaaattttaatcgcaaacagaggggaaattgctgtaagggttattagagcatgtaaagaatgggggatatctactgtggctattcactcagatgtagatagagaaagtatgcatgttaaattagcagatgaaagcatatgcgtaggtccacatcaaccatcaaacagttatttaaatataccagcaataatgtctgcaattgaattaactaacgctgaggccgttcatcccggttatggttttttatctgaaaatcatagatttgctaaaattttagaagacaataa

SEQ ID NO: 202867 - DNA, 430 bp, Unknown
  Bacterial polypeptide expressing nucleotide sequence isolated from the Sargasso Sea
aatgctaaagaaagttctgatagctaatagaggtgaaatagccctgagaatcataagagcatgtaaagatttaaaaatttcaacagtagctattcattcaactgctgatacaaattctatgcatgtaagaatggccgatgaaagtgtttgtattggtccaccaaaagcaggagatagttacttatcaataccaaacattatcgctgcttgtgaaattagtggagctgacgcagttcatcctggttatggttttctatcagaaaacccaaaatttgcacaggttttatcagatcataaaattacttatatcggtccatcatcaaaacatatagagttaatgggagataaaataacagcaaaaaagactatgaaacaacttggtgtaccttgtgtaccaggttcagacggtgtcattaaaaattttaaagaa

SEQ ID NO: 202868 - DNA, 602 bp, Unknown
  Bacterial polypeptide expressing nucleotide sequence isolated from the Sargasso Sea
aatgtataaaaaaatattaattgccaatcgcggtgaaatcgccctgcgaattattcgtgcttgtcacgaattagggataaaatcagtagctgtttattctacggctgacaaaagctcgctgcatacaaaatttgccgatgaagctgtttgtattggcccgcctcaaagcagcgagtcttacttaagcatccctagtattatttcagctggtgaaataacaaattctgatgccattcaccctggttatggttttttatctgaaaatgcagatttttctcaaatttgcagtgataataatttcgcatttatagggccaaagccagacataataaatgcaatgggagataaatctgaagctaaaaagacaatgaaatcagctggagttccagttattccaggtaacgaaggaattttatcaaaccctagcgaagctcggcgaattgcaaatgacattggatatcctgttatgctcaaggcttccgctggtggcggtggtaggggcatgcgcttagtgcataaagagtctgaaattgaaatgcttttacgacagcaagctctgaggctcgaagtgcattttataatggtgatatgtatattgagaa

SEQ ID NO: 202869 - DNA, 990 bp, Unknown
  Bacterial polypeptide expressing nucleotide sequence isolated from the Sargasso Sea
tgctgcaacactaactgatgtagatgctattcatccaggatatggttttttaagtgaaaatcaaagatttgcagaaataattgaagaacataaaataaagttcattggacctaaatctgatcatataagaatgatgggtaataagattgatgcaaaaaaaatcatggatgactcaggggtacccactgttaaaggaattaatgatttaagtgataaaagcaaagttttaaaatttattgaggaagtaaaatatccaataattgttaaagcagctagtggaggtggtggtaaaggaatgagagttgtaaaagaagatgatgatttagaaaaatcaattaaagaagctaaaattgaagcaaaaaaatcgtttaatgatgaaaatgtttatttagaaaaattcttaacttcacctaaacatattgagatacaagtcttatgtgattcatttgggaatgtagtaacacttggagaaagagattgttccattcaaaggaaacatcaaaaacttattgaagagagcccaagttcagttctcacaaatgaagaaagagaaaaaatttctgaactttgtacacaagctatgaaagaaattggttatgaaggtgttggtacattagaatttttatatgagaataatgaattttactttatggaaatgaatacacgattacaagttgagcaccctgttacagaaatggttactggaatagatcttgtaaaagagcaaatacaagtcgctaatggagaaaaacttaaaataaaacaagatgatattaaattaaatggtaattcaattgagtgcagaataaatgctgaacatcctgaaagttttattctctcaccgggcaaaataactcaatatcatcaaccaggtggattaggtgtacgtgttgactctgctgtatatgatggttactcaataccatcacattatgacagtatgattggtaaaataattacctatggttcaacaagatctgaagctctaaa

SEQ ID NO: 202870 - DNA, 832 bp, Unknown
  Bacterial polypeptide expressing nucleotide sequence isolated from the Sargasso Sea
atgtttaaaaaaattttaatagcaaaccgtggagaaattgcggtaagaattataagagcatgtaaagagtgggggatttcaacagttgctgttcattcagacgttgatagagacagcatgcatgttaaattagcagatgaaagtgtatgtattggttctcatcaaccagctaatagttatctcaatattccagccttattatcagcaattgatttaactaacgctgaagctgttcatccaggatatggctttttgtctgaaaactcaaaattcgcaaaaatattggaagaaaataaaattaaatttataggcgcctcatcaaaacacattgaaatgatgggagacaaaattcaagctaaaaaaattgcaaaagaacatgggctacctgttatcgagggttctgatggaggtgtaaaagacatttcagatgctaaagacctttcaaaaaaaattggctttcctgttttaataaaagcctctggaggtggaggtggaaaaggaatgaaaatcgttcataaggtagaagattttgaaactttattctcgactgcaaaatctgaagctaaaaaatattttggtaatgatgaagtatacatagaaaaatttttccagaatcccagacacattgaggtacaaatattgtctgggaaaaacggaactgttcatttacatgaaagagactgttctgttcaaagaagacatcaaaaattaattgaggaaacacctagcccagtattaaacgatgaaataagaaaagatctttttgaaaaaactgtaagtatggtgaacaaaattggttatgagggagcaggtacagtagaatttatttaga

SEQ ID NO: 202871 - DNA, 379 bp, Unknown
  Bacterial polypeptide expressing nucleotide sequence isolated from the Sargasso Sea
aatgtttaacaaaatactaattgcaaatcgtggagagatagctttaagaattatcagcacatgtcgccgcatgggaattaggactgtttcagtttattcagaggcagattcagatgcactccacgtcaaagaggcagatgaatcatgttttattggcgaggcgtcaccagcgatgtcttacctgcggatcgataaaatactggatgcaactaaggaaaaaggttgcgaagcgattcatcctggttatggtttcctgtcagaaaacgctgaatttgcaagtaaatgcttaaattcaggcataacatttatcggaccatcggctgaagcaataagattaaagggggaaaaacacaaagctaagagtgtgatggagaaggca

SEQ ID NO: 202872 - DNA, 662 bp, Unknown
  Bacterial polypeptide expressing nucleotide sequence isolated from the Sargasso Sea
aatggataaagattatgacggtataattacaacatcgcttgagaatgcagtaaactggtccagaaaattttcactcttccaatacccatttgttactgcgtgctgcggaatggaatacatggcagcagcctgctcgcattatgacatttcacgatttggagctgaaattcctcgtttctcgccaagacaagccgatttactttgggttgttggtacaattactcacaagatgtctccagtactgaagacaatttatgatcagatggcagacccaaaatgggtaatagcatttgggacatgtgcttcaactggtggtttctatcaaaattattctgttcttcaaggtattgatcgattaattcctgtagacctttatattgcagggtgcccccctcgtcctgaagccgtgctagacgggctaattgaattacagaataatattcagaaagaaggtccaaagcccaacggtattgctccttcagcaatcaggcatagagatcagaaggtagaccagcttaatcgatattttgaaatatccaaaaaagaagtcgttgagaatgtgcaaaatcccaagagtaatcgaattagtaaacctggatttacatactcagaagattatgtcaatactaatccccatattggttatgattcacctgaaatga

SEQ ID NO: 202873 - DNA, 568 bp, Unknown
  Bacterial polypeptide expressing nucleotide sequence isolated from the Sargasso Sea
gatgtttaaaaaagtactaattgccaatagaggcgaaatagcccttagaattttaagagcatgtcgtgaattaagaatcaaagcagtagccgtacattctgatatagatagaaacttaaaacatgtaagactagcagatgaatcagtatgcattggtcctgcaaatgctgctaaaagctatctaaatattccagcgattattgcagctgcagagctaacaaactgtgatgcagttcatcctggatatgggtttttagcggaaaatgcagacttttccgaacaagtagaaaacagcgggtttgcatttattggcccaagagctaaaaacatcagaattatgggagacaaagtttccgctattgccgctatgaaaaaagcaggagttccatgcgttcctggatcaaacggccctttaagtaaaactcaaaaagacaacttagcaatggctaaatcaataggatatccagtattaattaaagctgcagctggaggcggcggtcgcggcatgagagttgttagaaaagaaggagatttaattcaatttattgaatacactaaagctgaagca

SEQ ID NO: 202874 - DNA, 775 bp, Unknown
  Bacterial polypeptide expressing nucleotide sequence isolated from the Sargasso Sea
atgtcactaaaaacctacgccattattacagacgttcacggaaattcatcatctttaaaagaagcaataaaaataattaataaaagagatgatgtagatcaaatcatttgcttaggagattattttgctcttgggcctgacccaatgggctgctttaagttacttgaatcactttctagctgtgttttccttagaggaaatcacgagcgctaccttattgaaaatctttgggcacatgaaaggccaaaccttgaaggaatgtccccagatgatccaatatgcaaagaaatagttcaaaatgaaaaatggacggcagaaatgatcggagaaaaaggtagaaatttttgtaataatacacgaattgcagaaagacaaattattgataatacactggttgaatttactcatgcatggtatcagagagatgaaatacctcctacgatggatgaagctattgcttggaaaaatcatatttctaaagctaataataaaattaagcaatttatttttgttcatggacatacccatttgcccagaatagaagaaaaaggaaatttaaaaattttgtgccagggtgcaactggactaccttttgatcaagacccaagagggtcaattgcttttttaaaagttggtatggagtttaattgggaaatagtccgatttgaatatgatagaaaaagatctattgatatgttagaagatatcaagccaccattttataaaaatcttcaaaatactattcgatatgccactatcaggaatgatatttaat

SEQ ID NO: 202875 - DNA, 793 bp, Unknown
  Bacterial polypeptide expressing nucleotide sequence isolated from the Sargasso Sea
gaagctgttcatccaggctatggttttttatcagaaaacccaaactttgttaaccaactagaaaaaaaaggcattattttcatagggcctagtagtaaagttatctcgtcaatgggagataagattgaagcaaaaaaaatagctgagaatgcaaatgtttcttgtgttcctggttttttgggggaagttgtaggtttaaagcatgctaaagaaattgcttcaaagattggttatcctgtcatggttaaagcttctgcgggaggtgggggcaagggtatgagaatcgctgctaatgaaaaagatttagagagtggtttagagagagctatgagtgaagctaaatcttcttttggagatgatagggtttttatagaaaagtatatagaagagccaagacacatagagatccaaatagtttcagatgtttatggaaatactatatatctcggagaaagagaatgtagtatacaaagaagacatcaaaaagttattgaagaagctccaagtccttttttagatgagaaaactcgccaagctatgggagagcaggcgattgaattagctaaaaaagttggttatttctcagttggaacagttgagtttatagttgataagaataagcaattttatttcttggaaatgaatacccgtctacaagttgagcatccagtaactgaatttgttactggaattgatttggttgaacagatgtttaggattgcttctaaagaaaaattgaagttaaatcaaagtgatatagatttaaaaggttggtcaattgaagcaagaatct

SEQ ID NO: 202876 - DNA, 559 bp, Unknown
  Bacterial polypeptide expressing nucleotide sequence isolated from the Sargasso Sea
ctgtgcgcgaaccgcggcgagatcgcggtgcgcgtcttccgcgcgggcaccgagctgggcatgaacaccgtcgccatcttcagcgaggcggaccgcctcgcgacgcacaggtacaaagccgacgagtcctactgcgtgaacccgggcgagacccccgtgggcgcgtacctcggcttcgagggcatcatcgacatcgccaaggcgcacggcgtccaggccatccaccccgggtacgggttcttgtccgaaaacgccgccttcgcgaagcggtgcgaggaggagggcatcgcgtgggtcgggccccggtcggagaccatcatgcagatgggcgacaaggtgatcgccaagcagctggcgaaggagtgcggcctccccctcgttccgggaacggaggactccacggactcggtcgaggaggcgcaggcgttcgcggaggagttcggcatgccgatcatgctgaaagccgcgttcggcggcggcggccgtggcatgcgggtcgtgcggacgatgagcgaactccccgaggcgttcacgcgcgcctcgtcggaggctttggcgg

SEQ ID NO: 202877 - DNA, 753 bp, Unknown
  Bacterial polypeptide expressing nucleotide sequence isolated from the Sargasso Sea
gctggtcgccaaccggggcgagatagcggtcagggtccttcaggcagccagggaggctggcctgtcgagcgtcgcggtgtactccgagtccgactccgggtcgctccacgtcgagaccgccgacgagtcggtgctgctagagggggaggggctcgaccagacctacctcaacggcagcgcaatcatcgaggcagcccggtcgacgggggcggacgcgatccaccccggctacgggttcctctccgagagggcggacttcgcccgggaggtcgagtccgcgggaatccgctggataggcccgtccgcccacgccatcgagacgatgggcgacaagatatccgcacgcacgctcatgatcgagtcgggggtccccgtcatacccggggacgagatcccgatagaggagggcgcggaccacctgggggccctggccagcgccgctgccaaggtgggctaccctctcctgatcaaggccagcgccgggggagggggcaagggcatgaggtccgtgtccgtcccgaagaacctgcgcagcgagttcgaggcagcggccagggaggcttcagcggccttcggcgatgggaccgtgtacatcgagaggctcctcacccgcgccaggcacgtggagatacaggtcctgtgcgacgcgcacggcggggcaatccacctcaacgagagggactgctccctccagcgcaggtaccagaaggtgatcgaggaggcgccctcgccggcggtcgaccacgccaccag

SEQ ID NO: 202878 - DNA, 361 bp, Unknown
  Bacterial polypeptide expressing nucleotide sequence isolated from the Sargasso Sea
atgttcaaaaaaattcttattgctaatagaggtgaaatagccttacgtgttcttagggcgtgtagagaattaggtattaaaacagttgctattcactctgatgtagacgaaaacgcaatgcatgtaagaatggctgatgaaagtatttgcgttggaccagcttcggcacaatcaagttatttaaatattccagcaattataactgctgccacattaactgatgttgatgccattcatccaggatatggatttttaagtgaaaatcaaagatttgctgaaataattgaagagcataataaaaaatttataggaccgagatcagaacatatcaaaatgatggggaataagatgatgcaaaaaa

SEQ ID NO: 202879 - DNA, 791 bp, Unknown
  Bacterial polypeptide expressing nucleotide sequence isolated from the Sargasso Sea
taaggttatatcaagccttggaaatagcatgtctgatggtttgcatgtacctgacagagcggatggcatgggttgtttgcctgtagaaggcagtagcgacaaagttgcgctaatacgtaaccacgaactgcaccccaaacacttaagtgctcagccacagtctattcaaatgcatactagcgagttggcctatgacaactatcatagtggggtagctttaccaggcggcaccacaaccatggtgtataaccttaccaccaaaatggtagagcgagagtttatcagtcttgttggaacggtaagaaactgctcgggcggcattacgccttggggcacgtggctaacgtgtgaagagtcagtagaccgacctcatggcccgaacggcgatgtagtaaacaaagatcacggctacatatttgaagtacctgcaaatgctgactcactcattgaagctaaaccacttaaagcaatggggcgctttaaccatgaagcggcatgtgttgaccccaaaacaggcattgtttacctgactgaagatcagggtgacagcttgctatatcgctttgtgcctaacgagtacgctaacctggcagctggcggccaattagaagctctggtagtaaaaaacaaacctcagtttgatacacgtaattggagttccacaactatgccattggcgacgtggttcgacgttgagtggatagtattagacaacccagaaagcccgaacgatgacttacgcgctagaggatatgagaaaggtgctgccttattcgctcgcggtgaaggta

SEQ ID NO: 202880 - DNA, 267 bp, Unknown
  Bacterial polypeptide expressing nucleotide sequence isolated from the Sargasso Sea
aatgttcaaaaaaatattaatagcaaatagaggcgaaattgctgtaagaattattagagcttgcaaagaatggggtatttctacagtggcaattcattcaaatgttgatcgtgaaagtatgcatgtcaaattagctgatgaaagtatttgtgtaggttcacaccaacctgcaaatagttatttaaatataccagctatactttcagcaattgaattaactaattctgaagcagttcatccaggttatggtttcttatctgaaaattt

SEQ ID NO: 202881 - DNA, 529 bp, Unknown
  Bacterial polypeptide expressing nucleotide sequence isolated from the Sargasso Sea
aatgtttaaaaaaatacttatagctaatagaggagaaatagctgtacgtataattagagcctgtaaagaatggggtatagcaacagtggctattcactccgatgtggatagagaaagtatgcatgttagattggctgatgaaagtatttgcgtgggacctcatcaaccaacgttaagttatttaaatattcctgcaatcatgtcagcaattgaactaacaggttctgaagctgtccatcctggttatggttttttatcagaaaattttgagtttgcaaaaatattagaagagaatgatataaaatttataggcccttcatctaatttaattaaaatgatgggagataaaattgaagctaaaaaagtcgcaaaggaatatggacttccagtaattgaaggctcagaaggtggcataaaagatattaatgaagcaaaaaaaatatgtgagaagataggttttccagttttaataaaagcctctggtggtggaggtggaaaaggaatgaaaattgttaacaaagaagaagaa

SEQ ID NO: 202882 - DNA, 940 bp, Unknown
  Bacterial polypeptide expressing nucleotide sequence isolated from the Sargasso Sea
tatgttgatgccgataaagatgctccttttgttaaacaagcagatgaagctatcaaaatttctgatggtggttatctagatattgatgcaattattaatgctgcaaaaatttcaaaagctgaagcaattcatccaggatatggtttcttgtctgaaaatgctctttttgcaaaaaaaatacaaaaagaaaagctaatctggattggtcccggttctgaaattatttcgaagatgggtgacaaattagaagctaaggaactggctattcagtccggtattccaactttgccaaaaacctctgatcctaaaaaaattaataaaattggttttccccttctcattaaggctgctgcaggtggaggtggtaaaggtatgagagtagtttattcaaaaacagagttcaaggatgcactagcagctgctcaaagagaagcactatcaggatttaatgatgatagagtgtttattgaaaaatatattgaaaaatctcgtcacattgaaatacaaatactaggagattcatttggcaatataattcatcttggcgaaagagaatgttcaattcaaagaaggtatcagaaaatcatagaagagaccccctcctcacgaatttccgttgaagttagaaaaaatatgtgtgatgcagccgttaatcttgcaaaaaatttacaatatacttctgcaggaaccatagagtttttatacgatgataaaacggatgaattttggttcttagaagtcaatacaagattgcaagttgagcatcctgtaacagaaatggtcactggtattgatctcgttgcagagcagatttcaattgcacaaggaaacaaaatttcaatttcgcaaaaggatcttgttttcaaaggtcatgctattgaagcgagactctatgcagaagatcctgaaaataattcttaccagatatggaaaaatgatg

SEQ ID NO: 202883 - DNA, 659 bp, Unknown
  Bacterial polypeptide expressing nucleotide sequence isolated from the Sargasso Sea
gatgcagggagccccgagcccgtacaccaaggtgctggtcgccaaccggggcgagatagcggtcagggtcctgcaggcagccagtgaggcgggcctgtcgagcgtcgcggtgtactccgagtccgactccgggtcgctccacgtcgagaccgccgacgagtcggtgctgctagagggggaggggctcgaccagacctacctcaacggcagcgcgatcatcgaggcggcccggtcgacgggggcggacgcgatccaccccggctacgggttcctctccgagagggcggacttcgcccgggaggtcgagtcagcgggcatccgctggataggcccgtccgaccacgccatcgagacgatgggcgacaagatatccgcgcgcacgctcatgatcgagtcgggggtcccggtgatccccggggacgagataccgatagaggagggggcggaccacctgggggccctggccagcgccgctgccaaggtgggctacccgctcctgatcaaggccagcgccgggggaggggggaagggcatgaggtccgtgtccgtgccgaagaacctgcgcagcgagttcgaggctgctgccagggaggcgtcagcggccttcggcgacggcaccgtgtacatcgagaggctcctcacccgcgccaggcacgtgg

SEQ ID NO: 202884 - DNA, 530 bp, Unknown
  Bacterial polypeptide expressing nucleotide sequence isolated from the Sargasso Sea
gatgttagataagattctgatagctaaccgaggtgaaattgcactcaggatccaaagagcctgcagggaattgggaatcaaaacagtagcggtatattccaaagctgatgccaaacaaaaacacgtactcctagcagatgagtcagtttgtataggtccaccagaatctgcaaacagttatttaaatatgccttcaataataagtgctgcggaagtcacggattcaatggctattcatccaggttatggatttcttgctgagaatggcgattttgccgaacaggttgaagaaagtggctatagctttataggtcctaaatcagaaactattaagctaatgggaaataaaataaatgctaaagatgcagtcaaagaagttgaaattaactgcataccaggatctgacagttcattaggtgaggatatggataagatttatcagttagctgatgagattggttatcctgtcctaattaaagcagcagctggtgggggtggaaaaggaatgagaatcgcccatactaaagcaa

SEQ ID NO: 202885 - DNA, 870 bp, Unknown
  Bacterial polypeptide expressing nucleotide sequence isolated from the Sargasso Sea
tatctttataccttcgtctacatcaaagtcttttcgaaatcactttattaatgcagcaaaaaaatatgtaaaagatttaaaattaaataaaaaaaaatctttaataattgatataggatcaaatgatggagtagccttaaagccatttttagaaatgggttacaaaaatatacttggcattgaaccagctaaaaatttagcaaaattggctaataaaaataaaattaaaacaataaatagtttcttagaaaaaaagaatttaagaaaattcaaaaaaaatgctgatttaattcttgcatctaatgtttttgctcattcagataaattaaaagaaatggcagaatgtatgtttaaactgttaggaaaaaacggaactataattatcgaaatacagtatttaatgaatacacttaaagacttaacttttgataatatctaccatgagcactataattattggtctttaacctctttagtaaatttttttaatcaatttcaagcaacaatatacaggtctgaaaaaattgatactcatgggggttcgctaagaatttatataaaaaaaaataaaaaagtaaaaattgaaaaaagtgtaaaaaacactcttatggaagaaaaaaagtttggaattaaaaagtttaaaacctaccaagattttggagaaaaagtttataagatacgtgaaaatgttataaagaatattaaaaaattaaaaaataaaaataaattaataattggttatggagcacctgcaaaagctactaccgcactgaatttttttggaattactaatgaaatagattttataatcgaagataacaaacttaaacataataaatttattcctggagtaaaaatacctatcaaaaa

SEQ ID NO: 202886 - DNA, 681 bp, Unknown
  Bacterial polypeptide expressing nucleotide sequence isolated from the Sargasso Sea
aaaaatattaattgctaatcgtggagaaattgcagttcgagtaattagggcttgtaaggaatggggtatatctactgttgctgttcattcagatgtagataaagaaagcatgcatgtaagattagcagatgaaagtatctgtattggttcgcatcagcctgtaaatagttatttaaatatcccggcactaatgtctgcaatagaactaactaatgctgaagctgttcatccaggttacggttttttgtctgaaaattccagttttgctaaaattttggaagaaaataacatcaaatttattggtccatcatcaaaactaattaagatgatgggagacaaaattcaggcaaaaaaaattgctaaagaacatggtttgcctgttattgaaggttctgatgaaggtgttgcaaatatagaaaaagcaaaagaaatttgtaaaaaaattggatttcctgttttaataaaagctgctggaggtggtggtggaaaaggtatgaaaatagcttttgatgaaaaaaattttgaagagttattcttaacagcaaaatccgaagcaaagaaattttttggaaatgatgaggtttatattgaaaaattttttcaaaatcctagacatatagaggttcaagttttatctggtaaaaatggtactgtccatttgcatgagagagattgttcggt

SEQ ID NO: 202887 - DNA, 891 bp, Unknown
  Bacterial polypeptide expressing nucleotide sequence isolated from the Sargasso Sea
attcaacgcaacatttgtagctatgtctgatgttgcagtaaaacttaaaaatggctatttggatgcaaatgaaattatagatgcagcaaaaaaagcaggagctgatgcaattcatccaggctatggatttttatctgaaaactcaatttttgctagaagagtaattcgtaacaacataatttggattggcccaactcctcatgttatcaatgtgatgggagataaaatcaaagctaaagaattggcgataaaagcaaatgtaccaaccctagaaaaagctgaaaatattaaagattcaaaacgacttggattcccattactgattaaagctgctgctggaggcggcggcaaaggcatgcgaatagttgataataaaaatgaacttaaagatgcggttgcagcagcaaaaagagaggcaaaagctggttttggtgatgaaagagtatttattgagaaatatattaagaaatcaagacatattgagattcagattctgggggatcaacatggaaatgttattcatcttggtgaaagagaatgttctattcagagacgataccaaaaaattattgaagagtctccctcacccaaactggatcatgaattaagaaagcaaattggtaatgcggcggtcaaactagcaaaagaaattaaatatcaatcggcaggtactgtcgaatttattcttgatgatgatacaaatgagttctggtttcttgaagttaatactaggctacaagttgaacatcctattactgaggaagttacaggagttgatcttgtaagagcacagataaacattgcaaaaaatgagtatctagaattaaaacaaaatgatattgaatttaatgggcatgcagtggaagttcgactttatgcagagaatccaaa

SEQ ID NO: 202888 - DNA, 337 bp, Unknown
  Bacterial polypeptide expressing nucleotide sequence isolated from the Sargasso Sea
aatgatccaaaagatattgattgcaaatagaggcgaaatagcttgtcgaatagctcgcacggtcagttctatgggtatgcaaaccgtagctgtgtattctgacatagatgaaggatctttgcatgtcgcttcttgtgacgaagcagttaatataggtaattctccagcaacagagtcgtatctaaatattgattccattataaaggccgctctagctacggatagtgatgctattcatccaggttatggatttctatccgaaaatgctgctttcgccaaagcttgcctgaaggcgggtataatttttattgggccatctgtgtcaatattgaatcca

SEQ ID NO: 202889 - DNA, 434 bp, Unknown
  Bacterial polypeptide expressing nucleotide sequence isolated from the Sargasso Sea
aatgtttaagaaaatactgatagctaatagaggtgaaatagcagtacgtataattcgagcttgcaaagaatggggtatttcaacagtggctatccattcggatgtggacagagaaagcatgcacgtaagattagctgatgaaagtatttgtgttggacctcatcaaccagcgtttagttatttaaacattccttcgatcatgtcagcaatcgaactcacaggtgctgaagctgtacatcctggatatggttttctgtcagaaaattttgattttgcaaaaatgttagaagaaaataatataaaatttattggcccctcctctagtctaataaaaatgatgggagacaaaattgaagcaaaaaaagttgctaaagaacatggacttccaattatagagggatcagatggtggaattaaagatattaatgaggcta

SEQ ID NO: 202890 - DNA, 435 bp, Unknown
  Bacterial polypeptide expressing nucleotide sequence isolated from the Sargasso Sea
tatgaaaaaaattctgattgcaaaccgtggggaaattgcctgtagaattatcgatagttgtaaaaaacttaagtttcactcaatagcagtttattctgatatagataaaaacagtaaacatgtaagaaaagccgatgagtcaattcacatcggtgcatcgaaagctcaagaaagctatttaaatgcagataaaataattgaagcagctaaaaaattaaaagctgacgctattcaccccggttatggctttttagcagaaaacgaaaaatttgcccaaaaagtaattgattctggaattacttggataggacccaaaccaaatacaattgtatcaatgggtaacaaagatatagcaagagatttagctttaaaaagtaatttacctatttgtccaggcttaaataataaggatttagaaaaagaagatttagaaaa

SEQ ID NO: 202891 - DNA, 363 bp, Unknown
  Bacterial polypeptide expressing nucleotide sequence isolated from the Sargasso Sea
aatgtttaacaaaattcttattgcaaaccgtggcgaaattgccctcagagtaattagggcatgcaaagaaatgggaataacttctgttgcagtttattcaactccagacgtagattcaatgcatgttaggatggcggatgaaagcatatgtataggcccggctagtagtatagaaagctatctgtcaatacccgccataatatcagcttgcgaaatatctggggcggatgcaatccatcccggttacgggtttcttgcggaaaattcaaaatttgcccaaattctctctgaccacaagataacctttattggaccggacccctctcatatttcacaaatgggagataagatttctgctaacaa

SEQ ID NO: 202892 - DNA, 636 bp, Unknown
  Bacterial polypeptide expressing nucleotide sequence isolated from the Sargasso Sea
aatgttaaaaaaaatattaattgcaaatagaggtgagatagcctgcaggataataagaactgctaagaaaatgggaattaggaccgtctcaatatgttctgatccggatataaactcaccgcatgtcaacctagctgatgaatatgtaaatattggggggaatacttcatcagaaagttatcttagagtaaataagataattgatgcagtaaaaaaaactaatgcagaagcagtacacccaggttatggttttttgtcagaaaatgtaaagtttagggatgaaattcaaaaaattggaaaaatcttcattggtcctcctagtgaggcaatctcttcaatgggtgataaaattgaatcaaaaaagattgcaaaatcagctggagtttctgttgttccaggcggccttgaagttattccaaatataaaggaggcacttaaccaagctaaaattattggctatcccttaatgattaaagcttcagcaggtggtggaggtaaaggaatgcggatagcatttaatgatgaagaattaaaaactaattttggttcagctgttaacgaagcaaaatctagctttggtgatgatagagtatttattgaaaaaattcgtcgaattcccaaaacatatttgaagtt

SEQ ID NO: 202893 - DNA, 385 bp, Unknown
  Bacterial polypeptide expressing nucleotide sequence isolated from the Sargasso Sea
atgtttaaaaaagttttaatagctaacagaggtgaaatagctgttagagtgataagagcttgtaaagaatggggaatcaaaactgttgcagttcactctaatgtggactcagatgcaatgcatgtgagactagcggacgagagtgtttgcattggttctcatcaaccccaaaatagttaccttaatatttcatcaattatgtcagcagttgatcttaccggtgccgaagctattcacccaggttatggttttttatctgaaaatgctaaattttctgaaattgtaaataaacatgggataaagtttattggtccaagtgctgagataatttcaaaaatgggagataaaattgaggcaaaaagaatagctaaaaaatatggtttac

SEQ ID NO: 202894 - DNA, 384 bp, Unknown
  Bacterial polypeptide expressing nucleotide sequence isolated from the Sargasso Sea
gatgtttaagaaaattcttatagcgaatagaggtgagatagctgtcaggataattcgagcttgtaaagaatggggtattcaaactgttgctatacattcagatgtagacaaagaaagtatgcacgttaaattagctgatgaaagcctttgcgtaggttcaagacagccagttgatagctatcttaacattccatctatattatcagctatcaatttaacaaatgcagatgcagttcatcctggttatggttttttatctgaaaattataatttttctaaaatattaaaggacaataacattaaatttattggtccttcgcctgaaaatattaaaatgatgggagacaagattgaagcaaaaaataccgcaaaaaatacggaata

SEQ ID NO: 202895 - DNA, 362 bp, Unknown
  Bacterial polypeptide expressing nucleotide sequence isolated from the Sargasso Sea
gatgtttaaaaaagttttaatcgcaaatagaggagaaattgcagttagagtaataagggcttgtaaggaatgggggatcggtacggttgccgtccattctgatgtggactccgactccatgcatgttcgtctagctgatgaaagcgtttgtataggttcacatcaaccacaaaacagttatctaaatattcctgcaataatatctgctatagatgttactggagccgaagctgtccatccaggttatggttttctatcagaaaattataaatttgcagacatgattcaaaaacacggaataaaatttattgggccaagagctgacattataaaaaaaatgggagataaaattgaagcgaaaa

SEQ ID NO: 202896 - DNA, 846 bp, Unknown
  Bacterial polypeptide expressing nucleotide sequence isolated from the Sargasso Sea
agcagatgaaacagcaatgcatgtaagaatggtcgatgagagtgtttgtgttggacctgcttcagctcaatctagctacttaaatattcccgcaattataacagctgcaactatatcagatgtagatgctattcatccaggatatggctttttaagcgaaaacaaaagatttgcggaaataattgaagagcatggtataaaatttataggccccaaatcagaacatattgaaatgatgggaaataaaatagctgcaaaaaaaattatggaagaaaacaaggtgcctactgtaccaggactaaatgatctttcagatataaagagagtttatgatttcattgatacaatcaaattgccagtaataataaaagcagcaagtggtggtggtggcaaaggcatgagagtagtaaataaattagaagacttagaggaatcaattaatgcagctaaaatagaatctaaaaaagcatttaatgatgatactgtttatttagaaaaattttttgttaatccaaaacatattgaaatacaagttattgctgactcgaatggcaatgttttaacattaggagaaagagattgttctatacaaagaaaacatcaaaaaatcattgaagaaagtccaagtactgtcttaacaaatattgacagagaaaaaatcagtagcctatgtgtaaaagcagtaaaatcaattaattatgaaggagttggaactctagaatttttatatgaaaaaaatgacttttattttatggaaatgaatactcgacttcaagttgaacatcctgttactgaaatgataacaggacaagatttagtaaaagaacaaataaaagttgcaaatgg

SEQ ID NO: 202897 - DNA, 712 bp, Unknown
  Bacterial polypeptide expressing nucleotide sequence isolated from the Sargasso Sea
tatgttcaataaaattcttattgcaaatcgtggagaaatagctttaagaataattagagcttgcaatgaattatcaataaagacagttgcaatttactcatctgctgaccaatattctttacacgtaaaatttgcagatgaagctatttgtataggtccttacacaagtacagaaagctatttaaatattagtagaataattagtgcagctgaattaacaaattctgatgctattcaccccggctatggttttttatcagaaaatccacaatttgcacaaatatgtaaagataataattttatatttattggccctagttctaatacaattgaatcaatgggtaaaaaagcaaatgcaaaatcatcaatgttaaaagctggagttccagtaatacctggaagcaagggaattataaaagatgtaaagcaattgaaaaatactgctaatgaaattggatatccaataatattaaaagcttcttcaggtggtggaggaagaggtatgagagttgttcgcaatgaaacagaattggagtcagcctttaagacagcttcatctgagtctcaaattgcattcaatgatcctgatatgtatttagaaaaatttgttgaaaatcctagacatatagaaatacaaattttagcagataattatggtaatgtagtccattttggtgagagggaatgttctattcaaagaaggcatcaaaaa

SEQ ID NO: 202898 - DNA, 718 bp, Unknown
  Bacterial polypeptide expressing nucleotide sequence isolated from the Sargasso Sea
tatgtttagaaagattttaattgctaatagaggtgaaattgcatgtagagtaatagatacatgcaataaattaggtatagatactgtagctgtttatagtgaagctgatagtagagctttgcatgtaataaaagcaaaagagtctgttaatattggcttagctccatcatctgagtcttacctagttattgaaaaaataataaatgcctgtaaaaccactggcgcagatgcagttcatcctggatatggatttctttcggaaaatgcttctttcgttaatcaacttgaaagggaaggaattacgtttatagggcctccgtcagaaccaataagagtaatgggtgataaaattgagtcaaagatttttgctgaaaaatcaaatgtaaatataattccaggtcatcaagaaattattaaagattctgaagaagctcttgaaatttcaaaaaaaattggtttcccggttatgataaaagcttcggcaggtggaggtggaaaaggtatgagaattgccagagctgaagaagatgttgaggatgcatttaattcatcggttaatgaagcaaaatcaagttttggtgatgatagaatatttatagaaaaatttattgaaaaacctaggcatatagagattcaaatattagctgataatcatggaaatgttatacatttaggtgaaagagaatgttcaattcaaaggagaaatcaaaaaattata

SEQ ID NO: 202899 - DNA, 709 bp, Unknown
  Bacterial polypeptide expressing nucleotide sequence isolated from the Sargasso Sea
atgttcgataaaattctcattgctaaccgtggtgaaatagcattgcgtatccaacgggcttgccgtgaaatgggtataaaaacagttgccgtccactccgtagttgatgctgatgcaatgcatgtccgcctggcagatgaaagcgtttgtatcggccctgccccagcgactaattcatatctgaatattcccgcaattataacagcggcagcgattacgaatgcagacgccatccacccggggtatggttttttatcagagaatgcaaatttcgcttcaattgtcgaggaacatgggttctgttttattggcccaactgctgatcacatagctttgatgggggataaaatagcttctaaggctaaggttaaggaactcggtatccctgtcgttccaggttcaaaaggcgctgtaaaggatatccaagatgccaagtcaatggcagcagaaatcggctatccagtgctgattaaagcatcagctggcgggggggggcgtggcatgaaaattgtccaggaaaaatctgaattagaaattgcaattcagcaagctggcaccgaagcgctggcagcgttcggtgatgacgctgtctatatggaaaaatttttagaaaagcctcgccatatagagatccaggttgttggcgacggtagtggtcaggttgttcatctgggggaacgtgattgttcgttgcaacggcggcatcaaa

SEQ ID NO: 202900 - DNA, 292 bp, Unknown
  Bacterial polypeptide expressing nucleotide sequence isolated from the Sargasso Sea
atgttcaaaaaaatactgattgctaataggggagaaattgctttacgtgttcttagagcatgcagagaattaggaataaaaactgtagccattcactctgatgttgatgaaaatgcaatgcatgtaagaatggcagatgaaagtatttgtgtcggcccagcctctacacaatccagttatttaaacattcctgccattataactgctgccacgttgactgatgcagatgcaatacatccaggttatggttttttaagcaaaaatcaacgatttgcagaaatcattgaagaac

SEQ ID NO: 202901 - DNA, 731 bp, Unknown
  Bacterial polypeptide expressing nucleotide sequence isolated from the Sargasso Sea
tttggcaaataatttattaaaaagtaataacgaaaaatgtgaactttatcctttagaagtaaattattgttataaatgtcacaattgtcaattatctgtttcagttgatcctaaaaaaatgttttctaattatctttacacttcatccacatctaaatcatttagaaatcattttattcaagctgcaaaaaattatattaaaaatttaaaattaaataaaaaaaaatcatttattattgacattggaagcaatgacggtgtagccctcaaaccttttaaagatttaggatttaaaaatgtacttggtattgagcctgctaaaaatttagcaaagctagcaaataagaataaaattaaaacttttaatggcttcttagagaaaaaaaatcttaaaaagattaaaaagaacgccgatttaatattagcctctaatgtatttgcccattctgacaaattaaaagaaatggcagaatgtatgttaaaactactaagcaaaaaaggagttataattattgaagtgcaatatttaatgaacactttaaaagatttaacttttgataatatttatcatgagcattataattattggtctttaacatcattaattaacttttttaaccaattcgacgcaaaaatatataaatcagaacgtatcgatacacacggtggttcgattagaatttatgttaaaaaagataaaaaggttaaagttgaaagtagtgtaaaaaaaa

SEQ ID NO: 202902 - DNA, 709 bp, Unknown
  Bacterial polypeptide expressing nucleotide sequence isolated from the Sargasso Sea
atgtttaataaagtattgatagcaaacaggggagaaatagctgtaaggataattcgatcttgtatagaaatgggcattaatacagtagcaattcattctacggctgattctgatgcaatgcatgtgaaaatggcagatgaaagtatatgtgtaggaggatctaaatctctagatagttatttaaatatacctgctataattacagcaactgaattaactggtgctgaagcaatacatccaggatatggttttctatcagaaaattataagtttgcaagaattttagaagaatacaatattacttttataggccctaaatctgaacatattaaaactatgggtgataaagtatcggccagaaaactaattagtaaaacaggaattccacttgtgccaggatctgatggccctattaaaaatttaaaggacttaaaacttatatcaaaagatataggcttcccattgataataaaagcttcggcaggtggaggaggaaaaggtatgaaagtagttaaagaaattagtgaattagaaagtgcctataacttaactaaatctgaagcagaagtaaattttgggaatgatgagatctatgcagaaaaatttttaaaaaatccaaaacatgtagagtttcaaatttttgcagataactatcaaaatgtcattcatttaggagaaagggattgttctataccaaagaagacatcag

SEQ ID NO: 202903 - DNA, 322 bp, Unknown
  Bacterial polypeptide expressing nucleotide sequence isolated from the Sargasso Sea
ttggttgctaatcgaggggagattgcagtcagggttctgcgggctgctaaagaatctggacttcgtggagttgcggtttattccgatcctgatacaggatctttacacgtcgaaaatgcagatcaggcagtgcatcttccaggcaccactctagccgatacttatctcaatggagatgcaataatcgaggccgcccgctctaccggtgctcaagcgattcatccaggtttcggattcctttctgagcgggctgattttgcaaatgcagtcaaggcggccggtctgatttggattggcccacccagtcgatgcaatcgatact

SEQ ID NO: 202904 - DNA, 676 bp, Unknown
  Bacterial polypeptide expressing nucleotide sequence isolated from the Sargasso Sea
catgagcaggattacaaaaatactgatcgcaaatcgcggtgagatagctgttcgcgttatccgtactgcccgcaaccttggttaccgtacggttgccgtttacagtaatgcggacgcaggcgctcttcatgtgagtgaagcagaccaggccgtttgtatcggccctgcggctatcggcgaatcttacctggtcggagagaaaatcctcgacgctgccaaactgacaggcgcagatgcgatccaccctggctacggattcctctcggaaaatgccgagttttccaaggcctgtggagcaatggatatcgcattcataggccccccccccgacgctatcgaactgatgggcagcaagcgcttatcaaagatcgccatgatcaaagctggcgtgccctgtattccaggttaccaaggcgtggaacagtcagaggataccctgattgctaaggctgccgagattggctttccgctgatggtcaaagcgtccgctggaggcggtggtcgtggtatgcgtctggtatttagacagagcgaactggctgagcatatccgtatcgcgcgttcagaggcagagaacgccttcggcagcggcgagctgattatggagcgcgccattgtggagccacgccacattgagatccaggtatttgccgacgaacacggcaaagcgatattc

SEQ ID NO: 202905 - DNA, 676 bp, Unknown
  Bacterial polypeptide expressing nucleotide sequence isolated from the Sargasso Sea
aatggttgaaaaagttttaattgctaatcgtggagaaatagctttacgaattgtcagaagttgtagagaactaggcattgcaacagttgcagtttttagcactgtagataaaaaagcattgcatgttcagcttgctgatgaggcggtttgtgtcggagattcattaagtaataagagttatttaaatattccaaatatacttgctgctgctacatcaagaggagttgatgctattcatcctggttatggatttcttgcggaaaatgataaatttgctgagatgtgtaacgatcacgggatagtttttattggtccatctcctaaagctattagatctatgggagataaatctacagctaaagaaactatggaagctgttggagttccaacagtacctggcagtaaaggcttgttatcaaatgttgatgaggcttataaattggcagatgatataggctatccggtaattattaaagcgactgctggaggaggtggaagaggtatgaggttggttgaaaactctaataatctcgaaaaaatgtttaaagcagctcaaggcgaagcagaagcagcttttggtaatgatggtttatatatggagaaatttataaagaaaccaagacatgtagaaattcaaattttggccgacaggtcgggtaaggttgttcacttagga

SEQ ID NO: 202906 - DNA, 799 bp, Unknown
  Bacterial polypeptide expressing nucleotide sequence isolated from the Sargasso Sea
atgttcaatcgaatcctgatcgcaaatcgtggcgagattgcacttcgtgtcattcgtgcctgtcgagaacttggcattgagacagttgccgtctacagcgaagctgatcgtgacgcaccatatctgaatcttgccgatgaagccgtctgtattggcccagcaaaagctgccgacagttacctaagaattgatcgagtgattagtgctgccgagattggcaacgtccaggctattcacccgggctatggctttctttcagaaaacgctcacttcgcagaagtttgtcgttcatgtgatattgatttcattggcccaactccagaatcaatggagcgagtcggtgacaaaaactcagctcgatctcttgcgcgggaagcagacgtcccaactgtaccaggtagcccaggactgctttctggcgaacaggaagctctcaaagtagctaaggaaatcggtttccctgttctcctcaaggcgacggcaggcggtggtggcaagggcatgcgggttgccgccaatgacctcgccctctcaacggcgtggcagcaggcctctgcagaagctgaagctgcttttggaaatgccggcatctacattgagaaatatgttgaaaaaccaaggcatgttgagattcaggtactcggcgatcagcacggcacgatgcttcatctctgggagcgtgattgctcaacacaacgccgtcaccaaaaacttattgaagaaagtccctcccctcgactgccacaagagacacgagaagccatgacggccgctgcggttcgttggcaaaggctgccgg

SEQ ID NO: 202907 - DNA, 598 bp, Unknown
  Bacterial polypeptide expressing nucleotide sequence isolated from the Sargasso Sea
gttgcccgggaccacgcatccaaggcgcgacacgcaaaatgttcaccgcatccactcgatcaccaccacgaggaacgcgtacgtgatcaagaaaattctgattgccaaccggggcgagattgccgttcgcatcgtccgcgcttgcgcggagatgggaatcacctcggttgcggtctataccgatcccgaccgctatgccctgcacgtcaaacgtgccgacgagtcctacaacgtcggcagcgacccgctggcgggttatctgaacccgcgccagctggttaacctggcggtagaaaccggctgtgacgcactgcaccccggctacggttttctctccgagaatgccgaactggcgaagatctgcgccgagcgcggcatcaagttcattggtccagcggctgaggtcattacccgcatgggcgacaagaccgaagcccgccgcagcatgatcgccgccggcgtaccggtcacccccggcaccgaaggcaatctggcagatcttgacgaggcgctgcgcgaagccgagcgcgtcggttacccggtcatgctcaaggcaacatccggtggtggtggtcgcggcattcgtaactgcaacaac

SEQ ID NO: 202908 - DNA, 401 bp, Unknown
  Bacterial polypeptide expressing nucleotide sequence isolated from the Sargasso Sea
catgttcaaaaaaattcttattgctaataggggtgaaattgctattagaatcattcgagcatgtaatgagatgggcatcaaaactgttgcagtattttcaaaagcagataaaaattcattgcatgttaaatttgctgacgaagctatttgtattggagaaggtcctgcggtagaaagttatcttaatatacctagaattattgctgcaggagaaattacaaatgctgatgccattcatcctggctatggcttcctagctgagaatgcaaagtttagtaaaatttgtaaagaaaatggatttacattcattggtccagatgctgaaatcatcgatttaatgggtgacaaagtgaatgcaagaaatgctgccaaagatgttggcgtttctattattcctggaa

SEQ ID NO: 202909 - DNA, 283 bp, Unknown
  Bacterial polypeptide expressing nucleotide sequence isolated from the Sargasso Sea
atgacttttcataaattactaatagccaacagaggcgaaatagcttgtaggatcattaaaactgctcatgaaatgggcatattttgtgttgctgtatacaccgaggccgactccaattcgccatttgttcgaatggcagaccaagctattaagttaagcgactcttatttaaatggtgacgaaataattaatgctgctaagcaaactggtgctgaagcaattcatcctggttatggttttctatctgagaatgcaaaatttgctagagctgttcaaaaagaag

SEQ ID NO: 202910 - DNA, 454 bp, Unknown
  Bacterial polypeptide expressing nucleotide sequence isolated from the Sargasso Sea
aatgtttaaaaaaatcctaattgcaaaccgtggggaaattgcagttagagttataagagcatgtaaagaatgggggattgcaactgtagcagtccactctgatgtagacagagacagtatgcatgtgagaatggccgatgaaagtgtatgtataggatctcatcaacctgcaaatagctatctaaatattcctgctttaatgtcagcaatagagataacaaatgcagaagctgtgcatcctggttatggttttttatctgagaacgctaatttcgctcgtgtgctagaagaaaataacatcaaatttatcggagcatcatctaaactaattgaaatgatgggtgataaaatacaagctaaaaaaatagctaaagaaaatggcttaccagtaattgagggttcggaaggtgggataaaagatattcaagaagcaaaagaactggtaaaaaaattg

SEQ ID NO: 202911 - DNA, 568 bp, Unknown
  Bacterial polypeptide expressing nucleotide sequence isolated from the Sargasso Sea
aatgataaaaaaagttttaattgcaaatagaggtgaaattgctatcaggatagcaaagtcatgtaaaaaactaggtattaaaacagtagcggtatattcaaaagatgatagtgattcacttcatttaacatattgtgatgaaagctatttattaggaaacgatcccttgaaaggttcatacttaaatattgaaaaattaattgaaatatcaaagaagttaaatgtagatgcaattcatcctggttatggttttctatcagaaaattcagattttgtaaaaaaactaaataaagaaaaaattacttttatagggccttcatataaagctatagaattaatgggagataaaatagaatcaaaaaaaatagcgaaacaagcaggagtaaattgtattccaggctatgagcacgctattaagaatgttagagaagggttaattgaagcaataaaaataggttatccagtaatgataaaagcatctgcaggtggtggtggtaaaggcatgcgaattgctaaaaataaacatgagtttgaagaattattaactgctgctaaaaatgaggcttta

SEQ ID NO: 202912 - DNA, 706 bp, Unknown
  Bacterial polypeptide expressing nucleotide sequence isolated from the Sargasso Sea
atgtttaaaaaaatattaattgctaatcgaggagagattgcagttagagtaattcgagcctgcaaagaatggggaattcagacagttgctattcattctgatgtagatagagagagtatgcatgtaagactggcagatgaaagtgtatgtattggaactcatcaaccaataaatagttatttaaatatccctgcaataatatcagcaattgaactaacgggagcagaagcggttcatccaggttatggttttttatcggaaaattcagaatttgctaaaattttagaggactacaaaataaaatttataggtccatcttccaaattaataaaaatgatgggtgataaaatacaggcaaaaaaaatagcaaaagaatatggtcttccagttatcgaaggttcagatggtggagtgaaagataaagaggaagcaaaaaatatatgtaaaaaaattggttttccagttctaattaaagcatcaggtggtggtggtggaaaaggaatgaaaatagttaatcaagattctgaatttgaaaatttatttgcaactgctaaatctgaagcccagaaatattttggcaatgacgaggtatatatagaaaaattttttcaaaatcctagacatattgaagtccaagttttatcaggaaaaaatagaactgttcatttacatgaaagagattttcagtcaaagaagacatcaaaaa

SEQ ID NO: 202913 - DNA, 289 bp, Unknown
  Bacterial polypeptide expressing nucleotide sequence isolated from the Sargasso Sea
atggttgaaaaagttttaattgctaatcgtggagaaatagctttacgaattgttagaagttgtagagaacttggtattgcaacagtagcagtttatagcactgtagataaaaaagcattgcacgtccagcttgctgatgaagcggtgtgtgttggggactcgttaagtaataagagttatttaaatattccaaatatacttgctgctgctacatctagaggagttgatgctattcatcctggttatggatttctcgctgaaaatgataaatttgccgagatgtggtaac

SEQ ID NO: 202914 - DNA, 570 bp, Unknown
  Bacterial polypeptide expressing nucleotide sequence isolated from the Sargasso Sea
aatgtttaataaaattctaattgccaatcgtggagagatagccttgagggttcaacgggcctgcagggaactaggaataaaaacggttgcaatttattcagaagcggatgctcatgccaagtatgttaaattggcagacgagtcggtttgtataggccctcctatgagtatcgattcctatttgaatattccggcaatcatcagcgccgctgagttaacaaacgtggaggctatccatcctggttacggttttttatcggaaaatgcggatttcgctgaacgagttcagcaaagcggctttgtttttgtaggacctaatgcagacaccattcgtttaatgggggataaagtaagtgccaagaagaaaatgattgattctaaagttccggtcgtgccaggaagtgagggagttcttcccgaagatgaaagagcaataatacaaacagccacagctgtcggataccccgttcttgtaaaggctgccgggggtggaggaggaagagggatgagagttgtcttttcggaggatgatcttttgtcggcggttgcaacaacaaagcatgaggcaga

SEQ ID NO: 202915 - DNA, 397 bp, Unknown
  Bacterial polypeptide expressing nucleotide sequence isolated from the Sargasso Sea
aatgtttaaaaaaattttgatagccaatagaggtgagattgctgtcagaattattagagcttgtaaagaatggggaatttcaaccgtggctgtccattcagacgttgatagagagagcatgcatgtgagattagctgatgaaagtatatgcataggttctcaccagccagtaaatagctatttaaatattccagctataatgtctgctatagaattgacaaattccgaagctgttcacccgggttatggtttcttatctgaaaattcaaattttgcaaagatattagaggaaaataaaattaaatttataggaccatcatcaaaattgataaaaatgatgggtgataaaatacaagccaaaaaaaattgccaaagagtatggattacctgtaattga

SEQ ID NO: 202916 - DNA, 496 bp, Unknown
  Bacterial polypeptide expressing nucleotide sequence isolated from the Sargasso Sea
aatggttgaaaaagttttaatagctaatcgtggagaaatagctttacgaattgtcagaagttgtagagaactaggtattgcaaccgttgcagtttttagcaccgtagataaaaaagcattgcatgtacaacttgctgatgaggcggtttgcgttggagattcattaagtaataagagttatttaaatattccaaatatacttgctgctgctacatctagaggggttgatgctattcatcctggttatggatttcttgcagaaaatgataaatttgctgagatgtgtaacgatcatggcatagtttttattggcccatctcctaaagctattagatctatgggagataaatctacagctaaagaaacaatggaagcagttggagttccaacagtacctggtagtcaaggcttgttatcaaatgttgatgaggcttataaattggcagatgatattggctatccggtaattattaaagcgactgctggaggtggtgga

SEQ ID NO: 202917 - DNA, 589 bp, Unknown
  Bacterial polypeptide expressing nucleotide sequence isolated from the Sargasso Sea
tatgacttttcataaattattaatagccaacagaggagaaattgcttgtaggataattaaaactgctcatgagatgggtattgcttgcgtagctgtttatactgaagctgactctcactcaccctttgtaaagatggctgatgaggcagttaaacttagcgatacgtatctgaatgggaaagagattatagaagctgcaaaacaaacaggtgcagaagctatccatcctggatatgggttcctttctgaaaatgccaaattttctagggacgtgctaaaagctgacctgatttgggtcggtccaagttcaaaagttataacttcgatgggagacaagcttaaagctaaagatattgcagagaaagctggtgtgcctactttgcctatgactacagaccctaagaaagctaacactattggctaccctattctcattaaagctgctgctggtggtggaggaaaagggatgagaatagtcgagtctaaaaaagatttgaaaggaatcattgctggcgctcaaagggaagctaaaactggatttggagatgatagagtttttatagaacgatatgtagcttcttcaagacat

SEQ ID NO: 202918 - DNA, 656 bp, Unknown
  Bacterial polypeptide expressing nucleotide sequence isolated from the Sargasso Sea
cttgtcgaagcaaaaaaatgtgctcatcgcgaaccgaggagaaattgcggttcgtattgcccgggcagcaaaaggcctgggaattaatccgatttcgatttttgcgccagctgactctgattctctccacacgaaattgacaccaaaagccgtcgaactgtctggaaaggcgacagatcccgtctctgcctacctagatttagatcagattgtgtcaatcgctaaggaaaatgggtgcgagctcgtacaccctggttatggtttcctctctgaaaacgcggtgttcgcgaaaaaatgtagcgaacatggaatagaatttattgggcctgagcacagagttcttaaattattcggagataaagtccaggcaagacagctagcggagtctctctcgataccaaccattccaggaagcaaagatgctctcgactcggttggggccgccaagaaagttgcccaaggaatcggatatcccatcatgcttaaggcttcctcaggaggcgggggtcgaggtatgagagctgtaactaatgaaaaagagatggaggaggcctttgagcgctgcgctagcgaagcaaaatcttcttttggagacgaacgcttatttctggagaaactgatagaacgtccaaggcatatagaaattcaaattcttg

SEQ ID NO: 202919 - DNA, 835 bp, Unknown
  Bacterial polypeptide expressing nucleotide sequence isolated from the Sargasso Sea
tctgcacaatctagttatttaaacatacctgcaattataactgctgcaacattaactgatgtagatgcaattcatcctggatatggttttttaagtgaaaatcaaaggtttgcagaaattattgaagaacacaatattaaatttattgggccaaaatcggaacatatcaaaatgatgggtaacaaaattgatgcaaaaaaaataatggatgaaactggagtgccaacagtaaaaggtataaatgacttaaacgataaaaataagattgaagattttataaaaaaagtaaaatacccaattatagtaaaagcagcaagtggtggtggtggaaaaggaatgagaattgtcacagaagaagatgatttaaataaagctataaatgaagcaaaaattgaagcaaaaaaatcatttaatgatgaaaatgtttatttagaaaaatttttaacatctcctaaacatattgaaattcaagttctttgtgattcatttggaaatgttgttactcttggagaaagagattgctcaattcaaaggaagcatcaaaaactaattgaagaaagtccaagttcagttctaacaaatgaaaatagagaaaaaatttctgaactttgtagaaaatctatgaaagaaatcggatatgaaggagttggaacattagaatttttatatgaaaataatgaattttattttatggaaatgaatacaaggttacaagttgaacacccagtcacagaaatggttactggaatagatcttgttaaggagcaaattctcgttgctaatggtgaaaaacttacaataaaacaagaagatataaaactaaaaggtagttcaa

SEQ ID NO: 202920 - DNA, 868 bp, Unknown
  Bacterial polypeptide expressing nucleotide sequence isolated from the Sargasso Sea
atgtttaaaaagatcttaattgcaaaccgaggggaaattgcagtcagaataattagagcatgcaaagaatggggtatttctacagtcgcagttcattctgatgtagatagagaaagtatgcatgtaaaattagcagatgaaagtgtctgtataggatcacaccaacctgcaaatagctatttaaatattcctgctttattatcagctgtggatttaactaatgcagaagcagtacatccaggttatggatttttatctgaaaatgcaaattttgctaaaattttagaagaaaataatattaaattcattggagcttcatctaagcatatagaaatgatgggtgacaaaattcaagcaaaaaaaattgctaaggaaaatggtcttccagtaattgagggatctgaaggtggtgttagtgatatttctcaagcaaaagaactatgtaaaaaaattggatttcctgttctaattaaagcatcaggtggtggaggtggtaaaggaatgaaaattgttcataaagagcaagaatttgaaacacttttttctacagcaaaatctgaagctaaaaaatactttggtaatgatgaagtctatatagaaaaattttttcaaaatcctagacatatagaagttcaaatattagcaggaaaaaatagaaccgttcatttgcatgaaagagattgttcagtgcaaagaagacatcaaaaattaatagaagaaacaccaagtccaattcttaacaatgagataagaaaagatctttttgataaaacagtacaaatggtaagtaaaattgggtatgaaggagctggaactgtagaatatatttatgaagatggaaaattttactttctagaaatgaatacga

SEQ ID NO: 202921 - DNA, 1041 bp, Unknown
  Bacterial polypeptide expressing nucleotide sequence isolated from the Sargasso Sea
gatgaatatattaatattcggtgggcaaacatcggcagaaagttatttaatagtatcaaaaataattgatgctttgaaatcttctaatgctgatgcagttcatccaggttatggttttttatctgagaatgttcagttcagagacgaggtgcacaaagtaggaaaaatatttattggccctccgagtcaagcaatttcattaatgggcgataaaatagaatcaaaaaagattgccaaagaggctggtgtgtccattgtacctggaggtctcaacataattaagaacttggataaagcaataattgaagcaaagaaaattggttatccactgatggtaaaggcctctgcaggtggtgggggtaaaggaatgagaatcgcttttaatgaaaaagagcttaaggaaaatttcaattctgcaattaacgaggctaagtcaagctttggagatgagagggtttttatagaaaaatttattgaatttcctaaacatattgaaattcaaattttaggtgatcaatttggtaatttcattcatcttggagaaagagagtgttcgattcaaagaagacaccaaaaagtaattgaggaagcgccaagtccttttgtagatgaaaaccttagacaaaaaatggttgaccagtcaataaagcttgctaaagctgtgggatattattcagctggaactgttgaatttgttgttgataaaaataaaaatttttattttttagaaatgaatacaagactacaagttgagcatcctgtaactgaacttacaactggagttgatttggtggaacaaatgataagaatagcttatggtgacaaaattaaaatccaacaaaaagatattaactttagtggaagcgcaatagaatgtaggatttatgctgaagattctgctaagaattttcttcccctcattggcaggctaacaagatatattgagccattaagaaaacaaattaagattgattctggcgtagtcgagggttctgaaaatagtatgttttatgacccaatgatttcaaagctttgtactca

SEQ ID NO: 202922 - DNA, 750 bp, Unknown
  Bacterial polypeptide expressing nucleotide sequence isolated from the Sargasso Sea
aatgtttaaaaaagttttaatcgctaatagaggcgaaatagctttaagaatattacgtgcttgtagagaacttgatataaaaactgtagcaatacattctgaagcagatgaaacagcaatgcatgtaagaatggctgatgaaagtgtttgcgttggtccagcatcagcacagtcaagctatttaaatattccagcaattataacagcggcaactatatcaaacgcagatgctatacacccaggatacggttttttaagtgaaaacaaaagatttgcagaaattatcgaagaacataatataaaatttattggtcctaaatcagaacatattgagatgatgggaaataaaatagccgcaaaaaaaattatggaagagaataaggtacctactgtaccaggactaaatgatctctcagatatgaaaaaagttttagaatttatagataagattaaactaccagtaataatcaaagcagctagtggtggtggtggtaaaggtatgagggtagtcaatcaattagaagacctagaggaatctataaatgcagctaaaatagagtcaaaaaaatcatttaatgatgacacagtttatttagaaaaattttttgttaatccaaaacatatagaaatacaaattcttgctgatagtaatggaaatgttttaacattaggagaaagagattgctctatacaaagaaaacatcaaaaaattattgaagaaagtccaagtattatcttaactaatgttga

SEQ ID NO: 202923 - DNA, 409 bp, Unknown
  Bacterial polypeptide expressing nucleotide sequence isolated from the Sargasso Sea
aatgtttaaaaaaatattaatagcaaaccgtggtgagattgctgttagaataattagagcatgtaaagaatggggtatttcaactgtagcagttcattctgatgtagataaaaatagcatgcacgtaagactagctgatgaaagtgtttgtattggttcacaccaaccagctaatagctatttaaatattcctgcaataatgtcagccattgaacttacaaattctgatgcggttcaccctggatatggttttttatctgaaaattcagattttgcgaaaatactagaagactacaaaattaaatttattggaccttcatcaaaattaatcaaaatgatgggagacaaaattcaagcaaagctaattgcaaaaaaatatggccttcctgttatagaaggttctgacggt

SEQ ID NO: 202924 - DNA, 255 bp, Unknown
  Bacterial polypeptide expressing nucleotide sequence isolated from the Sargasso Sea
aatgtttaaaaaaattttaattgctaaccgtggggaaattgcggttagaattattagagcatgtaaagaatggggaatatcaactgttgctgtccattctgatgttgatcgagatagcatgcacgttagacttgccgatgagagtgtctgtataggctcccaccaaccacaaaatagttacttaaatatacctgcattgatgtctgctatagagctaactaatgctgaagctgttcatcctggttatggttttct

SEQ ID NO: 202925 - DNA, 514 bp, Unknown
  Bacterial polypeptide expressing nucleotide sequence isolated from the Sargasso Sea
atgccaactcaaagccggataaaaacatttaataaacttctcatcgctaatcgtggtgaaatagctcttcgcattattaaaacagcaaagcaattgggtttgaaaactgtggctgtttatagccgggtagattttgaaagtcctcacgtcagttttgctgaccaatcagtatgtataggtgatggtcctgtagctgatagctatttgaaccataaaaagataatttctgccgctataaattcgggttctcaagcaattcatccaggctatgggtttctttctgaaaatgctaagtttgcaaagtcatgtatgcaaaatgatttgatatttgtaggaccatccgcagcgtctatcgagttgatgtcagacaaagctcatgcgaaaaatttgctggaaaaagcaggtgtgccttgtataccagggtttgaagagaagggtttaaggtttaaagaagttttaagaaaagctatgaacataggatttcctgtaatggttaaagctgcagccaggtggt

SEQ ID NO: 202926 - DNA, 892 bp, Unknown
  Bacterial polypeptide expressing nucleotide sequence isolated from the Sargasso Sea
aaaattttaatagctaatagaggtgaaatagctgttagaattatcagagcatgtaaagagtggggaatacaaacagttgctatacattcagatgtagataaagaaagtatgcatgttaaattagctgatgaaagtgtttgcgttggttcacatcaacctgcaaacagttatttaaacattccagcaatattatctgcaatagaaataactaattccgaagcagttcatccaggttatggatttttatcagaaaattttaattttgctagtatgcttgaagaaaacaacataaaatttatagggccttcttcaaaacttatcaaaatgatgggtgataaaattgaagcaaagaaaattgcaaaaaaatatggtttacctgttattgagggttctgaaggtggtatttcagatttagaaagtggtaaaaaattagccaaagcaattggttttccaatccttataaaagctgctggtgggggtggtggtaaaggaatgaagattgttaggtctgaaaaagaatttgataacttatttttgacagctaaatcagaagcaaaaaagttttttgcaaatgacgaagtgtatattgaaaaattttttcaaaatccacgtcacattgaagttcaagtgctctcaggaaaaaatcatacagttcatttgcatgaaagggattgttctgttcaaagacgtcatcaaaagttaattgaggaaaccccaagtcctgttttaactgatgaaattcgtaaagatctctttgataggactgttaatatggtatctaaaattggttacgaaggagctggaacagtagagtttatttatgaagatggtaaattttattttttggaaatgaatacccggattcaagttgagcatcccgtaactgaaatgg

SEQ ID NO: 202927 - DNA, 287 bp, Unknown
  Bacterial polypeptide expressing nucleotide sequence isolated from the Sargasso Sea
catgcttagaaaaattgtaattgcaaatagaggtgaaatagcattaagaattttacgtgcatgtaaagagctcaatataaaaacagtagcaacatattcggttgcagatcgcgaacaaaaacacgtatatctagcagatgaatctgtttgcattggacctgcaatttcaaccgagagttatttgaatatccctgcagtaataagcgcagccgaggtaacagatgctattggtattcatcccggttatggatttctatctgaaaatgccgattttgctgaacaagttg

SEQ ID NO: 202928 - DNA, 665 bp, Unknown
  Bacterial polypeptide expressing nucleotide sequence isolated from the Sargasso Sea
aatggttgaaaaagttttaattgctaatcgtggagaaatagctttacgaattgtcagaagttgtagagaactaggtattgcaaccgttgcagtttttagcactgtagataaaaaagcattgcatgttcagcttgctgatgaggcggtttgcgtaggagattcgttaagtaataagagttatttaaatattccaaatatacttgctgctgctacatcgagaggagttgatgctattcatcctggttatggatttcttgcggaaaatgataaatttgctgagatgtgtaatgatcacggcatagtttttattggtccatctcctaaagctattagatctatgggagataaatctacagctaaagaaactatggaagcagttggagttccaacagtacctggtagtaaaggattgttatcaaatgttgatgaggcgtataaattggcagatgatattggctatccggtaattattaaagccactgctggaggaggtggaagaggtatgcggttggttgaaaactctgataatttagaaaaaatgtttaaagcagctcaaggcgaagcagaagcagcttttggtaatgatggtttatatatggagaaattcataaagaagccaagacatgtagaaattcaaattttggctgacaggtcgggtaatgttg

SEQ ID NO: 202929 - DNA, 769 bp, Unknown
  Bacterial polypeptide expressing nucleotide sequence isolated from the Sargasso Sea
atgactcaaaaaagaatcctaattgcaaacagaggtgagatagctcttcggattattagatctgccaaagagatggatctatatactattgcagtttattcagatgcagatgaagatgctttacatacaaaaagagctgatgaatcttattaccttggagggtcgctaccagcagagagttatagaaatttaaaaaaattagtgaaggctgcggaagcgacaaatgcagacttggttcacccagggtatggttttctcgcagagaatgctgattttgcaagagctatagaaaaaaaaggaattacctggataggacctaaacctgaaactattaaatctatgggtgacaaaattgaatcaagaaaactagtatcaaaaattggcctcaaccctgtaccaggccaactaaaaccatcaagatttcaaagggaagcagtgaaagatgcggaaagttttggatatcctgttgcattaaaggctgctcacggtggtgggggtaagggcttgagaattgttcataacgaaaaagaacttttagaaaattttgatattgtaaagcgagagagcgaagcttactttggatctgatcaaatttatgttgaaaaatttataaaacctgcaagacatattgagactcaaattcttgctgataaatatggtaatgttttgtatttaggtgaaagagattgctccttacaaagaagaaatcaaaagctaattgaggagagtcctcccgagtggttatctgattatggaagagagaagtaaa

SEQ ID NO: 202930 - DNA, 902 bp, Unknown
  Bacterial polypeptide expressing nucleotide sequence isolated from the Sargasso Sea
agtgttcgcgtctgtgagctgcactgctgcgacttgtgacacgccggacgatccgatagggcggaccgcgtcggattgcgctggcaagaccaccacgcagacgggctgtaacgtcacgtgcgatgacggatactacgaatcgggcggcggcaccgaaggggcaaagacgtgcactgccgacgccgacgcatcgacgtcgtcgtttccggaccttcccacttgcactgctgcgacgtgtgccacgccggacgatccgatagggcggaccgcgtcagattgcgctggcaagaccaccacgcagacgggctgtaacgtcacgtgcgatgacgggtactacgaatcgggcggcggcaccgaaggggcaaagacgtgcactgccgacgccgacgcatcgacgtcgtcgtttccggaccttcccacttgcactgcatcgacatgtgacacaccggacaacccgccggggcggaccgcgtcagattgcgagggaaagaccaccacgcagacgggctgtaaagtgacgtgcgatgacgggtactacgaatcgggcggcggcaccgtagggctgaagacgtgcactgccgacgccgacgcatcgacgtcgtcgtttccggaccttcccacttgcactgctgcgacgtgtgccacgccggacgatccgatagggcggaccgcgtcagattgcgctggcaagaccaccacgcagacgggctgtaacgtcacgtgcgatgacggatactacgaatcgggcggcggcaccgaaggggcaaagacgtgcactgccgacgccgacgcatcgacgtcgtcgtttccggaccttcccacttgcactgcatcgacatgtgacacaccggacaacccgccggggcggaccgcgtcagattgcgaggggaagaccaccacgc

SEQ ID NO: 202931 - DNA, 817 bp, Unknown
  Bacterial polypeptide expressing nucleotide sequence isolated from the Sargasso Sea
aatgtttgataaagtactgattgctaaccgaggagaaattgcggtcagaattaatcgagcatgtcaagaacttggaatatcaactgtagctattcatagtgaagctgatgcagattcaatgcacgtaagaatagcagatgaaagtgtttgtataggaccaaatccagtaaacaaaagctatttaaatgcacatgcaattatctcggcctgtgaaattactggtgcacaagcagttcatcctggctacgggttcttatctgaaaatgcatcatttgcaaagatgcttgatgatcacaaattaacattcattgggccaaagcataaacacataagtatgatgggagataagatagaagcaaaaaaaataatgcaagaatatggtgtccctacagtgcctggctcaaagggagcagttgttgacctaggagatgcaataaagacatcaaaagatattggctttccagttcttttaaaggcaagtgcgggaggtggcggcagaggaatgaaagtagtgaatgacgaaaaagaattggccgatgctctgcctgtaataaagcaagaagcgttatcattttttggaaatgactcaatttatatagaaaaatttattgattcaccaagacatattgaaattcaagtaatttgcgatagtcatgataattttcttcacttacatgaaagagactgttcaattcaaagaaggaatcaaaaagtaatcgaagaagcgttagcgcctgaaatagaccaagccaaaaaagaaaaacttttcaaaatatgtatagatgctatggcaaagatgggctatttaggtttgggc

SEQ ID NO: 202932 - DNA, 358 bp, Unknown
  Bacterial polypeptide expressing nucleotide sequence isolated from the Sargasso Sea
atgtttaataaaatattaattgctaatagaggagagattgcaatgcgtattattaggacgtgtaaagaaatgggtattaaaacagttgcaatatactcaaaagcagatgaggagagccttcatgttagatttgcagatgaagcagtatgtatcgggccaagtgcaagttcagattcttatttaaaatcagcaaatattattgctgctgcagaaattacaaatgcagatgctattcaccctggatatggatttttatcagaaaacagtaagttttcaaaaatttgtgaagagcataaaataaaatttattggtgcttcaccagaaatgatgaaaaaatggagacaaatcgtctgctaaa

SEQ ID NO: 202933 - DNA, 470 bp, Unknown
  Bacterial polypeptide expressing nucleotide sequence isolated from the Sargasso Sea
aatgtataaaaaaatactaattgccaatcgcggtgaaattgccctgcggattattcgtgcatgtcacgaattaggactaaaatcagtagctgtttattctacagctgataaaagctctcttcatacaaaatttgcagatgaagctgtttgtattggcccgccacaaagcagcgaatcatatttaagtatacctagtattatttcagccggtgaaataacaaattctgatgccattcacccaggttatggttttttagctgaaaatgcagatttttctaaaatttgcagtgataataatttcgcatttataggacccaagccagatataataaatgcaatgggagataaatctgaagctaaaaagactatgaaatcagctggtgttccagttattccaggaagcgaaggaattctgtctgaccctaatgaagctcgtcgaattgcaagtgaaattggataccctgtgatgc

SEQ ID NO: 202934 - DNA, 691 bp, Unknown
  Bacterial polypeptide expressing nucleotide sequence isolated from the Sargasso Sea
aatgcagaagctggaaaaagtccttatcgccaaccgtggcgagatcgccctgcgtatcctgcgtgcctgcaaggagctgggtatcaagacggtggccgtgcactccaccgccgaccgcgaactgatgcacctgggcctggccgacgagtccgtctgcattggtccggcagccggcgcgcagtcctacctgaacatcccggcgatcatcagcgcagctgaactgaccggcgccacgggcattcacccgggctacggcttcctcgccgagaacgccgacttcgccgaacaggtggaaaactccggttttgccttcattggcccgaccgcgagcgtgatccgcctgatgggcgacaaggtatcggccaaggaagccatgatcaaaaccggcgtaccggtggttcccggctccgacggcccgctgccggaagacgaggaagaagccctgcgcattgcccgtgaagtgggctacccggtgatcatcaaggccgctggcggcggcggtggtcgcggcatgcgcgtggtgcacaaggaagaagacctgatcaaatcggccaagctgacccgcaccgaagccggtgctgcgttcggcaacccgatggtctatctggaaaagttcctcggcaacccgcgccacgtcgaagtccaggtgctgtccgacggccagggcaacgcgattcacctgtacgaccgt

SEQ ID NO: 202935 - DNA, 969 bp, Unknown
  Bacterial polypeptide expressing nucleotide sequence isolated from the Sargasso Sea
agccgatagcgtccaccctggctatggattcctctcagaaaatcatgagtttgccgaattaatcgttgcgaatggtctaaattggattgggccatctccagaaattattcaggccatgggcgacaaactttctgcaaaagatatgctggataaagcgggcgtgccgatgcttccctcaatagaaataaggcccgaaaccgacataagcgacgcagcaaagacaatcggatacccagtcttagtcaaagcgtctgcaggcggtggcggaaaaggaatgagggtcgttgagtctcctgataccctagtcgctgctgttgagagtgcccaacgagaggccaaaaatgcctttggggatgacaaagtttttcttgaaaaatggctagagtcggtcaaacacgtggaggtgcaaattgtcggtgataaacatggaaacatactccattgcttcgaaagagaatgctcaatccagaggcgacatcaaaaaattattgaagaagcgccctcaccagccgtagacgaaaaacttcgcgatgcccttgggaaatcggctgtagaggctgcaaagacacttaattacttttccactggaaccgttgagtttttgctctctgagcgagagttctatttcctagaggtaaatactaggcttcaggtagaacacccagttacagaagaaattttagggattgacctcgttcgcgaacaaattcgtgtcgccgagaacaaaaaactttcattttcacaaggcgacctacagatctgtggtcatgctatcgaagcaagagtttatgccgaagacccccagaaaaaattcctgccctctccaggaaaaattcaaacctgggcgccaagttttagcgacaatgtgagatttgattctggcgtggaagagggctcttttgtctcacccgaatttgatcccatgatagccaaggtaatctgccacgcgccgacagaaaagaagctgca

SEQ ID NO: 202936 - DNA, 401 bp, Unknown
  Bacterial polypeptide expressing nucleotide sequence isolated from the Sargasso Sea
tatgactgaacgaataaaaacatttgattccgttttagtagctaacagaggggaaatagctgttcgaattttaacagttgcaaagcaacttggtttgcgaactgtggcggtttatagtgaggtcgatagaggcgctctacatgtaaaacttgctgataaagcaataaaaattggtgaaggtccagccgatgaatcgtatctatctatcccaaagataataagtatagcgaagcaagaaaaagttggggctattcaccctggatatgggtttctgtccgaaaaccctgattttgcaagagagtgccataaagaaaagattaactttattggccctagtcctgaaaccattatgaagatgggcaataaggctgaagcgaaaaactttgtatctagcatcaagg

SEQ ID NO: 202937 - DNA, 625 bp, Unknown
  Bacterial polypeptide expressing nucleotide sequence isolated from the Sargasso Sea
atgttcaaaaaaatattaattgctaatcgcggtgaaattgccgtaagaatcataagagcttgcaaagaatggggtatagaaactgttgctgttcattccgatgtggataaaaacagtatgcacgtaagattggctgatgagagcgtctgtattgggtcatatcatccagctagcagttatttaaatatacctgctatattatctgctattgaactgacaaacgctgaagcagtacatcctggatatggttttttatctgaaaattcagaatttgcaaaaattttagaagattataaaattaaatttattggaccatcttcaaaattgataaaaatgatgggagacaaaatccaagcaaaaaaaattgcaaaagaatatggtttaccaattatcgaaggttctgaagggggtgtttcagatattaatgaagcaaaaaaaataataaaaaacattggtttcccagttcttataaaagcagccggaggtgggggtggaaaaggaatgaaaatagtaaacaatgaagaagaatttaacgatttatttttaacagcaaaattagaagcaaaaaaattttttgggaatgacgaagtttatattgagaaattctttcaaaatccaaggcata

SEQ ID NO: 202938 - DNA, 754 bp, Unknown
  Bacterial polypeptide expressing nucleotide sequence isolated from the Sargasso Sea
atgataaaaaaaattttaatcgccaatagaggtgaaattgcttgtcgaataattaaaacagcaaataagatggggatcaaaacagtcgcagtttattctgaggctgataaatattctgattttgtaaatatggctgatgagtcatattttatcggaccctcagctcctaatgagtcatatctagtaattaaaaagataattgagattgctaaaaagtctaagagtgacgctattcatcctggatatggatttttatcagaaaattataattttgttaaagcattggaaaaagagaaaattaaattcattggtccaaataaaaacgctattacaaaaatgggagacaaaattgagtctaaaaatttagctctaaaactaaatttgaatgttattccaggtcacacagaggctgtgagagatccaaaaaaagcaataaagattgcagaaaaaataggatttccagtgcttcttaaagcttcagctggtggtggtggcaagggaatgagaattgttaataagagacaagagttagagtctaacttaaaggcagcgcaaagtgaggcattaaatagttttggagatgatagagtatttattgaaaaatacataactaacccaagacatatagagattcaaattctatgtgataagcatggtaatcaagttcatctaggtgaacgagagtgttcaattcaaagacggtatcaaaaggtgattgaggaatgtccatcttcatttgttgatgaaaaattaa

SEQ ID NO: 202939 - DNA, 551 bp, Unknown
  Bacterial polypeptide expressing nucleotide sequence isolated from the Sargasso Sea
catgcttgaaaaagtactgatcgctaaccgcggcgaaattgcgcttcgcgtactgcgcgcctgtaaagagttgggcattaagaccgtggctgtgcactccacagcggatcgggaactcaaacacgttcgcctcgccgatgaggctgtatgtatcgggccgccgccctcggcacagagttacctcgatgtgccgtccattatcagcgttgccgagctgaccaacgctgacgggattcaccccggttacggctttttgtcagagaacgctgactttgccgagcaggtagagaaaagcggcttcacctttattggccctaccgcggaaaccatccgcttgatgggtgacaaggtatctgccaagcagcagatgcagcgcaccggtgtaccgacagtaccgggctctgacggcgcgctgcccgatgatcctgatgaagtgattcggatcgcgagagaaattggtttcccagtgattgtgaaggcagcagccggcggtggcggtcgcggtatgcgggtggtgcacaacgaagaggtgctgctctcctccgtacagg

SEQ ID NO: 202940 - DNA, 715 bp, Unknown
  Bacterial polypeptide expressing nucleotide sequence isolated from the Sargasso Sea
acttatagctaatagaggcgaaatcgcagttcgtataattagagcatgtaaagaatggggtatttcaactgtagctattcattcagatgtggatagagagagtatgcatgtaaggttagctgacgaaagtatttgtgttggtcctcaccaacctacgtttagttatttaaatattcctgcaattatgtcagctatcgaactcacaggtgctgaggcagttcatcctggttatggttttttgtcagaaaattttgaatttgcaaaaatattggaagaaaatgatataaaatttataggaccttcatctaatttaataaaaatgatgggagacaaaattgaagctaaaaaagttgctaaagaatatggtcttccagtaattgaaggctcagatggtggcattaaagatataaatgaagcaaaaaaaatatgtgaaaaaataggttttcctgttctaataaaagcatctggtggtggtggtggaaaaggaatgaagattgttaataagcaagaagaatttgagaatctttttttaacagctaagcaagaagcaaaaaagttttttgggaacgatgaagtttacattgaaaaattctttcaaaatccaagacatatagaagtacaggttttgtcaggtaagaatagaactgttcatttgcatgaaagagattgttcagttcagagaagacaccaaaaacttattgaagaaacaccttag

SEQ ID NO: 202941 - DNA, 430 bp, Unknown
  Bacterial polypeptide expressing nucleotide sequence isolated from the Sargasso Sea
catgaagcctcaaactgcttcagggctttttcaaaaaatcctgattgcgaaccggggagaaatcgcctgcagaatcatcaggacttgccaaaatttaggaatctccacggttgcagtctattctgaaactgatcgtgatgctttgcatgtgaggcttgccgatgatgccttccatattggtaaagccacacctgaggactcctatctcaaccatgaacggatccttgaaacagcaatccaatgccaagccgatgccattcatcctggttacggttttctctcagaaaatgatgtttttgccgaggcatgtctgtccaaggggatccatttgatcggcccacgccccgaatcgatccgtgagatggggtcaaaatccagtgcgaaacagcttatgcaggaagctggagttccagttgtcccgggctatcat

SEQ ID NO: 202942 - DNA, 807 bp, Unknown
  Bacterial polypeptide expressing nucleotide sequence isolated from the Sargasso Sea
aaggtagatatagatgcaggagcgattgatgggacagctgttggtgcaacttcagcttccactggtgcatttactacggttacggccagtaccagtttagacatcaccggttctgcaggtttgatattagagaatgatgagaccataaccaatgcaacaaatggtacggtaaagattaatggggaagtatctgcaggaactggcagtggaagtggaatatttaaatcagatggtgattatgatgttattttgaaaacgggtaattcaacaaccggatctataactattaccgatgcatcaaatggtgacataactcttgctccaaacgggagcggtaaagtcattgcgacaaccgctttagatattactggttctacaggattgatattggaaaacgatgagactattactaattcaaccgatggtacagtattgattaatggtatcgtatctggaggtagtggaagcgcagatggagtatttcaatcaaatgggaattatgatgttattttgaaaacgggtaattcaacaaccggatctataactatagctgatggttctaatggtaatatagcaattactcccaatggaagtggagaggtggacatatctaaggtagatatagatgcaggagcgattgatgggacagctgttggtgcaacttcagcttccactggtgcatttactacggttacggccagtaccagtttagacatcaccggttctgcaggtttgatattagagaatgatgagaccattacaaatgctacagatggcacagtaaagattaatggtattgtatcagca

SEQ ID NO: 202943 - DNA, 661 bp, Unknown
  Bacterial polypeptide expressing nucleotide sequence isolated from the Sargasso Sea
atgtttgataaagtacttattgctaaccgaggcgaaattgcggttagaataaatagagcttgtcaggaattgggtatttctacagtcgccatacatagcgaagctgacactgaatcaatgcatgttcggattgccgatgaaagcgtttgcattggcccaaatcctgttaacaaaagttatctaaattctcatgctataatagcagcttgtgaaattactggagcgcaagcggttcatcccggttatggatttctatctgaaaatgcgtcatttgcgaaaatgttagatgatcataagcttacttttattgggccaaaattctcacacatagaaatgatgggtgacaaaatcgaagctaagaaaataatgaaaaaatttggagttccaacggttcctggatctgaagatgaaataaaaaatgaattagatgcgattaaaacttctgaaaaaattggttttccagtcttattgaaagctagtgctggaggtggtggcagaggcatgaaggttgtaagtaatgaaaaggaacttaaaaaagcccttccaataatcaaacaggaagcactatctttttttggaaatgactcaatttatattgaaaagtttatagactctccgagacacatagaaattcaggtaatatgtgacacctcatggtaac

SEQ ID NO: 202944 - DNA, 370 bp, Unknown
  Bacterial polypeptide expressing nucleotide sequence isolated from the Sargasso Sea
gatgaagaaaattctaatagcaaatcgtggagaaattgcctgtagaattattaatagttgtaaaaaattaaagtttcattcaattgctgtctattcggatgtagataagaatagtaaacacgttaaaaaagctgatgaatctattcatataggtggtgcaaaagcacaggacagttatttgtcttcagataaaataattgaagcagctaaaaaagtaaaagctgatgctattcatccaggttatggttttcttgcagaaaatgataaatttgctcaaaaagtaattgatgcagggatcgtgtggataggacctaaaccgaatactattgtgtctatgggtaacaaagatatagctagagatttagcatta

SEQ ID NO: 202945 - DNA, 304 bp, Unknown
  Bacterial polypeptide expressing nucleotide sequence isolated from the Sargasso Sea
atgtataaaaaaattctaatagcaaaccgaggtgaaatagcagtaagagttatcagagcttgtaaagagctcgaaattaaaactgtagcagttttttctgatgcagacagaaattctctccatgtaaatatggcagatgaggcctataatattggtggcccactacctaatgaaagttatttaattggtgataacattataaaagttgcaaaaaaagcaaaatgtgatggtattcatcctgggtatggctttttatctgaaaaggcagaatttgccgaaaaatgtaaaaaaaataaaattgatt

SEQ ID NO: 202946 - DNA, 652 bp, Unknown
  Bacterial polypeptide expressing nucleotide sequence isolated from the Sargasso Sea
atgtttaaaaaagtattaatagctaacagaggtgaaatagctgttaggattattagagcttgtaaagagtggggtattaatacagttgcagttcactcagatgtagactcagattcaatgcatgtaaggcttgctgacgaaagtgtatgtattggctctcatcaaccccaatatagttacctgaatatttcctcaataatgtcggctgtagatttaacaggagcagaagcaatccatccaggatacggatttttatcggagaatgcgaaattttcagatgtcgtaagcaaacatggaattaagttcattggtcctagtcccgatataatatcgaagatgggtgataaaattgttgcaaaaaaaattgcaaaaaaatacggtttgccgattattgagggatctgaaggagctgtaaaaaatcttaatgaggcaaaatctatttgtaaaaatataggctatccaatcttaattaaagctgctggtggtggtggtggaaagggaatgaaaatcgtagaagaagagagtcaacttgaaaatctttttttgacagcaaaatcagaggcaaaaaaattttttggaaatgatgaattatacattgaaaaatactttaagaaccccaagacatatagaagttcaaataatgtcaggtaaa

SEQ ID NO: 202947 - DNA, 865 bp, Unknown
  Bacterial polypeptide expressing nucleotide sequence isolated from the Sargasso Sea
atgattaaaaaaattctaattgcgaatagaggagaaattgcgtgcagagttatacgtacagcaagaaagttgaatatcaatacggtagctgtttattctgatgctgataaagactctttgtttgtgaaacaggcagatgaatcttaccatataggaggctctcagccagctgagtcttatttagatattaataaaatcattaatattgcaaaaaaatcaaaggctgatgcagttcatccaggatacggatttttatctgaaaatgcagcttttgttaaaagactggctaaagagaaaataaaatttattggacccaatcctaatgctataaaaaaaatgggagacaaaattgagtctaaaaatcttgcaataaaacttaaattaaacgtaatacccggtcataccgctccagtaaaaaactcaaaagaagcattaaaaatctcaaataaaattggatacccggtcttgctaaaagcatcagctggaggtggcggtaaaggaatgagaatagtaagaaaaaatagtgaattagaagaaaattttaatgctgcaaagagtgagtcaaagaaaagctttggggatgatcgtgtgtttattgaaaaatatatagagcaaccaagacatattgagatacaaattctttgtgacaaacatggaaatcaagttcatttaggtgaaagagaatgctcaattcaaaggagatatcaaaaagttattgaggagtgtccgtcgccatttgtagataaagcaatgagaaatgaaatggctgcacaagctttaacccttgcaaaggaagttaaatacgattcagcagggaccgtagaatttgtagtagatgctaacaaaaatttttattttctctgag

SEQ ID NO: 202948 - DNA, 466 bp, Unknown
  Bacterial polypeptide expressing nucleotide sequence isolated from the Sargasso Sea
atgtttaaaaaaatattaattgcaaatcgtggtgaaattgcagttcgaataattagagcttgcaaagaatggggcatatctacagttgccgttcattcagatgtagataaagaaagtatgcatgtaagattagctgatgaaagtgtttgtatcggtccccaccaaccagcaagtagttatttaaatataccagctttaatgtctgctatagaacttactaatgctgaagctgtacatccaggttacggatttttatcggaaaatcctgattttgcaagaattctagaaaaaaataatattacctttattggtccatcatcaaagttaattgaaatgatgggtaataaaattaaagcaaaaaaaattgcaaaagaaaatggtttaccagttattgaaggttctgaaggaggtgtttcagatattaaaaaagcaaatgaattatgcaagaaaattggatttcctgttt

SEQ ID NO: 202949 - DNA, 885 bp, Unknown
  Bacterial polypeptide expressing nucleotide sequence isolated from the Sargasso Sea
aatgtttaaaaaagttttaatcgcaaatagaggagaaattgcagtcagagtaataagagcctgcaaagaatggggaataggaacagtcgctgtacattccgatgtggactccgaatcaatgcatgttcgtttggctgatgaaagtgtttgtataggttctcatcaaccacaaaatagttatctaaatattcctgcaataatatctgctatagatgttactggagctgaagctgttcatcctgggtatggttttttatcagaaaattataaatttgcagatatgattcaaaaacatggaataaaatttattgggcctagggctgaaattataaaaaaaatgggagataaaattgaagcaaaaagaatagcaaagcaaaatggtttgccggtgattgagggatctgaaagtggagtaaaaaatgtggatgaagcaaaatcaatttgtaaaaaaattggctaccctgttttaatcaaagcttctggtggaggcggtggtaaaggaatgaaaattgttgagaatgataataaattaggagaattattttcattagcacgtctagaagcaaaaaaatattttggaaacgaagaagtttatattgagaagtattttaaaaatccaagacatatcgaagttcaaattatttctggtaaaaatagaacggttcatctaaatgagagagactgttctgttcaaagaaatcatcaaaaattaatagaagagactcctagtccagtgctagatgaaaaaactaggtcagatttgttaaacaaaacagttaagatggttgaagccttaggttatgaaggagctggtacagttgagtatatatttgaaaatggaaagttttattttttagaaatgaacacaagagttcaagtagaaca

SEQ ID NO: 202950 - DNA, 727 bp, Unknown
  Bacterial polypeptide expressing nucleotide sequence isolated from the Sargasso Sea
gatgttgaaacctgcgaagaaactgcaaaaagtcctgatcgccaaccgcggcgagatcgcgctgcgtatcctgcgcgcctgtaaggaagagggcatcaagaccgtcgctgtttactcgacggccgataccgaattgatgcacgtgaaactagcggacgaaagcatctgcatcggcccgccactggccacgaactcgtacctgaaagtctcgaatatcatcgccgcggcagaagtgaccggcgccgatggcatccacccgggctacggcttcctcgcggaaaacgccgacttcgccgaacaagtggaaaaatccgggtttgccttcatcggcccgaaagccgaaaccattcgcctgatgggcgacaaggtctcggccaaggacgccatgatcgcggccggtgtgcccaccgttccaggctccgacggcccactgcctgaagacgaggaaaccgctctgcgcattggtcgcgaagtcggctacccggtgatcatcaaggccgccggtggcggtggtggtcgcggcatgcgcgtggtgcacaaggaagaagacctgatcgaagccgccaagcagacccgctccgaagcgggcgcctggttcggcaacccgatggtctacctggagaagtacctgaccaacccacgtcacgtggaggtccaggtactgtccgatggccagggccacgccatccacctgggtgatcgcgattgctcgctgcaacgtcgccac

SEQ ID NO: 202951 - DNA, 579 bp, Unknown
  Bacterial polypeptide expressing nucleotide sequence isolated from the Sargasso Sea
aatgtttaataaaatattgatagccaatcgaggtgaaatcgcttgccgcgtaataaaaacagcaaaacaaatgggaattaaaactgtcgctgttttttcggacgcggacaggaacgctttgcatgtgcaaatggcggatgaggcagtcaatattggaccacctccagctaatcaatcgtacatcgatatagaaaaggtaatttctgcagttaaaaaaagtaatgctcaagctgttcatcctggctatggcttcttatctgagaatgcaaagtttgcgaagtcattatctgatatcggcgtaacgtttattgggccaccggagaatgctatcgaaagtatgggtgacaaaattacatcaaaaaagattgcacaggaagctggagtgaataccgttccaggttacatgggtgtaataaaagacgaagatgaggcactaagtataagtgagaagatcggttatcctgtaatgatcaaagcttctgcaggcggcggcggcaaagggatgaggatagcctggaacaatagtgaggtgaaagagggttttcagtcctcaaaaaatgaagctgccagcagtttgga

SEQ ID NO: 202952 - DNA, 835 bp, Unknown
  Bacterial polypeptide expressing nucleotide sequence isolated from the Sargasso Sea
tatgaaaaaaatattgattgctaatagaggagagattgctataagaatagcaagaacttgcaatgatttaggcatcaagaccgttggtatattttctgaagacgatataaattccttacatctttcaaaaatggatgaatctttcatgattgatgagaagggggctagtgcttatctgaatatcaagaaggtaattgctgtagctaagcgcgagaaagtagatggcatccatcctggttatggttttttaagtgaaaacccagcttttgcaaaagcagctaaacaagcgaaaataaaatttattggaccctcagaaaaatgtttaactatttttggtgataagtctgaagcaaaaaaattagctctcaagttagatattcctgtagtcaggggaacacaaggaaagacatctttaaaacaagcatcaagtttctttaaagatttaaaacagaactcttctatagttctaaaagctatagcgggtggtggtggaagaggcatgagggttgttaattcggaggcagatttaaaagatgcaatgagcagagcttcctctgaagcaaaatctgcttttgattcatcagatctttacatggaagaatatttaaaaaattataggcatgtagagatccaagtgttgggtgacggtaaagggcaggcaacccatatgcacgaaagggaatgttcgactcaaagaagacatcagaaaattatagaaattgctcctgcacctggaataaaaaaagaactaaaagagaaaatgtttgatgcttcagtagcgttaattaaagcatctaaatatgaaggcttagcgactgtagaatttttgggttat

SEQ ID NO: 202953 - DNA, 394 bp, Unknown
  Bacterial polypeptide expressing nucleotide sequence isolated from the Sargasso Sea
aatgtttaataaaattcttatagctaataggggtgaaattgctgttagggttttaagggcatgtaaagaacttggaatacagacggtatctgtatattcgtctgcagataaaaatgcaatgcatgttaaattagctgatgaaagtgtttgtattggacctgcttcatcactaaaatcttatttaaatattcctgcgataatttctgcttgtgaaatttctggtgcagatgcagtacatccaggatatggttttttatctgagaattttggctttgttgaaaaactagaagcacatggcattaaatttataggtccaaaatctgaacacattaaaatgatgggcgataaaatcttagcaaaagagtcagcgaataatcttgttcttccaattatt

SEQ ID NO: 202954 - DNA, 721 bp, Unknown
  Bacterial polypeptide expressing nucleotide sequence isolated from the Sargasso Sea
aatgtttaaaaaaattttaatagctaatagaggtgaaatagctgtaagaattattagggcatgtaaagagtggggaattcaaacagttgcaatacattcagatgtagataaagaaagtatgcatgttaaattagctgatgagagtgtttgtgttggctcacatcaacctgctaatagttatttaaatattcctgcaatattatcagcaatagaaataacaaattctgaggcagttcatccaggatatggattcttgtcagaaaattttaattttgccagtatgcttgaagaaaacaatataaagtttattggaccatcctcaaaacttattaaaatgatgggagataaaattgaggcaaaaaaaattgcaaaaaaatatggcctacctgttatcgaaggttcagaaggtggtatttcagatttagaaagtggtaaaaagttagctaaagaaattggttttcctatcctaataaaagcagctggtggaggtggtggaaagggaatgaaaattgttaggtctgaaaaagaatttgataacttatttttgactgctaaatcagaagccaaaaagttttttgcgaatgacgaagtgtatattgaaaaattttttcaaaatccacgtcatattgaagttcaggtactttcaggaaaaaatcatacagttcacttacatgaaagagattgctctgttcaaagacgacatcaaaaattaattgaagaa

SEQ ID NO: 202955 - DNA, 730 bp, Unknown
  Bacterial polypeptide expressing nucleotide sequence isolated from the Sargasso Sea
tatgacgcgaaacattcaaaaaatactcattgctaatcgcggcgaaattgccagtcgcattattcgaaccgcacacaagctgggcttttttaccgttgctatttatagcgaggctgaccgcaacgcgctgcacgtacagcaggctgatgaagctgttttcgttggtcctgccgatcctacatcgtcgtatcttcacagtgaaaaagtgataaacgccgcaattcaaacacaggcagatgctatccaccctgggtatggctttttatcagaaaatgctgacttcgcacgtgcatgtgaaaaagctggcttaacctttattggccctaacgcagacgccatagccttaatgggtagtaagcgtttgtcaaaaatagccatgctgcaggctaatgttccctgtattccaggctatgaaggtagcgaccaaagtgacgaggcactcattgaaaatgcccaaaatattggctttcctttaatggtgaaagccagcgctggtggtggcggcaaaggtatgcgtttagtgcatgaagccagtgatttggcagctcatatttctacggctcgctctgaggccttaaacgcatttggaaatgacgaacttattttagagcgtgcgttaattgcgcctcggcatatagagattcaaatttttgcagacggctgcggcaacacgctttatttaggtgaaagagattgctcaattcaacgccggcatcaaaaagtgattgaa

SEQ ID NO: 202956 - DNA, 1339 bp, Unknown
  Bacterial polypeptide expressing nucleotide sequence isolated from the Sargasso Sea
aatgtttaaaaagattttaattgcaaaccgtggggaaattgcagttagagtgatcagagcttgtaaagaatggggaatatcaaccgttgctgtacactctgatgttgatagagaaagtatgcatgtaagaatggctgatgaaagtgtttgcattggatctcatcaaccttccaatagttatttaaacatcccagcacttatgtcagcaattgaaataacaaattcagaagctgttcatcctggttatggttttttatcagaaaattctaattttgctcgaattcttgaacaaaataatattaaatttattggtgcatcctcaaaattaattgaaatgatgggagacaaaattcaagcaaaaaaaattgctaaagaacatggtcttccagttattgaaggatccgaaggtggtgttaaagatattaatgaagcaaaattgctttgtaaaaaaattggttttcctgttttaattaaagcgtctggaggaggtggaggaaaaggtatgaaaattgtttataaagaaaaagattttgaaaccttattttctacagcaaaatctgaagcaatgaaatattttggtaatgatgaagtttacattgaaaagttttttcaaaacccaagacatatagaagtgcaaatattagcaggaaaaaacagaactgttcatttacatgaaagggattgttctgtccaaagaagacatcaaaaactaattgaagaaacaccaagtccagttttaaacgatgaaattcgaaaagatttatttgataaaaccgtaaaaatggtaaataaaattggttatcagggtgctggtacagttgaatttatttatgaagatggaaaattttactttttagaaatgaatacaagagttcaggtagaacacccggtaactgagatgattactggtatagatatcataaaagaacaaatttggatagcttttacaggtgaaactgctttaaaacaaacagatattaatcctagaggtcatgcaattgaatgtagaataaatgccgaagatccaagtaaaaattttcaaccctctcctggtactattgttatgtgtcatcagccctctggttttagaactagagttgatggtgcgatatttcaaggttataaagtaactccattttatgacagtatggtttgtaaattaatatgtcatggaagaaacagaaaagaagcaattcaaagaatgaataggtcattagatgaatttgtgattgaaggtattacaactacaatcccattacataaaaaattattaaatcataaaaaatttatcaattcagactttaatgtaagttggctagataaagaaaaaattatttaa

SEQ ID NO: 202957 - DNA, 1339 bp, Unknown
  Bacterial polypeptide expressing nucleotide sequence isolated from the Sargasso Sea
aatgtttaaaaaaatattaatcgccaatcgaggtgagattgcagtaagagtcattagagcatgtaaagaatggggaattccaacagtagctattcattctgatgttgatagagatagtatgcatgtaagattagctgatgaaagtgtatgtgtaggaactcatcagcctttaaatagttatttaaatattccagctataatgtcagcaattgaactcacaggagcagaagctgttcatcctggttatggttttttatctgagaattcagatttcgcaaaaattttagaagattataaaattaaatttattggaccttcttcaaaattaattgaaatgatgggtgataaaatacaagcaaaaaaaattgctaaagaatacggtcttcctgttattgaaggttcagatggaggagtaaaagataaaaaatatgcaaaagaaatatgtgaaaaaattggttttccagttttaataaaagcttctgcaggtggagggggcaaaggtatgaaaatagtttacaaagaatctgaatttgatgacttgttcgccacagctaaatcagaagctcaaaaatattttggaaatgatgaagtatacattgaaaaattttttcaaaatccaagacacatagaggttcaagttttatcaggtaaaaatagaactgttcacttacatgaaagagattgttctgtgcaaagacgtcatcaaaaacttatagaagaaactccaagtccaattctaactgatgatataagaaaagatctttttgaaagaacagtgaatatggtaagtaaaattggatatgaaggagctggaacagttgaatttatttatgaaaatgaaaaattttattttttagaaatgaatacaagagttcaagtagaacatccagtttctgaaatgattacaggtattgatataattaaagaacaaatttggatagcttttactggtaatactgctttaaagcagagcgatgttgttccaagaggacacgctatagagtgtagaattaatgcagaagatgctagcaaaaattttcaaccttctccaggcactataggtatgtgtcatcagccttcaggttttagaactagagttgatggatcaatatttcagggttataaagtcactccatattatgacagtatggtttgtaaacttatttgtcatggcagaaatagaactgaagctattcaaagaatgagaaggtctttggatgaatttgtaatagaaggtattacgacaactatagatttgcataaaaagttattagatcatccaaaatttattaaatctgactttaatgtttcctggctagataaagagaaaattatttaa

SEQ ID NO: 202958 - DNA, 728 bp, Unknown
  Bacterial polypeptide expressing nucleotide sequence isolated from the Sargasso Sea
catgctagacaaaattctaattgcaaataggggtgaaatagcactcagaattcaaagagcatgcagagaattagggattaagactgtagcggttcactccactgcagacgatagtcagaaacatgtctttctagcagacgaatcagtatgcattgggcctccagaatcactgaaaagctatctaaatattccttcaataattagtgcagctgaggtcacagatgcaatggctattcaccctggctatggcttcttggcagagaatggtgattttgcagagcaagttgaacaaagtggttatattttcataggcccaaaatctgaaaccataaacctaatgggcaataaaatcagtgcaaaagaaattgtaggcgaggttggaatacagtgtattccgggttccgatggcaaattggatgatgacattgaaaaagttcataagctcgccgatgagattggttaccctgtattgattaaagctgctgctggtggcggaggcaaaggaatgagagtcgctcacacaaaaggagcgcttcagcatacgattgatctcacaaaaatagaatcgaaagctgcatttggtgacgatacgatcttcttggagaagttactggaagaaccaaggcatgtagaatttcaggtaattgcggatcatcatggcaatgcagtatgccttggagatagagattgctccatgcaacgaaaccatcaaaaaatcatagaagaag

SEQ ID NO: 202959 - DNA, 1099 bp, Unknown
  Bacterial polypeptide expressing nucleotide sequence isolated from the Sargasso Sea
atgtttaaaaaagtattgatagctaacagaggtgaaattgctgttagaataataagagcgtgcaaagaatggggtattggaactgtagcagttcattcagatgtggactcggatgctatgcatgtaagattggcagatgaaagcgtttgcataggttctcatcagcctcaaaatagttatctaaatatctcttcaattatgtctgcggtagatttaactaatgcagaagctattcatcctggatatggttttttatctgaaaatgcaaaatttgctgaaatggttactaaacatggaattaaatttattggaccaagtgctgatttaatttctaaaatgggagataaaattgaagcaaaaagaatagcaaaaaaatatggcttgccgataatcgaaggttctgaaggaggagttaagtcattttctgaagcaaaatctatatgtaaagacattgggtatccagtattaataaaagcagcaggtggtggtggtggaaaaggaatgaaaatcgttgaagaagaaagtcaattagaaaatttatttttaacagcaaagaatgaagctaagaaatattttggtaacgatgaattatatatagaaaaatattttaaacatccaagacatattgaagtacaaatcatgtctggaaaaaataaaactgtacacctaggtgaaagagattgttcagttcaaagacgacatcaaaaattaattgaagaaactccaagcccggtactaacaaatgagcaaagaaaagacttattggaaaaaacagtaaaaatggttgaacaaattggttatgaaggcgctggaacagtagagtttatttatgaaaatgggaaattctactttctagaaatgaatacaagagttcaagttgaacatcctgtgacggaagttcaaacaggaattgatattgtcaaagaacaattgtgggtagcttttacaggtgaaactgccttgaatcaaaacgatatagatcccagaggtcactctattgaatgtagaataaacgcagaaaacccagctttagattttcaaccaagtcctggaacaattagtgtatgccatcaaccatctggttttagaactcgagtag

SEQ ID NO: 202960 - DNA, 1369 bp, Unknown
  Bacterial polypeptide expressing nucleotide sequence isolated from the Sargasso Sea
atgtttgaaaaaatcctcattgccaaccgcggtgaaatcgcgctgcgcatccagcgtgcgtgccgtgagctcggcgtcaagacggtggtcgtctactcggaagccgacaaggaagccaagtacgtgcgcctcgcggacgaagccgtctgtatcggcccggccccgtcgaacctgagctacctgaacatgccggcgctgatcagcgccgcggaagtcaccgatgccgaggcgatccaccccggctacggcttcctgtcggagaacgccgatttcgcggaacgtgtcgagcagtcgggcttcacgttcatcgggccgcgcccggaaacgatccgcatgatgggtgacaaggtcaccgcgaagcagacgatgatcaagaccggcgtgccgtgcgtgccgggctcggaaggcgcgctgccggacgatccgaaggagatcgtcaagattgcgcgcgcgatcggctatccggtcatcatcaaggcggcaggcggcggtggcgggcgcgggatgcgcgtcgtgcacaccgaggccgcgctcgtcaacgcggtcaacatgacccgcgaggaagccggccgtgcgttcggcaatccgcaggtgtacatggagaagttcctcgagaacccgcgccacatcgaaatccaggtgctgtccgacgcgtacaagaacgcgatctggctcggcgaacgcgattgctcgatgcagcgccgccaccagaaggtgatcgaggaagcgccggcacccggcattccgcgccgcctgatcgaccgcatcggcgaccgctgcgcggacgcctgcaagaagatgggctacctcggggcgggcacgttcgaattcctgtacgaaaacggcgagttctacttcatcgagatgaacacgcgcgtgcaggtcgagcacccggtatcggagctgatcacgggcgtcgacatcgtgcaggaacagatccgcatcgcggccggcgagaagctcacgctgcgccagcgcgacatccagttccgcggacatgcgatcgaatgccggatcaacgctgaagatccgttcaagttcacgccgtcgccgggccggatcacgtcgtggcatacgccgggcggccccggcgtgcgcgtcgattcgcatgcctacaatggctatttcgtgccgccgaactatgattcgatgatcggcaagctgatcacctacggcgcgacccgcgagcaggcgatcagccggatgcgcatcgcgctgtcggaaatggtcgtcgaaggcatccagaccaacatcccgctgcaccgcgagctgatgatcgattcgaagttcgtcgaaggcggcaccagcatccactacctcgaaaaccggctcgcccagaagcagcaggtcgcaccggaagaagcgtaag

SEQ ID NO: 202961 - DNA, 1114 bp, Unknown
  Bacterial polypeptide expressing nucleotide sequence isolated from the Sargasso Sea
ggctattcaccctggctatggcttcttggcagagaatggtgattttgcagagcaagttgaacaaagcggttatattttcataggcccaaaatctgaaaccataaacctaatgggcaataaaatcagtgcaaaagaaattgtaggcgaggttggaatacagtgtattccgggttctgatggcaaattggatgatgacattgaaaaagttcataagcttgccgatgagattggttaccctgtattgattaaagctgctgctggtggaggaggcaaaggaatgagagtcgctcacacaaaaggagcgcttcagcatacgattgatctcacaaaaatagaatcgaaagctgcatttggtgacgatacgatctttttggagaagttactggaagaaccaaggcatgtagaatttcaggtaattgcggatcatcatggcaatgcagtatgccttggagatagagattgctccatgcaacgaaaccatcaaaaaatcatagaagaagcacctgcaccaaaaattccgaagaagttaagagatgagatgttcaaaaaatgtatcgctttttgtaaacacatcaaatatcgaggcgcaggaacacttgaatttctctatgaaaatggtgaattttatttcattgaaatgaacaccaggcttcaggttgaacatccagtaactgagatgattactggcatcgatattgtaaaagaacaaatcaaaatcgccatgggattacctctttcaattaaacaagaggatattacagaaaaagggcatgccattgaatgcagaatcaatgctgaagacccgaaaacatttatgccctcacctggaaagatagacttatggcatcctcccggtggaccaggaattcgggttgatagccatatttataccggctatgaaataccgccatattatgattctatgatcgcaaaagtcattgcgttcgcaaatacaagagaatccgccataactagaatgggggttgcactttctgaaatgattattgaagggattgaaacaaatagagatttacaaattgagatcatgcaacacaatgcttttaaagacggcggtacaaatattcattatctcgaaaaaagattgggtctttag

SEQ ID NO: 202962 - DNA, 1203 bp, Unknown
  Bacterial polypeptide expressing nucleotide sequence isolated from the Sargasso Sea
catgctggaaaaggtcgtcattgccaaccgcggcgagattgctctacggattctgcgcgcctgcaaagagctaggcattcgtaccgtagcggtttactcgaaaccggaccgggatctaatgcatgttcgtcttgctgacgaagccgtgtgcattggtcccgcttcatccgccgattcatacttgaacattcccgcgctgatcagcgccgccgaagtgaccgatgccgacgccattcacccaggctatggctttctggcggaaaatgcagactttgctgaaagcgtagaacgctccggcttcacctttatcggccccaaggcagacactattcgcctgatgggcaataaggtagccgccattgaagccatgaaaaaagcgggtgtgcccaccgtaccgggctccaacggccccatcggcgacgatgatgaagcctcactggccatggccgaacaaatcggctacccggtgatcatcaaggccgcagcaggcggcggcgggcgcggcatgcgtgtggttgatgaagcaaaacagctgctaaacgccatcaccctgacccgctccgaagcgaaaaatgcctttggcgacgccaccgtctacatggagaaattcctgcagcaaccacgccacgtggaagtgcaagtgctggccgatggtgccggccatgcaattcacttaggcgaccgtgattgctccttgcagcgccgtcaccagaaggtggtggaagaagctccggcacccggaatccctcagcatctaaaagaagaagtcgccgagcgctgcgttaacgcctgtaaagaaatcaattaccggggtgcgggcaccttcgaatttctctacgagaatgaaggcttctacttcatcgaaatgaatacccgtgtacaggtagaacaccccgtcaccgaaatggttaccggggtggatattgtcaaggaacaattgcgtatcgccggcggtgaaggcctgcaaatccagcagtccgatgtacaattccagggccatgccattgaggttcgcgtcaacgcagaagacccggtacggtttaccccctgcccgggcaaagtcacctacttccacgcccccggtggcaatggcgtacgagtcgattcccacatctacagtggttacactgttccgccatactacgactccctgatcggcaagctgatcacttgggggggaaatcgcgagaccgccttctcccg

SEQ ID NO: 202963 - DNA, 430 bp, Unknown
  Bacterial polypeptide expressing nucleotide sequence isolated from the Sargasso Sea
aatgtttaagaaggtattaatagctaatcgcggggaaatagctgtaaggattattagagcgtgcaaagaatggggtattgggactgttgctgtacattctgatgttgactctgacgctatgcatgtcagattagctgatgaaagtgtttgtataggatctcatcacccgcaaaatagttatttaaatatctcagcgattatgtctgctgttgatttgactggggctgaagctattcacccaggatatggatttttatcagaaaatgctaaattttcagaaatcgtaaaaaaacacggtattaaatttatcgggccaagtgcagaaataatttcaaaaatgggagataaaattgaagctaagagaatagcaaaaaaatttggtctacctataattgagggctctgaagggggcgtaaaatcactttctgag

SEQ ID NO: 202964 - DNA, 1318 bp, Unknown
  Bacterial polypeptide expressing nucleotide sequence isolated from the Sargasso Sea
aatgtttaaaaaagtattgatagctaacagaggagagattgctgttagaataattagagcatgtaaagaatggggtattggaactgtagcagtacactctgacgtggactcagatgccatgcacgtaaggttagctgatgaaagtgtttgtataggatctcatcaacctcaaaatagttatctaaatatttcatcaattatgtctgccgtagatttgactggagcagaagctattcatccaggttatggttttttgtctgagaatgctaaatttgcagaaatagttagtaaacatggtattaaatttgtagggccaagcgctgacttgatttctaaaatgggagataaaattgaagcaaaaagaatagcaaaaaagtatggtttaccaataatcgagggatctgaaggagcagtaaaatcattttcagaagcaaaatctatatgtaaagaaattgggtatccggttttgataaaagctgcaggtggtggaggtggaaaaggaatgaaaattgttgaagaagaaggtcaattagaaaatctatttttaaccgcaaaaagtgaagcaaaaaaatattttggtaatgacgagttgtacattgaaaaatattttaaacacccgagacatattgaggtacaaattatgtctgcagaaaataaaactgtacatttaggagaaagggattgttcagtacaaagacgacatcaaaaactaattgaagaaactcctagtccagttctaacagataagcaaagaaaagacttattagaaaaaactgtaaaaatggtggaaaaaatcggttatgaaggtgctggaactgtagaatttatttatgagaacggaaaattctattttttagaaatgaacacaagagttcaagttgagcatcctgttactgaggttcagacaggcattgatatagttaaagaacaattgtggatagcatttaccggaaaaactgctttaaaacaaagcgacatagatccaaggggtcattctattgaatgcagaattaatgcagaaaatccagctttagattttcaacctagtcctggattgattagtgtatgccatcagccatctggatttcgaactcgagtggatgggtcaatctttcagggatgtaagataactccttactatgatagtttaattgcaaaagttatttgtaaaggaagaaatagagaagaagcaattcaaagaactttgagatctttagatgagtttgttttagaagggattacaacaactatagatcttcataaaaaaatattaaatcataaaaaattttttaactcagattttgacacaaattggttg

SEQ ID NO: 202965 - DNA, 493 bp, Unknown
  Bacterial polypeptide expressing nucleotide sequence isolated from the Sargasso Sea
aatgtttaaaaaaattcttattgcaaatagaggtgaaattgctgttagggtaattagagcatgcaaagaatggggtattgatactgtagctgttcactcagatgttgacaaagatagcatgcatgtaaaacttgctgatgaaagtgtgtgtattggttcacacaatccagctaatagttatttaaacattccagctattctgtctgctatagaacttacaaatgctgatgctgttcatcctggatatggtttcttatctgaaaattatgaatttgcaaaaatgttagaggattataatataaaatttattggaccatcatctaaacttataaagatgatgggagacaaaattcaagcaaaaaaaattgcaaaagattatggtttacctattattgagggttctgacggcggaataacagatattgaggaggctaaaaagttatgtaataaaataaaataccctgttttaattaaagctgcgggtgggggtggc

SEQ ID NO: 202966 - DNA, 575 bp, Unknown
  Bacterial polypeptide expressing nucleotide sequence isolated from the Sargasso Sea
aatgtttaaaaaactacttatagcaaatagaggggagattgcctgtagaattgcggccacagcacgtagaatgggtattcgaactgtggcgatttactctgatgtggatcgggatggtttgcatgttgaagcttgcgatgaggcggttgctataggtggaacaagttcagcagactcgtatctagaaatagataaagttctgagcgcggcaatcgaaacagagagtgacgcgatacaccccggatatggatttttatccgaaaacccagtatttgcaaaagaatgtgctgccgcaaaaattatttttgtcgggccgccggcgacagcaattgaggttatggggtccaaatcaaaagccaaaaaacttatggaatcggcaggtgtgccgctagttcctggctatcatggcgaagaacaagaggtttcatatctatcgcaaaaagctaatgaaataggttttccggtactcgtgaaagcaagtgcgggtgggggtggaagggggatgcgtatcgtagaaagtcttgacgatctagagactgcggtaaactcgtctaagagggaagctaaggcggcgt

SEQ ID NO: 202967 - DNA, 394 bp, Unknown
  Bacterial polypeptide expressing nucleotide sequence isolated from the Sargasso Sea
atgcttagtaaacttttaatcgccaatagaggcgaaatagcacttcgtattctaagagctgcaaaagagttaaaaattccaactgtcgcagcttattcagaagctgataaagatctgatgcatgtgaaaatggcagacgagtctatttgtataggaccagcagattcttctcaaagttacttaaacataccagcgataatcagtgccatggaactgtcagggtccgatggtgtacatccagggtacggttttctctcagaaaatcctgattttgcagaaaaagttgaaaaaagtggctttgattttgtgggtccttcagcgtcagtcattagaatgatgggaaataaggtttctgcaaaagaatttcccttaaaatctggcctgcccattgttc

SEQ ID NO: 202968 - DNA, 1110 bp, Unknown
  Bacterial polypeptide expressing nucleotide sequence isolated from the Sargasso Sea
aatgtttaaaaaaattttaattgcgaaccgtggggaaattgcggttagaattataagggcatgtaaagaatggggtatagcaactgtagcagtccattctgatgttgatagagaaagtatgcatgtaagaatggcagatgaaagtgtctgcataggttctcaccaaccaactaatagttatttaaatattccagcattgatgtctgcaatagaactgactaatgcagatgctgttcatccaggatatggtttcttatcagaaaatgctaactttgctaaaattttagaagagaataaaattaaatttattggtgcatcttcaaaacacatcgaaatgatgggagataaaattcaagccaaaaaaatagctaaagaaaatggtttaccagttattgagggatctgaaggcggtgttagggatgttaatgaagcaaaagatctttgtaaaaaaattggttttcctgttctaattaaagcttctggcggtggtggtggaaaaggcatgaaaatagtgcacaaaaaagaagaatttgaaaccttgttttctacagctaaatctgaagcacaaaaatattttggtaatgatgaagtgtacattgagaaattttttcaaaatccaagacacatagaagtgcaaatactagcaggaaaaaataatgttgtacatttgcatgaaagagattgttctgtccaaagaagacatcaaaaacttattgaagaaaccccaagtcctgttttgaatgatgaaattagaaaagatctttttgaaaaaactgtaaatatggtatctaaaattggttatatgggtgccggtaccgtggaatttatatatgaagatggaaaattttattttctagaaatgaatacaagagttcaagtagaacatcctgttacagaaatggtaacaggaattgatattattaaggaacaaatttggatagcattttctaatgaaacagcattaaaacaaagtgatattaatccaaggggtcatgctattgaatgcagaataaatgctgaagatgctagtaaaaattttcaaccctctccaggagttataaatatgtgtcaccaaccatctggatttagaactagagtagatggtgctat

SEQ ID NO: 202969 - DNA, 859 bp, Unknown
  Bacterial polypeptide expressing nucleotide sequence isolated from the Sargasso Sea
atgagtgaaattaaaacttttaaatctcttcttgtagctaatagaggggaaatagcttccaggataataaagacagccaatgatattggtttaaaaactattgctgtatatactgatgcggacgctatgtctcctcatgtaagtatagctaacgaggcaataaatattggcgcaggaccaattggcgattcttatctttctattaaaaaaattattgatgtggcaaaaaaagcaggtgccgacgctatacatcctggatatgggtttttgtcggaaaatcataatttctcagaggcgtgcaagagttcagggatagtttttgtaggaccgtctccgaaatctatagaattgatgggtaataaagctcaagcgaaaagaataatgaaaaatgctggtgttccttgtgtgcctggagaggaagtagaaaataaaaacgacagagaacttattatctctgcagaaacaatcggttttcctttaatgataaaagctgctgcaggtggtggtggtaggggaatgcgtcttgtaaataatataacagaattgcaaaaaaattgtgagattgctcgatctgaagctgaaaatgcttttggttcttcagaaataatatttgaaaaagctataattgacccgcggcatgtggaaatccaaattatggcagacaatttcggcaatgtaatttctttgggtgaaagagattgctctgttcaaagaaggcaccaaaaaattattgaagaaagcccttctcctgcggttgacgatgatttgaggaagaatatgggggaagtagcatgtgcagctgccaaggaaatcaattattcaggagcgggcacggtagagttcttgttagatgaaaata

SEQ ID NO: 202970 - DNA, 1078 bp, Unknown
  Bacterial polypeptide expressing nucleotide sequence isolated from the Sargasso Sea
atgtttaaaaaggttctcatagctaatagaggagaaatagctcttagagttattagagcttgtcatgaactagatataaaaactgttgcagtatattcaacagtagacgaactatctcttcatgtcaaatttgcagatgaagctgtatgtatagggcctcctcagagcaaagatagttatctaaatattccaagaatcattgctgcaggtgagattactggtgctgacgcgatccaccctggatatggatttctatctgagagcgctcagttttcacaaatttgcaaagagaatggttttgccttccttggtccaagtcctgatataattgactcgatgggtaataaagcaaaagcaaagcaaacaatgaaacttgcaggagttcctgtggtacctgggggtgatggaatattagatggtccagacgatgcattagataaagcaaatgcgatgggatatccagttatgctcaaagcttcagccggaggtggaggtcgtggaatgaggctagttaaggatgcaaaagacgtcatctctgcctataaatcagcaaatcaagaatctttaacggcatttggtaatggtgacatttatatcgagaaatttattgaaaatccgaggcatattgaggttcaaatacttgctgattcatttgggaaagcaattcatttaggagaaagagagtgttctattcaacgacgtcatcaaaagttaattgaagaatcaccatcaccgctagttgatgaagaaactaggaaaagaataggagatgctgcagtagctggcgctgaagcggtaaattacatcggggttggtacaattgaatttttaatggataaaaataaaaactttttctttatggagatgaacacgcgaattcaagtagagcacccagtaacagaaatggtgacgggtatagatttaataaagcagcagataaaaatgcacgctggagaagtttgcccatccatagaaaattttcagcttagagggcattcaatagaatgcagaattaatgccgaagacccgtcaaaagactttatgccttttcctggagagattaaaaattttcatatgc

SEQ ID NO: 202971 - DNA, 1354 bp, Unknown
  Bacterial polypeptide expressing nucleotide sequence isolated from the Sargasso Sea
atgtttaataaagttctaattgctaatcgtggtgagatagctcttcgtgttataagagcttgtcatgaactaaatattaagacagttgcagtttattcaacagccgatgagtattctcttcatgtaaagtttgctgatgaagctgtatgtattggtccaccaccaagtaaagatagctatcttaatattccaaaaattattgcagcaggtgaaataacgggagcagatgcgattcacccaggatatgggttcctttcagaatctgcacaattttcgcagatctgtgaagataatggttttgtatttcttggccctaatccagaaataattgattctatgggcaacaaagctaaagcaaaacaaaccatgaaagcagctggcgtaccagttgttcctggtggggatggagtgttagatggccctgaggatgcactagataaagccaatgaaatgggataccctattatgcttaaggcttctgctggcggaggtggacgcggcatgcgtctagttaaagatgctgcagatgtgatagcatcatataagtcagcaaatcaggagtccataacagcatttggaaatggtgacatatacattgaaaaattcattcaaaatccacggcatattgaggtccaaatattagcggacaaatatggtaatgctattcatctaggcgagcgggagtgttctatccaacgtcggcatcaaaaattaattgaggaatcaccatcaccattagtagatgatgataccagaaaaaagattggtgatgcagctgtatcaggtgccaaatctgtaaactatgtaggagtaggtacaattgagtttttgatggatagtcaaaagaatttctatttcatggaaatgaacacgcgcattcaggtcgaacatccagtaacagaaatggtaacaggcgttgatctaataaagcagcagatcaagatgcatgctggaaaagaatgtcccaaacttgataatttccaattaagaggacattcaattgaatgtcgtataaatgcagaagacccatctaataatttcatgccttttcctggagagatttctagttttcatatgcctggtggtaaaggcgttcgggttgattcacatgcctatgcaggttatgttattccaagtcaatatgattcaatgataggcaagatcattgttcatgcaaaaaatagagagagggctatcataagaatgcaaagagctttggaagaaaccatcattgatggtccaaaaacaacaataccttaccaaatggctattatgaaagatgaggtttttaaatcaggtgactttgatacaagttttcttgaaacatttaactataacgaagaagaaaattaat

SEQ ID NO: 202972 - DNA, 697 bp, Unknown
  Bacterial polypeptide expressing nucleotide sequence isolated from the Sargasso Sea
aatggataaagattatgacggcattataacaacatcaatcgagagtgtggtaaactggtctaggaaattttcactcttccaatacccatttgttactgcatgctgcggaatggaatacatggcagcagcatgctcgcattacgacatttcccgctttggtgcagaaattccacgcttctcccctagacaagcggatttactatgggtggttggtacaattactcacaaaatgtctcctattttgaagacaatttatgatcaaatggcagatcccaaatgggtaattgcttttgggacatgtgcttcaaccggagggttctatcaaaattattctgttcttcagggaattgaccgtttaattcctgtagacctttatattgctgggtgcccaccccgccctgaagcagtacttgacggacttattgaactgcagaacaacattcaaaaagaaggtccaaaaccaaatgggattgctccttcagcaatcagacataaagaacagaaaatagaccagcttaatcaatattttgaaatatccaaaaaagaagtctttgaaaatgttcaaaatcccaagagtaaccgcataagtaaacctggatttgcatattcaaaagattttgtcaattccagtccacatattggctatgactcccctgaattgcagaaaaaaaagaacgaaataaaagaaaaaacatga

SEQ ID NO: 202973 - DNA, 2455 bp, Unknown
  Bacterial polypeptide expressing nucleotide sequence isolated from the Sargasso Sea
atgaaaaaaattctgattgcaaaccgtggggaaattgcctgtagaattatcgatagttgtaaaaaacttaagtttcactcaatagcagtttattctgatatagataaaaacagtaaacatgtaagaaaagccgatgagtcaattcacatcggtgcatcgaaagctcaagaaagttatttaaatgcagataaaataattgaagcagctaaaaaattaaaagctgacgctattcaccccggttatggctttttagcagaaaacgaaaaatttgcccaaaaagtaattgattctggaattacttggataggacccaaaccaaatacaattgtatcaatgggtaacaaagatgtagcaagagatttagctttaaaaagtaatttacctatttgtccaggcttaaataataaggatttagaaaaagaagatttagaaaaaaaatgtaatgaaattggttttcctattctagtaaaagctagcgcaggtggaggtggaataggaatgcaaattgttaatgactatggagaattaattaaatctgtagaaaaaacaaaaaatttagctaagaaagcttttggtaacagtgatgtttttttagaaaagtttataaaaaatgcaagacacatagaaatacaaatatttggttttggtgaaaagaaagctgtacatttttttgaaagagactgttcaattcaaagaagatttcaaaaaattatagaagaaagtcctgcaccaaagatagatgaaaaaatcttaaatgaaatggcacaaagtgcagtaaactttgcaagtaatcaaaattatgaaggtgctggaacgatagaattcatctacgatgtggacgaaaaaaaattctactttttagaaatgaatacaagaatccaagtagaacatcctgtaacagaaagtataactaattcagatctagtagagatgcaaattaagtttgcattaggtattgattttgatttaacagaacaaaataaaattaatagaaacggtcatgcagttgaatgtagattgtatgcagaagatccttcaaaaaactttctcccatctccaggaaaaattacaaaactaaaaattccaaatgtaggcttaacaaatattagattagatattggtgttgatgagggagatgaaatatctttttattacgacccaatgatagcaaagataatttctaaaggtgcaaatagaactgaaagtattaacaacatgataaattttttaaaagattttgaaattgaaggtattaaaacaaataaatcttttttgatatctgttcttcaaaataaaacttttgaggatgcagactttaatacaaaatttattgaaaataatttaactttatttaaagaaaaaaaagaaattaaactaaaagacaagcagcaaaataaaaataatgaacaaaaatatagcgacaaagatgtaaaagcatttgaaaaaattatttcaaaaactccaaaaattaaaaatggtcaagattatacagataaagatttaaaagaatttgaaaatatagtttcatcaaaaaataataagaagaaaactgatgagaaaactgaagtaaataacgttccaggcaaaatttacgatactcctaagttcttacctgctggtgataaatatatgcttattgagtttggaaacgtaatgaatttagagctaaattttaccgctcaaaatctagcaaaggcaataaaagaccacaaagttaaaggcgtttacgaaacatctccctgttttgcttctatgatagttcattatgaacctgaagaaataaaatttaatgaattaaaaaatgaacttatatccttaatcaactcactaggaccttcagatgaaatagaaataaatagtagaatcttttcttttccaactgtttatttagataaatggacaaaggaatgtattgaagattattcaaataaaatagctaaaaagaaacctgatcctgaacttataacagaattaaataatcttgaaaatattgatcaatttgtaagagttcattcaagtacagaatattgggtggcagcaataggtttttggccaggtcttccgtttatgatggcccttgatccaagatgtaagctgactgttccaaaatataaccctccaagaacttggactccaaaaggaactgttggaatgggtggtgcttcaacttgtatttatccagatcgtctaccaggtggttatcaaatttttggaattatccctgttcctatatgggacaccaaaaaaagttttccagtatttgaaaataatatatgtctttttcaacctggtgacagagtaaaatttgtacctactacttatgaagagtttgaccatgtatcaaacaaaataaaagacggaacatataattataacattgttgaatatcaaaaattttcagtaaaaaattataaaagttggttaaaaacgattgaccattcaaagaggttttaaa

SEQ ID NO: 202974 - DNA, 499 bp, Unknown
  Bacterial polypeptide expressing nucleotide sequence isolated from the Sargasso Sea
atgaagcctcaaactgcttcaggtctttttcaaaaaatcctgattgcaaaccggggagaaatcgcctgcagaatcatcaggacttgtcaaagtttaggggtttccacggttgcagtctattctgaagccgatcaggatgctttgcatgtgaggcttgccgatgatgccttccatattggtaaagccgtccctgaggactcctatctcaaccatgagcggatccttgaaacagcaattcaatgccaagccgatgccattcatcctggttacggttttctcgcagaaaatgatatttttgccgaggcatgtctctccaaagggatcaatttcatcggcccacgccccgaatccatccgtgagatggggtcaaaatcccgtgcaaaacagcttatgcaggaagccggagttccagttgtccccggctatcacggagaccagcaggacttcaaaattctaagtaatgaagcagaaaaaataggatttcctatattgatcaaac

SEQ ID NO: 202975 - DNA, 778 bp, Unknown
  Bacterial polypeptide expressing nucleotide sequence isolated from the Sargasso Sea
aatgattaacaaactattaattgctaatagaggcgaaattgccctacgcatattaagagccgctaaagaattaaagattcctacagtagcagcttactctgaagcagataaagatcttatgcatgtcaaaatggcagatgagtcaatatgcattggtcccgcagattcttctctaagctatctcaatattcctgcaattataagtgctatggaattgtctggtgctgatggagtgcatccaggatacgggttcttatcagaaaatccagattttgctgaaaaggttgaaaaaagtggatttgattttgttggaccttcagcatctgtaataaggatgatgggcaataaagtatctgcaaaagaatttgccttagaggcaggcctgcctattgttcctggttcatcaggacctattgaagaagatactcataataaggctgaagaaattggttatccgataattattaaagctgcttcaggtggaggaggcagaggaatgagaatagtaaactcgagagaggatttagaaagtgcaattgaactgactcaacaagaagcagcaattgcctttggggactcgaccgtatacatggaaaaatttcttgagaaccctagacacatagaagtgcaagtaatggctgataggcatggcaatgttttacaccttggagacagagattgctctttgcaaagaagacatcaaaaagttattgaagaagctccagctatcaacagtgatgaagaaaaaagacaagaaatttatgctaagtgtatagag

SEQ ID NO: 202976 - DNA, 782 bp, Unknown
  Bacterial polypeptide expressing nucleotide sequence isolated from the Sargasso Sea
aatgttcaaaaaagttttaatagcaaatagaggtgagattgctgtcagagtaattagagcttgtaaagaatggggcattggaactgttgctgttcattcagatgtagatgctgactctatgcacgtaagactagcagatgagagtgtttgtattggttctcatcaacctcagaatagttatttaaatactgccgctatcatgtcagcagttgatgtaactggtgctgaagcaattcacccaggatatggatttttatcagaaaattataaatttgcagaaatagttgaaaaacataatgttaagtttattggacctaaagctgagataattaaaaaaatgggtgataaaattcaagcaaaaataattgccaaagaaaaaggtttgccagttattgagggttctgatggtggtgttaaagatttaaagcaagctaaagaaatttgtaaaaaaattggatattcagttttaataaaagcatctggtggtggtggtggaaaaggaatgaaaatagttgaagaggaaaataaattaagtgaaatgtattctttggcacgattagaggcaaaaaaatattttggaaatgatgaagtttacattgagaaatattttaaaaatcctagacatattgaagttcaagtattgtcaggaagaaatagaactgttcaccttaatgaaagagattgtagtgttcaaagaaaacatcaaaaattgattgaggaaacaccaagcccggtcttagatgataaagtaagatctgatctgttagataaaacaataaaaa

SEQ ID NO: 202977 - DNA, 740 bp, Unknown
  Bacterial polypeptide expressing nucleotide sequence isolated from the Sargasso Sea
aatgtttaaaaaaattttaattgctaaccgcggggaaattgcggttagaattattagagcatgtaaagaatggggaatatcaactgttgctgtccattctgatgttgatcgagacagtatgcacgttagacttgctgatgagagtgtctgtataggctcccaccaacctcaaaacagttacctaaatatacctgcattgatgtctgctatagagctaactaatgctgaagctgttcatcctggttatggttttctttcagagaatgcaaattttgcaaaaatattggaggaaaataaaattaaatttattggagcttcttctgaattaattgcgatgatgggagataaaattcaagcaaaaaaaattgcaaaagaaaatggattacctgttattgaaggttctgagggtggtgtaaaagatatagctcaagctaaagaactttgtaaaaaaatcggttttcctgttttaattaaagcctcaggtggtggtggtggaaaaggaatgaaaatcgtttacaaagaagaggaatttgaaacattattctcaaccgctaaatcagaggcacaaaaatattttggaaatgatgaggtttatattgaaaaattttttcaaaatcctaggcatatcgaagtacagatcttagctggtaagaaccgagttgtgcatcttcatgaaagagattgttcagtccaaagaagacatcaaaaacttattgaagagacacctagtccagttttaa

SEQ ID NO: 202978 - DNA, 577 bp, Unknown
  Bacterial polypeptide expressing nucleotide sequence isolated from the Sargasso Sea
atgattaataaacttctaatcgccaatagaggcgaaatagccttacgtatattgagggccgctaaagaactaaaaattcctactgtggcagcctactctgaagcggataaagatttaatgcacgttaaaatggccgacgaatctatttgtataggtcctgcagactctagtcaaagttatctaaatataccagcaataataagtgccatggaattatctggagctgatggtgtacatcctggatatggctttctctctgaaaatcctgattttgcagaaaaggttgaaaagagtggttttgattttgtgggtccttcaggttcagtcataaggatgatgggaaataaagtatcggcaaaagaatttgctttaaagtccggactacctattgttccaggatcttcaggaccaatcgatgaaaacgttcatgaagaagcagaaaagattggttatcccgtcataattaaagctgcttctggaggcggtggtaggggtatgaagattgtttacaatccagaggaactagacaatgcgatagaacttactcaacaagaatctgctgcagcctttggagatt

SEQ ID NO: 202979 - DNA, 880 bp, Unknown
  Bacterial polypeptide expressing nucleotide sequence isolated from the Sargasso Sea
gatgtttaaaaaagttttaatcgctaatagaggcgaaatagctttaagaatattacgtgcttgcagagagctagaaataaaaactgtagcgatacattctgaagcagatgagacggctatgcatgtacgaatggcagatgagagtgtttgtgttggtcctgcttcagcgcagtcaagctacttaaatattcctgcaattataacagctgcaactatctcaaatgttgatgctattcatccaggatatggttttttaagtgaaaacaaaagatttgcggaaataattgaggaacataatataaaatttataggtcctaaatcagaacatattgaaataatgggaaataaaatagctgcaaaaaaagttatggaagaaaataaggtgcctactgtaccgggactaaatgatatttcagatatgaaaaaagttttagaatttatagataagattaaactaccgataataattaaggcagctagtggtggtggtggtaaaggtatgagagtagtcaataaattagaagacttagaggaatctataaatgcagctaaaatcgagtcaaaaaaatcatttaatgatgacacagtttatttagaaaaattttttgttaatccaaaacatattgaaatacaaattcttgctgattgcaatggaaatgttttaacattaggagaaagagattgctctatacaaagaaaacatcaaaaaatcattgaagaaagtccgagcactgtcttaactaatatggaaagagaaaaaattagcaacctatgtattgatgcaataaagtcaattaaatacgaaggtgtaggaactttagagtttttatatgaaaataatgaattttattttatggaaatgaatacccgactacaagtt

SEQ ID NO: 202980 - DNA, 681 bp, Unknown
  Bacterial polypeptide expressing nucleotide sequence isolated from the Sargasso Sea
aatgtttaaaaaaattttaattgcaaaccgtggggaaattgcggttagaattattagagcatgtaaggaatggggaatatctacagtagctgttcattcagatgtagatagagaaagtatgcatgtaagaatggctgatgaaagcgtatgtattggttctcatcaaccagcaaatagttatttaaatattccagcattaatgtcagcgatagaacttacaaatgctgatgctgttcatcctggctatggttttctctctgaaaatgcaaattttgcaagaattttagaagagaacaaaattaattttattggcgctacatcaaaacacattgaaatgatgggggataaaatccaagcaaaaaaaatagctaaagaaaatggattgcctgttattgaagggtctgaagggggtgtaaaagatgtttctgaagcaaaagaactttgtaaaaaaattggttttccggtcttaattaaagcctcaggtggaggtggaggtaaaggtatgaaaatagtctataaagaagaagaatttgaaacgttgttttcaactgctaaatccgaagcacaaaaatactttggaaatgatgaagtttatattgaaaaattttttcaaaatcctagacatattgaagtacaaattttagcaggaaaaaatagagcagttcaccttcatgaaagaga

SEQ ID NO: 202981 - DNA, 1369 bp, Unknown
  Bacterial polypeptide expressing nucleotide sequence isolated from the Sargasso Sea
atgtttgaaaagattttaattgctaataggggtgaaattgctattagaatcattcgagcatgcaatgagatgggtattaaaactgttgcagtttattcaaaagcagataaaaactcacttcatgtaaagtttgctgatgaagccatttgcattggggaaggccccgctgttgaaagttatcttaatatacctagaataattgcagctggggaaattacaaatgcagacgcaattcatcctggatacggtttccttgctgagaatgcaaagtttagtaaaatttgtaaagaaaatggattcacctttataggaccagattcaaaaatcattgacttgatgggagataaggttaatgctaggaatacagcaaaagatgcaggtttaccaattatacctggaagtaatactttgtcttctgttgaagagcttttagaaattgctgaacaaattggatatcctgtaatgcttaaagccgtagcaggcggcggcggtaaaggtatgcgaattattaataacgcaagtgaagcagagaaaggatttaatattattcaaaatgaagctggaatggcatttaaaaattcagaaatttatgttgaaaaatttgttgaaaatggccggcatattgaggttcagattttgtctgacaaatttggaaatcatcttcatttaggagaaagagaatgttcaattcagagaagtaatcaaaaattaatcgaagaatccccatctctatttgttgatgatgatttaagaaatgatttaactttaaagtctttacagttatcaaaaaaagttaattatgttggtgctggaacaatagagtatttagtagatgataagaaaaacttttactttattgaaatgaatacaagaattcaagttgagcatactgtaacagaaatggtttatatgatcgatcttgtaaaagaacaaataagaacctacgcaggtattgaattgtctatcaagcaggaagatatttgtatgaatggtcatgctattgaatgcagaataaatgctgaagatccatttaatgattttacaccttcaccaaagatgatcgaatctttaaactttgctggaggaattggagtaaggattgactcatttatatatgcaggttatcaaattccaacaaattatgattccatgcttggtaagttgatagttcattcttcatcgagggaaaaagcattagttagaatgaaaagagcacttcaagaaacttttattgatggtcctaaaacaactttaccgcttttagaaatgatttttgaaaataaagactttaataatggaaattttgacataaattttttaggtaaatttttaaaaaataaaaaggaaaaagataatgaatcatcctgat

SEQ ID NO: 202982 - DNA, 612 bp, Unknown
  Bacterial polypeptide expressing nucleotide sequence isolated from the Sargasso Sea
aatgtttaaaaaaatattaattgctaatagaggagaaatagctatgcgtgtcatcaggacatgtaaagaaatgggtattaaaactgtggctgtatattccagagctgatgaagaaagcttacatgtacgctttgctgacgaggctgtgtgtattggacctgctcctagcaatgaatcatatttaaaacctgcaaatataattgcagctgcagaaataacaaatgctgatgcaatccacccaggatatggtttcttatcggagaatagcaatttttcaaaaatatgtgaagagcataaaataaaatttatcggtgcttctcccacgatgatagaggcaatgggagataaatctacagccaagaagacaatgcaaaaagcgggagtacctgttatcccagggtcggatggtatagttccaactcttgaagatgcccaaaatattgctcttgagataggttatccagtaatgttaaaagcaactgcaggaggaggaggtaaaggtatgaggatggcaaatagtccaaatgatttaataaaagcctgggaagttgctagacaagaatcgaaatcagcttttgacaatgatgcaatgtatttagaaaaatttataga

SEQ ID NO: 202983 - DNA, 1223 bp, Unknown
  Bacterial polypeptide expressing nucleotide sequence isolated from the Sargasso Sea
tgaaggagcaatgcatgttaggatggcggatgaaagtatatgtgttggaccagcatcagctcaatcaagctatttaaatatacctgcaattattacagccgctactttaacaaatgttgatggaattcatccaggatatggatttttaagtgagaaccagagatttgctgaaattatagaggagcataatattaaatttataggacctcattctagtcacattaaaattatgggtaataaaattgatgctaagaaaataatggatgagaataatgtgccaactatcccaggtttaaatgacatattcgatagcaaattaattaaagagtttattaaagatgttaatcttccaattatagttaaggctgcaagtggtggtggaggaaaaggtatgagagttgttacaagcgctgaagaaattaacaatgctataaattcagcaaaagcagaagctaaaaaatcttttaatgatgataatgtttatttagaaaaatttctcacaaatccaaagcacatcgaaattcaaatacttgcagatgctcatggaaatataattaccttaggtgagcgtgactgttcaatacaaagaaaacatcaaaagcttatagaagaaagtccaagtacacttttaacaaatgaaaaaagaaaagagattagtgatctttgtaaaaaagccatctcctctattggttatgagggagttgggacactagaatttttatatgaaaatgaaaatttttattttatggagatgaatactagattacaagtagagcatccagtaacagaaatggtaactggtatagatttagtaaaacaacaaattttagccgcctcaggcgaaaaacttaaaatttcgcaaaatgatataaattttaaaggtcatgcaattgaatgcagaattaatgcagaacatccagatagttttattccttctccaggcaagattactcagtatcatcaacctggagggcttggtgtaagagttgaatcagctgtttatcaaggatactctgtaccacctcattatgacagtatgataggcaaacttattacttatgcagataatcgtaaagaatgtattgcaagaatgaacagagctttagaagaatatataattatgggcattaatacaaatattcaacttcatcaaaaaataataatgagtaaagaatttcaatctggaaaatatgacataaactttatgtcaactttcaattgaa

SEQ ID NO: 202984 - DNA, 691 bp, Unknown
  Bacterial polypeptide expressing nucleotide sequence isolated from the Sargasso Sea
aatgtttaaaaaaatactaatagctaatagaggtgaaatagcagtacgtataattcgagcttgcaaagaatggggtatttcaacagtggctatccattcggatgtggatagagaaagcatgcacgtaagattagctgatgaaagtatttgcgttggaccacaccaaccaacgtttagttatttaaatattcctgcaataatgtcagccatcgaactgacaggtgctgaagctgttcatcctggatatggttttctgtcagaaaatttcgagtttgcaaaaatgttagaggaaaataatattaaatttattggcccctcttctagtcttataaaaatgatgggagataaaattgaggcaaaaagagttgctaaggaatatggacttccgattatagagggatctgatggtggaattaaagatattaatgaggcaaaaaaaatatgtgagaaagttggttttcctattctaattaaggcatcaggaggtggaggtggaaaaggaatgaaaattgtaaatagattagaagaatttgaaaatctttttttaactgcaaaacaagaggcaaaaaagttttttggaaacgatgaggtttacattgaaaaattttttcaaaatccaagacacattgaggtacaggtcttatctggtaagaatagaactgttcatttgcatgaaagagattgctctgtc

SEQ ID NO: 202985 - DNA, 301 bp, Unknown
  Bacterial polypeptide expressing nucleotide sequence isolated from the Sargasso Sea
atgaaaaaaatacttattgcaaatagaggagaaatagcctgtagaataattgaaagttgcaaaaaattaaatattcattcaattgcagtttattccgatatagataaaaaaagtaaacatgtaagattagcagatgaagctatacatattggaaattctaaagcacaggaaagttatttatcttcaagaaagattattaatgcagctctgaaaactaaagctgatgctgttcatcctggttatggttttttatcagaaaacgcagaatttgctcaaaatgttattgatgctggacttattg

SEQ ID NO: 202986 - DNA, 376 bp, Unknown
  Bacterial polypeptide expressing nucleotide sequence isolated from the Sargasso Sea
atgcttaacaaagttctaatcgcaaatcgtggagaaattgccctccgggttattcgagcctgccgcgagatgggtataaaatctgttgcagttcattcaacagcggatagtgacgccatgcacgtccgaatggcagacgaaagtgtttgcattggcccagcagcaggaacttcaagttatttatctatgcccgcgattatcgccgcatgcgaaattactggagcggaagcaattcatcctgggtacggatttttgtctgaaaatgcaaaatttgttcaaatagtcgaggatcatgggataaagtttattggtccaacggctgagcatattcgcataatgggtgataaaattacggctaaagacacaatgagagagc

SEQ ID NO: 202987 - DNA, 670 bp, Unknown
  Bacterial polypeptide expressing nucleotide sequence isolated from the Sargasso Sea
catgttcaaaaaaattcttattgctaataggggtgaaattgctataagaatcattcgagcatgtaatgaaatgggcatcaaaactgttgcagtgtattcaaaagcagataaaaattcattacatgttaaatttgcagacgaagctatttgtattggagaaggtcctgcggtagaaagttatcttaatatccctaggattattgctgcaggagaaattacaaatgccgatgccattcatccaggctatggcttcctggctgagaatgcaaagtttagtaaaatttgtaaagaaaatggatttacattcattggtccagatgcagaaatcattgatttaatgggtgacaaagtgaatgcaagaaatgctgccaaagatgctggcgttcccatcattcctggaagtaatattttatcttcagttgaagaatttttagaaattgctgaacaaattggatatcctgtaatgctgaaagctgtagcaggaggcggaggtaaaggaatgcgcgttattaagaatgcaaatgaagcgaaaaaggttttaatatcattcaaaatgaagcaggaatggcatttaataattcagaaatctatgttgaaaaatttgttgaaaatggccgtcatattgaggtccaaattttatcagataaatttggaaatcatcttcaattag

SEQ ID NO: 202988 - DNA, 1339 bp, Unknown
  Bacterial polypeptide expressing nucleotide sequence isolated from the Sargasso Sea
atgtttaaaaaaattttaattgcaaaccgtggggaaattgcagttagaattattagagcatgtaaagaatggggaatatctacggtcgctgttcattcagatgtagatagagaaagtatgcatgtaagaatggctgatgaaagtgtatgtattggttctcatcaaccagcaaatagttatttaaatattccagctttaatgtcagcaatagaacttacaaatgctgaagcggttcatcctggctatggatttctttcggaaaatgcgaatttcgcaagaattttagaagagaataaaattaattttataggagcttcttcaaaacatattgaaatgatgggtgataaaatccaagcaaaaagaatagctaaagaaaatggattgcccgttattgagggctctgaaggaggagtaaaagatatttctgaagcaaaagaactttgtaaaaaaattggttttcctgtcttaatcaaagcctcaggtggaggtggaggtaaaggtatgaaaatagtttataaggaagaagaatttgaaactttgttttcaacagctaaatctgaagcacaaaaatactttggtaatgacgaagtttatattgaaaaattttttcaaaatccaagacatattgaggttcaaatattagctggaaaaaatagagttgttcaccttcatgaaagagactgttcagttcaaagaagacatcaaaaattaatagaggaaacacctagtccagttttaaatgatgaaataagaaaagatttatttgatagaacagtaaaaatggtagctaaaataggttatatgggagctggaacggttgagtttatatatgaagatgggaaattttatttccttgaaatgaatacaagagttcaagttgaacatccggtgacagaaatggttacaggggtcgatataattaaagaacaaatttggattgctttttcaggagaaacagctttaaaacaaagtgatatcaatcctagaggacatgcaattgaatgtagaataaatgctgaagacgcgagtaaaaactttcagccttcacctggagttataacaatgtgtcatcaaccatctggttttagaaccagagtagatggtgcaatatttcaaggatataaagtaacaccttattacgacagcatggtttgtaaattaatttgtcatggcagaaacagaacagaagcaattcaaagaatgaatagatctttagatgaatttgtgattgagggaataactacaacaatacctctccacaaaaaattactgaatcataaaaaatttataaattcagattttaatgtaagttggttagataaagacactatcgtttaat

SEQ ID NO: 202989 - DNA, 977 bp, Unknown
  Bacterial polypeptide expressing nucleotide sequence isolated from the Sargasso Sea
aatgtttaaaaaaatattaatcgccaatcgaggtgagattgcagtaagagtcattagagcatgtaaagaatggggaatttcaacagtagccattcattctgatgttgatagagatagtatgcatgtaagactagcggatgaaagtgtatgtgtaggaactcatcagcctttaaatagttatttaaatattccagctataatgtcagcaattgaacttacaggagcagaagctgttcatcctggttatggttttttatctgagaattcagattttgcaaaaattttagaagattataaaattaaatttattggaccttcttcaaaattaattaaaatgatgggtgataaaatacaagcaaaaaaaattgctaaagaatatggtcttcctgtaattgagggttcagatggaggagtaaaagataaaaagcacgcaaaagaaatatgcgaaaaaattggttttccagttttaataaaagcttctgctggtggtggaggtaaaggaatgaaaatagtttataaggaatcggaatttgatgatttgtttgcgaccgcaaaatcagaggccaaaaaatattttggaaatgatgaaatctatatcgaaaaattttttcaaaatccaagacacatagaggttcaagttttatcaggtaaaaatagaactgttcacttgcatgaaagagattgctctgttcaaagacgtcatcaaaaactaatagaagaaactccaagtccaattctaactaatgatataagaaaagacctttttgaaagaacagtgaatatggtaagtaaaattggatatgaaggagctggaacagttgaatttatttatgaaaatgaaaaattttattttttagagatgaatactagagttcaagtagaacatccagtgtctgaaatgattacaggaattgatataattaaagaacaaatttggatagcttttagcggtaatactgctttaaagcaaagtgata

SEQ ID NO: 202990 - DNA, 1717 bp, Unknown
  Bacterial polypeptide expressing nucleotide sequence isolated from the Sargasso Sea
aatgaagaagttattaaaagcctcaatattattattcggattaagccttttatccccaaactgctgggcttcaggtgatcctgtaaaagggaaatccttatatagtatctgcgttgcatgccatggggctaatggtgagggtcaaaaaataaataatgcccctagaatatctggacaacatgattggtatgttgagcggcagctgatcaattatcgcgacggtataagaggggttcatattgacgatattactggtatgcagatgcgttctatcgccattaccctaaaaaaggatcaggatattgcagatgtcaccgcatatgtttcaacgcttctgtcagagacaccaaaagcgacaatggaaggagatattgttgccggaaaaaacgcttacgccacctgtgctgcctgtcacggagctgatgggaaaggtaacaaggcacttaattcaccaaaaattgcaggtcttcaggactggtacatcgcaagacagctcaatcattttaagatcggtgccagaggtaggctgaaaaaagatataataggtcagcagatgcgtccgatggcaatggcacttgatgaggacgccatcaacaacctcgcagtttatatcgcttccctggaaggagctcctgtaatgtcaagtgctgtagctattgcctcttcaggaagccaaccctccatgtctgacatgatggctgcggcaaagccggctagtctcaacaccagtgaaccgctttattcgacctgtaccgcctgtcatggtgaaaatggggaaggaaaacaatggcttggcgcaccaaaaatttctggtcagcatgattggtacttgaagagacaactcaaaaactggcaggacggcatccgcggaactcatcctaaagacgtttatgggattcagatgcgatcaatgtctatggtcatggctaatgatcaagaaatcgataaagtagtttcctacattggaggtttaaactctcctaaaccccctgccactatcaaaggagatcttcaggctggtcagaatctctatgccacctgcgttgcctgtcatggtcctggtggaatgggaaataaagcattaaattctccaaagattgcaggtcttccagactggtatgttgccaggcaactatggggatttaaaaatggccttcgcggagaaaatccacgcgatgtctatggccaacagatgcgaccgatggcaatggcacttcctgatgaagaagcaatcaataatatttcagcatatatagcaacctttgacggaactggtgaagctccagctattactaccactgtagctgcatccggaactacagacgtatcttcgaccgataccggggccaaggcagtcactgtggctgcagccacctcaggaggttcagccgaagcgggagccgcactttataccacttgcattgcctgtcatggagccgatggtgcaggaaacaaggctctcaattctccaagaattgcaggacaatcggcatggtatcttactaaccagttgaaagggttcaaggcgggttatcgtggttccaagcccgaagatatttacgggatgcagatgcgtccaatgtcgatgactcttgccgacgatcaggcaattgccaatgtggctgcatacatcaccaccctaaacggagcagtttctccagcgaccctggatggaaatgccgaagcgggtaaagggctttatgtcacttgtgtcgcc

SEQ ID NO: 202991 - DNA, 466 bp, Unknown
  Bacterial polypeptide expressing nucleotide sequence isolated from the Sargasso Sea
atgaaatttttacttaaagataatattagtattataaaaaaagttaaggtcgaaagaaaaaaaatagtttttacaaatggttgctttgacttactacatgttggtcatattagatacttagctcaagcaaaaaaacttggtgattttttgattattggtcttaattcagacagttcggtaaaagcacttaaaggtaaagacaggccaatatattcttttgaggatcgagcagttttattatcagcacttacttcagttgatttagttataatatttgaggaactaacgccagaaaatttaataaaagaaatagtgcctgatgttttagtaaaaggaggagattacaatattgaagatattgttggattccaaacagtaattcaaaatggaggtcttgtaaaatctttaagtttttatgatggctatagtactacaaattatattaataaaataaataaaccctaac

SEQ ID NO: 202992 - DNA, 388 bp, Unknown
  Bacterial polypeptide expressing nucleotide sequence isolated from the Sargasso Sea
aaaatccttaaaaaattaactaataattataaaactcagatagtcattcaagagtttttgccagatatttatgatggagattttagggttttgatcattcatggtaaaccatataaaaaaacactagctagaattcctcaagagggaagtttcaagggtaatttagcagcaggaggaaaaggagaggtcagagatatctcagatgtgcaaatgagaataggctcagttgttggtgagtatttaatgaggaaagatatcaattttgcaggcatagatatcattggacagaagttaactgaaataaatatcactagcccaacgtgcgctcgtgaaatttttgagcagtctggtatgaatcctattgaagattattttaaaaaactatgaa

SEQ ID NO: 202993 - DNA, 1118 bp, Unknown
  Bacterial polypeptide expressing nucleotide sequence isolated from the Sargasso Sea
aatgtttaaaaaaattttaattgcaaaccgtggggaaattgcagttagaattattagggcgtgtaaagaatggggaatacctacagttgctgttcattcagatgtagatagagagagtatgcatgtcaggatggcagatgaaagtgtgtgtataggatctcatcaaccagctaatagctatttaaacataccatctttaatgtcagcaatagaacttacaaatacagatgctgtccatcctggatatggttttctttctgaaaatgcaaattttgcaagaattttggaagaaaataaaattaattttattggcgcctcctccaaacatattgagatgatgggggataagattcaagcaaaaaaaatagcaaaagaaaatgggttaccggtaattgaaggatctgaagatggggtaaaagatatttctgaggcaaaagaaatttgtaaaaaaattggtttccctatcttaattaaagcttcaggtggtggtggaggtaaaggtatgaaaatagtttacaaagaagatgagtttgaaacattgttctcgactgcaaaatctgaagcacaaaaatactttggaaatgatgcggtttatattgagaaattttttcaaaatccaagacatatagaggttcaaatattagctggaaaaaatagagtagttcatcttcatgaaagagattgttcagttcaaagaagacatcaaaaactaattgaggaaaccccaagtccagttttaaataacgaaattagaaaagatctgtttgaaaaaactctaaatatggttgcgaaaattggttatatgggtgctggaacagtggaatttatttacgaagatggaagattttattttcttgaaatgaacacaagagttcaagttgagcatcctgtaacagaaatggttactgggattgatattattaaagaacaaatttggattgcattttcaggagaaacagcattaaaacaaagtgatataaatcctagaggacatgctatagaatgtagaattaatgctgaggatccaagtaaaaactttcagccatcccctggggtaatcacaatgtgtcatcagccttcgggatttagaacaagagttgatggagcaatttttcaag

SEQ ID NO: 202994 - DNA, 652 bp, Unknown
  Bacterial polypeptide expressing nucleotide sequence isolated from the Sargasso Sea
aatgtttaaaaagattttaattgctaatagaggtgaaattgcatgcagagtaatcgatacttgtaataaactaggtatagatactgtgtctgtttatagtgatgctgatagtagagctcttcatgtaatgaaagctaaagaagctattaatataggttcagctccgtcttctgagtcttatcttgttattgaaagaattatagatgcttgtaagaaaacaggtgcagatgccgttcatcctggatatggctttctttcagaaaactcttcctttgttaaccaactcgaaagagagggaattacatttattggtcctccctctgaaccaataagagtaatgggtgataaaattgaatcaaagatttttgctgaaaaatcaaatgtaaatataattccaggtcatcaagaaattattaaagattctgaagaagctcttgaaatttcaaaaaaaattggctttccagttatgataaaggcatcagccggtggtggtggaaaaggtatgagaattgctaaagctgaagaagatgttgaggatgcatttaattcatctgttaatgaagcaaaatcaagttttggtgatgatagaatatttatagaaaaatttattgaaaaacctaggcatatagagattcaaattttagctgataat

SEQ ID NO: 202995 - DNA, 856 bp, Unknown
  Bacterial polypeptide expressing nucleotide sequence isolated from the Sargasso Sea
aatgttcaaaaaaattttaatagctaatagaggtgagatagctgtaaggattatcagggcatgtaaagagtggggaattcaaacagttgcaatacattcagacgtagataaagaaagtatgcatgtcaaactagctgatgaaagtgtttgcgttggttcacatcaacctgcaaatagttatttaaatattccagctatattatctgcaatagaaataactaactctgaagcagttcatccaggttatggatttttatcggaaaattttaattttgctagcatgcttgaagaaaataatattaagtttattggaccttcttcaaaacttattaaaatgatgggtgataaaattgaggcaaagaagattgcaaaaaaatatggtttacctgttatcgagggttctgcaggtggtatctcagatttagaaagtggtaagaagctagccaaagaaattggttttcctatcctgataaaagccgccggtggaggtggtggtaagggaatgaagattgtgagatcagaaaaagaatttgataatttgtttttaactgctaaatcagaggcaaagaagttttttgcaaatgatgaagtgtatattgaaaaattttttcaaaatccacgtcatattgaagttcaggtgttgtcaggaaaaaatcatacagtccacttgcatgaaagagactgttctgttcaaagacgacatcagaaattaattgaagaaactccaagtcctgttttaactgatgaaattcgtaaagatctcttcgataggacggttaatatggtatctaaaattggttatgagggagccggaacagtagagtttattatgaagatggtaaattttattttttag

SEQ ID NO: 202996 - DNA, 793 bp, Unknown
  Bacterial polypeptide expressing nucleotide sequence isolated from the Sargasso Sea
attgtttaaaaaaattttaattgcaaacagaggtgaaattgctgttagaattataagagcatgtaaagaacttaatataaaaacggtagctatacattctaacgttgatacagattcaatgcatgtcaaacttgctgatgaaagtatatgtgttggtgactcatcagctaaacagagctacttaaatataccaagcataattagtgcaatagatattactggtgctgatgctgttcacccagggtatggttttttaagtgagaatgataaatttgcaaaaatcttaaaatcacataacgtaaaatttataggtccatcttcaaaatcaattttagatttgggaaataaaagtaatgcattaaaattagcaaatcattacgatttgccaattcttggaaataaaaattcaaagaatataaatgatactgatgaagctttaaaaatagcaaatgaaataggtatgccaatagttattaaagctgcatatggaggaggtggaaaaggaatgagagtattttatagcgataatgaaattaaaaagttttttagccaattaaaaactgaagctaaaaattactttggtaacgacgcaatgtatgctgaaaaatttttgacaaatgcaaaacatattgaatttcaaataatctctgataccaaaaaccaaaatgtagaaataattggacaaagagattgttcaatacaacgaaaaaaccaaaaaattgttgaagaaatcccttctgaatttgtaaaaattaacaaattaaataaaataacaaaaaatataaaaagtctt

SEQ ID NO: 202997 - DNA, 1150 bp, Unknown
  Bacterial polypeptide expressing nucleotide sequence isolated from the Sargasso Sea
caattatttcagcttgcgaaattactgggcgcaaaagcagtccatcctggatacgggtttttatctgaaaatgcgtcatttgctaaaatgcttgatgaccacaaattaacgttcataggcccaaagcattcacatattagtatgatgggtgataagatagaagcaaaaaaaataatgcaagaatacggggtacctacagtgccaggttctgaaggtgaaatcgtagaccttaaagatgcaataaagacttcaaaagatattgggtttcctgttctattaaaagcaagcgctggtggcggtggcagagggatgaaggtggtacatgacgagaaagagttgactgatgctttgcctataataaagcaagaagcactgtctttttttggaaatgactctatatacattgaaaaattcatcgattcaccaagacatattgaaatacaggtaatttgcgacagtcataataattttcttcacttgcacgaaagagactgctcaattcaaagaagaaaccaaaaagtaattgaagaagcgctagctcctgaaatcgatcaagacaaaaaggataagcttttcaaaatatgcatagatgctatgaagaaaatgggctacctaggcttaggcactcttgaattcttatacgctgatagtgaattttattttatggaaatgaatacgaggctacaagttgaacatcctataactgaaatgctaacgagaatcgatttagtgagagaacaaatatgtgtagctgcgggtgacaaaatattcacttcacaagaaaatataaaacccttaggtcactcaatagaatgcagaataaatgcagaaagttcatacgactttaaaccttccgctggaacaattgaaatgtatcacccgccagcaggaaatggaattagattagatacatttatatattctggctataaagttccccattactatgacaatcttttagcaaaacttattgtgactggtaggaccagaaaccatgcaattaaaagagctcttagatcacttaatgaaattgtaattgatggaatcgaaacaaatattgacctacataaaaaaatactctcttcaaatgattttaaaaatggtgctgtacctattaactggctagaaaagaatattgacaaactctaac

SEQ ID NO: 202998 - DNA, 325 bp, Unknown
  Bacterial polypeptide expressing nucleotide sequence isolated from the Sargasso Sea
atgataaaaaaaattctaattgcgaatagaggagaaattgcgtgcagagttatacgtacagcaagaaagttgaatatcaatacggtagtagtttattctgatgctgataaagattctttgtttgtgaaacaggcagatgagtcttaccatataggaggctctcagccagttgagtcttatttagatattaataaaattattaatattgcaaaaaagtcaaaggctgacgcaattcatccaggatatggatttttatctgaaaatgcagcttttgttaaaagactggctaaagagaaaataaaatttattggacccaaatcctaac

SEQ ID NO: 202999 - DNA, 1339 bp, Unknown
  Bacterial polypeptide expressing nucleotide sequence isolated from the Sargasso Sea
aatgtttaaaaaaatccttatagccaatagaggagaaatcgccttaagaatcttaagagcatgtgaagaacttgatataaagactgttgctgtttattcgtcagcagataaagatttaaaacatgtaaagatggcggatgaatccatttgtattggacctgcagaatcagcaaaaagttatctcaacgtcgctgctattataagcgcatcagaactgacggggattgatgctattcatccaggtgtaggttttctctctgaaaacgatcattttgctcaacaagtaacatctagcggatacaaattcatagggccagattcagaaaccataaaagtgatgggaaacaaaatcactgcaaaagaagcagttctatcagctggaatgcagcccgtgccgggcacaggaagaattaactcggaggaagaagcattgaagatggctgatgaaattggctatccagtgataataaaagctgctgcaggaggcggaggtaaaggaatacaaatctgtgagaaaaaagaagaatttttgtcaaaactaagtctcactcaaattgaagccttaaatagctttggaagtgacgaagtttatatagagaaatatctccaaactccaagacatgtagaaatacaagttgccgctgatgatcatggcaatgctgttcatttttttgaaagagactgctcaatccaaagaagaaatcaaaaaatcattgaagaagcccctgcttttgatattcctcaagaaaaattagatgaaataagaaagatagcagtgaacacctgcaaaaagctaaattataaaggtttaggtacttttgaatttctttacgaggatggaaatttttactttattgaaatgaatacaagattgcaggtagaacacacaatcacagaaatgataactgggattgatcttgtaaaactacaaattatgattgctgctggtcaggaaattcctttgtctcaagatgatattaactgccgcggtcatgcaattgaatgcaggataaatgctgaacatcatgaaactttcattccatctcctggcaaggtaactgaattccatcctccaggcggatttaggattaggaccgattctcatctctattctggttacacagttccccaatattatgatgctttgatagcgaaaatatgtgcgcattcaagcgatagaatttctgcaataagaaagatgcgagtagcgctcgaagaaacttatatagagggaataaatacaaatgctcctcttcatcaaagaattcttattgagccaaactttgttgaagaaaaaatctcaataaattacttaagagatattcttaacataaagtaa

SEQ ID NO: 203000 - DNA, 503 bp, Unknown
  Bacterial polypeptide expressing nucleotide sequence isolated from the Sargasso Sea
tatgagatttaattcaattcttgttgcgaatcgtggagagattgcctgtcgaataatgcaaaccgctcaatttatgggtattaaatgtgtagctgtttttgttgatgctgataaggatgcaccatttgtaaagatggctgatgaagctataaagttatcttctggctatatggatggctctgctattattgatgcagctaaacaatctggagcagaagcgatccatccaggatatggttttttatcagaaaatgcagcctttgctagaaaggttaaaagcaataaattaatttggattggtccatcgccccatgtaataaaagtcatgggtgataaattaaaagctaaagaaatagcagaaaaatctggagttcccactttgccaatgacctcaaatactaaagatgttaaaagtattggctatccgatcttgatcaaggctgccgcaggaggtggtggtaaaggaatgcgaattgttgaaaaagaaagtgaattaaaagatt

SEQ ID NO: 203001 - DNA, 1331 bp, Unknown
  Bacterial polypeptide expressing nucleotide sequence isolated from the Sargasso Sea
aaaaatattaatcgccaatcgaggtgagattgcagtaagagtcattagagcatgtaaagaatggggaattccaacagtagctattcattctgatgttgatagagatagtatgcatgtaagattagctgacgaaagtgtatgtgtaggaactcatcagcctttaaatagttatttaaatattccagctataatgtctgctattgaattaacgagtgcagaagctgttcatccaggatatggttttttgtcagaaaatccagaatttgcaaaaattttagaggattataaaattaaatttattggaccttcttcaaaattaattgaaatgatgggtgataaaatacaagcaaaaaaaattgctaaggagtacggtcttcctgttatcgaaggttctgatggtggtgtaacagataaaaaacatgctaaggaaattagtaaaaaaataggttttcctgttctaataaaagcctctgctggtggagggggaaaaggaatgaaaatagtttacaaagaatctgaatttgatgacttatttgctacagctaaatcagaagctcaaaagtattttggaaacgatgaaatttatattgaaaaattttttcaaaatccaagacatattgaggttcaagttttatcaggtaaaaatagaactgttcatttacatgaaagagactgctctgttcaaagacgacatcaaaaattgatagaagaaacaccaagtccaattctaaatgataaaataagaaaagatctttttgaaagaactgtgaacatggtaggtaaaatcggatatgaaggagcaggaacagttgaatttatttatgaaaatgaaaaattttattttttagaaatgaacacaagagttcaagtagagcatccagtgtctgaaatgatcacaggtatcgatataattaaagaacaaatttggatagcctttactggtaatactgctttaaagcaaagtgatgttgttccaagaggccacgcaatagaatgtagaattaatgcagaagatgcaagtaaaaattttcaaccttcgccaggtaccataggaatgtgtcaccaaccttctggttttagaactagagttgatggtgcaatatttcagggttataaagtaactccatattatgacagcatggtttgtaaactaatttgtcatggaagaaatagaacagaggcaattcaaagaatgagaaggtctttggatgaattcgtaatagatggaataacaactactatacctttacacaaaaaactgcttgaccatccaaaattcatagattctgattttaatgtaagctggctagataaagaaaaaataatttaat

SEQ ID NO: 203002 - DNA, 409 bp, Unknown
  Bacterial polypeptide expressing nucleotide sequence isolated from the Sargasso Sea
gatgtttaaaaaagttttaattgcaaatagaggagagattgcagttcgagtaatacgggcttgtaaagaatggggaattggaacagttgctgtacattctgacgtggactccgagtctatgcatgttcgtttagccgacgaaagtgtttgtataggctctcatcaacctcaaaatagttatttaaatattcctgctattatttctgctatagatgtcactggcgcagaggccgtccatccaggttatggttttttatcagaaaattataaatttgcagatatgatacaaaaacatggaataaaatttataggacctaaggctgaaattataaaaaaaatgggagataaaattgaagcaaaaagaattgcaaagcaaaatggtttaccagtgattgagggatctgaaagt

SEQ ID NO: 203003 - DNA, 1333 bp, Unknown
  Bacterial polypeptide expressing nucleotide sequence isolated from the Sargasso Sea
atgtttaaaaaaattttgattgcaaatcgaggagagatagctgtcagaattatcagagcgtgtaaagaatggggtatctctactgtagcaatacattcagatgttgatagagagagtatgcacgtaaaattagctgacgaaagtatatgtgtcggttcacatcaaccagaaaatagttatctaaatatacctgcaattttatctgcaattgaattaacaaatgctgaggcggtacatcctggttatggatttttatctgaaaattacaattttgcaaaaatactggaggaaaataatattaaatttattggaccttcatctaaacatatcaaaatgatgggagacaagatccaagccaaaaaaattgcactgcagtatggtttgcctgtaattgaaggttcagagggtggagtgaaagatatattagaagctaaaagaattctaaaaaaaaccggtttaccagttttaattaaagctgcaggaggtggaggtggaaaaggaatgaaaatagtaaaaaatgaaaatgaatttgagagtctttttcttactgcaaaacaagaagctaaaaaatactttggtaatgacgaggtatatatagaaaaattttttgaaaaccctcgtcatattgaagttcaaatattagcaggaaaaaatagagtaattcacttacatgaaagagattgttcagtacaaagaagacatcaaaaattaattgaagaaacaccaagccccgtcttaaatgatgaaattaggagggacttatttagaaagacagtgaatatggttcaaaaaattggatacgagggcgctggtacagtagaatttatttacgaagatggaaaattttactttttagaaatgaatacaagagttcaggtagaacatccagtgactgaggttgttacgggtattgatattattaaagaacaaatttggatagcattctcaggagatacagctcttgagcagaaagatatacaaccaagaggtcatgcaatcgagtgtcgaataaatgctgaagatccgtcaaaaaattttcagccatctccaggaacaataggaatgtgccaccaaccttcaggatttagaacacgtgtcgatggtgcaatatatcaaggatataaagtaacaccatattatgatagtatggtttgtaagcttatttgtcatggaagaaataggacagaggcaattcaaagaatgaatagatcattagatgaatttgtaattgaaggaataactacaactatagagcttcacaaaaagctgataaatcacaaaaaattcattgagtcagattttaacgttacatggttagataaagaaaaaatta

SEQ ID NO: 203004 - DNA, 1348 bp, Unknown
  Bacterial polypeptide expressing nucleotide sequence isolated from the Sargasso Sea
gatgcccatcggcaaagtgctgatcgccaaccgcggcgaaatcgccctccggatcctgcgcagctgccgcgaactcggcatcgccaccgtggccgtctacagcacagtcgataaagacgcgcttcatgttcagctggccgatgaagcggtctgcgtcggcgacgccctgagcagcaagagctatctcaacgttcccaacatcctggccgccgccacctcccgcggggttgacgcgatccatcccggttacggcttcctggctgaaaacgacaaattcgccgagatgtgcggcgaccacggcctgaccttcatcggtccctccccccacgcgatccgctccatgggggacaaatccaccgccaaggccaccatgcagtccgtgggcgttccaaccgttcccggcagcgagggattgctggcaggaccacaggatgccgccgtgcttgcggagcagatggggtatcccgtgatgatcaaagccaccgccggcggcggcggtcgtggcatgcgtctggtgcagagcccggaccagctgaacaatctgttcaaggccgcccagggagaggcggaggccgccttcggcaatcccgggctgtacatggagaaattcatcgatcgcccccggcacgtggaagtgcaggtgctggcggaccgccacggcaatgtcgttcacctcggcgaacgggactgctcgattcagcgacgccaccagaaactgctggaggaagcccccagcccggccctggatcctgatctacgccgtcgcatgggtgaagcggccgtggccgcagcccgcagcattaactacgagggcgctggcactgtcgagttcctgctcgaccgcagcggtgggttctatttcatggagatgaacacccgcatccaggtggagcatccggtgacggagatggtgaccgggatcgacctgatcgccgagcaactgcgcattgccggtggagagcccatcagcgttcagcaggaggagatcaacctctccggccatgcgatcgaatgtcggatcaacgccgaagacgccacccacaatttccgaccagcacctgggcgcatcaccggctggctgccaccgggcggtcctggtgtccgtgtcgatagccatgtgtacaccggctacgacatcccgccgttctacgactctctgatcggaaaggtgatcgtctggggtcgcaaccgcgacgtggcgttatcgcggatgaaacgcgccctgaatgaatgcgccgtcactgggattcccaccacggtggaatttcatctagccctgctggatcgcccggagttcatcaacggcgacgttcacaccaagttcgtcgagcaggacatgctcaactga

SEQ ID NO: 203005 - DNA, 1504 bp, Unknown
  Bacterial polypeptide expressing nucleotide sequence isolated from the Sargasso Sea
aatgaaaaaaatacttattgcaaatagaggagaaatagcttgcagaataattaaaagttgtaaaaagttaaatcttcactcaattgcagtttattctgacgcagatgaaaaaagtaaacatgtaaagctagcaaatgaagcagtacatattggaaactctaaagcacaagaaagttatttatcatcaaaaaatattttaagtgctgctttaaagtataaagccgatgctatccatcctggttatggttttttatcagaaaatgcagaatttgcccaaaatgttattgactctggccttgtctggataggaccaaaaccaaatagtattacttctatgggcaataaagatattgctagagaactggcaataaaaagtaatttgcctatttgtcctggattaaaaaatgatgaattagattcaaatgatttagaaaaaaaatgtattgatattggttaccctattttaattaaagcaagcgcaggtggaggtggaataggaatgcaaattgttaataattttaacgaactaaaatctgcaatagaaaaaacaaaaaatcttgcaaagaaagcgtttggaaatagtgatatttttttagaaaaatttattagaaattcaagacatatagaaattcaagtatttggatacggagaaaaaagcgcagttcatttctacgaaagagattgttcaattcaaagaagatttcaaaaaataattgaagaaagcccagcgcctaaagttgagcaatcaataattaaagaaatggcagaaatgtctgtcaattttgcttcagatcaaaaatatgaaggagccggaactattgaatttatatacgatattgatcaaaagaaattttattttctcgaaatgaatactcgtatacaggtagaacaccctgtaacagaagaaataactggagttgatcttgttgaattacagataaaatatgcattaaatcttgattcaacgagtattttgcaaagtgatatatctaaaaatggcaattcacttgaatgcagactttatgctgaagatccaaaaaagaattttttaccttcgccgggaaaaattactaaattacgatttccagaagtaaacaaggatattagactagacattggagttgatgaaggagatgaaatttctttttattatgatccaatgatagccaaaattatttctaagggagttagcagggctgaggttataaaaaaaatgaaaaatttccttgaaaaaatggagatagaaggaattaagactaacaaatctttcttaattgaagttttaaaaaataaatcattcgaagaagcaaagtttaatactaaatttattgaaaataatttatctattttcacaaaatatgaagagaaaaatcaagatccaataattaaaaaggaagttaaaatttctgataaaaaagaaaatgaaaattcacaaataaaaaaatctgaaaataaaaactataccgataaagatgtcaaagctttcgagaatattatttctaaa

SEQ ID NO: 203006 - DNA, 443 bp, Unknown
  Bacterial polypeptide expressing nucleotide sequence isolated from the Sargasso Sea
tatgaaaaaaatcttaattgcaaatagaggagagattgctataagaatcgctagatcagtatctgatctaggaatgatacccataggaatttactctgaagacgatgagagttctttgcatctcaccaagatgaatgaaaatcataaaattccagggaagggcgtaagtgcttatctagacataaaagaaatagtttcaatttctaaagaaaataatatagatgttatccatcctggatatggctttttaagtgagaaccaaaattttgccaaaattgtcaggaaagaaggaataatttttataggacctgatgaaaaaacacttaaatcgttaggccaaaagagtttagcaagaggtttagcagagaaattaggaattccagttattaaaggaactaataaaaagacctctttagaagaatctaagaaattcttcaaatcgc

SEQ ID NO: 203007 - DNA, 459 bp, Unknown
  Bacterial polypeptide expressing nucleotide sequence isolated from the Sargasso Sea
catgttggacaaagtagtcatcgccaaccgcggtgaaattgccctgcggatcctgcgcgcctgcaaagagctcgggatcaagacagtggccgttcactccaccgccgaccgggagctcaagcatgtgctgctggccgacgaaaccatctgtatcggcaagccggccagtaccgactcctacctcaatgtgccggccatcatcgccgccgccgaggtgaccggtgccgtcgccatccacccgggttacggtttcctctccgagaacgccgacttcgccgaagtggtcgagaaatccggcttcatcttcatcggcccgcgcgccgagaccattcgcctgatgggtgacaaggtttccgccatcgaggcgatgaagaaggcaggcgtgccctgcgtaccgggctccgacggtccggtcgacagcgatgccaagcacaacgccgccatcgccaagcgcattgg

SEQ ID NO: 203008 - DNA, 854 bp, Unknown
  Bacterial polypeptide expressing nucleotide sequence isolated from the Sargasso Sea
tatgttcaaaaagattcttattgctaataggggggagattgctattagaataatacgagcttgcaatgaaatgggtatcaaaactgttgcagtttattccaatgctgacaaaaattcgttacatgttaaatttgctgatgaagcaatttgcattggagaaggtcctgctgtcgaaagttatttaaatattccaagaattattgcagctggagaaattacgaacgctgatgcaattcatccaggatatggttttctagctgaaaatgctaagttcagtaaaatatgcaaagaaaacggatttacattcattggacctgatgctgagattatagatcttatgggggacaaggttaatgccagaaatgcagctaaagatgcaggtgttccaataattccaggaagtaatacattatcttcatctgaagaacttttaaaaattgcaaataaaattggctatcctgttatgttgaaagctgtagctggaggtggtggtaagggaatgcgaattgtgaaaaatgaaagtgaggcagaaaaagggtttaatattattcaaaatgaagcaggaatggcatttgataattcagaaatatatgttgaaaaatttgttgaaaatggacgacatattgaagttcaaatactatcagataaatttggcaatcatttacatctaggagaaagagaatgttcgattcaaagaagtaatcagaaattaatagaagagtcaccttcgctatttgtagatgatctacttagagaagaactgaccagaaagtcgttggagcttgcaaaaaaagtaaactacgtaggagcaggtaccgtagagtttttagtagatagtcaaaagaatttttatt

SEQ ID NO: 203009 - DNA, 574 bp, Unknown
  Bacterial polypeptide expressing nucleotide sequence isolated from the Sargasso Sea
aatgtttaaaaaaattttaattgcaaaccgcggggaaattgcagttagaattattagagcatgtaaagaatggggaatacttacggtcgctgttcattcagatgtagatagagaaagcatgcatgtgagaatggcagatgaaagtgtttgtataggttctcatcaaccagctaatagttatttaaatattccagcattaatgtcagcagtagaacttacaaatgctgatgctgttcatcctggatatggttttctttctgaaaatgcaaattttgcaagaattttagaagagaacaaaattaattttattggagcttcatcaaaacatatagaaatgatgggtgataaaatccaagcaaaaagaatagctaaagaaaatggattgcccgttattgaagggtctgaaggaggagtaaaagatgtatctgaagcaaaagaactttgtaaaagaattggttttcctgttctaatcaaagcctcaggtggaggtggaggtaagggtatgaaaatagtttataaggaagaagaattgaaacgctgttctcaaccgcaaaatcagaagcacaaaaatact

SEQ ID NO: 203010 - DNA, 1279 bp, Unknown
  Bacterial polypeptide expressing nucleotide sequence isolated from the Sargasso Sea
attgagagcttgtagagaactagatattaaaactgttgcaattcactctgaagcagatgatacagcaatgcatgtaagaatggctgatgaaagtatatgtgttggaccatcttcagcacaatctagttatttaaatattcctgcaattataacagcagctactataactgatgttgatgctatacatccaggatatggatttttaagtgaaaataaaagatttgctgaaataacagaagaacataagattaaattcattgggcctaaatccgaacatattaaaatgatgggtaataaaatagatgccaaaaaaataatggatgcaaataatgtacctacagttccaggattaaatcatttagataatgatgataaagttaatgattttattaataaagttggtttacctattattgttaaagctgctagtggcggtggtggaaaaggaatgagaatagtaaacaaaaaaagtgaattaaaaaaatctatagaagctgcaaaagttgaatcaaaaaaatcatttaatgacgatgttgtttatttagaaaaatttctaacaaatcctaaacatattgaaattcagattttagcagattcttatggaaatgttgtaactcttggtgaacgtgattgttcaattcaaagaaaacatcaaaaactaattgaagaaagtcctagtacaattctcttagatgaagaaaggggaaagataagtaatctttgtcgtaaagcaattaactcaattgattatgaaggcgtaggtactttagaatttttatttgaagaaaataaattttattttatggaaatgaatacaagattacaggttgagcatccggtaaccgaaatggtaacaggtattgatttagtaaaacaacaaattttatcagctagtggagaaaaactaaaaataaaacaagaagatgtaaaaataaaaggtcatgcaattgaatgcagaattaacgcagaacatccaacaagttttataccatctcctggaaaaataactcaatatcatcaaccaggtggattaggtgttagagtagactctgcagtatatcaaggatatgtaataccatctcattatgatagcatgataggtaaattgattacttatgctgaaaatagaaaagagtgcattgaaaaaatgaagagagcattagaggagtatgtaattatgggaatcaatactaatattcaacttcatcaaaaactaattaaatcaaatgaatttagtgaaggaaagtatgacattaattatatgacaaagtatatttaa

SEQ ID NO: 203011 - DNA, 1357 bp, Unknown
  Bacterial polypeptide expressing nucleotide sequence isolated from the Sargasso Sea
atgtataaaaaaattttaattgcaaatcgcggcgagatcgccttgcgtattatacgtgcatgtcatgaattaggaattcattcagttgctgtttactcaactgctgataagaattctttgcacaccaaatttgcagatgaagctgtttgtattggaccgcctttaagtgctgattcatatttaagtattccaaatataatttctgcaggtgaaataactaatgctgatgctattcatccaggttatggttttttagcagagaatgctgatttttcaaaaatatgcgatgacaatggctttgcatttattggtcctaagcctgatataattgatgctatgggtgataaatcaaaagcaaaagaaactatgaaatctgctggggtacctgttattcctggaaatgaaggcatattatcaaatcccgaagaagctaaaaaaattgctaaagatattggataccctgtaatgcttaaggcatccgcagggggtggcggtcgtggaatgagattagtatatgatgaaaatgaaattgaaagcgccttcactactgcaagctcggaagccttgaatgcttttagcaatggtgacatgtatattgaaaaatttgttgagaatcctcgtcatattgaaatacagatattagctgatacaaatggtaatgtagttagcttgggagaacgtgaatgctctattcaaagaagatatcaaaaattaattgaagaatctccatctcctgcggtcaatgaaaaattaagaaaaaaaatgggtgatgcggcaatcgctggagctaaagctgttgattatgttggcgtaggtacagtagaatttttattagataaaaataaagacttttattttatggaaatgaatacaagaattcaagttgagcatcctataacagagatggtaacaggcgctgatttaattaaatggcaaattaaaactcattttggtgaaaaatttcctgattatttatacaaaatgaaacttagagggcattcaatcgagtgtagaattaatgctgaagatccagctaaaaattttgctccttcagctatacctatttctagtttccatatgccaggaggcaaaggtgttcgtattgattcccatgcttatgcagggtatgaaattcctccattctacgattcattgctaggtaagctaattgtacattcaccagatagaaaatcagcaataaatcggatggaaagagcattggaggaaacaattattgaagggccaaaaactaccgttccatttcatcaagcgattatgaaggatcagaggtttagatctggtgattttgatacaaactttttaaataattttaaatataatgatggggaaaaatagt

SEQ ID NO: 203012 - DNA, 802 bp, Unknown
  Bacterial polypeptide expressing nucleotide sequence isolated from the Sargasso Sea
aatgataaataaattactaattgcaaaccgtggtgaaattgcatgccgcgttataaagacagccaacgctcaaggtataaagacggtcgccgtttactctgacgccgacaaaaatgcccttcatgtacaaatggctgatgaagctgtttatctagggccatctccgtcgaaggaaagttatttacgaggcgagttgatcattgaaaaagcaaaggagcttggtgtagacgctatccacccaggctacggctttctctcagaaaatgctgagtttgcgaatctatgcgccaaaaacaatattatctttgtaggcccaccagcatctgcaattgaagcgatgggttctaagtctgccgccaaacacattatggaaaaagctggtgttcctttggttccaggctatcacggcgacgatcaaagtgaagcggtattaaaaggcgctgccgatgaaatgggatacccagttctattaaaagccgctgctggcggtggcggtaagggcatgcgccaagtgtggagtgaaaaagagttttctcaagcattaaacgcagccaaacgtgaatctatggcgagctttggtgacgaccacatgctggttgaaaagtacctgacgcgccctcgtcatgttgaaattcaagttttctgtgacacccatggcaacggcgtatacctttttgaacgtgattgttcggttcaacgccgacaccagaagattattgaagaagcccctgcccccaatatgtctcagtcagtgagagaaaaaatgggtgaagcggctatactcgcggcgaaagccattaac

SEQ ID NO: 203013 - DNA, 1339 bp, Unknown
  Bacterial polypeptide expressing nucleotide sequence isolated from the Sargasso Sea
atgtttaaaaaaatactaatcgctaatcgtggagaaattgctgttcgaataattagagcctgtaaagagtggggtatatcgacagtagcagttcattcggatgttgataaagaaagcatgcatgtaagattagctgatgaaagtgtatgtattggctctcatcagccagcaaacagttatctaaatataccagctttaatgtctgcaatagaattaactaaatctgaagccgtgcatccaggttatggatttttatctgaaaatgcaaactttgcaaaaattttagaagaaagtagtatcaaatttataggaccatcatcaaaattaattaagatgatgggtgataaaatccaagctaaaaaaattgcaaaagaatatggtttgccagtaattgaaggttctgatggaggtgtatcaaatattgctaaagcaaaagaaatttgtaaaaaaattggatttcctgttttaattaaagcagctggaggtggtggtggtaaaggtatgaaaatagcttttgaagaaaaaaattttgatgaattatttctagctgctaaatctgaagctaaaaaatatttcgctaacgatgaagtatacattgaaaaattttttcaaaacccaagacatattgaagttcaagttttgtcaggaaaaaatagaacagttcatttgcatgaaagagattgttctgttcaaagaagacatcaaaaacttatagaagaaacacctagtccaatactaagtgatgatttaagaaaagacttattcgaaaaaactgtaaatatggtaagtaaaatcggatatgaaggagcaggaacagttgaatttatatatgaagatggaaaattttattttttagaaatgaatactagagttcaagtagaacacccagttacagaaatggttacgggtatagatataattaaagagcaaatatttatagcatttactggcaatacagctttaaaacaaactgatataaatccaaggggacacgctattgaatgcagaataaatgccgaagatgcaagtaaaaactttcaaccatctccaggaactattacaatgtgccatcaaccatctggttttagaactagagttgatggatcgatttatcaaggatacaaaattactccctattatgacagtatggtgtgtaagttaatttgccaaggaagaaatagacaagaagccattcaaagaatgttaagatcgttagatgagtttgttcttgatggcataactaccacaattggtctacataaaaaattattaaatcataaaaaatttattgaatctgattttaacgtaagttggcttgataatgaaaaaataatttaac

SEQ ID NO: 203014 - DNA, 1354 bp, Unknown
  Bacterial polypeptide expressing nucleotide sequence isolated from the Sargasso Sea
atgataacacgacgccagtttttagtaggctctttggcatttggtggcctagcgaccagtgcttttggtaagaaaataaatttggcgtctatgccgattagtgaaggctatggtgcactagtcgccgaccctcaaaagctgctcgatttacctaaaggctttagctataaggttatatcaagccttggaaatagcatgtctgatggtatgcatgtacctgacagagcggacggtatgggttgtttgcctgtagaaggcagtagcgacaaagtggcgcttatacgtaaccacgaactgcaccccaaacatttaagtgctcagccacagtctattcaaaagcatactagcgagttggcctatgacaactatcatagtggggttgctttaccaggcggcaccacaaccatggtgtataaccttaccaccaaaatggtagagcgagagtttatcagtcttgttggaacggtaagaaactgctcgggcggcattacgccttggggcacgtggcttacgtgtgaagagtccgtagaccgacctcatggcccgaacggcgatgtagtaaacaaagatcacggctacatatttgaagtacctgcaaacgctgactcactcattgaagctaaaccgcttaaagcaatggggcgctttaaccatgaagcggcatgtgttgaccccaaaaccggtattgtttacctgactgaagatcagggtgacagcttgctttatcgctttgtacctaacgagtacgctaacttggcagctggcggccaattagaagccctggtagtaaaaaacaaacctcagtttgatacacgtaactggagttccacaactatgccattggcgacgtggttcgacgttgagtggatagcattagacaatccagaaagcccgaacgatgacttacgcgctagaggatatgagaaaggtgctgccttattcgctcgcggtgaaggtatacattggggtgaaaatgagctttatttttgctgtactaatggtggccaaaagcagctcggtcaggtgatgaaacttgttccttctgctgatggtaaacaagacaagcttcagctatttttagaaagtgaagacaagaacttatataacttcggcgataacctaaccgtatgtccaaacgggcatctagtggtgtgcgaagaccaatataccgacattgttgataatcatttacgcggtgttacaccaaatggagaagtgtataactttgcaaagctccatgcgcaaactgaacttgccggcgcgtgtttctcgcccgacggcaatacgcttttcgtgaatatttactctccaacgaagaccttagctataaccgggccatggcttgaaggttaga

SEQ ID NO: 203015 - DNA, 1655 bp, Unknown
  Bacterial polypeptide expressing nucleotide sequence isolated from the Sargasso Sea
aatgaaaaaaatacttattgcaaatagaggagaaatagcttgtagaataattaaaagttgcaaaaaattaaatcttcattcaattgcagtttattccgatgtagatgaaaaaagtaaacatgtaaggttagcaaatgaagcagtacatattggaaattctaaagcacaagaaagttatttatcatctaaaaagattttaagtgctgctttagagtctaaagccgatgctatccatcctggttatggttttttatcagaaaatgcagaatttgctcaaaatgttattgactctggtcttgtttggataggaccaaaaccaaatagtattaattctatgggcaataaagatgttgctagagaacttgcaataaaaagcaatttgcctatttgccctggattaaaaaatgatgaattaaattcaaatgatttagaaaaaaaatgtattgatattggttatcctattttaattaaagcaagcgcgggtggaggtggaataggaatgcaaattgttaataattttaacgaactaaaatctgcagtagaaaaaacaaaaaatcttgcaaagaaagcgttcggaaatagtgatatttttttagaaaaatttattagaaattcgagacacatagaaattcaagtatttggatacggagaaaaaagtgcagtacatttctacgaaagagattgttcaattcaaagaagatttcaaaaaataattgaagaaagtccagcgcctaaagttgagcaatcaataattaaaaaaatggcagaaatgtcagtaaattttgcttcagatcaaaaatatgaaggagctggaactattgaatttatatacgatattgatcaaaagaaattttattttctagaaatgaatactcgtatacaggtagaacaccctgtaacagaagaaataactggagttgatcttgttgaattacagataaaatatgcattaaatcttgattcaacgagtattttgcaaagtgatatatctaaaaatggcaattcacttgaatgcagactttatgctgaagatccaaaaaagaattttttaccttcgccaggaaaaattactaaattacgatttccagaagtaaacaaggatattagactagacattggagttgatgaaggagatgaaatttctttttattatgatccaatgatagccaaaattatttctaagggagcaaacaggcccgaggttataaaaaaaatgaaaaatttccttgaaaaaatggagatagaaggaattaagacaaataaatctttcttaattgaagttttaaaaaataaatcattcgaagaagcaaagtttaatactaaatttattgagaacaatttatctattttcacaaaatatgaggagaaaaatcaagatccaataattaaaaaggaagttagaatttctgataaaaaagaaaatgaaaattcacaaataaaaaaatctgaaaataaaaactatactgctaaagatgtaaaagcttttgagaatattatttctaaatcacaaataaaaaccaatggacaaaattatacccaaaaagacttaaaagcttttgaaaaaattatatctcctaaagatgaaattaataaaatttctaaaactaaaattagaaatattcctggaaaaatatatgacactccaaaatctaact

SEQ ID NO: 203016 - DNA, 1125 bp, Unknown
  Bacterial polypeptide expressing nucleotide sequence isolated from the Sargasso Sea
aatgtttaaaaaaatattgattgccaatcgaggtgaaattgctgttagagtaattagagcttgtaaagaatggggtattaaaacagtagctgttcactctaacgtagataaagaaagtatgcatgtgaggctagcagacgaaagtgtttgtattggttctcatcaaccagcaaacagttatttaaatatacctgcaataatgtcagctattgaattaacaaaagcagaagctgttcatccagggtatgggtttttgtcggaaaacgcaaacttttcaaaaatccttgaagaaaataaaataaaatttattggaccctcaccaaagttgataaaaatgatgggtgataaaattgaagcaaaaaaagttgctaaaaagtatggtttacctgtcatagaaggttcagaaggtggagtatcagatttaaatcaaggaaaaaaaatatcaaaaaaaataggttttcctgtattaattaaagctgctggtggaggtggaggaaaaggtatgaaaattgttaatgatgaaaaaagttttgatatagcttttagctctgcaaaaactgaagccttaaaatattttggaaatgaagaagtatatattgaaaaattttttcaaaatcctcgacatatcgaagtccaagttctctcaggaaaaaatagaacagttcatttacatgaaagagattgttctgttcaaaggaggcatcagaaactaattgaggaaactcccagtccaatattaactgatgaaatacgtaaagatttgttcacaaaaacagtaactatggtgagcaaaattggttatgaaggtgcaggaactgtagaatttatatatgaagatggaaaattttattttttagaaatgaatacaagggttcaagttgaacaccctgtaacagaaatggttacaggtatagatattataaaagagcaaatatggatagcttataatggggaaacagcattaaaacagagcgatataaatccaagaggacacgccattgaatgtagaattaacgctgaagatccagctaaaaactttcaaccttcacccgggactataggtatgtgtcatcaaccttctggttttaggacaagagtagatggttcaatttatcaaggatataa

SEQ ID NO: 203017 - DNA, 808 bp, Unknown
  Bacterial polypeptide expressing nucleotide sequence isolated from the Sargasso Sea
atgtttaaaaaagttttaattgcgaatagaggagaaattgcagtcagagtaataagggcctgtaaggaatggggaattggaacggtcgcagtacattccgatgtagactccgagtcaatgcatgttcgtttagcagatgaaagtgtttgtataggatctcatcaaccgcaaaatagttatctaaatattcctgcaataatatctgctatagatgttacgggggctgaagctgttcatcctggttatggttttttatcggaaaatttcaaatttgcagacatgattgctaaacacggaataaaatttattggacctaaagctgagattataaaaaaaatgggagataaaattgaagctaaaagaatagccaaacaaaatggtttgcctattattgagggatcagagggtggagtgaaaaatgtagatgaagcaaagttgatttgtaaaaaaattggttatccagttttaattaaagcctcaggtggtggtggtggaaaaggaatgaaaattgttgagagtgaggataaattagaaggattattttctttagcacgtctagaagcaaaaaaatattttggaaacgaagaggtttatattgaaaaatattttaaaaatccaagacacattgaggttcaaattatgtctggtaaaaatagaacggttcatttaaatgagagggattgttctgttcagagaaaacaccagaaattaatagaagaaactcctagtccggtattagatgaaaagactagatcagatttgttagacaaaacagttaagatggtggaagccctaggttatgaagggg

SEQ ID NO: 203018 - DNA, 949 bp, Unknown
  Bacterial polypeptide expressing nucleotide sequence isolated from the Sargasso Sea
atgtttaaaaaaatattaattgctaatagaggtgaaatagctgttagagttattcgtgcgtgcaaagaatggggaatttcaaccgtagcagtacattcagatgtcgacaaagaaagtatgcatgtaagattagctgatgaaagtatatgtataggatctcatcaacctgcaaatagttacttaaatattcctacaataatgtcagctatagaattaacaaattctgaagctgtgcatcctggttatggatttttatctgaaaattcaagttttgcaaaaattttagaggataataatattaaatttataggaccttcttcaaagttaattaaaatgatgggagataaaattgaggcaaaaaaaatcgcaaagaaaaatggtctaccagtaatagagggatctgaaggtggggtatcaaatattaaagaggcaaaagaaatttgtgaaaagattggatttccagttttaattaaagctgctggtgggggtggaggcaaaggtatgaaaatagttaataatgaatcagaatttgaaaaattattctccttagcaaaatctgaagcacaaaaatattttggtaatgatgaagtatatattgaaaaattttttcaaaatcctagacatatagaagttcaggttatgtcagggaagaataggacagtacatttgtatgagagagattgttcagttcaaagaagacatcaaaaattaatagaagaaacaccaagcccagtattagacgatgaaataaggaaagaattatttgataaaactgtaaatatggttagtaaaatcggatatgaaggtgcgggaacagttgaatttatttacgaagatggaaaattttattttttagaaatgaatacaagagtacaggtagaacatccagtttcagaagttgtaaccggaattgatataattaaagaacaaataaatgttgctttcactg

SEQ ID NO: 203019 - DNA, 1295 bp, Unknown
  Bacterial polypeptide expressing nucleotide sequence isolated from the Sargasso Sea
aatagctttaagaatattgcgtgcttgcagagagcttgatattaaaactgtagcaatacattccgaagcagatgagacagcaatgcatgttagaatggcagatgaaagtgtttgtgttggtcctgcatcagcccagtcaagctatttaaatattccagcaattataacagcggcaactatatccaatgcagatgctatacatcctggatatggttttttaagtgaaaacaaaagatttgcagaaatcattgaagagcacgatataaaatttattggccctaaatcagaacatattgaaatgatgggtaataaaatagctgcaaaaaaaattatggaaaagaataaagtacctactgtaccaggactaaatgatctttcagatatgaaaaaagttttagattttatagatgatattaaactacctgtaataattaaagcggccagtggtggtggtggtaaaggtatgagagtggtcaataaaatagaagacctagaggaatctattaaatcagctaaaattgaatcaaaaaagtcatttaatgatgatacagtttatttagaaaaattttttgttaatccaaaacatatagaaattcaagttcttgcagactctaacggtaatgttttaacattaggagaaagggattgctctgtacaaagaaaacatcaaaaaattattgaagaaagtccaagtattgtcttaactaatgttgaaagagaaaaaattagtagcctatgtatcaaggcaattaaatcaataaaatatgaaggggtaggtacactagaatttttatatgaaaataataaattttattttatggagatgaacactcgacttcaagttgaacatcctgttactgaaatgataacaggacaagatttagttaaagaacaaattaaagtagcaagtggaaataaaattaaacttaaacaagaagatataaattttaatggtcattcaattgagtgcagaattaatgctgagcacccggagactttcattccttctcctggtaaaataacacaatatcatcagcctggaggtttaggtgtcagagtagattcggcagtttatcaaggctatatcataccctctcattatgacagcatgatcgctaaacttattgtttatggtaagaatagaaatgaatgtattcaaaaaatgaaaagagccttagaagaatatgtgattattggaatagatacaaatattcaacttcatcaaaaaattattcaatcaagtgagtttttatctggaaaatatgatataaattatatgtcaaaatttgagtaaa

SEQ ID NO: 203020 - DNA, 712 bp, Unknown
  Bacterial polypeptide expressing nucleotide sequence isolated from the Sargasso Sea
aatgtataagaaaatactcattgctaatcgtggtgagatagccttgcgagtcataagagcttgtcatgagctaggattaaaatctgtggcagtttattcatctgcagataaagattctcttcatgtaaaatttgcagatgaagcaatatgtattggacctcccgatagtagagaatcatatttaaatatccccaatattatttcagctggtgaaataaccaatgcagatgctgtgcatccagggtatgggtttctagctgaaaatgctgatttttcaaatatttgcaaggaaaatggtttctcatttattggtccaacaggagatatcattaatgcaatgggtgataaagctcaagcaaaaaaaactatgaaagaagctgggttgccaattattcctgggaatgaaggtgtcctagataatgtagatgaaactaaggctctagcatcagaaatcggttatccagttatgcttaaagcttcagcgggtggtgggggaagaggtatgcgtttagtaagaaaggaaagtgaattggagcatgcatattctactgcaagtggagaagctcaaaatgcttttaataatggagacctctatattgaaaaatttattgaagaacctcgtcatattgaaattcaattattagcggatgtccacggcaatgctgtgagtttgggtgaacgtgaatgttcaatacaacgtagacacccaaaa

SEQ ID NO: 203021 - DNA, 3083 bp, Unknown
  Bacterial polypeptide expressing nucleotide sequence isolated from the Sargasso Sea
catgttcgagaaaatcctgatcgccaatcgtggtgccattgcgtgccgcatcctcagaacgctgcgtgaactcgatgtaaccggcgtcgccgtctacgcggaagcagatcgtgcgagcctccatgtgagcgaggcgcccatcgcgcacggtctcggtgacggtccggcttccgccacctacctcgacacggaaaagatcctcgagatcgcccgccgcgaaaacgtccaggcaattcatccgggctatggattcctgtccgagaatgcggcctttggcgaagcgtgcgaggcagcgggcatcgaattcatcggaccgacgccagcgcagttgcgggcgtttggcctgaagcacacggcccgcgggatcgcagcggaccagggtgtgccgatgctcaatggcacgggcttgctggacgacctcgccgccgcgctggcagccgctgagtcgatcggctaccccgtgatgctgaaaagcacggcgggcggcggcggcatcggcatgcgggtatgctggaacgtcgaagaactgcgtgctcatttcgaggtggtcaagcgccttggccagaacaacttcagcgatgcgggcgtgttcctcgaaaagtacatcgagcgggcgcggcatctggaagtgcaggtattcggcgacggccgcggcgacgcgatcgcgctcggcgtgcgcgactgctcggtgcagcggcgcaaccagaaggtactcgaagaaacgcccgcgcccaatctgccggatggcatgtcggccgccctgtgcgaagctgctgtcaagctcgcgaaagcggtcagttaccgctccgccggcacggtcgaattcgtctacgacagcgctgcgcagcagttctatttccttgaggtgaacacgcgtctgcaagtcgaacacggcgtgaccgagcaggtctggggtgtggatctggtgcgctggatgatcgaactggcggcgggcaccctcgcgccgttgcaggaactcgccgcgggtttgaagccgcacgggcacgcgattcaggcacggctctatgccgaggacccgggccgcgatttcaagccgagcccgggcctgctgaccgatgtcgcgtttccgcgcgccgacggacgttcgctgcgcatcgatacgtggatcgaggccggctgcgaagtaccgccctacttcgacccgatgcttgccaaggtgattgcctggtcgccaacgcgcgacgcggcacgccacgcgctcgctgacgcgttgcagaatacgcgcctctatggcgtggagacgaaccgcgactatctgcggcagattctcgacgatcacccgtttgcgtcgggcgagccgtggacgcgctgcctcgaaggtctgaagtaccgggcgagcacgctcgaagtgatcagcgccggcacgcagacaaccgtgcaggattatcccggccgccttggctattgggcggtcggcattccgccatccggtccgatggacgaccgtgcgctgcggctcggcaaccgcctgcttggcaacggcgccgacgctgccgcgcttgagattacgatgagtgggccgaccttgcggtttaacacggacgcggtcgtcgccgtgaccggcgcgaatctgcccgtgctgctcgacgatatcgaacagccgttgaacacgaccctgctggttgccgccggctcgacgctcgcactcggcaccattcgtggtgcgggcgcgcgggcctatctgtgcgtgcgcggcggcttcgacgtcgcgctgtatctcggcagccgcagcaccttcacgctcggccagttcggcggccatggcggacgagcgctgcgggcgggcgatgtgttgcatcttcagccgttgcaggacgtgcatgcgggcgcggtactcgctaaccttcccgcactggaaaccgtgcgcacgctgcgggtgatctatggcccgcatggcgcgccggagtacttcagcccgcgttatgtcgagcagtttttcgacaccgaatgggagatccatttcaactccagccgcaccggcgtgcgtctgatcggaccgaagcccgagtggtcgcgcgaggacggcggcgaggcgggactgcatccatcgaacattcacgacaacccctatgcggtcggtgcggttgatttcaccggcgacatgccagtgattctcggccccgatggtccgagccttggcggtttcgtctgtccggtgacgatcatcgaggcggatctctggcaaatcggccagttgaaagccggtgacaaggtgcgcttcgtgccggtgcagatcgacgccgcgcgtgaggctgcacgccaacgtctgcgtgaattggaaacgctcgaattcgagccgcaagcgacattcacgaaggccgcggcgctcacctcgcctatcgtcctcgaaaccggtgcggatcgcgaacggctcgtcgcgcgggtttccggtgacacgcatctgctgctcgaaatcggtccgaccgagctcgatctcgcattgcgtttccggggacacgcgctgatgcagtcgctcgaagcgatggcgctcaccggcgtgatcgacctgacacctggcatccgctcgctgcagattcactatcagcctgaaagcctgccgcttgcgcagttgctcgcgatcgtcgagcgcgcatggcaggacgtgctgttgcagaagaatttgcgcgtaccgtcgcggatcgtgcatttgccgctgtcgtgggacgatcccgcgtgccgcctcgcgatcgacaaatacatgaccacggtgcgcaaagacgcgccctggtgtccgagcaatctcgagtttatccgccgcatcaacgacctcgattcgatcgatgcggtcaaacagatcgtcttcgatgcgagctatctcgtgatggggctcggcgacgtctatctcggcgcaccggtcgcgacgccgctcgatcctcgccaccggctggtgacgaccaaatacaacccggcgcgtacgtggacggcggagaactcggtcggcatcggcggcgcgtatctatgcgtgtacgggatggaagggcccagcggttatcagttcgtcggccgcacattgcagatgtgggatcgctatcgcgaagtcgcggatttcgcgggacgcccct

SEQ ID NO: 203022 - DNA, 1339 bp, Unknown
  Bacterial polypeptide expressing nucleotide sequence isolated from the Sargasso Sea
aatgtttaaaaaaattttaattgctaaccgtggggaaattgcggttagaattattagagcatgtaaagaatggggaatatcaactgttgctgtccattctgatgttgatcgagatagtatgcacgttagacttgctgatgagagtgtctgtataggctcccaccaaccacaaaatagttacctaaatatacctgcattgatgtctgctatagagctaactaatgctgaagctgttcatcctggttatggttttctctcagagaatgcaaattttgcaaaaatattagaggaaaataaaattaaatttattggagcttcttctgaattaattgcgatgatgggagataaaattcaagcaaaaaaaattgcaaaagaaaatggattacctgttattgagggttctgagggtggtgttaaaaatatagctcaagctaaggaactttgtaaaaaaattggttttcctgttttaattaaagcttcaggtggaggtggtggaaagggtatgaaaatcgtttacaaagaggaggaatttgaaacattattttctactgctaaatcagaggcacaaaaatattttggaaatgacgaagtttacattgaaaaattttttgaaaatcctaggcatattgaagtacaaattttagctggtaagaaccgagttgtgcatcttcatgaaagagattgttcagttcaaaggagacatcaaaaacttattgaggagacacctagtccagttttaaataatgaagttagaaaagatctttttgaaaaaacagtaaatatggttgaaaaaattggttatatgggtgctgggacagtcgaatttatatatgaaggtggtaaattctattttcttgagatgaatactagggttcaagtagaacatccagtaacagagatggttacaggcattgatattatcaaagaacaaatttggattgcgttctcaggtgagacagcattagagcaaagtgacattaatccaagaggacatgcgattgaatgtagaattaacgctgaagatgcaagtaaaaacttccaaccttctccagggactatcgggatgtgtcatcaaccttctggttttagaacaagagtagatggagcaatataccaaggctacaaagtaactccttattacgacagcatgatttgtaagttaatttgtcatggccgaaatagatcagaagcaattcaaagaatgaatagatctttagatgaatttgtaattgaagggatcacaacaactattcctttacataaaaaactgttaaaccataaaaaatttatcgagtctgacttcaatgtaggatggatagataaagaaaaaattatttaa

SEQ ID NO: 203023 - DNA, 466 bp, Unknown
  Bacterial polypeptide expressing nucleotide sequence isolated from the Sargasso Sea
atgcttgagagattgctgatcgctaatagaggcgagatcgccattcgtattgcgcgcaccgcatcggatatgggtattaaaacggtgagtgtgttttcagaagacgatcatttgtctttgcatacccgtcatagtgagagcgcggtcaatttaggacaagctggcgttgccgcctatctcaatgctgaaaacttgatccaagtagcaaaggagacaggttgcgatgcaattcaccctggatacggatttctgagcgaatctgccgagtttgcaaagctgtgtgctgaagcgggcatacgctttgtgggaccgtctcctgaaactctcagtcaatttggtgacaaggctcaagcaagaaatctcgcgatagcgagcgaggtgcccgttttaaaaggaactaatcaagcgacaaatctagaagaagcgaacgctttttatgacagtctgggggtggggacagctgtga

SEQ ID NO: 203024 - DNA, 1085 bp, Unknown
  Bacterial polypeptide expressing nucleotide sequence isolated from the Sargasso Sea
aatgtttaaaaaaatcttaattgcaaaccgtggggaaattgcagtaagaataatcagagcctgtaaagagtgggggatttcaactgttgctgttcactctgatgtagatagagatagtatgcatgtcagacttgcagacgaaagtgtttgtattggctctcatcaaccagcaaatagttatttaaatattccagcacttttgtctgcaatagagataacagatgctgaagcagtgcatcctggatatggttttttatctgaaaatgcaaacttcgccagagttttagaggaaaacaatattaaatttattggagcctcttcaaagttaatacaaatgatgggggataaaattcaagccaaaaaaattgctaaggaacatggtttaccagttattgaaggatctgagggtgggattaaagatattaaagaagcaaaagaactctgcaaaaaaattggttttccaatattaatcaaagcatctgctggaggtggtggtaagggaatgaaaatcgtttacaaagaagcagaatttgaaactttgttttccacagcaaaatctgaagcaaaaaaatattttggaaatgatgaaatttatttagaaaaattttttcaaaacccaagacacattgaggtacaaatcctagctgggaaaaatggggttgttcacctacatgaaagagattgctctgttcaaagaaggcatcaaaaacttatagaagaaacacctagtccagttttaaatgatgaaattcgaaaagatctttttgaaagaactgtaaaaatggtaagcaaaattggttatgaaggtgctggtacagtggaatttatttatgaggatgggaaattttattttttagaaatgaacacaagagtacaagtagaacacccagtaacagaaatggtcacaggaattgatattatcaaagaacaaatttggatagctttttctggagaaactgctcttaaacaaaatgatataatgccaagaggtcatgcaatagaatgtagaattaatgctgaggatgctagcaaaaataatcaaccttcacctggaactatagaaatgtgtcatcaaccgtcaggtt

SEQ ID NO: 203025 - DNA, 1102 bp, Unknown
  Bacterial polypeptide expressing nucleotide sequence isolated from the Sargasso Sea
atgtttaaaaaaatacttatagctaatagaggcgaaatcgcagttcgtataattagagcatgtaaagaatggggtatttcaactgtagctattcattcagatgtggatagagagagtatgcatgtgaggttagctgacgaaagtatttgtgttggtcctcatcaacctacatttagttatttaaatattcctgcaattatgtcagctattgaactcacaggtgttgaagccgttcatcctggatatggttttttatcagaaaattttgagtttgcaaaaatattggaggaaaatgatataaaatttataggtccttcgtctaatttaataaaaatgatgggagataaaattgaagctaaaaaagttgctaaaaattatggactaccagtaatagagggttcagaagggggtattaaagatattaatgaagcaaaaaaaatatgtgaaaagatagggtttccagttctaataaaagcatctggcggtggtggtggaaaaggaatgaaaatcgtcaataagctagaagaatttgagaatctattcctaactgcaaaacaggaagcaaaaaaattttttaataatgatgaagtttatattgaaaaattttttcaaaatccaagacatatagaggtacaagttttatcaggtaaaaatagaactgttcatttgcatgaaagagattgttcggttcagagaagacaccaaaaacttattgaagaaactcctagtccagttttagacgatagtattagaaaagaactttttgagaagactgtaagtatggttagtaaaattgggtatgaaggagctggaacagttgaatttatctacgaggatggaaaattctactttttggagatgaatacaagggtgcaggttgagcacccagtaactgaaatggttacaggaattgacataataaaagagcaaatttggatagctttctcaggaaatactgctttaaaacaaagcgatataaaccccagaggacatgctatagaatgtagaattaatgctgaggatccaagtaataatttccaaccttcaccaggtaaaatagggatgtgtcaccaaccgtctggttttagaacaaagagttgat

SEQ ID NO: 203026 - DNA, 636 bp, Unknown
  Bacterial polypeptide expressing nucleotide sequence isolated from the Sargasso Sea
aatggttgaaaaagttttaattgctaatcgtggagaaatagctttacgaattgtcagaagttgtagagaactgggtattgcaactgttgcagtttttagcactgtagataaaaaagcattgcatgttcagcttgccgatgaggcggtttgcgtcggagattcattaagtaataagagttacttaaatattccaaatatacttgctgctgctacatccagaggagttgatgctattcatcctggttatggatttcttgcggaaaatgataaatttgctgagatgtgtaatgatcacggcatagtttttattggcccatctcctaaagctattagatctatgggagataaatctacagctaaagaaactatggaagcagttggagttccaactgtacctggtagtcaaggcttgttatcaaacgttgatgaggcttataaattggcagatgaaataggctatccggtaattattaaagcgactgctggaggaggtggaagaggcatgaggttggttgaaaactcagataatctcgaaaaaatgtttaaagcagctcaaggcgaagcagaagcagcttttggtaatgatggtttgtatatggagaaatttataaagaagccaagacatgtagaaattca

SEQ ID NO: 203027 - DNA, 496 bp, Unknown
  Bacterial polypeptide expressing nucleotide sequence isolated from the Sargasso Sea
gatgttcaaaagtatcttaatagctaatcgaggagaaattgcttgccgtttaattaagtcagctagacggctcgggataaaaacgtatgcggtctattcagaagtggacaaacattctttgcatacaaaagaggcagacgttgcagtttgtattggccaagcggaatcaaaaaaaagttatttaaatataaaaagaattattgaggttgcgttggaaaataagatcgaagcgatacaccctggttatggcttcctttcagagaactatctttttgcaaaaaaggttgaggcaagtggaattaaatttattggccccagttggaagtcaattagagcaatgggtaataagaataacgcgaaaaaaattatatcgtcagctaatattccattggttgatggctttttggttgataaggaaaaacctgtagagaataaaaataaagtgaaagaaataggctttccagttatgccaagccgcggccggtggtggaggtaa

SEQ ID NO: 203028 - DNA, 385 bp, Unknown
  Bacterial polypeptide expressing nucleotide sequence isolated from the Sargasso Sea
atggatacagattatgacggttttataacaacatcaattgacagtgtagtaaactggtccagaaaattttcactcttccaatacccttttgttacagcatgctgcggaatggaatacatggcagcagcctgctcgcattatgacatttcccgttttggtgcagaaattccacgtttctccccacgacaggcagatctactttgggttgttggtacaattactcacaaaatgtcaccggttttgaagacaatttatgaccaaatggcagatcccaaatgggtaattgcgtttggaacatgtgcttcaaccggaggattctatcaaaattattctgttcttcagggaattgaccgtttaattcctgtagacctttatattgcaggtt

SEQ ID NO: 203029 - DNA, 445 bp, Unknown
  Bacterial polypeptide expressing nucleotide sequence isolated from the Sargasso Sea
atgaaaaaaatacttattgcaaatagaggagaaatagcttgtagaataattgaaagttgtaaaaaattaaatattcattcaattgcagtttattccgatatagataaaaaaagtaaacatgtaaggttagcagacgaatctatacatattggaaattctaaagcacaggaaagctatttatcttcaaaaaaaataattaatgcagctcttaaaactaaagctgatgctgttcatcctggttatggttttttatcagaaaatgcagaatttgctcaaaatgttattgactctggacttgtttggataggaccaaaaccaaatagtataacttctatgggtaacaaagatatagctagagaacttgcaataaaaagtaatttacctatttgtcctggattaaaaaatgaagaattgaattcaaacgattggaaaaaaaatgtatgag

SEQ ID NO: 203030 - DNA, 742 bp, Unknown
  Bacterial polypeptide expressing nucleotide sequence isolated from the Sargasso Sea
catgaaaaaagtcttaatagctaataggggtgagattgcaattcgtattgctaggacttgtagtgatttaggtatcaaaactgttggcatttattcagaggatgatgccaactgtctgcatctttcaaaagtagatgaggcttatccaattcaaggaaaaggggctcaagcttatctcgatataaagcaaatcatatcaatagctaaagagtccaaggcagatttcatccatcctggatatggctttctcagtgaaaactctgctttagccgcatcaactaaaagagccaagattaaatttattggccccagtgaaaaaactttaaaaatattcggtgacaagaccactgccaaagaattagctttgagtttagacattcccacgatatcgggaacacatcagaaaacttctctgaaacatgctcaaagctttatgaagtcattaagtaagaattcatctattttgattaaggctatttcaggtggaggaggcagagggatgagagttgtctctaagctggaagaattaaaagaatcctatgaaagagcatcatcagaggctaaggcaacttttgattcccctgacttgtatctagaagagtatcttaaaaattataggcatatagaattccaaattataggggatgggacaggagcagtgagtcatttacatgaaagagagtgctctattcaaagacgccatcaaaagcttatagaaatagctcctagtccaagcctaggt

SEQ ID NO: 203031 - DNA, 1000 bp, Unknown
  Bacterial polypeptide expressing nucleotide sequence isolated from the Sargasso Sea
tatgactattataaattcagttttaattgctaatagaggcgaaatagcaattaggatttctaagaccttgaacgagatggggataaaggcttatgggatttatagtaaagatgatagttcaagtgcacatctttcgtattgctctgaagtatttgaattaaacggtacaggaccttctgcgtacttaaatattgatgagatcatatctctcgcaaaaagtaaaaaaattaaggctgtgcatccgggatatgggttcttgagtgaaaaccatgcatttgccgctagttgtgcgaagaatgacatcatttttataggcccaaatgaaaaaacattaaaaaattttggtaataaagaaaaagcaaaaaaattagctcaaaaattagagatacctgtatgctcttcatcggggccaatacaaaaaaaatcagatatcctgagtttttttaatgagataaaaaaaaataaaataatcttaaaagcaaattttggtggtgggggaagaggatcaagaataattcataaaaaagatgatttttctgaagtattatctttagtaaaagaagaagcaaagtcattttctggctctaatatgatttttgcagaggaggtaattgaagaggctagacatattgagattcaaattttgggtgatggacaatcgtgtattcatcttttcgaaagagattgttcctttcaaagaagttttcaaaaatttatcgaattttgtcccgcaccaaatctttcaagccaagctaaagataagctatataattatgcaattagtttgtgcgaaagtgttgcttacaaaggtttgggcacagttgaatttttggtcgataaaaatgaaaaaatctatttcatggaagttaatccaagggtgcaggtagagcatactattacagaagaacttactggaattgatctcatacgatcccagatcagcattttcaatggaaaatctcttaaggatcagaatattaaagcgggaattgtattagga

SEQ ID NO: 203032 - DNA, 1105 bp, Unknown
  Bacterial polypeptide expressing nucleotide sequence isolated from the Sargasso Sea
atgttcaaaaaaattttaatagctaatagaggtgaaatagctgttagaattattagagcatgtaaagaatggggaattcagacagttgcaatacattcagatgtggataaagaaagtatgcatgttaaattggctgatgaaagtgtttgcgttggttcacatcaacctgcaaatagttatttaaatattccagcaattttatcagcaatagaaataaccaattctgaggcagttcatccaggatatggatttttatcagaaaattttaattttgccagtatgcttgaggaaaataacataaaatttattgggccatcttcaaaacttattaaaatgatgggtgataaaattgaggcaaaaaaaattgcaaaaaaatatggtttacctgttatcgaaggttctgaaggtggtatttcagatttagaaagtggtaaaaaattagccaaagaaattggttttcctatccttataaaagccgctggtggtggtggtggtaaagggatgaagattgtaagatctgaaaaagaatttgataacttatttttgacagctaaatcggaagccaaaaagttttttgcaaatgatgaagtgtatattgaaaaattttttcaaaatccacgtcacattgaagttcaagtgctctcaggaaaaaatcatacagttcacttgcacgagagagattgctctgttcaaagacgacaccaaaaattaattgaggaaactccaagtcctgttttaactgatgaaattcgtaaagatcttttcgataggacagttaatatggtatctaaaattggttacgagggagctggaacagtagaatttatttatgaagatggtaaattctattttttagaaatgaatacaagggttcaagttgaacatcctgttacagaaatggtgactggaatagatattataaaagagcaaatatggattgcatatacaggaaatactgccttagaacagtctgaaattaacccaagaggacatgctattgagtgtagaataaacgcggaagatccaagtagaaattttcatccatccccaggattaattggaatgtgtcatcaaccatccgggtttagaactagggtagatagtt

SEQ ID NO: 203033 - DNA, 1038 bp, Unknown
  Bacterial polypeptide expressing nucleotide sequence isolated from the Sargasso Sea
aatgtttaaaaaaattttgattgcaaatcgtggggaaattgcagttagaattataagagcctgtaaagaatggggaatctccactgttgctgttcattctgatgtagatagagaaagtatgcacgttaaattagcagacgaaagtgtttgtataggctctcatcaaccagcaaatagttatttaaatattcctgcacttttatcagctatagacttgactaacgctgaagcagttcatcctggttatggttttttgtctgaaaatgcaaattttgcaaagatacttgaagaaaataaaattaaatttataggtgcatctgcaaaacatatagaaatgatgggagataaaattcaagcaaaaaaaattgcaaaagaaaatggattacctgtaatagaaggatctgaaggtggtgtccgagatgtggctgcagcaaaagagctgtgtaaaaaaattggtttcccggtcttaattaaagcctctggagggggtggaggtaaaggtatgaaaattgttcaaaaagaagaggattttgagacaatgttttctacagcaaaatcagaggcaaaaaaatattttggtaatgatgaagtctatatcgaaaaattttttcaaaatccaagacatatagaagttcaaattttagctggaaaaaatgaaacaattcatttacacgaaagagattgttctgttcaaagaagacatcaaaaattaattgaagaaactccaagtccggttttaaacgacgaaataagaaaagatttatttgataaaactgtaaatatggtcagaaaaatcggttatcaaggagctggcacagtcgaatttatttatgaagatggaaaattttactttttagagatgaatacaagagttcaagttgaacatcctgttactgaaatggttacaggaattgacataattaaagaacaaatatggattgcttttactggtgaaacagctcttaagcaatcagacattaatcctagaggccatgctattgaatgtagaataaatgctgaggatccagaaaaaaattt

SEQ ID NO: 203034 - DNA, 298 bp, Unknown
  Bacterial polypeptide expressing nucleotide sequence isolated from the Sargasso Sea
aatgtttaaaaaaattctaatagcaaaccgaggagaaatagcagtaagagttattcgtgcatgtaaagaatggggaatcgaaacagtggctgtttattcagacgttgacaaaaatagtatgcatgtcagactagctgatgaaagtgtttgcatcggatcacaccaacctgcaaatagttatttaaatataccagccattatgtctgcaatagaaataacaaaagcagaagccgtgcatcctggctatggttttttatctgaaaatgcaaattttgtaaaaattttgggaaaaaaataa

SEQ ID NO: 203035 - DNA, 265 bp, Unknown
  Bacterial polypeptide expressing nucleotide sequence isolated from the Sargasso Sea
aatgataaacaaagtactaatagctaacagaggtgaaattgcactcagagtaatgagggcatgtaaaaaaatggggatcaagacagttgcagtgcattcaactgctgatagacagctcgctcacgtcaagctagctgatgagtcagtttgcattggtggaccaaatccaaaagaaagttatctgaatatgccctcaattataagcgctgcagaattaacaaattcagatgcaattcatcctggctatggttttttatcagaatct

SEQ ID NO: 203036 - DNA, 568 bp, Unknown
  Bacterial polypeptide expressing nucleotide sequence isolated from the Sargasso Sea
atgaagaaaatattaattgcgaatagaggagaaatagcttgtagaataattgagagttgtaaaaagctaaatttgcatacaatagcagtatactcagatgtagataaaaaaagtaaacatgtgcgaatagcagatgaagctgttcatattggagagtcgaaagcccaagaaagttatttatcaacaagaaaaataattaatgcagcgctaagttcaaaagctgatgcaattcatccaggttatggttttttatctgaaaatgcggaatttgctcaaaacgttatggactccggaattacttggataggaccaaagccaaacaatataacatcaatgggtaataaggatattgcaagagaacttgcgataaaaagtaatctaccgatttgtcctggtcttaaaaatgacgaaatagaatcaagtgatttagaaaaaaaatgtatggaaataggttatccaatattaataaaagcgagtgctgggggtggtggtattggtatgcaaattgtcaacaacttcaatgaacttaaaactgcagttgataaaacaaaaaatctagccaaaaaag

SEQ ID NO: 203037 - DNA, 1151 bp, Unknown
  Bacterial polypeptide expressing nucleotide sequence isolated from the Sargasso Sea
aatgtttaaaaaaatattaattgccaatcgaggcgagattgctgtcagaattattagagcatgtaaagaatggggaatttcaactgtggccattcattcagatgttgatagagatagcatgcatgttagattggcagatgaaagtgtttgtgtaggaactcatcaacctttaaatagttatttaaatattccatcaataatgtctgcaattgagttaacaaatgcaaatgctgttcatcctggctatggttttttgtctgaaaacgcagaattcgcaaaaattttagaagattataaaattaaatttataggaccatcttcaaaattaattcaaatgatgggagataaaatacaagcaaaaaaaattgctaaagaatatggtctacctgttatcgaaggctctgatggtggagtaaatgacaaaataaaagctaaagaaatttgtaaaaaaattggttttccagttttaataaaagcttctgccggtggtggaggtaaaggaatgaaaatagtttataaagaatctgaatttgatgatttatttgcaacagctaaatcagaggccaaaaaatattttggtaatgacgaaatttatatagaaaaattttttcaaaatccaagacacatagaggtacaggttttatcaggtaaaaatagaacagttcacttacatgaaagggattgctctgttcaaagacgccatcagaaactaatagaagaaactccaagtccagtccttacagatgatataagaaaagatctttttgaaagaactgttaatatggtaagtaaaattggatatgaaggagcaggaactgtagaatttatttatgaagatggaaaattttattttttagaaatgaatacaagagttcaggttgagcatcccgtatcggaaatgataacaggaatagatataataaaagaacaaatttatattgcattttcaggtgaaacggcactaaaccaaagcgatgttaatccaagaggacatgcaatagaatgtagaattaatgcagaagatgctagtaaaaattttcaaccttcgccaggtactattggaatgtgccatcaaccatcaggttttagaacaagagtagatggatcaatattccaaggttataaagtaactccatattatgatagtatgg

SEQ ID NO: 203038 - DNA, 1102 bp, Unknown
  Bacterial polypeptide expressing nucleotide sequence isolated from the Sargasso Sea
atgataaataaaatattaattgcaaatagaggcgaaattgctcttagaataattagaagctgtaaagaaatgggtataagtacagtagctgtttattcaacaattgataaagaaagtttacatgtaaaatttgcagatgaagcagtatgtataggaccaccaaattctaaggattcatatttaaatattccaaaaataattgctgcagctgaaattacaaattcagaagctatacacccaggttatgggtttttagctgaaaattctgaattttctaaaatttgttctgaaagcaaaattaaatttataggaccaacccatcatatgatagaaaaaatgggtgacaaaataactgcaaaaaaaacaatggaaaaagcaggaattcctactgttcctggatccaaagacttaatagaatcaatatctgaggggaaaaaattagcaaaaaaaattggatacccaattattctaaaagctacagctggtggaggaggaaaaggtatgcgaattgtaaatgaggacaaggattttaaaaaatcatgggaagaagcaactaatgaatcaagtgcagcttttggaaattcaggtttatatattgaaaaatatattgaagaaccaagacatatagaaatacaaattgttggagataaatatggaaatgtaagtcatttatctgaaagagattgttcaatacaaagaagacatcaaaaacttattgaagaaacaccttctccatttgttgacgataatttaagagaaaaaatgggtcaaacagctataaaagcaggtaaagccattaattacgaaggtgctggtacaatagaatttattgttgataaagataagaatttttactttatggaaatgaatactagaattcaagttgaacatggtgttaccgaggaggttactgattttgatttaattaaagaacaaattaaagtaactgatggaataaaagtatctggaaaaaattattatccaaaacttcatgccatagaatgtagaatcaatgctgaggatccaaaaagaaattttattccttcacctggtaaaataacaaatcttcatattccaggaggtcatggtgtaagagtcgaca

SEQ ID NO: 203039 - DNA, 1363 bp, Unknown
  Bacterial polypeptide expressing nucleotide sequence isolated from the Sargasso Sea
tatgtataagaaaattttgatagccaaccgtggtgaaattgctctccgcattataagggcttgtcatgaactagatatcaagactgttgctgtttactcaactgcagatgaattttctctacatgtaaaattttctgatgaagcggtttgtatcggccccccaccaagtaatgaaagttatttaaatatacctcgtattattgctgctgcagaaataacacattccgatgcaatccatcccggctatggatttctagctgaaaatgcagaattttcaaaaatttgtgaagaaaatggattttcattcattggatcgtcagcaaaaattattaactctatgggaaataagtctgaagcaaggaatactatgaaaaattctggagttcctgtaataccaggcagtaaaagtgtcttaaaagatgtttctgaagcttcaaagttagcagaaaaagttggctatccaatcatggttaaggcatctgctggtggaggaggaaaagggatgagacttgtaaactcaaaaaaagaactagaatcagcatttgcttctgctcagacagaagcaaagaattcatttaataatgatgatctctatttagaaaaatttgttgaaaatcccagacatattgaagttcaaatattatcagataattttggaaatactattcatctaggagagagggaatgtacaattcaaagacgacaccaaaaattgattgaagagagtccgtctgttgttgtgaatgataagcttagaaataaattaggatcagctgcaattagtgcagcaaaggctgtgaattatgttggtgttggaacagttgaatttcttttagataaaaatcttgatttttatttcatggaaatgaatactagaatacaggttgagcaccctataactgagatggtaactggtgttgatttaataaagcagcaaataagaatgcatgcaggtaaaaaatatcctaaatttttagaaaattttcaattaaggggtcactctattgaatgtcgtattaatgctgaagatccagcaaatgattttattccctctccaatgaaaataacaagttttcatatgccaggaggaaaaggggtaagaatagatagtcatgcctatgcaggatatcaaattccagcaaattatgactctatgattggtaaattaattgttttttcaagttccagagaaagagctattaaccgcatggcaagggccttagaagaatgtattattgaaggaccaaaaacaactataccttttcatcaagcaattatgaataatgagctatttaaaaaaggtgagttcgatacaggatttttagataattttaaatttattgataaaggagaacaattatga

SEQ ID NO: 203040 - DNA, 985 bp, Unknown
  Bacterial polypeptide expressing nucleotide sequence isolated from the Sargasso Sea
aatgtttaaaaagattttaatagctaatagaggagaaatagcaatgcgccttataaggacttgtaaggagatgggcattcagaccgttgctgtatattcaaaagctgatgaggaaagccttcatgttcggtttgcagacgaggcggtttgtattggccctgctagtagtgcagaatcatatttaaaaagtgctaatattattgcagctgctgaaattacaaatgcagatgctattcatccaggatatggttttttatctgaaaacagcaaattttcaaaaatatgccaagagcataaaataaaatttattggggcttcaccagaaatgattgataagatgggagataaggcttcagccaaagcaacaatgaaaaaagctggagttccaacaatacctggatctgaagggattgtggatagcctagaagatgcacaaaaaattgctcaaaaaataggataccctattatgttaaaagcaactgcaggaggaggaggaaaaggaatgaggattgtcccaaaggcaaaagacttattgaaagcttgggaagatgcccgtcaagaatctaaagcatcctttgataatgatgacatgtatattgaaaagtttattgagaatccaagacacattgaaatacaaattattggagactcaaaaggagaggcagcgcacttatcagagagagactgttcaattcaaagaagacatcaaaaattaattgaagaaaccccctcgccttttatgacagaaaaactaagaaatgaaatgggggaggcagctgttaaagcagcaaaagcagtcaaatatgaaggggcaggaactatagagttcctggtagataaaaacagaaagttttacttcatggaaatgaatactagaattcaagtagaacaccctataactgagcaggtaatagactatgacttaattagggaacaaatcaagattgcaaatggagaggccatatcaggtaaaaactatttccct

SEQ ID NO: 203041 - DNA, 1453 bp, Unknown
  Bacterial polypeptide expressing nucleotide sequence isolated from the Sargasso Sea
atgaagaagttattaaaatcatcaattttgttgttcggattcagccttttatccgcaaactgttgggctgaaggtgatccagtccgcgggaaatcccttttcggaatttgtgttgcctgtcatggggcaaacggagaaggaaagaagatcaacaatgctccaaggatttcaggtcaacaggactggtatgttgaacgacaactgatcaattaccgcgacggtataagaggagttcatattgacgatattactggaatgcagatgcgttccatcgccattaccctcaaaagggatgaggatattgcagatgtcactgcatatgtttcaaccctccagtcggagactccaaaagcaacgatggagggagatctggttgcaggaaaaaatgcttacgccacctgtgctgcgtgtcatggagcagacggaaaaggcaacaaagcccttaacgctcccaagattgcaggacttcaggactggtacatcgcaagacagctcaatcattttaagatcggcgccagaggtagactgaaaaaagatacaataggccagcagatgcgtccgatggcaatggcacttgatgaagacgccatcaataatcttgcagtttatatcgcttccctggaaggagccccgatgatgtccagtgcagtcgctgttgcctcttcagaaaaccagccctccatgtctgacatgatggctgctgcaacgccagcgagtctcaacaccagtgaaccgctctatgcgacctgtaccgcatgtcatggtgaaaatggggaaggaaaacaatggcttggcgcaccaaaaatttctggtcagcatgattggtacttgaagagacaactcaaaaactggcaagacggcatccgtggaactcatcctaaagacgtttatgggattcaaatgcgatcaatgtctatggtcatggctaatgatcaagaaattgataaagtagtttcctacattggaggtttaaactctcctaaaccccctgccactatcaaaggagatcttcaggctggtcagagcctctatgccacctgcgttgcctgtcatggtcctggtggaataggaaataaagcattaaattctcccaagattgcaggtcttccagactggtatgttgccaggcaattatggggatttaaaaatggacatcgcggagaaaatccacgtgatgtctatggccaacagatgcgcccgatggcgatggcacttgcagatcaggaagcgatcaataacgtgtcggcatatgttgcaagttttgacggtagcggagcagctcctgctatggcaacctctgttgccgcatccggaaccacagatgcaacttcgaccgataccggaggacaggcagtcactgtggctgcagtcgcctcaggagattcagccgaagcgggagccgcactttataccacctgcattgcctgtcatggagctgacggagcaggaaacc

SEQ ID NO: 203042 - DNA, 574 bp, Unknown
  Bacterial polypeptide expressing nucleotide sequence isolated from the Sargasso Sea
gatgcccatcggcaaagtgctgatcgccaaccgcggcgaaattgccctacggatcctgcgcagctgccgggaactcggcatcgcgaccgtcgccgtttacagcacggtggataaggacgcactccatgtccagctggccgatgaagcggtctgtgtgggtgacgccctgagcagcaagagctatctcaacgttcccaacattctcgccgccgccacctcccgcggtgtggacgcgatccacccgggatacggctttctggctgaaaacgacaaattcgccgaaatgtgcggcgaccacggcctgaccttcatcggtccctccccccacgcgatccgttccatgggggacaaatccaccgccaaggccaccatgcaagcggtcggcgtaccgacagtgcccggcagcgaaggtttgctgtccggcactgaggatgccaccgtgctggcggaacagatgggctatcccgtgatgatcaaggccaccgccggcggcggtggtcgcggcatgcgtctggtccagagcccggaccagctgaacaacctgttcaaagccgcccagggcgaagcggaggcc

SEQ ID NO: 203043 - DNA, 1339 bp, Unknown
  Bacterial polypeptide expressing nucleotide sequence isolated from the Sargasso Sea
aatgttaaaaaagatcttaattgcaaaccgtggggaaattgcagtcagagtaatccgtgcttgtaaagaatggggaatcgaaacagtcgctgttcattctgatgtagatagagatagcatgcatgtgaaattagctgatgagagcgtttgtattggatcacatcaacctataaatagttatttaaatattcctgctatcatgtctgctatagagataactaatgctgaagcagttcatccaggttatggttttttatccgaaaatgcaaattttgctaatgttctagaagaaaacaatattaaatttattggtgcctctgcaaaattaatctcaatgatgggtgacaaaattcaagcaaaaaaaattgctaaagagaacggtctacctgttatagaaggatcagagggtggagttaaagatattaatgatgctaaacaactttgtaaaaaaattggctttccagttcttatcaaggcctctggaggaggtggaggcaaaggtatgaaaattgttaataaagaagaagaatttgaaaccttgttttctactgcaaaatctgaggctcaaaaatattttggtaatgatgaggtatatatcgaaaaattttttcaaaacccaaggcatatagaggttcaaatattagctggaaaaaatagaacaattcatttacatgaaagagattgctcagttcaaagaagacatcaaaaactaatagaagaaacaccaagccctgttttgaatgatgaaatccgaaaagatttatttgatcgaactgtaaaaatggttagtaaaattggatatgaaggtgctgggacagttgaatttatttatgaagatggaaaattttatttcttagaaatgaacactagagttcaggtagaacatcctgtaactgagatggtaacaggtatagatattataaaagaacaaatatggatagcatacacaggagaaactgctttaaaacaatcagatattactcctagaggtcatgctatagaatgtagaattaatgctgaagatcctagcaaaaactttcaaccttcgcctggtattatcgaaatgtgtcatcagccttcaggatttagaacaagagtagatggagcgatatttcaaggctataaagtaactccattttatgacagtatggtttgtaaattaatatgccaaggaaggaatcggcaagaagctattcaaaggatgaatagatctttagatgaatttgtaattgagggaattacaactacaattccactacataaaaaattattaaatcacaaaaaatttatagactcagactttaatgtaagttggttagataaagaaaaaattatttaa

SEQ ID NO: 203044 - DNA, 712 bp, Unknown
  Bacterial polypeptide expressing nucleotide sequence isolated from the Sargasso Sea
atgattgagaaagtactaattgcaaacagaggagaaattgcccttcgtgtaatgaagacatgtaagactttaggaattaagactgtagcagtatattcggatgaagatgtaaattcccttcacgtaaaaactgctgatgaatcatactacataggtgaggctgctcctgcaaagagctatctcaaccaagaaaaaattcttgaagtcatgctatcttctggtactgatgctatccatcctggttatggattcctctcagaaaatgatgatttcgcacgattatgtgaaaaaaacaaaattaactttattgggccttctgcagattcaatgaatctttgtggagataaaatgcgttgtaaagccgcaatgctaaaggctgaagttcctactgtacctggaagtccaggaatagttgatgatgcacaacaagcagaaaaaattgcaaatgaaattggttatcctgtacttttgaaatccgtttatggtggaggaggtcgtggaattagattagttactaatgataaagaattgaatgaaggctttgcaacagtaacttctgaatctatagctgctgtaggtaaatctgcaatcatcgttgaaaaattcttagaaaaaacaagacatatcgaatatcagatgtgtagagataagcacggaaatgcagtacatctctttgagagagaatgctctattcagagacgaaaccaaaaat

SEQ ID NO: 203045 - DNA, 1024 bp, Unknown
  Bacterial polypeptide expressing nucleotide sequence isolated from the Sargasso Sea
gctattcgcatagcaagaacttgcaatgatttaagtattaaggcaattggtatctattccgaagatgatctaaattctttacatctatctaagatggatgagtcgttcatggtagatgaaaaaggagcaagtgcttatctaaatataaagaagataattgatattgctaagcaagaaaaggtagatggcatccatccaggttatggttttttaagtgagaaccctgcttttgctaaagcagcaaaacaagcgaaaataaaattcataggaccttcagaaaagtctttaaagatttttggaaataaatctgaagcgaagcaactagctagcaagctaaatgtacccgttatagctggaactgaaggcaagacatctttaaaacaagcaactgacttctttaaaggtttaaaaaagaattcttctgtggtcataaaagctattgcaggaggcggtggaagaggtatgagggtagtcaatacgcaatctgatttaaaagatgcaatgaatagagctgcatcagaagcacaatcagcatttgattcatctgacctttatgttgaagaatatctagaaaactatagacatattgaaatccaagttttgggtgatggtaaaggactagcaactcattttcacgagagggaatgttctactcaaagaagacatcaaaaaatcttagaaatagctcctgctcccggaattaataaaggactaaaagagaagatgcttgatgcttcggtagcattaattcaagagtcaaaatatgaaggtttagccactgtagaatttctagttgattatgcaaaagaagatttcagatttattgaatgcaatgctaggttgcaagtggagcatactgtgactgaggctatattaggtttggatttagttaaagcccaaattcaaattgcttcaggcaaaaccttaaaacaacttaaattagaacaagagaacataagtgagccgaatggctttgcaattcaatcccgagtcaacatggaagttatagattctgaaggagaaa

SEQ ID NO: 203046 - DNA, 1276 bp, Unknown
  Bacterial polypeptide expressing nucleotide sequence isolated from the Sargasso Sea
atgaaatcagaaattagcgttgtaatacctactcttgataatttcttagaagttcaaaaaattattctaagcatagattctcaagatttactcccttcagaaataattttagctgattcaagtgcctcaaataaaattgaagattgcatatcagacctccagtcatctgttccaattcgatacttaagagttggaagagcctataagtatgatagatttctccatcgctttttttcttttccgattttatctttttttaaaagtcactttccaaaagggagggcatttccctacgaagcaacaaacgcaggcgcatcaatcgctagatataaatggatagcatttcttgatgcaaccactgttccaagcaaagcctggttaaaagactattttaatttaatttcaaaagaaggttttgatgtgatttttggaaacactaaatattatggagaaacttggtatcaagagcttctaagggcatcaacatatggaagtattgggcatgaaacagctcctggctctttaatgcaaactgctgaatttcttgatggctacaaaattactgaaggagttagatccggtggagatgttgcgtggaagatgcagatcaaggactcccttaaattttatttacctaaaaaaacctatttatcatattcaagtttacctaagtcacttttttctacgcttaaaaaattttttatttatcaaatttatggctcttttctagatattcaaaataatgttaaagatttatatcttggcactgctttgctcttgagtattatattgattccaaagtggaactatattgttggttgggatagcgctctttttatcccgcatataactaagatattttttttgagcttatctcttatcatttttataagttttattgtgaatagaatatttttcagaaaatttgctccagatagctttagagctaactttttaaagttaattttatttttcttaatcgcatattctatatttaattggaatggagttgtagccaagtgggtcgaggactctatttggtacataccccatattacaaaaatttttgtttcattgatttttgcagcttcttttatatacagaggaatctatttcccgcttaagaacagaataagattttcatatttatttccttatcgatggtttttagttggaattcttggaattttactcgatttagtcaaagctccaggatacttacttggtgcaattttagcttcttttataagacgagctaaatatattaaaggataga

SEQ ID NO: 203047 - DNA, 1030 bp, Unknown
  Bacterial polypeptide expressing nucleotide sequence isolated from the Sargasso Sea
ttaaaaattaatggaaaaggtacaattatttatgaagatggttccaggtatttaggtgagtttagagatagcacatataatggcagaggtacctttacttatgcagatggaaaagaatggacaggtgaatggaaagatggaaaaaatattaatggtgaaggaataataaaatatgataatggagagatgtgggagggtgaatataaagatggcaaaaggaatggagaaggaacgtatacatatccagatgaaaaacaatatgtaggtcaatatattaatgatgaacgtaatggagaaggaacattaactcatcctgatggaaaaaagtatatcggggaatggaaagatggaacttatcatggtcagggaacttacatatactctgacggaagagaatataaaggtgaattcagtgaagggttttttaatggagctgggttattcctatatccagacagctcaaaatatttaggaagctttactaagggcaatagaaatggtcaaggtacatacacttatccagatagtagtgaatgggtgggagaatggaaggatagcaagcgttttacaggtaatggaataataaagtttgataatggtggaatatgggaaggtgaattcaaaaatggagaaccatatactggtaaaggaatatttatttggtcagatagttcgcagtatgaaggggatattgtagagggcctatatcaaggtcaaggtacatacacttatccagatagtagtgaatgggtgggagaatggaaggatagcaagcgttttacaggtaatggaataataaagtttgataatggtggaatatgggaaggtgaattcaaaaatggagaaccatatactggtaaaggaatatttatttggtcagatagttcgcagtatgaaggggatattgtagagggcctatatcaaggtcaaggtacatacacttatccagatagtagtgaatggatgggagaatggaaggatagcaagcgttttacaggtaatggaataataaagtttgataatggtggaa

SEQ ID NO: 203048 - DNA, 491 bp, Unknown
  Bacterial polypeptide expressing nucleotide sequence isolated from the Sargasso Sea
gatgttgactaacagcatgttcactaagcttttaattgctaaccgtggtgaaattgcctgccggattatcaaaaccgcgcaggccatgggcgttcgcaccgtagccttatattccgatgccgataaaaacgcccgccatgttgccatggccgacgaatcgttttacttaggcggcagcgccccggcggattcttacctcaagggcgacttgattattgaaatcgccaaaaaagctcaggcgcaagccattcacccaggctatggcttcttatcggaaaacgctgactttgcccgcaagtgtgaggcggccggaatcgtatttgttggcccaggcagcgatgccatcgatgccatgggcagcaagagcgcggccaaagccattatgacggcggcccaagtgcctttagtgccaggttaccatggcgacgatcaaaccgacgcgacactcaaggccgaagccttaaaaatcggcttccccatgctgattaaag

SEQ ID NO: 203049 - DNA, 304 bp, Unknown
  Bacterial polypeptide expressing nucleotide sequence isolated from the Sargasso Sea
catgctagaaaaagtactgatcgccaaccggggtgaaattgcactgcgtattttacgtgcgtgtaaggaactcggtatcaaaacggtggctgtgcactccacagttgaccgtaatctgaaacacgtgctgctggctgacgagaccatttgtattggtcctgcgccatcaccacaaagttacttaaacattcctgcgctgattgctgcagctgaagtgaccaatgcccaggctattcaccctggttatggtttcttagctgaacgcgctgactttgctcagcaagtggaagaaagtggtctggtg

SEQ ID NO: 203050 - DNA, 414 bp, Unknown
  Bacterial polypeptide expressing nucleotide sequence isolated from the Sargasso Sea
gatgttgactaacagcatgttcactaagcttttaattgctaaccgtggtgaaattgcctgccgcattatcaaaaccgcgcaggccatgggcgttcgcaccgtagccttatattccgatgccgataaaaacgcgcgccatgttgccatggccgacgaatcgttttacttaggtggcagcgccccggcggattcttacctcaagggcgacttgattattgaaatcgccaaaaaagctcaggcgcaagccattcacccaggctatggcttcttatcggaaaatgccgattttgcccgcaagtgtgaggcggccggaatcgtatttgttggcccaggcagcgatgccatcgatgccatgggcagcaagagcgcggcccaagccattatgacggcggcccaagtgcctttagtggcagg

SEQ ID NO: 203051 - DNA, 304 bp, Unknown
  Bacterial polypeptide expressing nucleotide sequence isolated from the Sargasso Sea
atgtttgacaaaattttaattgcgaaccgtggcgaaatagcactccgggtcattcgcgcatgtcaagaaatgggcattcaaacagtggcagtgcactctactgcagacagtgatgcaatgcatgttcgtatggctgatgagagtgtatgcgttggacctccttccggtctagaatcttacctctcaatgccagctattcttgcagcatgtgaaatatcaggcgcacaggcaatacacccaggttatggatttctttatgaaattgctaactttgttcaagccagtggaagatcatggacttaaa

SEQ ID NO: 203052 - DNA, 838 bp, Unknown
  Bacterial polypeptide expressing nucleotide sequence isolated from the Sargasso Sea
cacgctgggagcggccaacacgctgaccaacccgcttaccgcgcaaggggcgaccaactcgctcaccggtcagggggcgcccaactcgctcgccacgccgggaacgaccaacacgctcgccgtgcagggcgcaactgactcgctcaccgggctgggggcgaccaactcgctcgccacgctgggagcggccaacacgctcgctgtgcagggcgcgaccaactcgctcgccgcgcagggggcgaccaactcgctcaccgagcagggggcgaccgactcgctcgccgtgcagggggcgaccaactcgcccgacgcacagggggcgaccaacccgcttaccgcgcagggggcggccaactcgctcaccggtcagggggcgaccaactcgctcgccacgccgggagcgaccaacacgctcgccgtgcagggcgcaactgactcgctcgccgctttgattcacgcgtggcgggcaaccaactcgctcaccgggcagggggtgaccaactcgctcgccacgctgggagcggccaacacgctcgctgtgcagggcgcaaccaactcgctcgccgcgcagggggcgaccaactcgctcaccgagcagggggcgaccgactcgctcgccgtgcagggggcgaccaactcgcccgacgcacagggggcgaccaacccgcttaccgcgcagggggcgaccaactcgctcaccggtcagggggcgaccaactcgctcgccacgccgggagcgaccaacacgctcgccgtgcagggcgcaactgactcgctcaccgggctgggggcgaccaacacactcgccgtgcagggagcaactgactcgctcgccgcg

SEQ ID NO: 203053 - DNA, 304 bp, Unknown
  Bacterial polypeptide expressing nucleotide sequence isolated from the Sargasso Sea
atgttgactaacagcatgttcactaagcttttaattgctaaccgtggtgaaattgcctgccgtattatcaaaaccgcgcaggccatgggcgttcgcaccgttgccttatattccgatgccgataaaaatgcccgccatgttgccatggccgacgaatcgttttacttaggtggcagcgctccagcggattcttacctgaagggcgacttgattattgacatcgccaaaaaagcccaggcacaagccattcacccaggctatggctttttatcggaaaacgcggactttgcccagcaagtgtgag

SEQ ID NO: 203054 - DNA, 712 bp, Unknown
  Bacterial polypeptide expressing nucleotide sequence isolated from the Sargasso Sea
caaaaaagctcaggcgcaagccattcacccaggctatggcttcttatcggaaaacgctgactttgcccgcaagtgtgaggcggccggaatcgtatttgttggcccaggcagcgatgccatcgatgccatgggcagcaagagcgcggccaaagccattatgacggcggcccaagtgcctttagtgccaggttaccatggcgacgatcaaaccgacgcgacactcaaggccgaagccttaaaaatcggcttccccatgctgattaaagccgcctacggtggcggtggcaaaggcatgcgtatcgttgagcatgaaggcgaaatcatggacgctatcaactcggcgcgccgtgaagcggcctcctccttcggtaacgataaattattgatggagcgttatttacgccagcctcgccatgtcgaagtgcaagtgtttgccgatacctttggcaatgcaatttacctatcggatcgcgactgctcgattcagcgccgccaccaaaaagtggtcgaagaagccccagccccaggtttaagtgatgagctgcgcgcccaaatgggtgaagccgccgtagctgccgctaaggccatcgattatgtcggcgcgggaaccgttgaattcctgttagataccgacaatagcttctactttatggagatgaatactcgtctgcaggtagagcatcctgtgaccgaaatggtgacgggccaagac

SEQ ID NO: 203055 - DNA, 283 bp, Unknown
  Bacterial polypeptide expressing nucleotide sequence isolated from the Sargasso Sea
atgttgactaacagcatgttcactaagcttttaattgctaaccgtggtgaaattgcctgccggattatcaaaaccgcgcaggccatgggcgttcgcaccgtagccttatattccgatgccgataaaaacgcccgccatgttgccatggccgacgaatcgttttacttaggcggcagcgccccggcggattcttacctcaagggcgacttgattattgaaatcgccaaaaaagctcaggcgcaagccattcacccaggctatggcttcttatcggaaaacgcta

SEQ ID NO: 203056 - DNA, 360 bp, Unknown
  Bacterial polypeptide expressing nucleotide sequence isolated from the Sargasso Sea
aatgttgaccaagcagatgttgactaacagcatgttcactaagcttttaattgctaaccgtggtgaaattgcctgccgtattatcaaaaccgcgcaggctatgggcgttcgcaccgttgccttatattccgatgccgataaaaatgcgcgccatgttgccatggccgacgaatcgttttacttaggtggcagcgccccagcggattcttacctcaagggcgacttaattattgacatcgccaaaaaagcccaggcgcaagccattcacccaggctatggctttttatcggaaaacgccgactttgcccgcaagtgtgaggccgccggaatcgtgtttgttgggccaggcagcgaggccat

SEQ ID NO: 203057 - DNA, 850 bp, Unknown
  Bacterial polypeptide expressing nucleotide sequence isolated from the Sargasso Sea
tttacaggtaatggaataataaagtttgataatggtggaatatgggaaggtgaattcaaaaatggagaaccatatactggtaaaggaatatttatttggtcagatagttcgcagtatgaaggggatattgtagagggcctatatcaaggtcaaggtacatacacttatccagatagtagtgaatgggtgggagaatggaaggatagcaagcgttttacaggtaatggaataataaagtttgataatggtggaatatgggaaggtgaattcaaaaatggagaaccatatactggtaaaggaatatttatttggtcagatagttcgcagtatgaaggggatattgtagagggcctatatcaaggtcaaggtacatacacttatccagatagtagtgaatgggtgggagaatggaaggatagcaagcgttttacaggtaatggaataataaagtttgataatggtggaatatgggaaggcgaatggagcgaaggtgttaaaataaatggaaaaggtactattacttatcctgataattctaagtatgtaggtgcatttaaagagagcaaatataatggagaaggaacgtatacctatgcgaatggagacaagtggagtggcacatggaaagatggagataagttaactggtaaaggtgttattaactatagtgatggttccaaatatacaggtccattagaggatgggaagagaataggttctggatcattgaattttactgatggtaaacgatacgtaggtgaatttttaaataatgaatataatggtgaaggagaattaacctatcctgataattctaagtatgtaggtgcatttaaagagagcaaatata

SEQ ID NO: 203058 - DNA, 871 bp, Unknown
  Bacterial polypeptide expressing nucleotide sequence isolated from the Sargasso Sea
cgctaatcgtggtgaaattgctcttcgcgttctcagggcatgcagagaaatgggcatacaaaccgttgccatccattctaccgctgatacagatgctatgcacgttcgtctagctgacgaaagcgtgtgtattggccctcctcctgtccaaaaaagctatcttaatgttccggccgtcttatctgctgcaactatttcaaatgctgatgcgattcatcccgggtatggctttctctctgaaaacgccaactttgcctctatggctgaggaacatggcttcatattcattggcccaacctcgaaacatatagagataatgggcaataagattttggctaaaaaaacaatgaagaacgctggaattcctgtagtgccgggggcagatagcggaatcactaccccagaggaggcaataccacttgcaaaagctattggtttccctctcatcgtaaaagcttcctcaggggggggaggaagaggaatgagggttgttgaaacttatgatgaattagaaaaatctgtcagattagctagcagagaggcactaaattcttttggggatccagtagtatatcttgaaaaatacttatccaatccaagacacatagaggttcaaattatagcggatcaccatggtaatgttgtacatttgggggaacgtgattgctccatccaacgcagacaccaaaaaatactcgaagaggcaccctcaccagccttatcacccgatcaaagagccctgattggtaagattgtctcaaccgcaattaaaaaaatcggctaccgaagcgtcggaactattgaatttttatatgataatggagaattttattttattgaaatgaatacacgtttgcaagttgaacaccct

SEQ ID NO: 203059 - DNA, 280 bp, Unknown
  Bacterial polypeptide expressing nucleotide sequence isolated from the Sargasso Sea
catgattgattccctgctgattgccaaccgcggcgaaattgcctgccgcatcatgcgcaccgcgcgcgagttgggtatcgctaccgtggcggtgcacagcgataccgaccgcgatgccctgcacgtgcgcagcgccgatcaggcggtcaacctgggtggcgcgcggccgagcgagagttatctgcggggtgaggcgatcatcgccgcggccaaggccactggtgcccaggcgattcaccccggctacggctttctctccgagaatgccgattcgcccgcg

SEQ ID NO: 203060 - DNA, 393 bp, Unknown
  Bacterial polypeptide expressing nucleotide sequence isolated from the Sargasso Sea
gatgttgactaacagcatgttcactaagcttttaattgctaaccgtggtgaaattgcctgccggattatcaaaaccgcgcaggccatgggcgttcgcaccgtagccttatattccgatgccgataaaaacgcccgccatgttgccatggccgacgaatcgttttacttaggcggcagcgccccggcggattcttacctcaagggcgacttgattattgaaatcgccaaaaaagctcaggcgcaagccattcacccaggctatggcttcttatcggaaaacgctgactttgcccgcaagtgtgaggcggccggaatcgtatttgttggcccaggcagcgatgccatcgatgccatggggcagcagagcgcggccaaagccattatgacggcggc

SEQ ID NO: 203061 - DNA, 685 bp, Unknown
  Bacterial polypeptide expressing nucleotide sequence isolated from the Sargasso Sea
atgatttttaattcaattctcattgcaaacagaggtgaaattgcttgtagagtaattaaaactgcaaaagaaatgggtattagatcagttgctgtatatgttgatgcagataaagatgcaccttttgtaaaagatgctgacgaatctgtaaaactcaaagatggaggatatcttgatgcagatcagattattgaagctgccttaaaaactgatgctcaagcaattcatccaggttatggttttctctctgaaaatgcgtcgtttgctagaaaagtaaaaaaatctggtttgatatgggttggtccatcacctcatgttatttccgtgatgggtgacaagcttaaagcaaaggaacttgcaattaaagcagatgttccaacacttccaatgacttcaaatcctaaagaagcaagcaaaattggataccctcttctcatcaaagcagctgccggaggcggtggaaaaggaatgagaatagttaataaatcaaaagaactaaaagattcaataataagtgctcaaagagaagcattaaatggatttaatgacgatagaatctttatcgaaagatatgtagaaaaatctagacatattgagattcaaattattggcgactcgcatggaaatgtagttcatctcggtgagcgagaatgttctatccaaagaagacatcaaaaaattatga

SEQ ID NO: 203062 - DNA, 526 bp, Unknown
  Bacterial polypeptide expressing nucleotide sequence isolated from the Sargasso Sea
ctgtcctatgaagcgaacttcaccaacgccaccacctctaacgccacagccgccatcatgctgccgctgcctgcgccgccgggaggctactcaccgcctccgcccgacgccaccgatgccatcgccaacgccaccgccttcagcaccacgaacgccaccgacaccgcccccatcgccaacgccaccgccttcaacgccacgaacgccaccgacgccgcccccatcgccaacgccaccgccttcaacgccacgaacgccactgacgccgcccccatcgccaacgccaccgccttcaacaccacgaacgccactgacgccacacccatcgccaacgccaccgccttcaacaccacgaacgccactgacgccacacccatcgccgctaacaccaccaccgtcgccaacaccaccaccgcctccgcagtcatcgtcgtctcgagcgcgtcgccctcgagcggccctctaacgggcggcactcacatcgtcgtgagcggctcgggcttcgccactcacgccgccgtgcgaa

SEQ ID NO: 203063 - DNA, 1737 bp, Unknown
  Bacterial polypeptide expressing nucleotide sequence isolated from the Sargasso Sea
tatgacgatcaaaaaactccttattgccaacagaggagaaatcgctagtaggattatttctagttcgcatgacatgggcataagttgtgttgcaatctatacagaagctgataaagacacaccatatgttagagaagctgatcaagcttttaaactttctgattcttatttgaactcaaaagaaattttagatatagctcttaaatcaaattcagacgcaattcatcctggctacggttttttatctgaaaatgcagcttttgccaatcaagttaaaaaattaaatattaaatgggttggtccttcttcaaatgccataaaaaaaatgggagacaaattaactgcaaaagaaattgcaataaaagcaaacgttcctactttaccaatgacttcagatcctaaaaaagctaattctattggatatccaatacttgtgaaagctgctgccggaggtggtgggaaaggaatgcgtatcgtcgaaaaggcaaaggacttgaaagagtctatcaaagctgcagaaagagaagctgaaggtggttttggtgataaaagagtatttctagaaagatatattaaaagatcgaggcacatagaaatacaaatattaggagatgcatttggaaatattgttcatcttggtgaaagagaatgttccattcaaagacgtcatcaaaaaattgtagaagaatcaccttcccccatggttgatgaagaaatgcgtgaaaagatgggagaagcagcaataaagctagcttcgaaacttaaatacgaatcagccggaacggtagagtttttggttgatgaaaaaactaaagaattttggtttttagaagtaaatacaagactacaagttgaacaccctataaccgaagaggtgactggaatagatttggttaaagaacaattaagaatagcatctggagaagagttgggttatgaacaagaagatatagatttttatggctcgtcgatagaagtaagactttatgcggaggatcctggaaatgatttccttccagtgacaggtaaaatgatagcttttgagccaagtgatgatccattagttcgttgggatgttggaattgaaagcggttcaaatataactgctaattttgatcctttgttagcaaaagtaatttcttttggagaaactaggttggaagcagctaacaaactagctcttgctatggaaaatagtcactttggtggaatgaaaacaaatagagattatttagtctctattttgagatcaaaagagtacctggatggagatacaactactgattttgttgagaggattaatttaaattctgaagtagatttaacagaagaagaaatttttaatttcgcaaaagttggcgctatgtggatgcaaggcaaaaacagaagtgaagcgatggttttacaaaatattcaatctggttggaataatgcgagactcccctaccaagaagtcaaattatcgcttgatgatcaagaatacagggtgaaatataagtcattaaaagatggaaattttgttagtgcagaaagcgaaattattagaatgtttgattggcatgaagattttattgatgtggaaatatctaatgttagatatcgatctaaaattaccatggacgatgatttgcttctcattcaaacacataaaggaaatttgttatttaaaattttaccgaaatttaatattactcaggaagaagcaataaaaggtgggcttactgcgcctatgcccgg

SEQ ID NO: 203064 - DNA, 1291 bp, Unknown
  Bacterial polypeptide expressing nucleotide sequence isolated from the Sargasso Sea
aatgtttgacaaaattttaattgcgaaccgtggcgaaatagcactccgggtcattcgcgcatgtcaagaaatgggcattcaaacagtggcagtgcattctactgcagacagtgatgcaatgcatgttcgtatggctgatgagagtgtatgcgttggacctccttcgggtctagcatcttatctctcaatgccagctatccttgcagcatgtgaaatatcgggcgcacaggcaatacacccaggttatggatttctatctgaaaacgctcactttgttcaagcagtagaagatcatggacttaaatttattgggccaactgctgaacatatcagaattatgggtgacaagattacggcaaaagacactatgaaggcgcttggggtaccatgcgtgccaggatctgagggcggtgtagatagcctgaatgatgcgcatgaagtagcagcggatatcggatacccagtgattattaaagcaaccgcgggtggcggtggtcgaggaatgaaggttgcccggactgctaaagaactagaaagtgctttcttgactgctagggcggaaggcaaggcagcttttggcaatgatgaagtttacatcgagaaatatctcacaactcccagacatatagagatacaggtctttggtgatggcaaaggtagagcagtacatttgggtgaacgagactgctcacttcagcggcgccaccaaaaagtgttagaggaagcgccaggcccttatgtcttagacgaagaacgcaagctaattggaaagacatgcgcagacgcagttgctaaaattgactacattggtgccggcaccatagaatttttatatgaaaatggagaattctacttcattgaaatgaacacacgacttcaagttgagcacccagttacggaggccatatttggcgtagacttggtacgagaacaaattcgcattgcatcaggacaaccactttcatttgtacaggaacagcttgaaataaatggccattcaatcgaagtacgcattaatgctgaaaaattacctaacttttcacctagtccgggaaaagtaaccgcttatcatgctccaggtggacttggagtaagaatggatagcgcactttacaatggctactcaattccgccttactacgatagtcttataggaaaattaattgtccatggtgagaatagaaaagaagcaatagcacgattaaggcgagctttgggtgaattaatcatagatggtatagacactactgttccattatttgaagaacttcttaatgaggatgatattgta

SEQ ID NO: 203065 - DNA, 1159 bp, Unknown
  Bacterial polypeptide expressing nucleotide sequence isolated from the Sargasso Sea
atgctcgataaagtagtcatcgccaatagaggagaaattgccttaaggatcttgagagcttgtcatgagattggaataaagaccgttgcagtccattctaaggcagatgataacctcaaacatgttttgttagctgatgaaacagtttgtatcggcccagctgagagtatgaatagctatctagacatgccgagaattatttcagcggcagaagttactgatgcggttgccattcatcctggatatggatttctatcagaaaatgccgattttgcagaaagagtggaatcatcaggttttaccttcattggcccatcctcagaagctattagaatgatgggagacaaggtttctgcaataaaattaatgaaaaaagcaggagtgccaaccgttcctggttcagatggggcgctcaaagatgatcccgatgaaaacctaagaattgctagagatattggctatccagtcatcataaaagcctctggaggaggaggtggaaaaggcatgcgtgtcgttcatgcagaagcagccttactaaatgcaattgcactgactcaggcagaatcgagatcagcatttaataatgatgaggtttacatggagaaatttctagagactccgagacacatagagattcaagttctatgcgatggacaaggaaatgccattcatcttggagagagagattgctcaatgcaaagacgccatcagaaagttatcgaggaagcgcctgcaccaggtataactgaggatcaaagaaattacgttggtcagagatgtattgatgcgtgcctagaaatgggttaccgaagtgctggtacattcgaatttttatatcaagacaatgaattctatttcattgagatgaacaccaggcttcaagttgaacatcctgtcacagaaatgattacaggaattgatatcgttaaagaacaattgaaaattgcctcaggagaaaaattagctatcaaacaagaagatgtaaaaatcaagggtcatgcaattgagtgtcgaatgaatgcagaagacccaaagacatttatgccttcacctggtgacatcaagttgtggcatatgcctggtggcccaggtatcagaattgacagccatatatacagtggatatcgtgtgccgccctattatgactctatgattggaa

SEQ ID NO: 203066 - DNA, 808 bp, Unknown
  Bacterial polypeptide expressing nucleotide sequence isolated from the Sargasso Sea
atgaattttactaaattattaattgccaatagaggcgaaatcgcatgtcgtgtaattggaagtgcccaaaatatgggaataaaatgtgtggctgtatatgtggatgcagataaagagtcaccatatgtgaaaatggcagatgaagcagttaagctttctgattcctatttaaattccaaagaaataattcaagcagcaatagatacaggtgctcaggccattcaccctgggtatggctttttatctgagaatgctaagtttgcaagagatgttgctaaagcaggaataaaatgggttggcccttcaggaagagtcataactcaaatgggagacaaacttaaggctaaagaattagctgagaaagctggcgtgcccacacttccaatgacaacagacccgaagaaagccaaagatattggttatcctttattgataaaagctgctgccggaggcggaggaaaaggaatgaggatcgtggaatcgtcaaaagaccttaagtcttctatagaaggggcacaaagagaagctaaagcgggctttgacgatgaaagaattttcattgaaagatatgtacctatttccagacatatagaaattcaaatcttaggtgactcccatggaaatgtagttcatctcggtgaaagagaatgctctatacaaaggagacatcaaaaaattatcgaagaatccccctctcctagagccgatgaagaaatgagacacaaaatgggtgaagcagcagtgaatctagccaaaaaattaaaatatgaatctgctggaacagttgagttcttagtagatgacaaga

SEQ ID NO: 203067 - DNA, 2020 bp, Unknown
  Bacterial polypeptide expressing nucleotide sequence isolated from the Sargasso Sea
tatgtttaaatcgattttagtagcaaaccggggcgaaattgcgtgccgtatcattcgaagcgccagacgcttgggtataaagtcgattgccgtttactccgaggcagaccgaggagcacttcatgtcgacatggccagtgattctgtgtgcattggtccggctcaggcatctgagagttatcttaacatggatgcgattatagaagccatcgaggagaccggcgcggaggcggtgcatccgggctacggttttttgtcggaaaacgcgacttttgctgagcggctcgccgaggccaatgtcacctttataggtcccgggcccgaggctattcggaagatgggcgataaaatagagtccaagaagctagcccaggcagctggagttccgaccgtacccggctactccgaccccttgagcggcgccgcggaatctaaaaaacttgcggatgatatttgctatccagtcatgctgaaagcgtctgcgggtggaggtgggaagggcatgcgcctggtagcagacccgtcaaaaatagaagacgcttttaagtcttgtgtggcagaggcggagtccagttttggtgatggtcgcgtttttattgagaaatttattaccacgccgcgccatattgaaatccaggtgctcgctgactctcacggccatacgcttcacctcggggagagggaatgctcgattcaacgccgccatcagaaagttatcgaagaagctccaagcccttttgttactgaggaaatgcgtgcagcaatgggcgggcaagcgatcgcgctttcagaggctgtggactatgtctcagcgggcaccgttgaatttattgtggatgctgacagaaacttttatttcctcgagatgaatacccgccttcaggttgaacacccggtcacagaactggtcactggactggatcttgtcgagcagatgatccgaattgcccatggagaggagctcgcgtttggccaggatgatatcaaaatggaaggctgggctatggaatcccgcatttatgcagaggatcccatgaggggtttcctgccatcaattggacggttagtgcggtaccgggagccggtgacgtcggcgttcggtatcaccaagaatgttcgtatggatggcggtatcaacgagggggatgagatcaatcgcttctatgaccccatgatcgccaaacttgtaactaatggggacactcgggaagaggcaatccgccatatgtgctgggcattggatgagtattatattcgaggagtggctaataacttgggcttcctgtctgcagttatgcaccatcctcgtttccaacgcggcgaactctctaccaattttattgccgacgagttcggcgaacggtttatcccggatcaaacagagcacaaggatcttgatctgatcgtggctgttacaggtgccgttcaccgcattgccgagggtaagctcttgggtctgcaatctcgcaatttgtctgggaatataatgtccaagcaggatacccatctagacgataaaaaggtcgttgtgttgaatggaaccttttttcccattgtcacgtccggtgccaacggggagataggggtgcgggttcgagaccgcaactttcggatcgagaccgattggtcaccccgcagccctatctttgctgggacggtcaacggcgagcctatttcccttcaaattgaaaaggagggctcacactattctgttcagcacactggtctcaccgcccatgcacgtgttatgtctccgcttgcagcagaaatgctcggccgtatgcccgagaaagaggcgcctgacacctcaggccaactcacttcgcccatgccggggctcttggtgtccctggaagtcgaggaggggcaggatgtcaaaatcggagagcctctggcggtcatcgaagctatgaaaatggaaaaccagctttttgctgagagggatggcgttgtcgccaaaatccacctaacgcccggtgacagtctggacgtgggagagctcattcttgaattgggatga

SEQ ID NO: 203068 - DNA, 1036 bp, Unknown
  Bacterial polypeptide expressing nucleotide sequence isolated from the Sargasso Sea
atgttcactaagcttttaattgctaaccgtggtgaaattgcctgccggattatcaaaaccgcgcaggccatgggcgttcgcaccgtagccttatattccgatgccgataaaaacgcccgccatgttgccatggccgacgaatcgttttacttaggcggcagcgccccggcggattcttacctcaagggcgacttgattattgaaatcgccaaaaaagctcaggcgcaagccattcacccaggctatggcttcttatcggaaaacgctgactttgcccgcaagtgtgaggcggccggaatcgtatttgttggcccaggcagcgatgccatcgatgccatgggcagcaagagcgcggccaaagccattatgacggcggcccaagtgcctttagtgccaggttaccatggcgacgatcaaaccgacgcgacactcaaggccgaagccttaaaaatcggcttccccatgctgattaaagccgcctacggtggcggtggcaaaggcatgcgtatcgttgagcatgaaggcgaaatcatggacgctatcaactcggcgcgccgtgaagcggcctcctccttcggtaacgataaattattgatggagcgttatttacgccagcctcgccatgtcgaagtgcaagtgtttgccgatacctttggcaatgcaatttacctatcggatcgcgactgctcgattcagcgccgccaccaaaaagtggtcgaagaagccccagccccaggtttaagtgatgagctgcgcgcccaaatgggtgaagccgccgtagctgccgctaaggccatcgattatgtcggcgcgggaaccgttgaattcctgttagataccgacaatagcttctactttatggagatgaatactcgtctgcaggtagagcatcctgtgaccgaaatggtgacgggccaagacttagtcaaatggcagttaatggtcgccagtggtcaaccgttaccgctcaaacaggacgaagtgcgtatccatggacacgcctttgaggtgcgtatttacgccgaagatccgcaaa

SEQ ID NO: 203069 - DNA, 1690 bp, Unknown
  Bacterial polypeptide expressing nucleotide sequence isolated from the Sargasso Sea
atgacaaaaaaaagagtactaattgctaatcgtggtgaaattgcactaagaattattcgatcagtaaaagaaatggacatgcatgcaatcgctgtttactcagatattgatagtgattctttgcatgtaaaacgagctgatgaatcattttatttaggcggttctcttccagctgacagttataggaacttaaaaaatttgatcaaggctgttgtggaaacaaaagcagatatggttcatccaggatatggctttttggcagaaaatgcagattttgcaaaagcagttcaaaaaaaagatgtaatttggattggacccaacccagaaacaataaaatcaatgggagacaaaatagaatctagaaaattaatctcaaaggttggtttaatccctgttccaggacaattgaaaccatcacgaactaaaagagaagccttgaaagatgcaaatagttttggctatccagttgccctgaaagctgctcacggaggtggtgggaaggggttaagaattgtcagtaatgaaaaagaattaaatgaaaattttgaaattgtaaaacgtgaaagtgaagcatattttggatcagatcaaatttacgtcgaaaagtttataaaaccagcaagacatgtagagacacaaatattaagtgataagtacggaaatcatatctatttaggtgaaagagattgttctctacagagaaggaatcaaaaacttatcgaagaaagtcctcctatatggttgtctgacttcggccgagaggaattaaaaaaagcaacgattaagattgctgagtcatcaaattatattaacgcaggaactgtagaatttttagctgataatgacgaaaatttttattttttagaaatgaatacaagattacaagttgagcataccgttacagaaatgagatatggtattgatctggtcaaagagcaaattaaagtggcgcttggtaattctttagaagatttcaaaactgaagctaggggtcacagcatagaatttagaataaatgcagaagatccgaccaataattttatgccaactccaggaaccattactgaatatagagaacctatggggaacggtgtaagagttgatggttgggtaaagactggtacatcaatatcacatttttatgacaatctaatttcaaaattagttgtatggggagtttctagagaagaagcaatttcaaaaggtaagagatgtttagatgaatatataattggagggataccaacaacaatatctcttctttccgatgttatatctactaaagaattcaaagaaagccagattcatgttaaatttttggaagaaaattttgaaattaaagatgtttctgaagatgagacatttactgatagaccaagcaaggtcaatatatctcttaacgataatgacagtccatcattagctccacaaagaccaaagaaaatcggtatggatctaactggaaatataagaaatcctggaatcataaaagcagatatgcaaggaacaattatggacatcatgacaaagaaaggtaaaaaggttaaaaaaggtgattcattgttcgttcttgaagctatgaaaatggaaaatgtagtaactgcccctattggtggtgttatcaaagaattcaatattaaaaaaggacagcctgtaaataagggcgatatattggttgaaataggataga

SEQ ID NO: 203070 - DNA, 1569 bp, Unknown
  Bacterial polypeptide expressing nucleotide sequence isolated from the Sargasso Sea
attgatcgccaatagaggtgaaatagcctgcagaattatcaaaactgctcatgaaatgggaatttcttgcgtggcagtgtatacagaggcagactctaattctccatttgtaagaatggctgatgaagctgtaaagctcagtgatacctacctgaatggtaaagaaataattgaagcggcaaaacgtaccggagcacaagctattcatcccggttatgggtttttgtcggaaaatgcaaagttctctagagatgttcaaaaagaaggtttaatttgggttgggcctagttcaagagtaataacttcgatgggcgataaattgaaagcgaaggatattgctgaaaaagctggtgtccccaccctgccaatgactactgatccaaagaaagctaatacaatcgggtatccaatacttataaaggctgcagcaggcggtggtggaaaaggcatgagaatagtcgaagataaaaaagacctcaaagaagctattgctggtgctcaaagagaagctctaactggattcggtgatgacagagtattcattgaaagatatgttgcctcatcaagacacattgaaatacaaatcttaggagattctcacggcaatgttgtccacttaggtgaaagagaatgctctattcaaagaaggcaccaaaagattatcgaagaatctccttcaccaagagttgactcagaaatgagagcaacgatgggcgaagctgcaataaaacttgctaagaaactcaaatatgaatctgccggcacagttgaattcttggtagatgataaaaccggggagttttggtttctagaagttaacacaaggctacaagttgaacatcctgtaactgaagaagtcactggcaaagacttggtttacgaacagctacgaatagctagaggtgaagaacttggctattcgcaagaagatatcagttgggaaggttcttcaattgaagcaagactatatgctgaagacccgtcaaaagattttttaccagctacaggtaccttaatagcttacgaaaatgatactaacatcgatgccagatgggatacaggaatagaacaaggatctgttgttggaactgactttgatccaatgcttgctaaagtaattactaaaggcaaaacaagaatagatgcagcaaataaactcgcacttgctctagaaactatgcatattgggggtgttaccactaatagagatttcctagtggcttctctaagaacaaaagattttttagatggaaagacaacttcagattttattgaaaaaacgaaccctcaaagagcagtaattctggaagggtcaatgttagaaaatgcattgaccgcagcagcattatggatccaaggacaaaatagagaaagtgcaaatattttgaaagatatacccactggctggagaaactctcgtcttccaagacaaaaaataaattttcgatacttagaaaaagatctagaggttacctataaagctaatcgagatggttcttttgatgtaaatgatggaacggttgctcgagttattaagtggactttctcaggaattgatattgaagttaa

SEQ ID NO: 203071 - DNA, 1483 bp, Unknown
  Bacterial polypeptide expressing nucleotide sequence isolated from the Sargasso Sea
atgacaaaaaaaagagtcctaattgcaaaccgtggtgaaatagccttaagaattatacgttctgtaaaagaacttgatatggaagccatagctgtatattcagatgttgatgctgactctcttcatgtcaaaagagctgatgaagcttattacttgggaggttcgcttccctcagaaagctatagaaatattaaaaccttaatgaaagcaatcacggacacaaaagcagatatggttcatcctggatatggattcctggctgagaatgctgactttgctaaggccgtacaaaaaaaaggtgtaatttggattgggccaaaccctgaaacaattaaatcaatgggagacaagattgaatcaagaaaacttatttcaaaagctggattaaatcccgttcctggtcaactcaaaccatcaagaactaaaagagaagcaactaaagatgctgctgattttggttatccagtcgcattaaaagctgctcatgggggtggaggaaaaggtttaagaatagtaaataatgaaaaagagcttttagaaaactttgaaatagttaaaagagaaagtgaagcatattttggttcttcacaaatatatgtagaaaaatttataaagccagcacgacatgttgaaacacagatattgagtgataaatatggtaatcatatttatttaggggaaagagattgttcattacagaggagaaatcaaaaactaattgaggagagtcctccgatatggttatcagattatggaagagaacagttagaaaaagcaacaatgagaattgctgaaatatctaattacgtaaatgcaggaacaatagaattcttggctgatacagatgaaaatttttattttctcgaaatgaatacaagattacaagtagaacataccgttacagagatgagatatggtattgatattgtaaaggagcaaataaaaatagcgctcgggaattcattagaaggttttgaaactgaagctagaggacatagtattgagttcagaattaatgctgaagacccacataatgatttcttaccaactcctggaacaataacagaatatagagaaccgatgggtaacggtgttcgagttgatggatgggttaaaacaggttcatctatatctcatttttatgacaacttaatagctaagttaatagtttggggagtttcaagagaagaggccatttcaaaaggtaagcgttgtcttgatgagtatattattgtcggtgtaccaacaactgcttcaatactttcagaagttttatcaacaaaagaatttagagaaagcaaaatacacgttaagttccttgaagaaaattttcaaataaaagagatagaagaagaggaagtaatcacagataggcctcaaaaagtaaacataacactagatgattcagcaaatcctagtttggctccgcaaagaccaaagaaaattggaatggatttaactggaaacataaaaaatccaggaa

SEQ ID NO: 203072 - DNA, 991 bp, Unknown
  Bacterial polypeptide expressing nucleotide sequence isolated from the Sargasso Sea
atgacaaaaaaaagagtcctaattgcaaaccgtggtgaaatagctttaagaattatacgttctgtaaaagaactcgacatggaagccatagccgtatattcagatattgattctgactccctccatgttaaaagggctgatgatgcttattacctaggaggatctcttccatcagaaagctatagaaatataaaaactttaatgaaagctatcacagatacaaatgctgatatggttcatcctgggtatggattcctggctgagaatgctgactttgctaaggccgttcaaaaaaaaggtgtagtttggattgggccaaaccctgaaacaattaaatcaatgggagacaaaattgaatcaagaaaacttatatcaaaagctggattaaatcccgtacctggtcaactcaaaccatcaagaactaaaagagaagcaactaaagatgctgctgattttggttatccagttgccctaaaagctgctcatgggggtggaggaaaaggattaagaatagtaaataatgaaaaagagctgttggaaaactttgaaatagttaaaagagaaagtgaagcatattttggttcttcacaaatatatgtagaaaaatttataaaaccagcacgacatgttgaaacacagatattgagtgataaatatggtaatcatatttatctaggagaaagagattgctcattacagagaagaaatcaaaaacttattgaggaaagtcctcctgtatggttatcagattatggaagagaacagttagaaaaagcaacgatgagaattgctgaaatatctaattacgtaaatgcaggaacaatagagttcttggccgatacagatgaaaatttttattttctcgaaatgaatacaagattacaagtagaacacacagttacagagatgagatatggtattgatattgtaaaggagcaaataaaaattgctcttggaaattcattaaaaggttttgaaactgaggctagag

SEQ ID NO: 203073 - DNA, 1726 bp, Unknown
  Bacterial polypeptide expressing nucleotide sequence isolated from the Sargasso Sea
atgtttgattcaattttagttgcaaatagaggagaaattgcattaaggataatgagaactgctcaagcaatgggcatccaaactattgcaatttatgttgaagcagataaggatgcgcctcatgttaggtttgctgataaagcagtacttcttccagatggaggatatcttaatatagatgcagttttagatgcagcacaaaaaagtaatgctggcgctattcatccaggttatggtttcttatcagaaaattctgaattcgctacaagagtcattaaagaaaagattgtttgggttggtccctcccctaaagtcatttctataatgggtgataaattaaaagcaaaagagcttgctataaaagctagcgttcccaccctttcaatgacctcaaatgaaaaagaagtcaaaaaaattggatatccgcttctaataaaagcagctgcaggtggaggcggaaaaggaatgagagtagttactgataaaaaagatctacaagagtcgcttgaaggtgcaaaaagagaggctttatcaggttttggagatgagagagttttcattgaaagatatgtagaaaaatctcgacatatagaaatccaaattcttggggactctcacggcaatgttattcatcttggtgaaagagaatgctcaatccaaagaagacatcaaaaaataattgaggagtctccatctccgaggataactgaagagataagattcgcaatgggtaatgcagcagttgatcttgcaaaaaaaataaaatacgagtctgcaggaactgttgaatttctttttgatgataagagtggtgaattttggttcctagaggtcaatacaagactgcaagttgagcacccagttacggaagaagttactggaatagatttagtagctgaacaaataaaaattgctagaggtgaagagctacagtactcgcaagaggacattgagtggacagggtcctcaatagaggctcgtctgtatgctgaaaatccaaataatgattttttacctgaaacaggaaaaatgtttgcttacgaacaagctgaaaatgattttatgactaggtgggattctggtgttcataaagattcagttattggtactaactttgatccgatgcttgcaaaagttatttcctatggtgaaacaagggaggatgctgcaagagttttagctaaatctttggaagattctcatattggcggcgttattactaataaagattttttaattgcaacacttaggtctgatgagtttttaaaaggaaatacaacaacagacttcatagagagagttaaaccaccaagagtaaaaaaccttactaatgatgagcttaatcttgcactaacagctgcagctatgtggaaacaaatgagaaatagaatctcttcagatattgcatcttacattccatccggatggacaaatggaagacttccaaatcctaacattacatttctcctcgatggtaatgaaatatttgttgaatataagttgataaataaaaataaattccttgttttcaattcggaagttgaagtagttaatattgatgataaatatatagatcttgtttttgatggtgtaagagtcaaatctagaatttctgaggatgctgaatttatattagttcatatcccaagtggtgatgtatcttttgaagttaaacctagattttcaatgccaggtcttgaggtgcaagctggtggattggtagctc

SEQ ID NO: 203074 - DNA, 1276 bp, Unknown
  Bacterial polypeptide expressing nucleotide sequence isolated from the Sargasso Sea
gacagctatctgcgctgggagcgcatcgtcgacgccgccaagaccacgggcgcgcaggcgattcaccccggctacggctttctgagcgagaacgaagacttcgcaaaagcatgtgccgatgcgggcctggtcttcatcggcccccccgccagcgccatcaatgcgatggggctcaaggccgagtccaagcgcctgatggagcaggcccaggtgcccctggtgcccggctaccacggtgcagaccaggaccctgccatgttgcaacgcgaggccgaccgcattggctaccccgtgctcatcaaggccagcgctggtggcggtggcaagggcatgcgcgcggtggacaaggccgaggacttcgccgctgcgctcgactcctgcaagcgcgaggccatcaacagctttggtgatgacgcagtgctggtcgaaaagtacgtgcagcgcccgcgccacatcgagatccaggtgttcggcgacacgcacggcaactgcgtgtacctgttcgagcgcgactgctcggtgcagcgccgccaccagaaggtgttggaagaagcgcctgccccgggcatgacgcccgagctgcgcgctcgcatgggcgaggccgctgtggccgccgccaaggccgtgaactatgtgggcgcgggcacggtggagttcatcgtcgaacagcccggcggctacgacgcgccagagcagatgaagttctacttcatggagatgaacacccgcctgcaggtggagcaccccgtgaccgaggccatcaccggcctggatctggtggagtggcagctgcgcgtggcgtcgggtgagcccttgccgctgaagcaggaagacctgcgcatcaccggccacgccatcgaggcgcgcatttgtgccgagaaccccgacaacaacttcctgcccgccaccggcgcgctgaatgtgtacgccttgccggaatgcgtgacgtttgaaagaggtgcagtacgcgttgattccggcgtgcgccagggcgatgcaatcagcccgttctacgactccatggtggccaagctcatcgtgcacggcgacacgcgcgagcagaccttggcgcggctggatgaagcgctggcacagacccacatcgtgggcctggccaccaacgtgcagttcttgcgccgcgtggcgaagacggcagcattcgcgcaggccaagctcgacaccgcgctgatccaacgcgagcaggccgtgctgttccaccaggagcctgtgggcctgccgctggctgcggctgccgccattgcccagaccctgtgca

SEQ ID NO: 203075 - DNA, 1339 bp, Unknown
  Bacterial polypeptide expressing nucleotide sequence isolated from the Sargasso Sea
atgtttaagaaagtcttaatcgcaaatagaggcgagatcgctgttagagttataagagcatgtaaagaatggggaataggaactgttgcagttcattcagatgttgactctgactcaatgcatgttcgattggctgatgaaagtgtttgtattggttcgcacgaacctagaaatagttatttaaatattcccgcgataatgtcggctgttgatgtaactggggcacaagctattcatccaggttatggttttttatctgaaaattacaagtttgctgaaatagttcaaaaacacggtataaaatttattggtccaggatcagaaattattaaaaaaatgggtgataaaatcgaagcaaaaaaaattgccaaacagaatggattaccagttatagaaggttcagacggaggggtaaaaaattcaaaagatgcaaaaataatttgtaaaagaattggttacccagttctaattaaagcttctggtggaggtggtggaaaaggaatgaaaattgtagaacatgaaagtaaattagatgaattattttcattggcccgactagaagcaaaaaaatattttggaaatgatgaggtatatatcgaaaaatattttaaaaaccctagacatatagaagtgcaagtcctctcgggaaaaaatagaacggttcacttaaatgaaagagattgttcagtacaaagaaaacatcaaaaattgatcgaagaaacacccagtcctgtgttagatgaaaaaaccagatctgatttattgaataaaacagttaaaatggtcgaagcaattggatatgaaggcgcgggtactgttgagtatatttatgaaaatggaaacttttattttcttgaaatgaatacaagagttcaagttgaacatccagtcacggaggttcaaacaggtatagatattgtcaaagaacagatttggattgcacattcaggtgacacagcccttaaacaaaatgatattagtgccaggggtcataccatagagtgtaggatcaatgctgaggacccatctaaagatttccagcctagtccaggcataatatctgtgtgtcatcaaccatccggctttaggactagggttgatggttcaatttttcaaggatgtaaaattacaccttattatgacagtttagtttgcaagttaatttgcaaaggcagaaatagaacagaggctatacaaagaactatgagatcgcttaatgaatttgttatcgatggtataacaactactatagacctacataaaaaaatactttcgcatgaaaagttcattagttcagattttgatacaaattggttaagtaaagagaaattttactaaa

SEQ ID NO: 203076 - DNA, 901 bp, Unknown
  Bacterial polypeptide expressing nucleotide sequence isolated from the Sargasso Sea
tatgacttttcataaattattaattgctaatagaggcgaaatagcttgcagaattattaaaactgctcatgaaatgggcattgcttgtgttgctgtctatacagaggccgacagctattcgccatttgttcgaatggcagatcaagccataaagttaagtgactcttacctaaatggtaacgaaataattaatgctgctaaacaaactggtgctgaagcaattcatcctggttatggttttctttcagagaatgcaaaatttgccagagccgttcaaaaggaaggcttgatttgggtaggacctaattcaagagtgataacctcaatgggagataaattgaaagctaaagatatagctgaaaaggctggtgtcccaactctgccaatgaccactgatcctaaaaaagcaaactctattggctatccaattcttataaaagctgccgcaggcggtggtggaaaaggtatgcggatagttgaagataaaaaagatctgaaagaagctattgctggagctcaaagagaagctaagactggttttggagatgatcgagtcttcatagaaagatacgtagcatcctctaggcatattgaaatacaaattttaggggattctcatggaaatgtagtccacctcggagaaagagaatgctctatacaaagaaggcatcaaaaaatcatagaagagtctccttctccaagagttaatccagagatgagagctgcgatgggtgatgcagcaattaagcttgctaaaaagcttaaatatgagtccgcaggcacagttgaattcttagtagatgataagactggagagttttggtttttagaagttaataccagattacaagttgagcatcctgtcactgaagaagttactggtaaggacttggtctatgaa

SEQ ID NO: 203077 - DNA, 1690 bp, Unknown
  Bacterial polypeptide expressing nucleotide sequence isolated from the Sargasso Sea
atgactaaaaaaagagtactaattgcaaatcgtggtgagattgcattaagaataatcagatcggttaaagaaatggacatgcacgcaattgctgtttattcagatgttgatgctgattctttgcatgtaaaacgtgctgatgaatcattttacttaggaggttcacttcctgctgatagctatagaaacttaaaaaatttaatgaaagctgtaattgagacaaaagcagacatggttcatccagggtatggttttttggccgaaaatgctgattttgcaaaagcagttcaaaagaaagatgtgatttggattggtccaaatccagaaacaatcaaatctatgggagacaaaattgaatcaagaaaattaatttctaaagctggcttaatgcctgtccctggtcaattgaaaccatccagaacaaaaagagaagcaatgaaagatgccaatacctttggctacccagttgcgctaaaagcagctcatggaggtggaggaaaaggtttaagaattgtaaataatgaggaagaattagatcaaaattatgagattgtaaaacgtgaaagcgaagcatattttggatcagatcaaatttatgttgaaaaatttataaaaccggcaagacatgtggaaactcaaatattaagtgataaatatggaaatcatgtttatctcggtgaaagagattgttcattgcaaagaaggaaccaaaaactaatagaagaaagtcctcctgtatggttgtctgaatttggaaaagaagagttaaaaaaagcaacactcatgattgctaagtcttcaaattacgttaatgcaggtacagtagaatttttagctgataatgacgaaaacttttattttttagaaatgaatacaagattgcaagttgagcatacggtaacagaaatgagatatggaattgacctagttaaagaacaaataaaaatagcgcttggtaattctttagaagattttgaaacagaagcaagaggacacagcatagagtttagaataaacgcagaagaccctgccaataactttttacctacacctggaacaattaccgaatacagagaaccaatggggaatggtgtaagggttgatgggtgggtaaaaactggtacgtcaatatcacatttttatgacaatctaatttctaaattagttgtttggggagtgtctagagaagaagctatctctaaaggaaaaagatgcttagatgaatacataattggtgggataccaacgacaatttctttactttcacaagtgatatctacaaaagaatttaaagaaagtcagatacatgttaaattcttggaagaaaattttaaaatcaaagatatttctgaagaagaaacaattagtgatagaccaagtaaggttaatatttctcttgacgataatgaaagtcaatcactggcaccccagagacctaaaaaaattggtatggatctaactggcaatataagaaatcctgggattatcaaagcagatatgcaaggaacaattatggatacgatgacaaagaaagggaaaaaagtaaaaaaaggagattccttgtttgttttagaagctatgaaaatggaaaatgttgttactgcaccaattggtggagttattaaagaatttaatataaaaaaaggacagcctgtaaataagggcgatatattggttgaaataggatagg

SEQ ID NO: 203078 - DNA, 1381 bp, Unknown
  Bacterial polypeptide expressing nucleotide sequence isolated from the Sargasso Sea
aatgattaaaaaaattctaattgcgaatagaggagaaattgcgtgcagagttatacgtacagcaagaaagttgaatatcaatacggtagctgtctattctgatgctgataaagattctctctttgtgaaacaggcagatgagtcttaccatataggaggctctcagccagctgagtcttatttagatattaataaaatcattaatattgcaaaaaaatcaaaggctgatgcaattcacccaggatacggatttttatctgaaaatgcagcttttgttaaaagactggctaaagagaaaataaaatttattggacccaatcctaatgctataaaaaaaatgggagacaaaattgagtctaaaaatcttgcaattaaacttaaactaaacgtaatacctggtcataccgctccagtaaaaaactcaaaagaagcactaaaaatctcaaataaaattggatacccagtcttgctaaaagcatcagctggaggtggcggtaaaggaatgagaatagtaagaaaaaatagtgaattagaagaaaattttaatgctgcaaagagtgagtcaaagaaaagctttggggatgatcgtgtgtttattgaaaaatatatagagcaaccaagacatattgagatacaaattctttgtgacaaacatggaaatcaagttcatttaggtgagagagaatgctcaattcaaaggagatatcaaaaagttattgaggagtgcccatcgccatttgtagatgaagaaatgagaaatgaaatggctgcacaagctttaacccttgcaaaggaagttaaatacgactcagcggggaccgtagaatttgtagtagatgctaacaaaaatttttattttctcgagatgaacacaagacttcaagttgaacatcctgtttctgagcttgttacaggcgtagatctggttgaacaaatgatttattgcgcagataataaaaagttaaatatatcacaaaaagatattaaccttaaaggctggtctgttgagtctcgtatttatgccgaagatccaactaaagattttttaccttcaattggtagagtgactgaatacatagagccatcaaaaattgaggataaagatcaaattattagaaacgatacaggaataaatcctggatctgaagtttctttattttatgatcctatgatatcaaagttagcggttcatagtaaggatagagcaactgcaatagacttaatgatcaattcactgcaaaattactacttatcaggagttgaaaataatattgaatttctgatttcaattttagatgacaaaaaatttagaaacggcaaaataagtacaaattttatcaaagaaaaattccctaagggttactattctaatcataattta

SEQ ID NO: 203079 - DNA, 973 bp, Unknown
  Bacterial polypeptide expressing nucleotide sequence isolated from the Sargasso Sea
atgtttaagaaaatcttgatcgcaaatcgcggagaaatagcttgtagggttattcagacctgtaaaaaaatgggtatcaaaaccgtggcaatttattcagatgcagatgaaaatgctttacatgctgacctcgctgatgaagccatttgtattggtggatcaagctctgcagaaagttatcttgtaatagaaaagatcattgatgcttgcaaaaaaaccaaagcggatgcagttcaccccggttatggttttctttctgagaatgaagaatttgctaaagcactcgaagaaaacagcattgcttttataggccccaatcacaaagcaattgtgagcatgggagataagattgagtcgaaaaacattgctgaaaaagcaagtgtcaatgtcatccctggttatacgaaagcaataaaagatgaaaaagaggctgtcaaaattgcaaaagaaattggctatccagtgatgctaaaagcaagtgctggtggtggtggcaagggaatgagagttgtcaacaatgatgatgaatgtgttgatggctttcagagggcaaagaatgagagtaaggccagctttggagacgacagaatttttgcagaaaaattcatcacggaaccgcatcacatagaaattcaaattcttgcagataaaaaaggcaacgctatcttcttaggtgagcgagaatgctcaatccaaaggagacatcagaaagtagtcgaagaggcgccctccccatttatcaatgataaaacaagacaagagatgggtgcacaagccatagcactagcaaaagcagtggattatgagtctgcgggtactgttgagtttattgttgataaaaatcagaatttttatttcctagaaatgaataccagattacaagttgagcaccctgttactgaaatggtaacaggtattgatttggtagaacaaatgatcaagatagcttatggagaagagcttgaaatttaac

SEQ ID NO: 203080 - DNA, 1486 bp, Unknown
  Bacterial polypeptide expressing nucleotide sequence isolated from the Sargasso Sea
atgattaaaaaggttttaatagcaaatcgtggcgaaattgctgtacgcattataagagcgtgtaaagaaatgggcatagagactgttgctatatactcaaaacctgatcgaacatctctacatgttctccttgcagacgaggcatatttcattggtccaggaccatctactcaatcatatttaaatattgagaacatccttactatattaaaaaagagtaacgcagatgcggttcatcctggttatggctttttatcagaaaattgtgattttgcaaatgcaattattaaagaaggtgctatctggataggtccatctgatgaagttattaccactatgggtgataaaatggctgctcgaaagctagtaatagatgcaggtgctcctattgttcctggcacaactgatcctataactaatgtttgtgaagctatagaaattgctggaaaaataggatatccaattcttataaaagctgctggaggcggtggaggtaaaggaatgagaattattcattctgaagttgaattggaatcagcaatggagcaggctagctctgaagctaaaaatgcttttgctgatgagagaatctacatagaaaagtatctagaagaaccacatcatattgaaatacaagtattcgcagatcaatacggcaatatagtaacacttggagaacgtgaatgttcaattcagcgaaggtatcaaaaaataatagaagaaactccatctccttttattgataagaaactacgtaaagagctatcaaaaactgcctatgatataactaaagcctgtaactatttaggtgcaggaacaattgaatttttagttgacaaacataaaaaaatttactttctagaaatgaataccaggctccaagtagagcaccctataactgagatggtaactggaattgatttagttaaagaacaaattttggttgcatctggtaaaaaactatcttactctcaacaacacatacaaaacaatggacattctattgaatgtagaatctatgctgagaatggatttaataatttttctccttcaattggtacaatctcagaaattatgtttcctcatggattaggagtgagaatagatgagggaataagagcaggacaagaaattactccatactatgaccctctcttaggcaagctcattacttggggaaataatcgagaaattgcacttaaaagaatgattagagcactagaagagctgcaaattataggaatagaatcaagtattccattctgtttaaactttataaagcataaaatatttaaggatggtaaatattcaacacatactttagatgaaattaaagatcaattattattagataaattaaacgagaaagaatatttagcagctagaatatcagcagtagaagctaaatatatttctaggaatagtttaactaataaacgaaagttaaatgataaaaataataattggagccagatcagtaaatagt

SEQ ID NO: 203081 - DNA, 2041 bp, Unknown
  Bacterial polypeptide expressing nucleotide sequence isolated from the Sargasso Sea
gatgttgactaacagcatgttcactaagcttttaattgctaaccgtggtgaaatcgcctgccgcattatcagaaccgcgcaggccatgggcgttcgcaccgttgccttatattccgatgccgataaaaacgcccgccatgttgctatggccgatgaatcgttttacttaggtggcagcgccccggcggattcttacctgaagggcgacttgattattgaaatcgccaaaaaagcccaggcgcaagccattcacccaggctatggcttcttatcggaaaacgccgactttgcccgcaagtgtgaggcggcaggaatcgtatttgttggccctggcagcgatgctatcgatgccatgggcagcaagagtgcggccaaagccattatgacggcggcgcaagtgcctttagtgccgggttaccatggcgacgatcaaaccgataccaccctcaaggctgaagccttaaaaatcggctttccgatgctgattaaagccgcctacggtggcggtggcaaaggtatgcgtatcgttgagcatgaaggcgaaatcatggacgccatcaactcggcacgccgtgaagcggcctcctccttcggtaacgataagttattgatggagcgttatttacgccagcctcgccatgtcgaagtccaagtgtttgccgatacctttggcaatgcaatttacttatcggatcgcgactgttcgattcagcgccgccatcaaaaagtggtcgaagaagcgccagcacccggtttaagcgatgaactgcgcgcccaaatgggagaagccgctgtagctgccgccaaggcgatcgattatgttggcgcgggaaccgttgaattcctattagataccgacaatagcttctactttatggagatgaatactcgtctgcaggtagagcatccggtgaccgaaatggtgacgggccaagacttagtcaaatggcagttaatggtcgccagtggtcagcctttaccgctcaaacaggacgaagtgcgtatccatggacacgcctttgaggtgcgtatttacgctgaagatccgcaaaatgagtttttacccgccagcggtaagctcaatttcctgcgcgagcccgagcaaagcaaatacgtgcgtatcgactccggcatccgtgaaaacgatgtgatcagtaatttctacgatcctatgatagcaaagctcattgtgtgggatgagtcgcgcccacgtgcgctacagcgcctagtgcatgcactcgagtcctaccaaatcagcgggcttaagcacaatattgaatttttggccaatattgccgagcatcccgccttcgccaaggcggattttagcaccgactttatcaaccgttacggcgatgcgctgattggtagtgcttcgagcgaaaccgatacggctatcgcttttgccgcgctgtatcaagtgcttgcccgtaaagaagccgccaaggcacaggcaattaatagcgccgatccttactcgccttggggccaagtcagtggctttagactcaacagtgtcagccagcatactattgccctgctcgacgatgcccacgagttacaacaattagtgctattagactttggcgatcactaccaattatcccaacccacagttgatggccaagtgagcaagtcccttagtggtgagcttaagcaggatttactgttagccgaaatcaacggccataagagtaaagtgcctgtcagcgcccagggcgatgattttacgttgtttttaccctctggcagttatcacttcacggcggttaaaacccaagtggttgaggcagagtccagtaatgaagataaactcaaggccccgatgaacggcacagttgtgacccacttagtggaagtcggtgcagaggtgaaggcgggacaagggctactggtgatggaagcgatgaagatggaatacaccatcgaagcgcccttcgacggtattgttaccgagttctacttcaaggcgggcgagttagtgagcgatggcgctgtgctgctccatgttgagcccaaagcccagagtgaggaagcctaa

SEQ ID NO: 203082 - DNA, 1087 bp, Unknown
  Bacterial polypeptide expressing nucleotide sequence isolated from the Sargasso Sea
aatgtttaaaaagatcctcatagcaaatcgtggagaaatagcatgtcgcgtaatccgtacagcaaaacggatgggaattgcgaccgttgctgtatactctgaagcggatgcggaatcgcttcatgcaaggtctgcggatgaagcgatagatatagggggcaatgcttcttccgatagttatttggttatagacaaaatattggatgcgataaagaaatcaggcgccgaagccgttcatcccggctatggttttctatctgagaacgcgacttttgccaagaaattgaatgaagagggcattacatttatcgggccgggtgttaaagcaatagccgccatgggggataagatcgagtctaagaaaatagctgccgtagctggagtaaatactgttccaggatatatgggcgtgcttgcggacgatcgagaagcagttaaagttgctgccgaaatcggatttcctgtgatgataaaggcttcggctggtggcggtgggaaaggaatgcgggttgcttttaatgaaggagaagtgagagagggattccgtgctgcagtaagtgaggcagcttcaagttttggggatgaccgcgtctttattgaaaagtttatagaagacccgaggcatatagaaattcaaatcgtggccgactcagacgggaacacagtttatttaggtgagagagaatgctccatacaacggcggcatcagaaggtagttgaagaagcaccaagcccttttcttgacgcgaagacacgaaaggctatgggtgagcaggccgttctgctttctaagtcggtagattataaatcggctggcactgtggagtttattgttgataaaaataaaaatttttattttttagaaatgaatacaagattacaggttgagcacccagtgacagagtgcataacgggtttagatttagttgagttaatgattaaaatcgccgctggagaaactcttccattgaaacaaaaagatgtgaaacttaaagggtggtcgatggaaacaagagtttacgcagaggatccctatagaaactttttaccgtcaaccggaagattgacccagtacaagccaccacaa

SEQ ID NO: 203083 - DNA, 1342 bp, Unknown
  Bacterial polypeptide expressing nucleotide sequence isolated from the Sargasso Sea
atgctagacaaagtcctaattgcaaataggggtgagatagcactcagagttcaaagagcatgtagagaattagggattaagactgttgcagttcactccactgcagatgaaagtcagaaacatgtctttctagcagacgaatcagtatgcattggacctccagaatcactgaaaagctatctaaatattccttcaataattagtgcagctgaggtcacagatgcaatggctattcaccctggctacggcttcttggcagagaatggtgattttgctgaacaagttgagcaaagcggttatattttcataggcccgaaatctgaaaccataaacctaatgggcaacaaaatcagtgcaaaagaaattgtaggcgaggttggaatacagtgtattccgggttctgatggcaaattggatgatgacattgaaaaagttcataagctcgctgatgagattggttaccctgtattaattaaagctgctgctggtggtggaggcaaaggcatgagagtagctcacacaaaaggagcgcttcagcatacgattgatctcacaaaaatagaatcaaaagcagcatttggtgacgaaacgatctttttggagaagttactggaagaaccaaggcatatagaatttcaggtaatcgcagatcatcatggcaatgcagtatgccttggagatagagattgctccatgcaacgaaaccatcaaaaaatcatagaagaagcacctgcaccaaaaattcctaagaagttaagaaatgagatgttcaaaaaatgcatagctttttgtaaacacatcaattatcgaggcgcaggaacgcttgaatttctctatgaaaatggtgaattttatttcattgaaatgaacaccaggctgcaagttgaacatccagtcactgagatgattactggcattgatatcgtaaaagaacaaatcaaaattgccatgggcttacctctatctttcaaacagaatgatattgtagaaaaagggcatgcaattgaatgcagaatcaatgctgaggatccgaaaacatttatgccctcacctggaaagatagacttatggcatcctcctggtggacctggaattcgggttgatagccatatttataccggttatgaaataccgccatattatgattctatgatcgcaaaagtcattgcgttcgcaaatacaagagagtcagccataactagaatgggagttgcgctttctgaaatgattgttgaagggattcaaacgaatagagatttacaaattgagatcatgcaacacaatgcttttaaagacggcggtacaaatattcattatctcgaaaaaagattgggcctttaga

SEQ ID NO: 203084 - DNA, 301 bp, Unknown
  Bacterial polypeptide expressing nucleotide sequence isolated from the Sargasso Sea
atgatttttaattctttactcattgctaacagaggagaaattgcgtgcaggataataaaaactgcaaaagagatgggaataaggtctattgctgtttatgttgatgctgataaagatgcactatttgttaaagaagctgacgaatctataaggctagatgatggtggttatttagattctaaagaaattataagtgcagctaaaaaatcaggtgctcaagcaatacatcctggatatgggttcttatcagagaatgcctcttttgcaagaaaagtaaaaaaagagggtattgtttgggttg

SEQ ID NO: 203085 - DNA, 1924 bp, Unknown
  Bacterial polypeptide expressing nucleotide sequence isolated from the Sargasso Sea
atgacatatcataaattacttattgcaaatagaggtgaaattgcttgtagaataatgaaaactgctcatgatatgggcatttcatgtgttgcagtatacacagatgctgattctgaatctccatttgttaaattggcagatgaagctattaaactcactgacacctatcttaatggtaaagaaattattgaagcagccattactactggagcacaagcaattcatcctgggtatggttttttgtcagaaaatgcaaagttctcaagagatgttattaaagcgggtttaatctgggttggtcctagctctaaagttattacatctatgggtgacaaattaaaggcaaaagaaattgctgataaagctggagttcctactttgccaatgacaactgagccatcaaaagcaaatacagtgggctaccctcttcttattaaagctgctgctggtggaggtggaaaaggcatgcgaatcgtggaatcaaaaaaagatctaaaagattctattactagcgctcaaagagaggcgaaagttggatttggtgatgatagaattttcattgaaagatatgtggcttcctcaagacatattgaaatacaaattcttggtgattcttatggaaatatagttcatttaggtgaaagagaatgctctatacaaaggaggcaccaaaaaattattgaagaatccccctctcctagggtcgatgaagagatgcgaacggcaatgggtaatgcagctattaaattggcaaagaaacttaaatatgaatctgccggaacagtagagtttttagttgatgataaaacaggcgagttttggtttttagaagttaatactagattacaagtagagcatcctgttactgaagaagttacaggcaaagacttagtatacgaacaattaagaatctcaagaggtgagactttagggtattctcaagatgacattacttggaatggatcttcaattgaagcaagattgtatgcagaagaccctgctaaagactttttgccggcaactggaacacttattgcttatgatgtagataaaaatatagatgctagatgggatactggagtagaaaaaggatcaataataggtactgattttgatccaatgttagctaaagtaattgctaagggtaaaaataggatggatgctactaacaaattagctttagcccttcagtcacttcatatagggggagttacaaccaatagagattttcttgttgaatgtttaaggtctaaacattttcatgaaggtaatactacatctgattttattgaaattgctaaacctaatagatcgattgaattgactaaagataaactagaacaagctgggatagctgctgctttatggattcaaggtgaaaatagggataaagctccgatattaaaagaaattcaatctggatggacgaattcaagattgcctaaacaaaaaattggctttcaatcaggctctgaagagatttcaatatcctataaatctaatagagatggttcttttaatataaatgatgctatttcagcaaaggttataaaatggaatccctttggcatagatatagaaataggtaacactagattcttctcaaaaataactaagaataatgaaaccttagtggtgcatggtccatggggagatatcttatttaaaatattacctagatttaaaactattggacaagaaactaaagatggcggattaattgctccaatgccaggtaaagtaattgatcttaaagtagaagttggaagcaagattaataaaggagacactttagtagtattagaagctatgaaaatggaacatactgtaaaggccattgaggatggtgttattgatgaattatttgtaagtcaaaatgaccaagttgaaaatggaacactcctaatggtaattaaaaaataaa

SEQ ID NO: 203086 - DNA, 988 bp, Unknown
  Bacterial polypeptide expressing nucleotide sequence isolated from the Sargasso Sea
aatgctagacaaagtcctaattgcaaataggggtgaaattgcactcagaattcaaagggcctgtagagaactgggtataaagacagtagcagttcactccactgcagacgatagccaaaaacatgtattccttgcagatgaatcggtatgtattggacctccagaatcactaaaaagctatctcaatattccttcaataatcagtgcagctgaggtaacagacgccatggcgattcatccgggctatggctttttggcagagaatggagattttgctgagcaagttgagcagagtggctacatctttataggtcctaagtctgaaaccattaatttaatgggtaataagatcagtgcaaaggaggttgtatctgaggtaggtatccagtgtattcctggatcagatggagaattagatgatgatattgataaagttcacaagctagctgatgaaattggttacccagtattaataaaagctgctgctggaggtggcggcaaagggatgagagttgcgcacacaaaaggtgctcttcaacatacaatcgatctgacaaaaacagagtcaaaggctgcatttggtgatgacacaatctttttagagaagttactggaagagccaaggcatatagagtttcaagttcttgcagatcatcatggtaatgcagtttgtttaggtgatagagattgctctatgcagcgaagccatcaaaaaataattgaagaagcgcctgccccaaagatcccaaagaaactaagagaagaaatgtttaaaaaatgcattactttttgtaaacacattgattatagaggtgctggaacactagaattcctttatgaaaatggtgaattttatttcattgaaatgaacaccagactccaagttgagcatccggtgactgaaatggttactggtattgatgttgttaaagaacaaatcaaaattgcaatgggaatgcctctatccattaacaagaagatgttgtag

SEQ ID NO: 203087 - DNA, 1921 bp, Unknown
  Bacterial polypeptide expressing nucleotide sequence isolated from the Sargasso Sea
atgagatttaattcaattcttgttgctaatcgtggagagatcgcctgtcgtatcatgcaaaccgctcaatttatgggtatcaaatgtgtagctgtttttgttgatgctgataaagatgctccatttgtaaagatggctgatgaagctataaagttatcttctagctatatggacggctctgccattattgaagctgcaaaacaatctggagcagaagcaatacatccgggatatggatttttatcagaaaattcagcctttgctagaaaagttaaaagcaataaattaatttggattggcccatctcctcatgtaatcaaagtaatgggtgataaattaaaagctaaagaactggcggaaaagtctggggttccaaccctgccaatgacctcaaacatcagagatgttaaaagtattggctacccgatactgatcaaagctgctgctggaggcggtggtaagggaatgcgaattgttaaaaaagaaagtgaattaaaagactcgatagtaagcgccaaaagagaagctctttcaggttttggtgatgacagaatttttatagaaagatatgtagaaaaatcacgtcatattgaaatacaaatcttaggtgatgaacacggcaatattgttcatttaggagagcgtgaatgttccatacaaagaaggcatcaaaaaattattgaggagtcgccctctccaagaattgatccttttttacgtcaagagatgggtcaagctgccgttaaattagctaaaaaaattaaatactgctctgcaggaactgttgaatttttgtttgatgataaaacagatgaattctggtttttagaggttaatacaagactgcaagttgagcatccagttacagaagaggttaccggcatagatttggttgctgagcagatcaagatagcgagaggtgaagagcttgaatttgttcaagatgatattgactggcagggacatgcaattgaagcaagattatatgctgaggatcccggaaataattttttacctgaaattggaatcctgcatgcatatgatactagcctagcttcagaggtaagatgggattcgggcgtagaagaaggtagtgtcattggaacagattttgatcccatgttatctaaagttatttcatgggcgcctaatagacttgatgccgcaaataaattggtacgcggacttgaaaaggctcatatgggaggcgtggtaacaaataggcaatttttaatttcttgcttaaggaatgaaagttttttaaacggaaatacaacaacggactttattgaacgtgaagttttagaaactaaaaaaaatctttctttaaatgaacttcaccaagcatcaatagcagttgctttatggctggcccagcaaaatagggtctctgaccttgttacaggatttatacctgcaaactggaccaatggaagaatgccgcttcaaagagttaagttaatttttgaaaaagatgagatcgaagtaaagtacaaattaaatagagataatttatatgaggttatgggctctacttgtgaaatttaccattgcgatagtgctggcattgatatggcgatagactctcacagattttactctaatgtaactaaggttgagagtgagatcttaataaatatgccatttggagatatcgacgcatctgtacttcctagatttttagagccaggtaatgatgttcctgagggaggtttgattgctccaatgccgggaaaagttattgatgtgaaggttaaaaaaggcagcaaagtaaaaactggtgatactttggtaataattgaggcaatgaaaatggagcattcaattaaagcaactgagacaggcaagatagccaaagtaatgattcaactgaacgatcaagttgataatggtgccacccttctcgtactagaaaaatagt

SEQ ID NO: 203088 - DNA, 748 bp, Unknown
  Bacterial polypeptide expressing nucleotide sequence isolated from the Sargasso Sea
tatgatctttgattcattattgattgctaataggggtgaaattgcatgtaggattataaaaactgccaaagagatgggcatcagatcaattgctatttatgttgatgctgacaaagatgctccttttgtaaatcaagcagatgagtcgattagattagaagatggtggttatcttaatgggaatcaaattattgaggctgcgaaaaagactggcgctcaagcaattcatccaggttatggttttttatcggaaaatgcttcttttgcaagaaaagttaaaaaagaaaatataatttggattgggccatctcctaatgttatatcagtaatgggagataaattaaaagcaaaagaattagcagttaaggctgatgtacctaccctaccaatgacatcaaaacctaatgaagcaaaaaagattggctaccctcttctaattaaggcagcagcaggtggtggtggtaaaggaatgagaattgttgataaagaaaaagatttaaaagaatctttagtcagtgcacaaagagaagctaaaagtggttttaatgatgaaagaatatttattgaaagatacgtagaaaaatctaggcatatcgaaatacaaattttaggcgactcatttggaaacattgttcacttaggagaaagagagtgttcaattcagagaagacaccaaaaaataattgaggaatctccatctccaaggatctcagatgaggttagaaaaatatgggtgatgctgcagtaa

SEQ ID NO: 203089 - DNA, 820 bp, Unknown
  Bacterial polypeptide expressing nucleotide sequence isolated from the Sargasso Sea
tatgatttttaattcaattctcattgcaaacagaggtgaaattgcttgcagagtaattaaaactgcaaaagaaatgggtattagatcagttgctgtatatgttgatgcagataaagatgcaccttttgtaaaagatgctgacgaatctgtaaaactcaaagatggaggatatcttgatgcagatcagattattgaagctgccttaaaaactgatgctcaagcaattcatccaggttatggttttctttctgaaaatgcatcgtttgctagaaaagtaaaaaaatctggtttgatatgggttggtccatcacctcatgttatttccgtgatgggtgacaagcttaaagcaaaggaacttgcaattaaagcagatgttccaacacttccaatgacttcaaaccctaaagaagcaagcaaaattggataccctcttctcatcaaagcagctgccggtggcggtggaaaaggaatgagaatagttaataaatcaaaagaactaaaagattcaataataagtgctcaaagagaagcattaaatggatttaatgacgatagaatctttatcgaaagatatgtagaaaaatctagacatattgagatccaaattattggcgactcgcatggaaatgtagttcatctcggtgagcgagaatgttctatccaaagaagacatcaaaaaattattgaagaatccccctctccaagagttacagatgaaataagaaataaaatgggagatgctgcagtaaagcttgccaagcaaataaaatatgaatctgctggtacggtcgaatttctatttgatgataaaaccaggtga

SEQ ID NO: 203090 - DNA, 1999 bp, Unknown
  Bacterial polypeptide expressing nucleotide sequence isolated from the Sargasso Sea
catgttcgacaagattctgatcgccaaccgcggcgaaatcgcgtgccgcgtcgccgcgacgtgcaaacgtctcgggatcgcgagcgtcgccgtctattccgacgcggacgcgaacgcgaagcacgtggccgcgtgcgacgaggccgtgcacatcggcggctcggccgccgcggacagctacctgcgcatcgagcgcatcatcgaagccgcgcgcgccaccggcgcgcaggcaatccaccccggctacggctttctgtcggagaacgaagattttgcgcatgcgtgcgaagcggccggcatcgtcttcatcgggccgccggtcgacgcgatcgcggcgatgggttcgaaggccgccgcgaaggcgctgatgcacgcggcggccgtgccgctcgtacccggctatcacggcgacgaccaggacgcggccaacctgcatcgcgaagccgacgcgatcggctatccggtgctgctgaaggccagcgcgggcggtggcggcaaggggatgcgcgtggtcgagcgctccgacgatttcccggcggcgctcgcgtcgtgccagcgcgaagccgcgagcagtttcggcaacgatcgcgtgctgatcgagaaatacctgacgcgcccgcgccacgtcgaggtgcaggtgttcggcgacacgcacggcaataccgtgtacctgttcgaccgcgactgctcggtgcagcgccgtcaccagaaggtgctcgaggaagcgccggcgcccggtttgcacgacgacgtgcgccaggcgatgggtgaggcggccgtcgcggccgcgcgtgcggtgaattacgtcggcgcgggcaccgtcgaattcatcatgacgggcgaagcgttctacttcatggaaatgaacacgcgcctgcaggtcgagcatccggtcaccgagatggtcacgaggctcgatctcgtcgagtggcaactgcgcgttgcgtccggcgagccgctgccgctgaagcaggacgaactgcacgtgcggggccatgcgctcgaggcacgcctctatgcggagaacccggcgcgcggcttcctgccgtcgacgggcacgctgaagcacctgcggctgccggccggcgtcgagttcgcgatcggggcatcggtgcgcgtcgacagcggcgtgcgcgaaggagacgcgatcacgccgttctacgatccgatgatcgcgaagctgatcgtccatggcgcggaccgtgcggaagcgctgagcctgatgctgcgcgcattgcgtgcctgtgaagtggtcggcctgcatacgaacgccgcgttcctgcagcggatcgttgcgtgcgcaccgttcgcgacggccgatctcgacacgggcctgatcgagcgcaaccacgacacgctgttcgcgccgcaggagccgccgcgcgcgatgcttgcgctcgcgtgtgcggcgctgcttgcacgcgaacgcggcgcgaccgcgcagggtgcgtcgccgtggggcgagctgccggactggcggctgaacggcggctatcgccgtacgctcgaatggcacgcggccgaacgcgaagcggacgtgacggtcacgtacgaggacgacggcgcggttgcgcgcctcgcgatcggcgacgccgccgcgcaaccgttcgtgtggacgcggggcgccacgccgctcgatttcgacgtgacgctcggcggcgtgcgcagcagcggccgcgtgtatgcggacggcgaccacttccacgtgttcacgcagggcgcggccgagacgttcgaatggcgcaacgtgctcgcgcatgcgggtgacgcggagcagggtggtggccgcctgaccgcgccgatgcccggcaaggtgatcgccgtgctggtcgagcccggccagaaggtcgaagcgggtacgccgctgatcgtgatggaagcgatgaagatggagcacacgatcggcgcgccgagcgcgggcgtggtcgcggaagtgctgtacggcgtcggcgaccaggtttcggatggcgcgcaattgctgatgatggcggaaggctga

SEQ ID NO: 203091 - DNA, 1417 bp, Unknown
  Bacterial polypeptide expressing nucleotide sequence isolated from the Sargasso Sea
catgccatcttctgttctgttcaccaaagtgctggttgccaaccggggcgaaatcgcactgcgcaccgtacgcgcactgcacgacctcggcatagccagcgtggccgtgtatgccgacgacgacgccgccagctcccatgtgcaggcggccagtgcggccgtggcgctgggtgccaccggcccggccgcctacctggacggcgcgcgcctcatcgccatcgcccaggcgcagggctgcgatgccgtgcacccgggctacggcttcttgagcgagcgggccgacttcgcccgtgcctgcgacgaagcggggctgcgcttcatcggccccacgcctgcgcaactggcgctgttcggcgacaaggcgcaggcccgcgcactggcgcagcagcagggcgtgccgctgatgcccggcacgcaggcggccgtgtcgctggaagaggtccaggccttcttcgcccagcacgcccatgccggcatcgtgatcaaggccatcgggggcggcggcgggcgcggcatgcgcgcggtggcgtcggccgatgatttgcccgctgcctacgcgcgctgccgcagcgaggcgcaggccgcgtttggtgtggacggtgtgtacgtcgagcgcctgatgagcaacgcccgccacatcgaagtgcaggtgctgggcgacgggcgcgaggtgatcgccctgggcgagcgcgaatgcacgctgcagcggcgctttcagaaggtggtggagatcgcgcccagcccctcgctgcccggcgcattgcgcgagcgcatcaccacggccgcgctgtccatggcgcgcgccgtggactaccagggcctgggcaccttcgaatttttggtggacctggccagtgccgacctgccttttgtgttcatcgaatgcaacccgcgcctgcaggtggaacacaccatcaccgaagaagtcactggcgtggacctggtgcaggcgcagattgcgctggcggcgggccgcaggctacgggacatcggtctcgaccctgccgcaccgcccaccgtgttgggctttgcggttcagtggcgcatcaacgccgaaacgctggacgcgcagggcaccgccacccctggcagtggcacgctgcgccgtttcgacctgcccgcaggccctggcgtgcgcgtggacacgcacggcgcagcgggcgccacgccatcgccgcactacgacacgctgctggccaagctcatcgtgcacacgcgcagcccgcgttttgccgacgcgctgcgccgctcgcagcgcgcgctggccgagtgtcgcatcgagggcgtggccaccaacctggcgctgctgcaggcgctggctgcgcggcaagaaatggagagccaacaggtgcacacgcgctggctggagtcggtactgccagagcttctggctgctaccaaagatatagctgattag

SEQ ID NO: 203092 - DNA, 2035 bp, Unknown
  Bacterial polypeptide expressing nucleotide sequence isolated from the Sargasso Sea
catgttcaacaagatcctgattgccaaccgcggcgagattgcatgccgcgtcgccgcgacctgcaagcggctcggcatcgcgagcgtggccgtgtattccgatgcggacgccaacgcgaaacacgtggccgcctgtgacgaggcggtgcacatcggcggatcgaccgcggcggaaagctatctgcgggtcgaacgcatcatcgaagccgcgcgcgccaccggcgcacaggcggtgcatccgggctatggcttcctgtcggaaaacgaagacttcgcgcatgcctgcgaagcggccggcatcgtcttcatcggaccgccggtcgaagcgatcgccgcgatgggctcgaaggcggccgcgaaagcgctgatgcatgcggctgccgtgccgctcgtgccgggctatcacggcgacgatcagggtgcgcaactgctgcatcgcgaagccgatgcgatcggctatccggtcttgctgaaggcgagcgcgggtggtggcggcaaaggtatgcgggtcgtcgaacgcactgaggatttcgcggcggcgctggcatcgtgcaagcgcgaagcggccagcagcttcggcaacgatcgcgtgctgatcgaaaaatatctgacgcggccgcgtcacgtggaagtgcaggtcttcgcggaccgtcacggcggcgcggtgtatctgttcgatcgcgattgctcggtgcagcggcgtcaccagaaagtgctcgaggaagcgccggcgccgggcttgtcctcggagatcaaacgcgagatgggcgaggcagccgtggccgccgcgcgcgcggtgaattacgtcggggcggggacggtcgagttcatcatgaccggcaccggcgatttctacttcatggagatgaacacgcgtctgcaggtcgagcatccggtcacggaaatggtgacggggcaggacctggtggaatggcaactgcgcgtcgccgccgacgaaccgctgccgctctcgcaggaacaactgaaagtcgacgggcacgcgatcgaagcgcgtatttacgccgagcaccccgcacgcggtttcctgccgtcgacgggcacgctcaagcatttgcgcatgccggaaggcgtcgaattttcgatcggcgagccgggccgcaaagcctcggttcgcatcgacagcggcgtgcgtgaaggcgacaccatcacgccgttctacgatccgatgatcgccaagctgatcgttcacggcgcgacgcgtgaagaagcgctcgcgcggctgaatcgcgcgctccgggcctgcgaagtggtggggccgcataccaacgtcgaattcctgcaacgtatcgtcacgagcgaaccgtttgcaacgggcgatctcgatacgggtttgatcgaacgtcatcacgatgccttgttcgcgccggccaggaagcctttcaaggaggcgctggcgctcgcctgcgccgcgttgctgacgcgcgaaggcggcagcgcgcatggcgcgtcgccgtgggatgcgctatcgcactggcgcctgaacagcggctacacgcagacgttaggctggcgcgacattgacagcaaccgcagcgcaaacgaaagcgacagcgtcttcacggtcacgtttgcccgcgacggcgccacgcaaacgctcgaacacgatggtgtgcgcgagaacttcacgtggtcgggcggcacaggcgagcacgaataccgtgcgacgattggcgatgcgcgggtgacagggcgcgttttcatcgacgccgacacgttccacgtgttctgcctcggcgaggcgctggccttcgagtggcagaacctgctcgcgcatgccgcggatgccgaaggtggcgaaggccgtttgaccgcgccgatgccgggcaaggtgatcgcggtgctggtcgaaccaggcacggtggtggagaagggcacgccgctgatcgtgatggaagcgatgaagatggagcacaccatcggtgcgccggcggcaggcacggtgtcggaagtgctgtatgcggtcggcgatcaggtcgccgatggggcgcagcttctggtgctggacgtaagctag

SEQ ID NO: 203093 - DNA, 964 bp, Unknown
  Bacterial polypeptide expressing nucleotide sequence isolated from the Sargasso Sea
atgtttaagaaaatcttgatcgcaaatcgcggagaaatagcttgtagagttattcagacctgtaaaaaaatgggtatcaaaaccgtggcaatttattcagatgcagatgaaaatgctttacatgctgacctcgctgatgaagccatttgtattggtggatcaagctctgcagaaagttaccttgtaatagaaaagatcattgatgcttgcaaaaaaaccaaagcggatgcagttcaccccggttatggtttcctttctgagaatgaagagtttgctaaagcactggaagaaaacagcattgcttttataggccccaatcacaaagcaattgtgagtatgggagataagattgagtcgaaaaagattgctgaagaagcaagtgtcaatgtcatccctggttatacgaaagcaataaaagatgaaaaagaagctgtcaaaattgcaaaagaaataggttatccagtgatgctgaaagcaagtgctggtggtggcggcaagggaatgagagtcgtgaataacgatgatgaatgcgttgatggctttcaaagggcaaagaatgagagcaaggccagctttggagacgacagaatttttgcagaaaaatttatcacggaaccgcaccacatagaaattcaaattcttgcagataaaaaaggcaacgcgatattcttaggtgagcgagaatgttcaatccaaaggagacatcagaaagtagtcgaagaggcgccctctccatttatcaatgatcaaacaaggcaagagatgggtgcacaagccatagcactagcaaaagcagtggattatgagtctgccggtactgttgagtttattgttgacaaaaatcagaatttttatttcctagaaatgaataccagattacaagttgagcaccctgttactgaaatggtaacaggtattgatttggtagaacaaatgatcaaggtagcttatggagaagagcttg

SEQ ID NO: 203094 - DNA, 1918 bp, Unknown
  Bacterial polypeptide expressing nucleotide sequence isolated from the Sargasso Sea
atgaagcctcaaactgcttcaggtctttttcaaaaaatcctgattgcaaaccggggagaaatcgcctgcagaatcatcaggacttgcgaaagtttaggagtttccacggttgcagtctattctgaagccgatcgtgatgctttgcatgtgaggcttgccgatgatgccttccatattggtaaagccgtccctgaggactcctatctcaaccatgagcagatccttgaaactgcaatccaatgccaagccgatgccattcatcctggttacggttttctcgcagaaaatgatgtttttgccgaggcatgtctctccaaagggatcaatttcatcggcccacgccccgaatcgatccgtgagatggggtcaaaatcccgtgcgaaacagcttatgcaggaagctggagttccagttgtcccgggctatcatggagacaagcaggacttcaaaaccctaagtaatgaagcagaaaaaataggatttcctctattgatcaaacccgttgccggagggggggggaggggaatgcgtctggttcatcaactcaacgaacttgaggaggcactcactctttcacgcagtgaggccaaaaatgcttttggcgatgacaacgttttattagaacgtttcattgagggcccgcgtcatattgaatttcagatctttggcgatcaacacggaaattttgtccatctccatgagcgtgaatgctcgattcaacgccgacaccagaaaattcttgaagaaagtccatctccttttcttgataaaaccctcagaaagcaaatggctgaagcctcattgaaagcagcaaatgcggttcaatatctaggagcaggcacggtggaattcattattggtgaggagcgtttattttatttcattgaaatgaacacccgacttcaggtagagcatcctgtgtcagaaatgcggaccgggctggacttggtggagtggcagatccgtattgcatcaggcgaggaactccctctcgagcaggatcaaattcgcccaaaggggcattcaatagaagttcgggtttgtgcagaaaatccggaacgcggtttccttcccagcagtggattgctcgaactgtatgattttcccgaagacccatccgcatccgaatcatctctaatcagactcgacagtggttttgaacaaaaagaccgagtaggaattcattatgattcaatgttggcaaaactgattgtttatggtgaagaacgtgaaaaggctctggaaaccatgcaacatgcattaaaatacactgccatcatcggaccggagacaaaccttggttttttacagaaactggtttcccatcctcaatttctcaatggaaaggcggatacacttttcatcgacgcctgtctccctgaattgcttcaaaacgaagaaacaactcccgagtggatatactgggcctgcgccatcgattttttacaatctgaaaaggaatcggcacgacaaaaagctgctaattcctctaatcctcattcaccttggcttttttttgataactggcgtatgggaggggaagaaccctttcagatctcctttcgggatgagcagaataaccaaaggggaattcgattgattgaaagagatcttggatttgaggtttttactggaaaggaatgcattcctttaaaatttcagcaacaaagccgggatgttgtaattctttatgaaaacagcaatggcatcacagaaaaacactcactgagaagtttcaggcatcaaaatgatattctggcagttcatgaaactggacgaattcaactcaccctggaaagtggcagggatcacgaacacgaaaccgaacatactgatagtcaactcaaagcacccatgccgggtaatatcattcgagtctgtgtcaaaaatggggaaaaggtcaatcgtggccagacat

SEQ ID NO: 203095 - DNA, 1924 bp, Unknown
  Bacterial polypeptide expressing nucleotide sequence isolated from the Sargasso Sea
tatgatttttaattcaattctcattgcaaacagaggtgaaattgcttgtagagtaattaaaactgcaaaagaaatgggtattagatcagttgctgtatatgttgatgcagacaaagatgcaccttttgtaaaagatgctgacgaatctgtaaaactcaaagatggaggatatcttgatgcagatcagattattgaagctgccttaaaaactaatgctcaagcaattcatccaggttatggttttctttctgagaatgcttcgtttgctagaaaagtaaaaaaatctggtttgatatggattggtccatcgcctcatgtcatttccgtgatgggtgacaagcttaaagcaaaggaactcgcaattaaagcagatgttccaacacttccaatgacttctaatcctaaacaagcaagcaaaattggataccctctactcatcaaagcagctgccggaggcggtggaaaaggaatgagaatagttaataaatcaaaagaactaaaagattcaatattaagtgctcaaagagaagcattaaatggattcaatgacgatagaatctttatcgaaagatatgtagaaaaatctagacatattgagatccaaattattggtgactctcatggaaatgtagttcatcttggtgagcgagaatgttctatccaaagaagacatcaaaaaattattgaagaatctccctctccaagagttacagatgaaattagaaataaaatgggagatgctgcagtaaagcttgctaagcaaataaaatatgaatctgctggtacggttgaatttctatttgatgataaaacaggtgaattttggttccttgaggtaaatacaaggcttcaagttgaacatccagtcactgaggaagtaacaggaatcgatcttgtttctgagcaacttaaaattgctagaggcgaacctttacaatttaaacagactgatatcaattggaaaggttcttctattgaagctaggctttatgctgaggatcctaataatgacttcctaccagagattggtactctaatagcttttgataaagatgaatctgtggaagcaagatgggattctggtgttacaaaaggaactatagttggtacagactttgatccaatgttagcaaaaataatctcatatgcacctaatagaactgatgcggctggcaagttagcaaaggcacttgaatcagctcatattggtggagtaaaaacaaacagagattttttaattaattgtcttaaatcttctgaatttattgatggtaacaccacaacagatttcattgatagggtaaatcctgctagaaaattaactttagatcaagattcactggaacatgtgaccgcagtagcaactttatggttgcaagcaagaaatagagataatgctaatgttgcaaactttatgccgtcaggatggacaaatggtaggctcccttctcaagctgttgtttttgaacatgaaggatctgaaataaaaataggatacaaacttatgagagatggttcttttaaattatcaaccggaaaaaatgcaaatatatactcagctgataatcatggtattgactgtgtttatgatgacaaaagacactatgcaaaagttacgaaggatgcagacaaacttttagtacatatgccttatggagacgtgatgcttaatattaagccaaaatttgttattcctggtcttgaggttgcaaaaggaggtcttacagcaccaatgccaggtaaagtaattgatatcaaagttaaaaaagggaaaaaagttaaaacaggcgatacacttgtaattcttgaagctatgaaaatggagcattccattaaagcatctgaagatggaacagtgacacagcttttaatatcagtaaatgatcaagttgaaaatggcgcattgttaatgattgttgaataa

SEQ ID NO: 203096 - DNA, 1105 bp, Unknown
  Bacterial polypeptide expressing nucleotide sequence isolated from the Sargasso Sea
atgctagacaaaatcctaattgcaaacaggggtgaaattgcactcagaattcaaagggcatgcagagaattaggcattaagactgtagcagttcattccactgctgacgatagccaaaaacatgtctttctagcggacgaatcagtatgcatagggccaccagaatcactaaaaagctatctcaatattccttcaataatcagtgcagctgaagtcacagatgcgatggctattcatcctggttatggcttcttggcagagaatggggattttgccgagcaagttgaacaaagcggttatattttcataggcccaaaatctgaaaccataaatctaatgggcaataaaatcagtgcaaaagagatagtgggcgaggtaggaatacagtgcattccgggttctgatggtgaattagatgatgatattgaaaaagttcataagcttgctgatgaaattggttatccagtattgattaaagctgctgctggtggaggtggaaaaggcatgagagtcgcacatacaaaaggtgcgcttcaacacacaattgatttaacaaaaacagaatcaaaagcagcgtttggcgatgatatgattttcatggaaaaattacttgaggaaccaaggcatatagaatttcaagtgatcgctgatcatcatggtaatgcaatatgcttaggagatagagattgttccatgcaacgaagtcatcaaaaaatcattgaagaagcacctgcgccaaaaattccaaagaagttaagagaagagatgtttgataaatgcatagctttttgcaaacacatcaattatcgaggtgctggaacacttgagtttctttatgagaatgatgaattttatttcattgaaatgaacaccagacttcaggttgagcatccagtcacagaaatggtaactggcatcgatattgtaaaagaacaaatcaaaattgctatgggattacctctatcccttaaacaagaagaaattgtagaaaaaggtcatgccattgaatgcaggatcaatgctgaagattcaaaaacattcatgccatcgcctggaatgattgatttgtggcatcctccaggtggggcctggaatacgagttgat

SEQ ID NO: 203097 - DNA, 1072 bp, Unknown
  Bacterial polypeptide expressing nucleotide sequence isolated from the Sargasso Sea
atgttcaataaaattcttatagctaatagaggtgaaattgctgttaggattttaagggcatgtaaagaacttggaatacagacggtagctgtttattcgtctgcagataaaaatgcaatgcatgttaaattagcagatgaaagtgtttgtattggacctgcttcatcgctaaaatcttatttaaatattcctgcgataatctctgcttgtgaagtttctggtgcagatgcagtacatccagggtatggttttttatccgaaaattttggctttgttgaaaaactagaagcacatggcattaaatttattggcccaaaatctgaacatattaaaatgatgggcgataaaattttagcaaaagagtcagcaaataatcttggtcttccaattattcctggttctccaggagaaataagcaacacaaaagagggtcttgaagtagcaaataaacttggctacccaataattataaaagcttcatcaggtggcggtggtcggggaatgataaaagtttttaaagaagaagatttagatgagtctttaaaaaaagcttctactgaagctgaaaaatcttttaatgataagagagtttatattgagaaatatttacaaaatcctaaacatatagaaatacaggtgataggtgatgagtatagtaatatagtacatttaggagaaagagattgttcaatgcaaagaagaaatcaaaaattaattgaagaaactccatctgttattatagatgataagaaaagagatgaaatttgcagtttaacaattaattcattaaaaacaatgggatattgtaatgctggaacagtagaatacctttatgaaaatggtaatttttattttatggaaatgaataccagacttcaagttgagcatcctgtttcggaagaaatttataattttgatttagtgaaagaacaaataaaaattgctgctaaatataagctctcaactgatcaagatactctcaaaagtaacggtcattcgatagagtgtagaataaacgctgaagacccagatagctttataccctcacctgggataataacaaattatcatg

SEQ ID NO: 203098 - DNA, 2971 bp, Unknown
  Bacterial polypeptide expressing nucleotide sequence isolated from the Sargasso Sea
atgaaaaaggttcttatagctaataggggtgagatagcaattcgtattgctagaacttgcagtgacttaggccttaaaactgtaggaatctattctgaagatgattcaaattctctccacctgtccaaggtagatgaagcttttaaaatagaaggtaatggagcacaggcttacctcaatatcaaagagataatagcagttgcaaaaaaatctaaagtcgatgctattcatcctggatacggctttttgagcgaaaattcctcctttgcttcagccgctaaacgagcaaaaattaaatttgtaggacccagcgaaagaaccttaaagatatttggagataaaacctcagcaaaagaacttgccctgagtttaggaataccggttattgctggaactaagcaaaagaccactttaaagcaagcacaagattttctaaaatctttaaaaaagaattcatcagttgttattaaggccatctcaggtggtggtggaaggggtatgcgagttgtttcgaaacctgatgacttaaaagaatctttcgacagagcttcttcagaagctaaagcatcattcgattctcctgacttatatttagaagaatatctcagagattatagacacatcgagtttcaaattcttggtgatggtactggtgctgtaagtcatttacacgaaagagagtgctctatccaaagacgttatcaaaagctgatagaaatcgctcctagcccaagcttaaatgtcgatttaaagtccagaatgattgaagcctctctggcattaactcaaaaacttaagtatgagggcttagccactatagagtttttagtaaacatagaaaaaaatgatttcaggtttatagaatgtaatcccaggctccaagtagagcacacagtgactgaatcagttttatctttggatttggtcagagctcaactacaaatcgcttcaggcaaaactttaaaacaaattaagcttgagcaagaaaatgttcctgaacctcaaggctatgcaattcaatccagagttaatatggaaacaattgactctcaaggtaatgcaaatcctggagggggaatttttgaaaattttgatttgccttctggtccaggagtaagggctgatagttatggctacgcaggatatcaaaccaatcctttgttcgattctctgatagctaaaataattacttatgcttctggagataattacaaacaagcaattaatagaaattacagatctctctgcgaatttaaaatttcaggagttccaactaatctgaaccttttaaagaatattctggtaaataaagattttaaaaataacaaagttcataccaatttttttgaagacaacctagatacacttacttctttgaaggatcattctgatctttctgacataaatagaagcatatccaaagatatcccaaaaagaggaaaaatagaagatctcgatccgttggcagttcttgatcacggaaaatctggtggagtttttgttgatcagtcagagaatatattggaactgcaacaattggatataaaagaaggttacgaaagtgttaatgccccaatgcagggaatgatcgttaaatttaatgtcaaggtgggagatagtgtttgggaaggcaaaacactaggaatcatggaagccatgaagatggagcatgaaattacatctcaagttagcggagtggtagaagaaatatctgtctcaaatttagatacagtttttgaaggacattccttaatgcttattcgtctagctgatgttgaaaaacaaaacttgagtgatgaagaagaaatagatttagattggattagaccagatctaagagaagctctcgataggaaagaagcaagtcatgatatcaatcgtcctgaggctgtgaagaaaagatatggaacgggtcatagaactgcaagagaaaatatcgcacatctttgtgatgaaggaagttttctggaatacggatcagttgtaatggctgcacaaagaagaaggagaagtgaagaagatttaattaaaaacactaccggcgatggtatggtttgtggtcttgggcatgttaatggtcatttatttcctgagagcgcttctagagttatggcaatgtcttatgattatatggttcttgcaggcactcaaggcaaaatgaaccatgccaaaaaagacagaatgtttgaaatagcagagcagaatgaactacctaccattttatttgctgaaggtggaggaggtagacctggagatacagatacttcaggagtggccggcctggattgcctggcttttacttattttgctcaattgtcaggtttagttccagtaattggtataaccactggaagatgttttgctggtaatgcagtcctattggggtgttgtgatgtcatcattgcaacggaagattcaaatataggcgtaggcggccccgccatgattgaaggcggaggtttgggagtttttacccctgatgaagtaggacctatggatgttcaggttcccaatggagtcgtggatatagctgtaaaagacgaagaagaggccgttgaggttgcaaaaaaatacctttcttattttcaagggtcaataaaaaactggacagcacctgatgctagaaaactaagatttgcagtccctgagaataggctgagatattacgatatgcgagatattattgatgggattgctgatatagattctgttttagagattagaaaagactgggcccctggaataattacttcgttgataagaatagaaggcaaacctgttggagttgttgcaaacaatcctggtcatctatctggagctatagactcacctggcgctgataaaggatcaagattcatacaactgtgcgatgccttcgatattcctattttatctttgatagattgcccaggcattatggtaggacccgaaagtgaaaaaacagctctcataaggcatgcagctagaatgt

SEQ ID NO: 203099 - DNA, 1699 bp, Unknown
  Bacterial polypeptide expressing nucleotide sequence isolated from the Sargasso Sea
atgtcacaacaaagaatccttattgcaaaccgtggtgaaattgctttacgtataattcgctcagcaaaagaaatggatatgtacacaattgctgtttattcggatgccgatgaagatgcccttcatgtcaaaagagcagacgaagcttattatctaggtggttctcttcctgcagaaagctatagaaatttaaaaaaactagtgaaagcagctacagatacaaaggctgatttagttcatccaggttatggatttctagctgaaaatgcagactttgcaaaagctattcaaaaaaaagggattgtctggataggaccaagtcctgaaacaattagatcgatgggagacaagattgaatcaagaaagcttgtttcaaaattaggtttaaatcccgtaccgggccaactcaagccatcaagactaagacgtgaagctattaaagatgctgaaagctttggatatccagttgctttaaaggctgcacacggtggtggcggaaaaggtttaaggattgttcaaaatgaagcagagttaatcgaaaattttgaaatagttaaaagagaaagtgaagcttattttggttcggaccagatttatgttgagaaatttataaaaccagctcgtcacattgaaacacaaattctctcagataaatacggaaatacactttatttgggtgagagggactgttcactacaaagaagaaaccaaaaattaattgaagaaagtccacctgaatggctctcagattacggaagagaaagactcaaagaatatactttgaaaattgcaaatagttctaattatataaatgcaggtacagttgagtttttagcagatagtgatgaaaatttttactttttagaaatgaacacacgattgcaagttgaacatactgtaacagaaatgagatacggtattgatttagtaaaggagcaaatcaaaattgcacttgggaactctcttgaagattacaagttagaacctagagggcacagtatcgaattcagaataaatgctgaagaccctaccaataattttttaccaacccctggaacaattactgaatacagagaaccgactggaaatggtgtgcgtgtcgatggatgggcaagaactggaacgcaaataacacatttttatgacaatctaatttcgaaacttattgtttggggggtctcaagagaagaagcaagatcaaaaggtataaggtgtttagaggaatatattattggaggaatcccaactacaataaatgtgctcgctgatattttaaaaactaaagaatttataaatagtcaaattcacgtaaagtttcttgaagaaaattttgaaattcgtgacattgaagatgaagaaatttcgtcagataggccaagtaaagtaaaaatttctcttgatgacaataacaatccaactcttgcaccacaaagaccaaagaaaattggaatggatctgacaggaaatattagaaatccaggattgatttttgctgaaatgcagggaacaattatggaaaccatgacgaagcagggtaaaaaagttaaaaaaggtgactccttatttgttcttgaagctatgaaaatggagaatgtgataacttcacctattgatggagttataaaaacttacaatgttcaaaaaggacaagctgtaaaaaaaggggatcttttagtggagatagaaacaagattctaat

SEQ ID NO: 203100 - DNA, 1924 bp, Unknown
  Bacterial polypeptide expressing nucleotide sequence isolated from the Sargasso Sea
atgatctttaattcaatattgatcgctaacagaggcgaaattgcttgcagaattattaaaactgcaaaagaaatggggataaggtctattgctgtttatgttgatgctgacaaggactcgctatttgtaaaacaagctgatgaatcaattagattggaagatggaggatatcttgatggagatcaaattattaatgctgctaaaatgtctggcgctcaagcaatccatcctgggtatggattcctgtcagagaacgcttcttttgcaagaaaagtaaaaaaagaaaagttaatctgggttggtccatcccctaatgttatctctgtaatgggagataaattaaaagcaaaagaattagctattaaagctgatgttcctactctaccaatgacatcaaaaccaaatgaggcaaaaaaaattggataccctcttctaattaaagcagccgcaggtggcggtggaaaaggaatgagaattgtaaataaagaaaaggatctaaaggaatctattgttagtgctcaaagagaagctaaaagcgggtttaatgatgaaagaatctttattgaaagatatgtagaaaaatctagacatattgaaattcaaattttgggggatagtaaaggcaatgttgttcacttaggtgaaagagagtgctcaattcaaagaagacaccaaaaaataattgaggagtctccatctccaaggatttcagatgatgtaagaaataaaatgggtgaagcagcagttaagcttgcgaaacaaattaaatatgaatctgctggcacagtagagtttctttttgatgataaaactgaagaattttggtttttagaggttaatacaaggcttcaagttgaacatccggttactgaagaagttacaggtatagatttagtatgtgaacaactaaagattgcaagaggagaatcacttgaatttgatcaaaaagatataacttggactggctcatcaatcgaagcaaggctttatgctgaagatccaaataatgattttcttccagaaattgggacattaattgctttcgaggaaaataattctgcagaggccagatgggatacaggtgtaaacaaaggaacggtagtcggaacagattttgatcccatgcttgcaaaaataatttcgtatgctccgaatagaactgatgctgccggtaaattagctaaagctcttgaatcagctcacattggtggtgtaaaaacaaatagagattttttagtgaattgtttaaaaactaaagaatttttagatggggataccacctcagattttattgaaagagtaaaacccagcagaaagctcgaaattaatcaatcagaaattgagcatgcttctgctattgccgcaatgtggatgcaacaacaaaatagaaataattccaatgttgcaaaatttatgccctccggttggacaaacggaagattgccaaatcaaaaagtaacatttgaatttgaaaatactgaatatgattttgaatataaacaaaaacgagatcaaaagtttcttttttcaaataataaggaagcattcatttattcgagtgatgaggatggaatagacatgatctttgatggtaaaagacactattccagagtgacggtatcaaaaaacaatattttagtacatatgccattcggtgatgtgatgcttgaattgaagcctaggtttaaaatgccaggtactgaagttactattggtggactaattgctccaatgccaggaaaagttattgatgtaaaagttaaaaaaggtaaaaaggtaaaagctggtgataccttagttattcttgaagcaatgaaaatggaacattcaattaaagcttctgaagatggaactgtttcagaactattaatatcggtaaatgatcaagttgaaaatggtgccttattgatggtggttaaataat

SEQ ID NO: 203101 - DNA, 1036 bp, Unknown
  Bacterial polypeptide expressing nucleotide sequence isolated from the Sargasso Sea
tatgatttttaattcaatactaattgccaatagaggtgaaattgcatgcaggattattaaaactgctaaagagatgggcattagatcagttgcagtatatgttgatgctgataaagatgctttatttgtaaaacaagctgatcaatctgtgcggctcaaagatggtggttatttagatgggaatcaaattattggtgctgccattaaggcaggagctcaagcaatacatcctggatatggctttttatctgaaaactcatcatttgcaagaaaagttaaaaaagaaggtttggtttggattggaccctctcctcatgtaatttcagtaatgggagataagctcaaagcaaaagaacttgccgtaaaagcaagtgttccaacacttccaatgacttcaaaccccaaagaagctaataagattggctatccacttttaattaaagctgcagctggtggtggtggcaagggaatgagaattgttaataaatcaagtgaattaaaagattcgatcataagtgcgcaaagagaggcacttaatggtttcaatgatgaaagaatatttatcgaaagatatgtggagaagtctagacatatagaaattcaaattttaggtgactctaacggcaatgttgttcatctcggagaaagggagtgttccattcaaagaaggcatcaaaaaattattgaagaatcaccctcgcctagagtgtctgaagaaataagaaatcaaatgggtgatgctgctgttaaattagctaaacaaataaagtatgaatcagctggtactgtagagtttttatttgatgataaaacaggtgaattttggtttctcgaagtaaatacacgtctgcaagttgagcacccagtgacagaagaagttactggtattgatcttgtgagtgaacagctaaaagttgcaagaggagaagagttaaaattttctcaagaagatattcaatggtgtggctcatcaattgaagcaagattgtatgccgaagatccctataatgactttcttcctgaaataggtacttta

SEQ ID NO: 203102 - DNA, 1924 bp, Unknown
  Bacterial polypeptide expressing nucleotide sequence isolated from the Sargasso Sea
atgatttttaactctttactcatttcaaacagaggtgagattgcttgcagaataataaaaactgcaagagacatgggaataagatctgttgccgtatatgttgacgcagacaaagatgcattgtttgttaaagaagcagatgaagctattagacttgatgacggtggttatttagactctaaacaaataattaatgctgctaaaaaatctggtgcgcaggcaattcatcctggatatggttttttatcagaaaatgcttcctttgcacggaaggtaaaaaaggagggcatcatttgggttggtccatctccacatgttatctcagtaatgggtgataaattaaaagcaaaagaacttgctgtgaaagctaatgttccaactctgccaatgacctcaaaaccatctgaagcaaaaaatattggctatcctcttttaatcaaagctgctgctggaggcggtggtaaaggtatgagaattattgaaaaagaaaaagacttaaaggaatctatttcaagcgcccagagagaagcaaaaaatggctttaatgatgacagaatatttattgaaagatatgtcgaaaaatcaagacatatagaaatccaaattctaggagactctaatggaaacgtagtccaccttggtgaaagagagtgttcaattcaaagaaggcatcaaaaaattattgaagagtccccctctcctagaatttcagaagaaataagaaataaaatgggtgaagctgcagtaaagttggctaagaaaattaagtatgaatcagcaggtactgttgagtttctttttgatgataagactgaagaattttggtttttagaagttaatactagattacaggtggagcatcctgtaactgaagaagttactgggatagatttggtttgtgaacagttaaaaattgcacgaggcgaatccataaaatttaatcaaaatgatatatcatttaatggctcttctattgaagctagactttatgcagaagaccctaataatgattttcttcctgaaattggtacattaattgcttttgaaataagtaagtctgctgaggctagatgggacacaggggttataaagggtgctgttattggtactgattttgatccaatgctcgcaaaggttatttcatttgcatcaaatagaattgatgctgctagtaaattagctaaggcacttgaatctgcccatatcggaggcgttaagacaaaccgagactttttaattaactgcttaaaatctcctgaatttcttaaaggcaatacaacaactgattttattgaaagagtaaatcctgatagaaaattaataataaatgaaagtgatttaaatcatgtcactgttattgcagcgttatggattcagacaaaaaataggaatgaagcaaaggtagccaaattcatgccatcaggatggacaaatggaagactgccaaaacaaaaaataatatttgaatacgaaagtcaagaaataaaaatagaatattctcaaaaaagaaatggtcaattcagtttttcagacaataaagttgcacaaatatattcttccgataatgagagtattgacgtcatatttgatggaaaaagacacatatcaaaaattacttcctctttaaataatattttggttcatatgccttatggtgatgtgatgttaaatgtaaaacctaaatttaccctacctggattagaagttgctgctggaggacttgttgcaccaatgccaggaaaagttatcgatataaaagttaaaaaaggaaagaaagttaaagctggcgatactttagttattcttgaagctatgaaaatggaacattcaataaaagctgccgaagatggagttgtttcagaacttttaatatctataaatgatcaagtcgaaaacggtgcccttctcatggttgttaaataat

SEQ ID NO: 203103 - DNA, 1035 bp, Unknown
  Bacterial polypeptide expressing nucleotide sequence isolated from the Sargasso Sea
catgctagaaaaagtactgatcgccaaccggggtgaaattgcactgcgtattttacgtgcgtgtaaggaactcggtatcaaaacggtggctgtgcactccacagtagaccgtaatctgaaacacgtgctgctggccgatgagaccatttgtattggtcctgcgccatcaccacaaagttacttaaatattcctgcgctgattgccgcagctgaagtgaccaatgcccaggcgattcaccctggttatggtttcttagctgaacgtgctgattttgcgcagcaagtggaagaaagtggtctggtgtttatcggtccacgtcctgagtctatccgtttaatgggcgacaaagtttctgccattgaagcaatgaaaaaagccggtgtaccttgtgtaccaggttctgacggcgctgtgggcgacgacgacgaagtcaacaaagctattgctaaacgtatcggttacccgattatcgtgaaagctgctggcggcggcggtggtcgtggtatgcgtgtagtgcgcagcgaagacgaactggttgaatctattgcgatgaccaaaaacgaagcaggcactgcttttggtaatgacatggtgtacatggagaaattcctggaaaacccacgtcatatcgaaattcaggtgttagctgatggtcagggcaatgccattcacttaggtgaacgtgattgttctatgcaacgtcgtcaccagaaagtggtagaagaagcgccagctccaggcattactcaggaactgcgtaattttatcggtggccgttgtgtgcaggcgtgtatcgacctgaactatcgcggtgctggtacgttcgaattcctgtttgaagacggcgagttttatttcatcgaaatgaacacccgtattcaggtagaacaccctgtgacagaaatgatcactggtgtggatctgattaaagagcagctgcgcattgcctctggcatgccactgagcattaagcagtcagacattgtgatccgtggtcatgctgtggaatgccgtatcaacgcagaagatgccaa

SEQ ID NO: 203104 - DNA, 1975 bp, Unknown
  Bacterial polypeptide expressing nucleotide sequence isolated from the Sargasso Sea
atgtttagaaagattttaattgctaatagaggtgaaattgcatgtagagtaatagatacatgcaataaattaggtatagatactgtagctgtttatagtgaagctgatagtagagctttgcatgtaatgaaagcaaaagagtctgttaatattggtttagctccatcatctgagtcttacctagttattgaaaaaataataaatgcctgtaaaaacactggcgcagatgcagttcatcctggatatggatttctttcggaaaacgcttctttcgttaatcaacttgaaagggaaggaattacgtttatagggcctccgtcagaaccaataagagtaatgggtgataaaattgagtcaaagatttttgctgaaaaatcaaatgtaaatataattccaggtcatcaagaaattattaaagattctgaagaagctcttgaaatttcaaaaaaaattggtttcccggttatgataaaagcttcggcaggtggaggtggaaaaggtatgagaattgctagagctgaagaagatgttgaggatgcatttaattcatcggttaatgaagcaaaatcaagttttggtgatgatagaatatttatagaaaaatttattgaaaaacctaggcatatagagattcaaatattagctgataatcatggaaatgttatacatttaggtgaaagagagtgttcaattcaaaggagaaatcaaaaaattatagaggagtcaccgagtccatttgtcgatgaaaagcttagaaatgagatgggagaacaagcgaagagattagcgtcaacaattaattatgcaagcgctggaacagtagaatttatagtagatcaagataaaaatttttactttttagaaatgaatacaaggttacaggttgagcatccagttacagaattggttaccggaattgatttagtagaagaaatgataaaaatagcttctggagaagaattaaaattaagacaagatgatattaagtttaatggatgggcaatagaatccagaatttacgcagaagatccagaaagaaattttatgccttcaacaggtaggttaaattcatacattacgcctattaatatagataacataagaaacgatactggggtttatgaaggaggcgaaatatcaatctattatgatccaatgatttccaaactttgctcatatggaaaagatagaaatgaggcccttttaaagatggagatcgcattaaatcatcattatattaatggaataagaaataatataaatttcttaacagcaatcatcaggaatgagaattttattagcggtgatatcaacactggatttattgatgttgagtaccccgaaggttatagaccttttgtaaatgatgataaatttgctctattatttgccattgccggaacttatttatataccatagacgaattcagattgagaaatcaaaatagaaataattcgttttttgaaaagtctttagttgctgttattgaggattctgtttttgagtttaagacatatgatagacaagataaccttataatagaatataatgatgaagtaattacaattgattcttcttatgaaccaggaaaaccactagcatccatttcaattaatggcgaagaatatcattttaaaattgaaaaaattataaatggttacaatatcagtagttacggtttttcttcagatgtcaaaattttgtctaaaagagcttatgagttatcaaaacatatgatagcaaaggatgttagatcaaatgaaaaaattattaaatgtcctatgccgggattagtagtctcaattgatgttaatgagggacaagaaatagatattggtgataaactttgtacgatcgaagcaatgaaaatggaaaatgtgattagatctgaagtatcaggcattattaaaaaaattcattgtaaaggtggtgatagtttagcttctgatgaaattattcttgaattttcctaag

SEQ ID NO: 203105 - DNA, 1975 bp, Unknown
  Bacterial polypeptide expressing nucleotide sequence isolated from the Sargasso Sea
atgtttaagaaaattttaatcgctaatagaggtgaaattgcatgtagagtaattgaaacatgcgacaaattaggtattgaaactgtagccgtatatagcgatgctgatagtagggctctacatgtaatgaaggctaaggaagctataaatataggtccagcaccatcatctgagtcatatctagttattgaaaaaattataaatgcttgcaaaaaaactggtgctgatgctgttcatccaggttatggttttctctcagaaaattcagcatttgtaaatcagcttgaaagagagggaattactttcataggccctccatctgaacctattagagtaatgggtgataaaattgaatcaaagatttttgcagaaaaatcaggtgtaaatataattccaggtcatcaagaaattataaaagactcccaagaggcattggaaatctcaaaaaaaataggttttccagtaatgattaaagcttcagctggcggcggcggaaagggaatgagaattgcaaaagttgaagcagatgtagaagatgcatttaattcatctgtaaatgaagctaaatcaagttttggtgacgatagaatatttattgaaaaatttatcgaaaaacctcggcatatagaaattcaagtattagctgataaacatggaaatgttgttcacttaggagagagagaatgctctattcagagaagaaatcaaaaaattatagaggagtcaccaagctcatttgttgatgaacagcttcgaaatgatatgggtgagcaggcaaaaagattaacctcaactataggctatgccagcgctggaactgttgagtttatagtagatcaaaataaaaacttttattttttagaaatgaatacaagattacaggttgagcatccagttactgagttaattacaggaattgatcttgtagaggaaatgataaaaattgctgctggagaggaattaaaattaaaacaagatgatattaaatttaagggttgggcaattgaatctagaatttatgctgaagatccggagagaaattttatgccatctaccggaagattaaatgaatatattgtacccagtgatatagaaaatattagaaatgatactggtgtttatgagggcggagaaatatcaatttattacgatccaatgatttctaagctttgttcttatggaaacgatagaaatgaagctctttcaaaaatggaaacggctttaaataatcattatattaatggcattagaaacaatataaattttttaactgctatattaagaaacaaacattttattagtggtgatatcaatactggatttattgatatcgagtatcccgatggttataaaccgtttgttgataatgataaatttgccttattattttctattgctgctacttatttgtatactattgatcaattcaggtcgagaaatcagaaaaagcaaaaatctttttttgagaaatccttagtggctattgttgagggttctatttttgaatttaaaacttatgacagacaagataatttaattattgagtataatgatgaagtaatttcaattgattcctcttataatcccggtaaccctcttgcggaaataactattaatggggaggattataatttcaagatagagcgtataattaacggctataatataagtagttatggtttttcctcagatattataattttatctaaaagagcacatgaattatccaaatatatgctcgaaaaagataatcgttcaaatgaaaaaattattaaatgtccaatgcctggtcttgtggtttcaatcgatgttgacgaaggtcaggaagtggatataggcgataaattatgtacaatagaagcaatgaaaatggaaaacgttatcagatcagaagtttcaggaattataaaaaaaattcactgcagtgatggcgatagtttagcttcagatgaaattattttagagttttcttaga

SEQ ID NO: 203106 - DNA, 2041 bp, Unknown
  Bacterial polypeptide expressing nucleotide sequence isolated from the Sargasso Sea
gatgttgactaacagcatgttcactaagcttttaattgctaaccgtggtgaaattgcctgccggattatcaaaaccgcgcaggccatgggcgttcgcaccgtagccttatattccgatgccgataaaaacgcccgccatgttgccatggccgacgaatcgttttacttaggcggcagcgccccggcggattcttacctcaagggcgacttgattattgaaatcgccaaaaaagctcaggcgcaagccattcacccaggctatggcttcttatcggaaaacgctgactttgcccgcaagtgtgaggcggccggaatcgtatttgttggcccaggcagcgatgccatcgatgccatgggcagcaagagcgcggccaaagccattatgacggcggcccaagtgcctttagtgccaggttaccatggcgacgatcaaaccgacgcgacactcaaggccgaagccttaaaaatcggcttccccatgctgattaaagccgcctacggtggcggtggcaaaggcatgcgtatcgttgagcatgaaggcgaaatcatggacgctatcaactcggcgcgccgtgaagcggcctcctccttcggtaacgataaattattgatggagcgttatttacgccagcctcgccatgtcgaagtgcaagtgtttgccgatacctttggcaatgcaatttacctatcggatcgcgactgctcgattcagcgccgccaccaaaaagtggtcgaagaagccccagccccaggtttaagtgatgagctgcgcgcccaaatgggtgaagccgccgtagctgccgctaaggccatcgattatgtcggcgcgggaaccgttgaattcctgttagataccgacaatagcttctactttatggagatgaatactcgtctgcaggtagagcatcctgtgaccgaaatggtgacgggccaagacttagtcaaatggcagttaatggtcgccagtggtcaaccgttaccgctcaaacaggacgaagtgcgtatccatggacacgcctttgaggtgcgtatttacgccgaagatccgcaaaatgagtttttacccgccagcggtaagctcaatttcctgcgcgagcccgagcaaagcaaatacgtgcgtattgattccggcatccgtgaaaacgatgtgatcagtaatttctacgatcctatgatagccaagctcatcgtgtgggatgagtcgcgtccacgtgcgctacaacgcctagtgcatgccctcgagtcctatcaaatcagcgggcttaaacacaatattgaatttttggcgaatattgccgagcatcccgcctttgccaaggcggattttagcaccgactttattacccgttacggcgatgcgctgattggcagtgcttcgagcgagaccgatacggcaatcgcctttgccgcgctgtatcaagtacttgcccgtaaagaagccgccaaggcacaggcgattaatagcgccgatccttactcgccttggagccaagtcagtggctttagactcaacagcgttagccagcatactattgccctgctcgacgatgcccacgaattacaacaattggtgctattagactttggcgatcactatcagttatcccaacccacagcagatggccaagtgagcaagtcccttagtggtgagcttaagcaggatttactgttagccgaaatcaacggccataagagtaaagtgccagttagcgctcagggcgatgattttacgctgtttttaccctcgggcagttatcacttcagggcagttaaaacccaagtggttgaggcagaatcgagcaatgaagataagctcaaagccccaatgaacggcacagtcgtcacccacttagtggaagtcggtgctgaggtgaaggcgggacaagggctactggtgatggaagcgatgaagatggaatacaccatcgaagcgcccttcgacggtatcgttaccgagttctacttcaaggcgggcgaattagtgagcgatggcgctgtgctgctccatgttgagcctaaagcccagagcgaggaagcctaa

SEQ ID NO: 203107 - DNA, 1504 bp, Unknown
  Bacterial polypeptide expressing nucleotide sequence isolated from the Sargasso Sea
tatgattgagaaagtactaattgcaaacagaggagaaattgcccttcgtgtaatgaaaacatgtaagactttgggaattaagactgtagcagtctattcagatgaggatgtaaattcccttcatgtaaaaactgctgatgagtcatattacataggtgaggctgcccctgcaaagagctatcttaatcaagaaaaaattcttgaagtaatgttatcttctggtacagatgccatacatcctggttatggattcctttcagaaaatgatgactttgcacgattatgtgaaaagaacaaaatcaactttattggaccttctgcagattcaatgaatctttgtggagataaaatgcgttgtaaagcagcaatgctaaaagctgaagtcccaactgtacctggaagtccaggaatagtagatgatgcacaacaagcagaaaaaattgcaaatgaaattggttatcctgtacttttgaaatccgtttatggtggaggaggtcgtggaattagactagttactaatgataaagaattacaagatggctttgatacagttacctctgaatctatagctgccgttggaaaatctgcaataattgttgaaaaattcttagaaaaaacaagacacattgaatatcagatgtgtagagataagcacggtaatgcagtacatctctttgaaagagaatgttctattcaacgaagaaaccaaaaattaattgaacaaactccttctcctatagttgatcaagccaaaagagaggaaattggtgaattagttgtaaaagccgcagaagcagttgattataccaatttgggtacggcagaatttttgagagcagataatggagaattttattttatagaaattaatgcaagattacaggtagaacatccaatttctgaaatggtatctggattagactttgtaaaacttcaactagatattgcaaatggagaaccattaccattcaaacaaagtgatctaaagatgaatggatatgctattgaatgtagaattaatgcagaagatactttcttagactttgcaccatcaactggtcccgttccatatgttacaataccttcaggaccaaatgttagatgtgacacatacttgtatcctggttgcactgtatctccattttatgattctttgatggcaaaactctgtacttggggaccaacatttgatgaatcaagagtaaaaatgctaaatgctctaaatgactttgacattcaaggtgtagaaacttcaattccattatacaaaactattctaaactctgaagaatacaagaacggtcaactatcaactgatttcttaaagagatatgatatgattgaaaaattagaaaaagatctaattcaagatagaaaagaaaaacaaattcctgctattgcatcagcaatcatgcactctgaattctataaaagtaaagtaaaatctcagaactctggtgacacagatggaatctctacatgggtagagagaggtataatgtaa

SEQ ID NO: 203108 - DNA, 1924 bp, Unknown
  Bacterial polypeptide expressing nucleotide sequence isolated from the Sargasso Sea
tatgatttttaattctttactcattgcaaacagaggtgaaattgcttgcagaattataaaaactgcaagagacatgggaataaggtctgttgccgtatatgttgatgcagacaaagatgcattgtttgtaaaagaagctgatgaagctattagacttgttgatggtggttatttagactccaaacaaataattaatgctgctaaaaaatctggtgcgcaggcaattcatcctggatatggctttttatcagaaaatgcttcctttgcgagaaaagttaaaaaagaaggcatcatttgggttggtccatctccacatgtcatctcagttatgggtgataaactaaaagcaaaagaactagctgtgaaggctaatgttccaactctgctaatgacttcaaaaccatctgaagcaaaaaatattggctatcctcttttaatcaaagctgctgctggaggcggtggcaaaggtatgagaattgttgaaaaagaaaaagacttaaaggaatctatttcaagcgcccagagagaagcaaaaaatggcttcaacgatgacagaatatttattgaaagatatgttgaaaaatcaagacatatagaaattcaaatcctaggagattctaatggaaacgtagttcatcttggtgaaagagaatgttcaattcaaagaagacatcaaaaaattattgaagagtctccctctcctagaatttcaaaagatacaagaaataaaatgggtgaagctgcagtaaagttggctaagaaaattaagtatgaatcagcaggcactgttgagtttctttttgatgataaaactgaagaattttggtttttagaagttaatactagattacaggtggagcatcctgtaactgaagaagtcactgggatagatttggtttgtgaacagttaaaaattgcacgaggtgaatccttaaaatttaaccaaaatgatatatcatttaatggctcttctattgaagctaggctttatgcagaagaccctaataatgattttcttcctgaaattggtacattaattgcttttgaaaaaagcaactctgctgaagctagatgggatacaggggttataaagggtactgttattggtactgattttgatccaatgctcgcaaaggttatttcatttgcaccaaacagaattgatgctgctagtaagttagctaaggcacttgaatcggcccatattggaggcgttaagacaaaccgagactttttaattaattgcttaaaatctcctgaatttcttaaaggcaatacaacgactgattttattgaaagagtaaatcctgataggaaattaataatagatgagggtgatttaaatcatgctactgttattgcagcgttatggattcagatgaaaaatagggatgaggcaactgttgctaaattcatgccatcagggtggacaaacggaagactgccaaaacagaaaataatatttgaatacgagggtcaagaaataaaagttgaatattctcaaaaaagaaatggtcaattcagtttctcagacaataaagttgcacaaatatactcttccaataatgagagtattgacgtaatgtttgatggaaaaagacacatatcaaaaattacttcctctgaaaataatattttggttcatatgccttatggtgatgtgatgttaaacgtaaaacctaaatttaccctacctggattagaagttgctgctggaggacttgttgcaccaatgccaggaaaagttatcgatataaaagttaaaaaaggaaagaaagttaaagctggcgatactttagttattcttgaagctatgaaaatggaacattctataaaagctgccgaagatggagttgtttcagaacttttaatatctataaatgatcaagttgaaaacggtgccctcctcatggttgttaaataa

SEQ ID NO: 203109 - DNA, 1339 bp, Unknown
  Bacterial polypeptide expressing nucleotide sequence isolated from the Sargasso Sea
atgttcaaaaaaatacttatcgcaaatagaggcgaaattgcattacgaatactaagagcttgtagagaattgggtattaaaactgttgcaatccattctgatgctgatgaggcagctatgcacgttagaatgtcagatgaaagtatatgtgttggccctgcttctgctcagtctagttatttaaatataccagctataattacttctgcaacaatgagtaatgttgatgcgatacatccaggctatggttttctaagtgagaataaaagatttgcagaaataattgaagaacacaacattaaatttattggtccaagttcaaagcatattggaatgatgggtaacaaaatcttagctaaaaaaattatgattgataatggtataccagtagttcctggtatcaacaaagttaatgatgaaaatgaaattaaatcatttataaaaaaagttgaacttccagttattattaaagcatcaagtggtggtggtggcaaaggtatgagagtagtatataaagaagaagatttacaggagtcaattgcagcagctaaagtagagtctaaaaaatcttttaatgatgatacagtttatatagaaaaatttttaactaaacctaaacatatagaaattcaaatcttatctgactctcatgggaatgttgtgacattaggtgaaagagattgttcaattcaaagaaagcatcaaaaattaattgaagaaagtccaagtaatttattaaccagtgagcaaagaaaagagataagttctctttgtcaaaaagctattaaaactattggttatgaaggggcaggaacaatagagtttttatttgaaaataacaaattctattttatggaaatgaatactagacttcaagttgagcatcctgttacagaaatggttacgggaatagatttggttagagaacaaattgaaatagcttatggaaaaaagttatctataaaacaagaagatataaatttaaaaggtcattctatagagtgtcgtattaatgcagagcatcctgaaaattttataccttctccaggaactattactcaatatcatcagccggggggacttggcattagggttgattcagcagtatatcaaggatattcaataccatctcattatgatagtatgataggtaagcttattacttatgcagacaatagaagcgaatgtatatcaaagatgaaaagagctttagaagaatatgtaataatggggattaatactaatatacaactccatcaaaaaattattaaatcgaaagaatttatttctggaaaatatgatataaattttctatcaaaatttttacaatttaaataag

SEQ ID NO: 203110 - DNA, 1342 bp, Unknown
  Bacterial polypeptide expressing nucleotide sequence isolated from the Sargasso Sea
aatgtttgacaaagttcttattgctaaccgaggagaaattgcagttagaataaatcgagcctgccaagaacttggaatttcaactgtagctattcacagtgaagcagatactgagtctatgcatgtcagaattgccgatgagagtgtttgcataggacctaatccagttaataaaagctatttaaattcacatgccataatttcagcatgtgagattacaggggctcaagcagttcatccaggatatggctttctctccgaaaatgcttcatttgccaagatgcttgaggatcataagctaacttttattgggccaaagtattctcatattgaaatgatgggcgataaaattgaggctaaaaaaataatgaaaaaatttggcgtaccaacagttccaggttctgaaggtgaagtcaaaagtgagtctgatgcgctgaaagctagtgatgagatcggataccctgttttacttaaggccagtgctggaggtggtggcagaggaatgaaaattgttaattctaaaaaagaattacaggatgcattgccaattattaaacaggaggcactttctttttttggaaatgattcaatatacattgaaaaatttattgactcaccacgacatattgaagttcaggtaatttgtgatactcatggtaattttcttcatttgcatgaaagagactgctctgtacaaagacgtaatcagaaagttgttgaggaagctcttgcgcctaatgtagatgagaaaaaaaaacagaaactatttaagacatgcgttgatgcaatggaaaaaatgggttatttgggcttaggcactctcgaatttttattcgacggcaaggaattttatttcatggaaatgaatacaaggcttcaggtggaacaccctattacagaaatgttaactagagtagatctcgttagagaacaaatatgtgttgctcatggagataaaatttttacaaatcaagaaaacattaaacctttaggacattcaattgaatgtagaataaatgctgagagctcaaaagatttcaagccatctgctggtaaaatagaaatgtatcatcctcccgcaggtaacggaattagactagatacctttatttattcaggttataaagttccgcactattatgataatttattggcgaagttaatctctactggcagaacaagaaatcatgctatcaagcgcgcattgaggtctctcaatgaaattgtaattgacggcatagatactaacattgagcttcataaaaaaatactatcttcctccgagtttaagaatggaggggtggctataaattggttagaaaataatattgagaatctatag

SEQ ID NO: 203111 - DNA, 1327 bp, Unknown
  Bacterial polypeptide expressing nucleotide sequence isolated from the Sargasso Sea
aatgttcaataaaattcttatagctaatagaggtgaaattgctgttagagttttaagagcatgtaaagagctagggatacagactgtcgctgtttattcttctgctgataaagacgcaatgcatgttaaattagctgatgaaagtgtttgtatagggcctgcatcctcattgaaatcttacctaaatattcctgcaataatttctgcatgtgaagtttctggagcagatgcagtacatcctggttatgggtttttatctgaaaattatggttttgtagaaaaacttgaggcacatgacattaaattcataggcccaagatccgagcacataaaaatgatgggagataaaattcttgctaaagaatctgcaaaaaatcttggtcttccaattatacccggatctcctggagagataaacaatacaaaagaaggtaaagatatagctaatgaactcggttatccaattataataaaagcctcatcaggtggaggtggtcgcggaatgattaaagtctttaaagaagaagaccttgatgagtctctaaaaaaagcttctactgaagctgaaaaagcttttaacgacaaaagggtttatattgagaaatatttacaaaatcctaaacacatagaaatacaagtaattggtgatgagtataataatatagtgcatttaggagaaagagattgttcaatgcaaaggaggaatcaaaaattgattgaagaaaccccagcagttgtaattgacgatataaaaagagaagaaatttgcaacttaacaatcaactctctgaaaactatgggatattttaatgctggaacagtagaatatctatttgaagatggtaatttttattttatggaaatgaacacaaggctacaggtcgaacatcctgtatcagaagaaatttataattttgacttagtaaaagaacaaataaaaattgctgccaaatataaactttctgctaatcaagatgtattaaatagtaatggtcattcaattgaatgcagaattaatgcagaagatccaaatacctttattccctctcctggattaataacaaattatcatgcgcctagtggtccgggaataagagtagattcgaattgttattcaggattagaaatttctccatattatgatagcttaattgcaaaacttattgtttatgatcaagataggtcttcatgcatacaaagattaaaaagggctcttgatgaattcgttatagacggaataaagactactattcctttttttcaagagataataactcaagaagattttttagagggttcctacaatattaattggttagaagattat

SEQ ID NO: 203112 - DNA, 3379 bp, Unknown
  Bacterial polypeptide expressing nucleotide sequence isolated from the Sargasso Sea
aatgaaaaagatactgattgctaatagaggtgagattgctattcgcatagcaagaacctgtaacgatttaggtatcaagacgatcggtatcttttctgaagatgatctgaattccctacatctttcaaagatggatgaatcttttatgattgatgaaaaaggagccaatgcttacttgaatatcaaaaaaatcattgatatcgcaaagcgtgaaaaggtagatggaattcatcctggatatggttttttaagtgagaacccagcttttgcaaaagcagctaaacaagcaaagttaaaatttatcgggccttcagaaaagtctttgataatttttggtgataaatcagcagccaaacttttggcaactaatttagatattcctgtagtcaagggaactgatggaaagacttctcttaaactcgcctcttcatttttcaaaggtttgaaaaagaattcttcattagttataaaggccatagcaggtggcggtggaagagggatgagggttgtgaattcggactcagagctaaaggatgcaatgaatagagcttcctctgaagcaaaagcagcttttgactcatcagatctttacgtagaagaatatttaaaaaactataggcatgtagaagttcaggttctgggagatggtaagggtaacgctgtccatatgcatgaaagagaatgttcaacccaaagaagacatcaaaaaattatagagatttcccctgcaccgggaattaacaaggaactgaaacaaaaaatgtttaatgcttcagttcacttaattaaagaaacaaaatatgaaggtttagcgactgtcgagtttttagttgattattcgaaaggagattttaaatttattgagtgcaatgctagattacaagttgagcacacagtaaccgaggctgtgcttggtctagatttggttagagcacaaattcaaatcgcttcaggtaaaagtttaaaacaactaaaattagaacaggaagatatccctgaaccaaaagggtttgctgttcaatctcgtgtcaatatggaggttatagattctaaaggcgaaataaaaccttctggtggaaagtttacatcttttgatctaccttccggcccgggcgttagatcagatagttatggttataatggttatgaaagtaacccagccttcgattctctcatagcaaaagtaataacacattctcccgaggataacttcaaacaagctctaaaaagaaattataggtctttatgtgaatttaaagttgaaggtgtacccactaatctagatttattaaagaatatcctttcaaattctaaattcaaaaacaatgagttgcatacaaactttatagatcagaatatagaaaaccttttgtctgtaggtaagcatattaatttgtctgatattagcagaagtattaagaagaatattccaaagagaggaaagatagagaatcttgatccattggcagtacttgatcatggtaaaacaggcggtgtttttgtagatgactcagagaatatactgcagttagagaatgaagaattagaggcaggactatctagcattaaagctccaatgcagggaatgatagttaagtttgatgttaagcaaggtgatgagatatggaaaggcaaacctcttcttattatggaagccatgaaaatggaacatgaagtactttcagatataagcggtatagttaaagagatcaaagtccaaccacaagataccgtgttcgaaggccattctttgatgacaattcaattagctgaagtcaaagaaaaaacaaccaagaaaacaaaagatattgatctagatagaatcagacccgacttaaaagaagctcttgaaagaaaagaagctagccatgataaaaatcgtcctgaagctgttaaaaaaagatattcaactggtcatagaactgcaagagaaaatatcgaagatttgtgtgatgaagggtcgtttgtagagtacgggtcggtagtcatagctgcgcaaagaagaagaagatcagaagaagacttaattaaaaataccactggtgacggaatggtctgtggtttaggccaagtgaatggtgacttatttggagaaactgactcccgtgtaatggcaatgtcatatgactacatggttcttgctggaactcagggaaaaatgaatcacgcaaaaaaagacagaatgtttgaaattgcagagcaaaataaacttcctactatcctttttgctgaaggcggaggtggacgtcctggcgatactgatacttcaggtgtggctggattagattgtttggcattcacttacttcgcacaattatctggattggtgcctgtcataggaatcaccactggaagatgttttgctggaaatgcagttttgttaggttgttgtgatgtaatcatcgcaactgaagattcaaatatcggaataggcggtccagcaatgattgaaggcgggggacttggtgttttcactcctgacgaagtaggtcctatggatgtacaagtaccaaacggagttgtggacctctctgttaaagatgaagaagaggcagttgaagttgccaagaaatatctttcttactttcaaggctctataagtgactggaaagctcccgatcctagaaaattaagattcactgtgccagaaaatagacttagatattatgacatgagagaagttatagaaggtatagctgatatagggtctattttagagataagaaaagattgggctcctggcattattacctcttttattagagttgaaggaagaccggtaggtgtagttgcaaataatccaggccatttatcaggcgctattgattcgccaggagcagataaaggatctaggttcattcaactttgtgacgcttttgatataccaatactttctcttattgattgtcccggaattatggttggtcccgaaagtgaaaagactgctcttgtgagacatgcaagcagaatgtttgttgtaggagcaaatatagagacaccactaatgtcagtggtcataagaaaagcctatggcctgggcgcgcaagcaatggccggaggtagctttaaaattcctttatttacggtcacatggccaacaggtgaatttggaggcatgggtcttgaaggggcagttaaacttggttacagaaaagagttggaagcgattaaagatcccaagaaaagaatagcagcctatgaaaaaatggtggccgacagttatcatcgaggtagggcagttaatatggcatctcactttgaattagatgatgtaatagatccggctgacacaagaaattggataatgggtgctctaaagtcattacctccaaaaaaagatagaacctctaaaaaaagaccaaatgtagatacttggtaa

SEQ ID NO: 203113 - DNA, 1927 bp, Unknown
  Bacterial polypeptide expressing nucleotide sequence isolated from the Sargasso Sea
tatgacatatcataaattacttattgcaaatagaggcgaaattgcctgtaggattattaaaactgctcatgagatggggatttcatgtgttgcagtctacacagatgctgattcagaatcaccttttgtgaaattagcagatgaagcaatcaaattaactgatacttatttgaatggaaaggaaataattgaagcagctattaaaactaaagctcaagcaatccatcctggatatggatttctatcagaaaatgcgaaattctctagagatgtcattaaagccggtttgatttgggttggtcctagctcaaaagttattacatcaatgggtgataaattaaaagcaaaagatattgctgataaggctggggtccctactctgccaatgacgacagatccttcaaaagcaaatactgttggttatccacttcttattaaagcagcggctggtggaggtggaaaaggcatgcgaatagttgagtcaaaaaaggacctaaaagattctataaaaggcgctcaaagagaggctaaagcaggctttggggatgatagaatatttatagaaagatatgttgcatcttctagacatatcgaaatacaaattctaggtgattctcatgggaatatagtccacttaggtgaaagagagtgttctatacaaagaaggcatcaaaaaattattgaagagtctccctcaccaagagtggattcaaagatgcgagcagcgatgggagatgctgcaattaaattagcaaaaaaacttaaatatgaatcagctggtactgtagagttcttagtggatgataagactggtgaattctggtttttagaagttaatactagattgcaagtagaacatcctgtaactgaagaagttacaggaaaagatttagtatatgaacaattaagaatttctagaggtgaacatttgggatatgatcaagaggatatttcatggaatggatcttcaatcgaagctcgactttatgcagaagatcctactaacgacttcttgccagccactggaacacttatagcttatgaagttgataaaaatattgatgctaggtgggatactggagtaaaacagggttcagtgataggaacggattttgatcctatgcttgccaaagttattgctaaaggaagaaataggactgatgcagccaataagttagctttggcacttcaatcactgcatattggcggagtgacaacaaacagagatttcctcgttgagtgcttaaggtctaaagacttccataagggaaataccacttctgattttataagcattgccaaaccaaaaagatcaattgaattaaaagggactgagttagaacaagcgggtattgctgcagctctttggcttcaaggagagaatagaaaaaatactcctatattaagtggaattcaatcgggatggacaaactctagattgcctaaacaaaagattaatttccaatataattcagaagaactatctatactatataagtcaaatagagatggttcattcgaaataaacaaagggattaatgcaaaaatcattgagtggaataactctggaatagatatagagatagaggatataaggtttttttctaaagttactaggaaggatgcaaatcttatagttcatggtccatggggagacatcttattcaaaataatgcctagatttaagtcggttaaccaagaggttaaagacggtggtctgattgcgccaatgccaggaaaggtcattgaccttaaggttaaggtaggtagtaagattaaaaaaggagacactctagtcatcttagaagctatgaaaatggaacatacagtaaaggctactgaagatggtgttatagatgaactatttatttctaatcttgaccaagttgaaaatggagcccttttaatggttattaaggctaaataa

SEQ ID NO: 203114 - DNA, 1924 bp, Unknown
  Bacterial polypeptide expressing nucleotide sequence isolated from the Sargasso Sea
aatgtttgattcaattttagttgcaaatagaggagaaattgcattaaggataatgagaactgctcaagcaatgggcatccaaactattgcaatttatgttgaagcagataaggatgcgcctcatgttaggtttgctgataaagcagtacttcttccagatggaggatatcttgatatagatgcagttttagatgcagcacaaaaaagtaatgctggcgctattcatccaggatatggtttcttatcagaaaattctgaattcgctaaaagagtcattaaagaaaaaattatttgggttggcccctctcctaaagtcatttctgtaatgggtgataaattaaaagctaaagagcttgctataaaagctagcgttcccactcttccaatgacctcagatgaaaaagaagtcaaaaaaattggatacccccttctaataaaagcagctgcaggtggaggcggaaaaggaatgagagtagttactgataaaaaagatctacaagagtcgcttgaaggtgcgaaaagagaggctttatcaggttttggagatgagagagttttcatcgaaagatatgtagaaaaatctcgacatatagaaatccaaattcttggggactctcacggcaatgttattcatcttggtgaaagagaatgctcaatccaaagaagacatcaaaaaataattgaggagtctccatctccgagaataactgaagagataagattcgcaatgggtaatgcagcagttgatcttgcaaaaaaaataaaatacgagtctgcaggaactgttgaatttctttttgatgataaaagtggtgaattttggttcctagaggtcaatacaagactgcaagttgagcacccagttacggaagaagttactggaatagatttagtagctgaacaaataaaaattgctagaggtgaagagctacagtactcgcaagaggacattgagtggacagggtcctcaatagaggctcgtctgtatgctgaaaatccaaataatgattttttacctgaaacaggaaaaatgtttgcttacgaacaagctgaaaatgattttatgactaggtgggattctggtgttcataaagattcagttattggtactaactttgatccgatgcttgcaaaagttatttcctatggtgaaacaagggaggatgctgcaagagttttagctaaatctttggaagattctcatattggcggtgttattactaacaaagattttttaattgcaacactaaggtctgatgagtttttaaaaggaaatacaacaacagactttatagagagagttaaaccaccaagagtaaaaaaccttactaatgatgagcttaatcttgcactaacagctgcagccatgtggaaacaaatgagaaatagaatctcttcagatatcgcaccttatattccatccgggtggacaaatggaagacttccaaatcctaacattacatttctgctcgatggtgaagaaatattcgttgaatataagttgataaataaaaataaattccttgttttcaattcagaagttgaagtagttaatattgatgataaatatatagatctagtttttgatggtgtaagagtcaaatctagaatttctgaggatgctgaatttatattagttcatatccctagcggtgatgtatcttttgaagttaaacctagattttcaatgccaggtcttgaggtgcaagctggtggattggtagctccaatgccgggcaaagtagtcgatttaaaagtaaaaaaaggatcaaaggtaaaatctggagagactctagtaattctagaggctatgaaaatggaacattctataaaggcaagtgaagatggagttattgctgatatttttatcaaggaaaatgatcaggtcgagaatggtgccgttttgatggtggttgattcttaa

SEQ ID NO: 203115 - DNA, 677 bp, Unknown
  Bacterial polypeptide expressing nucleotide sequence isolated from the Sargasso Sea
gctgtcggtgcagtacttcgcgcgcctcgggagctcgctgtcggtgccggacttcgcgcgcctcgggaggtcgctgtcggtgcaggacttcgcgcgcctcgggagctcgctgtcggtgctggacttcacgcgcctcgggagctcgctgtcggtgctggacttcgcgcgcctcgggagctcgctgtcggtgctggacttcgcgcgcctcggaaggtcgctgtcggtgctggacttcgcgcgcctcgggagctcgctgtcggtactggacttcgtgcgcctcgggaggtcgctgtcggtgctggacttcgcgcgcctcgggagctcgctgtcggtgctggccttcgcgcgcctcgggagctcgctgccggtgatggacttcgcgcgcctcgggagctcgctgtcggtgctggacttcgcgcgcctcgggagctcgctgtcggtgctggacttcgcgcgcctcgggagctcgctgtcggtgctggacttcgcgcgcctcggaaggtcgctgtcgttactcgacttcgcgcgcctcgggaggtcgctgtcggtgctggacctcgcgcgcctcgggaggtctctgtcggtgctggacttcgcgcgcctcgggaggtcgctgtcggtgctggacatcgcgcgcctcgggagctcgctgtcggtgctggacgtcgcgcgcctcg

SEQ ID NO: 203116 - DNA, 856 bp, Unknown
  Bacterial polypeptide expressing nucleotide sequence isolated from the Sargasso Sea
tagctacttaaatatccccaacatcattgcggcggcgacatcccgtggggcggatgccattcaccccggctatggcttcctcgctgagaacgatcgtttcgctgaaatctgtagtgcccatggcctcatttttgtcggtccatcgccggaatccatccgggccatgggcgataaatccaccgccaaggcgaccatgcagcgggtgggtgttcccaccatccctggcagtgagggtttgctttccagcgtggatgaagctgcgcagctcgccggttcgatgggctaccccgtgatgatcaaagccactgccgggggcggtggccgcggcatgcgactggttcgtagtgctgatgagctcgaaaacctcttcaaggcagcgcagggtgaggccgaagcagcttttggtaatccgggtctctacatggagaaattcatcacccggccgcgccatgtcgaggtgcagatccttgccgatcgctttggcaatgtcgtgcacctcggcgagcgggattgctcaatccagcggcgtcaccagaagttgcttgaagaagcccccagcccgggcttgcatcccgaaacgcgccgcctcatgggtgaagccgccgtatcggcagccaaaaccattggttatgaaggcgccggcacggtggaatttttgttggatgcctccggtgagttctatttcatggaaatgaacacgcgcatccaggtcgagcaccccgttaccgaggtggtcactggtgtggatctcattgctcagcaactcaaaattgctgctggtgagcccctcgagctcaagcaggagaccatcaagctcaatggccatgcgatcgaatgccgcatcaacgcggaggat

SEQ ID NO: 203117 - DNA, 740 bp, Unknown
  Bacterial polypeptide expressing nucleotide sequence isolated from the Sargasso Sea
ggatattataaaactatgcataatccaaaaactgattggtgttttaaaactgaaccagatgaaaccttgaataatcgctccattaattatcctagaggaaaaactttaggaggaagttcttcaataaatggtcttttatatataagggggcaagagcaagattatgatatgtggagacagttaggaaatgttggttggagttggaaagatgttctcccttattttttgaagtctgaaaagcaggaaagaggtaaaaacgaattccatggagacgcaggaccaatttctgtagaggatcaaagaataaaattagatatattagatgtttttatgaatgcagctgaagaaattggcataccaaaagtaaatgattttaacaaagggaataattttggttgtggctattttcaagtaactgaaaaaaaaggattaagatgtagtgctgcagttggatatttaagaccaattaaaaatcgacttaatttaaaaattataacaaaagcacatgtaaaaaatataaattttgataaaaaaagagctgttggtgtttcatattggagagataatcaattaataaaagcaaaagctaaaaaagaagttattttatctgctggatcaataggctctcctcatattttgcaagtttctggtgtaggagatcctttaaaaattaaaaatcatggtattgaaattataaacaattctccaggtgtagggaaaaatctccaagatcacataat

SEQ ID NO: 203118 - DNA, 811 bp, Unknown
  Bacterial polypeptide expressing nucleotide sequence isolated from the Sargasso Sea
catgaattttaaagactcatctaaagtccttgataattttattagctgcaaacttgaaaactttggacattacgaagattttgttagcaccagtgatccatacattaatcatagcttaattagtgcaccattaaatataggtttaataactccagaacaagtactcaataaattgagctctttttcttattctaaagttggcatcaataattacgaagggtttattagacaagtctttggttggagagaatttatgagatacttaaatattcactattataaagattttaataaaggtaacttttttggaaatgacagaaaattaacaaaacattggtatgagggtacaacaaacattcctattttaaatgacatgatattaaatttaaaaaaaagtggatatgttcaccatatcccaagattgatgataattagtaatataatgaacttagctggattaaagccatctgaagtttataaatggtttatggagacattcattgactcatctgattgggttatgacaccaaatgtctatggaatgggtatgtttagcgatggaggtatttttgcaacaaaaccatatttatgcggttcaaattacttactaaagatgagtaattatagtcgtggggattggacacaaacactagatggtttatattggaattttatatataaaaataaaaattattttaaaactaatcagagactatctatgatgtactatactgtaaataaaatggacaagtctaaaattagtactcatatatctaatgcaaaaaaattcatcaaagaatacacaagatag

SEQ ID NO: 203119 - DNA, 846 bp, Unknown
  Bacterial polypeptide expressing nucleotide sequence isolated from the Sargasso Sea
aaggcacttatcagtaccaagtagcagtacaggtaacaaaaatatttcaaaattagaaccaggtcagtacttggttattaataaagaaaaaagtatttttaaaaataaatattgggatccgttttcttttgaagtcgatcactcaataactgaaaatgaagcaatactaaaaattgaagaattactatttgaatctgttaagcacagaaaagtaagtgatgttgaggttggtttatttttatctggtggtttagattcctccttaatcggtaagattatgagcaaagatacaaattcagacgttaagagtttcaatattgattatcaagaacattttcaaggatatgaaggagaagtagatgaggcaaggtttgctgcttctcatataggtgtaaatctaattgaagataaaatacaatactcagattttaaagagattattgataattactctttctatcaagatgatttagttggcgatgaagttggcattccattatattttttaggtaaatcagcaaaagataatggaatcaaggttgtgcaggtaggggaaggggcagatgagttattttatggatatgaccactggattagatttatgaagctaaataatttcttaagtccaataacaaaatcccgatcaagtagttttaacctcaaaagtcatagaggtaacatgctttcaaatatattacttaatcgaacttcttttgcaggaggtgcgttaggatttaatctaccagagataaacaatcttttagttgaaggaattactccagagtatgaattaattcattttgttgataataagtgggatgattatttttcaaataaaaactcata

SEQ ID NO: 203120 - DNA, 650 bp, Unknown
  Bacterial polypeptide expressing nucleotide sequence isolated from the Sargasso Sea
aatggaaaactttgactatattattattggtgctggctcagctggatgtgttttggctaatagactttcagaaaatccaaaaaataaagttttattaattgaagctggaggaaaagatacaaatccatggattcatattcctgttggatattataaaaccatgcataaccctgaagtagactggtgttataagacagagccagatgagactatggcaaatagatctattccatatcctagaggcaaaacactaggaggtagctcatctattaatggacttttgtatataaggggtcaggaacaggattatgatatttggagacaattaggtaataaaggttggagttggaaagaagttctgccttactttattaaatccgaaaatcaagaaagaggaaaaaatgagtatcatggagttggtggaccattatctgtatcagacacaagaattaaattagacttgttagaaaaatttatggatgcttctgaagagaggggaattcctcgagtggaagattttaataaaggaaataattttggttgtggttatttccaagtgactgaaaaaaatggattaagatgtagtgcggcagtcggatatttaaatccaattaaaacaagaaaaaatttaaaaattgaaactaattgtc

SEQ ID NO: 203121 - DNA, 793 bp, Unknown
  Bacterial polypeptide expressing nucleotide sequence isolated from the Sargasso Sea
agagacagtgtaaaactgtgtagtattggtagacgaaaaataggaatatttttaagtggtggtttggatagcggtatgatagcttatgaacatagcaaactatacgacacaactaacacctacacaaataagatggaaccaaatgttatttggcgagaagatgatcacaatgatgatcattataaagcattagaccttgcaaaacaattcaactttaatcacaaagtagtgactatgactccacaaattttaacagagacttgggatgatagcatttattttatggaacaaccagtatacaatccatcaatggttatgtattatcatacaaacaaaatgttagctgacgatggcattgtggttacactggctggtgacatgggcgatgaagtgttaggtgggtatccaaaatactggaaactaagaaataaaaatgtaaacacgtggaataaattaatagatgcatggatgaatagaattaagcgtccaatacaagtaacagaaacacctgtcagcagagaagatttgaaagagcattttgttaaaacttttccaatagaattatataacactgaagatactgtaaattcttatatggcattggattgtgttacacaagtacctgaagaattttttattcgtaacgacacttatggtatggcatttagtatggaaggacgttttcctttagcaactaaaaaatttatgcaatatgctctaagtattcgctcttatgaaaaaattggaaaacataaacatcaaaccaaactattgagtaaaaaagcatacaaaa

SEQ ID NO: 203122 - DNA, 598 bp, Unknown
  Bacterial polypeptide expressing nucleotide sequence isolated from the Sargasso Sea
ttggcgggagctcctccacataccaacgctagtgtaagggatgaagatggtcagttgctcacgaaggcatccgatgtggcggggcggtggactaggtacttcgctgatgtattctgtgccgatgttgtttcagaaagtgttgcgagaccgaccatttcccgaaatgatgcattgggcaaaagatgttttgacgaagacaccttacaacttagcttttccgaaacactgcggttgatagaaaggcttccgaaagggaaagggcttggtatggacgggctgcccgctgaaattcttcaggcaggcggtgctgcaatggctatgttcttgcacgactttatatctgatgctgctgttgttcgctacatgccctttcagtggaaaggtgggaggatagcaccagtattcaagaagaaaggctcgccacagatttgtagtgacaatcgtggtatacttttggcaccacatgcttctaaggtatttactggaggactgcagtatcgcattaaggatgcatacttggaagcagtgggccgtacccagttcggtgctgtgcgtggtcgtggtactcttccagccaacatgttgacgaggtcagttg

SEQ ID NO: 203123 - DNA, 559 bp, Unknown
  Bacterial polypeptide expressing nucleotide sequence isolated from the Sargasso Sea
tatgagatacttaaatattcactattataaagattttaataaaggtaacttttttggaaatgacagaaaattaacaaaacattggtatgagggtacaacaaacattcctattttaaatgacatgatattaaatttaaaaaaaagtggatatgttcaccatatcccaagattgatgataattagtaatataatgaacttagctggattaaagccatctgaagtttataaatggtttatggagacattcattgactcatctgattgggttatgacaccaaatgtctatggaatggggatgtttagcgatggaggtatttttgcaacaaaaccatatttatgtggttcaaattacttactaaagatgagtaattatagtcggggagattggacacaaacattagatggtttatattggaattttatatataaaaataaaaattattttaaaactaatcagagactctctatgatgtactatactgtaaataaaatggacaagtctaaaattagtactcatatatctaatgcaaaaaaattcatcaaagaatacacaagatag

SEQ ID NO: 203124 - DNA, 3253 bp, Unknown
  Bacterial polypeptide expressing nucleotide sequence isolated from the Sargasso Sea
gctgacgttctcgtttgtgaaggactcgcggcaggccggaaagtactacgaagagaccgacgactactatgcgaaggaaggtcatcgcggcgaatgggatggcgaaggcgcggaagcgctggggctgcaaggcggtgtcgacaaagagaccttcaagaatctgcttgatggcaaattgccggatggcaccgtggttcgaaagcccgcgccgaagacgaacaaggacggcaagaaagccaatgcccggctcggcattgacttcacgttcagcgcgccgaagagtgtcagtatcgttgctttggtcagtggcgatcggcgtgtgattgctgcgcacgatgcggccgtggctgatgccttgaaaatgcttgagagcaaggtcgtcgcacgcaagaaggtcaagaagctgtcttttcgcgagcacaccaacaatttcgtcgtcgcgaagtttcagcacgatctatcgagagaccaagatccgcagttgcacacccatgcggtcgtcatgaatctcacgcagcgcgaagacaagcgttggacggcgctttccaacgaggaaatgctgaagagcgtcaaggtgactggagcgtactaccgcgcgcgactcgcggagagattgcaggacatgggctacgacattcgggcgacgcggcacggcttcgagatggcgtcggttccggatgctgcgatcgaaatgttcagtcagcgcagccgcacgatcgagaagcacctcgacgcccaaggactgacgagagataccgccagcggcggcatgaagcagaccatcacgaagaacacgcgcaagcgcaaagacgagggcgatcgcgcggtgttgcgtcaagagtggcgtgatgcccttgctaccgcaggcatcaagattccagaagccgcgcccgaacatcaggccgcgcctgcaagaaccccgacgccccccggccgcgaggccgggcacggagcatcggacggcgctggcccgcgcgatcctggtgctggtggtggctcatccgggcgcggtggcgcagagccgcggcgtcccgaggtgacaccgcaatcgccaagcactcggccgacgtcgggcgatttcaacagagatgcgaccgacccgcgcgactcacgggagcggccgcagcagcccgagcgtgtcgatgcagaatcattcccagcgcattctccgcagcaggccgccggcccgacaggtggagatccaccgttgcccgataagcagcgccgcgcccgcgaggctctggactttgcgatcgagcatttaaccgagcggcagggcattttcacgcatggcgagctgcttgagcgcgcgtacatgaaggcgctgggtggaacggccgagatcgaccgtgagctagatcgagccaaggtggacgggcgattgttgcccgaactgccgttgtaccaaactgcaaagtctttctcgcgtgacgagcaggcaaaatcagacgatccgcagttcgacaagtttcggcacgacaacgacatccacaagctcacgcgcgcgtcgtgggtgtcgatgctcgtcaacgttgagggttatagcgccgatcgcgcggaaaaaacagtcgacaacgcgatcgcaagcggtcgccttgtgcagaccgaagagcgctacacgactcccgacatgcgaagccgcgagctgcgcatcctctggatggagcggcttggccgcgatacggtgcagccgatcaagacggccgaagaggtcgatacgatgctcgcgcagagtgacctgaatgcggggcaacgtgacgctgcgaaacttgtgttgaccacgacgaaccgtattgtcggtgtgcaaggttatgccggtgtggggaaaagccacatgctgagcaagtcggtcgagggcatcaaggcggagactgcaaagagggcgtctgaaagcggttatcgcgtcatcgggctcgcgccatacggttcgcagaacaaggcattgaaggagctggggatggactctcagaccctcgcatcgttcttggcgaagaagccagagccggggctgctggggccgaacacgatcgtctttcttgacgaggcaagcgtggtgcccgcacaccagatggaagcactgatgaagcgcattgagcagcatggtgcgcgcctggtgctactcggtgatcgtaagcaaacacaggcggtcgaggcgggcaagcccttcgagcaacttcaggacgcagggatgcagctcgcacatatcaccgagatccagcgtcagaagaacgcaaccctgaaagccgctgtcgagaaggccgcgaacgacaacatcggcggttccgtttttacgctcaaagagaacgtacatcaggttaaggaggctccagagcgtcacaaggctatcgcggacgcgtacgcatccaagccccttgaagagcgcaataacacactgatcgtcgttggcacgaatgaagcccgacgagagatcaacaagcttgttcgcgagaatctggagctgccaaagggcgagctggtgcgcgcgctggagtcgtttgacatgacgcgggcagagcatcgtcatgcatccagctatgtgccggggctcattgtgctcgcagagcgggacggatcgcacggactgaagcgcggtgagcacttcaaggttgtgtcgatcgacgcgaatgcgaacacgctacgcctggtcggcaaggacacgggtgagctggtggtcaatgcgtcgaaacttgaaggactgtcgacgtatcagccaacagaaatcgagatcgtccgcggcgattggctcagaatgacccgaaacgacaacaagcagggcgtctacaacggcgagcggcatcaagttgcggccgtggaggcggatgcggttgttctcgagaacggcgcgcgtctgccgcgcgagaacgcgattcacgctcagcatggctatgcgcaaaccgtccatagcgctcagggactgacgacgaacagcgtattgatggatgcggacacgaaaagcctcaccgcgaaccgggccgttttctatgtcgccatctcccgcgctcgccacgatatcgcgatctataccaacgatcgatcgaagctggctgaaacgatgagccgtgagcccaagaagtacgcagcactcgaattgcgcgataaccggcgcgaggatgaggttttaagggccatatcggctatccgccgatccgagaaggacgcccggtcagcgcggcaagcgctgtcccgagacattcgtggcagtgcaacccgcaccacccagcagcgagccgcgcgtcgcgggcgttcacgctga

SEQ ID NO: 203125 - DNA, 464 bp, Unknown
  Bacterial polypeptide expressing nucleotide sequence isolated from the Sargasso Sea
tcatagactagtttcaggttatgaagcaccggtttacattgcatggagttcaagtaatcgttgtgcaacaattagaattgcaggtcactttaaaggagaaaaatatgcatacatgaaaagaatggaataccgtgttccagatccagcatcaaatccatatcttgtattttcagcagtattagctgcaggtttagatggaataaaaaagaaaatagaaccaggagacccagttaaagaagacatctacaaaatgacaaaatcagaaagaaagaaacacggaatcgatactttacctgcaaaccttggaagggcattggatgagttagaaagtgacagaaaatatctaaacccaattttctcaaatgaagttttggataagattgtcgaattagagagaagagaccacagggaaattgcaattagaccacacccacatgaattttatctttactttgacgtttaat

SEQ ID NO: 203126 - DNA, 488 bp, Unknown
  Bacterial polypeptide expressing nucleotide sequence isolated from the Sargasso Sea
gatgaaacgggttcttatcgctaatcgtggtgaaattgccctaagggttcaccgtgcctgcaaacagctaggcttggaaactgtcgctgcgtataccaaagtagatcatcaattgttgcatcttcgccttgctgatcatcagatatgcataggggaagaatcttacctagatggcaggcaattgatatctgcggctctggttactgggtgcgacgcgatccatcctgggtacggatttctgtctgaaaatgctgaattcgttctttctgtagaatctgccggactcatttttgtaggccccgctgcttctcatatcgctttgatgggtgacaaggttgttgcgagaaggactatggctaaagcaggtctgccaactttacctggcagtgaaaccgctatttcagacgaaaaggaactgctagcagttgctcaagaaattggattcccagtgatgctaaaagccgcatacgggggaggaggcatgggta

SEQ ID NO: 203127 - DNA, 793 bp, Unknown
  Bacterial polypeptide expressing nucleotide sequence isolated from the Sargasso Sea
catgggtattggcaagcttctgatcgccaaccggggtgagatcgctctgcgaatcatccgcagttgccgggaaatgggcatttccacggtggctgtgtacagcacggtggatcgcaacgccttgcacgtgcaattagctgatgaggccgtttgtgtcggtgatccccccagcggccgcagctacttaaatatccccaacatcattgcggcggcgacatcccgtggggcggatgccattcaccccggctatggcttcctcgctgagaacgatcgtttcgctgaaatctgtagtgcccatggcctgatttttgttggtccatcgccggaatccatccgggccatgggcgataaatccaccgccaaggcgaccatgcagcgggtgggtgttcccaccatccccggcagtgagggcttgcttcccagcgtggatgaagctgcgcagctcgccggttcgatgggctaccccgtgatgatcaaagccactgccggtggcggtggccgcggcatgcgactagttcgtagtgctgatgagctcgaaaacctctttaaggcagctcagggtgaggccgaagcagcctttggtaatccgggtctctacatggagaaattcatcacccggccgcgccacgtcgaggttcagatccttgccgatcgctttggcaatgtcgtgcacctgggcgagcgggattgctcaatccagcggcgtcaccagaagttgcttgaggaagcccccagcccgggtttgcatcccgaaacccgtcgcctcatgggggaagccgctgtatcggcagcc

SEQ ID NO: 203128 - DNA, 961 bp, Unknown
  Bacterial polypeptide expressing nucleotide sequence isolated from the Sargasso Sea
ttgtttaataaagttttaatagcaaataggggtgaaatcgcatgtagaattgctgcgactgctaataaaataggcttgagaactgttgcaatctattctgaggcagactcgggatcaaaacatgtaagtttatgtgatgaagcttttctagtcgaaagctcaacacctttggaaagttatctgaaccagagtgaaattattaagatcgccataaaaactggtgctggtgctattcatcctggctatggttttttatctgaaaattcggagtttgctcaaaaggtcgaggaagctggacttatttttgttggtcctgattttaaagctattgaaattatggggcgtaaggatgcagctaaaaaagctatgtctaaagctggtattccggttgttcctggataccacggtgaaaatcaaactgatgaaaaattgaaaaaggaagcagaatcgattggttaccctttattgataaaagcgattgcaggaggtggtggaaaaggtatgcgattggtcgaaagtccaaaagaatttttgacccttttagcaagtgctcggaccgaggctgaaaaagcttttggaaatggcagggtgttaattgagaagtatattttggctcctcgtcatattgagatacagatatttggtgatggccaatcggctattcacttatttgagcgagattgttctctccagcgccgacatcaaaaagttttggaggagtgcccagctccaggaatgaccggcaaaatgagagaggctatgtgtagagcagctgttagtgcagctgaaactattggctacaaaggtgctgggacagtagaatttattgttgatggatctgatggtctaaaagaagacaaattttggtttatggagatgaacactcgtcttcaagtagaacacccaataacagaagaaataactggaattgacttagtagcatggcaatttgacgttgcta

SEQ ID NO: 203129 - DNA, 760 bp, Unknown
  Bacterial polypeptide expressing nucleotide sequence isolated from the Sargasso Sea
tgccagtgatgcagcaaatgaggtcgtagatattattaattctgaaggtggtgaagctattgcaaatggtgctagtgtgaccgatctggatgcagtaaaagaaatgactaatcaaaccatggaaaagtggggaagaatagatatcttggtaaataatgctggaattcttagagataaaagttttcataaaataactcttgaagattttaatttagtaatggatgttcattttcaaggaagcttaaattgcacacatacaatttttcctattatgagagaacaagagtatggccgcattgtttttacaagctcctcaagtggtgtttttggtaactttggccaaactaactacggctctgcaaagatggcaatggtgggccttatgaataccttaaaaattgaaggtcaaagtaaaaatgtttttgcaaactctattacacctgttgcttatacaagaatgactgaaggtttaattccagaagactttggcaaaaatcttcaaccagaatttgttacacctgcagtaatctatttatcaagtgaaaatgcacctaacggagccattatggctgctggtgcaggagttttctctagaatattcattcatgaaactatgggagtatctttgggtatgggtgaagacatgacacctgaaaacatcgaggctaattgggacaaaatttctgatatgacagatgcacgagctttacagaatggaggagaacaaactcttaaattttttgaattaatcaacaaatag

SEQ ID NO: 203130 - DNA, 982 bp, Unknown
  Bacterial polypeptide expressing nucleotide sequence isolated from the Sargasso Sea
aggcgtaatttataaaggtagagataatgttgatcaatttaagtctgcacatgctattaatacaaaactcagaactctcaaggaagcaatcaaaggatcagacgtttttttaggtttgtcagcaaaagatacagttacccaagatatggtaaaatctatggcaaaaaatccaataatattcgcctgtgctaatcctgaccctgaaataaaacctgaattagtagatgaagtaagatcagatgcaatagttgctacaggaagatcggattatcctaatcaagttaataatttaattgggtttccatatatatttagaggtgctcttgatgtaagggcaaaagaaattaatgaagaaatgaaaattgcagcagcccaagcaatagcatcccttgctcgagaagaagttccagatgaagtggtaaatgcttacggtggagaaagaccacgttatggtagagaatatattatcccttcaacctttgatccaagattaattagtagaataccttcagcagttgctgaagcagcaataaaaagtggtgttgcaagaaaaaaaatcaaagatatagaagcatacaaagatcagttagcaaatagacttgatccttccatgagtattatgcaagggattaatgctcaaatcaaaaaaaatcctaggacagttgtttttgctgaaggtgaagatgagaatatgttaaaggctgccattgcttacaaaaatagccgtcttggtacaccgatagtaattggaagtgaaaaaagagtaaaagaacagttaaaagaaattggattagatgaaaattataacattaaaattgtcaactcaactaacaaagataaaagagaattatacactaaaaaattatacagcaagttacaaaggaaaggtcttttagaaagagacgtggacagattaattagaaatgatcgtgttatttggggagcttcgatggttgagtgtggtgatgcagatgcaatggta

SEQ ID NO: 203131 - DNA, 1010 bp, Unknown
  Bacterial polypeptide expressing nucleotide sequence isolated from the Sargasso Sea
ccacccttgtctgaaattcatgaagattctgagaacgtttataaatatacctcaaagtcaaacttggttgctgttattaccaatggcactgcggttttgggtttgggagatattggccctttagcatcaaaacctgtcatggaaggaaaaggtcttttatttaagatttttgctgacatagatgtgttcgatgtagaaattgacgcaaaaaatattgatgattttgtaaacactgtaaaaaatatagccccaacatttggaggaattaatttggaagacattaaagctcctgaagcttttgaaattgaaaaaagactagttagcgaacttgatattcctgtaatgcatgatgatcaacatggaacagcaattatatcaggagcagctttgattaatgctcttgaacttgctgaaaaaaagattgaggaagttaaaatggtaatctgtggtgcaggagctgcagctatttcatgtgctaaaatatatttggccctgggtttaaaaaaagaaaatataatcatgtttgacagtaagggaccaataaatattgaaaggaccaatttaaccaccgaaaaacaaaaattcattacacacaatacctcaatcaaaactttgtctgacgcaattgatggctctgatgtttttattggtttatcgatggcaaatatgatgactaaagaaatgcttttatcaatggcaaaaaatcccattgtctttgcgatggctaatcctgaccccgaaatcagctacactgttgccaaaagaaccagagaagatattatcattgctacgggaagaagtgaccatccaaaccaagttaataatgttttaggttttccatttatttttaggggagctcttgatgttagggcatcaaaaataaatgaagaaatgaaaatggctgctgtttatgcacttgcagaacttgcaaaagagcctgttccagaaattgtaaacatagtatataaagagaaaaaattaatgtttgaagagattatatattccaaaac

SEQ ID NO: 203132 - DNA, 214 bp, Unknown
  Bacterial polypeptide expressing nucleotide sequence isolated from the Sargasso Sea
acagtaaattgtattgcaccaggattaattgaaactgatatgacttctcacctttctgatactgtgaaacagggatatttagatagaattcctttgaaaaaacttggaaaaccaaaagatattgcacaaatgattttatttttatgttccgatgaagccagttatattacagggcaaacattttatattgatggtggaatgtcattaaattaat

SEQ ID NO: 203133 - DNA, 301 bp, Unknown
  Bacterial polypeptide expressing nucleotide sequence isolated from the Sargasso Sea
tatggctaatcgactaaaaggaaaagttgctctcatcacaggaggagcagcaggattcggtaaaaaaaccgctgaaacgctaaaagcagaaggcgcagtagtatacatctcagacattaatgttgaaggtggagaaaaagttgcgaaagactttgatgtaaattttctacagcaggatgtaactaatacagatgactgggaaagagtaattaacgaaataaagaacaaagaaggcaagctaaatattcttgtaaataatgctggtattggctatatgggagatgttgaatcaacaactaat

SEQ ID NO: 203134 - DNA, 988 bp, Unknown
  Bacterial polypeptide expressing nucleotide sequence isolated from the Sargasso Sea
agtcgctgctcctgtaaaagcaatagctaaaaatcctgatttagtttacgactatactagtaaaggaaatttagttgcagttattagtaatggttccgctatattaggacttggaaatcttggttctctcgcatcaaaaccagtaatggagggaaaatctgtactattcaaaagattcgcagatatagactccattgatattgaaattaataataataaaactgactctataattgaaacaattaaaaatattagtggaacatttggtggtattaatcttgaagatatagctgcacctgactgttttatagtagaacaaaaactcaaagaaattctagatatacctatttttcatgatgaccaacatggtacagcaattattacaacagctgctttaattaatgctttggacgtatcaaaaaaacaaataaataatgtaaaaattgttgtaaacggagctggtgcctctgcccaagcgtgtacaaatttatttaaaagttatggagttaaaaatgaaaatataattatgtgtgatagtaaaggagtaatctacaaaggtaggaaaaatgttgatcaatttaagtctgcttttgctgctaatactaaattaagaactttggaagaagcaataaaaggagcagatgtatttttaggtttatcagctaaagatgtcgtttctaaagatatgataaaatctatggcaaaaaatccaataatatttgcttgtgcgaatcctgatccggaaattaaaccagaaattataaatgaggtaagatcggatgcaataattgcaactggtagatctgattatcctaatcaagtaaataatttgattggatttccatatatctttagaggagcgttagatgtaagggctaaagaaattaatgaggaaatgaaaatggctgcggctaaagcaattgctttattggctagagaagatgttcctgatgaagttgttgctgcttatggtggagatagacctaaa

SEQ ID NO: 203135 - DNA, 820 bp, Unknown
  Bacterial polypeptide expressing nucleotide sequence isolated from the Sargasso Sea
aattataaatgaagtaagatcagatgctataatagcaactggaagatctgattatccaaatcaggtaaataatttaattggttttccatatatttttagaggagcgttagatgttagagccaaagaaattaatgaagaaatgaaaatagcggctgctaaagcaattgctttgttagcaagagaagatgtgcctgatgaagtagtttctgcttatggtggagacagaccaagatatggaaaaaattatattatcccttcaacgtttgatccaagattgataagtgtaattccagttgctgtagccaaggcagcaatgaaaagcggggtagctagaaaaaagattgaagattttgatatttataaagatcaattaacaaatcgattagatccatcaatgtcaatcatgcaaggtattaatgctaaagtgagaaaaaatccgaaaaaagttatttttgctgaaggagaagatgaaaatatgcttaaggctgcgattgaatttggaaaaaataaacttggaacgcctatattaattggaactgaaaaaagaattaaagaacaattaaagaaaattggtttggatgaaaatcacaaaattgaaattgtaaattcaactgataaagaaaaaagagaaaaatatgtaaaacatttatacaaaagattacaacgagaaggtcaattagagagagacgttgatcgtttagtgaggaatgaccgtatagcttggggagcttcgatgattgcttgtaatgatgctgacgctatggttactggcaatataaggcactataccgcttcaatagaaaaattaaaaaaagttgtt

SEQ ID NO: 203136 - DNA, 478 bp, Unknown
  Bacterial polypeptide expressing nucleotide sequence isolated from the Sargasso Sea
atggacttagagaataaagtagcccttgtaaccggagcaggagttcgtattggacaagaagttgcagtgaaactgggacaacttggcatgcgtttggtgatacattatcatcactctgaagaaggagcaaaacaaacaattcaaaggcttccaggaaaaaagtccagacacttggttttacaagcagatttgaaggacgtttccgcaatcaaagaacttgtacataaagcagaaaagcaggccggtcctgtatcggtactggttaacaatgcagcagaattttttcctactccattatttttcgcaactgaagaagaatgggaccatctattggcactaaatttaaaagcccccttctttttatcacaagctttagggggaaatatgaaatcttctggagaaggaaaaatcatcaatatggtagatgtctctgctgaacgtccttggaaaagttttctaccatattgtgcttcaaaag

SEQ ID NO: 203137 - DNA, 707 bp, Unknown
  Bacterial polypeptide expressing nucleotide sequence isolated from the Sargasso Sea
cgctgaggctgggtcagatgtggccataacaggattgaccgatgttaatgctaagactattgctaatgaattggctgctactggtgtgaacactttggcattaggcggggatgcaaccaaggcaaaggatatggattctattgttaataatgtattggaacaatggggaacagtagatactttaatcaattgtgttggcgatgctattaggaaaccagtttcacgattaccaggaactgaattagaaggaatgtctgaagaggaatggcattttatattggatatcaacttaaccgaagcgtttcagggttgccgagctttaggcccacatttcttagagagaaagacaggaaatgtaataaacatatccggatgggcttctttcagaggtagagctcagtcagctgcttatgacgctgctaaggctggtgtaatgagattcactgaatgcttggctcaagaatgggccccatataatatacgagttaatgccgttgctccagggagatttcctgacccagagcaattgagccaagatgtgtatgcaggacggcaacaagaggctgctcaagaaataccattaggaaggttgggtaatctcaaagagccagggtatttgtgtgtatttctcgcctcagaggcggcatcttatatcacaggccaaacttgggccatagatggagggataagtatcaagcatccgtagc

SEQ ID NO: 203138 - DNA, 690 bp, Unknown
  Bacterial polypeptide expressing nucleotide sequence isolated from the Sargasso Sea
agggatttggtcttgctattgttgaaaagtttttagcctctgaagcaaaagtaattatttgggataaagataaagaaatgatgaactctttaaacttaggagacaatgttcatacagtggaagtagatgtaacaaattttgatagtgttaataaagcaacagaacaatctcttcaaatttctgattctatagacatattagttaataatgccggtattgctggtccaagttttaagacatgggaatatcctatagaagaatggcaaaaagtaatagatatagatttaagtggagtattttactgctgtaaatcagttgttccacacatgattgaaaaaaattatggaaaaattgttaacatcgcctctattgctggcaaagaaggaaatcctaatgcaatgccttacagtgcagcgaaggctggtgtaattgctttgacaaaatcacttgggaaagaactagctgacaaaaatattgctgtaaattgtgtaactccagcagcagccaaaacgagaatatttgatcaaattagtcaagagcatattgattatatgctttctaaaatacctcgaaatagatttgtaaaagtggaagaacttgcatcactagtagcttggatgtcttcagatgaaaattcatatactactgcaggagtttttgatttaagtggaggaagagcaacttattaat

SEQ ID NO: 203139 - DNA, 830 bp, Unknown
  Bacterial polypeptide expressing nucleotide sequence isolated from the Sargasso Sea
aattactactgcagcactaataaatgctttggatatatcaaaaaagaaaataaacaaaattagagtagtaataaatggagctggagcttcagcaattgcttgttcagatctatttatgaaaaaaggtgttcccaaaaaatctataactatgattgatagaaaaggtgtaatttataaagggagagataatcttaatcactggaaatctgaacatgcaatagaaacaaaaaatagaactttggagcaggcaataaaaggtgctgatgtctttttaggattatctacaaaaggagtcctcacgaaaaaaatggtaaaaagtatggaaaaaaatccaataatatttgcatgtgcaaatccagatccagaaattacaccagaggaagttaatgaagtaagaaatgatgcaatagttgcaactggtagatcagattatccaaaccaagtaaataatttgctaggttttccgtatatatttagaggggctttagatgtaagagcaaaaacgataaatgaacaaatgaagcttgctgccgctgatgctattgccgctctcgcaagagaagatgtgcctgatgaagtggctgcagctatggggggaggagaaagaccaaagtatggaagagaatatattattccatcaacttttgatccaagattaataagtgtaatcccagtagcagtagctaaagcagcaatgcaaagcaaagtagcaagaaaaaaaattgaagactttgaagtgtataaagaaagactaaaacaaagattagatccgtctgttacaattttacaaggaataaactctcaaattaaaaaaaataaaaaaaaggtgg

SEQ ID NO: 203140 - DNA, 922 bp, Unknown
  Bacterial polypeptide expressing nucleotide sequence isolated from the Sargasso Sea
attgaaagaaatgttagatattccggtttttcatgatgatcaacatggaactgcaataattacatgtgcagctttaataaatgcattacacattacaaaaaaaaatattaagaatataaaaattgtaataaatggtgcaggggcatctgctatggcttgtgcaaatctttttaaagctaaaggagtacctcaaaaaaatatcacaatgctagatagaaaaggagttatttataaaggaagagaaaatctaaatgaatggaaatctttacatgctattgaaactaaagccagaacattagatgaaataatcgaaggagctgatgtatttcttggattatctaaagctgacgtattgaaaaaagatatggttaaaaaaatggcaaaaaatccaataatttttgcatgtgcaaatcctgatcctgaaattacacctgaagaaattgaagaagtaagaaatgatgcaataattgcaactggaagatctgattactcaaatcaagtaaacaacttgataggttttccctatatttttagaggagcactagatgttagagcaaaaacaataaatgaagaaatgaagatggccgcatcaaatgccatagctgctttagctagagaaagagttcctgatgaagttgttgcggcaatgggaggtgaaagaccaagatatggaaaaaattatataataccatctacatttgatccaagattgattagtgttattcctgttgcggttgctaaagctgcaattaaaagtggcgttgcaagaaaaaaaattgaaaattttgaaatttactctgaacaactaaaacaaagattggatccttcggtaactataatgcaaggaattaattctcaagttaaaaaagcacaaaaaaaagtagtatttgtagatggtgaagatgaaaatacacttaaagct

SEQ ID NO: 203141 - DNA, 611 bp, Unknown
  Bacterial polypeptide expressing nucleotide sequence isolated from the Sargasso Sea
aagccaagataaacttgaaactctttacgatgagctaatacctaatggtaataatgttgctattcaaccgattgacttctcttcggtcaaagaaaaggactacatagatatagttaaagccattagagaagagtatccagaaataaacggacttgtgaacaatgccggaatattaggagaaaaaaaatctatcgaacaatttgattataaaacttggagagaagttcaaagagttaatcttgatgcaggctttctactctcgaaacatcttttaccgttgatgaaaaaatcaaaaaacagttcaattattttcacctcatcaggtgtggggagaattggaaaagcttattggggagcctattctgtaagtaaatttgctacagaaggattgatgcaaatactttctgaggaactacaaaatacctcatccgtaagggtgaactgtatcaacccaggagcagtaagaacaaaaatgagagaatctgcttatcctgctgaagacccggagagcaacccattggcgtcagagatcatgacaccttatctgtttcttatgtcagacataagtgcagatattactggtcactcaattgacgctcaagagaactgat

SEQ ID NO: 203142 - DNA, 643 bp, Unknown
  Bacterial polypeptide expressing nucleotide sequence isolated from the Sargasso Sea
cgctgaagccgatgccctcgtcgccgaactgactgcccagggccgccgtgccgcagccttgcagctcgacaccggcaagatcgccacgttccccgcctttgccgaggccgtgcgcggcgtgctgactcggtggaaggccgagcgcttcgattacctcgtcaacaacgccggcgtgggcgtgcacgccacggtggccgaaaccactgaagcccagttcgacgaactgatgaatgtgcatttcaaaggcgtgttcttcctcacgcagatcctgctgccgctcatggctgacggcgggcgcatcgtcaatatctcgtcggggctggcgcgctttgcgctgccgggttacggcgcgtatgcggcaatgaagggcgcggtggaggtgctgacgcgctatctggcgaaggagctggggccgcgcggcattgctgtgaatgtggtggcaccgggcgccatcgagactgactttggcggcggtgccgtgcgcgacaacgcgagcctcaacgcgatggtcgcgtccaatacggcgctggggcgcgctggtgtgccggacgatatcggtggtgtggtggcatcgttgttgtcgccggataaccgctggatcaacgcccaacgcattgaggcatcgggcgggatgttcctgtaa

SEQ ID NO: 203143 - DNA, 314 bp, Unknown
  Bacterial polypeptide expressing nucleotide sequence isolated from the Sargasso Sea
catgtcactttctgccaagaccctattcatcaccggcgccagtcgtggcatcggccgcgaaatcgccctcaaggccgccgccgatggcgccaacatcgtcatcgcggccaagagcgccgagccgcacccgaaactcgaaggcaccatcttcagcgtcgccgccgaggtcgaagccgccggcggcaaggcgctggccctgcagctggacgtgcgcgacgagcaggccgtggccgccgccatggcccaggccgccgagcatttcggcggcatcgatgccctggtcaacaacgccggcgcgatcaagctggtaggcg

SEQ ID NO: 203144 - DNA, 957 bp, Unknown
  Bacterial polypeptide expressing nucleotide sequence isolated from the Sargasso Sea
tggatttcgacacggcgcactgccacctcttcacgccgatggccaggccgtcgccaaaccactgcagcaggccgcctgacgccgctccatcacgggatgttccagatgaaactcaatcgccagcagctttcccggctcggcggcgccgtcgcgctgcccagctacaccgcagagatgatccgcaccggcatcgcccattttggcgtcggcggctttcaccgcgcccaccaggcggtctacaccgacgccctgatgaaccagggcctggcactggactggggtatctgcggggtcggcgtgcgcagtgaggaccgcgccatgcgcgatgccctggccagccaggattacctctacaccctggtcgaactgggcgacgagccgaacctgccggtgcgggtgatcggcgcgatcaccgacatgctgctggccgaggagtcgccgcaggcgctgatcgacaagctggccgacccggcgattcgcatcgtctcgctgaccatcaccgagggtggctactgcatcgacgacagcaccggcgaatttctcgccgaactgccagccattgcccacgacctgcgtcatcccgaatcgccgcaaagcgtgttcggctttctctgcgcggccctggccaaacgtcgcgccgccggcattccggccttcaccctgatgtcctgcgataacctgccacacaacggcgacgtcacgcgcaaggcactgctggccttcgcccacctggccgaccaccagctggccacctggatcgaccatcatgtgagctttcccaatgccatggtcgaccgcatcacgccgatgaccagcgccgcccatcgccagcagctggccgagcagcacggcgtcgacgacgcctggccagtggtctgcgagcccttcgtggcatgggtgctggagggacagttcgtcagcggtcggccggcctgggaagaagtcggcgtgcagttc

SEQ ID NO: 203145 - DNA, 239 bp, Unknown
  Bacterial polypeptide expressing nucleotide sequence isolated from the Sargasso Sea
tatgaaatcatttaagaacaaagttgctttagttactggtgcggcatctggaatgggtagatatttggctattaatttagccaaagaaggtgctgatgttgttatttgtgatatcaatgaagactcgctcagagaaacagaaaaaataattaagtcattcaatgttggttcaagttgttatgtttttgatatcagaaacaaagaagaaatagaagaacttccagagaggattatcaaag

SEQ ID NO: 203146 - DNA, 412 bp, Unknown
  Bacterial polypeptide expressing nucleotide sequence isolated from the Sargasso Sea
atggaaacccgcgccgcaattgccgtcgaagccggcaagccgctagagattcactccgtcgaactagacggtccgaaggaaggcgaggtccttgtcgaaatgaaggctacgggcatctgccatacggatgagttcactctgtctggcgcagatccagagggtattttcccagccattctcggtcatgagggcgcgggaattgttgtcgacattggtccaggtgtaacgtctttggaaaaaggcgatcacgtgatcccactttacacaccggaatgtcgcgaatgcgaatactgcacgtctggcaagaccaatctctgccaggcgatacgcgaaacccaaggtcggggtgtcatgccagacggcacatcgcgcttccgcatgggccaggaccccatctatcactacatgggaa

SEQ ID NO: 203147 - DNA, 100 bp, Unknown
  Bacterial polypeptide expressing nucleotide sequence isolated from the Sargasso Sea
ccagacgatatatctagtttgactaaattcttagcaagtgataaagctagttatattacaggacaaacttttcatattaacggaggaatgttaatgtaat

SEQ ID NO: 203148 - DNA, 974 bp, Unknown
  Bacterial polypeptide expressing nucleotide sequence isolated from the Sargasso Sea
ttttttggtctctcgattggtaatatcattagtcaaaaaatggttttatctatggcagaaaaaccaattatttttgcaatggctaatcctgaacctgaaatattgcctgaaaagattaaagaatgcagaaatgatgcgattattgctactggaagatcagattatcctaatcaggttaataatgtcttaggattcccctatatatttagaggtgcgttagatgtaagggcaaaaacaattaatcttgaaatgaagatcgctgctgctaaagcaatagctgatctagccaaggaagatgtaccagacgaggtagccaatgcttatcctgggaaaagacctcaatacggtccagattatattattccttctccctttgatccaagacttattagtaaggttcctccagcagttgctaaagccgcaatggatactggtgttgcaaggaaagcaattgttgatattgaaaattactcaaatgaattatcagctaggctcaatccttctgctggtcttctacaaaaagtttttcaagaagtaaaagaaaatccaaaaagagtaatttttacggaaggtgaagaagaagacatgatcagagctgcagtaatatttctcaacaatagaatgggcactccgatattaattggaagagatgacgtcataaaagataaaatgcaagaaatggggttagatttttttgatcaaatggaaattcacagtactagaaataaatctgaacatgataggtacgccgaacatatctatcatcgtttacaaagaaaagggtttttaaaaaaggattgtttagatctactaaatcgggaaagaaatgttttcgcagcatgtatggtatctttaaaagaagctgatgcaatggtttgtggtttaacaagaagctatgctgcgtcattagaaagtattgagtatgttcttgatccaatacctaataaaaccattcttggcctgactgtgatgtt

SEQ ID NO: 203149 - DNA, 545 bp, Unknown
  Bacterial polypeptide expressing nucleotide sequence isolated from the Sargasso Sea
tatggctaatcgactaaaaggaaaagttgctctcatcacaggaggagcagcaggattcggtaaaaaaaccgctgaaacgctaaaagcagaaggcgcagtagtatacatctcagacattaatgttgaaggtggagaaaaagttgcgaaagactttgatgtaaattttctacagcaggatgtaactaatacagatgactgggaaagagtaattaacgaaataaagaacaaagaaggcaagctaaatattcttgtaaataatgctggtattggctatatgggagatgttgaatcaacaactaatgaagcttgggatatggtccataaagtagatcttgattcagtgttttatggctgtaagtacgcacttccattaatgagagattcaggcaatggatcaataattaatatttcatcaatttcaggaattgttgccggacataattttacagcttataacagtgcaaaagcagcggttagacatttatctaaatctgtagctcttcattgtgccagaaccactaatttagttagatgtaatagcgtgc

SEQ ID NO: 203150 - DNA, 463 bp, Unknown
  Bacterial polypeptide expressing nucleotide sequence isolated from the Sargasso Sea
atggaaataaggtttgatgaacaagttgcgatcgtaactggtgcaggaagggggcttggcagagctcatgctattgctatggcttcaaagggtgcaaaggtggtagtcaatgattttagtggaagccaggaaatatcagaaaatgccaattcagttgtagaagaaattatttctgctggaggtgaagcttttgccaatggtgcgaatgtcgcaaattttgatcaagttcaatgcatggtcaatgaaaccatagataaatggggtcgagtagatattttggttaataatgccggtattctcagggataaaacttttttaaaaatgtcggttgaggatatgcgtgaagtgatagatgttcatcttatgggctcgttaaattgttcaaaggcagtgtgggagacaatgcgtgaacaaagctatggaagaatcgttctcacctcgtcaagctcagggctttacggca

SEQ ID NO: 203151 - DNA, 225 bp, Unknown
  Bacterial polypeptide expressing nucleotide sequence isolated from the Sargasso Sea
ctgcaccagatattgcgggacaagggatagctaatccagtgggtcaaatttggtcagctgctatgatgttagattatttaggtgaaaaagaagcttctgatagaatagtaaaatcaattgaattaactcttaaagataaaaacagtcgaacaaaagatcttcaagggtctagtaatacagaacagtgttcaaaaaaaattttagacaatcttagttcagtctaaa

SEQ ID NO: 203152 - DNA, 331 bp, Unknown
  Bacterial polypeptide expressing nucleotide sequence isolated from the Sargasso Sea
atggaaataacaagtttatttaacatatctggaaaagttgctgttgttacaggcggttcaagaggaattggagaaatgataactgcaggctttttggcaaatggagtaaaagtttatatttcagcaagaaaagccccagccttgattgaaaaggctaaagaattgtctgaaaaatataaccaagaatgtatcccagtaccatgtgacttaagctcaatgaatggtattgatgagtttgttaatcagataactgaaaaggaagatgctattgattttttagttaataatgcaggggctgcatggggcgaacctctagaaagttctctgaaaa

SEQ ID NO: 203153 - DNA, 583 bp, Unknown
  Bacterial polypeptide expressing nucleotide sequence isolated from the Sargasso Sea
atggatacccaatctctcttttctctggctgggcgcaccgcgctggtcaccggcggctcccggggcatcggcaaaatgatcgccaccgggtttattgctcaaggcgccaaggtgtacatctccagccgcaaagcagacgtctgcgaggccgtcgccgaagagttggggcccaactgtattgccgtaccccaggacatctctaccgtcgacggctgcaaggccctggccgccaccatggccgagcatgaatccggcatcgatattctcgtgaataacgcgggcgccgcttggggcgagtcctttgaaacctttcctgaagcgggatgggacaaggtcatggacctcaacgtgaagtcaatctttttcctgacccaggcaatgcactgcctgctgaaagccggcgcatcggatgagcagccagcaaaggtaattaataccgcctcgatcgacggcctgcggctgaacccctgggaaacctatagctatcaagcctccaaggcggcggtcatcaacctgaccaagcgactcgcagcgcgactggtgaaagatggcattctggtcacgggtatcgcacccggcgcgt

SEQ ID NO: 203154 - DNA, 252 bp, Unknown
  Bacterial polypeptide expressing nucleotide sequence isolated from the Sargasso Sea
tatgtcaaaaaaaatatcattaatcggtgctggacaaattggtggaacacttgcacacttaattggtttaaaggaactggtagacgaagttgtaatgtttgatgttgcaagtggtattgctaaagggaaagcactagatatagcccagtcatcatcggttgatggctttaatgttaaattatctggaacagataattatgaagatattaaagactcaaatgtaattattataactgcaggagttcctagaaa

SEQ ID NO: 203155 - DNA, 618 bp, Unknown
  Bacterial polypeptide expressing nucleotide sequence isolated from the Sargasso Sea
aatgaatcaaatagatctaaataataaaactgcagtaataacaggaggcgctcaaggttttggttattcaatggtagagcggttttctcaatcaggagcaaaagttatgatttgggataaagatcaagaattaattgatagtttagatcttcccgaaaacgtaagtgcagtacaaactgatgtaacatcatatgatagtgttgagaattctgtaaaagcaactttagaaaaaaataataaaatagatattcttgttaataatgcaggaatagctggacctagttttaaaacatgggaataccctattgatcaatggcaaaatgttgttgatattgatttaacaggagtattttattgttgcagagcagttactcctcatatgattaaaaataattatggaaggattgttaatatagcatctattgctggtaaagaaggaaacccgaatgctatgccatatagtgctgcaaaagctggagttattgcattaacaaaatcacttggtaaggaattgtcagataaaaatattgcagttaattgtgtcaccccagcagcagcaaaaacaagaatatttgatcaaattagtcaagagcatatagattatatgtatcaaaaaaa

SEQ ID NO: 203156 - DNA, 172 bp, Unknown
  Bacterial polypeptide expressing nucleotide sequence isolated from the Sargasso Sea
atgttcttaaaaaattataacttaagaaataaaactgcacttgtgacaggagcaggaaaaggtattggtagagcatgtgccattgcactagcagaagcaggagcaaacctaattataataagcagaactaaaaaagacttagatgaagtttcaaaaaagataaaaagtttaa

SEQ ID NO: 203157 - DNA, 836 bp, Unknown
  Bacterial polypeptide expressing nucleotide sequence isolated from the Sargasso Sea
tggaggaattaatttagaagatattgctgcaccagattgttttattattgaacaaaaattgaaaaaaatagtagatgtacctatttttcatgatgatcaacatggaacagcaattattacaacagcagctttaatcaatgctttagatattaatggtaaatcaattaaaaaagttaaagtagtcgttaatggagctggagcatctgctttggcatgcacagaactgtttaaaaaaacaggtgttaaacatgagaatttaattatgtgtgatcgaaaaggtgtgatctataaaggtagggataatgtagatcaatggaaatcgaaacatgctgtaaaaacaaaatttagatctctaaaggaagcaattaatggggcagacgtatttttaggactttcagcaaaagacgctcttaccaaagatatggtaaaatcaatggcaaaaaatcctattatatttgcttgtgcaaatcctgatcctgaaattacaccagaaaaagttgaggaggttaggaaggatgctatagttgcgactggtagatctgattacccaaatcaggttaacaatcttataggatttccttatatttttagaggagccttagatgttagagcacaaacaataaacgaagaaatgaaaatagctgctgcacacgctatagccgatttagccaaaaagagagttccggatgaggtggcctcagtaatgggaggggtaagaccaatctatggtaaagaatatattattccctcaacttttgatccaagacttataagtgtaatccctgtcgccgtagctaaagcagcaattaagacaggtgttgctagaaaaaaaataa

SEQ ID NO: 203158 - DNA, 622 bp, Unknown
  Bacterial polypeptide expressing nucleotide sequence isolated from the Sargasso Sea
atgaaattaaaagataaagtggcactagttacaggtggcgcatcaggattaggtcaagcaactgttgaagcatttgtggcaaaaggcgctaaagtagttattttagatattaatgaagacaaagctaaggcaattattaaagatttaggcgatgataatgttctttttatctctacagatattatggaagaagatcctgttgttgatgcagttaatcaaataaaagataaatttggagcattacatattgctgtaaattgtgctggtacaggctatccaggaagaatacttggaaaagaagctccgcatccacttgacgcatttaaatttattattaatttaaatcttgtaggaacatttaatgttatgaggattgcagctgaattaatggataaaaacgatccaggttcaaaaggtgaaaaaggagtaataataaatacagcatctatagcaggttatgaggggcaaattggtcagtctgcatatagcgcatcaaaggcaggcgttattggtttaaccttaacagctgcaagagatttagctagacatgctgttagagtatgtactatagctccaggtattttcgatactccattaatgcaactagcaccagataaagtaa

SEQ ID NO: 203159 - DNA, 858 bp, Unknown
  Bacterial polypeptide expressing nucleotide sequence isolated from the Sargasso Sea
gtggaggtattggcaaacagcatgctcttgaattagcaagaagaggcgcaaaggtggttgttaatgatcttggaggaagtgtagatggaagtggcgcaagtgatgcagcaaatgaggttgttgagcttatcaagtctgaaggtggagaagctatttcaaatggagcaagtgttacagacttagatgcagtcaaggcaatggttgaccagactatgactgagtggggcagagtggatatattggttaacaatgctggtattttgagggataaaagctttcataaggtaactttagaagattttaatcttgtgatggatgtgcatttccaaggaagtttgaattgcacacatacagtatttccaattatgagagatcaagaatatgggcgtattatttttactagctcatctagtggtgtatttggtaattttggacaaaccaattatggctctgcaaagatggcaatgattggattaatgaataccttaaaaatagaaggtcaaaataaaaatgttttcaccaattctattactcctgttgcatacacgagaatgacagaaggattaattcctgaagatttcggtaagaacttacaaccagaatatgtcacaccagcagttatatatttagctagtgatgatgctcctaatggagcaatcatggctgcaggagctggagttttttcgagaatatttattcatgaaacaatgggagtttcattaggaatggataaagacatgactcctgaaaatatacaagccaactgggacaagatatctgatatggaagatgctagagctcttcaaaatggtggtgagcaaactttaaaattttttgaattaattagtaaggaataaa

SEQ ID NO: 203160 - DNA, 256 bp, Unknown
  Bacterial polypeptide expressing nucleotide sequence isolated from the Sargasso Sea
tatgaaaaaaatatctttaataggggctggccaaattggaggaaccttggcacatttaattggcttaaaagaattagcaaatgaagtagtattatttgatattgcaagtggaatagcaaagggcaaaagtttagatattgctcaatcttcatcagttgatggttttaatgtaaaattatctggaactgatgattataaggacatcaaaaactcagatgtaataattataacagcgggagttccaagaaagcctggc

SEQ ID NO: 203161 - DNA, 499 bp, Unknown
  Bacterial polypeptide expressing nucleotide sequence isolated from the Sargasso Sea
atgaatggactacgggataaagttattttggttactggcgcggcatcgggtcttggttacgctgatgccgagtttctcacagagagtggcgcgactgtggtcatgactgacattaacgaagacagcggtaaggctgtcgcggatcggttagggaatctatttttgggccaaaatgtcgcggatgagcatcgatggtccgaggtaatgtcagagataagggatagatttggacggcttgacggccttgttaacaatgctggcatagctccgatagcagatattgaaacgacgactacggaggtttggagacaaactttagctgtacatctagatggaaccttttttggttgtcagacggcactccgattaatgaaggagtcgggcggtggttcgattgtaaacatgtcgtcgactgctgcgttaattggaatccctgattatttggcctactcggctgcaaaaggaggtattagatcgatgacaaaggcgattgctgttc

SEQ ID NO: 203162 - DNA, 885 bp, Unknown
  Bacterial polypeptide expressing nucleotide sequence isolated from the Sargasso Sea
tttcaaaaatccagatgctgcttacgaatatacaagcaaaggaaatttttttgctgttataagtaacggttcagcaattttagggcttggaaatttaggttctttagcatctaaaccagttatggaaggtaaggccgttttgtttaaaaggttcgcagatatagacgccattgatattgagattgataataaaaattctgatgagattataaaatgtatacagaatataggaaatagttttggtggaataaatttagaagacattgcagcgccagattgtttcatcatagaaagtaaattaagagaaactttagatattcctatatttcacgatgaccaacatggtactgcaataatcactactgcagctctgataaatgcgcttgatatatcaaaaaaaaaggttggtgatgttaaaatagtggtaaatggagcgggagcctctgcaatagcatgtgcaaatctttttaaaaaaattggaattaaaagtgaaaatattttaatgcttgatagaaagggtgtaatttataaaggaagagataatattgatcaatttaagtcagcttatgctgttgagacaaaactaagaacactcccggaagctattaaaggagcggatatttttttagggttgtcagcaaaaaatgttttaacgaaagacatggtaaaatctatgtctaaaaatccgataatttttgcatgtgctaatccggatccagagataaaacctgaattagttgatgaagttagatcagatgcaatagttgcaacaggaaggtctgattatccaaatcaagtaaataatctaatcgggtttccatatatttttagaggtgctctagatgtgagagcaaaagaaataaatgacgaaatgaaaattgcagc

SEQ ID NO: 203163 - DNA, 709 bp, Unknown
  Bacterial polypeptide expressing nucleotide sequence isolated from the Sargasso Sea
aatgggaaatacaaaaaaaattgtaattacaggagcgagtcgaggtataggctcaacgatagctaaagcgttttctgatcaaggtgcctatgttgtaggaacgtgtacttctcctattagaaaagaattttgcagtgaatggattatatcagatttctcagatattaatcaaattaatgaatgtgctgaacgtataaaagaaattggtcccgatgttcttattaataacgctggtattaataaaatatcttcttttgaaaatatagtagctaatgaatttcttttgatacatcaaataaatgtatttgctccttttcgtttttgtcaggctgctatacctaacatgaaaactaaaaattgggggcggattataaacatttcttctatttgggggaagattagtaaagagtttcgtgcttcgtattctgcttcaaaatttgctctagatggaataacgttggcgcttgcagccgaatattcaaaatgtggtattctagccaattgtgtttctcctggttttactgatactgagcttacccgaaatattttaagtgatattgaaatacgaaatattgccttaaatattcctataaatagattagccgctcctaatgaaattgcagattatgttttatggttaggaagtgaaaaaaatacttacgtcacaggtcaaaatcttgcaattgatggaggatttactcgtgtctga

SEQ ID NO: 203164 - DNA, 583 bp, Unknown
  Bacterial polypeptide expressing nucleotide sequence isolated from the Sargasso Sea
ttttgttgctgatgtatctaaagcatcaagttttaattcactattaacatatttttataaaaaatataaatctgtggacatatttgtcaacaatgctggcataacgcataaacctaagcctatggaaaaagtaactgaaaaagaatttgataaagtatttaatgtaaatgcaaagtcagtttactactgtggaaaatattttgtcccaaaaatgaaaaaagtaaaaagaggggttatattaaatgttgcttcaacggcaggtttatcacctagaccaaaattaaattggtataatgctagtaaaggttggatgattactgcaacaaaagcaatggctatagaattggcaccttttaaagtaagagttaacgctatagcgcctgttgcaggaaaaacaccgttattaaagtcatttatgggaggcaacacacccaaaaaaaaacaagcttttttatcaacaatccctataggtagattttctacacctcaagatatggggaatgcagcatgttttttgtgttccgatgaagcaagcatgataacagaaattgttttggaagttgatggtggaagatgtatttaa

SEQ ID NO: 203165 - DNA, 411 bp, Unknown
  Bacterial polypeptide expressing nucleotide sequence isolated from the Sargasso Sea
catgaaagatttattttcaatagaaggcaaggtggctttggtcactggaggttcgagaggaattggtagcatgatcgctgctggcttcttagcttcaggagcgaaggtttacataagctcaagaaaagcagaggtatgtgatgaaaccgctaaaaaattaagtgaggaatacggaggtgaatgtatttcaatacctgccgacgtatctaatgttgaagggatagaggcattagctgatgccataaaaacaaaagaagacaaacttgatattttaataaacaatgccggtgttgcttggggtgagcctatcgatacctatccagaaatcggttgggataaagtcatggatactaacgtcaaaggtatcttctttttaactcaaaaactattaccacttttaaggcaagcagg

SEQ ID NO: 203166 - DNA, 730 bp, Unknown
  Bacterial polypeptide expressing nucleotide sequence isolated from the Sargasso Sea
aatgcattatggccgtgaacgaatcgtgctcgtcaccggagcaagtcgaggcgccgggcggggtattgctttagcgcttggtaagacgggtgcgacggtctaccttacaggccgtccggaaaatgacagcaacaccaacctctcaggaactttgtcagaaactgctcagcaagtaaccaatgccggaggtcatggtatacccctctactgcgatcactcaagcgatgaacaaactgggtcagttttaagtgagataaaaaaagaacatggtaggctcgacgtactggttaataatgttaccgatattgatgatgcgattactgataggggtcctttctgggaaaaaccaatttctctttgtaatcttttgagtgtgggtctacgctcacactatgttacaacttggcatgcggcaccgttgttaattgctgagggaggaggtctagtggttaatacttcctcctttgggggacgtacttatatgcatggaccggcttatggtgcgggtaaggctggggtagacaaaatggctcatgacatggcagtagattttaaaccttttcaggtcgcggtgatttccctatggatgggacttcttttaacggaaagaaccaagcgtgttttggatagcgatcaagatcggtataaagatctacttgattcagccgagacaccagagtttaccgggcacatcattaatgcgctagctgacgataaaaatttcataatt

SEQ ID NO: 203167 - DNA, 703 bp, Unknown
  Bacterial polypeptide expressing nucleotide sequence isolated from the Sargasso Sea
atgaccacctcgcgcttcgacctgaccggcaaaaccgccctgattaccggcgcctccagcggtctcggtgcccacttcgcccgcgtactggctgccgctggcgcacgcgtggtgctggccgcccgccgcgccgatcgcctgtccgcgctggtggacgagctcaagcaacaggggcatgaggcgatggcggtcaccatggacgtaaccgacgccgacagcgtcgacgccggcttcagcgctgccgagcaggccttcggcgtgtgcgacattctggttaacaacgccgggattggcgatccggtgcccttcctgaacatggacgaaggcaactggcgcagcatgctcgacaccaacctcgacggtgcctggcgcgtcgcccatcgcggctgcaaggcgatggccggcagcggccagggcggcagcgtgatcaacattgcctcgattctcggcctgcgcgtcggcaaggccctggcccactatgccgtcgccaaggccggtgtggtgcaattgaccaaggccatggcgatggaactggcgaagaacggtatccgcgtcaacgccattgcccccggctacttccgcaccgaaatgaattctgactacttcgataccgagcatggccagacctacgtgcgcagcaaggtcccgatgggccgcctggggcagctcgacgaactcgatggcccgctgctgctgctcgcca

SEQ ID NO: 203168 - DNA, 891 bp, Unknown
  Bacterial polypeptide expressing nucleotide sequence isolated from the Sargasso Sea
ggctgggcttgatgttacattggcggacatgaatggggcagccattgagaatgcaatcacgcgcgcagcaaagttgtttgaacggcgcctaaaaaatgagaacaagattgctgcagcgttagaacgtcttcggtccgatcctgatggtcacggtgcagccgatgcagatctaatcatcgaagccgttgctgaaaagttagacgtcaaacaggctgttttccaaaatctagaaaaagtttgtaaaactggtgcaattttggcaacaaacacctcggctattcccctcgaagatattgccactgcactaaacgctccggaacgcctaatcgggctgcatttcttcaaccctgttccagttctgcctctggtcgaggtgatatggtcaaaatattcagatcaagatttggttaaccgcggaatgcagtttgctggccagattgataaaatgccagttcgctgtaaatcagctccaggctttttagtaaatcgcgctttgctaccctatattttcaaggcgattgaggccgtggccggaggagaaaacgccgaccatatcgatgaagctttagttgatttcggtatgccaatggggccagtcgaactagctgatcagattggactggatgtctgccttgatgctggcatcgtgctcggcattgctccagccgcaaaaacattactcgacgagaaatgtaaggctggtacaattgggcggaaatccgggggcggtttttatgaatgggacggcaaccaagctatccgtgcgcgtcaatcacaagatccaagcgtcatggccacaatagctgaaaacatgttaacccccatgattgaggaatgccgaaaggcggtggatgaacaggttgttgactctgctgatagcgcagatgctgg

SEQ ID NO: 203169 - DNA, 373 bp, Unknown
  Bacterial polypeptide expressing nucleotide sequence isolated from the Sargasso Sea
gttgtgcaggcggaatgggtacagcaacattgatagagcgaatggatgcgtaaacacaaacgctaccttaagctatagtgaggaaatgatgcacattgatttgagcaacaaaagagtgatagtaacaggggcttctcgagggattggcaaagctattgctaaagcttttgcgcaagagggagcaaaagtggctatctgcgctcgaaacatagacacattgcaagcagccgccaatgagttttgtgcgccaattgaaaatatacttgtgcgcggggttgatgtgactgattcagaagcagtcaaggagttcgtgcatgaagtcgctgatttatggagcggcgtagatatcttgattaataatgcagggcaaggt

SEQ ID NO: 203170 - DNA, 847 bp, Unknown
  Bacterial polypeptide expressing nucleotide sequence isolated from the Sargasso Sea
cgactgttttttaatgagcagaaattaaaagaacttctggatattcctatttttcacgatgaccaacatggaactgcaataatcactactgcagcgttaataaatgctttagatatttcgaaaaagaaaattgacagagtaaaaattgtagtaaatggtgctggcgcatctgcacaagcatgtgcaaatttatttaaaagttctggcgttaaaagtgaaaatataattatgtgcgatagcaaaggagttatatttaaaggtcgaaaaaatattgaccaatttaaatctgcccatgcaattgaaacaaagttgagaactctagaagaggcaatgaaaggtgctgacgtattcttaggattgtctgctaaggacgttgtttcaaaagaaatggtaaaatcgatggctgacaagcctattatttttgcatgtgcaaatccagaccccgaaataaaaccagagttaatcaaacaatcaagatctgatgcgattatagcaacaggaaggtctgactatcctaatcaagtaaacaaccttattgggtttccttatatttttagaggagcgctagatgtaagagctaaagaaataaatgaggcaatgaaagttgctgcagctaatgcaatagctctattggcaagagaaaatgttcctgacgaagtagtgtctgcatatggaggtgatcgaccaagatatggtaaagattatataattccatcaacttttgatccaaggctaattagtgtaattcctgcagcagttgccgaagctgctatgaaaagtggtgtagcaagaaaaaatataatggatttagaaagttataaagatcaacttacaaacagattagatc

SEQ ID NO: 203171 - DNA, 127 bp, Unknown
  Bacterial polypeptide expressing nucleotide sequence isolated from the Sargasso Sea
gccaacgttactaatgaagatcaggtgaaagatttagttgagggtgttttagataaatggggaagaatagatattctcgttaataatgcaggtatattgagagataaaacttttgcaaaaatgtgat

SEQ ID NO: 203172 - DNA, 421 bp, Unknown
  Bacterial polypeptide expressing nucleotide sequence isolated from the Sargasso Sea
atgaataaaatagatctaaaaaataaagtagcaattgttacgggaggagcacagggatttggtcttgctattgttgaaaagtttttagcttccgatgcaaaagtcattatttgggataaagataaagaaatgatgagtactttaaatttaggagacaatgttcacacagtagaagtagatgtaacaaattttgatagtgttaacaaagcaacagaacaatctcttcaaatttcaaattctatagacatattagttaataatgctggtatagccggcccaagctttaagacatgggaatatcctatagaagaatggcaaaaagtaatagacatagatttaactggagtattttattgttgtaaatcaattgttccgcacatgatgaaaaaaattatgggaaaattgttaatattgcttctat

SEQ ID NO: 203173 - DNA, 613 bp, Unknown
  Bacterial polypeptide expressing nucleotide sequence isolated from the Sargasso Sea
atgaacaatattgatttaaaaaacaaggtagcaatagtaacaggtggtgcccaaggttttggttactccatggtagaaaggttttctgcttctggcgcaaaagtgataatttgggataaagataaaagtttaatgagcaaattatctcttccaaaaaatgtaaagacaatggaagtcgatgtcacgtcttatcaaagtgttgaaactgctactaatgatacgattaataagttttattcaattgatatcttagttaacaatgctggcatagctggaccaagttttaaaacgtgggaatacccattagaagaatggcaacaagttatggatattgatttaaacggagttttttattgttctaaagcgattgtgccacatatgataaaagcaaattatggaagaattgtaaatattgcttctatagcaggaaaagaaggtaatccaaatgcaatgccttatagtgctgctaaggctggtgtcattgctctaacaaagtctcttggaaaagagttgtctgataaaaatattgcagttaattgtgtgacccctgcagcagcaaaaacaaaaatttttgatcaaattagccaagagcacatagactacatgctatcaa

SEQ ID NO: 203174 - DNA, 613 bp, Unknown
  Bacterial polypeptide expressing nucleotide sequence isolated from the Sargasso Sea
ataattgcaactggaagatcggattatccaaatcaggtaaataatttaattggatttccatatatttttagaggcgcactagatgtaagagcaaaaactataaatgaggaaatgaaaattgctgcagtaaatgctatagcatccttagctaaaaaaagagttccagatgaagttgttgcagccatgggaggagaaagacctaaatatggaaaagattatataattccatctacatttgatccaagattaataagtgttattcctgttgcagttgctagggctgcattaaaaactaaagttgcaagaaaaaaaatagataactttgaaacttatgccgaccaattaaaacaaagattagatccttctgtaactataatgcaaggtataaattctaaaatcaaaaaaaatcaaaaaagagttatttttacagatggcgaagatgaaaatacattaaaagctgcaatcgcatttaaaaatgctgaactaggaattcctataattgtagctaaggaaaaaattgtcaaacaaagactaaaagaaattggatatggagaaaattttgatattcaaattacaaattctacagataaaaaaaagagagagaaatatgtta

SEQ ID NO: 203175 - DNA, 319 bp, Unknown
  Bacterial polypeptide expressing nucleotide sequence isolated from the Sargasso Sea
tatgaaaattgaagaaattttttctgtcaaagataaggtagcgctagtaacaggtggttcaagaggagtaggcgagatgattgcatccgcctatttggctaatggggcaaaagtctatataactgctagaaaggcagaagcctgtaacaataaagcaagcgaacttagtgaaaaatataatgccgaatgtatttcaattccaaataatgcatctagtttggagggtattcaggaacttttcgaagaaataaatcaaaaagaatcaaaattagatatcttagtaaataatgctggtgcagcatggggagagccgtttgaa

SEQ ID NO: 203176 - DNA, 832 bp, Unknown
  Bacterial polypeptide expressing nucleotide sequence isolated from the Sargasso Sea
gatgtatttttaggactttctgcaaaagatacagtatctccaaaaatgataaagtctatgtccaagaaacctattatatttgtatgtgcaaatcctgatccggagattactccagaagaaattttaaaggttaggacagatgcaataatagcaacaggtaggtcggattatccaaatcaagtaaataatttaattggattcccatatatttttaggggcgcattagacgttagagcaaaagagataaatgaagaaatgaaaatggctgcagcaaaatctattgcaatgttagcaagagatgatgtgccagatgaagtcgtttcagcttatggaggtgagagacctaaatatggaaagaattatattataccatcaacgtttgatccaagattgttaagcgttataccttccgctgttgccaaggcagctattaaaagtggtgtcgcacgaaagaaaattaacgactttgatgtttataaagatgaattaattaatagactagatccctctatgtctttaatgcaaggcataaatgctaaaattagaaaaaacccaaaaaaagtaatttttgcagaaggggaagatgagaatatgcttaaggctgcaattgagtttaataaagcaagacttggtacaccaattttgattggaagtgaggaaagaataaaagatcagcttaaaaagattggattaggcgaaaattttaaaattcaaatagttaattcaaaggataaatcgaaaagagaaaaatatacaaagtatttgtataaaaaactccaaagagatgggctattagagagggatgttgatagattgataagaaatgatcgag

SEQ ID NO: 203177 - DNA, 520 bp, Unknown
  Bacterial polypeptide expressing nucleotide sequence isolated from the Sargasso Sea
tgtaattaatcaatataagagaattgatatccttgttaataatgctggtatcgctaccagtgccccaatacatgaaatgacagatgtgatgtgggatgaattaatttcaatccatcttaatggaaccttctatgcgacaagagaatgtttaaaggtaatgtatgaacaagaatatggcagaataattaatacagcatcgcaattggcatacaaaggcagtgcaggtttttcacattacactgcagctaaaggtgcaatcatatcatttaccagatcactctctcttgaaattggagaaatgaatatcagagctaattgtgtagcaccaggcgctacaatgacaagaatgctatcagaagtgccgactgagattcttgatgggattaaagcatccatacctaaaggaacaattgcaaacatagaggaaatagttccagcatacctgtttctagcctcagaagatggcgaccattttgtaggacaaacaattagtccaaatggtggagatcatttcttatag

SEQ ID NO: 203178 - DNA, 739 bp, Unknown
  Bacterial polypeptide expressing nucleotide sequence isolated from the Sargasso Sea
atgatagatttaagcaaaacaaatgtaattttaactggagcaacaggcggtattggaaattcgatattggaaaaactgataaattcaggagcaaatgttttggcaacaggcactaatgatgaaaaactaaaaaaaataaatgaaaaattcaaatctgttaaaacgactaaatttgatatttctttgcatgataaaatagaagaatttattaacaaaagttatgaaactttagataataaggttgatgtgttaattaacaatgctggcataactcgagacaatttatcaattagaatgaaagatgaagaatggaatcaggtaattaatttaaatcttacttcaacttttttgctttcaaaaaatataataaaaaaaatgttaaaaaataaaaaagggaaaataataaatatttcttctttagtaggtcatacaggtaatataggccaagccaattataccgcttcgaaagcaggagtgattgctatgtcaaaaagtttagcccttgaatatggaaaaaaaaatataaatgtgaattgtatttcacctggatttataaccaccgaaatgacagataagattaatgaagattacaaaaaactacttaaatcaaaaataccattaaatagatttggcgatccagttgatattgcaaatactgtactttttttatgttcaaatctttcagattatattaccggagaaacaatacatgttaatgggggcatgtattttagttgac

SEQ ID NO: 203179 - DNA, 844 bp, Unknown
  Bacterial polypeptide expressing nucleotide sequence isolated from the Sargasso Sea
gtgtagaactctagaagatgcattaaacggagctgatattttttttggtctttcaattggtaatatcattagtcaaaaaatggttttatctatggcagaaaagccaattatttttgcaatggctaatcctgaacctgaaatattgcctgaaaagattaaagaatgtaggaaggatgcgattattgctactggaagatcagattatcctaatcaggttaataatgtcttaggattcccctatatatttagaggtgcattagatgtaagggcaaaaacaattaatcttgaaatgaaaattgcagcagctaaagcaatcgctgatctagcaaaagaagatgtgccagatgaggtagccaatgcttaccctgggaaaaggcctcaatacggtccagattatattattccctctccatttgatccaagacttattagtaaagttcctccagcagttgctaaagccgctatggatactggtgttgcaaggaaagcaattgttgatattgaaaattactcaaatgaattatctgctaggctcaatccttctgctggtcttctacaaaaagtttttcaagaagtaaaagaaaatccaaaaagagtgatttttacagaaggtgaggaagaagacatgatcagagctgcagtaatttttctcaacaatagaatgggcaccccgatattaattggaagagatgacgtcataaaagataaaatgcaggaaatgggattagacttttttgatcaaatggaaattcacagtactaggaataaatctgaacatgataggtatgccgaacatatctatcatcgtttgcaaagaaaaggatttttaaaaaaggattgttta

SEQ ID NO: 203180 - DNA, 562 bp, Unknown
  Bacterial polypeptide expressing nucleotide sequence isolated from the Sargasso Sea
cgcgaaagtatcgccgatgccttcgagaccgtcgaacgcgaagctggcaccgttaccgtcttagttaacaacgcaggcatcgccgagcgcgatatggccttggacgtcaccgagggccattggaaccgagtcattggcaccaatcttaccggagtttgggctgtcgctcaggaggcggcgagacgtatggtcaagagtgaagtgggtggcagcatcgtatcaattgcctcactgctatctaaacgcgtctctccgggaatcatgccatatgccgtttccaaggccggtgtcgctcacatgacccgcgcgctggctgtggaatgggcccagcacggcattcgcgtaaacgccatcgcgccgggctatttcgagacagatttgaaccgcgaatacctacgcagcgactacgcccaatccatgatcaagcggatccccttccgacgcaccggagagttggaggagttatctgggcccgtcctgatgctatgctctgacgcgggtagctacgtaagcggcaccgtgatcagtgtcgacggggcgcatgcggttaatcagttctagg

SEQ ID NO: 203181 - DNA, 763 bp, Unknown
  Bacterial polypeptide expressing nucleotide sequence isolated from the Sargasso Sea
tgctcatgctatagatacaaaattaagaactcttaaagaggctataaaagatgctgatgtatttttaggcttgtctacaaaagatgtacttactaaagacatggtaaaattaatggcaaaaaatcctataatttttgcatgcgcaaaccccgaccctgagattagtcctgaagatgtccatgaggtaagggaggatgcaatcgtagcaactggtagatctgattatccaaatcaagttaataatttaatcggatttccatatatttttagaggcgcgcttgatgttagagcaaaaacaattaatgaagaaatgaaggtagcagctgcacatgcaatagctgagcttgcaagagagtacgttcctgatgaggttgtagctgcaatgggtggagaaagaccaatatatggaaaagaatatataattccctctacttttgatccaagattaataagtgtaataccagttgcagtggcaaaggcagcaataaaaagtggtgtagcaagaaaaaatatagaaaattttgaaacttataaagaacaactaaagcaaaggcttgatccatcaacaacaattatgcagggtgtaaatactcaaataaaaaaatctcagaaaaaagttgtttttgctgacggtgaagatgaaaatacattaaaagcagcaatagcttttaaaagtaatggtctcggaattcccatattaatagcaaaaaaagaaattgtgaaacaaaaacttaaagaaattggtttggaagaaaattataaa

SEQ ID NO: 203182 - DNA, 121 bp, Unknown
  Bacterial polypeptide expressing nucleotide sequence isolated from the Sargasso Sea
tatgtattaccaatccattagatgtgatggttatggcctttcaaaattttctggtttaccagctaataaagttgtgggtatggcaggtatattggagagttctagatttaaattattttta

SEQ ID NO: 203183 - DNA, 916 bp, Unknown
  Bacterial polypeptide expressing nucleotide sequence isolated from the Sargasso Sea
gtagttgttaatggagcaggagcttcagccatagcatgcacgaacctatttaaatcgcttgggattaaaaaagataatgtagttatgtgtgatagaaaaggtgtaatttatcaaggtagagacaaagtagatcaatttaaatctgctcacgcaattaaaacaaaattcagaactttagaagaggtgatgaaaaatgcagatgtttttctaggtttatctgcaaaagacgtggtcactcaagcgatgataaaatccatggcaaaaaaaccaataatatttgcatgtgcaaatcctgatccagaaattaagccagaaaaaatacttgaggttagagatgacgctataatagcaacgggaagatcagactatccaaatcaagtaaataatttaatcggattcccttacatatttagaggagctttagacgtaagagcaaaagagataaatgaggaaatgaaaattgctgctgttagagctattgcgaaactagccagggaagatgtcccagatgaggttgtgtcagcttacgggggagacagaccaaaatatgggaaagattacataattccatcaactttcgatcctagactaataagtgagattccagttgcagtggcagatgcggcgataaaaagtggagttgcgagaaagaaaatttcaaaactagatgattataaagatcaacttacagctagactagatccctctatgtcgctaatgcaaggaattaatgcgaaggtaaagaacaatcctaagacagtagtttttgctgagggtgaagatcaaaatatgcttaaagcagcaatcgagtttggaaaaaataaacttggaaaaccaatagtgattggaaatgaaaaaagagttaaagaaaccctcaagagcattggtttagatgaaaatataaaatcgacatagt

SEQ ID NO: 203184 - DNA, 433 bp, Unknown
  Bacterial polypeptide expressing nucleotide sequence isolated from the Sargasso Sea
catgtttctcgtggcacgcgcctgcgccccattactgatggcctcggccgcgcagggccgcgcaccggcggcggtgctggtgtcctctaccttcggcgtgcgcgttccacacgtgggctacggaccctacgcagcgtcaaaggcgggcgtcatcaacctggtgcgcgcgctcgccaccgagtgggcgcccgggatccgcgtcaacggcatagcgcccggcgtgatcgacaccgccttcctccagggcggcaccggtcgcgcggtgaagcagaccggactggacatggagcacttcgtgcagggcgttgcgctgcagcgcctgggcagggccgaagagatcgcacacgccctgctgtatctgctgagtcacgccgccagctacatcaccggccagaccgtgcatgtcaacggtggcacccacatggcagcttga

SEQ ID NO: 203185 - DNA, 528 bp, Unknown
  Bacterial polypeptide expressing nucleotide sequence isolated from the Sargasso Sea
aatggttaagaaagtaattgtaacaggagcgagtagaggaataggtttcgaattggttcagaaatatgcagaagctgggcatgaagttatagctctatctaggaattcagatcgattgaaacaattgaaagaagcttgtttgcaattaaatcctcaagctcaagttcatattcttccttttgatttagctaaggatgatattgctgcgcaactcatgtgctttattgaatcttgttttcagcatgtcgatatacttattaataatgcaggtgcactaattgcaaagccttttactgagataagtgcagaagaattagagcgtatatataatgttaatgtgctttctgtatttaaactgacccaagagcttattcctaaattttctaataatgcacatattgtaaatattagtagtgtagggggtgttcagggttcggttaagttttcaggcttatctgcttacagttcttctaaagctgctttagttgcactaactgagtgtttgggtgaagatataaagaaaccgac

SEQ ID NO: 203186 - DNA, 711 bp, Unknown
  Bacterial polypeptide expressing nucleotide sequence isolated from the Sargasso Sea
aatgaaaagtattttagtcactggatcatcctctggtattggttcagcagtatgccaacattttgcaaaaagaggttggaaagtttttgggtcagttagaaaaatagaggatgggattaaattaaaggaaatttgtggagataattttatccccttattatttgatgtaactgatcgagaaaatattaaagatgcaataactatcctaaacaaagaattagaaggtttgggtttagattgccttgtaaataatgctggtataaatattccgggtccaattgaatatcaagatacaggtcaaattcgaaaagtctttgaagtaaatatcatgggagtaatcaattgcattcaagcatttcttccttcattaaagaaatctaaggattcgacgatcattaatataagttctatggctggcaaaacaggtcttcccatgcaagggagttactgtatgaccaaatttggtttagaaggtttgtctgaatctctaagaagagaacttttgatttatggaatcaaagttgtagtaattggtccaggtgcgattgaatctgcaatttgggaaaaaatccatgaagatgattacacaacctattcaaataccatctacgaaaatgctttttctaagcttgattttatgctgaataaggcaagagattctgcacttccagcaaatgtaattgcaaaaaaagtggaggatattgtaagttc

SEQ ID NO: 203187 - DNA, 925 bp, Unknown
  Bacterial polypeptide expressing nucleotide sequence isolated from the Sargasso Sea
aaatccagatgctgcttacgaatatacaagcaaaggaaatttggttgctgttataagtaatggctcagcaattttgggtcttggaaatttaggcgctttagcatccaaaccggttatggaaggtaaggccgttttatttaaaaggttcgcagatatagacgcaattgatattgagattgataataaaaattctgaagaaattataaaatgcatacaaaatatagggaatagttttggtggaataaatttagaagacattgcagcaccagattgtttcatcatagaaagtaaattaagagaaactttagatattcctatatttcacgatgatcaacatggtacagcaataatcactactgcagctctgataaacgcacttgatatatcaaaaaaaaaagttggtgacgttaaaatagtcgtaaatggagcgggagcctctgcaatagcatgtgcaaatctttttaaaaaaatcggaattaaaagtaagaatattttaatgcttgatagaaaaggtgtaatttataaaggaagggataatattgatcaatttaagtcagcttattctgttgagacaaaactcagaacactttcagaggctattaaaggagcagatatttttttagggttgtcggcaaaaaatgttttgacaaaagacatggtaaaatctatgtctaaaaatccaataatttttgcatgtgcaaatccagacccagagataaaacctgagttggttgatgaagttaggtccgatgcaatagttgcaacaggaaggtctgattatccaaaccaagtaaataatctaattggatttccatatatttttagaggtgctctagatgtaagggcaaaagaaataaatgacgaaatgaaaattgcagcagcgaaagcaattgctacacttgcaagagaagaagtgcctgacgaa

SEQ ID NO: 203188 - DNA, 829 bp, Unknown
  Bacterial polypeptide expressing nucleotide sequence isolated from the Sargasso Sea
atgggcagattaaataaaaaggttgctattgttactggagcaggaagaggcatagggaaagaaatttgtttatatctcgctaatgaaggagcgaagatagtagtaaatgatcttggtggcgatagagatggaagtggtggaggaaaaatagctgatgaagttgttaatgaaatcaatggtttaggaggagaatctgtagctaattatgattcagtaagtactgttgaaggtggtaataatatctttaatactgccattgattcgtttggccaagctgacatattagtaaataatgctggcatattaagagacagaactctttacaacatggaagagtctgattgggatctcattatggaagtgcatcttaaagggcactataactgcacaagacctttagttaggtatattagagacactaatagaagtgattgcagaatcattaatatgtcttcagtgtcaggtttatttggaaattttggtcaggttaattatggcgcagctaaagaaggtatagctggatttacacgatcacttgctttggaagttgctaaatacaaatgtactgtaaacactatatctcctggagcggcaactagattaacaatagatcttatagaagctgctggaagaaagtatgatgaaaacgactggactcaaggacccgaacagatagctcctatagtcgcgtggttgtgtaccgatgctgctaaagatgtaacgtcacaaataatacattctcaaggtggaattttaggaattatgcaacagcctgcaattattcagtcttttacaactgaagatctttggactttagatcaacttgata

SEQ ID NO: 203189 - DNA, 788 bp, Unknown
  Bacterial polypeptide expressing nucleotide sequence isolated from the Sargasso Sea
agaaataataaaagataacgtaaataaaaaagaaaaatcaataattttttcatttctgcataatgcattaaatttaagaagggaaaaatgtaataaaccaataaccctattatgttgtgataatattagagaaaatggtaaaatgcttgagaaatcactcatttcttatttaaaactttgtaatgatatagagttaataaattggatcgaaactaatgtgacattcccctcttgcatggttgatagaattaccccaagatcgcctaaaaatttagcaaatgaaattagtgagaaatttaaaataaatgagaaatcttccgttatggcagagccatttattcaatgggttattgaagataaatttattgatgaaagacctaagttagaaaaagttggtgttgagtttgtaacaaatattataccttatgaagaagcaaaaattagaattttaaatgcaggtcatttagttttaagttattttggtgttctcaacaattataaaacatacgaccaaacaattaaggatgagcaacttaaagaatttttttttaactttcaaagattagaagctataccagctcttggaaatgatataccttttgatttagaggaatatatgcttgtaatatttaatagatttaataatgaaaatatagctgataaacatgagagattagtgatggatgggtcaagtaaatttcctttatttgtattaccaacaattcaaagatgttttgatttaaaaaaaattccgaatcattgtattgatgcaatagcaagctggtata

SEQ ID NO: 203190 - DNA, 517 bp, Unknown
  Bacterial polypeptide expressing nucleotide sequence isolated from the Sargasso Sea
catggatttttttaacctcacaggtaagactgctttggtgaccgggggcaatggtggattaggactgggaatggctcaaggtctggctaattatgggtgtgaggttatattagtaggaaggaataaaaagaagttaactgattctgtggcacttattaatgaaaaccaccaagggaaagcgcaccaattgttagcagatgtcaatttatatgaagacttagagcgtatagtatatgaagggattaagattacaggcacgatagacattttggtcaacaatgctggtatatctatcagaaagcaaccacaggatctttccgatgatgactgggatcaggtgttaaatactaatctgaagtcagtctttagattgtctaaattaatgtattcccattttgaaactataggacacgggaagattattaacataggttcaatgtactctatatttggtagtgattgggttgttccctattcagcaagcaaaggagccgtcatacaactgactaaaagtctg

SEQ ID NO: 203191 - DNA, 838 bp, Unknown
  Bacterial polypeptide expressing nucleotide sequence isolated from the Sargasso Sea
gcaatactatttaaacgttttgcagacatagactccatagatcttgaaatagattcatcgaatgccaaagaaataattaattgtatagcgagtctttcaaaaagttttggaggaataaatttagaagatatagctgcaccagattgttttattatagaacaaaaattaagggaaaaattggacattccaatatttcatgatgatcaacatggtacagcaattataactttagctgcattgattaatgctctagatatatcaaaaaaatctataaaaaaaattaaagttgtagtaaatggtgctggagcatcagccatagcgtgtactaatttatttaaaagcagtggagtaccaagtgaaaacataattatgatagatcgaaaaggagttttgtttcgtggaagagataatctcgatcaatggaagtctgctcatgcaatagatacaaaattaagaacgctcaaagaagcaataaaaggtgcggatgtatttttaggtttatctacaaaaaacgttcttacaaaagaaatggtaaagtcaatggcaaaaaaacctattatctttgcttgtgcaaatcctgatcccgagattaatcccgaagatgttaatgaagtaagatcagatgcaattgtagctactggtagatctgattatccaaatcaagttaataacttaattggatttccatatatttttagaggagctctagatgttagagcaaaaacaattaatgaagaaatgaaaacggctgccgcttattcgatagctgagctcgcaagagagtatgttccggatgaagtagtagctgcaatgggtggtgaaagacccaatttatggg

SEQ ID NO: 203192 - DNA, 544 bp, Unknown
  Bacterial polypeptide expressing nucleotide sequence isolated from the Sargasso Sea
ggagcaacgattgaattgccaagtttacgtgaatgtgttgatgatattttgattttatcagaacactttcttgacttgctagaaaaagagggcggaccaaaaagaaaattggggattaaggcgcaagatttatttcgagcttacagttggcctggaaacgtaaggcaattacaaaatgttgtgaagcgacttgggttaactgccagagagtatgaaatttcacttactgaagttgagcagtccttggaaaaccaaccagatagcaacggatcatttggcaacgcgggaacagaaaaaatggcaaatgatatagagaggcacttgaggaggtattttgatttgcatggaaatattttaccccccgttggtttatataatcgcattttaaaggagcttgaaattcccttaatcgctgtatctttagaagccacaggtggtaaccaagcaaagtgtgctgatttattgggaataaatcgaaatactttacgaaaaaaaattagtgacctagaaataaaagttcataaacgccgaaaattgatgtaaa

SEQ ID NO: 203193 - DNA, 144 bp, Unknown
  Bacterial polypeptide expressing nucleotide sequence isolated from the Sargasso Sea
catgaaaacgctgactttcgaaaatggtgacaccctacccatgctgggcctgggcacctggaaatccgctcccggcgaggtgtacaacgccgtcagaagcgccattgagatgggttatcggcatatcgactgtgcccatattta

SEQ ID NO: 203194 - DNA, 955 bp, Unknown
  Bacterial polypeptide expressing nucleotide sequence isolated from the Sargasso Sea
aatgttaagagtatgggaaaaaatccaaattatatttgcatgtgcaaatcctgatccagaaattactcctgaggaagttgaggaagttagagatgatgcaattgtagcaactggtagatcagattatccaaatcaagtaaataatttattaggttttccttatatttttagaggtgctttagatgtaagggctaaaacaataaacgatgaaatgaaaatagcagcagctaatgcaatagcatttcttgctagagagagagtacctgatgaggttgtggctgccatgggtggtgataggccaaaatatggaaaagattatattattccgtctacgtttgacccaaggcttattaatgtaattccagtagcagtagcaaaggcagctataaaaacaggtgttgcaagaaaaaaaattgacaattttgatttatattctgatcaattaaaacaaaggttagatccatctgtaactataatgcaaggaattaattcgcaaattaaaaaaaatcaaaaaagagtcgtatttgcagatggtgaggatgaaaatacattaaaagcagcgattgccttcaaaaatagtggtctaggtataccaatattagttgcgaaagataaaatagttaaacaacgtttgaaagaaataggttatggcgagaactttgatattgagattataaattccactaaaaaaaaattaagagaaaaatactcaaaatatttatttgaaaaattacacagatcacaaggcttgcttaagagagattgtgatagattagtaagaaatgacagggtaatttggggttcttgtatggttgcttgctcagatgctgatgcaatggtaacaggtaatacaagaagatatgggcaatctttgcaaaaaatcacaaaagtagtacctcctagaccaggtgaaatcatgtttggtttaaatatggtcgtaaataaaggtagaaca

SEQ ID NO: 203195 - DNA, 697 bp, Unknown
  Bacterial polypeptide expressing nucleotide sequence isolated from the Sargasso Sea
gctggcgcagcaaagatgctgcaatctatgctcgacgcttttccccccgatcattcgtaattcattcggagagactcccatgctgaaaggcaaaactgccctcgtcaccggctccaccagcggcattggtcttggcatcgccaaggccctggcgcgccagggtgccaacatcgtgctcaacggctttggcgatgtggatggcccgcgtgccgaagtgctggccgccggtgaggccgcaggggcccaggtggcgtaccacggcgcggacatgagccgtgtggccgacatcgaagacatgatgaagtacagcgccagccagttcggccgcgtggacatcctggtcaacaacgcaggcatccagcatgtggccaatgtggagaacttccccgttgagcgctgggactccatcatcgccatcaacctgaccagtgccttccacacctcgcgcttggccctgcccgcgatgaagagcgccaactggggccgcatcatcaatgtggcatcggtgcacggcttggtgggatcagcccagaagtccgcctatgtggctgccaagcacggcatcgtgggcctgaccaaggtcactgcgctggaaaacgccaccaccggcgtgacctgcaatgccatctgccccggctgggtgctgacgccactggtgcaaaagcaggtggacgccaaggccgcagaacatggcatc

SEQ ID NO: 203196 - DNA, 902 bp, Unknown
  Bacterial polypeptide expressing nucleotide sequence isolated from the Sargasso Sea
tatagactctatagatttagaaattgattcatcgaatgcaaatgaaattattaattgcatagcaagcctatctaaaagctttggtggtattaatttagaagatatagctgctccagattgttttgttatagaacaaaaattaagagaaaaattagacattccaatatttcatgatgatcagcacggcacggcaattataactctcgcagccttaattaatgctttagatatatcaaaaaaatctattaaagatattaaagttgttgttaatggtgctggtgcatcagctatagcttgtactaacctatttaaaagtagcggagtaccaaataaaaacataattatgatagacagaaaaggaattttgtatcgtggaagagataatcttgatcaatggaaatcagctcacgcagtagatacaaagttaagaactctcaaagaagcaataaaaggtgcagatgtatttttaggtttatcaactaaagatgtacttacaaaagatatggttaaatcaatggcaaaaaatcctataatttttgcctgcgcaaaccctgatcctgaaattagccccgaagatgtaagcgaagtaagagaagatgcaatagtagcaactggaagatcggattatccaaaccaagttaataacttaattggatttccatatatttttagaggagcgctagatgttagagcaaaaacaattaatgaagaaatgaaaacagctgctgcgcatgcgatagctaaacttgctagagaatatgttcctgatgaagttgttgctgcaatgggtggcgaaagacccatatatggaaaagaatatataattccttcaacttttgatccaagattaataagcgtaataccagttgcagtagctaaagcggcaataaaaagtggtgttg

SEQ ID NO: 203197 - DNA, 196 bp, Unknown
  Bacterial polypeptide expressing nucleotide sequence isolated from the Sargasso Sea
tttgggtaaaaatggcttagattgtctcgtaaataatgcaggtattaatatttctggtcctatggagtatgtagaatctaatgaagtaagaaaagtcttcgaagtcaatgtaatgggaccattaaattgctcgcaatcattcctgccaatgcttaaaaaatccacatcagcaactataattaatataagctcaatg

SEQ ID NO: 203198 - DNA, 230 bp, Unknown
  Bacterial polypeptide expressing nucleotide sequence isolated from the Sargasso Sea
aatgagaaaaaaaattgctctagtgggagcaggtaatataggtggaacacttgctcatataattggattaaaagaaattgcagatgttgctctaattgatgttgttgaaggtataccaaaaggcaaagcattagatttatctcaatcatcttcaatagagtcttttaatatacaatttaaaggatcagccaactttaaagatatgaataattcagacgttgttatagtaa

SEQ ID NO: 203199 - DNA, 262 bp, Unknown
  Bacterial polypeptide expressing nucleotide sequence isolated from the Sargasso Sea
atgaaatctatattagttacaggatcttcttcaggaattggagctgcaatatgtgaacacttctcacaaattggttggaaagttttcgggagtgtgcgaaatcaatatgatggggataaactaacagatatatgtggagaaaatttcattccccttatctttgatgtcacagatattaatgcaattaaggaggcggctaatttagttgaatctcatttgggcaaaaatggcttaaattgtctcgtaaataatgcaggtatta

SEQ ID NO: 203200 - DNA, 265 bp, Unknown
  Bacterial polypeptide expressing nucleotide sequence isolated from the Sargasso Sea
aatgtatttaaacaaatataatttaaaaaacaaagttgcattagttacaggtgctgggaaaggccttggaaaagcctgtgcagttgccttggccgaagcaggagctaatttaataatagttagtagaacaaaaaaagacttaaatcaggtatcaaaaataattaaaagatttaaagtaaaatgtaaatcatatgtttgtgatgtaactaattataatgaaattaaaggaataattaataagcaaggcagaatagatattttaatt

SEQ ID NO: 203201 - DNA, 367 bp, Unknown
  Bacterial polypeptide expressing nucleotide sequence isolated from the Sargasso Sea
atgccggagccctacccagagcgcgacgttgccggccgggtggtgctgatcacgggcgcaagccgcggcctcggccactacgtcgcctcgcagctcgcctcgcgcggcgcacgcgtcatcgcggtggcgcgcacgctcgagcctccttgggtcgaagcgctcaccgccgccgcgtcggttggcggctctgttgatgcggtggcctgcgacctgacgagcgtggacgctgtgcgctcgctcttccaatcgacgctgccggcgctcggtgtgagcaagatcgacgtgctcgtcaacaacgcggcgatcatgccgcacatcttcgatgatccactgagtacgcgccgcgcgcgccccttcatcatatgag

SEQ ID NO: 203202 - DNA, 292 bp, Unknown
  Bacterial polypeptide expressing nucleotide sequence isolated from the Sargasso Sea
acacttgaagatgttcttaaaggagcagatattgcctttggtttatcagtaaaaggagcatttactaacgagatgatgctttccatgaatgaaaagccaattgttttcgcaatggcaaatccggatcctgaaattagtcctgatgagcttagaaaaataagacccgatgcaattattgcaacaggaagatctgattatcctaatcaggtaaataatgtacttggctttccttacatttttagaggtgccctcgatgttagagcgtctgctatcaatattgatatgaaaattg

SEQ ID NO: 203203 - DNA, 894 bp, Unknown
  Bacterial polypeptide expressing nucleotide sequence isolated from the Sargasso Sea
tttgggcctatcgcgctgccgggtgttgtaaaaaaaagtatggtaaaaaagatggcaaaaaatccaattatatttgcatgcgcaaatccagatcctgaaattaaaccagaagatatagaagaagtgagaaatgatgcaattatagcaacgggtagatcggattatccaaatcaagtaaataatttaattgggtttccttacatatttaggggagcattagatgttagagcaaaaactattaatgaagaaatgaaagttgcggcagctaatgctatcgcctcgcttgcaagagaatttgtaccagacgaggtcgcagctgcaatgggcggtgaaagacctaattatggaaaagaatatatcattccatctacttttgacccacggttaataagcgttataccagtagcagtagcaaaagctgctataaagtctggtgttgcaagaaaaaaaatagaaaattttgatcaatattctgaacagctaaaacaaaggcttgatccatctgtaacaattatgcagggtataaataaccaaattaaaaaaacgaacaaaaaagttgtatttgctgatggtgaagatgaaaatactttaaaggcagctatagcatttaaaaatagtggactaggtacacctattttggttgctaaagaaaaagttgttaaagaaaaactgagagagataggttacggagaaaactttgatattgaaattgtgaactctactttaagcgacaaaagaaaaaaatatgtaaattatttatttaaaaaactgcaaagaaaagagggattgcttgaaagagattgtgataaaatggttagaaatgacagagttatatggggttcttgcatggttgcatgtggtgatgctgatgcaatggttactggaaattcaaga

SEQ ID NO: 203204 - DNA, 739 bp, Unknown
  Bacterial polypeptide expressing nucleotide sequence isolated from the Sargasso Sea
aatgattaatttagaaaataaaaatattatacttacaggagcgactggcgggataggaaattctattgttgatacactttcttcattaaaagccaaaataatagtaactggtacaaatgaaaataaattagaagaattaaaaaataaatataaaaatataatttctctaaaacaagacatatccaaacataatgaattggagtcttttattgaaaaatgcaacactgaattaggggataaaattgatattttaattaataatgcaggaattacaaaagacaatttaacaataagaatgaataaagaggattgggaaaaagtaattaatgtaaatttaacatcaacatttttattatcaaaatatgtaataaagaaaatgttaaaaaaaaaatttggtaaaataattaatattacatcagttgtcgcccatacaggaaatttaggccaagcaaattatacagcttctaaaggaggtgtatctgcaatgtcaaaaagcttatcattagagtatgcaaaaaaaaatattatgattaattgtattgcaccaggatttattgaaacagcaatgactgaaaaaataaataatgaatataagaatcaactaaaatcaaaaatacccatggatagatttggaacccctcaagatatagctaattgtgcagcttttttatgttcagacttatcaaattacattactggcgaaacaatccatgttaatggaggtatgtattttagttga

SEQ ID NO: 203205 - DNA, 946 bp, Unknown
  Bacterial polypeptide expressing nucleotide sequence isolated from the Sargasso Sea
ttctccgggtgttgcagcgccagtaaaagaaatttacaaaaatccggatctcgcttatgaatataccactaagggtaacttggttgctgttattagtaatggatctgcaattttaggattaggaaatttaggagctattgcatctaaacctgtaatggaaggcaaggcagttttatttaaaagatttgcagatatagacgctattgatttagaaattgacactaaagatccaaatgaaataattaaaagcataaaaaacttcgctataagttttggaggtattaatcttgaagacattgctgctccagaatgttttataattgaggaaaatttaaaagaaattctagacataccagtttttcatgatgatcaacatggaacagcaataattacatctgcagcacttataaattcaattcatattacaaaaaaaaaaatttctaaaattaaagttgttgtaaatggagcaggtgcatctgcaatggcatgttcaaacttatttattaaattaggtgtaaaaaaagataatttaactatgattgatagtaagggtgtaattagcactatcagaaaagatttgaataaatggaaattaaaatatgcaaaaaaaacaaaggacaaagatttatatgatgcattgaaaaatgcagatgtttttttaggtttatcttcagctggcatacttaaaaaagaaatgattaaaagaatggcaaaaaatccaattatatttgcgtgcgctaatcctgatcctgaaattttacccgaggaggcttacaaagtaagaaaagatgctattctcgcaacaggtaggtcagattatgcaaatcaagtaaataatttaattggatttccatacatatttagaggagcacttgatactagggcaaaaacaattaacgaggaaatgaaaatttctgcagcttatgccattgcaaaattagctaga

SEQ ID NO: 203206 - DNA, 242 bp, Unknown
  Bacterial polypeptide expressing nucleotide sequence isolated from the Sargasso Sea
tatgagaaaaatatctttgattggtgctggacaaattggaggaactttagcccaccttattggacttaaagaattggtaaatgaagttgtaatgtttgatgtggcaagtggtatagcaaaaggtaaagcgctagatattgctcaatcatcatctgtagacggatttaatgttaatttttctggtacagataattacgaggatattaaaaattcagatgtaataatcattaccgcaggagttc

SEQ ID NO: 203207 - DNA, 581 bp, Unknown
  Bacterial polypeptide expressing nucleotide sequence isolated from the Sargasso Sea
gatgctactgaagcacaaaacttcaattataacaggttgtaacaggggcataggtttgcacattttggaaacctttgtgcaaaatggagccaatgtatttgcttgttacagaaaaaaaagtgatcaaataattgataattgtaaaaatctatctaaaaaatttggtgtcaaagtttatccaatattttttgatcttaaaaataatgatgaattaaaaaaagcttttcaggaaatatctgaaaaccaagaaaatatagatattttagtgaataatgctggcataatacatacttctttattccaaatgacaaaaattgaaaacttcaaagaaatattcgacgtaaactttttctcttacatagattttactcaaagaatttcaaagttaatgactaaaagaaaaagtggtagtatcattaatatttcttcgtctgcagcgcatgaagctaatattggcagatctgcttatgcatcaagtaaatcatctattgaagtgttatcgaaagttatttccagggaattaggaagatctaatgtgagagttaattcaattgcaccagggcttaccgagactgacatga

SEQ ID NO: 203208 - DNA, 508 bp, Unknown
  Bacterial polypeptide expressing nucleotide sequence isolated from the Sargasso Sea
atgagtaataagtataaaaccctttttgatttgactgataaagttgctattgtaactggatcgagtagaggtataggtgcatcaatagctgaggcttttgctgaatttggagcaagtgtagtcttgagcagtaggacaaaagaaagtgtagatgagattgctgcaaatattaaaaaaaatggctttaaggcagaggctgttgaatgtcatgttggtgaggaggagcaactaaaaaatctagttgaaacaacaataaaaacatatggaaaaattgatatattagttaataatgctggaattaatccagtttttgatagacttgaaaatgcagatgataaattatttaataaaattattgacattaatgtcaaagctgcgtttaagctttcgaatatggttatgaaatatatgaaagaaaataatgccggatccataattaatatctcatcagttgaaggtcataaaccagacaaagacctaggggtatattcaattagtaaggcagcta

SEQ ID NO: 203209 - DNA, 646 bp, Unknown
  Bacterial polypeptide expressing nucleotide sequence isolated from the Sargasso Sea
tatgcagttacaagaaatattaatgatttaaaaaaattaaaaaaacgaaaaaatcttttcttattctatggagatataacgaaaaaagaaatcatcgaaaatatttttaatttagcaaaaaaaaataagcatgtaatcaattgtttagtcaataatgctggaataagacaaagaaaaagttttgattttttaacagaaaatgatttaaaattcatttttgaaaataactatttttctgtatttaatttaacaaaaaaatttgtgaaacaatttaaatttaaaaaaaattttggatcaattgtcaatataagttcgattgttggagaattaggttttaaagagttaagtggatatgcagcaaccaaatcagctataaatggttttacaaagtctttatctgatgaactaccaaaaaaaaaaatacgagtaaattctatagctccaggatttataaaatcatcgtattataataattttaaaaaaaataagaaatctctttacaaatggactttaagcagaattccaatagcaaagtggggtgaaaatgctgatgtagcagatttaacaatatttttgttatcagaaaactcaaaatatataaatggacaaattataaaagtagatggaggatggtcttcaacatgaa

SEQ ID NO: 203210 - DNA, 864 bp, Unknown
  Bacterial polypeptide expressing nucleotide sequence isolated from the Sargasso Sea
gtgtgaccgtaaaggtgtaatttacaaaggtagagaaaatttagatcagtggaaatctaagcatgcagtaaatacaaaatttagaaccttaaaagaagctataaaaggagcagatgtatttttgggattgtcagctaaggatgcattaacgcagggcatggtaaaatctatggcaaaaaatcctataatatttgcatgtgctaacccggatcctgaaattagtcctgaaaaaatagaggaggtaagatcagattcaattattgcgacaggaagatctgattatcccaatcaagtaaataatctaataggctttccatatattttcagaggtgccctggatgttagagcaaggacaattaacgaggaaatgaaagtagcagctgctcatgctatagcagatctagctaaaaagagagttccggatgaagtcgcatcagtaatgggtggtgtaaggccagcttatggtaaagattatattattccctccacctttgatccaagacttataagtgtaatacccgtggctgttgcaaaagctgctataaagacaggtgtcgctagaaaaaaaataaaagattttgatttatatgctgatcaactaaaaaatagattggatccgtccgtaactgtcatgcaaggaataaattctttaataagaaaaaaacaaaaaaaagttgtttttgcagatggtgaagatgaaaataatcttaaggcagcaatagctttcaaaaatagtggtttaggaattcctatactggttgcaaaaaaagaactggttaaaaagaaacttaaagaaataggctataatgaaaatcttaatatagaaatcgtaaattctactgataatgagaaaagaaataaata

SEQ ID NO: 203211 - DNA, 930 bp, Unknown
  Bacterial polypeptide expressing nucleotide sequence isolated from the Sargasso Sea
aaaaccaactcaataattgaaacaattaaaaatatagctgggacatttggtggtataaatcttgaagatattgctgctccagattgttttattatagaacaaaaactaaaagaagttttaaacatacctatttttcatgacgaccagcacggtactgcaattattactacagctgctttgattaacgcattagatgtttcaaaaaaacaaattcaaaatgtaaaaatagttataaatggagctggtgcatctgctcaggcttgtgcaaatttatttaaaagttctggtgttaaaagtgaaaatattatcatgtgcgatagcaagggagtaatatacaaaggcagagaaaatgttgaccaatttaagtcagcttttgcctcaaatactaaattgagaactttaaaagaagcaatgaaaaatagtgatgtatttttgggtttatcagctaaagatgttgtttcccgagatatggtaaagtctatggcaaaaaacccaattatttttgcctgtgcaaatcctgacccagaaattaaaccagaacatatacaagaagttagaacggatgcaataatagctactggcagatctgattatcctaaccaagtaaataatttaattggttttccttatatttttagaggagcgcttgatgttagagctaaagagattaatgaagatatgaaaattgctgcggctaaggctattgcattattggctagagaggatgttcctgatgaagttgtgtccgcttatggaggtgatagacccaaatatggtaaagaatatattattccctcaacatttgacccacgattgataagtgtgattccctctgcagtagctaaagctgccataaacagtggtgtagctagaaaagaaataaaagactttgaagcatataaagatcaattaactaatcgtttagatcct

SEQ ID NO: 203212 - DNA, 559 bp, Unknown
  Bacterial polypeptide expressing nucleotide sequence isolated from the Sargasso Sea
aatgataaattttaaaaataaaaaaattctcattacgggcgcaactggaggtataggaaaagaattagttaaaagatttaattctttagaaggccaagttttggcaacaggaactaaaaatgagaagttaaatgatttaaaaaaagaatttcctaatataagtattttaaagtttgatatttctgagcactctaaaattgaagaatttattgaaaatgtgtcttctcaactatccggcttagatatattagtaaataatgctggaataaatatggacaatctttctttaagaatgaaggatgaggaatggaaaaaagttattgatgtaaatttaggatcaactttcttattatgcaaatatgctataaaaaaaatgttaaaaaataagtatggcaaaattgttaatataacttcaatagttggacatacgggcaaccttggacaatctaattacgcagcatcaaaagcgggaataattggtatgactaaatccttagcaattgaatatgcaaaaaaaaatattactttaaattgcgtatctccaggatttatacagaca

SEQ ID NO: 203213 - DNA, 510 bp, Unknown
  Bacterial polypeptide expressing nucleotide sequence isolated from the Sargasso Sea
gatgagcgaatcagcgcttccctctatgagagtcgacggtcaagtcgccctggttacaggcgcaggccgaggaataggccgaggctgtgcgcttgcgttagcagaagccggtgccgaagttattgcgatgagtcgtaccgaagctgaactcaacgaagtcgttaacgaaatacaggctgcgggaggaacagcaactccagttgtctgtgacgtcagcgatggagcggcggtacggcaacatatttcagagatccaaacactagatattttggtcaacaacgcaggaattctcagagcctcatcgctgctggatctcagcgaagaggatttggacgccatgctccaaatcaattgtcgaggcgcagtgttagtcgcccaagcagccattcagatcatggaacggcaaggttctggcgtcgtaattaacatgtcgtccacatttggggtcaacggacgggcaaacaacagcgtctattcagcaaccaaacacttcattgaaggattcacaaa

SEQ ID NO: 203214 - DNA, 712 bp, Unknown
  Bacterial polypeptide expressing nucleotide sequence isolated from the Sargasso Sea
atgagtcgattaaaagataaagtagctatcgtcacaggtggcgcatcaaatccaggccttggacattcaacaattcataagtttgcagaagaaggtgcaaaaattgttgtgacagatattgatgttgaaggtggagaaaaaacagtatctgaggttaaagaaaaaggtggtgaagccatttttataaagcaagatgttgtttcaacagaagattggaaaaatgttgtagatgcttcaatatcagaatttagtaaaattgatatacttgtcaataatgccggaatagcgttaatagggcctttcgaagaattttctgaagatcaatgggatcaacaaatcaatgtgaatttgaaatctgtttttcttggttgtaaggctgttatacctgagatgaaaaaaaataactcgggctcaataatcaatctttcatcaatagccggtttagtaggtcttcaaggatgtgcagcttacaatgcgagcaaaggtggtgttagattactaaccaaatcaatcgctattgagtatgggccgaacaaaataagatgtaattctattcatcctggttttatggccacaaatatgaatgatccaaaaaaaattgcagagcgtggaagagattttgaagcaattattgaaacaattcctttaaaatcaatgggtactgcagaagatattgctaattgtgctctgtatctagcctcagatgagtcat

SEQ ID NO: 203215 - DNA, 445 bp, Unknown
  Bacterial polypeptide expressing nucleotide sequence isolated from the Sargasso Sea
aatgcaaaataataatttgaaaggtaagatcgcagtaattactggatgtaataaaggtattggaaaagctattttaagtgagtatgcaaagaacggagtaaattgtatttcttgtgttagaagtgtttcagatgatttcaaagctttttgccaaaatctaagcgaagaaaacaatgtcaaagtcagtattgttaaaatggacttatcagataacaaattagtaagtgagtcagtaaaagaaatatttaagatttcaaaaaaaattgatattcttgttaataacgctggaatcttatttaattctctattttttatgacaagtgacaaacagcttaaagatttgttccagataaactttttctctcatgtatttcttactcaattaatttcaagagaaatgattaaaaataaaaaagggaacattatattttctcttctacttcag

SEQ ID NO: 203216 - DNA, 772 bp, Unknown
  Bacterial polypeptide expressing nucleotide sequence isolated from the Sargasso Sea
atgtctataaaaggtaaaacagccttggtaacaggttctagtaggagcctaggaaaatcaattgcaatagctttagcaaaaaacggcgcaaatgttgttattaatcatcgcgatagtgaaagtgaagctattgaggtttctaaagaaattgaagatcttggtgttaaatctttagtagttcaagcagaggtgtcaaataaagatgatgttttaaaaatgtcagaattagtccatgagaagtttggtggagtcgatatattggtaaacaatgtgggtacaagtgcaatggtgccatttttagatatgacagatgaagattggcatcaaataataggtattaatttgcatagttttttttattgtacacaaacctttataagacatatggttaaaaaccaatggggtaggataattaatattactggacatgcatcattgagaggtagtccatttgcagcccatactgttgcaggtaaaggtggtgcagttggttttactaggtctatagcaactgaatttgctgatcaaggaattacctgtaataacgtagctcctggtcatatggatacaccgccaagacgaccgtactatacccaacttaaggaagaagtaggacaggattggtacggaggatggatttcaaaaattcctatgaaaaaattaggtgatcctgatgaatttggagcattatgtgcctttttagcttcagaagatgcatcgtatattactggtcaaatgtttcttgtgaatggcggaataatgtattcttaaa

SEQ ID NO: 203217 - DNA, 685 bp, Unknown
  Bacterial polypeptide expressing nucleotide sequence isolated from the Sargasso Sea
acaaggtgttgatattattctaacttaccaaagcaatgccgctgcagccgccgaggtggtagcggaaattgaatggcatggacgcaaggctgtcgctttaccgttagatgtgggtgatagccagtcatttaacgatttttcgctgcgcgtaaaagccgcactcgaacagacttggcagcgggatagttttgactatctagttaataatgctgggattggtatccatgtgcccatggctgaaaccagtgtggagcacttcgatactttgatgaatatccatgttaaaggacccttctttttaactcaggcgttgctgcctctacttgccgataacggcagtattatcaatgtctccacggggttaacgcgctttgctgtcccggggtttggtgcctaccccaccatgaaaggcgcggtcgaaaccatgaccaaatactgggcgaaggagcttggtccacgcgggatccgcgttaatgtgctggctcccggtgcaattgaaacggactttggcggtggtgcggtgcaggataatccacaaatgaatgagtttttagcgcagcaaacggctttggggcgggtgggattacccgaggatattggtggcgcaatcagtgtcttgttgtcacccgctgcggcatggataaacgcccagcgtatcgaggcttctggcggtatgttcttatag

SEQ ID NO: 203218 - DNA, 712 bp, Unknown
  Bacterial polypeptide expressing nucleotide sequence isolated from the Sargasso Sea
tggctctagtggtattggtgctgctatagctactttgtttgctaaagaaggcgctgatatttcattttgccattttaaagatgacacaaaagcaaatttagttatggaaaaaataaatggttacggtagaaaatgtttcaatcaaaatattgatattggaaaaaaagataattgtgatgatttttttcaaaaatctttacagtcaattggagaaccggatattttggttaacaatgctggaattatttatgcaaggccatttgaggaggcaactgaaagtgaatttgatgaaacattgaatgttcatttaaagagcacattttttttaactcaaaattgttataaaataatgaagaaaaacaaatttggtaggattattaatatttcctcacaacttgtattttcaggtggtccaaacagaacagattactgtgcagctaaaggcggaattttttcatttactcgagctttatctttagaagctataaatcataatattttagtcaataatatagccccaggtgtagcacaaactgctttgttagatggaatagatcaaaatgttttagatcaagccaaagaaattatacctatgaaaagatttgctcagcctgaagaaatagctccaacagcattacttttagcttctgaggaaggaagtttttattgtggcgctacactctcacctaatgggggtgaggttatggtatga

SEQ ID NO: 203219 - DNA, 874 bp, Unknown
  Bacterial polypeptide expressing nucleotide sequence isolated from the Sargasso Sea
gctgcacttattaatgccttagacttggtgggtaaaaaattgtctgacattaatattgttattaatggagcgggtgccgcaggaattgcatgcttagaacttctaaaatcgatgggtcttccaaataaaaatggaattttatgcgacactaaaggtgtgattcatgcagacagaaaagaaaatattaaccaatggaaatctgcccatgccatcaaaacaaaaaaaagatcactagaagatgctttaaagggagctgatgttttttttggattatcaaaaggaaacatagtatcccaagaaatggcaaaatctatgtctgaaaaacccattatttttgctatggccaatccagaaccagaaatacttcctgaagctgtcaaagaatgtaggcccgatgccataatagcaaccggaagatctgactatcctaaccaagtaaacaatgttttaggttttccttacatatttagaggtgcattggatgttagagctaccacaattaacttggaaatgaaaattgcagctgctaaagcaattgctgaacttgctaaagaagatgttccagatgaagttgcaaatgcttatccgggtcaaagaccacaatatggaccagactacattataccatctccatttgatccaagacttataagcaaagttcctcctgctgttgcaaaagctgctatggaaactggggttgcaagaaaagctattgtagatatggatcaatatgcaagcgatctttcagctaggttgaatccttcagaaggactattacaaaaaatatttcaagaagtaaaagaaaatcctaagagagttatttttactgaaggtgaagaagaagacatgattcgatctgcagcaatttttctta

SEQ ID NO: 203220 - DNA, 738 bp, Unknown
  Bacterial polypeptide expressing nucleotide sequence isolated from the Sargasso Sea
cattagggtcaaaaaaagactccgtaatcattatttccaaaatctggcccgaacccgatctggcactcaaagattatcaaagggctctagacaattcccttaaggcgttaggaagagattccgttgacctttatctgatgcattggccaggaaattactttaatactcgcgaaaaaagcgcacggcttgtagaaaacatgctttcccttaaacaaagcggcaaagcaaaaaccattgggctttcaaatttcaaggctggtgacctagaactccttggtagcaatattaaaaaattctctctcaaccaaattccttacagcttgttagatcgtgggtacgaaggaaaaactctggacctttgtaaaaaaaacagtatggagtacatggcattctcacctaccgcacaaggacttctcgcccgacccatgaaagagaatgatctgaaaatgccaacacgtaaaatgcatcacctttttcaaccttccacctatcccgcagcaaaaaaagtttgggaaactgttcgcaacattgccaatgaaataaaacgcgaacccattgaagttgcagtagcctgggttctaaagcaggagaatatttttactgccattgtcggatcccgcaatcctgaacaagttgaagaatttgcatcggcagcagacctagagttaagcagcgaccaactttctcgcctaaccgaatccagtaatacgtttccagcagtaaaagctcggaaataac

SEQ ID NO: 203221 - DNA, 115 bp, Unknown
  Bacterial polypeptide expressing nucleotide sequence isolated from the Sargasso Sea
atgagaaaaaagttagccctcattggatctggaaatataggaggaactctggcacatcttatttgtctaaaagaattaggagatgttgttatgcttgatgttgcagatgggcatg

SEQ ID NO: 203222 - DNA, 388 bp, Unknown
  Bacterial polypeptide expressing nucleotide sequence isolated from the Sargasso Sea
gatgacgcgcctccgacgcgcgatggacgcgttccgcgccatcgcggacccgctcgagcggtacgtgtacctgcgcacgctccagcgcggggacacggagacgttttatcgcgcgctcatctctcggccgctcgaactcatgccgttcgtgtacacgccgacggtgggcgaggcgtgcgagcggtaccacgagctcccgacgccggtgaacggagtgtacgtcacggcggacgacgcgggcgcggtcggggcgaagcttcggcgacactggaaggaggagatggcgtggctgagccgaggggtcggggggcgcgtcggcggcggcgagggcggagggcgcgagtcacggggacgagcgcgtggcggtggcggtggtgacggacggtga

SEQ ID NO: 203223 - DNA, 670 bp, Unknown
  Bacterial polypeptide expressing nucleotide sequence isolated from the Sargasso Sea
agataaattgtatgcatcaaacgcaaaaattttagccacaggaacaaaccaaaataaattagataatattaaacaaaattatgaaaatataattactaaaaaatttgatatttcaaatcatgctttaatagaaaagtttatagatgaatgtaatagtctattagaaaataaaattgatgtgctgattaataatgcaggaataacatctgataatttatctattagaatgaaggatgaagaatggaataatgttttaaacctcaatcttacttctacttttatgattacaaaatatgtaattaagaaaatgctaaaaaataaaaaaggtaaaattattaatataacatctattgttggtcatacaggcaatgttggtcaggtaaattattcagcatcaaaagctggtttaattggaatgtcaaaaagtttagctttagagtatggaaaaaaaaatataaagataaattgtgtttctcctggctttatcaaatctgagatgacagataaaattagtgaagattataaaaaaataatgcaggataaaatttcattaggtagatttggcaagccagatgatgtggccaatgttgttgcctttttatcttctgaattatctgattatattacaggggaaactatacatgttaatggtggcatgtattttagttga

SEQ ID NO: 203224 - DNA, 322 bp, Unknown
  Bacterial polypeptide expressing nucleotide sequence isolated from the Sargasso Sea
aatggatgtccgagctgcagtcgcacacgaagtgggcaagccacttacaattgaaactgttcaacttgaggggccaaaagaaggagagattttggttgaaattaagtcaactggagtttgtcataccgacgcctttacgctctcgggcgacgatccagaaggtatattcccggccattttaggacatgagggtgccggggtcgtagtggatattggaaaaaacgttacatctcttacgaaaggggatcacgttatccctctttatatccccgaatgccgtcaatgtaagtcatgcttgtcgggcaaaactaatctctgtacc

SEQ ID NO: 203225 - DNA, 586 bp, Unknown
  Bacterial polypeptide expressing nucleotide sequence isolated from the Sargasso Sea
agacaatcatgttcaagttgatctttcaaatccaaacaacacgctcgaggcaatacatgaagtaaaaaaacgactaaatggaagattgcatgcgcttgtgaacaatgctggcatatcgccgaaaggtgagaatggagaaaggctagacactttaggtactgacctaagtatatggggaaaggtttttcatgttaatttttttgcctctgtaattttagctagaggattgaaggaagaacttttaaaggcgcaaggggcaatcgtcaatgttacatcaattgcgggaagtagagttcacccttttgcaggagctgcctacgcgacatcaaaagcagctttgggagccttgacaagagaaatgtcgaaagatttcggtcctttgggtgttcgagttaatgccattgctcccggagaagttaagactgctattttaagtgaaggtactgacaaaatagtcgcagatattccaatgaaacgactgggcttaccggaagaagttgccgacactattttttatctatgttcccaggaagcaagttatgtctcaggagcagaaatagagataaatggaggtcagcatgtttag

SEQ ID NO: 203226 - DNA, 940 bp, Unknown
  Bacterial polypeptide expressing nucleotide sequence isolated from the Sargasso Sea
gatgttaaaattgtaataaatggggcaggtgctttagcattagcttgtgcaaatctatttcaaagtattggtgtaaaaacggggaatataattatgctcgatagaaaaggagtaatttataaaggtagagataatgttgaccagtttaaatctgcatatgcagttgaaacaaaattaagaacacttaaagatgcaattaaaggtgctgatgtgtttttgggtttatcagcaaagaatgttttggacaaagatatggtgaaatctatggcaaagaatccaattatttttgcttgcgcaaatccagatccagagattaaacctgaattagttgatgaagttagatcagatgctattgtagcaactgggaggtctgattaccctaatcaagttaataatttgattggatttccatatatatttcgtggtgcattagacgtaagagcaaaagaaataaatgaagaaatgaaaattgcagcagccaaggcaatagctactcttgctcgtgaggaagttccagatgaagtagttaatgcttatggtggtgagagaccgcattacggaaaagaatatattattccttctacttttgatccaagattaattagtcgaatacctgcagcagtcgcgcaagctgcgatggatagtggtgttgcaagaaaaaaaattggagatattgaagcatacaaagaccaattaacaaacaggcttgatccatccatgagtatcatgcaaggtattaatgcgcaggtaaaaaaaaggcccaaaactgttgtttttgctgaaggagaagatcgaaatatgcttaaagcagcggtcgcttataaaaatagtcgattgggaaacgccattgtaattgggaatgagaaaagagtttcagagcagttaaaaagaataggattagatgaaaattacaaaattaaaattgtgaactctactgata

SEQ ID NO: 203227 - DNA, 274 bp, Unknown
  Bacterial polypeptide expressing nucleotide sequence isolated from the Sargasso Sea
atggtagagaatcaaaaggtaattataaccgctggagcatcagggattgggttagaaactcttaaactttttttaagtgcaggagcaaaagtagccatctgcgatattgaccactcagctcttgacactgtacaaaaacaatttccaggggtttttataaatcactgtgatgtttccgatgctatacaatcagaaaattttattagaaatgcagctaccttcttaggggggatcgatactttagtaaataatgcaggcattggtggtccaaccg

SEQ ID NO: 203228 - DNA, 533 bp, Unknown
  Bacterial polypeptide expressing nucleotide sequence isolated from the Sargasso Sea
tgtaaaatatgtaaacgatgaaatggaaaataaaatcgatgtattaataaataatgcaggaataacaaatgacaacttgtctattagaatgaaagaagaagaatggaaaagagttatagatataaatctcacttcaacttttttaataagcaaaaatataattaaacaaatgttaaaaaataaaaaaggtaaaataattaatattacctctgtcgttggacataccggaaatattggtcaggcaaactacactgcttcaaaagctggtatcgtagcgatgtccaaaagttttgcattagaatatggaaaaaaaaatataaaagttaattgtgtttctccaggatttataactacagaaatgacaaataaaatagatcaaaattataaagaaatattaaaatctagaattccgcttgatagatttggcgatccaaaagatgtagctaatacagttctatttctttgctcaaatctttcagaatatatcacaggggagacaatacatgtaaatggaggcatgtattttagttgac

SEQ ID NO: 203229 - DNA, 328 bp, Unknown
  Bacterial polypeptide expressing nucleotide sequence isolated from the Sargasso Sea
atggcaggacgactggaaggaaaagtcgcgctggtcacgggtggggcttccggcatcggtgcggaaacatcacgcatctatgcgcgggaaggcgctaagattgccatcgcggacattaacgacaacgcgggccatgcggtggcgcaagagattggcgatgctgcgttctatgcccaccacgacacccggaatgaggacgcgtggcaagctatcgtcaaacaagtggtcgacaccttcggccgcctcgacatactggtgaacgcggctggtgtttccggccgtcgcccggacgggacttcagcgccgaaccttgaggaacaagacctcg

SEQ ID NO: 203230 - DNA, 265 bp, Unknown
  Bacterial polypeptide expressing nucleotide sequence isolated from the Sargasso Sea
atgtttcttaaaaaacaaaacttaaaaaataaaattgctcttgttactggagctggaaaaggcataggaagagcttgtgctattgctcttgctgaagctggagcaagtttaattatggttagtcgaacaaaaaaagatttagatcaagtttcaaaaattattaagaaatttaaatctaagtgtaaatcatatgtttgtgatgtaacgagatattctgagataaaatcagtaatagattctcaaaaaagaattgatattttgtaaa

SEQ ID NO: 203231 - DNA, 688 bp, Unknown
  Bacterial polypeptide expressing nucleotide sequence isolated from the Sargasso Sea
tatgagattaaaagaaaaagtttctatagtaacaggcgccgcttcaggttttggtaaaggcatatcagaaaagttttccaaagaaggagctaaagtaatattagcagacattaataaagatcttttagaaacagtttctaaaaaattaaatcaagatttttttcatacagatgttgcaagttcaagcagcatgcaacaattatctgaatatgtaataaaaaaatatggatctattgatattatggttaataatgcaggaataacacatttaccaaagccgcttgaagaagttggcgaagaagaatttgataaagtttttgcagtaaattcaaagtcagtttttttttgtggaaaattttttgttccacatatgaaaaaaaaaaaacaaggttcaattttaaacattgcttctacagcaggaatttctccaagaccacatctaaactggtataatgcatcaaaaggatggatgattacagcaactaaggcaatggcagtagagcttgcgccttttaatgttagagtaaattctcttgcgccagtagctggagaaacaccacttcttaaatcttttttaggagaagatactcacgaaagaagaaaagctttcttgtcaacaatacccataggtagattttctacttctaaggatttaggtaatgctgcttgtttcctttgttctgatgag

SEQ ID NO: 203232 - DNA, 945 bp, Unknown
  Bacterial polypeptide expressing nucleotide sequence isolated from the Sargasso Sea
aggttatagcaataataccaactctataattgaaacaattaaaaatataagtggcacatttggagggattaatcttgaagatattgcggcgcctgattgctttattattgaacaaaaactaaaagaagttttagacatacctattttccacgatgatcaacatggtactgcgattattaccacagctgctttgattaatgccttagacgtttccaaaaaaaaaatcaacaatgttaaagttgttatcaacggagcaggagcgtctgcacaagcgtgcacaaatttatttaaaagttctggtgtaaaaagtgaaaacattattatgtgtgacagtaaaggtgtaatttataaaggtagaaaaaatattgatcaatttaaatcagcttttgcagttagcaccaagttaagaaccctggaggaggctatgaaaaatgctgatgtgtttttaggcttatctgcaaaagatgttgtgtctaaagacatggtaaaatccatggcaaaaaatccaataatatttgcatgtgctaatcctgatcctgaaattaaaccagaaattattgaggaggtcagatctgacgcgataatagcaactggcagatctgattatccaaaccaggtaaataacttaatcggttttccttatatatttagaggagctctagatgtaagagctagagaaattaatgaagaaatgaaagttgctgctgcaaaagcaattgccttgttagctagagatgatgttccagacgaagttgtatctgcgtacggcggagacagaccaaaatatggaaaaaattatattataccttctacatttgatccaagattgataagcgtgattccttctgctgtagctaaagcagctattaaaagtggagtagcgagaaaagaaattaaagactttgataattataaagatgaattaacaaaccgattagatccatc

SEQ ID NO: 203233 - DNA, 940 bp, Unknown
  Bacterial polypeptide expressing nucleotide sequence isolated from the Sargasso Sea
cctggtttttcatgatgatcaacatggtaccgctataattactacagcagcattattaaatgctcttgatataagtagaaaaaaagtagacaaaataaaaatagttgtaaatggtgctggtgcatctgcaatggcttgtgcaaatttattcaagaaaagtggtgttcctcaaaaaaatatcaccatgattgacagacaaggtgtaatatttagaggaagagaaaatttaaatcaatggaagtcaagtcacgcaatcgaaacaaaagacagagatctaaatcatgcaattaaaaatgcggatgtgtttttaggattgtctgcaaaaggagctttaacaaaagatatggtaaaaaaaatggcaaaaaacccaattatttttgcttgcgcaaatccagatcctgaaattacaccggaagaaattgaggaggtaagagatgatgcaattatagcaactggaagatcagactatccaaatcaggtaaataatttaataggctttccatatatttttagaggtgctctagacgttagatctaaaacaattaatgaagaaatgaaagtagctgccgcaaacgcgattgctaatttagcaaaagaggatgttccagatgaagttgtagcagcaatgggtggtgaaagaccacactatggcaaagattacattattccatcaacatttgacccaagattaataagtgtcatcccagctgctgtagctcaggctgctatagatactggagttgcaagaattaaaattaatgattttgaaatatataaagatcaactaaaacaaagattagatccaacagtaactattatgcagggtattaatagttatataaaaaaaaaaccaaagaaagttgtttttgcagatggtgaagatgagaatactcttaaagctgcaatagctttcaagaattcaaaattaggaataccaatt

SEQ ID NO: 203234 - DNA, 316 bp, Unknown
  Bacterial polypeptide expressing nucleotide sequence isolated from the Sargasso Sea
aaggccagctttgtcgagcagtgcctggacaagcgtcagggcccggttatcgccgccaccgactacatgaagctgtatgccgaccagattcgccagtgggttccggcgccgtacaaggtgctgggcaccgacggcttcggccgcagcgacagccgccgcaagctgcgtcagttcttcgaagtggaccgtcactgggtggcctacaccgcgctcagcgcgctggtggagcaaggcaagctcaagcccaaggtgctgaccgacgccctcaaggcgttcggtatcgaccctgccaagaccaacccgctggactgctgag

SEQ ID NO: 203235 - DNA, 625 bp, Unknown
  Bacterial polypeptide expressing nucleotide sequence isolated from the Sargasso Sea
aatgaataaatataattttagcaaaagaattgcaattgtaacaggtggtgcacaaggatttggtttagcaattacaaaaagaattattcaatctggtggcaaagttatagtttgggatatagataaagaggctatagaaaaggctcaaaaagaaattaattcagatgattttaattttaaaatagtagatgtgactaattttgatattgttaaaagctcaattaaagagattgaggaacaatttggcaaaatagatatttttgtaaataacgctggaatcactggaatgaatgctaaagtttgggattatccaattgatgaatggaaaaaagtaatagaattaaatttaaattctactttttactgttgtaaagcaattgtgcctcacatggttaaaaacaattatggtagaattgtaaacattgcttcaatagcaggcaaggaaggaaatccaaacgcaagtgcttatagcacatctaaagcaggagtcataggattgacaaaatcattaggcaaagagcttgcagataagaatattgcggttaattgtattactcccgcagcagcaaaaacaagaatatttgaccagatgacagaggaacatataaactatatgttatcaaaa

SEQ ID NO: 203236 - DNA, 522 bp, Unknown
  Bacterial polypeptide expressing nucleotide sequence isolated from the Sargasso Sea
tttgatttctactttagaaaaagaaattacttttaggtttttaaaagccagaaaaaaagatggttttttaaatgtaatatccattttttcttttattggaataagtctaggtgttgctattttaattattgtaatgtctgttatgaatggtttcagaactgaattaattagcaaaatagttggatttaatgcacacgctgttgtcaagccttataataaagcaatagttgcgatttcagataaagatctctacaagagtgttttttcaaatgatggtgaggcggttattttttatgagaatagtactaaaggtgtttttttaaaaggttatttggaaaaagattttaaagaacttgaaattacgaataatgaaaaattctttggttctaaaaatctaagtgaaaatacaatttctattggtagagatttaagtaacactttaggattagatataggtgatgaagtatcaattacatcaccttcaggtattcagacattgattggttctttgccaaaacaaac

SEQ ID NO: 203237 - DNA, 797 bp, Unknown
  Bacterial polypeptide expressing nucleotide sequence isolated from the Sargasso Sea
cgataaagcggttaaaaaaattggacttagtagagtggcattaataactggtgaagaaaaaattcttcccaaagaggcaagttattttttttgtacagttgaatctatgcctaataacatctctgtagattgcgtaataattgatgaaattcaactagcagctgattatgagagagggcacatttttacaaacaagcttttaagtttaaaaggaaactttcaaacaatatttttaggatcattaaatatagaatatatattaaaaaaaatttatccaaatattattattcaaaaaaaaaatcgcttttctcaacttacatttctaagaaaacaaaatttttctaaacttgaaccaaggtcagcaataatagcatttaatattaataaagtttatgaaattgctgagaatattagaactcataaaggtggaacagcaatcgttcttggctctcttagtccaagaacaaggaatgctcaagttgaagtttatgaaaacaaaaatgttgactacctcgtagcaactgatgcaattggtatgggtttaaatcttaacataaaccatgtaagcttttcctcactagaaaaatttgatggaagatataatcgaaatttatttccaaatgaaattggtcagatagctggtagggcaggtagatacaaacaggatggaacatttagttatacaaaagaagctggaaaattagattcattggtaatacaacaaattgaaaatcataattttgatagaattcaaaagatttattggagaaatagcgatttaaattttgattctatag

SEQ ID NO: 203238 - DNA, 313 bp, Unknown
  Bacterial polypeptide expressing nucleotide sequence isolated from the Sargasso Sea
catgagcgcatccaaagtcatcatcgtcaccggcgcatcgcaaggcatcggcgcggcaacggtcgacgcattccgggcccgcggccatcgcgtcgtcgcaacgtcacgttcgatcgggccgtcgaacgatcccgacctcgtcaccgtcgcgggcgacatcggcgacgcggccgtcgcacggcgcgtggtcgacgccgccatcgaacgcttcggccgcgtcgacacgctcgtcaacaacgcgggcatcttcatcgcgaagccgttcacgcagtacaccgcggacgactatgcgcagatcacgaacgtcaacctg

SEQ ID NO: 203239 - DNA, 275 bp, Unknown
  Bacterial polypeptide expressing nucleotide sequence isolated from the Sargasso Sea
tatgaaagatataaatggtaaaaacattatagttacaggcgcatctggaggaattggaaattcaataattgaaaaattaaatcaagctggggcaaatatcttagcctcaggtacaagaatagaaaaacttgaggagctaaaaggaaagtatgaaaatattaaaacattaaagtttgatatttctaaaaatgataaaattgaagaatttattgaaaacgcaacaaaagaacttggtggcagtttagattgtatcgtaaataatgcgggtattacac

SEQ ID NO: 203240 - DNA, 502 bp, Unknown
  Bacterial polypeptide expressing nucleotide sequence isolated from the Sargasso Sea
gatggaattaaaagataaagtaatcattataacaggtgctgggcaagggttggggcgtcaattcgcactggactgtgcggcaaaaggaatgaaagtagcacttgcagatatcgatacagacgcgatggaaaaaacccgtaaggaatgtgagtctaatggaattgaagcacgcggatacgaacttaatgttaccatagaggcggaagttgaagcagtatattctcaggttgtcagcgattttggaacacttgacgccacagttaacaatgctgggattttgcgtgacagccttctagtaaaagaaaaagatggcgaaatcagaaagttccctctctcgaaatggcaggaggtaatcgataccaacctcactggagttttcctttgcggacgcgaggcagctgcccagtttgttgggctcaacaagtcaggcgttatcataaacattgccagtgttgcacgttctggaaattttggacagagtaattattccgcggcaaaagcg

SEQ ID NO: 203241 - DNA, 619 bp, Unknown
  Bacterial polypeptide expressing nucleotide sequence isolated from the Sargasso Sea
aatgaatttaaaaaataaaaagattttgataactggcgctactggtggtattgggaactgtctggtaaaaaaattttatgatttagggtcaaatattattgcaacaggtaccaatgaacaaaaactagaaaaaataaagaaagatttttctggtgttcatacggaaaaatttaaattagatcagcataataaaattgaggaatttattgataaaatagataaaaagctagaaggtcttgatatcttagtaaataatgcaggcataaatcttgataatttatctataagattaaccgaggaaaattggaaaaaagttttagatgtaaacctaacttcaacttttatgatgtgcaaatatgcaattaaaaaaatgttgaaaaaaaaatatggaaaaattatcaatattacttctatcgttggacacacaggaaatttaggtcaatcaaactatgctgcatcaaaagcaggtatagtagctttttcaaaaagtttagctatagagtatgcgaggaaaaatattaatattaattgtgtttcaccaggttttataaaaaccgatatgactgataaaataaatgaagactttaaaaaatcacttattagcaaaattccgtcagga

SEQ ID NO: 203242 - DNA, 806 bp, Unknown
  Bacterial polypeptide expressing nucleotide sequence isolated from the Sargasso Sea
agtgcttgaagttcgtgacgatgcaattatagctacaggcagatcagactatccaaatcaagttaataatttaattggatttccttatatttttagaggtgctttagacgttagatctaagaccattaatgaagaaatgaaagttgctgctgctaatgcgatagcggctcttgcaagagaagatgtgccagatgaagtggtagctgcaatgggtggagatagacctcattatggaaaagaatatattatcccatcaacttttgatcctagattaatcagtgttattccagcagctgttgcaaaagctgcaatggatagtggagtggcaagaaaaaaaataaaagattttgaaatatataaagaacaactcaaacaaagactagatccttctgtaacaataatgcaaggtattaattcacaaataaaaaaaacaaaaaaaaagatagtttttgctgacggagaagatgaaaacactttaaaagcagctatagcatttaaaaatagtggattaggaatacctatattagttgcaaaaaaagatataataaaaaaaagactaaaagaaataggttatagtgaaaatttagatattgaaataaccaattcaacagacaaaaataaaagagaaaaatattcaagttttttatttaaaaaactacaaagagaacaaggattattagaaagagattgtgacaggttggtcagaaacgatagagttatttgggcttcttgtatggtttcatgtggtgatgccgatggagcagtaactggaaatactagacgttatggcgcttctttagaaaaaa

SEQ ID NO: 203243 - DNA, 868 bp, Unknown
  Bacterial polypeptide expressing nucleotide sequence isolated from the Sargasso Sea
caatggaactgctgttttaggtttaggtaatattggtcctttagcctcaaaaccagttatggagggaaaatctgttttatttaaaaaatttgctgatgtggacggaattgatttagaaattaatacagaggaaattgataaatttgtagatacagtatctcttttagaaccaagttttgggggtattaatttagaggatataaaagctcctgattgctttattatagaagataaattaagagaaaaaatgaatattcctgtttttcatgatgatcaacatggtacggctattataacaattgcaggaataatcaatgctcttgatttaacaaatagaaaaatatctaatacaaaatttgttgtaaatggagcaggtgcagcttccatcgcatgcgtagagttattgaaagctataggtgctaaaaataaccatgtaatcctcatagacaggcaaggtgtaatttttcagggtagaaaagaaaatatgaatcaatggaagtctgggcacgctgttaacacaaaattaagaactcttgaagatgctcttaatgatgctgatgtttttttaggtctttcagtaaaaggcgctgttaccaaaaaaatggtcaaatcaatggctgacaacccaattatatttgcgatggctaaccctattccagaaataatgcctgatgaaataaaatctgtcagaggagatgcaattatagctactggaagatctgactttccaaatcaagtaaataacgttcttggttttccatatatctttagaggggcacttgatgtcagagccactaaaattaatgacaaaatgaagatagctgctgccaatgctatagcagaattggcaaggcaagatgttccagat

SEQ ID NO: 203244 - DNA, 829 bp, Unknown
  Bacterial polypeptide expressing nucleotide sequence isolated from the Sargasso Sea
ttaggtttatcagcaaaaggagctttgaccaaagacatggtaaaaaaaatggctaaaaatccaatcatatttgcatgtgcaaatccagacccagaaatcacacctgaggaaatagaggaggttcgtgatgatgcaattattgcaactggtagatctgactaccccaaccaggttaataatttaatcggatttccttatatttttagaggtgcattagatgtaagggcaaagacaataaacgaagaaatgaaagttgctgctgctaatgcgattgcaaacttagcaaaagaagatgtgcctgatgaagttgtagctgcgatgggaggtgaaagaccccattatggaaaagagtatattattccatcaacatttgatccaagattaattagtgttattcctgctgcagtagctctagctgcaattaaaacaggagtggcaagaattaaaatagaagattttgagacttataaagatcaactaaaacaaagattagatccaacagtaactatcttgcagggtgttaacggttatataaagaaaaaacaaaaaaaagttgtttttgcagatggggaagatgaaaatacacttaaagcagcaatagcttttaaaaattctaaactaggaataccaattttagtaggaaaagaagaattgattaaagatcaaattaaaaaaattggttacaatgagaattttgatattgaaatcataaattcgaaagatgcagataaaagagagaagtacgttaaatatttatttaaaaaacttcagagagaaaaaggtatgctggaaagggattgtgacaggcttgtgagaaatgacagagtaa

SEQ ID NO: 203245 - DNA, 871 bp, Unknown
  Bacterial polypeptide expressing nucleotide sequence isolated from the Sargasso Sea
cccctagcaaaccagcgggatcttgcccttgcgtattcccctggcgtcgctgttgcctgtaaagctatacaggagaatgctgaagaggcctctaagcttacaggtcgccagaatctggtagctgtaattacgaatggaacagctgtgcttggccttggcaatataggtgctttagcttcaaaacctgtcatggaaggaaaagccgttttattcaaaaagtttgcaggaataaatgtttttgaccttgaattaaatgagaataatcctgaaaaattggttgatatcatatgtgctttagaacctacctttggtgccataaatctggaagatatcaaatcacctgattgttttatgatagaaaaactctgtcaacaaaggatgaagattccagttttccacgatgaccagcatggtacagctattgttgtaggcgctgccgttaaaaactggctccgcctcgtggaaagaaagttaagcgatctcaaaattgtatctaccggcggtggggcagctggaatagcttgtttagatttgctagtgaaaatgggtgcaaagcctgaacagatctatttagtagatcacctaggcctagtctacgatggccgaaaagaagcgatgaatccgcacaaagctgcgttttccaaaaagactgcagcccgatgccttgatgatattatggatggcactgacatttttctggggttatccgttcctgacattcttaaagcggatatggtggctaaaatgaatccaaaaccacttatcctagctctagctaacccagatcctgaaattttcccagaagatgctcagacgattagacctgatgccattatagccaccggtagatcagattaccctaaccaagtga

SEQ ID NO: 203246 - DNA, 224 bp, Unknown
  Bacterial polypeptide expressing nucleotide sequence isolated from the Sargasso Sea
aatgagcaaaatatctttaattggagcaggtcaaataggtgggactttagctcatttaattggaataaaagaattagtaaatgaggtagttttatttgatgttgcgagcggtgttgcaaaaggaaaagcgttagatattgcacaatcatcatctgtagatggttttgatgttaaattttcagggactgatgattacaaagacataaagggctcagatggtataa

SEQ ID NO: 203247 - DNA, 514 bp, Unknown
  Bacterial polypeptide expressing nucleotide sequence isolated from the Sargasso Sea
acgcattttagagtgttacgagtcgatcagtgtactcgttaataacgctgggatcggtagttcgaaaggcttactggagattactgaatctgagtgggatcgtacgattgatgttaacctaaaagggtgtttcaactggtcgcgagctgttgttccatcgatgcaagatagaggttctggcagaattgttaatattgcttctatagccgcctacagcggtggttcagtcagcaagcttgcctacgcagcttccaaggcaggcattctgggtatgacacgttcacttgcgaaagaactggggccttccatcactgtgaatgcgatatgtccgggcaccatcaaaactgagcttactgccaaggcatatgctaataagggttctgaagggattagccttggacgttttggaacgcccgaagacattggagaggtagttgccttcctggcgagctccgaaccaaactttataacgggccaggcaattacagtcgatggattacagtctattttttga

SEQ ID NO: 203248 - DNA, 636 bp, Unknown
  Bacterial polypeptide expressing nucleotide sequence isolated from the Sargasso Sea
agtggggaagaatagatattttggtaaataatgctggaattcttagagataaaagtttccataaagtaactctagaagattttaatttagtaatggatgttcattttcaaggaagcttaaattgtacacatacaatttttcctataatgagagagcaagagtatggccgaattgtttttacaagctccgctagcggtgtttttggtaactttggccaaactaactacggctctgcaaagatggcaatggtcggccttatgaatactttaaaaattgaaggtcaaaataaaaatgtttttacaaactctattacacctgttgcttatacaagaatgaccgagggtttaattccagaagactttggcaaaaatcttaaatcagaatttgttacacctgcagtgatttacttatcaagcgaaaatgcacctaacggagccatcatggctgccggtgcaggagttttttctagaatatttatacatgaaactatgggagtatctttgggtatgggtgaagacatgacacctgaaaatatcgaagctaattgggacaaaatttctgatatgacagatgcacgagctcttcaaaatggaggagaacaaactcttaaattttttgaattaataaacaaatagt

SEQ ID NO: 203249 - DNA, 352 bp, Unknown
  Bacterial polypeptide expressing nucleotide sequence isolated from the Sargasso Sea
catgaaccccgagccgatcgtgttcgccatggctaacccggagcccgagatccaccctgaggaggccgatggccttgccgcagttatggccaccggccgcagcgactacccgaaccagatcaacaacgtgctggcctttccgggaatcttccggggcgctttggacgccggggccaccgacgtgaccgagaacatgaagctggcggcggcgaaggccatcgccgactcggtttcgccggccgacctccggccagcgttcgtggtgccgtccgtgttcgataaatcggttcctttccgggtggccgacgcggtcgcagcggccgccatcgccgacggtgtctgccgggcctga

SEQ ID NO: 203250 - DNA, 976 bp, Unknown
  Bacterial polypeptide expressing nucleotide sequence isolated from the Sargasso Sea
aagagacctttcattagcatactcacctggagttgctgctccagtgaaagagatagctaaaaacccagaccttgcctatgactatacaagtaagggaaacttagtagcagttataagcaacggatcagcaattctgggtttgggtaatctaggggctttagcatcaaaaccagttatggagggcaaatctgttttatttaaacgatttgcagacattgactcaatagatattgaaataaataataataatcccgattcggtaattgaaactataaaaaatattggcggaacattcggtggaataaacttagaagatattgctgcacctgattgttttataatagaacaaaagttaaaagaacttttagatataccaatttttcacgatgatcaacacggcacagccataataactaccgcggcactaattaatgctttagatatttctaaaaaggaaatcgataaagtaaaagttgttattaatggtgctggtgcttctgcgcaagcttgcgcaaatttatttaaaagttcaggagttaaaaatcaaaatatcattatgtgtgatagtaaaggagtaatctataaaggtcggaaaaatattgaccagtttaaatcagctcatgcaatagatactgatcttagaaaattagatgaggctatgaacaacgctgatgtgtttttaggattatcagcaaaaaatgtcgttactaaagatatggtaaaatctatggcaaaaaatcctataatattcgcttgtgctaatcctgaccccgaaatcaaacctgaattaatacaagaagcaagatctgatgcaataatcgcaaccggtaggtcagattatcctaaccaggtaaataatttaattggatttccttacatttttagaggagcacttgatgttagagctagagaaataaatgaagatatgaaagttgcagctgctaacgcaatagcgcttttagcaagagaaaatgtt

SEQ ID NO: 203251 - DNA, 955 bp, Unknown
  Bacterial polypeptide expressing nucleotide sequence isolated from the Sargasso Sea
cgtcacctaggtggcaaaattgagatgcaaagtaaaactcttattaaaacaaggaatgatatgtctattatttatacccccggagtagctagaattagtaatgccataaaacagcaacctgaatctgtttggaacctaacaagtaaaggaaatacagtggcagtagttacagatggctctgcagttttagggttaggagatattggagcatctgcatcactacctgttatggaaggcaaagctcaacttttaaaggaattagctgatattgatgcatggcctatagcaatcaacagtaaagatccggaagaaataataaatactgtgaaattaatatctccaggatttggagggataaatttagaagacatatcttctccaagatgtttttacatagaagaaagattacaaaaagaattagacataccagtatttcatgacgatcagcacgggactgcagtagtagttcttgcgggcttattaaattcaacgaaagttgttaataaaaaaatcaaaaaactaaaagttgtgattgccggggtaggtgctgcaggaatatctacaaccaaattattgatgaagtctggaattaaagacatcgtcggtgttgatcaagaaggaataattagttcttcatcaaattatagtgataatccaaattgggaatggtttgcaaagcatacaaaccctagagatttatcagggaacttagatgaagcaatgaaaggtgcagatgtttttataggtctgtcagctccagatgtaatatcaactaaacatttgaaatcaatgtcagaaaacccgattgtttttgctatggcaaatccagaacctgaaatctggcccgaagaagctttgaagtatgtcacagtaatggcgacgggccgatctgactaccctaatcaagtaaacaatgctctgtgtttcccaggaatgttaggggagtataaatgca

SEQ ID NO: 203252 - DNA, 907 bp, Unknown
  Bacterial polypeptide expressing nucleotide sequence isolated from the Sargasso Sea
catggaacggcaatcataacaacagctgcattaattaacgcagttgatattgcaaaaaaaaacttaaaaaaaattaaaatagtaattaatggtgcgggtgctgcagctatggcatgtgcaaaattatttagaagcacaggtattcccaaaaataatattaaaatgttggatacaaaaggagtaataaataaaaatagaaaagatattaattcttggaaaaaagaatttgcagtagagactaaggatgaaaatttagatgatgcaatgaaaaatgcagatgtatttttaggcttatccgctgcaggtgttgtaaaaaagagtatggttaaaaaaatggctaaaaatccaattatatttgcgtgtgcaaatccagatcctgagattaaacctgaagatatagaagaagttagaaatgatgcaattatagcaactggtagatccgattatccaaaccaagtaaataatttaattgggtttccttacatatttagaggagcattagatgttagagcaaaaactattaatgaagaaatgaaagtcgcagcagctaatgctattgcttcacttgcaagagaatttgtgcctgacgaagtggcggctgcaatgggtggcgaaagacctaattatggaaaagaatatattattccatctacttttgaccctcggttaataagtgtaataccagtagctgtcgcaaaagctgccataaaatctggtgttgctagaaaaaaaatagaaaattttgatcaatattctgaacagctaaaacaaagacttgatccatctgtgactattatgcagggaataaacaaccaaataaaaaaaacaaacaaaaaagtcgtatttgctgatggtgaagatgaaaatactttgaaggctgcaatagcatttaaaaatagtgattagg

SEQ ID NO: 203253 - DNA, 802 bp, Unknown
  Bacterial polypeptide expressing nucleotide sequence isolated from the Sargasso Sea
tatggctgttgtatgtgttattcccggtgacgatgctgctccagaagctatgaacgctgctgtgcaggtccttaatgaactcactcctgagatcgatcttgtcgaactcccgatggacgaagggtccggtggtagtctgagcgacgagtccaagaatacgatcgatggagcagacgcgaccttgtttggagcaacttcaatacgaaatggtgctatcgcatatctacgctggggtaagaagacttacgcaaatattcgaccgatcacatatatgtcaggtgcgaagtcgccattgtcgaaccctaacgatattgattttgtcatagtgcgcgagaacactgaagatctatatgtcgctatcgagggagatctagagacgattcgaccgttgcaactgcaaccctacagaggatcgggtatacccgaatctggcgacggaaaattcgcagtgaaggtgataaccgaagaggccactagccgtatcgcccactatgcgtttagttttgctcgtgagagaaaacaagatggctaccctggtcgtgtcacgatgtcctgcaaatacaatacacttccgacgtctgatggctttttcaggcagatagttcagggcgttgccaaagaatatccggacatcgagtatagggactttattattgacgattttgctagacggatagttgtggagccgcaggagttagacgtagtgttgctcccgaacatgtatggcgacatattatctgacgaagcatctggactgataggagggttgggtattccgccatcagggtgttacggagatgat

SEQ ID NO: 203254 - DNA, 355 bp, Unknown
  Bacterial polypeptide expressing nucleotide sequence isolated from the Sargasso Sea
atgggcatcttagatggaaaagtagttattgtgaccggctcggccagaggaatgggagcagctgaagcattggatgcagcagagaatggtgcagaagtaatagtcacagacatactggatgagcaaggtaatgaaaccgcagttgaaataggcgccacttaccgaagtttggatgtgacatcaaaagagaactggagtgaagttgtctcttctgttcttgatgagcatggaaggatcgacggtcttgtcaataatgccggaatttatacatcacaggacatattctctggctctgccgatacattccaaaaggttattgaagtcaaccagttcggcacttacctgggaatggcag

SEQ ID NO: 203255 - DNA, 250 bp, Unknown
  Bacterial polypeptide expressing nucleotide sequence isolated from the Sargasso Sea
atgaaaaaaaaaatttctttaatcggtgcaggccagataggtggaacgcttgctcatttgataggaacaaaagaactagtagatgaagttgttttatttgatgtagctagcggaattgcaaaaggtaaagcgcttgatatagctcaatcttcttcagtagatggctttaatgtaagattatctggtactgatgattataaagatattaaagattcaaatgtaattattatcacagccaggtgtccctaga

SEQ ID NO: 203256 - DNA, 664 bp, Unknown
  Bacterial polypeptide expressing nucleotide sequence isolated from the Sargasso Sea
atgctgatcacgggtgcaagccgggggatcggggcagccattgcccgcctagctggccgcaaggggtgggatgttgccattaactacctccaatccaaagaaaaggctgaagccgtcgccgatgaaatccgcgctgcaggtaccaatgcgataacagtccgggcagacgtcggactggaaactgacatcatccgcatgtttcatgaagtggatgccggtctggggacacttgatgcagtagtcaacaatgccgctgttgactacgacaccctgatagccgagttcagtctcggtcaatttcgtcgaacgttcgaaattaacgtcattgggcccgctttgatcgcgaaggaagcggtcaaccgtatgtccacccgcctgggtggtgctggtggcgtcatcgtaaatgtttcctcaatctcttctcgaacgggaggctggccccgcgatgtaccttacgcagcatcgaaaggggccctggactcattcactctgggcctcgcaaaggaggtcggtcccgaaggtattcgcgtggtctcagtgcgtccgggcgctacgcgaacggagatctgggatggcaatgaggttgacctcaatgcggccacggaggcggttatccgggaagcaccgttacggcgcatgggtgaaccggaggaaattgctagcc

SEQ ID NO: 203257 - DNA, 929 bp, Unknown
  Bacterial polypeptide expressing nucleotide sequence isolated from the Sargasso Sea
agaccctgaaattacaccggaggaaattgaggaagtaagagatgatgcaattattgcaacaggaaggtcggattaccctaatcaagtaaataatctaattggatttccatatatttttagaggtgctttggatgtaagatcaaaaactattaatgaagaaatgaaagttgcggctgcaaatgcaattgttaatttagcaaaagaagatgtacctgatgaggttgttgctgcaatgggaggtgaaagaccccaatatggtaaagattatataattccttcaacatttgatccaagattaataagtgtaatacctttggctgttgctaaagctgcaattgatactggtgtggcaagaaaaaaaattgaagattttgatttatataaagatcaacttaaacaaagactagatcccacggtaacaattatgcaaggtgtacataattatattaagaaaaaacaaaaaaaagttgtttttgctgatggtgaagatgaaaatacacttaaagcagccatagcattcaaaaattcaaaacttggaatacctgttttagttggaaaagaggaattaattaaaaatcaaataaaaaaaattggctataatgaaaattttgacattgagattgttaattcaaaaaataaagaaaagagagaaaaatacgtaaaacacttatttaaaaaacttcaaagacaaaaaggaatgttggaatgggattgtgatagactcataagaaatgatagagtgatctggtcttcttgtatggttgcttgcggtgatgcagatgcaatggtaactggaaatacaagaagatattccgcatcccttgaaaagataatgcaagttgttgaaccaagaactggagagattatgtttggtttaaacttaatagttaatagagggaaaactatatttctctgtgatacttcttaat

SEQ ID NO: 203258 - DNA, 460 bp, Unknown
  Bacterial polypeptide expressing nucleotide sequence isolated from the Sargasso Sea
aatgtaaacattaatgaaattgaggcattgacacttggaagtcatggagaaacaatggttccggtcccttcacagtgcaaagttgcaggcaagtcacttaataagctacttggtgatgacgagatttcagaattagttcaaaagacttctgatggaggcgccgagatagtgggattacttaaaaccggaagtgcatattttgcaccctcttccgctgcagcaacaatggttaagtcaattatttcagattccaatgaaataatgcccgcatgttcttgggtcaatggtgaattcggcataaatgatgtgtttttaggcgtcccaacaatgttgggagcaaatggcgtgaccgaggttgttgaaattgatcttgaggaaagtgaattaaacgctttaaaaagcgcttcagatgctgttaaatcaaaggtagaagaacttaatagcatattaagtcaataaa

SEQ ID NO: 203259 - DNA, 410 bp, Unknown
  Bacterial polypeptide expressing nucleotide sequence isolated from the Sargasso Sea
tatgaagaatctttttgatctcaatgggaaaactgctttggtgacaggtgcgtcgagtggtcttggccgccattttgcactgactttatctcgttcgggagcgactgtagttgtcgcggccaggcgtgatgacaaggtggcggaagtcgcttccgagattgtcgcctctggcgggagagcaatcggcgtagccctcgacgtgaccgaccgcgaaagcattactgatgtctttgagagggttgaacgcgaggtcggcacggtgacgatcctggtaaataatgcaggaatcgcaaagcgtgatttagcgattgaggtgacggaggaccattggcaagaggtgattgcaactaatttaacaggcgtttgggttgtcgcccaagaggcggcaaggcgtatgattaaagctcagt

SEQ ID NO: 203260 - DNA, 896 bp, Unknown
  Bacterial polypeptide expressing nucleotide sequence isolated from the Sargasso Sea
aaagaacttttagatattccaatatttcatgatgaccaacatggaacagctataattactactgctgcattaattaatgcgttagatatttcaaaaaaaaaaatagataatgtaaaagttgttattaatggtgctggcgcgtctgctcaagcttgtgccaacttgtttaagagttctggagttaaaagtgaaaatattattatgtgtgatagtaaaggagtaatctttaaaggtcgtgaaaatattgatcaatttaaatctgcatttgcaatagatactaagtttagaactttgaatgatgcgataaaaggtgcagatgtattcttaggcttgtcagcaaaagatgttgtctcaaaagaaatggtaaaatcgatggcaaaaaatccaataatttttgcttgtgctaatcctgatccagagattaaaccagaattaataaatgaagttagatctgatgcgattgttgctactgggagatcagattatcctaaccaagttaataatttaattggatttccctatatttttagaggagcgctcgatgtgagagctaaagagattaatgaagaaatgaaagtagcggctgcaaatgctatagctcttcttgcgagagaaaacgtaccagatgaggtggtttctgcttatggaggtgataggccaaggtatgggaaagattatataataccttccacttttgatccaagactaataagtgtaataccatcagctgttgctcaagctgcaatgaagagcggcgtcgctagaaaaaaaattcctgatttagaattatataaagatcaactaacgaatagattagatccgacgatgtctttaatgcaaggaataaatgctaaagtaagaaaaaatccaaagagagttatatttgccgagggtga

SEQ ID NO: 203261 - DNA, 431 bp, Unknown
  Bacterial polypeptide expressing nucleotide sequence isolated from the Sargasso Sea
tatgagattaaaaggtaaaatttcaattataaccggggccgcctctggttttgggaaaggaatagcaaaaaagttttctgaagagggtgcattattaattttagcagacataaataatgatgaattaaaaaaagtttctgaagaacttaaacaagacctttttcaagttgatgtatcaatatcaaagagcatgaaggatttgtcagagtatgtaattaaaaagtacaaaaaaattgatataatggtcaataatgcgggcattacacatttgcctatgcctctagaaaaagtaagtgaagaagaatttgataaagttttttctgtaaatgcaaaatctgtatttttttgtggaaagttttttgttccacatatgaaaaaattaaataatggctctatccttaatattgcatctacagctgggctttcaccca

SEQ ID NO: 203262 - DNA, 644 bp, Unknown
  Bacterial polypeptide expressing nucleotide sequence isolated from the Sargasso Sea
tcttgagaaactaattagtgaagtcaactcaaagagattaaagacatataaatgtgatatttctgactcacatgatgtagaaaaaacattcaggtctataaaagatgattttggttgtctatatggccttgtaaacaatgctggaataaatccatccagaaacacaatacttgaaaccacttatgatgactggaataaaaccattgaaacaaatttatctggtgcatttagatgttcgaaagaagcaatttcactgatggtaaaaaatggagaaggatctattgtaaatatttcctcaatagctgggatttctggtatggagaaaagatttgcatatagtgccagtaaagcagcattaattgggatatcctcatcaatggcaatggactttgctaaagacaatatcagggtaaattgcatatgtcctggttatgttgaaactcctttggtctccgattatataaaagatcttccagcaagcgagaaagaaatactagtttcctcacacttattaggaagactagggtcagttgctgatattgcttcagctgtctcattcttaatatctgatgaagcttcttggataacaggcgcaatactgcctgttgatggtggatatacattaggtaaaatttctcaataat

SEQ ID NO: 203263 - DNA, 879 bp, Unknown
  Bacterial polypeptide expressing nucleotide sequence isolated from the Sargasso Sea
catgatgatcagcatggaacagcaatcattactacagctgctttaattaatgctttggatataacaaaaaagtcaattgataaaattaaagttgttgtaaatggcgctggagcttctgcaatggcatgtgctaatttattcaaaaacactggagttcctcaaaaaaatataacgatggttgatcgaaaaggtgtcatttatagaggaagagaaaatttgaatcagtggaaatcaagtcatgcagtagaaacaaaagacagaactttaagtgatgctattaataaagctgatgtatttctaggactttcagctaagggtgcattaacaaaagaaatggtaaaaaaaatggcaaaaaacccaattatttttgcttgtgccaatccggacccagaaataacacctgaagagattgaagaagtaagagacgatgctattattgcaacaggcagatccgattatcctaatcaagtcaataatttaattggtttcccgtatatatttagaggagcacttgatgtgagatctaaaacaattaatgaagatatgaaagttgcagcagcagatgcaattgctaaacttgcgcgtgaagatgttcccgatgaagtggtagcagcaatgggaggagaaagacctcattacggtaaagattatataatcccttctacttttgatccaagattaataagtattattccatcagcagtagcaaaagcagctatggatacaggtgtagcaagaaaaaaaattgataatttcgaattatataaagaacaactaaaacaaaggttagatccaacggtcacaataatgcaaggtataaataattatatcaaaaaaaataataaaaagattgtttttgctgatgagaagagaaaatac

SEQ ID NO: 203264 - DNA, 516 bp, Unknown
  Bacterial polypeptide expressing nucleotide sequence isolated from the Sargasso Sea
actggtagcccgcagcagcgaccaactggaatccgtggcagaacagatccgcgattcaggaggccaggcttctgtccttcctgcggatctgaccaagatggaggaaatccataaactcgaagaactcggtcctttcaccattctcgtcaacaatgccggcatcaaccgtccccaaagctttgaggacgttaaagaaaatgatttcgatgatgtcctcgatcttaatgttaaatctgctttttttgttgcccaaagtgttgccagggggatgatccagacagggcgcggaggttcgatcatcaatatgtcgagtcagatgggtcacgtcggcggacgcaatcgatcggtctactgtgccaccaaacatgcgatggaaggattcagtaaagggatggcgctggacctcgcggcccacaagatccgcgtcaacaccgtctgcccaactttcattgaaaccgcattgaccaagcctttcatggaaaacaaggaattcatgcaggatatcctcagtcgcat

SEQ ID NO: 203265 - DNA, 919 bp, Unknown
  Bacterial polypeptide expressing nucleotide sequence isolated from the Sargasso Sea
acagaaaatgctgacgagtttattaattctgttaaatatttaggcccatcttttggaggaataaatttagaagatatcaaagcacctgagtgtttcattattgaagacacattaagagagctaatggatatcccaatatttcatgatgaccaacatgggacagctataatatctacagctgccctcctaaatgcattggatctgagtgggaaaaaaataagtgatgcaaaaattgttgttaacggtgcaggtgcagctggcatagcatgtttagagcttctcaaagcaatgggaatgcctaacaataatgcaatactttgcgatacaaagggcgttattcactccgaaagaaaagaaaacatgaaccaatggaaatctgctcatgcaattaaaactgattgtaggacattagaggatgcattagtcggtgcggatattttttttggtttatcagttgggaatattattagtcagaaaatggctttatcaatggctgataatccaattattttcgctatggcaaatcctgaacctgaaattacacccgaagatgtaaaagaatgtagatctgatgcaattattgcaacaggaagatctgattatcctaaccaggtgaataatgtcctagggtttccttatatatttagaggagcattagatgttagggctacaacaattaatttagaaatgaagatagccgccgcaagagcaatagctgaattagcaaaagaggatgtacctgacgaagttgcgaatgcttatcctgggaagcgcccacagtatggtcctaattacataataccttctccatttgatcctagacttattagtaaggttccacctgcagttgcgaaagccgctatggatactggagtggcacgcagagcaattgttgatatggaccagatattccaatgaa

SEQ ID NO: 203266 - DNA, 343 bp, Unknown
  Bacterial polypeptide expressing nucleotide sequence isolated from the Sargasso Sea
attgatattaaataacactactaaggataaacacatgtctgattttattaaatcaaaagcggcgattgcttggggccctaaccaacctttaagcgttgaagaagttgatgtaatgatgcctaaaaaaggcgaagtaatggtaaaaattactgctactggtgtttgtcataccgatgcatttacgttatcaggtgaagatccagaaggtatattcccagctattttaggccacgaaggcgcaggcgttgtttatgccgttggcgaaggtgtaacaagtgttgaagtgggggatcatgtaattccacttttatacgctgaatgtggtgagtgtaaaatgtgtaca

SEQ ID NO: 203267 - DNA, 824 bp, Unknown
  Bacterial polypeptide expressing nucleotide sequence isolated from the Sargasso Sea
gttgtaaatggcgcgggtgcttctgcacaagcttgtgcagaattatttaaagattttggagttcctaataaaaatataatcatgattgataaaaaaggtgtaatttataagggtagacccgacaaaatagatcaatggaaatcaaggcacgtagtaaatacaaaatttagaactcttaatgaagcgatcaaagatgcggatatgtttttaggtttatccgtaaaaggagccttaaaaaaagaaatggttaaaaaaatgtctaaaaatcctattatttttgcatgtgctaatcctgatccggaaattactcctgaagaaattagtaaagttagagacgacgctattgttgcaactgggagatctgattatcctaatcaagtaaacaatttacttggatttccatatatttttagaggcgcattggatgttagatcaaaaactattaataaagaaatgaaaattgcagcagctaaagcaattgctaaacttgcaagagaaaatgttccagatgaagttgttgctgctatgggtggtgatagacctcactatggaaaagattatattataccttcgacatttgatccaagattaataagtgttattcctgaagctatcgccaaagctgctatgagcactggtgtagcaagaaaaaaaatagaagattttgaattgtacaaagatcaactaaaacaaagattagatccaactgtaactataatgcaaggtattaatacctatattaaaaaaaatcaaaaaaaaattgtattcgctgatggtgaagatgaaaatactctaagagctgcgatagcttttaaaaattcaaa

SEQ ID NO: 203268 - DNA, 632 bp, Unknown
  Bacterial polypeptide expressing nucleotide sequence isolated from the Sargasso Sea
tatgaaatctatattagtcacaggatcttcttcaggaattggagctgcaatatgtgaacacttcacacaaattggttggaaagttttcgggagtgtaagaaatcaaaatgatggggataaactaacagatacatgtggagaaaatttcactcctcttatttttgatgtcacagatatttatgcaattaaggaggcggctaaattagttgaatatcatttgggcaaaaatggcttaaattgtctcgtaaataatgcaggtattaatatttctggtcctatggagtatgtagagtctaatgaagtaagaaaagtcttcgaagtcaatgtaatggggccattaaattgctcgcaatcattcctgccaatgcttaaaaaatccacatcagcaacaataattaatataagctcaatggccgggaagattggtctgccaatgcagggatcatattgtggcagtaaatttgcacttgaaggaatctctgaatcaatgcgaagagaacttcaaatccataatatcaaagtagttgtaattggtcctggtgcaattgagtcatcaatttgggataagtttgaaaaagatgagatggaagaacaatataaggatacagaatatacatcagcaataaaaaaaa

SEQ ID NO: 203269 - DNA, 253 bp, Unknown
  Bacterial polypeptide expressing nucleotide sequence isolated from the Sargasso Sea
aatgaaaaaaatttctttgataggtgctggacaaattggaggaactctagctcatttaattgctttgaaaggattagcaaatgttgtgttgtttgacgttgctgcaggtatagcaaaaggaaaggctctagacatagcacaatcatccccagtaaatggttttaatgtaaatttattaggaactgataaatacgaggatacgaaaaactctgatgtgataattgtcaccggcaggagtacccaagaaaaccag

SEQ ID NO: 203270 - DNA, 884 bp, Unknown
  Bacterial polypeptide expressing nucleotide sequence isolated from the Sargasso Sea
ggaaaaaaaggtaattgaagcttctggtggagaagtagtagttgctcctgatagttctgaagaaactcttatagctctagccaaagatgtagacgtgattatgacatgctttgcacaagtaaccgacaatgttattgaatctgctaaaaaatgtgtagccataggcaggtttggggtaggagttgacaacatatcagttaaaaaagcaactgagctaggcataccagttacttacgttccagattattgtatggaagaagtatctgatcatgtattggctctattgcatacttggaacagaaaaattgcattatttgataaatcagtaaaggacgaaggttggggacatttaaaattatccatgagaattatgcgattaagagaaaaagtcttaggaatagttggatttggaagaatagggcaaatggtagccgaaaaagcatctgcatttggaatgaaaattattgccaatgacccaataatttctaaaaatgaaatggaaaagttaggggtagaatctgtctctctaaagcatttattaagcatctctgactttgtaacgctacatgcaccacttattcctcaaacacataatctgataagtaccgaagaattaaacctaatgaaaaaagactcattcttaataaatgccgcacgtgggccattaattgacgaaaaggctctctatcatgctctaaaaaacggaacaattggaggggcaggattagatgtaatggtagatactattccagaaaagaatcatcctttattacaattagacaatattttagttaccccacatatagcatttttttctcaagaatctaccttagaattagaagaacgtgcagcccaagaagtagtaagagtgtataaaggacaaa

SEQ ID NO: 203271 - DNA, 298 bp, Unknown
  Bacterial polypeptide expressing nucleotide sequence isolated from the Sargasso Sea
catgagtaaatcaattatcgtaaccggtgcaggatcagggatcggagagtcaatagctaggaaagcgggcgacgctggctacaaggtaggtgttctagatgtgaatactgatgccgctgaacaggtcgccagctcgttgtccaatggtgttgcgctccatgcatctaccactgatccggatcaggttgagcaggcactcgacaaatttggggagacacctgatgccctagtgaacaatgctggaattgtcaggtttggcccgctaattgatctttctttcgatgattggaggtcagtt

SEQ ID NO: 203272 - DNA, 891 bp, Unknown
  Bacterial polypeptide expressing nucleotide sequence isolated from the Sargasso Sea
attgaaatttcttcttcaaaaaatatgaccactaaaagagatctggctttagcatattcgcccggtgttgcagcacctgtgagagcaataagtgaaaatccagaagctgcttttgattatacaagtaagggaaatctagttgctgtcataagtaatggatccgctattcttggaatgggaaatttaggtgccttagcctcaaagcctgtgatggaaggcaaggcagttttatttaaaagatttgctgatatagactcaattgatctcgaaattgattcaaataacacggatgaaatcataaatagtattaaaaattttgcgccaagttttggaggtattaaccttgaagatattgcagcaccagattgtttcattattgaggaaaaactaaaagagattttagatatacctgtttttcatgatgaccagcatggcacagctataatcacaacagcagctttaattaatgcacttgatatatgcaaaaaaaaaattgatgaagtaaaaatagttgttaatggtgctggagcttctgcaatggcatgtacgaatttgtttaaaaaaagtggggttccacaaaaaaatattactatgatcgatagaacaggagttatttataaaggtagagaaaaattaaataaatggaagtcaaatcacgcaattgaaacgaaggatagaactttagatgaggctataaaagatgctgatgtatttttaggtttatcagcaaaaggagctttgaccaaaaatatggtaaaaaaaatggcaaaaaatccaataatatttgcatgtgctaatccagatcctgaaattacaccagaagaaatagaagaagtaagagatgatgcaataattgctacaggaagatccgactacccaaatcaagtaaat

SEQ ID NO: 203273 - DNA, 310 bp, Unknown
  Bacterial polypeptide expressing nucleotide sequence isolated from the Sargasso Sea
atgactataagattcgatgataaggttgcaatcgtaactggggcaggtggaggtataggcaagcagcatgctcttgaacttgcaaaacgaggtgcaaaggttgttgtcaatgatctaggcggtagcgttgatggaagtggagctagtgacgcagctgaagaggttgttgagcttattaagtctgatggaggagaggctatctctaatggtgctagcgtgacggatttagaagctgttaaaggaatggttgaccaaaccatgagcaaatggggaagggttgatattctagttaataacgctggtatttgag

SEQ ID NO: 203274 - DNA, 115 bp, Unknown
  Bacterial polypeptide expressing nucleotide sequence isolated from the Sargasso Sea
atgaaaaaaaaaattactttaatcggagctggtcaaataggtggaactttagcacatttaattgcacttaaaaatctaacagatgtagttctatttgacgtagcatcaggttagc

SEQ ID NO: 203275 - DNA, 967 bp, Unknown
  Bacterial polypeptide expressing nucleotide sequence isolated from the Sargasso Sea
aaaaatgttttagacaaagatatggtaaaatctatggctaagagtcctataatatttgcatgcgcaaatcctgatcctgagataaaacctgagttagttgatgaagtaagaacagacgcaatagtcgcaactggtagatcagattatccaaaccaggttaataatttaattggtttcccctatatatttcgaggtgctctggatgttagggcaaaagaaattaatgaagaaatgaaaatagcagcagctaaagctattgccacgcttgcaagagaggaagttcctgacgaagtggtaaatgcctatggaggagagaggccacattatggaaaagaatatatcattccatctacttttgatccgagattgatcagtcgaatacctgctgctgttgcacaagctgctatggaaagcggtgttgctagaaaaaaaatattagatattgaaacttacaaagatcaattaactaacagactcgatccatccatgagcattatgcaaggtattaatgctcaagtaaaaaaaagacccaagacagttgtttttgcagaaggagaagaccaaaatatgcttaaagctgcggttgcctataaaaatagtcgattaggaaacccaattgtaattggaaatgaaaagagagtaaaagagcaattaaaagaaataggactagacgaaaactacaaaataaaaattgttaattcgactgataaagaaaaaagagagatgtatacgaaaaaattgtacgcaaaattgcaaagaaaaggcctattagaaagagatgtagacagattaataagaaatgacagagttatttggggatcttctatggttgaatgcggagatgcggatgcaatggtaacaggaaatatcagacattacgctgcatcaattgagagtttaaaaaaagttgttgaggctagacctggtgaaatactattcggtctaaacttactaattactcctaaaa

SEQ ID NO: 203276 - DNA, 607 bp, Unknown
  Bacterial polypeptide expressing nucleotide sequence isolated from the Sargasso Sea
gagctgggggtggtttttatatcccacgacgtcaccaagacggaagattggataagtgtcattgatgaaataaaagaacaatcttcgggattaaatgtactcgttaacaatgccggcataggtttcatggctgatgtagaggcaaccacggaggaagagtgggaattggtacacaaagtcgatctcgattccgtatttcttggatgcaaatatgccattccgctcatgagagagtctggcaatggctcaatcatcaatatttcgtcaatttcaggcattgttgccggacataattttgcagcctataacagtgcaaaagctgcggtgagacacttaaccaagtcggttgcacttcattgtgcgagaagcactgatttagtcagatgcaatagcgtgcatccagtttttgctcaaaccgagatgatgaaagcattttttgacaatccaaatgatgagcttgtctccaaaatagagagacaaattcccgtcagaaaattagtgaccgttgaagacgtagcaaactcaatcctattccttgcgagcgatgaatcaaaaatgatcaccggatcagagctggtgattgatggcggtttgtctgcccaataat

SEQ ID NO: 203277 - DNA, 734 bp, Unknown
  Bacterial polypeptide expressing nucleotide sequence isolated from the Sargasso Sea
aaaagagtttgcggtagatacaaaagataaaagtttagatgatgcaatgaagaatgcagacgtatttttaggcttgtctgctgctggtgttgtaaaaaaaagtatggttagaaaaatggcaaagaatccaattatatttgcctgcgcaaatccagatccagagataaaaccagaagatatagaggaagtgagagatgatgcaattatagcaacgggtagatcagattatccaaatcaggttaataatttaattggtttcccttatatatttagaggagcgctggatgttagagctaaaactataaatgaagaaatgaaagttgctgcagctaatgctattgcttcacttgcaagagagtttgtgcctgatgaagttgcagctgcaatgggtggtgaaaggccaaattacgggaaagaatatattatcccctcaacttttgacccaagattaataagcgtaataccagtagcagtggcaaaagctgctatgaagtctggagtagctagaaaaaaaattgaaaatttcgatcaatattctgaacaattaaaacaaagattggatccatcagttacgatcatgcaaggaattaataaccaaattaaaaaaacaaataaaaaagttgtcttcgcagatggtgaagatgaaaatactttaaaggctgcaatagcttttaaaaatagtggattaggtacacctatattagttgctaaagaaaaagtggttaaagaaaaac

SEQ ID NO: 203278 - DNA, 598 bp, Unknown
  Bacterial polypeptide expressing nucleotide sequence isolated from the Sargasso Sea
atgcttttcgatatttcagatccaaaagctagtgaggcaatctataagcaggtgagggaaacctttgggagattagatgctttggtaaataatgctggaatagctatctttgatccgattgaaaaagtagaaaatgggacatggcgcaaagtgatggccacaaacttagatggtgttttttatcttaccaaggcgctgacacctatgttgaaagaaacaaaagggacggtggttaatgtttcgtctatatctggtttgcgagcgtctacccttcgggtagcttacggaacctcaaaggcggcagtaattcagctgactaagcaacaggccgtggagcttggtgaatatggtatcagggtaaatgctgtagctccaggtccagtgagaactaaacttgcgatggctgttcatacgaaagaaattattgagacttatcacgatcatattccacttaatcggtatgggactgagcgtgaattaggtgaagtaatatattttttatcatctggtaaagcatcttatgttactggacagatcgttgccgttgatggagggtttgaagctgctggtgttggcctgcctgctctaagacgttgat

SEQ ID NO: 203279 - DNA, 928 bp, Unknown
  Bacterial polypeptide expressing nucleotide sequence isolated from the Sargasso Sea
tgatgtctttctaggattgtcttcagccggagctcttaaaaaagaaatgattatagtaatggcaaaaaatcctataatttttgcatgtgcaaatcctgatcctgaaataactccagaagaaattgaagaggtaagaaatgacgcaattgtagctactggaagatcagattatcctaatcaagtaaataatctgctaggctttccatatattttcaggggagctttagatgtaagggcgaaaacaattaacgaggagatgaaattggcagctgttcatgcaatagccagcttagcaagagagagagttcctgatgaagttgctgctgctatgggaggagagagaccagtatatggaaaaaattatataataccctctacttttgacccgagattaattaatgtgatctcaattgcagttgcaaaagcagctataaaaagtggtgtagcaagaaaaaaaattgaaaattttgatttatattctgaacaactaaagcaaagattagacccgtctgtaacaataatgcaaggtataaataatcaaattaaaaaaaatcaaaaaaaagttgtatttgcagatggtgaggacgaaaatacattgaaggctgcaattgcatttaaaaatggagggttaggaactcctataataatagctaaagaaaaagtaataaaaaaaagattaaaagaaatcgggtacagtcaaaactttaacattgaaataataaattcaacaaaaaaaaatatgagagaaaaatatgttcaatatatttttaaaaaattacatagagatcgaggtcttttagaaagagattgcgataggatgattagaaacgacagggttgtgtggggatcttgtatggttgcttgtggagacgctgatgccatggttaccggaaataccagaagatatgggcaatcgcttgataaataa

SEQ ID NO: 203280 - DNA, 827 bp, Unknown
  Bacterial polypeptide expressing nucleotide sequence isolated from the Sargasso Sea
caattgttgcacaggaagatcagattatcctaatcaagtaaataattttattggatttccttatatctttagaggagctttagatgttagatccaaaacgataaatgaggaaatgaaagttgctgcagcaaatgcaatagctcagcttgcaagagaagatgttcctgatgaagtggttgctgctatgggtggagaaagacctcattatggaaaagattatattattccatctacatttgatccaagattaattagtgtaatacctgcggctgtagcaaaagcagctatagatagtggagtagctagaaaaaatatagatgattttgaaatttataaagaacaactaaaacaaagactagatccaacggtgactatcatgcaaggtataaattcatttataaaaaagaatcaaaaaagaattgtatttgcagatggtgaagatgaaaatactttaaaagctgcaattgcatttaaaaactcaaaattaggtattccaattttggttggtaaagaaagtaaaatcaaagaacagattaaaaatattggttatagcgaaaattttgatattgaaattgttaattcaaaagatgaagaaaaaagaaaaagatacgttaaacatttatttgaaaagttgcaaagagagcaaggactattagaacgagattgtgacagaatgattagaaacgatagagttgtctgggctacaagcatggttgcctgtggtgatgccgatggtgccgtaacaggcaatacaagaagatttggtgcttcttttgaaaaaatcaaacaagttgtagacgttaggaaaggagaaataatgtttggat

SEQ ID NO: 203281 - DNA, 740 bp, Unknown
  Bacterial polypeptide expressing nucleotide sequence isolated from the Sargasso Sea
agaaatagttaatagtataaaaaattttgctgtaagttttggaggtatcaatcttgaggatattgctgccccagagtgttttattattgaggaaaatttaaaaaaaatacttgatataccggtttttcatgatgaccaacatggaacggcaattataacatcagcggcactcattaattcaatacatattactaaaaaaataatttctaaaataaaagttgttgtaaacggtgctggagcatctgctatggcttgctcagatttatttataaaattaggagtaaaaaaacaaaatttgacaatgattgatagcaaaggtgtaattagtttagatagaaaaggattaaataagtggaaattaaaatatgcaaaaaaaacaaaagatataactctaagtgatgcattaaaaaatgcggatgtttttttaggactatcatcagcaggtatcctaaaaaaagaaatgattaaacaaatggcaaaaaacccaattatatttgcatgtgctaacccagatccagaaatattaccagaggaagcttataagattagaaaagacgcaataatagcaactggtagatcagattatgcaaaccaggttaataacttaataggttttccatatatatttagaggagcacttgatgtaagagcaaaaactataaatgaagaaatgaaaatttctgcagctaatgcaattgcaaatttagctagagaaagagtaccagatgaagttgcagcag

SEQ ID NO: 203282 - DNA, 856 bp, Unknown
  Bacterial polypeptide expressing nucleotide sequence isolated from the Sargasso Sea
gctcgaagatgcaataaaaggagctgatgtttttttaggtttatcaaccaaaggtgtcttaacaaaagcaatggtaaaaagtatgtctaaaaatccaattatatttgcttgcgcaaatcctgatccggagattactcctgaagaagtcaatgaagttagagatgatgttataatggcaacaggtagatctgactatccaaatcaagttaataatttaattggctttccttatatttttagaggtgcactcgatgtaagagctaaaacaattaacgaggaaatgaaagtagctgccgcgtacgcaatagcagaactagcacgagaatatgtccctgatgaagttgtggcggcaatgggcggggaaagaccaaaatatggaaaagaatatataattccatcaacttttgacccaagattaattagcgtaataccgactgcagtagcaaaagctgcgataaaaagtggtgtggctagaaaaaaaatagaaaattttgatatttataaagaacaattaaaacaaagacttgacccatcaacaactattatgcagggtgtaaacaatcaaataaaaaaatcccagaaaaaagttgtctttgccgatggcgaagatgaaaatacattaaaagctgcaatagcttttaaaagcaatggtcttggaatcccagttttgatagcaaagaaagaaattgtaaaagaaaaacttaaggaaattggtctagatgaaaattataaaatagaaataataaattctaccgataaagaaaaaagggaaaaatatgcaaaacttctttataaaaaattacaacgtaaagaaggtttgttagaaagagactgcgatagattagtaagaaatgat

SEQ ID NO: 203283 - DNA, 761 bp, Unknown
  Bacterial polypeptide expressing nucleotide sequence isolated from the Sargasso Sea
tcgattaaaagataaagtagctatcgtcacaggtggcgcatcaaatccaggccttggacattcaacaattcataagtttgcagaagaaggtgcaaaaattgttgtgacagatattgatgttgaaggtggagaaaaaacagtatctgaggttaaagaaaaaggtggtgaagccatttttataaagcaagatgttgtttcaacagaagattggaaaactgttgtagatgcttcaatatcagaatttggcaaaattgatatattggttaataatgctggaatagcgttaatagggcctttcgaagaattttctgaagatcaatgggatcagcaaatcaatgtgaatttgaaatctgtttttcttggttgcaaagctgttatacctgagatgaaaaaaaataactcgggctcaataatcaatctttcatcaatagccggtttagtaggtcttcaaggatgtgcagcttacaacgcaagtaaaggaggggttaggttactaaccaaatcaatcgctattgagtatgggcctaataaaataagatgtaattctattcatcctggttttatggccacaaatatgaatgatccaaaaaaaattgcagagcgtggaagagattttgaagcaattattgaaacaattcctctaaaatctatgggtactgcagaagatattgctaattgtgctctgtatctagcctcagatgagtcatcatatgttacaggaagtgagtatgttgtcgatggtggttggacaactcgttaat

SEQ ID NO: 203284 - DNA, 667 bp, Unknown
  Bacterial polypeptide expressing nucleotide sequence isolated from the Sargasso Sea
attgactcaattgatcttgaaattgattcacaagatcataatgagataattaatagtattaaaaattttgctccaagtttaggaggcattaacttagaggacattgcagctcccgattgttttgttattgaggaaaaacttaaagaaattttagatatacctgtctttcatgatgatcaacatggtacagctattataactacagctgcattaattaatgcacttgatattaccaaaaaaaaaattgacgaagtaaaaatagttgtaaacggcgcgggagcatcagcaatggcatgtgcaaatttatttaaaaaaagtggggttccacaaaaaaatattacaatggttgatagaacgggggtgatttatagtggacgagaaaatttaaaccaatggaaaacagcccatggtattgaaaccaaacaccgaactttaaaagatgcaataagtaatgcagatgtttttttgggtttatcagcaaaaggtgctttgacaaaagatatggttaaaacaatggcaaaaaatccaatcatatttgcatgtgcaaatcctgatccagaaattaaaccagaggaagttgcagaggtaagaaatgatgccatcatggctactggaagatcagactatccaaaccaagtaaataatttgattggctttccttacattt

SEQ ID NO: 203285 - DNA, 955 bp, Unknown
  Bacterial polypeptide expressing nucleotide sequence isolated from the Sargasso Sea
gagatcattagaatatatcgattcttggtttggaaaaggtagtaatgaattaccatggattgttggagctgctggaagtattcgagaaaatttaacatatttctatagtgctcaatcaactcttccaagtgttgttgtaattgataaattaggttacgtcatagataggttaaattctgtgaatggaaattggtctaaattagaaaatgctgtaaatatttcagataataatggaaatacaaaacctctaaggcagcaatattatccatcagcaccttatcctccttgtcacattaaaaatattgattatgatgatgatgatattaatgacgatatagatgctgatattgatggtgatggatggttaaatagtgatgaacaaacctgtaaaacggatccaattgacgaaaaatcaattcccatagatactgatggagacgggctctgtgatgattgggatgattgggataatgacaatgattcgttcaacaatagtatagacgattgtccattgattgctggttcctcttatatcccactaggatgttctccagatactgatggtgatggtgtatcagatgcctttgaaagtgtgatgtatggaacagatgcctatcactgggatacagatcgagatggttttggagatggagaggaaattgaaaatggaacaaaccctttagattcagaaaattatccaatcattgaagataatgattactgtattgatttagatgaagataacatttcaaatgacccaagtgaagaaccacaaggagaccctgacaatgatggattagctaattaccaagaaaatattcttggtacaaattgtacaaattgggattctgatggtgatgggctgtctgatagtgtggagataaacggatgggatatcactgtttttagtccatgtacatttagtacatattccgagggagaaatatttttgtaa

SEQ ID NO: 203286 - DNA, 559 bp, Unknown
  Bacterial polypeptide expressing nucleotide sequence isolated from the Sargasso Sea
atgactaccacgaacaatctcaacggccaagtagctctaataacaggtggctcttctggaataggtgctggtgtcgcaaagtccttttcaaaacatggggcacgggtgatagttaactatttgcacgaaaatgaacaagcgaaggtcatcgccttgattaaagagacgggtggcattggtgaagggtaccgcgctgatgtttcagaagaggcagaagttaacaagatgattaatcatgtaattaaaagctatggaagattggacattcttgtaaataacgctgggattgttcattccgccccagtggaaagtattcaaacggatcactgggtagaaacatttaaggtacatgtgaatggaacttttttttgtacaagagcctccttacctcatatgtataatcaaaactatggccgtattattaatacttcgtcacaacttgcttataagggagcagccggtttttcaaattactcagctgcaaagggagctataatttcttttaccagaagtcttgcgcttgaaattggcgaaagaaatatatgtgtgaatactgtcg

SEQ ID NO: 203287 - DNA, 180 bp, Unknown
  Bacterial polypeptide expressing nucleotide sequence isolated from the Sargasso Sea
aatgtatttaaaaaaatataaccttaaaaataaagtcgctctcgtaacaggagctggcaaaggtttaggtagagcctgtgcaattgcattggccgaagcaggtgcaaatctattattaattagcaggacaaaaaaagacctggaaaaagtttctaaaataattaaaaaatttaatgttaa

SEQ ID NO: 203288 - DNA, 574 bp, Unknown
  Bacterial polypeptide expressing nucleotide sequence isolated from the Sargasso Sea
atgaatttggaaaataaaaaaataattattacaggcgccactggaggaattggtaattccatagtaaaaactttaagtgattctggtgcaaaaatattagccaccgggacaagacttgaaaaacttgaaaaattaaaatcaaaatttaaaaatactgatattttaaaatttgatatttctaaaggtgaagaaattgaagagtttattgaaaacgcaacaaagaaactcggtggaggattagattgtttaataaataatgccggtataactcaagataatttagctatcagaatgaacattgatgagtggaaaaaagtaataaatattaatctaacttcaactttcttgttaagcaaatttgcagtaaaaaaaatgcttaaaagtaaatatggaaaaattattaatataacttcagttgtaggtcatacagggaatttaggacaagcaaattatactgcttctaaagcgggtattgttgcaatgtccaaaagtttagcgatagaatatgcaaaaaagaatataaatataaattgtatttcacccaggttttataaaaacagagatgacagataaa

SEQ ID NO: 203289 - DNA, 826 bp, Unknown
  Bacterial polypeptide expressing nucleotide sequence isolated from the Sargasso Sea
aatttatttaaaagctcaggggttaaaagtgaaaatataataatgtgtgacagtaaaggtgttatttacaaaggtagaaaaaatattgaccaattcaaatctgcttttgctattgatacaaaattaagaactctgtcagaggcaatgaaaaatgctgatgtttttcttggtttgtcagctaaagatgtggttaataaagagatggtagagtccatggcaaaaaatccgattatttttgcatgtgctaatcctgatcctgaaattaaaccagaattaattcaagaagtaagagatgatgcaattattgctactggtcgttctgattatcctaatcaagtaaataatctaattggttttccttatatttttagaggagctttagatgtaagagcaaaagcaattaacgaagaaatgaaagttgctgcagcgaatgcaatagctcttttagctagagaaaatgttcctgatgaagttgtagctgcttatggtggtgatcgtccaagatacggtaaagattatataataccttcaacttttgatccaagattaatcagtgtaatacctgccgctgttgcacaggctgcaatgaaaagtggggctgctagaaaaaaaattcaagacttagaactatataaagatcaactttctaatcgtttagatccttcaatgtctataatgcagggtatcaatgcaaagataagaaaaagtcctaaaagagttatttttgcggaaggagaggatgaaaacatgcttaaagcagcaattgaatttggaaaaaacaagttaggtataccaattttaattggtgcagaaaaaagagttaaag

SEQ ID NO: 203290 - DNA, 961 bp, Unknown
  Bacterial polypeptide expressing nucleotide sequence isolated from the Sargasso Sea
atagatagaaaaggagttttatatcgaggaagagataatcttgatcaatggaaatctgctcacgcaataaacacaaaattaagaagtcttaaagaagcaataaaaggtgctgacatatttttaggtttgtcaacaaaagatgtattaacaaaagatatggtaaaatcaatggcaaaaaatcctattatttttgcttgtgcaaatcctgatcctgaaataaatcctgaagacgttcatgaagtaagggatgatgcaattgtagcaacgggtagatcagattatccaaaccaagttaataacttaataggttttccatacatttttagaggtgctcttgatgttagagcaaaaactattaatgaagatatgaaagttgcagctgcacatgcgatagcaaaactagcaagagaatacgtgcctgatgaagttgtagcagctatgggtggtgaaagaccgatatatggaaaggagtatattattccttcaactttcgatccaagattaataagtgtaatacctgttgcagtagctaaagcagcaataaaaagtggtgtagctagaaaaaaaatagaaaattttgaaacctatcaagaacaattaaaacagaggcttgatccatcaacaactattatgcagggcgtaaataatcaaataaaaaaatctcaaaaaaaagttgttttcgctgatggtgaagatgaaaatacattaaaagctgcaatagcttttaaaagtaatggtcttggaattccaatattaatagcaaaaaaagacattgttaaacaaaaacttaaagagattggattagacgaaaattataaaatagaaataattaattctactgataaagaaaaaagagaaaaatattcaaaatttctttataaaaacttgcagagaaaagaaggtttgcttgaaagagattgcgatagattggttagaaacgaccagggtaatttggggaact

SEQ ID NO: 203291 - DNA, 650 bp, Unknown
  Bacterial polypeptide expressing nucleotide sequence isolated from the Sargasso Sea
ttatttttcaatatcaactcttgctttctcagaaatggttagactatccctactaaaatttagctatcaaaaagaaattgatggtgaacttgtggggcctaacggagctgagggatttggtggaattagatggatcttcgaaaacaatattactgtacttcagtatacatttttgatttaccttgttcttattataattttgacttgtctgtttttaatggagcgctctgggttgggcatgatcttcagaatgataggacaagatccaatgttgactcgtgtacacggattaaatactgtgatttacaaagtcattgctgctgtcatagctggattcgttgctggattaggaggtatgctttatgctcattcatttacctacattgaaccacagatatttaacgtaatgttaggtgttcactctcttgcatatggacttatagggggactggggacagtatttggaccattgattggtgtggctttagacattggtttacttgaatcaattcgcattatacaaggttacagaatgattgtgtttggaggactagtcgctattatgctgatctttatgccacgaggaattctcgacgaaaatcgtgtttacaaactaaaaatagctttaaggagtttgctccgtgtatgag

SEQ ID NO: 203292 - DNA, 742 bp, Unknown
  Bacterial polypeptide expressing nucleotide sequence isolated from the Sargasso Sea
atgaggttaaaagaaaaagtttctataataactggcgcagcttctggttttggaaaaggtatagcaaaaaaattttctgaagaaggtgctaaattaatattggcagatattaacaaagatgttttagaaaaagtttcaaaagatatgggtcatgactttttccctgtagatgttggagattctaacagtatgcaagaattatctaattatgtattaaataaatatggaactattgatattatggtaaataatgcaggcataactcatttaccgaaacctctagaagatgtaaatgaagaagaatttgataaagtttttaaagtaaactcaaagtcagtttttttgtgtggaaaattttttgttcctcatatgaaaaaagaaagaaaaggatcaatccttaatatttcttcaactgccggtctttctccgagaccaaacttaaattggtacaatgctacaaaaggatggatgataactgcaacaaaagcaatggctatagaacttgcaccttttaatgttagggtaaattcattagcacctgtagctggtgaaactccacttcttaaatcttttttaggagaagatactgtagaaagaagaaatgcatttttatcaacaattcctataggtagattttctaccccaaaagatttgggtaatgctgcttgttttctttgttcagatgaagccagcatgattacaggttcaatactagaagtagatggtggaagatgtatttaaa

SEQ ID NO: 203293 - DNA, 914 bp, Unknown
  Bacterial polypeptide expressing nucleotide sequence isolated from the Sargasso Sea
tgatgatagaagtacagtttatgactacacaagtaaaggaaacatagttgcagtcatatctaatggaactgcaatattgggtcttggaaatttaggtgcgcatgcatcaaaaccagttatggagggtaaatctgtattatttaaaagattttcagacattgactctatagatttagaaattgacactgaagatgctgaagaatttattaattctgtaaagtatttgggtccatcctttggaggaataaatctcgaagacattaaagctcctgaatgctttataatagaagactcactaagagaaataatggatattcccatttttcatgatgatcaacacggaactgcaataatatctgcagcagcacttataaatgccatggaccttgctggaaaaaaaattgatgaagctaaaatcgttgttaacggtgcaggtgctgctggtattgcatgtctggagctattaaaggctatgggtatgccaaatgaacatgcaatactatgtgatacaaaaggggttattcatactgaaagaaaagaaaatatgaaccagtggaaatctgcccatgcagtaaaaacaaagtgcagaactcttgaagatgcactaaatggagctgatattttttttggtctatcaattggtaacatcattagtgaaaaaatggttttatctatggcagaaaaaccgattattttcgcaatggcaaatcctgaacctgagatattgcctgaaaaaattaaagaatgcagagacgatgcaattatcgcgaccggtagatccgactatcccaatcaagttaataatgttcttggattcccctatatatttagaggggctttagatgtaagagcaaaaacaattaatcttgaaatgaagattgctgcagctaaagccatagccgacctagcaaagg

SEQ ID NO: 203294 - DNA, 766 bp, Unknown
  Bacterial polypeptide expressing nucleotide sequence isolated from the Sargasso Sea
aatgattgataattcagatttattcacccttaagggaaaaacagcattaataacaggttcaagtcaaggtataggtttagctttagcaaaaggtatgtatagttttggtgcaaaaataattcttaatggaagaaataagaaaaagttagatgaagtttcaaaaaaatttgaaaaacaagatcatgtttttaaattaaattttgatgtgacctcttacaaagaaacagaaagatcaattaacgattttgagcaaaaagaaggacagatagatatcttggtgaataatgcaggcatccagtttaggtctcctttggaaaactttcctgaggaggagtttggcaagttgattcagacaaatataatatcaatatttaatgtaagtaagtgtgttgctaaatttatgataaaaagagaaaaaggaaaaattattaatattgctagtgtgcagacttcactagcaagaccaggaattgctccatacacagcgtctaaaggtgcagttggaaatttcacaaaaggcatggcaacagattgggcaaaatatggattgcaatgtaatgcaatagcgcccggatatttcaaaacacctttaaatgaagctctggttcaagataaaaatttttcaaaatggttggaaaccagaactccagctggtagatggggtgaggttaaagagttgataggtgcttgtatttttttaagttctaatgcttcaagttttgtaaatggtcacattctatatgttgatggtgggataacagcctct

SEQ ID NO: 203295 - DNA, 328 bp, Unknown
  Bacterial polypeptide expressing nucleotide sequence isolated from the Sargasso Sea
tttgatttctaagccaaaaatttcaattattggtgcgggaaatgtgggagcttcagctgcttacagggctctggagcttgatcttgcagatgtcgtgctattagatattgtagagggtctccctcaggggaaggctttagatatgactcaaatgctttctgttacgggtatatcatcaagtgttattggcactaatgattattcagacactaaagattctgatgttgtgataattacttctggtttagcaagaaaacctgggatgagcagagatgatttaatctcaactaataccaagataataaaagaagtaactgaacaagtcgat

SEQ ID NO: 203296 - DNA, 844 bp, Unknown
  Bacterial polypeptide expressing nucleotide sequence isolated from the Sargasso Sea
ggtggtcatttctggagcgggcgcctctgctttgtcttgtgctgaacactacgttcgtctaggtgttcggaaagagaatatgatcgtttgcgactcgggtggtattttgacgaagacgcggaaagacgcgggtgaattaaacaagtacaaggcaaaattctctcgcgaaattccagatgggggaattggagatgctttggttggagctgatgtgtttctaggcctgtccaaagctgggatcgtgtcggggaaaatggtcgcgaaaatggcggttacaccactgatttttgctttggcgaatccgacaccagaaatcatgccggaagaagtagcggcggttcgtaatgatgccatcatggcgactggaaggtctgattatccaaatcaaatcaacaacgtccttggattcccctacatcttccgtggcgctttggatgttcaagctgacaaaattaccgagggaatgaagatggctgcaacgatggcgttggctgaattggcaaagatgccggtgcccgatgatgtcgccgcggcatacggtggggcccagattcagtttggtcccgattatctaattcccaaaccattcgatgctcgtgttctaatttgggaagcaagtgctgtcgctcaagctgctgtagaggaaggtgtcgtcgatccggaaatcgccaagtcgttcgatgttgattcatatcgacaccagttagaggggcgattgggactaacccgatccatcatgcgtggtgttatcgataaggccgggagattgagacaacgaattgtcttcacagaaggggatcacccaaccatgctcaaggcagctgcacaatgtatccaagagggg

SEQ ID NO: 203297 - DNA, 178 bp, Unknown
  Bacterial polypeptide expressing nucleotide sequence isolated from the Sargasso Sea
atgtcaaaaaaaatatcattaattggtgctggacaaattggtggaacactcgcacacttaattggtttaaaagaactagtaggtgaagtggtaatgtttgatgttgcaagtggtattgctaaagggaaagcattagatatagcccaatcatcctcggtcgatggttttaatgttaaat

SEQ ID NO: 203298 - DNA, 773 bp, Unknown
  Bacterial polypeptide expressing nucleotide sequence isolated from the Sargasso Sea
tatttttgcttgcgcaaatcctgatccagaaataaaaccagaactaattcaggaagtaaggtctgatgcaataattgcaactggtagatccgattatccaaatcaagtaaataatttaattggatttccatatatctttagaggtgctttagatgttagagctaaagaaataaatgaggctatgaaagtggctgctgcaaaagcaattgcattattagccagagaaaatgtaccagatgaagttgtttcagcttatggtggagatcgaccaagatacggcaaagattatattataccctcaacttttgaccctaggttaataagcgtaatcccctcagctgttgctgaagcggcaatgaaaagtggtgttgcaagaaaaaatatcaacgatctggaaatttatagagatcaacttactaatcgtttagatccaactatgtctttaatgcaaggtataaacgcaaaagtaagaaaaaatccaaaacgagttatatttgctgaaggtgaagatgaaaatatgctcaaagcagctattgagtttggtagaaacaaattaggcactccaattttaattggagctgagaaaagaattaaagagcagttgaatagcataggcttagatgaaaattataaaattgatattgtgaactctacagataaggaaaaaagagaaagatatgtcaaacacctttataaaaaacttcaaagagagggtcaattggaaagagatgtagatcgattagtacgaaatgatcgtattgcttggggagcat

SEQ ID NO: 203299 - DNA, 604 bp, Unknown
  Bacterial polypeptide expressing nucleotide sequence isolated from the Sargasso Sea
aaaggatttaaatcaagattttttacatacagatgttgcaaattcaaatagtatgcaacaattagctgattatgttttaaaaaaatatggaactatagatattatggtaaataatgctggtataactcatttaccaaaaccactcgaagaagttagtgaagatgagtttgataaagtttttgcagtaaattccaaatcagtttttctttgtggaaaattttttgttccacatatgaaaaaacaaaaaaaaggttcaatactcaatatttcttcgactgcaggtatttctccgagacctaatctaaattggtataatgcaacgaaaggatggatgataacagcaacaaaggcaatggcagtagaacttgcgccatttaatgtaagagtaaattcattagctccagtagcaggcgaaactcctcttcttaaatcttttttaggagaagatacgcttgaaagaagaaatgctttcctatcaacaattcctataggtagattttctacccctaaagatttaggtaatgctgcttgttatctttgttctgatgaagcgagcatgataactggatcaatactagaagttgatggaggaagatgtatttaa

SEQ ID NO: 203300 - DNA, 550 bp, Unknown
  Bacterial polypeptide expressing nucleotide sequence isolated from the Sargasso Sea
catggcgggaacagcgattatcacaggaggcagccgcggcatcggcgcggcgacagcgcgccaagccgccatggccggctatgacgtctgtatcaactacgtcacgcattccaaggcggcggaccgagtggttgccgaatgcgaggcattgggccgaaaggcagtcgcggtgaaagccgatgtgggaaatgcgcaggatgtcgctgaactttttaccgcctgcgacaatgcgctcggtcccgtttccctcctggtgaacaatgcaggcattatcggcaaggcgacgaccgtgtccgacctcccggatgacgcactcgcacgaacattcgaggtcaacgtatacggcaccatttactgcgcgcgagaagccatccagcgcatggcgacatcgaaaggcggccgcagcggtgtcatcatcaacgtctcttcggtggccgcccgcctcggcagtccaggcgagtacgtccactacgccgccagcaaggcggcagtcgagaccttcactatcggcctcgcaaaggagatcggcggagagggtatacgggtcaat

SEQ ID NO: 203301 - DNA, 391 bp, Unknown
  Bacterial polypeptide expressing nucleotide sequence isolated from the Sargasso Sea
tatgagattaaaaaataaaattgctataataacaggggccgcatctggttttggcaaaggtatagcaaaaaaattttctgaagaaggagctaaatcaatattggttgatattaataaagatctattagaaaaagtttctaaagatttaaatcaagactttttacatacagatgttgcaaattcaaatagcatgaaacaattagctgattacgttttaaaaaaatatgaaagtatagatattatggtgaacaatgctggcataactcacttaccaaaaccacttgaagaagttagtgaaaaagaatttgataaaacttttgcagtaaattcaaaatcagtttttctttgtggtaaattttttgttccacatatgaaaaaacaaaaaaagggg

SEQ ID NO: 203302 - DNA, 862 bp, Unknown
  Bacterial polypeptide expressing nucleotide sequence isolated from the Sargasso Sea
tattagtaacgggactgctattttaggtttaggtaacttaggtgctatagcctccaaacctgttatggaaggtaaagcagttttgttcaaaagattcggagatatagatgctatagatttagaaattgactctattaacccagaagaaataattaattcaataaaaaattttgccaacagttttggtggaataaatttagaggatattgcggctccggattgttttgttattgaggaaaaattaaagaaaattttagatatccctgtttttcacgatgatcaacatggtacagctattattacttatgcggcattattaaatgcactagatatctctaaaaaaaatattaaaaaagtaaaagttgtagtgaatggcgctggtgcttcagcaatggcttgctcaaatcttttattaaaagcaggtgtgattaagtcaaatataacaatgttagatagcaagggtgtgatacataaaaataggaagaacttaaacaagtggaaacaaaattatgcaacaaatacaaaatcgagaaaattatctgatgcaattaaaggtgcagatgtatttttgggtttatcttccgctggcgtgcttactaaagaagatgtgagaagtatggcagctaacccaataatatttgcttgtgcaaatccagatcctgaaataactccagaggaagtagaagaagttagaaatgatgcaattgttgccactggtagatctgattatgctaatcaagtaaataatcttttgggatttccatatatatttagaggtgctttagacgttagagcaaaaacgataaatgatgaaatgaaaatagcagctgcaaatgctatcgcatatttagcaagagaaaga

SEQ ID NO: 203303 - DNA, 808 bp, Unknown
  Bacterial polypeptide expressing nucleotide sequence isolated from the Sargasso Sea
agagaaatagccaaaaatcctgatgctgcttatgactatactactaaaggtaatttggtagcagttataagtaatggatcagcaatccttggaatgggaaatctaggtgcattagcatctaaacctgtaatggaaggtaaggcagtattatttaaacgtttcgcagatatagattctattgatctagaaatagacagttcaaatactgaagaaattattaaaagtataataaacttttcaaaaagttttggtggaattaatcttgaggatattgctgcaccagattgttttattatagaaaaaaaactaaaagaaaaactagacattccagtatttcatgatgatcagcatggtactgctattattacgctagctgcacttattaatgctctagatatatctaaaaagtccataaaaaaaataaaaattgttgttaatggagctggtgcttctgcaatggcgtgtacaaacttgttaattagaagtggtgttccaaaaaaaaatattacaatgcttgatagtaaaggagtcatacacaaaggaagagataatttaaatcaatggaaaataatttatgcagcagaaacaaaaaatagaactcttgaagatgctattaaaaatacagacgtttttttaggtttgtcgactaaaggtgttcttacaaaaaaaatggttaaaaaaatgtcaaaaaaacctataatttttgcatgcgcaaatcctgatcctgaaataacacctgaggaagttaatgaagtaagaaaagatgctattattgcaacaggaagatctgattatccaaaccaagtaa

SEQ ID NO: 203304 - DNA, 154 bp, Unknown
  Bacterial polypeptide expressing nucleotide sequence isolated from the Sargasso Sea
aatgacaaaaaaaaaaagtaaaatatcattaattggtgcaggtcaaattggaggaacattagctcacttaataggaacaaaagaattggttgatgaagtagttttattcgatgtagcaagtggaattgccaaaggaaaggctttggatattgct

SEQ ID NO: 203305 - DNA, 352 bp, Unknown
  Bacterial polypeptide expressing nucleotide sequence isolated from the Sargasso Sea
gatgggaagagtggaagaaaaggttgttctaattacgggtgcttcgtctggtcttggctttgcggatgcacaccgattagccgaagaaggagctaagcttgttctaaccgatattaaccgtgacgatggggaagcacttgctggcgaaattggcgaagccgctctatttattgagcaagacgtcagcgaggaacaatcatgggatttggtcattgatcaaaccctaaagcggtttgggcgactcgatgcgcttgttaataacgccggcatcgctcctatttcagatattgagaaaacaacgacccaagagtggcgaagagtgatgggtgttcatgttgacgcgacgttcttt

SEQ ID NO: 203306 - DNA, 506 bp, Unknown
  Bacterial polypeptide expressing nucleotide sequence isolated from the Sargasso Sea
catggacgataataaacgccccctctatcttccgtttgcaggacctgccattcttgaagcacccttaattaacaagggcagtgcattttcggaagaagagcgtattttctttaacctcgaaggcttagtaccctacgccattgaaactattgaagaacaggcgtcacgcgcctacgatcagttcagaagtttcaataacgatctcgataagcacatctatctgcgcaacattcaagacaccaacgaaaccctgttttatcgtttagtgcaaaaccacatcagcgaaatgatgccaattatctacaccccgacggtaggtttggcctgtgagcgcttctcgaaaaactatcgccgtaaccgtggtctgttcatctcctacccgaataaggacagaatcgacgacatcctcaataactcgactcgccaaaaagtaaaaatcatcgttgtgaccgacggtgagcgcatcttaagcttaagcgaccaaagtattggcggcatggggatcc

SEQ ID NO: 203307 - DNA, 502 bp, Unknown
  Bacterial polypeptide expressing nucleotide sequence isolated from the Sargasso Sea
ttgaattttaaaaataaaattgtagttgttactggtgggttttctggaactggtaaagtaattgtagacaagttcttaagcttaaaagcaaaagtttattcacttgataaaatgtacctgggagtcgaaaaaaaaaaattcttagtaaattatcaaattgatttatctaattatgacgaaattaaaagattttctgactatatatataaatgtgaaaaaaaagttgattttcttgtaaataatgctggaatttcattgccatttaataaaaagaatccttatgaatactggaataatactataagcacaaatttatcagctgctttttttttaagtaatttcttagttaagcttttaaaaaaatcaaaaaatgcttcaattgttaatatagcaagtgtttcttctaaaatagctatggcaaataatcaagcatacaattcttctaaatcaggtctaacagcattaacttttagtcaagctatggattataaaaattataaaa

SEQ ID NO: 203308 - DNA, 484 bp, Unknown
  Bacterial polypeptide expressing nucleotide sequence isolated from the Sargasso Sea
aatgaaaaaaaaagttttaattactggtgtctctggaggaatagggtcagcaattgcaaataagtttattgaaaataattatacaataattgttagcacttcatcacaagaaagtcttaaaaatttaaggaacaaatttggagaaagccatttttattaccacataaatttcaataatttagatgatattgatagtgaattaaaacttatatctgaagagcataaagatttatcagttatagtaaacaatgccggtattactgatgatggattactacttagaatgaaatatagccaatgggagagagtcatacaaacaaatttaaattcaaattttaaaattattaaaagtcaacttccaaatatgatttcaaacaaatatggtaaaatcataggaatttcatctgttgttgcaacttctggtaatcctggtcaaacaaattatgtagcttccaaatcaggaatgattggtttttataaatca

SEQ ID NO: 203309 - DNA, 907 bp, Unknown
  Bacterial polypeptide expressing nucleotide sequence isolated from the Sargasso Sea
cttgagatcaaaccagaagttaatacaagaagttaggtcggacgctattattgcaactggaagatcagattatcctaatcaagtaaataatttgataggatttccgtatatttttagaggcgcacttgatgtaagagccaaagaaattaacgaggaaatgaaagtttctgctgctaacgcaattgcgcttttagccagagaaaatgttccagacgaagtagtttctgcttatgggggagacagaccaagatatggaaaagattatattattccttctacttttgatccaaggttgataagcgtgattcctgcagcagtcgcagatgcagctatgaaaagtggagtggcaagaaaaaatataaaagatttggagcattataaagatcagcttactaataggctagatccaacgatgtctttaatgcaaggtataaatgctaaagttagaaaaaatccaaaacgggtgatatttgccgaaggcgaagatgaaaatatgctcaaagcagctattgagtttggaaggaataagcttggtattcctattttaattggaacagaaaaaagaataaaagaacaacttaaaaatataggccttgatgaaaattataaaatagagattgtaaattctacagataaagtaaaaagagaaaaatatgtaaaacatttatacaaaaaacttcagagagagggtcaattagagagagatgttgatcgattggttcgtaatgaaagaattgcctggggagcatcgatgatagcgtgtaaagatgcagatgcaatggttactgggaatataagacactacgcagcctcaatagaaaaacttaaaaaagttactgaaccaagacctggagaggaaatttttgggatgactatgattactttaaagggaaaactattcttgtag

SEQ ID NO: 203310 - DNA, 127 bp, Unknown
  Bacterial polypeptide expressing nucleotide sequence isolated from the Sargasso Sea
gatgaagcggatcggcaagccggaagatatcgccgccgcctgcccctttctggcgtcggaagaggccagctacatcaccggccagacgatcagcactaatggcggtcgctatatggggtcgcattaa

SEQ ID NO: 203311 - DNA, 866 bp, Unknown
  Bacterial polypeptide expressing nucleotide sequence isolated from the Sargasso Sea
aatggtaaaaaaaatggcaaaaaatccaataatatttgcatgtgcaaatcctgatccagaaataacacctgaggaagttgagcaagtaagaagtgatgcaataattgcgacaggaagatctgattacccaaatcaagtaaataatcttattggctttccttacatatttagaggagcgctggatgtaagagcaaaaacaataaatgaagaaatgaaagttgctgccgcaaatgcaatagcttctttagctcgggaaagggtgccagatgaagttgttgctgcaatgggtggtgatagaccaacttatggtaaagagtacataattccatctacttttgatccaagattaataagcgtaattccagtagcagtggcaaaagctgcaattaaaactggagtagcaagaaaaaaaatcaaaaatttcaatgcttatactgaacaattaaaacaaagacttgacccatctgtaacaatcatgcaaggaataaattcacaaataaagaaaacacaaaaaaaagttgtgtttgcagatggagaagaccaaaataccttgaaggctgctattgcattcaaaaagagtggattgggcattccaattttagttgctaaagaaaaagtggttaaagaaagacttagaaaaattggttatagtgagaattttgatattgaaatcgtgaactcaacatcaaaagaaaatagaaaaaaatatttaaaatatatttttaaaaaattacatggagataaaggtgaacttgatccggatgtttatcaattatatctgagagattgtgataaaataataaaaaatgatagcgttgcatggggttcttgtatggtttcgtgtggggatgcagatgcgatggtta

SEQ ID NO: 203312 - DNA, 823 bp, Unknown
  Bacterial polypeptide expressing nucleotide sequence isolated from the Sargasso Sea
aatttttgtttaaatccaaaaactaatttatgtcagtcaattcgagtgacacaaggaagaggtctgatgccagatgggacaagtcgtttttctttagatggccaagagattcttcattacatgggatgttcaactttctcaaattacaccgttctacccgagatagcagtcgcaaaagtgagagaggacgcgccatttgataaaatctgttacattggatgtggtgtcacaactggcataggagccgtcgcctttaccatgaaggttgagccaggatcaaccgttgcagtttttgggctgggaggaattggtcttaatgtaatacaaggtgcgaaaatggttggtgcagctcgaataattggtattgatctaaacaactcaaagcaatcacttgcgacacaatttggcatgacggattttataaatcctactgatgtcgaaaatgttgttgattatatagttgatatgaccggtgggggtgttgattacagttttgaatgcataggaaacgttagcgtaatgcgacaagctttagaatgttgtcacaaaggatggggacagagctgtatcgtcggtgtagccggtgcaggaaaagaaatatcaacccgaccatttcagttagtaaccggaagatcctggcgtggcacggcgtttggaggtgcgagggggaggactgatgttccaagaattgtagactggtatatggagggtagacttaatattgatgatttaattactcacaaaatgccacttgagcaaatcaatgaagcctttgatttgatgcacgaagggaagagtattcgctctgtaattgagtattaag

SEQ ID NO: 203313 - DNA, 193 bp, Unknown
  Bacterial polypeptide expressing nucleotide sequence isolated from the Sargasso Sea
atggatttagagaacaaagtagccctagttaccggggcaggagttcgtattggacaagcagtagcagtaaaactgggacaacttggtatgcgtgtcataatacactatcatcactctgaaaaaggagcaaaacaaacaattcaaaagcttcctggaaaaaagtctagacatctggttcttcaagccgattgaa

SEQ ID NO: 203314 - DNA, 275 bp, Unknown
  Bacterial polypeptide expressing nucleotide sequence isolated from the Sargasso Sea
tatgaaggcagccgtttttcgcgaagttaatgttccaatggagattgaggatatacaggtatcaaagcctggaccaagagaggtgctgatacgaaccggtgcggcaggtatttgtcatagcgacatgcacttttttaatggcacgtatccggggcaagttcccatggtactcggtcatgaaagtgctggagtagtggaagaagtgggtagtgacgttcactatgttaagcccggtgatcatgtgattacctgcctatccgttttttgtggacatt

SEQ ID NO: 203315 - DNA, 730 bp, Unknown
  Bacterial polypeptide expressing nucleotide sequence isolated from the Sargasso Sea
atgaaaaatatattaattacaggtgctggtaaaggaattggatatgaatgtgttaaagctctatccaatgacaaaaaagttttgatatttgcacttatgcgatcaaaaagtgacttaaaaaaatttgataaaataaaaaatgtaatttcgtttacaggagatgtgaacaatcaaaaagtaattaataaaatttttaattacgctttaaaaagaaaaattgtcatagatggacttgtcaataatgctgggattagacagagacaaaattttttagaaatatcaagaaaaaaaatcaataaaatttttcaaaccaatttcttttcaattttctatttaatgcaaattttttcaaaaggcctaatacgaaagaaaagacctggagcaatagttaatataggatctatagttggaaatttaggttttagtcaattgagtggttatgcatcaactaagatggctttaattggattgacaaaaagttttgctgttgaaatggctagcaagaacattagagctaacttaataaaccctggatttactaaaacatcattttacaaaaaattcaaatctaagaaaaaactatacaattggacaattagtagaattccgcttaagagatgggctgaaccatatgagatagcaaatttagtaaaatttttattatctaacaagtcatcatatattaacggtgaggtaataaatatagatggcggttggacaaatgcgtaac

SEQ ID NO: 203316 - DNA, 916 bp, Unknown
  Bacterial polypeptide expressing nucleotide sequence isolated from the Sargasso Sea
aaaaatattacaatggttgatagaagtggagttatttacagaggaagagaaaaattaaatcaatggaaatcatctcatgcaattgaaacatcagatagatctttggatgatgcaataaagaatgcagatgtatttttaggactttcagctaaaggagttttgacaaaagctatggtaaagaaaatggcaaaaaatccaataatttttgcttgcgcaaatccagatcctgaaattacaccagaagaaattgaagaagtacgtaacgatgcaattgttgcaactggcagatcagattatcccaatcaagttaataatttaattggatttccttatatattcagaggagctttagatgttagagctaaaataattaatgaggaaatgaaaatagctgcagctaaagcaatcgcaagactagcaagagaagatgttcctgatgaagtcgtagctgcgatgggcggtgaaagacctcactatggtaaaaattatataattccgtcaacttttgatcctcgattgataagtataattcctgctgcagttgctaaagcagctatagacactggtgttgccagaaaaaaaattagaaattttgaaacttatcaagaacaattaaagcaaagattagatcctactgtaactattatgcaaggtattaatggatacattaaaaaaaatcagaaaaaaattgtttttgctgatggggaagacgaaaatactcttaaggctgcaattgcatttaaaaattcaaaattgggtacacctattcttgtaggtaaagaagaaaaaattaaagaacagatcaaaaaaattggttacaatgaaaattttgatataaaaatcattaattcaaaagataaatcaaagagagaaaaatacgtaaaatttttatttaaaaaacttcaaagagaacaag

SEQ ID NO: 203317 - DNA, 556 bp, Unknown
  Bacterial polypeptide expressing nucleotide sequence isolated from the Sargasso Sea
gatgggaagagtggaagaaaaggtcgttctaattacgggtgctgcgtctggtcttggctttgcggacgcgcaccgactagccgaagaaggagctaagcttgttctaaccgacgttaattgtgacgatggggaagcacttgctagcgaaattggcgaagccgctttgttcattgagcaagacgtcagcgaggaacaatcatgggatttggtcattgatcaaaccctaaaccagtttgggcgacttgatgcgcttgttaataacgccggcatcgctcctatttcagatattgagaaaacaacgacccaagagtggcgaagagtgatgggtgttcatgttgacgcgacgttctttgggtgtcggtcagccatcccgataatgacgaagagcggaggtgggtcgatcattaacatgtcttcgatcgctgctttggttggtttgtcttcttacctttcctattcttcggccaagggcgcgattcgctccatgacgaagtccatcgcgatgcactgcatagaatcgcgtaacaacattcgttgtaactcgattcatccagga

SEQ ID NO: 203318 - DNA, 598 bp, Unknown
  Bacterial polypeptide expressing nucleotide sequence isolated from the Sargasso Sea
caaggcataaatttggacgttactaagtctgaagactggatatctgcaattcaatttataaaaaatgaggccggatctctgaacatattagttaataatgcaggtattggtaatggcggtgatattgaatctaccgatgtcgaaacatggaaattagtgcatagtgtaaatttagattcagtatttcttggttgcaaacatgccattgaattaatgagagactctggagacggctcaattataaatatttcttcaatgtctggtattgttgcctcgcataatacttctgcatacaactcttctaaagctgcagttagacatttatcaaaatccatagcacttcattgtgctaaaacaaccaacttagttcgatgtaattcaattcatccagtatttactagaactgcaatggtacaaaccatgattgatgctgctccagaaagaaatattgaagaaaagctaatccaacagattccaataagaaaacttgctgaacctaaagacattgctaatgcagccgtttttctcgcctctgatgaatcatcttttataacaggcacggaattgttaatagatggaggtcttagcgcaacctaaa

SEQ ID NO: 203319 - DNA, 550 bp, Unknown
  Bacterial polypeptide expressing nucleotide sequence isolated from the Sargasso Sea
atgattttagaacgttttaaagtcactgataaaatagccattgtgacaggtggtactagaggaataggcttagcaattgcgtatgcacttggagaagcaggagcaaagcttgtcgttaccagtaggacaaataaatttggtggactagaaagccttcaaaaagctaattttgatgtttctttttatgaaggagatatgcatgataaatcagtgcctcaaaaaataattgattttgcaatagaaaaatatggaagagtagatattctggttaacaatgcaggtgttgcgcaacatggtgatatggaggagtataatgatgaacttttagataacataatgaatataaatgtagattctgtctttagaatgtgtcgctctgtattaaccccaatgaaacaacaaggaggtggagtaattttgaatattggttctatatcaggattggtatcaaatattccacaaccacaagttgcttataatgcatctaaagcagctgttcacatgttaacaaaaagtttagcaagtgactatgctgatcaaaatatacgtg

SEQ ID NO: 203320 - DNA, 457 bp, Unknown
  Bacterial polypeptide expressing nucleotide sequence isolated from the Sargasso Sea
catgagtaatctattggaagggcatgtagcggtggtaactggtggcggatcgggaattggagagggtatcgccataggttacgcggagcagggagcatcagtggctattttagatgtgaacgtagaggcaggatcgcatgtcgctaaaactatttcgatgaaggggggaaatgcaattaatgttggcgtggatgtaaccgatagagaatcttgcgagggcgcggtaggcgaagttagagaaaaacttggtgtggtatcaattttggtaaataacgctgggattaatcggcgaaccccagttactggcgataaggccaccgtggcgaaggattgggatgatatcatagaagttaacataaagggtgttttcaatgtcactcatgcgtttctgccccagcttattgaaaccaaaggacgcgtcatcaacatcggttctattcagtcgtttgtgcacgta

SEQ ID NO: 203321 - DNA, 111 bp, Unknown
  Bacterial polypeptide expressing nucleotide sequence isolated from the Sargasso Sea
tatggaacgtgtagcattagtgacaggcggatctcgcggtattggagctgctatctctttagcattaaaaaatgaaggctacaaagtagctgcaacttacgctggtaatga

SEQ ID NO: 203322 - DNA, 859 bp, Unknown
  Bacterial polypeptide expressing nucleotide sequence isolated from the Sargasso Sea
gaagacgtaacgttggtgtgcaatggagccggagcagcggccctcgcctgccttgatctgctactcacccttggtctgaagagagaaaatatactgatggtcgactcaagaggtgtcgtgcattcggaacgtgagggtctcggcaatcaatacaaagcccgctatgccatgacgaccgaagcgcgttctctctcggacgccatggttggccgagacatatttttaggggtgtcggtcgccgacacagtgacccaggacatgatcaaactcatggcgcccgacccgatcattatggcacttgccaatccggatccggaaatcaggccggaactcgtcaaagaggtaagtccgaattccattatcgcaaccggccggagcgactatcccaaccaagtgaacaatgtactctgtttccccttcatgttccggggtgcgctcgacgttggcgcgacaaccatcaacgacgagatgaaagcagcatgcacccacgctctggcagcgcttgccaaagcggaagcagacgagaccgtggtgcaggcctacggcactgagatgaagtttgggccagaatatgtaatcccgaaacccttcgatcctcgcttgcttgcccaactcgccccggctgtagccaaagctgccatggattctggggttgccacacgtcccatcgcggactttgacgcctatcgccagagtttatccgagtttacctttcaatctggacacgccatgcggcctttatttgaccgagcgcgtctcaaccccaaacgtattgtttacgcggagggagagtcttcgcgagtgcttcgggcggttcagaacgcagtggatgaaggaatcgtcaaacctattttaatcg

SEQ ID NO: 203323 - DNA, 754 bp, Unknown
  Bacterial polypeptide expressing nucleotide sequence isolated from the Sargasso Sea
agtaatggctctgctattctaggacttggtaatctaggtgcaatagcctctaaacctgtaatggaaggtaaagcagttttatttaaaagatttgcggatatagactcaatcgatcttgaaatagactctaacaatccagaagaaataattaattcaataaaaaatttttcaaaaagtttcggtggaattaatttagaagatatagcagcgccagattgttttataattgaaaataaactaaaagaaattttagatatacctgttttccacgatgatcaacatggaactgctataattacaacagcagcattaatcaatgcaattcacataacaaaaagagatattaaaaaaataaaaattgtaattaatggagctggagcttcggcgatggcttgtgcagatttatttataagtaaaggtgttcctaaaaaaaatatcgcgatggtagatagaaaaggggttatttataaaggtagaaaggacttgaatgaatggaaatctttacatgccatagaaacaaaatcacgatcactagatgaagtgattaaagatgctgatgtttttttaggattatctaaagctggaactttaaaaaaagaaatggttaaaaaaatgtcaaaaaatccaataatttttgcctgtgctaatccagatccagagataactccagaagaaattgaacaagtcagagatgatgcgataattgcaactggtagatccgattatccaaatcaagtaaataacttaattggtt

SEQ ID NO: 203324 - DNA, 652 bp, Unknown
  Bacterial polypeptide expressing nucleotide sequence isolated from the Sargasso Sea
gatgacattttctataaaattataaaaaagcgatgtccaagagctatttggaaaaccttggatctttgtgatgatcaagattgcaaaaaagcagtaaaagatattttgactaagctgagtaaaattgatggtttggtaaataacgctgggattaatgacaccgttggcatttcggctggaccaaacgagtttcgcaaatcactcgacagaaatcttgtgcattattacacgatgaccaatttgtgtataatggagttaataaaaacgaaaggatcaatagtgaacgtttcatcaaaagttgttttaactggtcaatctggaacctcagcttatgcagctgcaaagggaggtatcttggctctaactcgcgagtgggcggcagaacattcagcttgcgggctgcgggtaaacgcagttattccaggggaagttatgacaccgatgtatgaaaaatggttggagggctttaaaaagcctgatgaaaaacttaaacagatcaccagccgtatccccctagaaaaaagaatggcaaaagttgaagagttagctatgcctatagtgtttcttttatctcaatgggcgggacacattacagggcagtttttggtggtcgatgggggttattcgcacttggatagagcccttacgtaaa

SEQ ID NO: 203325 - DNA, 712 bp, Unknown
  Bacterial polypeptide expressing nucleotide sequence isolated from the Sargasso Sea
atcattaattgtatatcggcacttggaaaaagttttggaggaataaatttagaagatatagctgctccagattgttttataatagaaaaaaaactaagagaaaaattggatattcctatatttcatgatgaccaacatggcactgcaataataactttggcagctttaataaatgctttggatatatctaaaaaattaatcaaagatattaaaattgttgtaaatggtgcaggcgcatctgcaatggcatgtgcaaacttatttgtaaataatggagttttaaagaataatattataatgcttgatagaaagggcgttatatatagaggcagagataatcttaacaaatggaaatctgcttttgcaattgaaacaaagcatcgaacactagaggatgcaattaaaggagctgatgtttttttaggtttatcagctaaaggcatattgacaaaaaaaatggtaaaaaatatgtctaaaaatccaattatttttgcatgcgcaaatcctgatcctgagattctcccagaagaggtccatgaagtaagaagcgacgcaatagttgctaccggtagatctgattacccaaaccaagttaataatctaataggctttccttatatttttagaggagcattagatgtaagagcaaaaacaattaatgaagaaatgaaagttgctgcagcacatgcaatagcgcaacttgcaaaagaat

SEQ ID NO: 203326 - DNA, 133 bp, Unknown
  Bacterial polypeptide expressing nucleotide sequence isolated from the Sargasso Sea
gatgagaaaaaaaatttctttgataggagcaggacaaattggcggaacattagctcatttaattgttttaaaagaattagccgatgtagttttgttcgatgttgcagagggacttgcaaaaggaaagctttag

SEQ ID NO: 203327 - DNA, 483 bp, Unknown
  Bacterial polypeptide expressing nucleotide sequence isolated from the Sargasso Sea
aatgaaaaaaatttctgttattggtgcaggcgtaattggctcaggatggatcataagatttctagctcatgataagaaagttacagcatatgataaagattctaaattaaaaaaaaaaattattgcggaaataagaagaacttggccatatgtaaaaaaactttttaataaaaaaaaacttaaacttaaaaattttaaatatgtaacatctttaaaggaagctttaaaagatgcagattttatccaagaatgtgcaccagaaaattataagttaaaaactacattaatggaaattattggaaaatactccaaacctaatgctattatctcttcaagctcttctggtttacttccatcaaagatttattcaaaatgtaaaaatccttcaagaactattatagctcatccatttaatcctgtttatatgatcccaggtgtagaattagtacctggaaaaaaaacatcaaaaaaaatattaaataa

SEQ ID NO: 203328 - DNA, 640 bp, Unknown
  Bacterial polypeptide expressing nucleotide sequence isolated from the Sargasso Sea
gttgaaaaaggagaccagggtgaaagatctattttcggtggaagggaaaacggcggtggtaacaggcggttcccgaggcataggagaaatgatcgctgctggttacctatcaaatggtgcaaaggtttacatctcctcgagaaaagccaatgcctgcgacgagactgccaaacgacttgcagaacagttcggtggtgagtgcgtttcaatccctgcggacatgtcttctctggagggcatagacgcgttcgtgaaggagctcaatgaacgggaatcaagcctcgacattctcgtaaacaatgcgggggtcgcctggggcgctccgctggaggaatttccagagctgggttgggacaaagtaatgaacactaacgtaaaaggagtgttttttctgactcaaaaattattgccactcctagaggctggtaattcatcagagaagccttcatacgttataaacgttgggtccattgatgggattaaaacgccccgatttgacaacttttcttacggcccctcgaaagccgcggtacatcaccttacgagggtcctagcatcacatcttgtgcgaagaaatattattgtaaatggaattgcgcccgggccgttcccgacattcatgctcagcgcgggcgtaggg

SEQ ID NO: 203329 - DNA, 750 bp, Unknown
  Bacterial polypeptide expressing nucleotide sequence isolated from the Sargasso Sea
tgcaacccaacccaaccgtcggtaacgtcgaagcaggtcttgcactattaaaagccaatcaatgtgattttgtgatttcattaggcggtggttcaccccacgattgcgctaagggtatcgccctagttgccaccaatggcggcagcatcaaagactatgaagggttagaccaatccgctaagccacaactaccattagtagccattaacactactgctggtaccgccagtgaaatgacccgtttttgtatcatcacagacgaagctcgccatattaaaatggcaattgtcgataaacacaccaccccattactgtctgtgaatgaccctgagctgatgctgaaaaaaccagcgagcctcacagccgcaacaggcatggacgcgctgacccacgcggttgaagcctatgtgtctatcgctgctaaccccattaccgatgcctgcgccattaaggccattgaacttatccaaggcaacttagtgaatgcggtaaaacaaggccaagatattgaagcccgtgagcagatggcctatgcgcaattcttggcgggtatggccttcaacaacgccagcttaggttatgtgcatgcgatggcgcaccaattaggcggtttctacgacctgccccatggtgtgtgtaacgccctattattaccccatgtgcaagaatacaacgccaaagtggtaccagatcgcttaaaagatattgccaatggcgatgggtgtagatgtagccaatatgacagatgaa

SEQ ID NO: 203330 - DNA, 658 bp, Unknown
  Bacterial polypeptide expressing nucleotide sequence isolated from the Sargasso Sea
tatgaatttagagaataaaaaaataatcattacaggcgctacaggaggaattggtaattccatagtaaaaaggttaagtaatgctggcgccaaaatattagccactggcacaagacttgaaaaacttgaggaactaaaatctaaatttaaaaatactgatattttgaaatttgatatttcaaaaggcgatgaaattgaagagtttattgaaaacgcaacaaatcaacttgggggaggactagattgtttaataaacaatgctggtataactcaagataatttagccattagaatgaatattgatgaatggaaaaaagtaatagatattaatttaacttcaacttttttgttaagtaaatttgcagtaaaaaaaatgcttaaaaataaatttggaaaaattataaatataacttcagttgtaggtcatacaggaaatttaggtcaagcaaattatactgcttccaaagcaggcattgttgcaatgtctaaaagtttagcgatagaatatgcaaaaaagaatataaatattaattgtatttcaccaggttttataaaaacagagatgacagataaaatagaagaaaagtttaaagaagctataatatcaaaaataccttcttctaggttaggggaaccagaggatgttgctaatgcagtt

SEQ ID NO: 203331 - DNA, 683 bp, Unknown
  Bacterial polypeptide expressing nucleotide sequence isolated from the Sargasso Sea
tattgcaaaaaaattttctgatgagggtgcaaaagtaatattggcagatattaataaagatcttttagaaaaagtttcaaatggtttagatcaagatttttttcatgtggatgtatcaagttctagtagtatgaaaaaattatctgaatatgtattaaataaatatggaaatattgatattatggtaaataatgcaggaataactcatttacctaaaccccttgaagatgttagtgaagaagaatttgttagagtttttgaggtaaattctaaatcagtttttttgtgtggtaaatttgttgtcccacatatgaaaaaacaaagaaaaggttcaattcttaatatttcctccactgctggtatttctcctagaccaaacttaaattggtataatgctactaaaggatggatgataaccgcaaccaaagcaatggcaatagaacttgctccttttaatgttagagtaaattcattggccccagtagctggtgaaacaccacttttaaagtctttcatgggagaagatactccagaaagaagaaatgcttttttatcaaccatacctataggaagattctcaactcccaaagatttaggagatgctgcatgttttttatgttctgatgaatctagtatgattaccggttctatattagaagtagatggaggaagatgtatttaaa

SEQ ID NO: 203332 - DNA, 991 bp, Unknown
  Bacterial polypeptide expressing nucleotide sequence isolated from the Sargasso Sea
tccaagaagcaaaatacttttttttgtactgttgaagcaatgccaaacaatattgatgttgattgcgtaattgttgatgaaattcaattagccgctgattatgaaaggggccatatttttacagacaggctattaaacttaagaggtaattttcaaactatttttttaggctcattaaatatacaaaatatactaaagaaaatttatccaaatattataattgagaaaaaaagtaggttttcacaacttacatttcttaggcaacagaatatttctaagcttgaaccaagatctgcaataattgcttttaatactaacaaagtttacgaaattgctgaaaatattagaacgcataaaggtggaactgctgttgttttagggtcactcagcccaagaacaaggaatgcccaagttgaggtatatgaaaataaaaatgttgattatcttgtcgctactgacgctataggtatgggattaaatctaaatattaatcatgtaaatttttcatcattagaaaaatttgatggaagatataaccgaaaccttgctccaaacgaattaggtcaaattgctggtagagctggtagatataagcaagatgggacatttagttatactaaagaagctggaaatttagatccattaattatacaacaaatagaaacacacaattttgataatattcaaaaaatttactggagaaatagtgatttagattttaattcgtctgaaaagttattattatctctaaaaaaatatcctgtacacaattactttatccataaaaagaacgcactagatgaaataaattttcgtaatttgattaatgataatgaaataaataaacatctatcatctataaaaaatttaaaattattatgggatatttgtcaaattccagattttgaaaaacttttttatgacaattatttattattattaaaagaaatatatcttactttaatagaaaataatttatatattccctgaa

SEQ ID NO: 203333 - DNA, 199 bp, Unknown
  Bacterial polypeptide expressing nucleotide sequence isolated from the Sargasso Sea
atgagccttcagggaaaagtcgcgctggtcaccggcggctcgcgcgggatcgggcgcgccatcgcgttggcgctggccgaacagggcgcgaaagtcgccttctgccatcccgacgacgcgcaggcgcacgacacgctggccgagcttcagaagctgaccgaggcggaatccctgcccgccgatgtctccgacgaggcgc

SEQ ID NO: 203334 - DNA, 754 bp, Unknown
  Bacterial polypeptide expressing nucleotide sequence isolated from the Sargasso Sea
atgtctggcagattaaaaaataaagttgcactgattacaggtggagctcaaggatttggaaaaggaattgcttctaagtttcttgcagaaggcgcttctgtaataattaccgatataaacaaggctaatggtgaaaagacagcaagcgagctaggtgttacattttttgagcatgatgttggggatcacaagagatgggaagaagtcgtcacagcagtgaacgatcaaataggtaagttaaacattcttgtgaataacgcagggattggtcatatgggtaatgttgaacaaacttctgttgaagattgggatatggtccacaaagttgacttagattcagttttttatggctgcaaatatgcactaccactgatgagagaatcaggtatgggttcaatagtaaatatttcgtctatttcaggtatagttgctggacacaatttctctgcgtacaacagtgcaaaagcagcagtaagacatttaactaaatcagtagctttacattgtgcaagaaccactgatcttgttcgttgtaatagtgttcatccagtatttgctaaaaccgaaattctcgaggcgcttttgagcgatacctcatcaggaatgcttgaaaaactagaaaaacagataccagttagaaagttagccgagattgaagatattgcaaatgctgttctctttttagcatctgatgaatcaaaaatgattaccggttctgaattagtaattgacggtgggctgtctgctcagtgat

SEQ ID NO: 203335 - DNA, 169 bp, Unknown
  Bacterial polypeptide expressing nucleotide sequence isolated from the Sargasso Sea
aatgggtaccgatctttttaatcttgagggcaaggttgctctggtgaccggcgcgagccggggtattggcgaagaaattgcccgcctgttggcagagcagggcgcccatgtgattgtgtccagccgtaagattgatggctgtcaggtcgttgccgatgccattaaggca

SEQ ID NO: 203336 - DNA, 838 bp, Unknown
  Bacterial polypeptide expressing nucleotide sequence isolated from the Sargasso Sea
ataatgctagacagaaagggtgttatttacgagggaagaactgagggaattgatcaatggaaatccagatatgcagttaaaactaaacataaaaatttagaagatgcagttaacggtgcagatgtttttttaggattgtctacgaaaggtgttttgaaaaaaaagatggttaaatcaatggcaaaaaatccaattatttttgcttgtgcaaatcctgatccagaaatcactccagaagaaattaatgaggtaagagacgatgcaattattgcaacaggaagatcagattaccctaatcaagttaataatttaattggatttccctatatcttcaggggggctttagatgttaggtctaaaactattaatgaagaaatgaaagttgctgctgctaatgcaatagctaaacttgcaagagaagatgtacctgatgaagttgttgcagctatgggcggagaaagacctcactatggaaaagactatataattccatccacatttgatccaagattgattagtgtaattccagctgcagtagcaaaagcagctatagagagtggtgttgctcgaaaaaatattggtgattttgaagtttataaagaacaacttaagcaaaggttagacccaactgtaactattatgcaaggtataaactcatttatcaaaaaaaatcaaaaaagaattgtgtttgctgatggtgaagatgaaaatactctaaaagcagcaatagcctttaaaaattcaaaattaggaataccaattttagttggtaaggaaagtaaaattaatgaacaaataaaaaatattggttacagtgaaaattttgacattgaaattg

SEQ ID NO: 203337 - DNA, 829 bp, Unknown
  Bacterial polypeptide expressing nucleotide sequence isolated from the Sargasso Sea
gaggcaataaaagatgcagatgtttttttaggtttgtctgtaaaaggcgcattaactaaaaacatggtaaaaaaaatggctaagaatccaattatatttgcctgtgcaaatccagatccagaaattacaccagaagagatagaggaagtaagagatgatgcgattattgctacaggaagatcagattatcctaaccaagtaaataacttgattggttttccatatattttcagaggcgctttggatgtacgatcaaaaaccattaatgaagaaatgaaagttgcagcagcaaatgcaattgctaacttagcaaaagaggatgtgcccgacgaagtagttgctgcaatgggtggagaaagaccccactatggtaaagattatataataccatcaacatttgatcccagattaataagtgtgattccaactgctgtagcaaaagctgcaatggatactggtgttgcacgagtaaaaattaagaatttcgaattatataaagatcaacttaaacaaagattagacccaacagtaactataatgcaaggtgtacatagttatatcaagaaaaaacaaaaaaaggtggtatttgctgatggtgaagatgaaaatacgcttaaagcggctatagcttttaaaaattcaaaattaggaataccaattttagtcggaaaagaagaattgataaataatcaaattaaaaaaattggatataatgaaaattttgatattgaaataattaattcaaaagatactgctaaacgagaaaaatacgtaaagtatctatttaaaaaacttcaacgacaaaaaggtatgtggagtgggattgtga

SEQ ID NO: 203338 - DNA, 739 bp, Unknown
  Bacterial polypeptide expressing nucleotide sequence isolated from the Sargasso Sea
ctgtcacagggtggtgcatcaaacccaggtcttggacactcaacaattcataagtttgcagaagaaggtggaaaaattgttgtgacagatattgatgttgaaggtggtgaaaaaacagtttctgaggttaaagaaaaaggtggtgaagccatttttataaagcaagatgttgtttcaacagaagattggaaaaatgttgtagatgcttcaatatcagaatttaataaaattgatatactggtcaataatgctggaatagcgttaatagggccttttgaagaattttctgaagatcaatgggatcaacaaatcaatgtgaatttgaaatctgtttttcttggttgcaaggctgttatacctgagatgaaaaaaaataactcgggctcaataatcaatctttcatcaatagctggtttagtaggtcttcaagggtgtgcagcttataatgcgagtaaaggaggggttaggttactaaccaaatcaatcgcgattgaatatgggcccaacaaaataagatgtaattctattcatcctggttttatggccacaaatatgaatgacccaaaaaaaattaaagaacgcggtagagattttgaagcaattattgaaacaattcctctaagatctatgggtactgcagaagatatcgctaattgtgctctatatttagcctcagatgaatcatcatatgttacaggaagtgagtatgttgtcgatggcggttggacaactcgttaat

SEQ ID NO: 203339 - DNA, 614 bp, Unknown
  Bacterial polypeptide expressing nucleotide sequence isolated from the Sargasso Sea
tatgaaagatttattttcaattgaaggaaaggtagccttagtgacaggtgggtcaagaggtattggtgaaatgatagctgcaggattcttagcctcaggagctaaagtctatataagctcacgtaaaaaagaagtttgtgatcaaactgctgaacgtctatcaactgaatatggaggaacatgcatatctatgccatctgatttatcaaacctagagggtattgataatttagtaagtgatatatctaaggaagagtctaagatagattttttaataaacaacgcaggagccgcatggggagcacctattgataattaccctgaaaatggatgggacaaagttatggacaccaatgtaaaagggatcttctttctaacacagaaattactccctatgcttagaagcgctgcaaaagaaagtcctgctcgtgtagttaatataggttccatagatggattaacatctggatctttcgaaaattttgcctatggaccttctaaagcggccgttcatcatctgaccagagtattagctgcaaatctaatttctgaaaatataatcgtgaatgctattgctcccggaccttttcctacatggatgttaagtacaggtg

SEQ ID NO: 203340 - DNA, 697 bp, Unknown
  Bacterial polypeptide expressing nucleotide sequence isolated from the Sargasso Sea
tatgacgcaacgtatcgcattagtgactggtggtagtcgtgggctcggtaaaaacgccgcacttaagctggctgacagaggaacggacattatctttacctacaacagccagcagcaggcggcgctggatgtggttgctgaaattgagcaaaaaggcagaaaagctgcggcaatacaactgaatgtcagcgatgtggctggctttgagtcctttactcatgaggtacaagcgcagctgaagagcatgtggaatcgtgaggcgtttgattatttagtgaacaatgccggaattggtctgtatggcgcttttgccgatacctccgaagcgatgtttgatcaattagtgaacattcactttaagggccccttcttcctgacccaacgtctgttgccgttgatccagaatggcggcaggatcctgaatgtttcatcgggactggcgcgttttgcactgccagggtatgccgcctatgcctcaatgaaaggggcgatggaagtactgacgcgttatcaggcgaaagaactgggagagcggggtatttcagtaaatatcatcgcgcctggggcgattgaaaccgattttggcggcggtcgactgcgggataataaagagctgaatgcatatgtggcatcgcaaacggcgctgggacgcgcgggcttgccggatgatattggcgacgcgattgccgcgttgctc

SEQ ID NO: 203341 - DNA, 397 bp, Unknown
  Bacterial polypeptide expressing nucleotide sequence isolated from the Sargasso Sea
atgaaatctatattagttacagggtcttcttcaggaattggagctgctatatgtgaacacttttcacaaattggttggaaagtttttgggagtgtgcgaaatcaaaatgatggggataagcttataaatatttgtggagaaaatttcacccctcttatctttgatgttacagacattaatgccattaaagaagcatctaatatagttgaaaatcttttaggcataaatggcttagattgtctcgtaaataacgctggtattaatatttctggcccaatggagtatgttgaatcagatgaagtaagaacagtctttgaggtcaatgtgatggggccattaaattgctcgcaaatattcctgccaatgctaaaaaaatcctcgtcagcaactataatta

SEQ ID NO: 203342 - DNA, 232 bp, Unknown
  Bacterial polypeptide expressing nucleotide sequence isolated from the Sargasso Sea
gatgccaccttcaaataatgaaaaaaatttattagcgatacttggcccaacaaatactggtaaaactcatttagcttttgataggcttatttcgtataaatcaggaatttttggttttcctttaaggcttcttgcaagagaaaattatgaaaaagcaataaaattaattgattttaataaagtagcattggtaacgggagaagaaaaaatcattccgaaaaatgctaaatat

SEQ ID NO: 203343 - DNA, 258 bp, Unknown
  Bacterial polypeptide expressing nucleotide sequence isolated from the Sargasso Sea
aacctgtacatggttctgcacccgatattgctgggcaaggattagctaatccgatagctgcaattctgtcagtagcgatgatgcttagatatagttttggtctggaagagccagcgaggaaaattgaagaggcaatagagaaggtccttaaagaaggttatagaacggttgacctcgaaggtcctaaagacatgaaattaaacacagatcaaatgagtcaaaagatattggagaatttgagaggtttcaatgaataag

SEQ ID NO: 203344 - DNA, 838 bp, Unknown
  Bacterial polypeptide expressing nucleotide sequence isolated from the Sargasso Sea
aaccagtggaaatctgcacatgcagtgaaaacaaagtgtagaactcttgaagatgcattaaatggagctgatattttttttggtctctcaattggcaatatcattagtcaaaaaatggttttatctatggcagaaaaaccaattatttttgcaatggctaatcctgaacctgaaatattgcctgaaaagattaaagaatgtagaaaagacgcgattattgctactggaagatcagattatcctaatcaggttaataatgttctgggattcccctatatatttagaggtgcattagatgtaagggcaaaaacaattaaccttgaaatgaagattgctgctgctaaagcaatagctgatctagccaaggaagatgtaccagatgaggtagccaatgcttatcctgggaaaagacctcaatacggtccagattatattatcccttctcccttcgatccaagacttattagtaaggttcctccagcagttgctaaagctgctatggatactggtgttgcaaggaaagcaattgttgatattgaaaattactccaatgagttatctgcgaggctcaatccttctgctggtcttctacaaaaggtttttcaagaagtaaaagaaaatccaaaaagagtaatttttactgaaggtgaagaggaagacatgatcagagctgcagtaatatttctcaacaatagaatgggtactccgatattaattggaagagatgacgtcataaaagataaaatgcaggaaatgggattagatttttttgatcaaatggaaattcacagtactaggaataaatctgaacatgacaggtatgccgaacatatctatc

SEQ ID NO: 203345 - DNA, 481 bp, Unknown
  Bacterial polypeptide expressing nucleotide sequence isolated from the Sargasso Sea
atgattgacatcaaaaataagaatgtaatagtaacaggagcaactggtggtattggtaattcaattgtcaaagctttggtagatcacggtgctaacgttttagctactggaactaaagttgaaaaattaaatgaattaaaaaaaattaacagcaaaattaaaactttgcaatttgatatatctaatcatgataaaattgaaaagttcattgatgatgctgctagtgagttagataataaacttgactgtatcataaataatgctggtattactaaagataatttatcgatccgaatgacatatgatgaatggtcaaaagttatagatattaatttaacttctacttttttgatgagtaaatattctattaaaaagatgttaaaaaataaatctggtaaaattgtgaatattacttctgttgttggtcatacagggaatgttggtcaagctaattatacagcatcaaaggctggaatagtag

SEQ ID NO: 203346 - DNA, 775 bp, Unknown
  Bacterial polypeptide expressing nucleotide sequence isolated from the Sargasso Sea
gcagatattttttttggcttgtcagttgggaatataattagtcaaaaaatggctttatcaatggctgataatccgattattttcgctatggcaaatcctgagcctgaaattactcccgaagatgtaaaagagtgtagatctgatgcaattattgcaacgggaagatctgactatcctaaccaagtgaataatgttttagggtttccctatatatttagaggagcattagatgttagagctacaacaattaatttagaaatgaaaatagctgctgcaagagcaatagctgacttagcaaaagaggatgtacctgacgaagttgcaaacgcttaccctggaaagcgaccacagtatggtcctgattatataataccttctccatttgatcctcgattgataagtaaagttccgcctgcagttgccaaagctgccatggatactggagtagcgcgcaaagcaattgttgatatggacagatattccaatgagctatcagcgaggcttaatccttcagctgggctattacaaaaaatatttcaagaagtaaaagaaaatccaaaacgtgtaatctttacagagggtgaagaagaagacatgattagagctgctgttatattccttaataatggaatggggacaccaatattaattggaagggaagaaattataaaaagtaagatgaaagaaatgggacttgatttctttgataaaatagaaatccatagtaccagaaataaaactgaacacgatagatacgctgaacatatttataaca

SEQ ID NO: 203347 - DNA, 534 bp, Unknown
  Bacterial polypeptide expressing nucleotide sequence isolated from the Sargasso Sea
aatgcaagcagcaatattgcgcgatgacagcggttctttaaacgtggaagacatatcaatagataagcctcagagaaacgaagtacttgttcaaaccgttgcgtctggactctgccatagtgacttgcattttattgatgggagctggtcccaccttgctatgtacccgatgctcctcggtcacgaagctgcaggcatcgttcaagatgtaggtgaagatgtagtaggaatagaagtaggtgatcacgtcatcagttgcctttccattttctgcggttattgtgatcgttgtttgacaggtcatagctatatctgctctcagcgtcaagaaatctctggtcgtcctatggaagagccgccacgacttaccgatagcgaaggggcagtgataaaccaattcacaggtttgggttcgtttgcgcaagagatgctggttcatcagaatggagtagttaagattactccagatatgcctttagaccgtgctgctttgattgggtgtggagtgaccactggtgtcggagctgtttttcg

SEQ ID NO: 203348 - DNA, 802 bp, Unknown
  Bacterial polypeptide expressing nucleotide sequence isolated from the Sargasso Sea
gatgatgctataaaaggtgcggatgtttttctcgggctatccaaagctggagtgttaaaaaaaaacatggttaaaaaaatggccaaaaatcctataatttttgcttgtgccaatccagatccagagattacacccgaagaaattgaagaaattagaaatgatgcaataatagcaactggaagatcagattatccaaatcaagtaaataatttaattggtttcccttacatttttagaggggctctagatgttagagcaaaaacaattaatgaagagatgaaactagctgcatctaatgcgatagctacactagcaagagaaagggttcctgatgaagtggtcgctgctatgggtggtgatagacctaaatatggtaaagattatataataccttcaacatttgatccaagactaataagtgttattccagttgctgtcgctaaagcagcaattaaaagtggggttgccagaaaaaaaattgaaaattttgatacatactctgaacagttaaaacaaagacttgatccttcggtaactataatgcaaggaattaattcacaaattaaaaaaacacaaaaaagagtagtatttgttgatggtgaagatgaaaacacactcaaagctgcaattgcttttaaaaatagtggattaggaattccaataatagttgctaaagaaaaagttgtaaaagaaagattaaaagagattggatatagtgaaaattttaatattgaaatagtaaattctgcaataaaagaaaagagagaaaaatactctaaatatttatttaagaagcttcaca

SEQ ID NO: 203349 - DNA, 697 bp, Unknown
  Bacterial polypeptide expressing nucleotide sequence isolated from the Sargasso Sea
ctcaattgcaaaagcatttgcagaatttggggcaaacgtcgttgtatgcagtagatctcaagaaggtatagagaaagttgttagtgaaataactgcaaatggttataacgcaattgcgtgtgtttgtcatgtaggtgaggatgatcagttaaaaaatctaattgaaactacaatcaataaatatggaagaattgatatacttgttaataatgctggaataaatcctgtatttgatcgtctagaaaatgctgatgaaaaactttttaataaaatactagatatcaatacaaaatcccctttcaaactatctaatcttgtgtttgactatatgaagaaaaataagtctggttctattataaatatatcatcagttgaggcaaataagcctgataaaggtttgggagtttactctataagcaaagccgctatatcaatgctgactaaatctcaggcaaaggagtggggaaaatatggggtaaggtcaaatgcaatttgccctgggctaatcaaaacaaaattaagttcagctttatggcaaaatgaggaaatgctagataaatggcttggtgatcttccaattcgcagggctggagatcctgacgaaatatcaggaatagctctttatcttgcttctgaagcttcaagttatacaactggtgaaacatttaatatagacggtggttatatgataaattaa

SEQ ID NO: 203350 - DNA, 367 bp, Unknown
  Bacterial polypeptide expressing nucleotide sequence isolated from the Sargasso Sea
atgaatttaaaaaataaaaaagttattattaccggtgctacaggtggaataggtaatagtcttgttaaaagatttgctgaagaaggagcattgattttagcgacaggcacaaaggaagaaaaactgaacgatttaaaaaaaaatttcaacaatatacaaatagcaaaatttaacttaggggaacattctacaattgagtccttcatagaatcagctgttcaaaaacttggtggattagatatcttagttaataacgcaggaattaatttggacagtttaacaataagaatgtcagaggaaaactggaaaaaagttctggatatcaatttaacatcaacatttctaatgtgtaaatcagcgataaaaa

SEQ ID NO: 203351 - DNA, 254 bp, Unknown
  Bacterial polypeptide expressing nucleotide sequence isolated from the Sargasso Sea
aatgcaattgtcgtttttagacggaaaaaccttatttgtgacgggaggtagtcgaggcatcggcttagctatagcaaagcgagctgccagtgagggagcgaacgtaacgctggcggctaagactgcagaacctcatccgagactcccgggaacggtttactcggctgcgaacgaagtccgtaagttgggagggaaggcgcttccgatggtagttgacataaggtttgaagagcaggttgaagctgccattaaac

SEQ ID NO: 203352 - DNA, 665 bp, Unknown
  Bacterial polypeptide expressing nucleotide sequence isolated from the Sargasso Sea
tgacaagaatggatttgttaaaattaacgcaggagttgtaaaagacgttgttggtaacataaagaaatttgcagatgatgcaatgattattccggttacaaacccattagatccaatggcacaaattgcatacaaaacttcaggatttgatagaagtagagtttttggaatgggtggaatgttagacttgtcaagattcaaacaattcatacatgaagcaacaggatattcccgtgaatcaacaaaagcattagtgattggagaacatggtgaaaacatgttaccgttaacaagatttgctacagtatcaggaattccattacctacattacttccaaaagaaaaacttgatgagattttcacagcaacaaaaggtgtagctgcagaagttatcaaactaaaaggagcaacagtacatgcaccaggaaatgcaatttcagccatgatagaatcagtagttcaggacaaaaaacaggtaattccagtttcaactaacttagatggggaatatggacaaaaggatgtttcaattggagttccagcagtagttggaaagaatggagttgagaaaatactcgagttagaactaaacgatgaagaaaaagaatggttcaacaaaggggttgacagtgtcaaaaatgcattgtcaggtgttgaattttaaa

SEQ ID NO: 203353 - DNA, 896 bp, Unknown
  Bacterial polypeptide expressing nucleotide sequence isolated from the Sargasso Sea
catggtcttggggcatgaaggtgcaggcgttgttgtggaggttggagctcttgtaaaagatatttctattggtgatcatgtagcttttatttttatgccaaattgcggcgactgtttgcagtgtcgttctggaaaaccgtcaaattgtgaacaaggaaacgctacaaatgcagcaggaaagctgttatcgggggaaagacgaattgcattgaatgggagagagataaatcactacgccggtgtcagttgttttgctgaatacgtaacggcagaccatcgatcagtagttaaacttccaaaagaagtgccattcgatattgctgccgttttttcttgcgctgttatcactggtgttggagcagtagtgaatactgctaaagttccgatgggagcttccgttggtgttgtggggctaggcggggttggactgtctgctatgcttggagcgcgggcgagcggtgcccgacaaatagtaggtattgaccctgtcaaatataagcgtgatggcgcaaaacagcttggagcagatatggtgtttgattccaaggaccgtgatattgtaacaaaaatcagggacgccacgtctggaggccttgattatgtttttgaagctgtcggtgaggtagaggcaatcgaacttgcttatgcacttacaggtcgaggcggtaccaccacttctagcggattatcgcacccttcaaagaatttttcagtgagtcatgtgcaacttgttgcggaagagcgaactattaaaggtagttttttgggtggctgtgttcccaaaagagatattccaaattacataaagatgtaccaggatggaaaattaccggttgaccagttaatcaaaggtcatatcaatctcgaaaacataaatgaggcttttgataagcttg

SEQ ID NO: 203354 - DNA, 517 bp, Unknown
  Bacterial polypeptide expressing nucleotide sequence isolated from the Sargasso Sea
atggctaatagattaaaaggaaaggttgctcttattactggtggagcagcaggtttcggaaaaaaaacagctgaaacactaaaaaatgaaggcgcagtagtttacatttcagacatcaatgttgatggcggggaaaaagttgctaaagaatttgatgtaaattttttacaacaagatgtaacaaagacagatgactggaaaagagtaatagaaaaaataaaggaatctgaaggtaaacttcatatcttggtgaataatgctggcattggttacatgggggatgttgaatcaactaccaatgaagcatgggatatggttcataaagtcgatttagattcagttttttatggatgtaagtatgctcttccattaatgagagattcaggaaatggttcaataataaatatttcctcaatatcgggtattgttgctggccataattttacagcctataacagtgctaaggcagcagtaagacatttatctaaatctgtagctcttcattgtgctaggacta

SEQ ID NO: 203355 - DNA, 541 bp, Unknown
  Bacterial polypeptide expressing nucleotide sequence isolated from the Sargasso Sea
atggcaaataaattattagaaaataaaatagcagttgtaacaggaggagccaccggtattggtaaagaaattgttagggagttagcagaaaatgatgctacagtaattcttgccgatagaaatgcccctctgggtgaaaaagaagctcaagaatttcaagcaaaaaaactagatgtcacatttatgcagcttgatatttcaaaaattgatgaagtgaaaaatttttttaatagtattaacaaaaaatattctagattagacattcttgtaaataatgcaggcattaaaattaatgctggtaaagtaactgaaacatcagaattcgaatggaatttaactttgggtaccaatttaacaggtacatttctctgttgtaaatatggcattccattaatggaaaagaatggtggctcagtaattaatttctcgtctggttctggaatcaaaggatcatataactctgtagcatatggtgtcacaaaagcaggaattattcatcttacaaaaacagtcagtctagaattgcaacacaaaatattag

SEQ ID NO: 203356 - DNA, 586 bp, Unknown
  Bacterial polypeptide expressing nucleotide sequence isolated from the Sargasso Sea
ttgacaaaggagaccagggtgaaagatctattttcggtggaagggaaaacggcggtggtaacaggcggttctcgaggcataggagaaatgatcgctgctggttacctatcaaatggcgcaaaggtttatatctcctcgagaaaagccaatgcctgcgatgagaccgctaaacgacttgcagaacagttcggtggtgagtgcgtttcaatccccgcggacatgtcttctctggagggcatagacgcgttcgtgaaggagctcaatgaacgggaatcaagcctcgacattctcgtaaacaatgcgggggtcgcctggggcgctccgctggaggaatttccagagctgggttgggacaaagtaatgaacactaacgtaaaaggagtgttttttctgactcaaaaattgttgccactcctagaggctggtaattcatcagagaagccttcatacgttattaacgttgggtccattgatgggattaaaacgccccgatttgacaacttttcttacggcccctcgaaagctgcggtacatcaccttacaagagtcctagcgtcacatcttgtgcgaagaaatattatgtaaa

SEQ ID NO: 203357 - DNA, 610 bp, Unknown
  Bacterial polypeptide expressing nucleotide sequence isolated from the Sargasso Sea
aatgataactaatgctgctgttttaagagaagctaagaaacctcttagttttgaggaattaaaaatagacgctccaaaagcaggagaagttagagtacagcttagatcatgtggagtttgtcatactgattattctttagcaaaaggtatactagaccatcaaccaattccttcagtgcttggtcatgaaggttcaggtatagtaattgatgtaggacctggtgtaagtaatgtcaaaaaaggagatcatgtagtgatggctccaattgctccttgtggacaatgtggtaggtgcttaaatcaagaaggagcatattgcgaaagagaagaaattagaggatggggaatacttcctgatggaagaacaccattaacagataaggatggaaatggcgttgcaatcggattcaatactggcttttattcagattatgctgttgtaccttcaactgcagttgcaaagattccaaaagatgtcccttttgaaatagcatcattgcttggttgtgcggttgtaagcggatatggtgcaatagtaaatactgctaaagtccaagttagtcaatcaacattagttgttggtcttggaggtgttggattaagtgcagta

SEQ ID NO: 203358 - DNA, 481 bp, Unknown
  Bacterial polypeptide expressing nucleotide sequence isolated from the Sargasso Sea
aatgaaattaaaagataaagtggccttagttacaggcggagcatcaggattaggtcaggcaaccgttgaagcgtttgtggcaaatggcgccaaagtagttattttagatcttaatgaggataaagctaacgaaattattaaagatttaggagatgataatattctttttatagccactaatattatggaagaagatcctgttgttgatgcagttaatcaaataaaagataaatttggagcattacatattgctgtaaattgtgctggtacaggctatccaggaagaatacttggaaaagaagcacctcatcctcttgatgcatttaaatttattattaatttgaatcttgtaggaacatttaatgttatgagaattgcagctgaattaatggataaaaacgatccgggttcaaaaggtgaaaaaggagtaataataaatacagcatctatagcaggttatgaggggcaaattgtcagtcag

SEQ ID NO: 203359 - DNA, 857 bp, Unknown
  Bacterial polypeptide expressing nucleotide sequence isolated from the Sargasso Sea
taatcagcatattgcgattaaaacaaaactaagaactcttaaagacgcaataaagggggcagatgtttttttaggtttgtcagcaaaaaatgtattgacccaagagatggtaaaatctatggctaaaaatccaatcatattcgcatgtgccaatcctgatcccgaaataaaacctgagttagtagacgaagtaagatcagatgcaatagttgcaacgggaagatccgactatcctaaccaagttaataatctaattgggtttccatatatatttagaggagctcttgacgttagagcaaaagagattaacgaagaaatgaaaatagctgcggcaaaggctatagcaacactagctaaagaagaagttcctgatgaagtagtaaatgcttatggtggagaaagacctcgttatggaaaagaatatattattccgtcaacttttgatcctagattaattagtagaatacctgctgcagttgctgaagccgcaatgaaaagtggagtagcaagaaaaaaaatttcagacattgaaacctataaagaccagttaactaacagactcgatccttctatgagcattatgcaaggaattaacgcacaacttaaaaaaagacctaaaacagttgtctttgctgaaggtgaagacaaaaacatgttaaaggccgcaattgcttacaagaatagtcgtttaggaacaccgatcgtaattggaaatgaaaaaagagtaaaagaacaattaaaagaaattggattagatgaaaattataaaattaaaattgtcaactcaactgataaggacaaaagagaactatataccaaaaaattatacaataagttacagagacaaggtcttttgg

SEQ ID NO: 203360 - DNA, 958 bp, Unknown
  Bacterial polypeptide expressing nucleotide sequence isolated from the Sargasso Sea
cggatgaacgaacgtcttgacatgaaggtgccgctcgattttacgacactttgcatcgaagactttctgaaggtcataaaccatctgatcgacctattcaagggtgatggctacaccgacgacatcgaccacctcggtaaccgacgcattcggtcggtcggcgaattgctcgggaatcagttctcgatcggtttgtcccgtatggcgcgcacgattcgggagcggatgagcctgcgagattccgatcagctgaccccgcacgacctcgtaaatgcgaggacggtgtcgacggtcgtccaggctttcttcgggagcagccagctgtcgcagttcctacagcagacgaacccgctcgacgagctgacgcacaagcgtcgtctttccgcgctcgggccgggagggcttacccgcgacagggccggattcgaggtccgcgatgtgcaccacacgcactacggccggatctgccctatcgagacgccggaaggaccgaacatcggtctgatcgcctcgctgtcgacatacgcgatcgtgaatcctttcgggttcttggaaacaccatatcgcatagtcgagaaagggaagctggtcaacgggggtatccagtatctctcggctgatcaggaagacaagcagacgatcgcacaggcgaacgcggccgtcgacgggcgagggcgcttccaggaagatgtgatccaggttcgccgtcgaggcgactttccggtcgtccgtcccgaggagatcgggtttatggatgtctcgccgtgccagttggtaagcgcagccgcggctttgattccgttcctcgagcacgacgatgcgaaccgcgcccttatggggtcgaacatgcagcgccaggcggtcccgctcctcagaacagccgctccctttgtcgggacgggtatggagcgacgggttgcgatcgattcgaaggccgtcgtcacggcacgccacgaag

SEQ ID NO: 203361 - DNA, 723 bp, Unknown
  Bacterial polypeptide expressing nucleotide sequence isolated from the Sargasso Sea
ttgctttggccatccaagccctgaagtaatgccagacagtgctcgcaaagccgtttccgatgctattatagctacgggaaggagcgattttcccaatcaggtaaataatgttttatgttttccatttattttcagaggggcgctagacgtagaagcaactgaaataaacgacgaaatgcaattcgcatgcattaatgcaatagccgagattgcccgaacgactacgagtgccgaagcggcagcagcatatcaaggcgaatccttaacttttggaccagaatatctgatacctaaaccttttgatccaagactatcagttgtcgtaccaaccgctgtcgcacaagcagccatgaaaagtggtgtcgcaaaaaaaccaattccagatttagaaagctataaagacaaattgaaagaaggcgttttcaagtctgctctcctcatgcgtcccgtttttgaaaccgcaaaaagggtgaagagaaggattgtttttgccgagggtgaagatgaacgtgttttacgagcagcccaagctattttagaggaaactagtgagcaaccaattctaattggtcgaccatcagtacttgaacaacgctgtgaacgtcttggtttagttgtccggcccggcagagattttgaaatagttaaccctgaagacgacccccgctaccgagactattggacgagttatcacgaaaaaatgtgtagaacgcggcattacgc

SEQ ID NO: 203362 - DNA, 769 bp, Unknown
  Bacterial polypeptide expressing nucleotide sequence isolated from the Sargasso Sea
gaagcaaggtattttttttgcactgtggagtcaatgcccaacaacatttcagtagattgtgtaataattgatgaagtccaattatcagctgattatgaaagaggacatatttttactgataaaattttgaatttaaaagggaattttcaaactatttttttaggatcgttaaatatagaaaatatattaaaaaaaatttatccaaatattataattgaaaaaaaaaatagattttctcaacttacatttcttaggaaacaaaatttttctaaacttgaacctagatctgcaataattgccttcaatataaataaagtttatgaaatagcagaaaatataagaattcataaaggtggagctgccgtagttttaggttctcttagcccaaggactagaaatgctcaagttgaagtatatgaaaatcaaaatgttgattaccttgtggcaactgatgcaattggaatgggtttgaatcttaatattaatcacgtaagtttttcatcattagaaaaatttgatggtagatataatcgtaatttagccccaaatgaaattggccaaatcgcaggtagggcaggaagatataaacaagatggaacttttagttatactaaggaagctgggaatttagatccaatagtaatacaacaaatagaaaaccaccaatttgaagatattcaaaaaatttactggagaagtagtgatctagattttaattcaattgaactattattatcatcattaaagaaataccctataaaaaaatttt

SEQ ID NO: 203363 - DNA, 730 bp, Unknown
  Bacterial polypeptide expressing nucleotide sequence isolated from the Sargasso Sea
ggttaaatcaatggcaaaaaatccaattatatttgcttgtgcaaaccctgacccagagattagcccagaagaaattaatgaagttagagatgatgcaataatagcaacaggaagatcggattaccctaatcaggtaaataatttaattggatttccttatatatttagaggtgctttggatgttaggtcaaaaacaataaatgaagaaatgaaagttgcggctgctgaagcgattgcaaaacttgcgagggaagatgttcctgatgaggtggtagctgctatgggtggggaaagacctcattatggaaaagattatataattccatctacatttgatccaagattaattagtataatcccagctgcagttgcaaaagcttctatagaaagtggagtagctagaaaaaatattagtaattttgaaatttataaagatcaacttaaacaaagactagatccaacagtaacaattatgcaaggtattaattcattcattaaaaaaaatcaaaaaagaattgtatttgcagatggagaagatgaaaataatttaaaagcagcaatagcatttaaaaattcaaaattaggtattccaattttaattggaaaagaaagtaaaattaaagaacaaattaaaaatatcggatataatgaaaattttgatattgagattgtaaattcaaaagatactaagaaaaaagatcgatatgtccatcatttgtttaaaaaactc

SEQ ID NO: 203364 - DNA, 478 bp, Unknown
  Bacterial polypeptide expressing nucleotide sequence isolated from the Sargasso Sea
attgaatcaaggagttgatgtgaatgtgttagcgcctgaaaagacagctgtggttactggtggaagccgcgggattggttatgcgactgctctacggcttgctcaggatggacttcgggttatcatatgttctcgcagtgaggaatctgtcaaaaagtctgctgaagaaatcgcggttacttcaggtaacgattctgtgcttgggatctgtgctgatgtttcatcagcgtgcgaggttgatcggatgttcgctgaagttgaaaattttgcaagtggatcgccgagtattcttgttaataatgcgggatatttggagttggaagcacttattggaatgagtgagtctcattgggaccgtgtcataagtcaaaatttgaagtccacttttctgtgcagtagaaaagcgatggcaatgatggctgcggcaggtgtttcagggaacattgtgaatgtaagctcattagcaggaattcgaggt

SEQ ID NO: 203365 - DNA, 566 bp, Unknown
  Bacterial polypeptide expressing nucleotide sequence isolated from the Sargasso Sea
attgttcgatgctagtaataaagtagctctcgtaacaggtgcgactggaggaattggtaaagctactgtccaactctttttggattgtaatgccaaagtaattacaacaggaaggtctcaagaaaaacttaattctatttataaagacaaagaaaaagttttcacggttcaagctgacttttctaaagaagaagatgctaaagctgctattaaaaagggattaattcaatttaatagaattgattatgtaattcattgtgcgggagcagtaggtagtggctctttctcagaaacatccatagacgaatggcacaaattgttagatataaatctgacatcagcttttttactctgtagagaaacctactctgctcttaaaaagacttcaggatctttagttttagtttcttctgtaaacggatcacatggtggctcttctacctctggaccagtttatgcaatttcaaaggcaggtattaacaacatgactcgttacctagcgaaagaatggtcaaaagataatattcgagtaaattgtgtttcacctggaccagttgacactccca

SEQ ID NO: 203366 - DNA, 718 bp, Unknown
  Bacterial polypeptide expressing nucleotide sequence isolated from the Sargasso Sea
atgaaaaaaattctaattacaggagcttctggtggaataggctcatcaatcgcagataagttttttaataataaatatgaaatgattcttacatcgtcatcagataccactcttgatcaattaagagaaaaatatggcaataataattattattattctttagattttaaaagaccagatgaaaataatatagttttaaaaaaaatttcagaggaacatcaagatttaaatgtaattgtaaataatgcagggattactgatgactctctgcttctaagaatgaaaacagatcagtggaataatgttattcaagcaaatttatcatcaaatttcacaatcataaaagccttacttcctaatatgattaaaaataaatcaggaaatattataggtatatcatctgttgtagcaacttctggaaatcccggacagtctaattatgttgcggctaaatcaggaatgataggattctataagtctattgctttagaggttgcttctagaaatataaatgtcaatatagtttcaccaggttttataatttcacctatgactaataaactcaatgataaacaaagaaatattattttagaaaaaattcccatgaaaagattcggtgaatcaaatgaaattgctgatttagtttactttttatctagagatgaatctagatatataacaggtcaaaacattctatataaagcggtggaatgttgat

SEQ ID NO: 203367 - DNA, 877 bp, Unknown
  Bacterial polypeptide expressing nucleotide sequence isolated from the Sargasso Sea
aataccgggatatcaaaaaaaaatataataatgttagatcgaaaaggagtaattcatagtggtagaaatgatcttaataaatggaagtcaaattatgcaataaaaactaatgatagaacattaaatgatgcaataaaaaatgctgacgtttttttgggactatcttctgcgggtgttttaaaaaaagaaatggtaaaaaaaatggctaaaaatccaataatctttgcttgtgcaaatccaaatccagaaattaatcctgaagaagttgaagaggttagagatgacgcaataatagctactggaagatcagattatcccaatcaggtaaacaatttaattggctttccatatatatttagaggtgctttagacgtaagagcaaaaacaattaatgaagatatgaaagtagctgcagccaatgcaattgcttttttagctagggaaagagttcctgacgaagtagttgctgctatgggtggcgatagacccaaatatggtaaagattatattattccgtcaacatttgatccaagattaataagtgtaattccagttgctgtagcaagagcagctataaaaagtggagtagcgagaaaaaaaatagaaaattttgatttatatgcagaacaactaaaacaaaggttagatccatctgtaaccataatgcaaggaattaactcacaaattaaaaaaaatcaaaaaagagttgtatttgcggatggtgaagacgaaaataatttaaaagctgcaatatcttttaaaaatagtggattgggagtccctataattatagcaaaagaagaaatagtgaaaaaaaaattaaaagaaattggttacagtgaaaattttaatattgagattattaattcaaaaaata

SEQ ID NO: 203368 - DNA, 723 bp, Unknown
  Bacterial polypeptide expressing nucleotide sequence isolated from the Sargasso Sea
ataacaaatatgccgttgtaactggctgtaatcgaggtattggtcgtgccatttgccaaaacttcttaatacagggcgcaagtgttattggttgttctcgggaagtcaataaacaactacaaatggaaatggctagttttggacaaaactttcacaatattcaacttgacgtacaagatgaaacctcgattaaagaagcattaaaagcaattaaaaacatcacaaaagaagttgatatcttagtcaataatgctggcattgcacatggtggtatttttcaaatgactccgctggcagatatgcgaagagtctttgaggtaaatgtgtttggagctgttgcagtaacacaagcgatagcgcggttgatggtccgaaagaaatctggttcgatcataaatatctcgtcaacagccgctcatttgcctgatcgtggaaccatgacctatggtgcgagcaaggctgccttatctcggattactgaaagcatggcacaggaattgggcgctatgggtattcgcgcaaacaccatagcaccaggagttactgaaactgatatggcaaagcaaatggatggggaagcaaaagagcgtttgattagtgcatctgccttgaaaaagattgcacagcccaatgacattgcaaatgttgcccttttccttgcatctaatctatcatcgcatatgacaggtcaaattctgatcgtcgacggaggaattctgtaaa

SEQ ID NO: 203369 - DNA, 742 bp, Unknown
  Bacterial polypeptide expressing nucleotide sequence isolated from the Sargasso Sea
tgatggtgatgccgcagatctcgtcgtcgaagaaatcaagtcgaacggtggcgaggctatcgccaacaaagcgtctgtatcagatcgtgacggcgcaaagtctatcgttgacgatgcggtcaaccacttcggcaccctcgacatcctggttaacaatgctgggaacctcagagataaaagcttcaagaacatgacgttggatgactacgacgccgttctggatgtccacctgcgtggcaccggatacgtgacgcacttcgcgtggcccgtgatgtatcagaagaactggggtcgcatcgtgctcacaagttccacttccggaatcttcggcaacttcggacaggcgaactatggggcttccaaaatgggaatgctcggattgatgaatgttctcgccatcgaaggtgcatcccacaacatccgcgtgaactgcctcgcaccaggtgcggcgacacgcatgaccgccagcgtccccggtgcgaccttcgaccccaaggatccacccgccgaacgtggtccttctctagtgagtcctgcggtactctatatgtgcactgaagacgccccatctggatgggtcatgcacgctgccagcggtcgattctcacgctcgcagattttcgccaatgaaggcgtcaagttcgatgcagacgaggcgactttcgagaaactgatggacaatattgagcaagcaactgacatgtccgcggctgtcggtcgtgaaccgacgcgtcgaggctga

SEQ ID NO: 203370 - DNA, 151 bp, Unknown
  Bacterial polypeptide expressing nucleotide sequence isolated from the Sargasso Sea
tatgaaaaaaaaaatttcactaataggagctggacaaattggagggacattagcacatttaattagcataaaagagatagcgaatgtggttttatttgatgttgccgagggtattgctaaaggtaaagctctagatatttcccaatcaatt

SEQ ID NO: 203371 - DNA, 904 bp, Unknown
  Bacterial polypeptide expressing nucleotide sequence isolated from the Sargasso Sea
gcctctcatgagttgacaattagaaaaaacacagtggcgatcgttagcgacggcaccgcagttctcgggcttggtgatattggtccagaggctgctatgcctgtcatggaaggcaaagcactgttatttaaagaatttgccgatgtcgatgcattcccgatctgcctcgacgttgaaacaccggaccaaattattgagacagtcattcggcttgcaccgactttcgggggaataaatctagaagatattgctgccccgggtgccttcgaagttgaagcagaactgcgccgggcactcgacataccggtattccacgatgatcaacacggaacagcggttgtcgctttggctgctttggagaactcggttcgtctcacaggaaaagatttcaaagatttgcgctgcgtcatcttgggtgccggagcagcgggcgttgcgtgcgcaaaaatcctgttagggcgcggcatcggcgatgttgtggtctgtgatcgacaaggcacaatttaccctggccgagataatttgaatgccgccaaagaatggatcgctgataacaccaacaccgatcaaattgccggcacagttgcgcaggcaatggcgggtgctgacgtgttcatggggcttagcggccccgggcttgtgacccgagatgacgtcgctgcgatggctgaaaagcccatcgtcttcgcaatggcgaatcctgaccccgagatcctcccagaggagattggtgatattgcggcggttgtcgcgacaggtcgcagtgattaccccaaccaaatcaacaacgtacttgcgttcccagggatctttcgtggcgcatttgattcctcagccactgatataaccgaaggaatgaaaattgctgcggcgtcggctatcgcagcagctgtatctagtgatg

SEQ ID NO: 203372 - DNA, 856 bp, Unknown
  Bacterial polypeptide expressing nucleotide sequence isolated from the Sargasso Sea
aatttatttaaaaaaataggtgttaaaaatgaaaatgtaattatgtgtgacagaaaaggagttgtttacaaaggtagagataatgtagatcaattcaaatctgctcacgctgcagaaacaaaattaagaacgcttgaacaggcgatgaagggtgcagatgtttttttaggtctttctgcaaaagatgtggtcaataaaaagatgataaaagagatggctacaaatgcaattgtctttgcttgcgctaacccagatccagagattaaacctgagttaattggtgaagtaagaaatgatgtaattatagccactggaagatctgactatccaaatcaagtaaataatttaattggttttccttacatttttagaggcgctttagatgtaagagctaaaatcataaatgatgaaatgaaagttgctgctgctagagcaattgctttgctagcacgagaagatgttcctgatgaggtagtttcggcttatggaggtgagaggccaaaatacggaaaaaattatattattccatcaacctttgatccaagattagtgagaataataccttcagcagttgcagaggcagcaatgaaaagtggggttgcaagaaaaagaattgaaaatttagagggttataaagatcaacttgcagctaggttagatccatccatgtcattaatgcaaggtattaacgctaaagttaagaaaagtcctaaaaaagtggttttcgctgaaggggaagatgaaaatatgttgaaagctgctatcgagtttggaaagacaaaacttgggaagccagtagtcattggtaacgaaaaaagagttaaggaaacactaaaaaaaataggtttagatgaaa

SEQ ID NO: 203373 - DNA, 940 bp, Unknown
  Bacterial polypeptide expressing nucleotide sequence isolated from the Sargasso Sea
atctgcacatgcaataaaaacaaaatgcagaactcttgaagatgcattaaatggagctgatatttttttcggtctttcaattggtaacattatcagtcaaaaaatggttttatctatggcaaaaaaaccaattatttttgctatggcaaaccctgaaccggagatattacctgaaaagataaaagaatgtagagatgatgcaataatagcaactggtagatcagattatccaaatcaggtgaataatgttctcggatttccatatattttcaggggtgcgttagatgtaagagctaaaacaattaatcttgaaatgaagattgccgctgccaatgccattgctgatctagcaaaagaggatgtgccagacgaagtggccaatgcatatcctggaaaaaggccacaatatggtccagattatattattccttctccttttgacccaaggttaatcagtaaggttccacctgctgttgctaaagctgcaatggataccggggttgcaagaaaagcgattgttgacatggaaaactattctaatgaattatctgcaaggcttaatccctcagctggtcttcttcaaaaagtttttcaagaagtaaaagaaaatccaaaaagagtgattttcactgaaggtgaagaggaagatatgattagggcagcagtaatatatcttaataatagaatgggtactccaattttaattggaagagatgaagttattaaaagtaaaatgaaagatatgggtttagatttttttgatcaaatggaaattcatagtactaggaataaaactgagcatgaccgctacgcggatcatatttatcatcgtttacaaagaaaaggatttctaaaaaaagattgtttagaccttttaattagagaaaggaatgtttttgccgcgtggtatggtatctctaaaagaagccgatgcgatggt

SEQ ID NO: 203374 - DNA, 115 bp, Unknown
  Bacterial polypeptide expressing nucleotide sequence isolated from the Sargasso Sea
atgagtaaaaaaatatctttaattggtgcaggacaaattggtggaactttagcacatctaattgccatcaaagagcttgctgatgttgttttgtttgatgttgttgagggtttgg

SEQ ID NO: 203375 - DNA, 589 bp, Unknown
  Bacterial polypeptide expressing nucleotide sequence isolated from the Sargasso Sea
atgtacttaaaaaaatataacttaaaaaataaagtagcactcgttactggtgctggtaaagggctaggcagagcttgtgctattgcgttagctgaggcaggtgcaaacctattaatagttagtagaacaaaaaaagacttagaacaggtgtctaaaatagttaaaaaatttagagtaaaatgcaaatcttatgtttgcgatataacaaattataatgaaattaaagaaataataaataagcagctaaaaatagatattttaattaacaatgcaggtacaaatattccagaacatttcacaaaagtaaaaagaagaaatatggaatttttagtaaaagtaaatactgttgcggcatttaatatagctcaactttgtactttaaaaatgattcaaacaaaaaacagaaaaaaaataggtggatctattgtaaatatgtcatctcaaatgggtcatgttggtgggcctataagaagtgtttataatatgaataaacatggcttagaaggtcttacaaaaggaatggctattgacctagcaaaacataacattagagtaaatactgtttgtccaacttttgttgtaactccaa

SEQ ID NO: 203376 - DNA, 580 bp, Unknown
  Bacterial polypeptide expressing nucleotide sequence isolated from the Sargasso Sea
ggcggtggcgattgaggcggatgtcagcgacccggacgcggtcgaggaaatgttcgcctgcatcaccgccaccggcccgctgcacggcctggtcaacaacgctgggattattcaggagcagtcctttctggacacctcggaagaggattggcgacggatcatggcggtcgatctggatggcgtctatcgctgctgccgctgcgcgctggaaagcatgagcggcgcgggccgtggcgccatcgtcaatatcgcctccgagctgggtcagctggggcgcgaaaactacgtggcctactgcaccgccaaggcgggtgtgattggtatgaccaaggcgttggcgcgcgagtttgcgccgcagattcgcatcaacgcggtggcccccggcccggtggaaaccgccatggtgtcgctggagcacatgagcgaggagtggattgccaaggagctggccatcccggcggcgcgccttggtcagcccgaagagattgcggcagcggtgtgctttttgttgtcgccggcggcgagctttttcaccggacagacgctgggcgccaatggtggtgcctggatgggtagctga

SEQ ID NO: 203377 - DNA, 724 bp, Unknown
  Bacterial polypeptide expressing nucleotide sequence isolated from the Sargasso Sea
atgagcagagtagcactcgttacaggtggaacacgcggtattggtgaagcaatctgtacgacactgaaggatgcgggttataccgtagtggctaactatggcggaaacgatcaggcggcacaggaatttaccgagcgaacaggcatcgcggcgatgaaattcgacgtgtcagactttgagaaaactaaagccgccatcgagcagatcgagtcggatttcggaccggtagatgtgctgatcaataacgccggtatcacccgcgacggtaccatgcaccgtatgacgtttgaacagtggaacgcggttatccaaactaacctggcttcgtgttttaacacttgccgggcggttatcgaagggatgcgcgagcgttcatttggccgcatcgtaaacattggttcaatcaatggccaggcgggtcagtatggccaggtgaattacgcggcggcgaaatccgggatccatggcttcactaaagcgctggctcaggaaggtgctgcaaaaggcatcaccgtaaatgctattgctccaggctacattgatactgacatggtacgcgcagtaccagaagacgtactgaagaaaattgttgcgaaaatcccggttggccgtttaggtaagccagaagatatcgctgacggtgtgttgttcctgattaaagatgagtcgagctttatcacaggctcaacgctgtctattaacggcggtcagcacatgtactaaa

SEQ ID NO: 203378 - DNA, 472 bp, Unknown
  Bacterial polypeptide expressing nucleotide sequence isolated from the Sargasso Sea
actgaaggataagggcattattgtcacgggcggaacccgcggtatcggcttggccattgccaacgcgtttgcggcggaaggtgccaacatttctatctgtggacgcacgcaagtgtcgctcgatgcggcgaaggaaaagctcgccggacacggcggcacagtgcatgcggctgcctgcgatgtcggggacagcgcgtcactcgaggtctatatgaatgatgctcacgcggcgctcggccggcttgacgtgctggtcaataatccttcgggtttcgggcgcaccgacgacgatgagggatggaagcgttccatcgatatcgacctgatgccagtcgtgcgcagtagccacatcgccattcccatgattgaacaggttggcggcggcgctatcatccacatctcgacgatctccgctctgactgagagcatgcgcacgccgccctatggtgctatcaaggccgctgtgaaccac

SEQ ID NO: 203379 - DNA, 902 bp, Unknown
  Bacterial polypeptide expressing nucleotide sequence isolated from the Sargasso Sea
tgctgtcgaaacacaactaaggggccttgatgaggcaattaaaggtgcagatgtttttctagggttgtcagcaaaaggcgtacttaaaaaagaaatggtaaaaaatatggcacaaaatccaatcatatttgcatgtgccaatcctgatcctgaaattttaccagaagaaattaatgaagtaagagatgatgcaatagttgcaacaggaaggtctgattatccaaatcaagtaaataatttaataggatttccttatatttttagaggtgctttagatgtcagatccaaaacaattaacgaagagatgaaagttgcagcatcactagcaatcgccaaacttgcgagagaagatgttccagatgaagtagtagctgcgatgggtggtgaaagacctcattatggaaaagattatattatcccatccacatttgatccaagattaataagtgttatcccagctgctgttgcgaaagctgctatggaaagtggcgttgcaagaaaaaatattgaaaatttcgaaatttataaagaccaactaaaacaaagactagatccaacagtaactattatgcaaggtataaattcatatattaaaaagaatcaaaaaagaattgtatttgctgatggtgaagacgaaaatactttgaaggctgcaatagcatttaaaaattccaagttaggaattcctattctaattggtaaagaaagtaaaattaaagaacaaattaaaaatatcgggtacagcgataattttgatattgaaattgtaaactcaaaaaatgaagagaaaagaaataaatacgtgaaacatttatttgagaaactacagagagagcaaggtttgctggaaagagattgtgatagattggtcagaaatgatagagttatatgggcaactagta

SEQ ID NO: 203380 - DNA, 811 bp, Unknown
  Bacterial polypeptide expressing nucleotide sequence isolated from the Sargasso Sea
atgaaaaaaatcttagtaataccaggagatggaataggattggaagtgattccagctacggttagtgtgatagagtcactaggattaaaaattgagtttattaattcaaatgcaggggatgagataaaaaaacaaactggaaatgcactaccagtagaagtacttgaacttgtggaagaagtagactccatactgtttggagcagcgggtgaatctgcagcagatgtgatacttccacttagaagggaaatagactcatttgtgaatgtgaggcccgcgaaggcatatccaggtgtaaacgcacttcagccaaagacagatttggtaatacttcgggagaattcagagggcgtttacacagggattgaatccagagtatcagaagaaatggcaactttaacaagagtagtaactaaaaccgcttctactagattggcagaatattcttgtgaatatgtgaaagcacaaggattggataaatttactattgcccacaaagataatgtgatgagaattacagatgggctctttagagaaactgtagagtcagttgcatctaaaaaaggtgtgaaaacagaatctgcaataatggatgcgcttgctatgttgatggtgatgcacccagaaaattatcaggtgattgtttgccctaatttggcaggagatatattatcagatttggccgcgggattggtagggggtcttggtcttctacctagttcgaacattggtcctaaatgtgctctattcgaaccggttcatgggacggctccagacatagcagggagggggatctccaatccaatagcgt

SEQ ID NO: 203381 - DNA, 761 bp, Unknown
  Bacterial polypeptide expressing nucleotide sequence isolated from the Sargasso Sea
agataaagtagctcttgttactggtggtgcatctggcttaggacaagcaactgtagaagcttatgtagctaaaggggctaaggcagtaatattagatattaatgaggataaagccaaagaaataataaataatttgggagaagataatgttatgtttatctctactgatattatgaaagaagatcctgtaatagaggcagtaaatcaaataaaagaaaattttggaggtctgcacattgcagttaattgtgctggcactggatatccaggaagaatattaggtaaagaagcacctcatcccttagatgcctttcaatttatcattaatttaaatcttgttggaacctttaatgttatgagaatagctgctgagttaatggataaaaatgagcctgatcaaaaaggtgagaagggggtaatcattaatacagcttctatcgcaggtattgagggtcaaattggtcaatcagcatacagtgcatcaaaagctggtgtaattggattaacaataactgctgctagagatttagcaaggcatgcaataagagtttgtaccatagcgccaggaatttttgatacacctttaatgcaattagcaccagataaagttagagaacctttattggagtcaacccagttcccgcatagatttggccagcctaatgagtttgctgatttagcagtgcatatcgtagagaacacatatctgaatggtgaaacaattagattagattctggtatgaggatgaagcctagataaa

SEQ ID NO: 203382 - DNA, 919 bp, Unknown
  Bacterial polypeptide expressing nucleotide sequence isolated from the Sargasso Sea
tttattgatgacttagtagaaaaaaatataaaaataggaagtatagtaattagagcaacacctattatggaatgtttgacgggatttatgatagcaggatttatattcatatctggaaaactaattgctacaggtgaactaggagtgaacaattttttttcttttcttgcagctatgatgcttgcataccaaccaataagatctttagctacaattaatatggctgcctaccaaggtgcttcggcttttaaaagaatcagtgaaataatcgataaagagattaagattaaagagttacctaatgctccatcattgattttaaaaaactcaaacataagattccatcaagttggatttaaatataactctacaaatgaaaaagccattaaagatgttaactttgatattaaaggacaaactatgactgcttttgtaggtcacagtggagcgggtaaaagtactattataaatcttcttccaaggttttatgaacctcaagaaggttatatcaagattgataatcaggacattaaagaagtatcattaaaatctcttagggagaatttatcattagtaagtcaagatgtagtactattcgatgatacaattaaaaataatattgcttacgctaaatctaatgcatcagataaagaaataatcaatgcttgcaagtttgctgcagctgaagaatttattaaaaaactaccaaatggatatgatacgatgataggtgaaaacggcataagactctctggtgggcagaaacaaagaatatcaatagctagagctattttaaaagagtcaccaataatattgcttgatgaagcaacctcatcacttgacgccgagtctgaagaaattgtgcaaaatgctataagtaatttagtaaaaaacaaaacaactttagtaattgctcata

SEQ ID NO: 203383 - DNA, 253 bp, Unknown
  Bacterial polypeptide expressing nucleotide sequence isolated from the Sargasso Sea
aatgagcaaaatatctttaattggagcaggccaaataggtggaactttagctcatttaattggaataaaagaattagtaaatgaggtagttttatttgatgttgcgagcggtgttgcaaaaggaaaagcgttagatattgcacaatcatcatctgtagatggttttgatgttaaattttcaggtacggatgattatgaggacataaagggctcagatgttattaaaattacagctggcgtgccgagaaaacct

SEQ ID NO: 203384 - DNA, 493 bp, Unknown
  Bacterial polypeptide expressing nucleotide sequence isolated from the Sargasso Sea
ggaagaaaaggtctaaataaatggaaatcaacttatgctatagaaactaaaaacagaacattgaatgacgcaataaatggtgctgatgtttttttaggtttatcatctgcaggtgttttaaaaaaagaaatgataaaaaaaatggcaaaaaatccaattatttttgcctgtgctaatccagatccagaaataacacctgaggaagttgaaaaagtaagaaaagacgcaataattgcaactggaagatcggattatccaaatcaggtaaataatttaattggatttccatatatttttagaggcgcactagatgtaagagcaaaaactataaatgaggaaatgaaaattgctgcagtaaatgctatagcatccttagctaaaaaaagagttccagatgaagttgttgcagccatgggaggagaaagacctaaatatggaaaagattatataattccatctacatttgatccaagattaataagtgttattcctg

SEQ ID NO: 203385 - DNA, 594 bp, Unknown
  Bacterial polypeptide expressing nucleotide sequence isolated from the Sargasso Sea
ctcaagattactttgctgcagacgtatcaaaagaatcaaattttaaatccttattaaaatatactttcaaaaaatataagacagtagatataattgtaaataatgcaggaattactcacaaacccaaaaatatggaagctgtaacaggaagggaatttgataaagtatttaatgtaaatgccaaatctgtttatctaagtgccaaatattttgttcctaggatgaagaagttaagaagaggagtaattttaaatgtagcatcaacggcaggtctgtcgcctaggcctaaattaaattggtacaatgctagtaaaggatggatgattacagcaacaaaagctatggctattgaacttgccccttttaatgtaagagttaatgcaattgcacccgtagccggagtaacgccattactaaaatcatttatgggcggagataccccccaaaaaaaaaaagcatttttgtcaacaattccaatcggtagattctctacccctcaagatatgggaaatgcagcatgttttttatgctcagatgaagctactatgattactggaacgatattagaagttgatggagggagatgtatttaaa

SEQ ID NO: 203386 - DNA, 913 bp, Unknown
  Bacterial polypeptide expressing nucleotide sequence isolated from the Sargasso Sea
tgtgaatgccattgctgatgataccagttcagtctacgactatacaagtaagggaaacatagtcgctgtcatatctaatggcactgcaatacttggcctcggaaatttaggtgcccatgcttcaaaaccagttatggaaggtaagtctgttttatttaaaagattttcggatattgactcgatcgatttagaaattgacactgaagatgctgacgaatttattaattctgtaaaatatctaggaccatcttttggaggtattaatcttgaggacataaaagctccagagtgctttataattgaagactcgttaagagaaataatggacataccaatttttcatgatgatcaacatggtactgcaatcatatctgccgctgcactcataaatgcgatggaccttaccggaaaaaaaattaatgaagttaaaattgttgttaacggtgcgggcgctgctggtattgcttgcctggaactcttaaaagcaatgggaatgcctaatgaaaatgcaatattgtgtgataccaaaggtgttattcatactgaaagaaaagagaatatgaatcagtggaaatctgcccatgcagtaaaaacaaaatgtagaagtcttgaggatgcactaaatggagctgatattttttttggtctttcaattggtaacattattagtcaaaaaatggttttatctatggcagaaaaaccaattatttttgcaatggcaaatcctgaacctgagatattgccagaaaaaattaaagaatatagagatgatgcgattatagcgaccggaagatccgactatcctaatcaagttaataatgttcttggattcccgtatatatttagaggtgcattagatgtaagggcaaaaacaattaatcttgaaatgaagattgccgcagctaaggccatt

SEQ ID NO: 203387 - DNA, 226 bp, Unknown
  Bacterial polypeptide expressing nucleotide sequence isolated from the Sargasso Sea
tatgtctagacctaagatagcattaattggtggtggccaggtaggtggtaatattgcccttctttctgcacaaaaagaacttggtgatatagtgattgttgatattccagaagctgaaaactttatgaagggtaaggctttagatatatctcaattacttcctcatgatggaaaagattctaaattatctgggacttctaactttgaagatattcaagattcagat

SEQ ID NO: 203388 - DNA, 876 bp, Unknown
  Bacterial polypeptide expressing nucleotide sequence isolated from the Sargasso Sea
cttgggggttggaaactttcatagggctcaccaggccctttacattaataattacattgaagaaaccaaggacgcaaattggggaatttgtggcattaatttaagaaaagaagaaagagaaaaatttaacttcctgaaaaatagagaaggaaaatatatattaaaaactgtttctacagatggagataatgaattttctgagatccattcaattcaaaaattaattgattggagcaaagataaagaagaagctgaaaatattcttacagataaaaatgtggaaattcttacaatgactgtaacagaaagtggttattatattaatgaagagaataatttaaatcttcacttacaaattgttaaagataatattgaacaaaaagaaaataccattattttttcatttctcttatctgcattaaagaaaagaatgttatcaatagataaagaaataacacttttgtgttgtgacaatattagagaaaatggattgatgcttgaaaaatgtcttaaaaaatatgtcaaagaatcaaatgagttaggattattacaatggattgaaaagaaggtaagttttccttcttgtgttgtagatagaattactcctagagcaccagagtatttagcaaatgaagtaaaagagaaatttaatattgatgaaaaatgctcagtaatggctgagccatttattcaatgggtaattgaagataattttattggtaaaagacctgatcttgaaaaagtaggtgtgcagtttgttaaaaatgtttttccttatgaagaaacaaaaataagaatacttaatggcggtcacgttgctttaagttacattggcgctcttaaaggccatacaacatatgataaagcaatatgcga

SEQ ID NO: 203389 - DNA, 907 bp, Unknown
  Bacterial polypeptide expressing nucleotide sequence isolated from the Sargasso Sea
gctactacctcaacttttgcaccacacttaaaagggatatctgaaaatggtaggtcattcttttaccagggaatcataccagataaaatatcttcatatgtcaagaaattcagaggttggatctgtgaagaagactttacaaaacatacttgcagttgggttgaaccaatatcatcaaattacaggagacatgatgtatgggaatgtcctccaaatggacagggcattgctgcacttatagccttgaacatcattgaaaatattgatttttctgacccttcaattgaacctgtacttcagatccattataaaatcgaagcaatgaagattgcctttcaggacgccctttggtatgtagcagaccctgaaaaattgaaaattcctgttgatgaactgctatccaagacttatgcgcagcaaagatttgatgaaattaagaaagataaggcaaatatggaatacaggaaaggcaattttaaacagtctggagacacagtatacgtaagtgtcatagatggaaatgggaatgcgtgttcatttatcagtagcctttatgaatcatttggaacagggctggttgttcctgatacgggaattgttctgcagaacaggggtgcactattttcaactgacactgaccatccaaattttcttgaaccagctaaaagaccatacaacaccatcattccaggcatgattaccagaaacaggaatcttgtaagcagcttcggcgttatgggaggttttcagcagccacagggccatttgcaggtagtatcaaacatggttgacttcggcatgaatcctcaggaggcacttgattctgcgaggtttaggatagatatcaatgacgaaatcacttttgcagaggattcttttgatcaggaagttatttcaggtttgaagt

SEQ ID NO: 203390 - DNA, 698 bp, Unknown
  Bacterial polypeptide expressing nucleotide sequence isolated from the Sargasso Sea
cggcataggtaaggaaatcctcaaatctctggcttctgatggttttgtggttataggtacctcacgaagccaagacggattaggtcatattaacgaaaccatcaatgatataggagcaaaaggctgtgggctagaatataatgtaaatgataaagattctctaccaagcctcaatagcactattaaagataagtttggacctgtgagtgtattaataaataatgcaggtattactaaagataatctattgataagaatgaatgagaatgaatggaatgacgtattagatactaatctcaactcaatttttagactttctaaagaatttgtaaaagatatgatgaaattaagatatggtagaattataaatattggttctgtggtagggttgactggcaatgcaggtcagacaaattattctgcgactaaatctggaattttaggctttacaaaatcactagcaaaagaagtagcgtcaagaaatattacagtgaattctgtatcaccaggttttatagatacagatatgactaaccaactcaaagatgatcaaaaaaatgcacttatccaatcaattccacttggaaggatgggtacagcaactgaattagctaaaactgtgagttttctggcttctgaagaagcatcatatattactggtgaaaatattaatgtaaacggaggcttatatatgtgaa

SEQ ID NO: 203391 - DNA, 613 bp, Unknown
  Bacterial polypeptide expressing nucleotide sequence isolated from the Sargasso Sea
atgagcaaatgcctgatcgtcaccgggggaagaagaggaatcggcgcggaagtttcccgtaaagcaagcaaacaaggatactcggtctgcgtcaattttcatcgcgatcagacttccgcgcaaaaactggttcgtgaactggaagaggatggggtcaatgccctgacctatcaggccgatgtgtcacaggaagagaaggtcgtagctctttttcaaaccgtcgagaaacacttgagaaccccagaggctctggtcaacaatgccggaattctcgactttcagacccgtgtcgatggcatgaacgcaaaaaggatccaaaggatctttgcagtgaacatcacaggatcctacctttgtgcccgcgaggccgtgaaacggatgtccacaaaatatggaggaacgggcggatccatcgtcaacctttcctcgggagcggccaaatacggttccccgggggagtatgtggattacgccgcatcgaaggccgccattgacaccctgaccatcgggctcgccagggaggttgccgaagaagggatccgggtcaatgccgtccggccaggattcatctacaccgaaatccatcagtccgggggagaaccagatctcatgg

SEQ ID NO: 203392 - DNA, 299 bp, Unknown
  Bacterial polypeptide expressing nucleotide sequence isolated from the Sargasso Sea
tatgtatcagaaaagtttaaaaaataaagttgcattagtcacgggaggaggaggtcccgcaatgggcagttctcattgcctaaaactttcgaaaatgggtgctcatgtaattgtccttgataaaagagaagatatggcacaaatggtttcaaaaaaaattattcaaaccggaggttcatctgaagttataatatgtgatattgcaaatattaaagaaacatcaaatgtattatcctcagttctttcagaaaaacaattgatattcttgttaaccatgctggtatttcaggaatgtcttt

SEQ ID NO: 203393 - DNA, 241 bp, Unknown
  Bacterial polypeptide expressing nucleotide sequence isolated from the Sargasso Sea
catgagaaaaaaaattgctctagttggcgctggcaatattggaggaactttagcacatttaataggattaaaagaattagctgatgttgtactagttgatattgctgatggaattgctaaaggcaaggcgctcgatctttcccaatcttcagcaatagaattgtttgatttaaatattacgggttcaaaaaattttaaaaatttaaaaaatgctgatgtggttattgttacggcaggattc

SEQ ID NO: 203394 - DNA, 906 bp, Unknown
  Bacterial polypeptide expressing nucleotide sequence isolated from the Sargasso Sea
tagaacacttgctgaagctataaagggagctgacgtatttctcggtttatcggccaaagatgtagtaagtaaagagatggttaagtctatgtcaaaaaatccgattatatttgcgtgcgctaatcctgatcctgagataaaacctgaattgattcaagaagtaagagacgatgcaattattgctactggccgttctgattatcctaatcaagtaaataatctaattggttttccttatatattcagaggtgccctcgatgtaagagcaaaagcaatcaatgaagaaatgaaagttgctgctgcaaatgcaatagcgttattagctagagaaaatgttcctgatgaagttgttgctgcatatggtggagatcgaccaagatatggaaaaaattatattataccttcaacttttgatccaagattaatcagtgtgattccagcagcagttgctgaagctgcaatgaaaagtggagcagctagaaaaaaaattgaagacgtggagctatacaaagatcaattatcaaatcgtttagatccatcaatgtcaataatgcaggggataaatgctaaagtaagaaaaaatccaaaaagagtaatttttgctgagggagaggatgagaacatgcttaaagcagcaatcgaatttggaagaaataaattaggagtaccaatattaattggatctgaaaatagagttagggaacaattaaaaaaaataggattagatgaaaactataaaattgaaattgttaactccacagataaagaaaaaagagaaagatacgttaagcatctatacaagaaacttcaaagagaagggcaacttgaaagagatgtggatcggttggttagaaatgatagaattgcatggggatcatctatgatagcatgtaaagatgctgatgc

SEQ ID NO: 203395 - DNA, 610 bp, Unknown
  Bacterial polypeptide expressing nucleotide sequence isolated from the Sargasso Sea
catgattgacagcaaaggtgtaatttatgaaggaagatctaacaaaataaatcaatggaaattaaaacatgctttagatacaaaattaagaacactcaaagatgcaataaaaggtgcagatgtatttctagggttgtcgactaaaggtgcactaaaaaaagaactaattaaaacaatggcaaaaaatccaattatttttgcttgtgctaatcctgatccagaaattactccagaagaaattaataaagttaggaaagacgctattatcgcaactggaagatcagattatccaaatcaagtaaataatttacttggatttccttatatttttagaggtgcattagatgttagatcaaaagtaattaatgaagaaatgaaaactgctgcggccttagctattgcaaaacttgcaagagaagatgttcctgatgaagttgttgcagcaatgggtggtgacagaccacattatggaaaagattacattataccatctacatttgatcctaggttaataactgtaattcctgctgcagttgcaaaagctgcaatggatagtggtgttgctagaaaaaacattgataattttgaagtttataaagattcaacttaa

SEQ ID NO: 203396 - DNA, 398 bp, Unknown
  Bacterial polypeptide expressing nucleotide sequence isolated from the Sargasso Sea
aatggaaaagaactctcagcgggtgatcatgatctccggagccaatcggggcatcggcaaggcgatccgtgaaaaactccaatccgaaaaatacctgctcagccttggccttagaaatcctggtgcattcagggatgcgatggatcatcatgaaagtaaaaacgtacatctgcataaatatgatgcaagaaacccggaatcagcggaatcatgggttcagtccacgttggaaaatttcggcagaatcgatggtctggtcaacaacgcgggaatccttcatccgatgggattggaagacgaccgtgaagaattgctcgatgatatgtgggaagtcaacgccaaagccccaatgcgactcacccgtctgacttttcctcacctcaggaaaagcggacgag

SEQ ID NO: 203397 - DNA, 871 bp, Unknown
  Bacterial polypeptide expressing nucleotide sequence isolated from the Sargasso Sea
ggtgacgggggtcagggaaataatacagcaaaccaaaacggtggcgccggtggtgcggtcggttcaacttctaacactttcaccgggatggtatcgggaacgcttaccgtaaccggaggtaatggtggtgcagggggtagtggagctaatgcccaagggggtattggtggagcgggtggtgcagttacggtaaccaacttggcaaatggcctgacgggaccgcttaatctcatggggggtaacgccggaaatgggggtattggtaatgccaacgcgggtggtaagggtggcgatggtggtcttgtaaccatcactgctataggtgctggtgggacgcttggaaatgtggctataggagctggaaccagtgggattggtggagacagtggtgcggcaaacggtggtgccggtggtgaaggtggaacaattgtggtcggtaatatctcacaagatatcacaggaactttaacagtctgggccggtagcggtggagcaggtggagccggaaatggtaatggaaatggcggtgccggtggtgatggtaaagcaatttcgactatgtctgtgtctggcgcaatctcttcaaatgtatccttaactggtggctcgggtggtaacggtggtgctgctggctctggatcgggaagtgggggtaacggtggtgcgggtgcggcgcttaacgcttcccttggtggaaatatcggtgggacgcttacccttaacgatggagagacgggcaccgcgggcgcaacgggaacaggatcagcaggatcagggggtgcgcttggtgctgttactctcacacttaatggatccgcagcgcaaaccattacgggtgcagtaactgtaggagatgatggcgaggctacaa

SEQ ID NO: 203398 - DNA, 619 bp, Unknown
  Bacterial polypeptide expressing nucleotide sequence isolated from the Sargasso Sea
ggagtgcgaggctaaaggagtagaagcacgtggatacgaactaaacgttactatagaggcgcaagttgatgcagtatattcgcaggttattagcgatttcggaacacttgacgccacagttaacaatgctgggattttgagggacagcttactagtaaaggaaaaagatggtgaaatcaggaagttccctctgtcaaaatggcaggaggtaatcgacaccaacctcaccggggtcttcctttgcggacgtgaggcagctgcccggtttgttgaactcaaaaaaacaggggttatcataaacattgccagtgttgcacgttctggaaatttcggacagagtaattattctgctgcaaaagcaggagtatcagcgatgaccgttctttgggcaaaggaactcgctcagaatggaataagagtagcaggtgttgccccaggtttcactgctactgagatggttgtttctctgcgtgatgatgtaaaggaaaaattcgttaagagtattcctatcaaacgctttgctgagcctagcgaaatgtcagatggtgttttgtttatcctcaaaaatgactactttaccggacgaatgttggaaattgacggtggtgtcaggatgtga

SEQ ID NO: 203399 - DNA, 889 bp, Unknown
  Bacterial polypeptide expressing nucleotide sequence isolated from the Sargasso Sea
tttaaaacggtttgcagatattgactcaatagatatagaaattgatagtaaagactcacaagctattattgaaacgataaagaatatcagtggaacatttggaggaattaatcttgaagatatagctgcaccagactgttttattatagaacaaaaattaagagaagttttaaatattccaatatttcatgacgatcaacatggtactgccataataactcttgctgcattaattaatgctctggatatctgtaaaaaaaaaattgaaaaagtaaaagttgtaattaatggagcgggtgcatctgctcaagcttgtacaaatctttttatgagttcaggagtaaagaaagaaaatattatcatgtgcgacagtaaaggcgtcatatataaaggcagaaaaaatattgatcaatttaaatcggcttttgctagtaacacaaaattgagatctcttgaagaagcaattgaaggggcagatgtgtttctaggattatcagcaaaagatgttgttacaaaaaacatggttaaatcgatggctaaaaatccgattatttttgcttgcgcaaatccagatccagagattaaacctgaagcaattgaagaagttagatccgatgcaattatcgcaacaggaagatctgattatcctaatcaagtaaataatttgataggattcccttacatatttagaggagcattggatgtaagggcaaaagagattaatgaagaaatgaaagttgctgctgcaaaatctatagcgcttttagctagggaagatgttccagatgaagtggtttcagcttatggtggtgacagacctaaatatggtaaaaattatattatcccatctacttttgatccaaagattaataagtgtaataccctcagc

SEQ ID NO: 203400 - DNA, 646 bp, Unknown
  Bacterial polypeptide expressing nucleotide sequence isolated from the Sargasso Sea
ctgaacgagccagaggccgagggcgtcacctttattgaaactgacgtcgcccgagaagcgggcgtgagagatctcatgacgcgggtggagttcgatttcgggcatttggatattttggtgaataacgccggtatctgcatcgaggaaccgatcgccgagaccgctgaagaggactgggaccgggtgatggcggtcaacgtgaaaagcacgttcctcaccaccaagcacgccctgcccctgatgcgcgcgaagagcgcactgcatccggccatcgtgaatatcagttccatcgaggggctcggtgccaatccactgcacagcgtatatgccgcgtccaaagccgccgtggcggccttcagccataacaccgcgctcgaatacggcccctatggcatccggtgcaatgccgtggcacccggttggattaacacgccatttaacgagcaactgcttacccagtatccggatcgtgccgcggtcgacgccgagatcgaggccctgcatccggtgggccgcctcggcagcccggaggatgtcgccaacaccgtgttctggctggccagtcacgatgccgcctttgttaccgggcaagaagtggtggtcgatggcggccgccttgccaaactacccctgccggcactctgaa

SEQ ID NO: 203401 - DNA, 145 bp, Unknown
  Bacterial polypeptide expressing nucleotide sequence isolated from the Sargasso Sea
gctcggccgtcgcgccgttgcgatccaggccgacagcgccgatccggtggccgtacgcgacgcggtcgatcgtgcggcggaggcgttcggcggcctcgacattctcgtcaacaacgcggggattttccgggccggcgcggaaaat

SEQ ID NO: 203402 - DNA, 702 bp, Unknown
  Bacterial polypeptide expressing nucleotide sequence isolated from the Sargasso Sea
gatgagtaataagtataaaaacctttttgatttgactgataaagttgctattgtaactggatcgagtagaggtataggtgcatcaatagctgaggcttttgctgaatttggagcaagtgtagttttgagcagtaggacaaaagaaagtgtagatgaaattgctacaaatattaaaaaaaatggctttaaggcagaggctgttgaatgtcatgttggtgaagaggagcaattaaaaaatctagttgaaacaacaataaaaacatatggtaaaatcgatatattagttaataatgctggaattaatccagtttttgatagacttgaaaatgcagatgataaattatttaataaaattattgacattaatgtcaaagctgcgtttaagctttcaaatatggttatgaaatatatgaaagaaaataatgccggatccatcattaatatctcgtcagttgaaggacataaaccagacaaaggcctaggggtatattcaattagtaaggcagctattagtatgctaacaaaatcccaagcaaaggagtggggtaaatatggaattcgatcaaatgcaatttgtcctggattaattaaaacaaaacttagctcagctttatggcaaaatgaggagatgttagaaatatggcttaaagatctgccaattagaaaagctgcagaacctgaagaaatatcgggaatggcagt

SEQ ID NO: 203403 - DNA, 787 bp, Unknown
  Bacterial polypeptide expressing nucleotide sequence isolated from the Sargasso Sea
gctttaataaatgcatgtgatatagctaaaaaaaaattaaacgagataaatgtagttattaatggtgctggtgcctctgcgatggcatgtgcaaaacttttcattaattcaggtgttaacaaaaataaaatcaaaatgcttgattcaaaaggtgttatttacaaaggtagagacaacttaaatgaatggaaaaatgagttttcaattaaaactgatgacagagatttaaatgactcaataaagaatgctgatgtttttttaggtttatctcaagcaggagttctcaaaaaagatatggtaaaaaatatggcaaaaaaccctataatatttgcttgtgctaacccagatccagaaattacacctgaggaaattgaggaagttagaaatgatgcaattgttgcaactggtagatctgattatccaaatcaagtaaacaatttgattggtttcccttatatttttagaggagctcttgatataagatcaaaaacaattaatgaggaaatgaaggttgctgctgtacgcgcaattgcctcgcttgcaagagaaagggttcctgacgaagtagttgccgcaatgggtggggaaagacctgtttacggtaagaactatattattccatctacttttgatccaagacttataagtgtaataccgcttgcagttgctaaagctgcaataaaaactggtgttgctagaataggaattgaaaattttgataattattctgagcaacttaaaaatcgacttgatcctacagttgcggttatgcaaggtataaattctc

SEQ ID NO: 203404 - DNA, 154 bp, Unknown
  Bacterial polypeptide expressing nucleotide sequence isolated from the Sargasso Sea
ggtgtgaatgaggattacctcattaaagaaataccattaggtagatttggtgagccagctgaagttgctaatttagtaactttcttatgttccgaagaagcttcatatatcactggacaaaccatacatattaatggcggcctatatatgtaaa

SEQ ID NO: 203405 - DNA, 783 bp, Unknown
  Bacterial polypeptide expressing nucleotide sequence isolated from the Sargasso Sea
ttgcagtaattagtaatggttcagctatccttggcatgggtaaccttggagcactggcttctaaaccagtaatggagggaaaagcagttctgttcaaaagatttgctgatattgactctattgatcttgaaattaacagcagtgacgtagacgacatagttaattctataaaaaatttttcaccttcttttggtggaataaatttggaagatattgctgcgccagattgttttataattgaagaaaaactaaaagaaattttagatatacctgtttttcatgatgaccaacatgggacagcaattattactactgctgctttaattaacgcattagacataagtggaaagtctattaaagatattaaagttgttgtgaatggagctggagcatcggctatggcctgtactaacctttttaaaaatagtggtgtacctcaaaaaaacattacaatgattgataagaaaggggtgatttatcgaggtagagaaaatttaaatcaatggaaaactagccatgcaattgaaactaaagatagagtcttatcagatgcaattaaaggtgcagatgtctttttaggactatctgctaaaggggctttaacgaaagagatggttacaaaaatggcaaagaatccaattatttttgcttgtgctaatccagatccagagattacaccagaagaaattgaagaagttcgaaatgatgcaattattgcaactggaagatctgactatcctaatcaagtaaataacctaattggtttccccatatatttttaga

SEQ ID NO: 203406 - DNA, 910 bp, Unknown
  Bacterial polypeptide expressing nucleotide sequence isolated from the Sargasso Sea
cgcaaaccctgatcctgaaataactcctgaggaagtagaggaggtaagaagtgatgcaataattgcaactggaagatctgactatcctaatcaagtaaataatcttattggttttccatacatatttagaggagctttagatgtaagagctaaaacaataaatgaagaaatgaaagttgccgcagcaaatgcaatagcttctttagcccgagaaagagtaccagatgaagtagttgctgcaatgggaggcgatagaccaaaatatggaaaagattatataattccatctacttttgatccaagattaataagtgtgatccctgtggcggttgcaagagctgcaataaaaagtggtgttgcaagaaaaaaaataaaaaattttgatgaatatgcagatcaattaaaacaaagattggatccatcagtaacaattttgcagggaattaattctcaaattaaaaaaacacaaaaaagaattgttttcacagaaggagaagatcaaaatactttaaaggctgctatagcatttaaaaaaaatggtttaggaattccaattttagtagctaaagaaaaaatcgtcaaaaaaaaactaaaagagattggatatagtgaaaactttgatattgagattataaactcaacctcaaaggacaataaagaaaagtatttaaaatatatatttaaaaaattacatggagataaaggtgagcttgagccagatgtttatgaactatacctaaaagactgtgatagaataattaaaaatgacaaagtagtgtggggatcctgcatggttgcttgtggagatgcagatgcaatggttactggaaatactagaagatatgcacaatcattagataaagtacttaaagttgtagattcaagaccaggtgaaattatgtatgggctt

SEQ ID NO: 203407 - DNA, 609 bp, Unknown
  Bacterial polypeptide expressing nucleotide sequence isolated from the Sargasso Sea
aatgaaaaaaatttctgttattggtgcaggcgtaattggctcaggatggatcataagatttctagctcatgataagaaagttacagcatatgataaagattctaaattaaaaaaaaaaattattgcggaaataagaagaacttggccatatgtaaaaaaactttttaataaaaaaaaacttaaacttaaaaattttaaatatgtaacatctttaaaggaagctttaaaagatgcagattttatccaagaatgtgcaccagaaaattataagttaaaaactacattaatggaaattattggaaaatactccaaacctaatgctattatctcttcaagctcttctggtttacttccatcaaagatttattcaaaatgtaaaaatccttcaagaactattatagctcatccatttaatcctgtttatatgatcccaggtgtagaattagtacctggaaaaaaaacatcaaaaaaaatattaaataaagctaaaagattttacaaatctttatctatgaatccaataattcttaaaaaagaattacctggatatttatcagacaggcttcaagaagctttatggagagaagcgctacatatcgtaaatgaggg

SEQ ID NO: 203408 - DNA, 936 bp, Unknown
  Bacterial polypeptide expressing nucleotide sequence isolated from the Sargasso Sea
tatgtgtgatagtaaaggtgttatttacaaaggtagaaaaaatattgaccagtttaaatctgcttttgctattgatacaaaattaagaacccttgcagaagctatgaaaaatgctgacgtatttctcggtttatcagctaaagatgttgtttctaaagaaatgataaaatcaatggctaaaaatcctatcatttttgcatgtgcaaatccggatccagaaataaaacctgaattaatagaagaagtaagagatgatgcaatcattgcaactggaagatctgactatccaaaccaagtaaataatcttattggttttccttatatttttagaggtgctttagacgtaagagcaaaggctataaacgaagaaatgaaagttgcagcagctaatgccatagcccttttggcaagagaaaacgtcccagatgaagttgtagctgcttatggtggtgatagaccaaggtatggaaaaaattacataatcccctcaacttttgatccaagattaataagtgtaatacctgctgctgttgcagaagctgcaatgaaaagtggggccgcaagaaaaaagatagaagatcttcagttatatagagatcaacttactaaccgtttagatccttctatgtcaattatgcaaggtattaatgcgaaaattagaaaaaatcctaaaagagttatttttgcagagggggaagatgaaaatatgcttaaagccgcaattgaatttggaagaaataagcttggagtgccaatacttattggtgctgaaaatagagttaaagaacaattaaaaaaaatcggcttagacgaaaattataaaattgagatagtaaattctactgacaaaaaaaagagagagaaatatgttaagcatctttataaaaaactccaaagagaaggtcagcttgaaagagatgtagatcgattggttag

SEQ ID NO: 203409 - DNA, 673 bp, Unknown
  Bacterial polypeptide expressing nucleotide sequence isolated from the Sargasso Sea
atgattgatttaaaaaacctaaatataatattaactggttcgacaggtggaattggtggtgcaattttagagaaattgtattcatcaaatgcaaccatcatagcaacaggcactaatcaagtaaaattagacaaaataaaagaaaactataaaaacgtgattattaaaaaatttgatatatcaaatcactcaactatagaaaaattcattaatgattgtaatgacattttaaataataaaattgatgtattaataaataatgcaggaattacatctgataacctaactttaagaatgaaagaggaagagtggaatagagttataaatcttaatttaacatctacatttttgcttagtaagtatgctattaaaaatatgttaaaaaataaaagtggtaaaataattaatattacttctgttgttggacatactggaaatattggtcaagcaaattattcagcctccaaggcaggtataattggcatgtcaaaaagtttagctcaagaatatgggagaaaaaatatttcaataaattgtgtatctccaggttttataaaatcagaaatgacagacaagataagtgatatttataaaaaaaccatggaagaaaaaatttccttaggtagatttggtgtacctgaggacgtggcaaatgttgttgctttcttgtctt

SEQ ID NO: 203410 - DNA, 736 bp, Unknown
  Bacterial polypeptide expressing nucleotide sequence isolated from the Sargasso Sea
attggggcggacggcaattgttacgggcggagcgaagggtataggtttagcaatagctactcgctttattcactcaggcgccaatgtgactatttgggacatagatgaagatcgtcttaagcagagcatcgatttattggaaaacaagggagcagttaagacagaagttgttgacgtcaccaataagaaaagcatagaggctgcaaccaataaggtgctggaatctgagaataaaattgatattcttgttaacaatgcaggtgctgttggcactctagccccagtatgggaacaacccatagagaattgggaaaaaatgctccgacttaatcttaccagtgcctttatgtgttgtcagattatagtcccatcaatgatttctaaaaaatatgggagagtagtcaatatcgcttccaacggtggtaaaataggaataaaaaataattcaggatatgcagctgccaaagcaggattgattagtttaacaaaatctctatcgaaggaagtagctaaaaccggggttttagttaactgtataactcctggcggagctaacactgagctttttgataaactttcaaacgaatatcgcacaacaatagaagagggtatggagctaggacggcttgttgaaccggcagaaatagctgcactagctgcctggctagcttccgaagaatgctctttcagcacaggggcagcatttgatatttcaggaggaagagcggactactga

SEQ ID NO: 203411 - DNA, 824 bp, Unknown
  Bacterial polypeptide expressing nucleotide sequence isolated from the Sargasso Sea
attaaggacgcacgtgtagtcatcaatggggcaggcgccgccggagttgcctgcgcggagctattaaaaggtatgggagtgcctccgaaaaacgttattttatgcgacactcggggggttatttttacaggccgagaggccggaatgaaccaatggaagtccgcccacgccaatcctactgaactaagaaccttggctgaggcagtgaaaggtgctgacgtattttttgggctctcaaagaagggcgtcatgacggcagagatggtgaaaggcatggccccgcagccaattatttttgcaatggcaaaccctgacccagaaattactccagaagaagtggccgcaatccggggtgatgccattatggcaactgggaggtctgactatcccaaccaggttaacaatgtgttgggctttccgtatatttttaggggggccctcgacgtgcgggcatctacaattaacgacgctatgaagattgccgcagcagaagccatcgcggcgctcgcgcgggaggacgtgccagacgaggttgccgcggcctattctgcgggtaacttgcgttacggaccagaatacataataccagccccgttcgatccccgcctaataagcgctgtccctatggctgttgctcaggccgctatcgcaagcggcgtcgcgcagaaaccttttgcagatgaaaacgattataggcggagtctgggtgtcaggctagatcccgccgcaagcaatgtccaaatgattcaagaggaagtccgtagcaaaccagtgcgcatggtttttgcagaaggcgaggaagaacctgtaattcgtgctgcact

SEQ ID NO: 203412 - DNA, 646 bp, Unknown
  Bacterial polypeptide expressing nucleotide sequence isolated from the Sargasso Sea
ttcgatagatcttgaaatagattctgaagatcctgaagaaattatttcatcaatcaaaaattttgcaaaaagtttcggaggaataaatttggaggatatagctgcaccggattgttttataatagaagaaaaattaaaaaaattacttgatatacctgtttttcatgatgatcagcatggtacagctataataacttatgcagcattaattaatgcaattgatattgcaaaaaaaaatataaaaaaaatcaaagtagtagttaatggtgcgggagcatctgcaatggcttgctcaaatttatttaaaaattctggagttcctggaaaaaacattacaatgctggatagaaaaggtgttatttacaaaggaagaaaaaatcttaataaatggaaattatcacaggcaatagatactaaggatagaactttaaatgatgcaataaaaggggcagatgtatttttgggattatcttctgccggtgctttaaaaaaagatatggtaaaaaaaatggcaaaaaatccaattatatttgcatgtgctaatccggatcctgaaataacaccagaagaaattgaagaagttagaaaagatgcaataattgcaacgggtagatccgattatccaaatcaagtgaataacttaata

SEQ ID NO: 203413 - DNA, 706 bp, Unknown
  Bacterial polypeptide expressing nucleotide sequence isolated from the Sargasso Sea
atggctgatccttgcgtaatcgtcactggcgcatccaagggcatcggcgcggccatcgccatcgaattggacaagcgcggccttccggttatcggcctgtctcgggctggtgacactgtcgtaggcaacgccttcgtttgcgatatgactaatgaagaccaagtccgaaagcgcatcggcgcaataggcgccgaacgcggtatcgccgcactggttaataacgccggcctctatattggtagtcctattgctgaactcagcacggatcagtatgagcaggtgatgaacctcaacgccaaggctgtgatgatcgcgtcccgagaggcctatccccaccttagagacagtggaggcacgattgtaaacatcgggtcttttttcgataagatgggcgttccgcacaatctcccctactgcgcgtcgaaagccgcggtggcagcgatgacacgttgcatggccgtggaatgggcccgggacggcattggtgtcatcaatgtggcgcccggctacattgaaacggatttgaacgccgattacctaggccgtcaaaaggtgcagcattggctggcaggccgggtgcctacaggaggccccggcaagccggatgatgtggcccggttggttgcagctttgatttgcgaagatattccatttctcaccggcgagactatttacatcgacggcgggcaggggatgaaccattgat

SEQ ID NO: 203414 - DNA, 706 bp, Unknown
  Bacterial polypeptide expressing nucleotide sequence isolated from the Sargasso Sea
taaactaacagatatatgtggagaaaatttcattcctcttatctttgatgtcacagatatcaatgcaattaaggaggcggctaatttagttgaatctcatttgggcaaaaatggcttaaattgtctcgtaaataatgcaggtattaatatttctggcccgatggagtatgtagaatccgatgaagtaagaagagtctttgaagtcaatgtaatgggaccattaaattgctcgcaatcattcctgccaatgcttaaaaaatctacgtcagcaactataattaatattagctcaatggccggtaagattggtcttccaatgcagggatcatattgtggcagtaagtttgcacttgaaggaatttctgaatcaatgcgcagagaacttcaaattcataatatcaaagtagttgtaattggtcctggtgcaattgaatcatcaatttgggataagtttgaaaaagatgagaaggaagaacaatataaggatacagaatatacgtcagcaataaaaaaaatggatggcactcttaaaagagcaagaagtatagctattccagctcatcgagtagccaaaaaagttgagaaaattgttaactctaagaatccaaaaccaagatatgtagttgctggcataacagataaaatgttaaatctcattccaagaaagatccttgataaagcttttaagatgttattaacgaaataa

SEQ ID NO: 203415 - DNA, 694 bp, Unknown
  Bacterial polypeptide expressing nucleotide sequence isolated from the Sargasso Sea
tttggatatgccatagcaaaaagatttgttcaatcaggtgcaaaagtaattaatattgataaggatcctgaatcaacagctgacatcaaaaataatggagaaattaattttttagaaatttatcaaattgatatcactgactatgacgttgttgaacaaactataaactcaattatagataaatatataaacatagatattttagtaaataatgcaggaatagcaggaccttcttttaaaacatgggattatcccttagatgattggcatcaagtaattgatattgatttaaatggaacatttaattgttgtagattagttgcacctcacatgattaaaaataattatggaagaattgtaaatatagcaagtattgcaggaaaagaaggtaatcccactgcctcaggttatagtgcagctaaagctggggtaatagcattaacaaaatctatgggtaaagaattagcggactataatatttctgttaattgtgttacacctgccgcagctaaaactaaaatttttgaacaaataagtgaagatcatataaattacatgttatctaaaattcctagaaaaagatttctaaaagtcgatgaattagcatctctagtttcgtggatggtttcagaagaaaactcttttactactgcaggagtgtttgatataagtggtgggagagcaacttattaat

SEQ ID NO: 203416 - DNA, 637 bp, Unknown
  Bacterial polypeptide expressing nucleotide sequence isolated from the Sargasso Sea
gcagcagcagcagcagcagcagcagcagcagcagcagcagcagcaacagcagcagcagcagcagcagcagcagcagcagcggcagcagtggcagcaacacgacaacagccacagccacagccacagccacagccacagccacagccacagccacagccacagccacagccacagccacagcaacagcaacagcaacagcaaccgcaaacgcaaccccaacagcaggagggcagcggcacaggcaaccagcagccacactcatcatcattatcaacaacaagcccaatcttccagccccatcttcagccggctcaacctcaagacccatcttcaaggcatcgaccaccgcacctctctggtcccctcgccggcagctgccacctccgtggccggcagtcgcgtgcgcgttcctcttggcctctgtggatcccgcagatcatgccgtcgtgggctgcagcacgtcctccaccaaagcgcttatggaagaggatatgttcacggcggagatcttggagatgcagctctagttgaagccgccggccgcaatttccacgtgggccgctcagcagtcttcgaacttcaaagagattatgtgtcacctgctcgggtgagtcgttcggtgcgtgacgaaggatga

SEQ ID NO: 203417 - DNA, 715 bp, Unknown
  Bacterial polypeptide expressing nucleotide sequence isolated from the Sargasso Sea
atgagtcagactcgaacggttgtcgtgaccggcggcaataggggtatcggacttgctaccgcgaaacgtttcgccgaacttggacaccgcgtggcaattactgcccgggatccgggacacatcgacgatcaaattttggcggtgtcttgtgatcaaacagactccaatgctgtcgacgccgcgtttgatgaaattgagtcgaatctaggagcggtcgaaattctggtcgccaatgccggaattacacgcgaccagctgatgctgcgcatgtccgatgacgacttttctgctgtaatcgaaaccaacctcaccggttcgtacagaatggctcgacgagcagcacgccccatgctcagagcccgctggggccgtctcatcttcgtttcttcagtagtcggattattaggttccgcaggacaagttaactactcagccagcaaagccgggctgatcggaatggctcgttccatggctcgggaacttggctcgagaaacatcactgccaacgttctctcgcccggcccagtcgacaccgagatgtttgccgccttaactgaagagcaacaggcaactattactgagcaggtgccactcaatcgagtcgcccaaccagaggaaatagcagaaaccatcacctttttggcgtctgactcggcggcctacataacaggtgcagtaattccaattgatggtggactaggcatggggcattgac

SEQ ID NO: 203418 - DNA, 556 bp, Unknown
  Bacterial polypeptide expressing nucleotide sequence isolated from the Sargasso Sea
atgtctgatgatatgaaacaagcagctcttgattaccatgagtttccacgtccaggtaagatcagcgttgagctgtctacaccagctgagtctcagcttgatctttctttggcatatagcccaggtgtagctgagccggttcgtgaaatcgcgaaagaccctgataacgcataccgttacacagctaaaggtaacttggtagcggttattacaaacggttcagcaatcttaggtcttggtgatctaggtccgttagcgtctaagcctgtaatggaaggtaaatcattactgtttaaacgttttgctggtatagactcaattgatattgaagttgatgcagaaagcccgcaggcatttatcgatacggttgctcgcatcgctgaaacgtttggtggtattaacctagaagatattaaagcacctgagtgttttgaaattgagcgtgcgcttattgagcgttgtaatatccccgttttccatgatgatcagcacggtacagcgattgttacggctgcaggcatgatcacagcattgaaattgcgggcaaaacgctgag

SEQ ID NO: 203419 - DNA, 865 bp, Unknown
  Bacterial polypeptide expressing nucleotide sequence isolated from the Sargasso Sea
agcattattaacaggtgaagaaaaaattcttccaaaagaagcaaaatattttttttgtactgttgagtcaatgcccaaaaatatttctgtagattgtataataattgatgaagtgcaattgacagcagattatgaaagaggacatatttttactgataggattttaaatctaagaggcaattttataactatcttcttaggatcactaaatattgaaaatttactaaaaaaaatttatccaaatattataattgagaaaaaaaaaagattttctcaactttcatttctgagaaaacaaaatttttctaaactcgaaccaagatcagctataattgcatttaatattaacaaagtttatgaaattgctgaaaatattagaacacataaaggtggaactgctgtagttttaggttcgctaagtcccagaactagaaatgcccaagtagaagtatatgaaaataaaaacgtagattatcttgtagcaacagatgctattggaatgggcttaaatcttaatatcaatcatgtaagtttttcagcactagaaaaatttgatggcagatataatcgtaatcttgctccaaatgaactaggtcaaattgcaggtagagcaggtagatacaaacaagatggaacttttagccatactaaagaagcaggaaatttagatccattaattatacagcagatagaaacacacaactttgataatattcaaaaaatttattggagaaatagtgatttagattttaattcaatagatgcattattatcatcattaaaaaaatatcccattcataactattttatacataaaaagaatgctttagatgaaattaaccttcgtaatttaattaatgataat

SEQ ID NO: 203420 - DNA, 864 bp, Unknown
  Bacterial polypeptide expressing nucleotide sequence isolated from the Sargasso Sea
atatttggctgactcaatcgcggcgtttaaaagttgcaatgtcgttgtagaggcagtttttgaagacctggaagtcaagcacgctgtttacgaggagttggaacaacacgttagttctgaatgtattattgcttcaaacacatcatccttacccattagttctttgggacggtcatgcgaaaaacaagagagatttgcaggcttacacttcttcaatccagttccattaatgcgtttggttgaagtaattagaggaccttcaactgatgattgggtaatcgatggattagttaaattaggtgaacgaatggggcgaactccggttgttgttcgtgatgcacctggttttttggtgaatacaggcggccgagcatttacaacggaagctttgcacatattgcatgagggtgttgctaaacaatctcaggtagatgctgttatgcgggattgcgcgcactttagaatggggccgtttgaacttatggacttaacaggtgttgatgtgaactaccctgcttccttaattatgcatgaacagaattcatatgacccccgaattagaacagttcctttccataaatccctttatgatgctgggcggtttggtcgtaaaacgcgtcatggcaattataaatatgacgcagagggaaacatagtcgatatagaaagcccggattatcaaacgtcatcacagaaggcgccgaaggttatcattggtgaaaatgcagaaattttctcagatattttagcgggttctgcaatggctttaatcgatgatggggagagcccgatcgttgcggcattgtttggcgaagattgttcttcgttcgctcatagaactggtctcgattatcgaagaatagt

SEQ ID NO: 203421 - DNA, 523 bp, Unknown
  Bacterial polypeptide expressing nucleotide sequence isolated from the Sargasso Sea
tgggggcggatagattctctcatatgtaatgctgccactaccccagtctttggccccatatcaactcttacagataaggcctttgataaaattatgaatattaatttaaaaagtagcttatggctttctaatttaagtgttccccacatggttaaaaatggtggaggctcgattattcttatgtcttcgataactgcgtttgtggggacagatacaattggcgcttatggcatttcaaaagcagctgaagcatcccttgtgaggaaccttgctgttgaacttggacctaagggaatcagggttaatggaatagcgccaggtcttatcaaaactgacttttcaaaggccttatgggagaacccaaaacttcttgaaaaacaggaaaaacaaacacctcttagaagaattggtaggcctgatgacatagcagggatcgctcattttttagtctgtgatgcttcctcttacatcgcaggtcagctcattgttgctgatggaggagaaacaatttcttggggataaa

SEQ ID NO: 203422 - DNA, 731 bp, Unknown
  Bacterial polypeptide expressing nucleotide sequence isolated from the Sargasso Sea
caggccgctgcacaacatgcactggaaggcttcgtacgagccgttggcaaagagatcggcaaaaagggcgctaccgcgaacctggtctggatagcacccaatgctgaaaaccagctggattcctcggttcggttcttcctgtcgccacgctcagcctacgtctccgggcaggtggttcgcatcggcaaagccgacgaagccaaagccaccaatccggtcgcaccattggcaggcaaagtggccctggtgaccggcgcgtcccgaggcattggcgccgctatcgctgcaaccctcgccagagatggggcaaccgtcatcgggctcgacattccgccggcactcgaggaattgcagaaagtaaccggcgctctgaaaggcaaggcgctcgcctgcgacatcaccgacgaaaaggcgccaaagctgatcgcagactttatcgaaaaggaaaccggcggtgtcgacttcgtcatccacaacgccggcatcaccagagacaaaaccctaggcaacatgcccgaacatttctgggatatgaccattgccgtcaacctgaccgcagaagagctgattgacgaggaactggctgagcgcaaactgatacgggaaaacggccgcatcgtctgcatttcttcgatcagcggcatcgcaggcaatttcggccagaccaactactcctgcgccaaaagcggcgtgatcggctatgtcgaagccatggcccgtcatctgaagaa

SEQ ID NO: 203423 - DNA, 572 bp, Unknown
  Bacterial polypeptide expressing nucleotide sequence isolated from the Sargasso Sea
aatgaaattaaaagataaagtagcactagttacaggtggcgcatcaggattaggccaagcaaccgttgaagcatttgtagcaaatggggcaaaagtagttattttagatattaatgaggataaagctaacgaaattattaaagctttaggagatgataatgttctttttatctccacaaatattatggaagaagatcctgttgttgatgcagtcaatcaaataaaagataaatttggcgcattacatattgctgtaaattgtgctggcacaggctatccaggaagaatacttggaaaagaagcacctcatcctcttgatgcatttaaatttattattaatttaaatcttgtaggaacatttaatgttatgagaattgcagctgaattaatggataaaaacgatccaggcgcaaaaggtgaaaaaggagtaataataaatacagcatctattgcaggttatgaagggcaaattggtcagtctgcatatagcgcatcaaaggcaggcgttattggtttaactctaacagctgcaagagaattagctagacatgctgttagagtatgcactatag

SEQ ID NO: 203424 - DNA, 818 bp, Unknown
  Bacterial polypeptide expressing nucleotide sequence isolated from the Sargasso Sea
cttatttaaaaaaataggcgttaaaaatgaaaatgtaattatgtgtgatagaaaaggcgtaatttacaaaggaagagatcaggtagatcaatttaaatctgctcatgctgtagagactaaacttcgaacattagagcaagcgatgagaaatgcagatgtatttctaggactgtcagcaaaggatgttgttaatcgtgaaatgataaagtcgatggcaaaaaaccctatagtgtttgcatgcgcaaatccagatcctgaaattaagccagaaataatcaatgaagtacgtgatgatgtaataattgcaactggaagatcagattatcctaaccaagttaataacctaataggttttccatatatttttagaggagcgctagacgtaagggccaaaataattaatgatgaaatgaaagttgctgcagctaatgcgatagcgttattagctagagaagacgttccagatgaagttgttgctgcctatggaggtgaaagaccaaagtatggaaaagaatatattattccttcaacgttcgaccctagattagttcgcagaattccttctgccgtagctgaagctgcgatgaaaagcggtgtagcgagaaaaaaaattgaaaatttggaaaattataaagatcaacttactgcaagattagatccatctatgtctttaatgcaaggaataaacgctaatgtcaaaaaaagtcctaaaagagttgtgtttgcagaaggtgaggatgagaatatgttaaaggcagcaattgaattcggtaaaaataaattaggaacacctatagtgattgggaatgaaaaaagag

SEQ ID NO: 203425 - DNA, 573 bp, Unknown
  Bacterial polypeptide expressing nucleotide sequence isolated from the Sargasso Sea
acaagtttgatatatctaagcataatgaaatagaaaattttattgataaatgtaatgagattttagataataaaattgatattttaattaataatgcaggaattacaaaagacaatctctcaataaggatgaaggatgaagaatggagcaaagttatagatattaatcttacatctacttttttactttgtaaaagtgcaataaaaaaaatgttaaaaaataagaatggtaaaattataaatattacttctgttgttggtcatacaggaaacataggtcaagctaattacgttgcatctaaggcgggagttgtaggtatgtcgaaaagtttggctttggaatatggaaaaaaaaatataacagttaattgtatatcacctggatttattaaatctaatatgactgaaaaaattaatgataatcataaagaattattaaaatctagaatacccctcgaaagattcggtgatccaattgatatagcaaatacagttgtttttctttgttcaaacctttcagattatattactggagagacaatacatgtaaatggtgggatgtattttagttgac

SEQ ID NO: 203426 - DNA, 766 bp, Unknown
  Bacterial polypeptide expressing nucleotide sequence isolated from the Sargasso Sea
atgattttagaacgatttaaaattactggtaaggtagcaattgtcacaggtggaactagaggcattggtcttgctatagctcatgctttaggtgaagctggggcaaaactggtagttactagcagaacagataaatttggtggtttaaatagtttaaaagaagctggacatgatgtttctttttttgaaagcgatattactgataagtcagttcctcaaaaaataattgattatactttagataagcacggtgtaattgatatacttgttaataatgcaggcgtagcacaacatggtgaaatggaagaattcaatgatgaacttctagataaaataatgaatatcaatgtagattcagtttttagaatgtgtcgatctgtgttaacacccatgaaaaaacaaggaagtggtgtaattttaaatattggttctatatctggactggtttcaaatattcctcaaccacaagttgcatataatgcatctaaagcagcagttcacatgatgactaaaagtttagcaagtgattttgctgatcaaaatattagagtaaatgcaatcgcaccaggttattttagaactgaaatgacaaaactttcaaaagagactgagcattggtatcctacatgggataaaatgacacctctaaatagaatggctgaaacagaggaaattggagcagcagcactttttttgtgtagccctgcatcaagctatgtaactggagaagttcttgttgttgatggtggttatacatcacgataat

SEQ ID NO: 203427 - DNA, 766 bp, Unknown
  Bacterial polypeptide expressing nucleotide sequence isolated from the Sargasso Sea
atgagtcgattaaaagataaagtagctatcgtcacaggtggcgcatcaaatccaggccttggacattcaacaattcataagtttgcagaagaaggtgcaaaaattgttgtgacagatattgatgttgaaggtggagaaaaaacagtatctgaggttaaagaaaaaggtggtgaagccatttttataaagcaagatgttgtttcaacagaagattggaaaaatgttgtagatgcttcaatatcagaatttagtaaaattgatatacttgtcaataatgccggaatagcgttaatagggcctttcgaagaattttctgaagatcaatgggatcaacaaatcaatgtgaatttgaaatctgtttttcttggttgtaaggctgttatacctgagatgaaaaaaaataactcgggctcaataatcaatctttcatcaatagccggtttagtaggtcttcaaggatgtgcagcttacaatgcgagcaaaggtggtgttagattactaaccaaatcaatcgctattgagtatgggccgaacaaaataagatgtaattctattcatcctggttttatggccacaaatatgaatgatccaaaaaaaattgcagagcgtggaagagattttgaggcaattattgaaacaattcctttaaaatcaatgggtactgcagaagatattgctaattgtgctctgtatctagcctcagatgagtcatcatatgttacaggaagtgagtatgttgtcgatggtggttggacaactcgttaat

SEQ ID NO: 203428 - DNA, 544 bp, Unknown
  Bacterial polypeptide expressing nucleotide sequence isolated from the Sargasso Sea
agtcgttgttctcggagcaggccccatcggcttgatgtcagtattctacgccgcacgtgccggcgctaccgacatcgccgtaactgctcgatacgatcatcaggcagacgccgctcgaatgcttggagcaacacatgtatttgattctgatggtgatggccctgaaaaattacgatcctgggcggaagaacaccccgtcgatctagtaatggaaactgtcgggggcacggcgaacactcccactctcgccggacaggtcgcgagacgcggcgggcgcgttctcatccttggagtatttgaccccggggtagcaatgccagcgtcactcattttatccaggcaactccgattagctggcactattttctacggatacatagggatgcagcacgattatgaaattgccacagacctcctcaacgagcatcgtgatctgctaggaaatctaatcacccatcgagtatctcttgatgatgtagccctaggagttggttacgcaggagataagtctagtggtgctctaaaagtagcaatcgagccataa

SEQ ID NO: 203429 - DNA, 879 bp, Unknown
  Bacterial polypeptide expressing nucleotide sequence isolated from the Sargasso Sea
tgcgacaggtagatcagattatccaaatcaagttattaacttaattggatttccttatatttttagaggcgcattagatgttagggcaaaaacaataaatgaagaaatgaaagtagccgcagcacattcaatagctgaacttgctagagaatatgtccctgatgaagttgtcgccgcaatgggtggggaaagaccaatttatggaaaagaatatataattccttcaacttttgatccgcgattaataagtgtaataccggttgctgtagccaaagctgcaataaaaagtggagtggcaagaaaaaaaatagaaaattttgaaacttataaagaacaactaaaacaaagacttgatccatcaacaactattatgcagggtgtaaatactcaaataaaaaaatcacaaaaaaaagttgtttttgctgacggcgaagatgaaaatacattaaaagctgcaatagcatttaaaagtaacggtttgggaattccaatattaatagcaaaaaaagaaattgtaaggcaaaaacttaaggatattggtttagatgaaaattataaaatagaaatagtaaactcaactgataaagaaaagagagaaaaatatgcgaaatttttgtatggaaaattacaaaggaaagaaggtttgttagaaagagactgcgatagattaataagaaatgacagggttacttggggaacttgtatggtttcttgcggagatgcagatgcattagttacgggaaatacaagaagatatacttccacattagataaagtaaaacgtgtggtcgatccaagatctggagaaataatttttggtttaaacataatggttaatagaggtagaactgtttttattgctgatataactgttcatga

SEQ ID NO: 203430 - DNA, 739 bp, Unknown
  Bacterial polypeptide expressing nucleotide sequence isolated from the Sargasso Sea
atgatcagtttaaaagataagaaaataattgttacaggagccactggtggaataggcaattcaataattaaattgcttagtgatagtggagcacaaatattagctacaggaacaaaaatagataaattagaagaattaaaatctaaatttaaaaatgtaaaaattttaaactttgatatatctaaaaatcagaaaattgaggaatttatagaaaatgcatctaaacaaataggtgggggattagactgtttaattaacaatgctggaataactcaagataatctagcaattagaatgagcttagaggaatggcaaaaagtaatagaaattaatctaactgcaacttttttattaagtaaatttgcaataaaaaaaatgttgagaagtaagtctggtaaaataataaatattacctcagttgtaagccatacaggaaatttaggccaagctaattataccgcctctaaagctggtattattgcaatgtcaaaaagtttggctatagagtacgcgaaaaaaaatataaatataaattgtgtgtctcctgggtttatcaaaacagatatgactgataaaattgatcagaaatttaaagaagctataatatcaaagattccttcatcaagattaggtgaaccagaagatgttgctaatgcagttatttttttagcctcagatcaatcaaattacattaatggtgaaactatacatgttaatgggggcttgtatatggcttgac

SEQ ID NO: 203431 - DNA, 694 bp, Unknown
  Bacterial polypeptide expressing nucleotide sequence isolated from the Sargasso Sea
aatgagtaatttaaaaaacaaaattattatgatcaccggtgcaagctcaggttttggcaaagagaccgctaagatgtgtgttgacctaggagctaaggtagtacttggtgcgcgaagagaagataaacttgcagatttatgtaatgaactgggatctgattcagcaatatataaagcaattgacgtaacatctaaagagcaaatgcatgcattggctaattatggtatcgagacctttggaagaattgattcattagttaacaatgctggaattatgcctttatctcttcttgagaggggaagaactgatgaatgggaccaaatgatcgatgtaaacattaaaggtgttttatatggtattgattcagtgtattcgcatatgcttgagagagaatcaggtcaaatcataaatatttcgtcggtagccggtaaaagagttatgccaggaagcgcggtatattcaggtactaaatatgctgtcagagcaatatctgaaggtttaagaatagaatcttctggaaagatacaggtaacatgtatttatccaggcgcatttaaaacagagctagcattttcaataaaagatgaatcaatgttagaagcattgatgagtagagggataggggagattgctcaacctgcagagagagttgcagagtcaattatttatgctctccagttagatcctgggggt

SEQ ID NO: 203432 - DNA, 864 bp, Unknown
  Bacterial polypeptide expressing nucleotide sequence isolated from the Sargasso Sea
catgtcaataagatttgatgatagggttgcaattgtcacaggtgctggtggtggtataggcaaagaacatgcgcttgagttagcaagacgaggtgcaaaagttgttgtaaatgatcttggtggaagtgttgatggtagtggtgccagtgatgctgcaaatgaggtagtagatattattaaatctgaaggtggcgaagctattgcaaatggtgccagtgttactaatctggatgctgtaaaagaaatgactaatcaaaccatggaaaagtggggaagaatagatattttggtaaataatgctggaattcttagagataaaagttttcataaagtaaccttagaagattttaatttagtaatggatgttcattttcaaggaagcttgaattgtacacatacaatttttcctataatgagagagcaagagtatggcagaattgtttttacgagctcctctagcggtgtttttggtaactttggccaaactaactacggctctgcaaagatggcaatggttggccttatgaatactttaaaaattgaaggtcagagtaaaaatgtttttacaaactctattacacctgttgcttatacaagaatgaccgagggtttaatcccagaagactttggcaaaaatcttcaaccagaatttgttacacctgcagtgatttatttatcaagcgaaaatgcacctaacggaaccataatggctgctggtgcaggagttttttctagaatatttatacatgaaactatgggagtatctttgggtatgggtgaagacatgacacctgaaaatatcgaagctaattgggacaaaatttctgatatgacagatgcacgagctcttcaaaatggaggaga

SEQ ID NO: 203433 - DNA, 816 bp, Unknown
  Bacterial polypeptide expressing nucleotide sequence isolated from the Sargasso Sea
actaaacaaatggtaaaaaagatggcaaaaaatcctataatttttgcttgtgctaatccagatccagaaattactcctgaagaaatagaagaagtaagaaatgatgctattattgcaactggaagatctgattaccccaaccaagtaaataatttaattggttttccatacatatttaggggtgctttagacgtaagagcaaaaacaattaacgaagaaatgaaagttgctgcttcattagctattgcaaaacttgctaaggaagatgttccagacgaagtagtagcagcgatgggtggagaaagacctcattatggcaaagattatataataccttcaacttttgatccaagactaattagtgtcataccttgtgcagttgcaaaagctgctatgaaaactcgtgttgccagaaaaaaaatagaaaattttgatatttaccaagaccaactaaaagaaagacttgatcctacagtaactattatgcaggggataaacggttatattaagaaaaatcagaaaaaaatagtatttgcagatggagaggatcaaaatacgttaaaagctgctattgcattcaagaattcaagattaggtataccagttctgattggtaaaaaagaaaaaattaaagagcaaataaaaaaaattggatacaatgaaaactttgatatcgaaatcattaattcaaaagataagccaaaaagagaaaaatacgtaaaatttttattcaaaaaacttcaaagagaacaaggtctgcttgaaagggattgtgatagattagttaggaatgacagagtagtatgggcctcatgc

SEQ ID NO: 203434 - DNA, 205 bp, Unknown
  Bacterial polypeptide expressing nucleotide sequence isolated from the Sargasso Sea
aatgtatctaaaaaaaataaatcttaaaaaaaaagttgctctagtaaccggagcgggaaaaggcataggaaaagcttgtgctattgctctagctgaagctggggctgatttaattattataagcagaacacaaaaagatcttgatgcagtttcaaaaattataaaaagatttaaatctaaatgttcatcttatgtttgtgatgta

SEQ ID NO: 203435 - DNA, 625 bp, Unknown
  Bacterial polypeptide expressing nucleotide sequence isolated from the Sargasso Sea
aatggatgtttcaaaagaacttgactggaaatcatttttaaagtttctaaaggttcagaaatttaataagattaatatattagtcaataatgctggtatttaccttggaaaagacattttaaaagttacttcaaaagattttactgaattgatatcaattaaccttttgggaacattttttggtataaagtttattactcctcacttgaaaaaagccggtgaattttcaaattctatgagttctatcataaatcttagttcaatcgctgggttagttggttctagattggaccctctttactcgatgagcaaaggaggaataacaacatttactaaatcaatggcaatatattatggcaatagaaaatatccaataagaattaatcaaatacaccctggtataattgagactgatatgggaaaacaagttgaggattcaagaataattcaaaatccaaatatgtcaaaaaaacagtcctataacgaaggtataaaacaaacacccattggtagacttggtagtccaaatgaaatagctcaaggtattttgtatttagcttcaaatgactcaagttttatgactggatcaagtttagttgtagatggtggtttaacagcacaataa

SEQ ID NO: 203436 - DNA, 445 bp, Unknown
  Bacterial polypeptide expressing nucleotide sequence isolated from the Sargasso Sea
aaaaaaagctgatgtttttttaggtttatctcaagcgggagttctaaaaaaagatatggtaaaaagtatggcaaaaaatcctataatttttgcttgtgctaatcctgatccagaaattactcctgaagaaatcgaagaagttagaaatgatgcgattattgcgactggaagatcagattatcctaatcaagtgaacaatttaattggctttccatatatttttagaggtgctcttgatgttagatcaaaaacaataaatgaagaaatgaaagttgctgcagtcgatgcgatagcttcacttgcaagagaaagagttcctgatgaagtggttgctgcaatgggtggggagagaccagtttatggtaaagattatattattccatccacttttgatcctaggcttattagtgtaataccactcgctgttgctaaagctgcgataaaa

SEQ ID NO: 203437 - DNA, 757 bp, Unknown
  Bacterial polypeptide expressing nucleotide sequence isolated from the Sargasso Sea
attaacaatgtaaaaattgttgttaatggagcaggtgcatctgcacaagcatgtacaaatttatttaaaagttctggcgttaaagatgaaaatattatcatgtgtgatagcaaaggagtaatctataagggtagaaaaaatatcgaccaatttaaatcagcttttgcagcaaatactaaattaagaaccttaaaagaagcaataaaaaatgcagatgtatttttaggtttatcaactaaagatgtggtctctaaagatatgataaaatctatggcaaaaaatccaataatatttgcttgtgctaatcctgatcctgaaattaaaccagaaattattaaagaagttagatcggatgcaataatagcaactggtagatctgattatcctaatcaagtaaataatttaattggttttccatatatttttagaggagctttagatgttagagctaaagaaattaatgaagagatgaaaattgctgcagctaaagcaattgctttattagctagagaaggtgtccctgatgaagttgtgtcagcttatggcggagatagacctaaatatggaaaagattatattatcccctcaacatttgatccaagactaataagtgtaattccatctgcagtagctaaagctgctatcaaaagtggagtggccagaaaaaagattgaagacttcgatctttataaagatcagttaacaaatcgtttagatccatcaatgtcaattatgcagggtatcaatgcaaaagtaa

SEQ ID NO: 203438 - DNA, 866 bp, Unknown
  Bacterial polypeptide expressing nucleotide sequence isolated from the Sargasso Sea
ggagttattcatacttgaaagaaaagaaaatatgaaccaatggaaatctgcacatgcagtaaaaacaaagtgtagaactcttgaagatgcattaaacggagctgatattttttttggtctctcaattggtaatatcattagtcagaaaatggttttatctatggcagaaaaaccaattatttttgcaatggctaatcctgaacctgaaatattgcctgaaaagattaaagaatgtagagatgatgcgattattgctactggaagatcagattatcctaatcaggttaataatgtcttgggatttccctatatatttagaggtgcattagatgtaagggcaaaaacaattaatcttgaaatgaagattgctgcggctagagcaatagctgatctagccaaggaagatgtgccagatgaggtagccaatgcttatcctggaaaaagacctcaatacggtccagattatattatcccttctccctttgatccaagacttattagtaaggttcctccagcagttgctaaagccgctatggatactggtgttgcaaggaaagcaattgttgatattgaaaattactcgaatgagttatctgcgaggctcaatccttctgctggtcttctacaaaaagtttttcaagaagtaaaagaaaatccaaaaagggtaatttttactgaaggtgaagaagaagacatgatcagagctgcagtaatttttctcaacaatagaatgggcactccgatattaattggaagagatgacgtcataaaagataaaatgcaggaaatggggttagatttttttgatcaaatggaaattcacagtactaggaataaatccgaacatgatagatatgccgaacata

SEQ ID NO: 203439 - DNA, 313 bp, Unknown
  Bacterial polypeptide expressing nucleotide sequence isolated from the Sargasso Sea
aatgtacctaaaaaaatataatttaaaaaataaaattgccctagttactggtgctggtaaaggcataggtcgagcttgcgctattgcattagctgaggcaggtgcaaatctattattgattagtagaacaaaaaaagatttggaacaagtttctagaataattaaaaaattaaaagtaaaaagcaaatcttatgtttgtgatataactaattataatgaaattaaagaaataattaataaacaacataatatagatattttaattaataatgctggaaccaatattcctgaacacttcacaaaggtaaaaaga

SEQ ID NO: 203440 - DNA, 595 bp, Unknown
  Bacterial polypeptide expressing nucleotide sequence isolated from the Sargasso Sea
cgatcggaagggcggatcagcagtctctcggaccgccgacgtgaccgagtcaggtgctgtccagcaggttgtttcggacacagtggcagagagtggacgtatcgacatccttgtcaacaatgccgggataatgagaatctcggacatgactgagaaccacattgaagactggacggcaatggtcgacgtcaatatcaagggtgtgctgcattttttgtccgccgtcatgccgaacatgatccagcaagggtccggtcacatagtaaatgttggctcagtagcgggccgacgccctttcccgggggctagtgtctacgcggctacgaaattcgcagtccgggcattgtcctggggactccaccttgagctaggtgcggcccatggtattcgtgtcacggatatccaacccggcttcgtatccaccgatctgctcgccgagcagcccgagactctcacgtcttggagcgaagcatgggctgaacgacgcaccttagaacctgaagacgtggctcgcagtatcgttttcgcggtcacctcacccgaccatgtttcagtaagcgaaatcctagttaggccgaccgaccagccaacctag

SEQ ID NO: 203441 - DNA, 655 bp, Unknown
  Bacterial polypeptide expressing nucleotide sequence isolated from the Sargasso Sea
agctaaattaatattagcagatattaataaagatctactggaaaaagtttcaaaagatttaaatcaagattttttttatacagacgtagcaagttctagtagcatgcaacaattagctaattatgttttaaaaaaatatggaaccattgatattatggtaaataatgctggcataactcatttacctaagccactcgaagaagttagcgaagaagaatttgataaagtttttgcagtaaattctaaatcagtttttctttgtggaaaattttttgttcctcatatgaaaaaacaaaaaaaaggctcgattcttaatattgcttccactgctggaatttctccaagacctaatttaaattggtataatgcaacaaaaggatggatgataacagcaacaaaggcaatggcagtagaacttgctacttttaatgttagagtaaattcactggcacctgttgctggagaaactcctctacttaaatcttttttaggagaggatacttcagaaagacgaaatgctttcttatcaactattcctataggcagattttctactccaaaagatttaggtaatgctgcttgttatctttgttctgatgaggctagtatgataaccggagcaatactagaagtcgacgggggaagatgtatataa

SEQ ID NO: 203442 - DNA, 440 bp, Unknown
  Bacterial polypeptide expressing nucleotide sequence isolated from the Sargasso Sea
catgaaaacacgtgcggctgttgcgatggaagctggtaaaccacttgaaatcatggaggttgatcttgacggtccccgcgctggtgaggtgcttgtcgagattatggccacgggtatttgtcatacagatgaattcacgctgtctggggctgatccagagggcatgtttcccgcaattttaggccatgaaggggctggcattgtacgtgaggtgggcgctggtgtgacaagcgtgaacgttggcgatcacgtgattccactatacacgccagaatgccgcgagtgtgattattgcctgcatccaaaaactaatttgtgtcaggctatccgtaccacccagggtcaaggtgttatgcccgatggcaccagtcgattttcattaaatggcaaaccaattttgcattatatgggcacgtcgacattttcaaatttcactgtat

SEQ ID NO: 203443 - DNA, 964 bp, Unknown
  Bacterial polypeptide expressing nucleotide sequence isolated from the Sargasso Sea
tgattttactatggtatcaaatggagcaggtgctgcaggtatagcgtgcgcagaattattaaatgctatgggagttccaaaaaaaaatattactatgtgtgatacaaaaggagttattcaccgagagagaacagatttaaatcaatggaaatctgcccatgcgattactacaaaaaaaagatctctaaaagaagcattagaaggagctgatgtagtttttggactatctgttaaaggagccttctctcaagaaatgatggaaaaaatggctaaaaaccctattgtttttgctatggccaatcctgatccagaaattacacctgaagacctcaaaaaaattagacccgacgctattatagcaactggaagatcggattatcctaatcaagtgaataatgttttaggttttccatttatatttagaggggcgttagatgttcgtgcatccagaattaacatggaaatgaaaattgcggcagcaaatgctttagctcaaatcgcaagattagatgtgccagatgaagtagctgctgcatacagcggagcagagttgcattatggtcctgaatatattattccaactccttttgaccctagactcataaccactgttccaccggcagttgctgaagcagccattaggtctaaggtagctaaaaaacctcttaaagatgaactatcctacagaagagaattagctatgaggttggaccaaacagcatctatgatgcaagtgatttcatcacgcgtaaaagacaatcctaaaaaaatagtttttgcagaaggcgaagaagaaagaattattagagctgcttttcaatggaccaaagaaggttatggagaatcaattttaattggcagaaacagtagggtattaaaggcaatagaaactttagggttagatcctgaacaaaaaggagttcaaattttaaatgctaaaaatagcaaaagaaatgatcactat

SEQ ID NO: 203444 - DNA, 838 bp, Unknown
  Bacterial polypeptide expressing nucleotide sequence isolated from the Sargasso Sea
atggaaggaaaagcagtactatttaaaagatttgcagatatagattctatcgacctagagatagattcaaaaaactctgatgaaataattaattcaattaaaaattttgcgccttcttttggtggtataaatttagaagatatagcggcgcctgagtgttttattatagaagaaaaattaaaagaaattttagatattcctatttttcatgacgatcaacatggtacggctattattacaacagcggcattaattaatgcattagatattaatgggaaatcaatttctaaagtgaaaattataattaatggagctggagcatcagcaatggcttgtgctaatttatttaaaaaaagtggtgtgcctcaaaaaaatatcacaatggttgatagaactggtgttatttacaaaggaagaaataaactaaataaatggaaatcactgcatgctgttaaaacgtcagatagatctttaaacgatgctattgaaggagctgatgtatttttaggtctctcagcaaaaggtgctttgtcaaaaaatatggtaaaaaaaatggcaaaaaatcctataatttttgcatgtgcaaatccagaccctgaaataacacctgaagaaatcgaggaagttcgtgatgatgcgatcgtagcaactggtagatcagattatccaaaccaagtaaataatttaattggttttccttacatttttagaggagcactcgatgttcgtgctaaaaccattaatgaagagatgaaagttgctgcatctttagcaattgcaaaactggcgagagaagacgttcctgatgaagttgttgcagctatgggaggagaacgac

SEQ ID NO: 203445 - DNA, 847 bp, Unknown
  Bacterial polypeptide expressing nucleotide sequence isolated from the Sargasso Sea
aaagacaaaaatattacaatgctagattcaaaaggtgttattcactctgaaagggataatttgaatgagtggaaaaagaaatttgctatcaaaacaaaaaacagaactctaaatgatgcaattaatggggcagatgtatttttgggtctgtctcaagctggtgtattaaaaaaagagatggttaaaaaaatgtcaaagaatccaattgtgttcgcatgtgcaaacccagatcctgaaatcactcctgaggatgttgaagatgtaagagatgacgccattatagctaccggtagatcagactatccaaatcaagtaaataatttaattggttttccatatatttttaggggagctcttgatgtaagatctaaaacaataaatgaagaaatgaaagttgctgcggtgaaagctattgctactttggcaagagaaagagttcccgatgaagtagtagcggcaatgggtggggatagacctcactacggtaaagaatatataattccatcaacttttgatccaagattaataagtgtaattccagttgctgttgcaaaagcagcaatcaaaactggtgttgcaagaaaaaatattgaggattttgatgtttatgccgagcaactaaaaaaccgcctagacccatctgtagcggtaattcagggaataaattctcaaattaaaaaaaatcaaaaaagagtggtgttcgcagatggtgaggatgaaaataatttgaaagcggcgatagcatttaaaaataatggacttggcgagcccattttaattgcgaaagaagatatagttaaaaagaagttatatgaaattggttatgaagaaaaacttgatataaaaa

SEQ ID NO: 203446 - DNA, 729 bp, Unknown
  Bacterial polypeptide expressing nucleotide sequence isolated from the Sargasso Sea
tgagccgccgcgttcttgtgacgggtgccagccgcggcattggccgcgccatcgcctaccaactggcctccgacgggtttgacgtgtccgtgcattgccgcagcggccgtgccgaggccgatgccatcgtcgcagacatccacgcaaaccatggcagcgcccgcgtgctgcagttcgacgtgcgcgaccgcgccgcctgtcgcacccaactcgacgccgacgttgaagcccacggcgcctactacggcatcgtcctgtgtgcaggcgtcacgcgcgacgctgccttccctgccctgaccgacgaagactgggacatcgtcctcgagaccggcctggatggcttctacaacgtcgtccaccccctcaccatgccgatggtgcgcgcgcgcaagggtgggcgcatcgtcaccatcgcgtctgtctctggggtgatgggcaatcgcgggcaggtgaactacagcgccgccaaggccgggctgatcggcgcaaccaaggcgctggccgtcgagcttgcgtcgcgcaagatcaccgtcaactgtgtagcgccgggcctgattgaaaccgacatgctcgcccacatggaacacgtggaccaggccctgcgggccgtgccgatgcagcgcgtcggacagcctgcggaggtggctgcggtggtcggtttcctgatgtcggatgcggcgtcgtacgtcactcggcaggtgatcggcgtgaatggcggaatggtctgat

SEQ ID NO: 203447 - DNA, 208 bp, Unknown
  Bacterial polypeptide expressing nucleotide sequence isolated from the Sargasso Sea
gatgaaaaaaatttcccttataggcgctggacaaattggtggcacacttgctcatctgatcgcaataaaagaattagctaatgtagtattatttgatatcgacgagggtattgctaagggaaaagcattagatatagctcagtcattggctgttgacggttataatgttaagttatcaggtacaaataattatgaagaaaccaaagac

SEQ ID NO: 203448 - DNA, 776 bp, Unknown
  Bacterial polypeptide expressing nucleotide sequence isolated from the Sargasso Sea
ccatgacgaccaacacggcacagccatcatcgcgggggccgctctccttaacgcactagagatcacggaccgatcggtccaggatgtccgagtggtatttagtggagcgggagcttcagccctctcaaccgccgagcacttccagcgtctgggggtgaagaaggaaaacattctcatcgtagactctgtgggggtcatttatgagggccgtgaagagcggatgaacgagtacaagactcctttcgcggttaagacagatagacgcacgctcgaagaggcgatgaaggacgcagacgtctttatcggtctctcggtcaagggaatcgttagcaaggacatggtcaaaggcatggcggctgaccccattatcttcgcgctcgcaaacccggatccagagatccttcccgaggacgtagcagaggttcgccaagacgcgattatggcgaccgggagatcggattatccgaatcaggtgaataacgtgctaggattcccgttcatattccggggtgcccttgatgtgagagctaaggccatcaaccccgagatgatgttggccgcaacgaaggccctagccgatcttgctcgtgagcaggtgcccgaggcggttaggggggcatacgagggaagtgagatcgcctacggtcgtgattatctcattccaaagcctttcgaccgcatggtactgtaccacgtggctccggcggtggcccaggcagcgatggactccggggttgctcgaatagatgtcgagttaggcgagtatagtgatcggc

SEQ ID NO: 203449 - DNA, 820 bp, Unknown
  Bacterial polypeptide expressing nucleotide sequence isolated from the Sargasso Sea
ggattaggaaatcttggagctctagcatcaaaaccagttatggaaggtaaagcgatattatttaaacgttttgcagatatagactctatagatttagaaatagattcatcaaatgctgatgaaattattaattgcataaccagtctttccaaaagttttggtggtataaatttagaagatatagctgctccagattgtttcgtaatagaacaaaaattgagagaaaaattagatattccaatatttcatgatgatcaacacggtacagcaattataactttagcagcattaattaatgcattagatatatcaggaaaatcactgaaagatattaaagttgtcgtaaatggtgctggcgcatcggcaatagcttgtacaaatttatttaaaagcagcggagttccaaacgaaaatataattatgatagatagaaaaggagtattataccgtggaagagataacttagatcaatggaaatctactcatgcaatagatacaaaattaagaaatcttaaagaagcaataaaagatgcagatgtatttttgggtttatctgcaaaggatgtgcttacaaaagatatggtaaaatcaatggcaaaaaatcctattatttttgcctgcgcaaaccctgatccagaaattagtcccgaagatgtccatgaagtaagacaggatgcaattgtagcaactggtagatcagattacccaaatcaagttaataacttaatcggatttccatatatttttagaggtgctctagatgttagagcaaaaaatattaatgaagaaatgaaagttgctgccgcacatgcaatagcaa

SEQ ID NO: 203450 - DNA, 206 bp, Unknown
  Bacterial polypeptide expressing nucleotide sequence isolated from the Sargasso Sea
catgaaagcagccgtttttagagaagttaatgtaccgatggagatagaagaaataactgtctctaaacccggaccaagagaggtgttgataagaaccacggcagccgggatttgtcacagtgacatgcatttttttaatggtagttatcccggcaaagtgccaatggttttaggccacgagagtactggaatcgttgagcaggtcg

SEQ ID NO: 203451 - DNA, 856 bp, Unknown
  Bacterial polypeptide expressing nucleotide sequence isolated from the Sargasso Sea
ggaaaatctgtattatttaaaagatttgctgacattgactctattgatattgaaattaataataacaaaacagactctataattgaaacaattaaaaatataagtggaacttttggtgggattaatctagaggatattgctgcacctgattgttttattatcgaacaaaaactaaaagaagttttagatatacctatttttcatgatgaccaacatggaactgcaattattactactgcagctttgatcaatgccttagatgtttctggaaaaaaaattaacaatgtaaaaattgttgttaacggagcaggagcgtctgctcaagcatgtacaaatttgtttaagagttctggtgttaaaaatgaaaacattactatgtgtgacagtaaaggagtcatttataaagggagaaaaaatattgatcaatttaaatctgcttttgcaatagacaccaaactaagaaccttgggggaagcaattaaaaatgctgacgtttttttaggtttgtctgctaaagatgttgtctctaaagaaatggtaaagtctatggcaaaaaatccaataatatttgcatgtgccaatcctgatcctgaaattaaaccagaaattatagaggaagtaagatctgacgcaataatagcaactggtagatctgattatccaaatcaagtgaataacttaattggttttccatatatatttagaggagctctagatgttagagcaaaagaaattaacgaagaaatgaaagttgctgccgcaaaagcaattgccttattagctagagaagatgttccagacgaagtcgtgtctgcttacggtggagatagacctaaatatggaaaaaatatataat

SEQ ID NO: 203452 - DNA, 790 bp, Unknown
  Bacterial polypeptide expressing nucleotide sequence isolated from the Sargasso Sea
gatgagggcagcaatcctaagagatgacagtggtactttaaatattgaggacgtcacaattgataaacctgatcgtaatgaggtgctgatcaagacagttgcttcagggctatgtcacagtgatcttcacttcatagatggaagttggtcttttttagctatgtatcccatgcttctaggccatgaggctgcaggggtcgttcaagctgtaggtgaggacgtcgtcggtatccagactggggatcatgtgattacttgtctatcaatgttctgcggctactgcgaacgctgtttgacggggcacagctatatctgttcagagagacaacaagtacaaggccgccaacctggaaaccagccaagaattaccgaccatgatggtgcagaagtgaaccagtttacgggtataggttctttcggagaagagatgctcgtgcatcagaacggagtcgttaaaatcagcaatgatatgccccttgatagagcggcgttggtcgggtgcggagtcacaacgggggtcggtgctgttttccgcagtgcagaggttaaaccaggctcaaccgttgcggtcgttggctgcggaggtgtcggaatatctactattcaaggtgctcatctagcaggcgccaggcagattatagctgttgacttggaacagcaaaagcttgactgggcaacacaattaggagctacccatacagtcaatcccaatgatggtgatcccgtagcacaggtcctcgaactcacaagtggcggggtggactatagctttgaggccatagggcttaaa

SEQ ID NO: 203453 - DNA, 884 bp, Unknown
  Bacterial polypeptide expressing nucleotide sequence isolated from the Sargasso Sea
gaaattaggtcatgcaataaaaactaaaaatagaacattgaatgatgcaatagtagatgctgatgtttttttaggtttatcatctgcaggtattttgaaaaaagaaatggtaaaaaaaatggcaaaaaatccaatcatatttgcttgtgctaatcctgacccagaaataacacctgaagaagttgaagaggttagaagcgatgcaataatcgctactggtagatcagattatccaaatcaagtaaacaatttaattggatttccttatatttttagaggcgcactagatgtaagagcaaaaactataaatgaagatatgaaaattgcagctgcaaatgctattgcatctttagctaaaaaaagagttccagatgaagttgttgctgctatgggcggtgataggccaatatatggaagagattatattattccctcaacatttgatccaagattaattagtgttataccagttgctgtggctaaagccgcaatgaaaagcaaagtcgcacgaaaaaaaataaaaaattttgatatttattcagaaaaattaaaacaaagactagacccatctgtaactataatgcagggtataaactcaaaaataaaaaaaaatcaaaaaaaagttgttttcacggatggtgaagatgaaaatactttaaaggctgcaatagcatttaaaaatgctggactaggagtacccataattattgcaaaagaaaaagttgttaaacaaagattaagacagataggttatgtagaaaatcttgatattcaaatcataaattccactgacaaaacaaagacggataaatattcaaaatttatttttaaaaaattgcacggagataaaggtagtctcgaaccagatgttaacgaattatatt

SEQ ID NO: 203454 - DNA, 514 bp, Unknown
  Bacterial polypeptide expressing nucleotide sequence isolated from the Sargasso Sea
aatgttgttaaaaaataaaacagctgtaataactggctgtaatcgaggtattggattttctattttagaaacgtatttaaaaaacggagccaatgtcatcgcttgtgttagaagtgaaagtgaattatttagagataaaattgatttgttttctaaaaaatttgaagcaaaagtaaatgtagtaaaatttaatctagaaaatgaggaagaaatagaaaaaggttttttagaaattaaaaagatttcccctaaaattgacatactggtaaataatgcaggaataaaccaaatgtctctatttcaaatgacaactttaaaaacatttagatcagtttttgatgtaaattttttttctatagtaagtttaactcaaaaaatactcaaaataatcgtaaaaaaaaacaattctaaaataataaatattgcatcaaatgcagctgatctttcatcgcaaggtagagcagcctatgcacccagcaaagctgcattattatctttacgaaagtatatcaaa

SEQ ID NO: 203455 - DNA, 937 bp, Unknown
  Bacterial polypeptide expressing nucleotide sequence isolated from the Sargasso Sea
tggagcgggagcttctgctcaagcctgttctgatttatttaaaaattcaggagtgcctaataaaaatttgattatgattgatagaaaaggtgtaatttataaaggtagatctgaaggagtaaatcaatggaagtctaaacatgcaaatgaaacaaaacttcgtactttagatgaagcaatagttggtgcagatgtatttttaggcttgtctgcaaaaggagctttaaaaaaagaacaggtaaaaaaaatggctaaaaatcctataatttttgcttgtgctaatcctgatccagagatcactcctgaagaaatttatgaggtaagagatgatgctattattgcaacaggaagatctgattatcctaatcaagtaaataatttaattggttttccatatattttcagaggagctttagatgtaagatcaaaaacaattaatgaaaaaatgaaagttgctgcagctcaagcaattgctaaacttgcaagagaagaggttcccgatgaagttgtagccgctatgggcggagaacgaccacattatgggaaggattacataataccttctacatttgatccaagattgataagtataatcccagcagctgttgcaaaagctgcaatggatagtggtgttgcaagaaaaggtattgataactttgatttgtataaagaacaactcaaacaaagattagatcctacagttaccattatgcagggtataaattcttatattaaaaaaaatcaaaaaagaattgtatttgctgatggagaagatgaaaatacacttaaagcagcaattgcttttaaaaattctaaattgggtattcctatattaatcggtaaagaagaaaaaattaaagagcaaattaaaaatattggttacagtgaaaactttaacattgaaattgttaactctaaagatgaagaaaaaagaaaa

SEQ ID NO: 203456 - DNA, 754 bp, Unknown
  Bacterial polypeptide expressing nucleotide sequence isolated from the Sargasso Sea
ttgaaaaatttaagaggtaaaaacgcgatagttacaggtggtgctaaaggcattggtaaaagcgtttgtctagccttagctaatgctggagcgaatatacatatattagatatcaataaagacgagggacaagagaccgtaaaagaaattgctaaattaaatgttcaagtaagtttttatcaaatagatgttgcagacgataattcatggattgaattttctaattttttaaaaagtaagaaaattcttatagatattttagtaaataatgcgggcatttggattggtaaagatattaataatgtatcgctagaagaatatcagagacttatatctattaatttaactggtgtatttcttggtattaaatatttagtaccctttttgactgaggcagggaaaaaatcaaaatttggaagtactataattaatcttagttctgtagctggtcttgttggttctcaacttgatccattatattcaatgacaaaaggtggtataactactttcacaaaatcaatggcaatatattttggaaaaaataaatttccaatcagaattaatcaagtccatccaggtattatagaaactgacatgggaacacaagtctataaagcaagaattagtcaaaacccagagatgacaacagaagagtctatttcagctggcattaatcaaacacctattggtcgtcttggaacagctgatgaagttgcgaaaacaattttatttctatcctctgataactcaagtt

SEQ ID NO: 203457 - DNA, 168 bp, Unknown
  Bacterial polypeptide expressing nucleotide sequence isolated from the Sargasso Sea
tatgtcaaaaaaaatatcattaattggcgctggtcaaattggaggaacgctagcgcatctaattggtctaaaagaattagctaatgaagttgtattatttgatgtagcaagtggtattgccaaaggaaaagctttagatattgctcaatcttcttctgttgatggatt

SEQ ID NO: 203458 - DNA, 898 bp, Unknown
  Bacterial polypeptide expressing nucleotide sequence isolated from the Sargasso Sea
gtttaaatcagcttttgcaatcgatactaaactaagaactttagatgaggcgattaaaaatgcagatgtattcttaggtttatctgcaaaagatgttgtttcaaaagaaatggtaaaatcaatggctaaaaatccaattattttcgcatgcgcaaatcccgatccagaaataaaaccagaattaattcaagaggttaggtctgatgcaattattgcaactggaagatctgattatcccaaccaagtaaataatcttattggatttccatatattttcagaggtgctctagatgttagagctaaagagataaatgaggctatgaaagttgctgctgcaaaagcaattgcattattagcaagagaaaatgtccctgatgaagtggtttcagcttatggcggggatcggccgaggtatggtaaagattatattataccatcaacttttgaccctagattaataagcgtgatcccttcagcagttgctgaagcggcgatgaaaagtggtgttgcaagaaaaaatatcactgatttggaaatttatagagatcaacttactaatcgtttagatccgactatgtctttaatgcagggtataaatgcaaaagtaaggaaaaatccaaaacgagttatatttgctgaaggtgaggatgaaaatatgctcaaagcagctattgagtttggtagaaataaattaggcactccaattttaattggagctgaaaaaagaattaaagagcagttaaatagcataggcttagatgaaaattataaaattgatattgttaactctacagataaagaaaaaagacagagatatgtcaaacatctttataaaaaacttcaaagagagggtcaattagaaagagatgtagatagattagtacgaaatgatcgtatg

SEQ ID NO: 203459 - DNA, 849 bp, Unknown
  Bacterial polypeptide expressing nucleotide sequence isolated from the Sargasso Sea
aagtcggaacatacaattgaaacaaaaaatagaaccttggaagaagcaataaaaaatgccgatgtttttctaggcctgtcttcaaaaagtattttaacaaaaaaaatggtaaaaaaaatggcaaaaaatccaattatttttgcatgtgcaaatccagatcctgaaattacacctgaagaagttaaagaggttcgtaatgatgcaataattgcaactgggagatctgattatccaaatcaagtaaataatctaattggttttccttatatttttagaggagctttagatgtgagagcaagaacaataaatgaagaaatgaagatagcggcagctaacgcaatagcggcacttgcgagagaagatgttcctgatgaggtggtcgctgctatgggtggtgaaagaccaaagtatggaaaagaatatattattccatcgacctttgatccaagattaattgttgaaatacctgtggcagtggcaaaagcagctattaaaagtggtgtagcaagaaaaaaaataagtgattttgaattgtataaagaacaactaaaacaaagactggatccttccgttacaataatgcagggtataaataatcaaattaagaaaaaacaaagaaaaattgtttttgcagatggagaagatgaaaatactttaaaagctgcaattgcatttaaaaatagtaaattgggaattcctatactcgtaggcaaaaaagaaaaaattaaagaacagctaaaaaatattggatatagcgaaaatctcgatattgaaataataaattcgactgacaaagaaaaaagggcgaaatacgcaaattatttatttaaaagattacaaagaaaagaa

SEQ ID NO: 203460 - DNA, 667 bp, Unknown
  Bacterial polypeptide expressing nucleotide sequence isolated from the Sargasso Sea
atgacaagaatggatttgttaaaaattaacgcaggagttgtaaaagacgttgttggtaacataaagaaatttgcagatgatgcaatgattattccggttacaaacccattagatccaatggcacaaattgcatacaaaacttcaggatttgatagaagtagagtttttggaatgggtggaatgttagacttgtcaagattcaaacaattcatacatgaagcaacaggatattcccgtgaatcaacaaaagcattagtgattggagaacatggtgaaaacatgttaccgttaacaagatttgctacagtatcaggaattccattacctacattacttccaaaagaaaaacttgatgagattttcacagcaacaaaaggtgtagctgcagaagttatcaaactaaaaggagcaacagtacatgcaccaggaaatgcaatttcagccatgatagaatcagtagttcaggacaaaaaacaggtaattccagtttcaactaacttagatggggaatatggacaaaaggatgtttcaattggagttccagcagtagttggaaagaatggagttgagaaaatactcgagttagaactaaacgatgaagaaaaagaatggttcaacaaaggggttgacagtgtcaaaaatgcattgtcaggtgttgaattttaaa

SEQ ID NO: 203461 - DNA, 853 bp, Unknown
  Bacterial polypeptide expressing nucleotide sequence isolated from the Sargasso Sea
gatcttgcttatgattacacaagtaaaggtaacttagtagcagtgataagtaatggatctgctattttaggacttggtaatcttggtgctttagcatcaaaacctgttatggagggtaaatcagttttatttaaaagatttgcagacatagactctatagatatagagataaataataacaatcctgattcaattattgaaacaataaaaaatatcggaggaacctttggaggaattaatcttgaagatatagcagctccaaattgtttcattatagagcaaaaattaaaatcacttttagatatacctatcttccatgatgatcaacatggtactgcaataatcactactgccgcactcatcaatgcattagatatttcaaaaaagaatattgaaaaggtaaaaattgttgttaatggcgcaggtgcttccgctcaagcctgtgcaaatttattcaaaagctcaggggtaaaaaatgagaatatcataatgtgtgatagtaaaggtgttatctacaagggacgtaaaaatatcgatcaatttaaatcagcatttgcaattgaaactaaactaagaactttagatgaagcaataaaagatgcagatgtattcttaggcttatctgcaaaagatgttgtttctaaagaaatggtaaaatcaatggcagaaaatccaattattttcgcctgtgcaaatcctgatccagaaataaaaccagaactaattcaagaagtaagatctgatgcgattattgcaactggaagatctgattatccaaatcaagttaataatcttattggttttccttatatttttagaggtgctctggatgttagagctaaagaaataaatg

SEQ ID NO: 203462 - DNA, 631 bp, Unknown
  Bacterial polypeptide expressing nucleotide sequence isolated from the Sargasso Sea
ttggcgatacataagatcttaagtgaggaaagacaagtggatagacttgatggaagaacagctttggtcacaggagcagctagaggcttaggagctcagatcgtccgtcgattcgctgaagaaggggcccacgttattgttaatgacttaaacctgactgcggcccaggaaactgctaaaaaatacagcggtgatgcttttgcctgtgatgttagcaattcatcagaagtggaccgcatgtttctagacattgccgctaaaggtttggagatagatattcttgtaaataacgcagggatcagcggtttagaaggggataatcaagcgcaagagagagtaaggaagtcgctgaaagttgccgaggcctcggcgaagggtgaacttcctgatatagaccctcctattttagaagtcactgactcggcttggtccaaaatgctcgcggtacaccttgacggtacttttttttgcagtagagcttttgtaaaaaattttagagacagtaatagcctaaacggaatcggtcgcgcaatcattaatatgggtagtatcatgggcacctctggtggcgcaggctctgctgcttattgcgctgccaaggccggcattttagggcttacaagatcttagc

SEQ ID NO: 203463 - DNA, 899 bp, Unknown
  Bacterial polypeptide expressing nucleotide sequence isolated from the Sargasso Sea
taagccggcagaaaccgtaaccgacctggcgctggcgtatagcccgggtgttgctgagcccgtgcgggaaattgctgccgatgtcgacaatgtctacaaatacacagctaagggcaacctggtggcggtaataagcaatggcactgctattctggggctgggtaatctggggcctatggcgtccaaacccgtgatggaaggcaaggctttactgtttaaacgttttgccaatattgactcgattgatatcgaagtaacacatcgttcaacagaagagtttattaataccgttgctaatattgctgatacttttggtggtattaacctggaggatattaaagcgccagagtgctttgagattgaaaaagagctgattaagcgctgcaaaataccggtgtttcatgatgatcagcacggtacagccatcgtgacagcagcagggatgttaaatgcgctggaaatccagggcaaagacatcaggcaagcgattattgtgtgtatgggggcgggcgcagcagctatcgcctgtatggaactactgattaaatgcggcgctcagcgcgagcatatctacatgctggataccaaaggggtgatccatacccgccgtaacgacctcaaccagtataaacagctgtttgccaacaataccgataagcgcacgctggaagatgcattaaccggggctgatgtatttgttggtgtatccgggccggatgtattgcctcctgaggcattacaactaatggctgaaaagccggttatctttgcctgctctaaccccgatccggaaattaagccggagctggcgcatgcagcccgtaatgacatcattatggcgacaggccgctcagattacccgaatcaggtgaacaacgtgctgtgcttttcgtttatct

SEQ ID NO: 203464 - DNA, 914 bp, Unknown
  Bacterial polypeptide expressing nucleotide sequence isolated from the Sargasso Sea
aaatgggaaaagaatccaataatatttgcttgtgcaaacccagatcctgaaataactcctgaggatgttgaaactgtaaggaatgatgcaataatagccacgggaagatctgattatccaaatcaagtaaacaacttaattggatttccttatatttttagaggagcattggatgttagagcaaaaacaataaacgaagaaatgaaaattgcagccgcagatgcaattgctgcattggcaagagaaagagttcctgatgaagttgtagccgcaatgggtggcgatagaccaaaatatggcaaagattatattattccttcaacatttgatcctagattaattagtgtaattccagttgctgttgcaaaagctgctataaagtctggagtggcaagaaaaaaaatagaaaattttgaaatctactcagagcagcttaaacaaaggcttgatccatctgtaactataatgcaaggaattaattcccaaattaaaaaaaatcaaaaaagagttgtttttgctgatggagaggatgaaaataatttaaaagccgctatagcatttaagaatagtggtttagggatacctattataatagcaaaagaagagatagttaaaaaaaaactaaaggaaataggttacggtgaaaattttaatattgaaataataaactctaaaaataaaaaccttagagaaaaatacgttaaatttttatttaacaaacttcatagaaaagagggtttgcttgaaagagattgtgataaaatggcaagaaatgatagggttgtttgggcttcgtgcatggttgagtgtggagatgcagacgcaatggtaacaggtaacacaagaagatattcatcgtctttaaaaaaagttacaaaagttatagatgccagacccggcgagataatgtttgg

SEQ ID NO: 203465 - DNA, 637 bp, Unknown
  Bacterial polypeptide expressing nucleotide sequence isolated from the Sargasso Sea
aagaggcggctaattttagttaaatctcatttgggcaaaaatggcttagattgtctcgtaaataatgcaggtattaatatttctggtcctatggagtatgtagaatctgatgaagtgagaacagtctttgaagttaatgtaatggggccattaaattgctcgcagtcatttctgccaatgctaaaaaaatcctcggcggcaactattattaatataagctcaatggccggcaagatcggtctgccaatgcaaggatcatattgtggcagtaaatttgcgcttgaaggaatttctgaatcaatgcgaagagaacttcaaatccataatatcaaagtggttgtaattggtcctggtgcaattgaatcatcaatttgggataagtttgaaaaagatgagatggaagaacaatataaggatacagaatatacatcagcaataaaaaaaatggacggcactcttaaaagagcaagaagcatagctattccagctcatcgagtagccaaaaaagttgagaaaattgttaattctaagaatcctagaccaagatatgtagttgctggcataacagacaaaatgttaaatcttattccaagaaagatccttgatagagcttttaagaggttattaacgaaataac

SEQ ID NO: 203466 - DNA, 683 bp, Unknown
  Bacterial polypeptide expressing nucleotide sequence isolated from the Sargasso Sea
tatggatctcaataaaaaagtagcattagttacaggtggagcttctggtttaggacaagccactgttgaagcttatgtggctaaaggagcaaaagcagtcatcttagacataaatgaagataaggccctagaaataataaataatctcggtgaagacaaagtcatgtttatatctactgatattatgaaagaggatccagtagtagaggctgttaataaaattaaagataattttggagggcttcatattgcagttaattgtgctggaactggatacccaggaagaatattaggtaaagaagcgcctcatccattagatgcctttcaatttattgttaacttaaaccttgttggaacttttaacgtcatgagaatagcagctgaattaatggataagaatgaaccagatgaaaaaggtgaaaagggggttattattaatacggcttctattgcaggtattgagggtcaaattggtcaatcagcatatagtgcatctaaagcaggtgtaattggattaactattactgctgctagagatcttgcaagacacgccataagagtatgtacaattgctccaggaatttttgatactccactaatgcaattagctccagataaggtaaagagatccttattagaaatcactcaatttcctcatagatttgggcacccaaatgaatttt

SEQ ID NO: 203467 - DNA, 443 bp, Unknown
  Bacterial polypeptide expressing nucleotide sequence isolated from the Sargasso Sea
tatgaaaagattaaataataaagtagccattgtcacgggtggtgcatcaaacccaggtcttgggcattcaacaattcataagtttgcagaagaaggtgcaaaaattgttgtgacagatattgatgttaaaggtggtgaaaaaacagtttctgaggttatagaaaaaggcggtgaagccatttttataaaacaagatgttgtttcaacagaagattggaaaagtgttgtagatgcttcaatatcagaatttagtaaaattgatatattggtcaataatgcaggaatagctttaatagggcctttcgaggaattttctgaagatcaatgggatcaacaaatcaatgtgaatttgaaatctgttttccttggttgcaaggctgttatacctgagatgaaaaaaaataactctggttcaataatcaatctttcatcaatagccggtt

SEQ ID NO: 203468 - DNA, 586 bp, Unknown
  Bacterial polypeptide expressing nucleotide sequence isolated from the Sargasso Sea
atgattcatgatgtgtccgatgaagcatcatggtcagaattagttgaatctgtttttaaaaagtacggaagaattgatattttagtcaacaacgccggaatcgggacacttccggattttgaagaggaagatgaaagcggttgggatgagatgctctcggtcaatgcaaaatccatttggctaggaatcaaatcagttgtttccataatgaagtctcaacaatccggttcgatagtcaatgtttcaagcatttttggagcatcaggtggtttcggcaaatcttcttcctatcatgccagcaaaggagcggtcagcgcaatgacccgtaatgcagcgataaggtatgccaatgacaacattcggatcaattcagtgagtcccggtttcatcaaagttttgcgtgaggaaaaaaccattgaggaggctggagacacaatgtctcaggatattctttcccgaactccaatgggacgttggggggatgctgacgaggttgctgcagccatctattttttggcaagttcagaatcaagttacatcacaggagcagaactctttgtggatggcggctggatggcaacatgaa

SEQ ID NO: 203469 - DNA, 235 bp, Unknown
  Bacterial polypeptide expressing nucleotide sequence isolated from the Sargasso Sea
atgagcaagatatctttaataggagctggacaaattgggggaacattagctcacttgattggaactaaagaattatcagatgaagtagttttatttgatgttgcgagcggtatagcaaagggcaaagcactagatattgcacaatcatcttctgtagatggatttgatgtaaaattttcggggaccgataattataaagatataaaaaattcagatgtaataattatactgcagg

SEQ ID NO: 203470 - DNA, 557 bp, Unknown
  Bacterial polypeptide expressing nucleotide sequence isolated from the Sargasso Sea
ttcatttgaaaatatagactcagcaacgcaagaagttataaaacaatttaaatcaatcgacatattagttaataatgcaggtattgctggtccaagttttaagacttgggattaccctttagaagaatggcaacaagttatcgatattgacttaaatggtgttttttattgttctaaagctgttgtacctcatatgattaaggctaattatggtcggatagttaatattgcatctatagcagcaaaagagggaaatccaaatgcaatgccttatagtgccgctaaggcaggagttgttgcacttacaaaatcacttggaaaagaattggccgaaaataatatttcagttaattgtgtaacacctgctgcagctaaaacaaaaatatttgatcaaataagccaggaacatattgattacatgctatctaaaattccaagaggcaggtttttaaaagttaatgagcttgcatctatggtttcctggttagtatcagaagaaaattcatatactacaggtgcagtttttgatcttagtggaggaagggctacttattaat

SEQ ID NO: 203471 - DNA, 618 bp, Unknown
  Bacterial polypeptide expressing nucleotide sequence isolated from the Sargasso Sea
atcaagaaattcttaataaaataaacataaaaaatactataaaaaaggttgttgatgtttcatcatataaaagtgtttcatatgggttagaaacaaccctacaagaattaggacaaatagatattttagtaaataatgctggtattgcaggaccaagttataaaacttgggattatccaattgaagaatggcaaaaagttattgatatcgatttgactggagtttttttttgttgcaaagcaattgttcctcatatgaaagaaaaaaattatggtagaatagttaatatttcatctattgctggtaaagaaggtaatcctaatgcaatgccttatagtgctgccaaagcaggtgttattgcgttaacaaaatctcttggaaaagaattagctgaaaataatatagctgtaaattgtgttacaccagcagcagcaaagacacgaatttttgatcaaataagtcaagaacatattgattacatgctttcaaaaataccacgtaatagatttgtattagttgaagaattagcctctctagtaacttggatggtttctgaagaaaattcttttactacaggcgctgtttttgatctaagtggtggaagagcaacatattaaa

SEQ ID NO: 203472 - DNA, 876 bp, Unknown
  Bacterial polypeptide expressing nucleotide sequence isolated from the Sargasso Sea
gttgcgggtatccctactgcttgggttgctcggtggggctcgggccggcctgtcatttctttcggttcagacatagacgggattccaaaagcgaaccaaaaaccgggtgttgcttatgccgaccctcttatttctggtgcgcctggacacggtgagggacacaactcaggacaagctgtaaacgtggtagctgcacttgccctgaaggaattgatggagtctgagggcatccaaggaacactagttttgtggcctggcgtcgctgaggagcagctagctagtaaggcttggtacgtaagagacggtgtccttgatgacgttgatgtgacgctgtttacccatgtgagctcgaacttgggcgtgagttggggtcaagctggtggaacggggctggtctcggtcgagttcagttttgagggtgaagctgcgcacggggcaggcgcaccatggcgaggccggagtgccttggatgctgtcgaactaatgaacgttgcttggaatttcaaacgcgagcacctgcgcccggatcagaggtcgcattacgtcattactgacggtggcgatcaacccaatgtcgtgccggtttcagcgtcggtctggtactacttccgggaaatggattacgaggacatccagagaaactacgatacagccgttagaatagccgaaggcgcggcgatgatgaccgacaccgagatgagttaccgcgtgcgcggagcggcgtggcctcgtcacttcaatcgaacagtcgcagagacgatgtatgaacatattgaggaggttggtctcccggagtggacggaggacgatcacgcgttcgctgaagccgtgcagcagtcggtgggaagtattccgtctggaatgcccatgtcccta

SEQ ID NO: 203473 - DNA, 886 bp, Unknown
  Bacterial polypeptide expressing nucleotide sequence isolated from the Sargasso Sea
gcggcacctggttaaagaaatttataaaaatcctgaaatggcatactattttacaactaaaggcaatctagttgcagtaataagcaatgggtctgcaattttagggttaggcaacctaggagcaattgcatcaaaacctgttatggaaggcaaagcggtattatttaaacgatttgcagacatagacgccattgatttagagattgatagcaaagatcctgacgaaatagttaatagtataaaaaatttcgctgtcagttttggaggtattaaccttgaagatatcgctgctccagactgtttcattatcgaggaaaaattaaaagagatacttgatataccagtatttcatgatgatcaacacggaacagcaattataacctcagcagcactcattaactccattcaaattacaaaaaaaaaaatttcaaaaattaaagttgttataaacggtgcaggagcgtctgccatggcttgcgcagacctatttttaaaattgggcgtaaataaaaataatttaacaatgatagacagtaaaggagtaattagttttgatagaaaaggattaagtaagtggaaattaaagtatgcaaaaaaaacaaacaataaaactctaattgatgcattaaaaaatgcagatgtttttttagggttgtcatcagccggtattttaaaaaaacaaatgattaaaaaaatggcaaaaaatccaattatatttgcatgtgctaatcctgatccagaaattttacctgaggaagcttttaaaattagaaaagatgcgattgtagcaactggtagatcagattatgcaaaccaggttaataatttgataggttttccttatatatttagaggtgcactagacgtaagagcaaaaacgatcaat

SEQ ID NO: 203474 - DNA, 775 bp, Unknown
  Bacterial polypeptide expressing nucleotide sequence isolated from the Sargasso Sea
ttgaaagcatatccagcggtgatttctagttcggtagagcgtttcagattccgcgaagcacttggcgaaatgatgaatgctgcccgacttggtaataaatatttagccgatgaagagccgtggaaaatgattaaaacagacgaagagcgcaccaaaacacaaatgtatgtggccttgcaaattgccgcagcgttgagcacgctttgtgaaccgtttttaccatttacagcacaaaaattatctcgtattttaaaactagaacagccattggcttggaataccatctctgaaacatcggagttgttagcttcaggacaccaaattggagaggcagaattactgttttcaaaaattgaagacgaggccatccaacagcaaattgaaaaattgcaagctaccaaaacggcaaacgaagctgaaaataaagtagccgagccacaaaaagagctgattcaatttgaagattttgcaaaaatggacattcgtaccggaactattttagaagccgaaaaaatgccaaaagcgaataaacttttgatattgaaagtggacacaggaattgatgttcgcaccatcgtttctggtattgccgaaagttttaaacccgaagatatcattgggaaacgcgtaaccgttttagtaaacttggctccaagaaacttacgaggcgtagaaagtcaaggtatgattttgatgactaccaacaccgaaggaaaattggtttttgtaaatccggacacggatggtgttgcgaatggagagacaatcaattaaa

SEQ ID NO: 203475 - DNA, 733 bp, Unknown
  Bacterial polypeptide expressing nucleotide sequence isolated from the Sargasso Sea
acttcagggcaagcgtgcactcatcacgggcggcagccgcggcatcggtgcggcgatcgcgaaacggctggcggccgatggcgcggacgtcgcgattacctatgagaaatcggcggagcgggcgcaggccgtcgtcgccggcatcgaggcgctcggccgtcgcgccgttgcgatccaggccgacagcgccgatccggtggccgtacgcgacgcggtcgatcgtgcggcggaggcgttcggcggcctcgacattctcgtcaacaacgcggggattttccgggccggcgcgctggacgacctcacgctcgacgatatcgacgcgacgctgaacgtgaacgtgcgcgcggtgatcgtcgcgtcgcaggcggcggcgcggcatctcggggagggcgggcgcatcgtgtcgaccgggagttgccttgccacgcgcgtgcccgatgcggggatgagcctctatgcggcgagcaaggccgcgctgatcggctggacgcaggggctcgcgcgcgatctcggttcgcgcggcatcacggtcaatatcgtgcatccggggtcgacggataccgacatgaacccggccgacggcgaacacgccggtgcgcagcgttcgcggatggcgatcccgcagtacggcaaggccgaggacgtcgcggcgctcgtcgcgttcgtcgtcgggccggaagggcggtcgatccatggcaccgggttgacgatcgatggtggtgcgaacgcgtga

SEQ ID NO: 203476 - DNA, 505 bp, Unknown
  Bacterial polypeptide expressing nucleotide sequence isolated from the Sargasso Sea
gggggtattcttgatagctccagatttaagacttacatttccttagagactaatttctcacaacatgatattgatgctatggttattggtggtcatggtgatacaacaatgattcctttaacctctatttcaaagtgtaaggacaagcttttatctaacattgtttcaaaagatatacttgaaaaaatttcttcagatactatggttggtggagcaactctaacgaaactcctaggtacctctgcttggtatgctccaggcgcctcggtttcatatctagttaatgcaataatcaatgacacaaaagaaatgcttccctgctcagtatatcttgagggagagtataatgctgaggatttgtgcataggagtacccgtaataattggtaaaaagggatttgaggaagtcgttgatctagatattaataaaaatgaaattgaaatgtttgaaaatagtgtaaaagctgtaaaacaaaccaatttagccttggatggtttaatttaga

SEQ ID NO: 203477 - DNA, 723 bp, Unknown
  Bacterial polypeptide expressing nucleotide sequence isolated from the Sargasso Sea
aatgagtacttcaccaaataaggttgctctggttaccggtgcatccgatggaataggagctgaatttgttcagattcttgcaggtcgaggctatgatttgattcttgttgcgcgtcgcaaagaaaagcttgatcagttggcagttaaattgagtgatgagtttggagttaattgcactgttatggcagctgatttatcagaacccaaagcagctcaaaatttatttcaacgcgttgaagatagtggattgcaagtaaactttttaattaataatgctgggcttcttcacaatggattttttaccaaactcagccttgaagcccaggaaaaaatgattcaagttaatgtcatggcccttaccgctttgactcacttatatgcagacaatatgtcagctaatggcggaggacatatattgaatgtggcttcactggcaggctggatggctattccaaatcagaatgtgtacgctgcatcaaaagcttatgttgtatctttttctcaagcattgtccaatgaaatgatcgctgcaaatagtggggttcaggtaactgcattatgtcctggttatacagcaacaaaaatgatggataaccctgatcaaggagctactcttcacattccatcaagcatgatgatgtcggctaaggatgtagctgaaatcggtataaaagcatgttttgctggtaaggatattgtagttccaggacttgctaataagct

SEQ ID NO: 203478 - DNA, 472 bp, Unknown
  Bacterial polypeptide expressing nucleotide sequence isolated from the Sargasso Sea
tatgaataaaatagatctaaaaaataaagtagcaattgttacaggaggagcacagggatttggtcttgctattgttgaaaagtttttagcttctgatgcaaaagtcattatttgggataaagataaagaaatgatgagcgctttaaatttaggagacaatgttcatacagtagaagtagatgtaacaaattttgatagtgttaacaaagctacagaacaatctcttcaaatttcaaattctatagacattttagttaataatgctggtatagccggcccaagctttaagacatgggaatatcctatagaagaatggcaaaaagtaatagatatagatttaactggagtattttattgttgtaaatcaattgttccacatatgattgaaaaaaattatgggaaaattgttaatattgcttctattgctggtaaagaaggaaatcctaatgcaatgccttacagtgcagcaaag

SEQ ID NO: 203479 - DNA, 604 bp, Unknown
  Bacterial polypeptide expressing nucleotide sequence isolated from the Sargasso Sea
gagatttctaaatattcagattcatcgactattttaaaagcagacgtttctaattcagcagaagtttcaaaaatggttcaatctgtaactgatcaatataagagaattgatatccttgttaataatgcaggtatcgctaccagtgccccaatacatgaaatgacagatgagatgtgggatgaattaatttcaatccatcttaatggaaccttctatgcgacaagagaatgtttgaaggtaatgtatgaacaagaatatggcagaataattaatacagcatctcaattggcatacaaaggcagtgcaggtttttcacattacactgcagctaaaggtgcaatcatatcatttaccagatcactctctcttgaaattggagaaatgaatatcagagctaattgtgtagcaccaggcgctacaatgacaagaatgctatcagaagtgccgactgagattcttgatgggattaaagcatccatacctaaaggaacaattgcaaacatagaggaaatagttccagcatatgtgtttctagcctcagaagatggcgaccattttgtaggacaaacaattagtccgaatggcggagatcatttcttataga

SEQ ID NO: 203480 - DNA, 849 bp, Unknown
  Bacterial polypeptide expressing nucleotide sequence isolated from the Sargasso Sea
aaaaattgaaaatgtaaaagtagtaattaatggagcgggtgcttctgctcaagcttgtactaatttatttaaaagttcaggagttaaaagtgaaaatattattatgtgtgacagtaagggcataatataccggggaagaaaagatgtagatcaattcaaatcagcttttgctgcaaatactaaattaagaacactagaagaagctatgagaaatgcagatgtgtttttaggtttatctgctaaagatgtagtgtcaaaagaaatgatcaaatcaatggctagtaatccaattatctttgcttgtgcaaatcctgaccctgaaattaaaccagaaataataaacgaggtaagatcagatgctatagtcgcgacaggcaggtcagattatccaaatcaagtaaataatctaattggatttccttacatattcagaggagcattagatgtaagagcaaaagtaattaatgaagaaatgaaagtttcagcagctaaagctattgcttctttagctagagaggatgtgcccgatgaagttgtatctgcatatggtggagataggccaaaatatggaaaagattacatcattccttcaacttttgaccccagattaataagcgtaatacccgtagcagttgctgaagcagctataaaaagcggagcagcaagaaaagaaattaaagattttgataattataaagatgaactaacaaatcgtttagatccttccatgtctttgatgcaaggtatcaatgcaaaagtaagaaaaaatcctaaaagagtaatatttgctgaaggagaagatgaaaatatgcttaaagcagctatagaatttggaaaaaataagcttgg

SEQ ID NO: 203481 - DNA, 631 bp, Unknown
  Bacterial polypeptide expressing nucleotide sequence isolated from the Sargasso Sea
cccttcgacaagatctgctacatcggctgtggcgtgaccacgggcatcggtgccgtcgccttcacgatgaacgtcgagcccggcgcgacagttgccgtatttggcttgggcggcattggactaaacgtgattcagggcgccaaattggtcggcgcacggcgcatcatcggcgtcgatctcaatgccgataaaaaggagctggcaacccagtttggcatgacggactttgtgaatccgagcgaggttgataacgttgttgatcacctaatccagatgacaggcggcggtgtggactacagctttgagtgtattggtaacgtcaatgtgatgcgccaggctctcgagtgctgccacaaagggtggggccagagctgcatcattggtgtagcgggcgcaggacaagagatctcaacgcgaccctttcagctggtaaccggacgctcatggcgcgggacagcattcggcggcgcaagaggtcgcaccgacgtgccgaagatcgtggattggtacatggagggcaagatccatgtcgatgaaatgatcacccacaccatgccgctcaccgagatcaataccgcttttgatcttatgcatgaagggaaaagcattcgctctgtggtgacttactgat

SEQ ID NO: 203482 - DNA, 694 bp, Unknown
  Bacterial polypeptide expressing nucleotide sequence isolated from the Sargasso Sea
tttggagcaggttcaggtataggcagacaaatagcaaggactttcgcagactttggtgcagatttaattcttctaagtaagagtattgagaaactagaatccatttatgaagaaataaatcaaataacttctggtagtgtgatcatccagcctataaattttaaaactgctgatgaaaaaagctatcagaaaattgttggagcaattaaagaggaatattcgcaaattgatggactggtgaataatgcagggatactcggtgaaaaaaaacctcttgaacaatacagttactcggtctggagagatgtactaaaagtcaacctcgacgcaagctttctgctaacaaaaaatttgattcctcttttgaaagaatctagcagtagctcgataattttcacgtcatctggagttggtagaaaaggaagagcttactggggggcttactcgataagtaaatttgcaactgaagcaatcatgcaaatcctatttgaagaactccagaacactacatcaatcagagtcaactgtataaaccctggagcagtcagaactaaaatgagagagtcggcataccctgcagagaatccggagtctaatccatcggctaatgagattatgaatcattatttatatttaataagtgatttgagtaaagatattaatggccaatcgattgacgctcaagagcactgat

SEQ ID NO: 203483 - DNA, 820 bp, Unknown
  Bacterial polypeptide expressing nucleotide sequence isolated from the Sargasso Sea
gatcctgaaataactccagaagaagtagaagaggttagagatgatgcaattgttgcaactgggagatctgactatccaaatcaagtaaacaacttaataggatttccatatatttttagaggagctttagatgtaagggctaaaacaattaatgaagatatgaaaattgctgctgcaaactctatagccactttagctagagaagatgtaccagatgaagttgtggctgcaatgggaggagaacgtcctaaatatggaaaaaactatattattccatcaactttcgatccgagattaatttctgaaatacctctggctattgcaaaagcagcaattaaaagtggtgttgctagaagaaaaattgaggattttgatgtctacagagatcaacttaaacaaagattagatccatctgtaacaattatgcagggaattaactctcaaattaaaaaaacacaaaaaagaattgtttttgcagatggtgaagatgaaaatactttgaaagctgctattgcttttaaaaatagtaaattaggaattcctatattggttggtaaaaaagagaagataaaggaacagcttaaaaatataggttatagcgaaaatttaaacattgaaataacaaactctaatgacaaagaaaaaagagaaaaatatgtaaattttttatttgaaaagcttcagcgtgaacagggtcttctacaaagagactgtgatagaatggttagaaatgatagagtaatttgggcatcatgtatggtttcttgcggtgatgctgatggagctgttacaggtaacacaagaagattcggaacttctt

SEQ ID NO: 203484 - DNA, 661 bp, Unknown
  Bacterial polypeptide expressing nucleotide sequence isolated from the Sargasso Sea
aatggaattaaaaaacaaagttgcactggtaactggtggcagtagcggaataggcgccgaaacagctaatattctttcaaaaaatggatgtaaagtagttgttggttataataggggcgagaaacgtgcgaaaaatttggttaagaaactatataacaacggacatagcatcgtaaaaattgatctaagtgatcaaatttgttctgaggtagcaaaaaagtttataaaaaaaacgtatggtagacttgattatttaattaattcggccgggtacacagaaccaatcaatcatgcagacatatcttcactaactcctgaaaaatttaatataataataagcataaatacaggtggaacttattcaataattagaacctttgttccgttacttaacctttcgaaatcagctacaattgtaaatgtctcctcagtttctgcatttactggatctggaagcaatattgcatactgtgctgcaaaggctgcaatagacacaatgacaatttctctcgcaagagcattaggaccaaaaattcgtcttttatcagtttctccggcagccgttgctacaaattttgttgaaggcaggacactggaaaatttgaaaaatatagccaagaaaacacccttaaacaaagtaatcaaaccaaaggacgttcat

SEQ ID NO: 203485 - DNA, 895 bp, Unknown
  Bacterial polypeptide expressing nucleotide sequence isolated from the Sargasso Sea
agatattcccatatttcatgacgatcaacatggtacagcaataataactttagcagctttaataaacgccttagatgtttctaaaaaatcaattaaaaatattaaagttgttgtcaatggtgccggggcctcagcaatggcatgttcaaatttatttaaaaacaacggtgttttaagtaaaaatattataatgatagatagaaaaggtgtcatatatagaggtagagataatcttaaccaatggaaatctgcttatgcaattgaaacaaaacatcgaacgcttgaagatgcaattaagggagctgatgtttttttaggattgtcggctaaaggtgtcttaacaaaagatatggtaaaaagtatggcaaaaaatccaattatttttgcctgcgcaaatcccgatcccgaaataaatcctgaagatgttcatgaagtaagagatgatgcaatagttgcgactggtagatctgattatccaaatcaagttaataatctaattggctttccttatatttttagaggtgcgttggatgtaagatctaaaacaattaatgaagaaatgaaagttgctgctgcccatgcaatagcaggacttgcgagagaatatgttcctgatgaagttgtagccgcaatgggtggggaaagaccaatatacggaaaagattatataattccttccactttcgatccaagattaattagcgtaataccagttgcggtagcaaaagcagcggtgaaaagtggagtagctagaaaaaagatagaaaattttgaaacttataaagagcaattaaaacaaagacttgatccatcaacaactattatgcagggtgtaaatactcaaataaaaaaatcccagaaaaaagttgtttttgccgatggtgaagatgaaaat

SEQ ID NO: 203486 - DNA, 736 bp, Unknown
  Bacterial polypeptide expressing nucleotide sequence isolated from the Sargasso Sea
atgaaatctatattagtcacaggatcttcttcaggaattggagctgcaatatgtgaacacttctcacaaattggttggaaagttttcgggagtataagaaatcaaaatgatggggataaactagcagatatatgtggagaaaatttcactcctcttatttttgatgtcacagacatttatgcaattaaggaggcggctaatttagttgaatctcatttgggtaaaaatggcttaaattgtctggtaaataatgcaggtattaatatttctggtcctatggagtatgtagaatctaatgaagtaagaaaagtcttcgaagtcaatgttatggggccattaaattgctcgcaatcattcctaccaatgcttaaaaaatccacatcagcaactataattaatataagctcaatggccggtaagattggtctgccaatgcagggatcatattgtggcagtaaatttgcacttgaaggaatttctgaatcaatgcgaagagaacttcaaatccataatatcaaagtagttgtaattggtcctggtgcaattgaatcatcaatttgggataagtttgaaaaagatgagaaggaaaaacaatataaggatacagaatatgcatcagcaataaaaaaactggatggcactcttaaaagagcaagaagcatagctattccagctcatcgagtagccaaaaaagttgagaaaattgttaattctaagaatcctaaaccaagatata

SEQ ID NO: 203487 - DNA, 222 bp, Unknown
  Bacterial polypeptide expressing nucleotide sequence isolated from the Sargasso Sea
gatgaaaacaaaagcagccgttctttttggggccaacaaaaaacttgaaatttgtaatgttgatttggcgaaacctcaaaaaggcgaagtatgtgtggagatgaaggcagctggggtttgccatactgactacagtgtaatgaagggacaactaaatgcgccattaccagcaattctaggtcatgagggagctggtgttgtagttgcagttggagatggcgt

SEQ ID NO: 203488 - DNA, 223 bp, Unknown
  Bacterial polypeptide expressing nucleotide sequence isolated from the Sargasso Sea
atgacaaaaaaaaatagtaaaatatcattaattggtgcaggtcaaattggaggaacattagctcacttaataggaacaaaagaattggttgatgaagtagttttattcgatgtagcaagtggaattgccaaaggaaaagctttggatattgcccagtcctcatctgtagatggatttaatgtgaaattttctgggactgataattacaaagatatgagggatc

SEQ ID NO: 203489 - DNA, 598 bp, Unknown
  Bacterial polypeptide expressing nucleotide sequence isolated from the Sargasso Sea
aagtggattagattgtctcgtaaacaatgctggaattaacatatctggcccaatggaatacgtagatcctaatgaggtaaggaaagtttttgaggttaatgtaatgggtcctttaaattgttcacagatattcttaccaataatgaagaattcttcctctgcggtaataataaatatttcctccatggctggaaagattggtctacctatgcaaggctcatattgtggaagtaagtttgctcttgaaggaatgtcagagtctatgcgaagagagcttcaaattcataatatcaaagtggttgttatcgggcctggagcaatcgaatcctctatctgggataagtttgataaagacaataaaatagagcagtataaagagacagaatatgcatcagctatcggaaaaatggatgctacccttagacaagcaagaagtattgccattcctgccaacagagttgctaagaaagttgaaagaatagttaattcaaagaatccaaggccaagatatgtagtctctggcattatagacaagattttaagccttgttccaacaaaaattcttgactatgttttcaggaaaaaactaattagctag

SEQ ID NO: 203490 - DNA, 694 bp, Unknown
  Bacterial polypeptide expressing nucleotide sequence isolated from the Sargasso Sea
catgactcacgcggtgatcacaggtggaggccgcggactgggtgcagcgattgccacagcttttgatgcagcaggcatcagtaccaccctcctcggacgcgatctcacaaacctgcaggaagtagccggacgactccaggctgcccgttgtcaggagcttgatgtgaccgatccggaggccgttcaggctgcgttctctggcttgcatgccgtcgacatactggtgaacaacgccgggattgccccaagcagccctttcaaccgacataccctggaggactggcgagcgagtttcgcggttaatgtggacggggcattttactgtacccaggcagtcatcgattcaatgctcgagcgcaacgtcggtcgagtcatcaacatcgccagtaccagcgcacagaaaggttatgcctatgtcagcggctacgttgcctcaaagcatgcattgctaggcctcacccgggccctggcgactgaatatgcccggactggtatcactttcaatgccatctgtcctggctttgctgaaactgacctactgacccagtcagtcgacaacatcgtctcgaaaaccgggcgcagcactacagaggcgagagcaacgctggccagcaacaatccccagaaacgctttatacaacccgaagaggtggcagcgacggctatgtggctgatcagtcatgcagcgtcgtcc

SEQ ID NO: 203491 - DNA, 373 bp, Unknown
  Bacterial polypeptide expressing nucleotide sequence isolated from the Sargasso Sea
atgggcagagtcaaagataacgtcatcattgtgaccggcgcggcctcaggtcttggcctcgccgatgccgtcgtgcttgcgcgtgagggcgcgaaggtcatcatgaccgatatcgaccgggaggcgggacaagcgcatgccgatgcaatcggagcgcatttcattgcgcaggatgtcagtgaggaatcgtcttgggcgaaggtcatgcaggaggtcgatagcagctacggtcgtctggacggtttggtgaacaacgcgggcattgcccctatcgccacaatagaaagcaccaccaccgaggtctggcggcgcgtactgggcattcatctcgacgccaccttctggggctgccagtcggcaatgaactcatgaa

SEQ ID NO: 203492 - DNA, 995 bp, Unknown
  Bacterial polypeptide expressing nucleotide sequence isolated from the Sargasso Sea
tccagatccagaaattaaacctgaattgattgaggaggtaaggaatgatgcaattgttgctactggacgatctgattaccctaatcaagttaataatcttatcggttttccatatatttttagaggtgcactcgatgttagggccaaagctattaatgaagaaatgaaagtagctgcggctaatgctatagcacttttagcaagagagaatgttccggacgaagttgttgcggcttacggtggagatcgtccaagatacggaaaaaactatattatcccgtcaacttttgaccctaggttaataagtgtaatccctgctgctgttgctgaggccgctatgaagagtggtgctgcaagaaaaaaaatagaagatttccagttatataaagatcaacttacaaaccgtctagacccgtcaatgtctattatgcaaggtattaatgctaaaattaggaaaaatccaaaaagagttatttttgctgaaggtgaggatgaaaatatgcttaaggccgccattgaatttggtaaaaataaattaggaattcctatattaattggtgctgagaatagagtgaaagaacaattaaaaaaaataggattagatgaaaattatcaaattgaaatagtaaattctacgcaaaaagaaaaaagagagagatatgttaagcatttatacaaaaaacttcaaagagaaggtcagctagaacgagatgtcgatagattagtgagaaatgatagaattgcttggggatcttcaatgattgcttgtaaagatgcagatgcaatggttacaggaaatattagacattatgcagcctcaatagaaaaacttaaaaaagttgtggaagctaggccaggagaagaaatttttggtatgacaatgattgtatccaaaggaaagactatattagtagcagatacaaacgttactgagttaccatcagctgaaagactagtaaacatatctaaatcttgtgtcaggatagcacgtttta

SEQ ID NO: 203493 - DNA, 142 bp, Unknown
  Bacterial polypeptide expressing nucleotide sequence isolated from the Sargasso Sea
aatgaaaaaaaaaattactttaataggagctggtcaaataggtggaacactagctcatcttatagctataaaaggattagcaaatatagttctttttgacgttgctgaaggaatagctaaaggtaaagcactagatattgct

SEQ ID NO: 203494 - DNA, 853 bp, Unknown
  Bacterial polypeptide expressing nucleotide sequence isolated from the Sargasso Sea
atgaatttaaaagatttagagaacttttctaataacgcatcagggaaagtattatttgattataatctaaacaaaactaattggtttaatataggtggaaaaacaaaggttttttttaagccagaaaaattaaacgaactaattgattttttaaagttatttaataatagaggaaaaatatttgttttaggagcaggatcaaacatcttatttaaagatgatatttttgatggagtggtaattaaattaggtaagaatttttccaatctatcgattttaaataaagaaataatcatagctggaagtggggcacaggataaaacgctttctaaatttgcaagcgaaaatagtttgagtggttttgaatttttgagctgcattcctggaacagttggaggaggaatcagaatgaattcaggttgctttaatagagaatttaaagacattattctgtcagtacaagcagtggacacttctggtaatgttattacagcttctagagataaaattaattttagttatagaaaatgtgatttaaataataatttaatttttttaagtgcatcattaaaaggaaaaaaagaagataaaaaaaaaattgaaaaagaaatgatacttttaaaatcaaaaaaagataaaactcagccaacaaaaataaagactggcggaagtacttttaaaaatccaattgatcaaacaaataaaaaagtttgggagcttataaaatcatctgttccattagatacacgatttggagatgcaataatttctgaaaaacattgtaatttttttataaacaaagataaggcttcatgtagtgatatgaaaaaacttataaacttgtccagaagaa

SEQ ID NO: 203495 - DNA, 497 bp, Unknown
  Bacterial polypeptide expressing nucleotide sequence isolated from the Sargasso Sea
tctgcagggcaaaacgcttttcatcaccggtgcctcgcgtggcatcggcctggccatcgcactgcgagctgcgcgcgacggcgccaatgtggccattgcggccaagtcgtcggtgccgaatccgaagctgccgggcaccatccacaccgccgccgaagcggtgacggctgcaggcgggcagggcctggcgctgaagtgcgacatccgcgaggaagagcaggtgcaggcggcggtggcggccacggtcgacaccttcggtggcatcgacatcctgatcaacaacgccagcgcgatctggttgcgcggcacgctggatacgccgatgaagcgtttcgacctgatgcagcaggtcaatgcgcgcggcagcttcctgtgcgcgcaggcctgcctgccgtacctgctgcaggcgccgaacccgcacatcctgaccctggcaccgccgccgagcctggagccgaagtggtggggcgcacataccggctacacgctggcgaaga

SEQ ID NO: 203496 - DNA, 742 bp, Unknown
  Bacterial polypeptide expressing nucleotide sequence isolated from the Sargasso Sea
tatgaggttaaaaaataaagttgcaataataacaggctcagcttctggtttcggaaaaggaattgcaaaaaaatttacagaagagggcgctaaattaataatggtagatataaactcaaaactattaaaaaaaacttcaaataatttatctcaagatcattttgttgcagatgtatctaaaagttatgacttcaaatctttactatactttgcatataaaaaacatggtaatatagatattgtggttaataatgcaggaataacacataaaccaaaatttatggagttagtaaacgaaaaagaatttgataaagtatttaatgtgaatgctaaatcagtttattactgtggaaaattttttgttccgaaaatgaaaaaaaaaagaaagggagttattttaaatgttgcttcaacagcaggtttgtcaccgagacccaagttgaattggtataatgcaagcaaaggctggatgattactgctaccaaagctatggcgattgagttagcaccttataatgttagagttaatgcgatagctccagttgctggagttaccccattgttaaagtcttttatgggcggaaatactcttaaaaaaaaacagtcatttttatcaactattccaattggaagattttctactcctcaagatatgggtaatgcagcatgttttttatgctccgacgaagcgagtatgataacaggaactatattagaggtcgatggtggaagatgtatataa

SEQ ID NO: 203497 - DNA, 406 bp, Unknown
  Bacterial polypeptide expressing nucleotide sequence isolated from the Sargasso Sea
atgagcaaatgcctgatcgttaccgggggagggataggaatcggcgcggaagtttcccggaaagcggccaaacagggatactcggactgcgtcaattttcatcacgatcagacttccgcgcaaaaactggttcgtgaactggaagaggatggggccaatgccctgacctatcaggccgatgtgtcacaggaagaggaggtcgtagctttttttcaaaccgtcgagaaacacttgggaacccccgaggctctggtcaacaatgccggaattctcgaccttctgacccgtgtcgatggcatgaacgcaaaaaggatccaaagtatctttgcagtgaacgtcacaggatccttcctctgtgcccgtgaggccgtgaaacggatgtccacaaaatatggagggaagggcg

SEQ ID NO: 203498 - DNA, 943 bp, Unknown
  Bacterial polypeptide expressing nucleotide sequence isolated from the Sargasso Sea
tgctaactcaattatcgaaacgataaaaaatattggtggaacatttggtggaataaatcttgaggatattgcagctccagattgttttttaatcgagcaaaaattaaaggagcttttagatattcctatttttcacgacgatcagcatggtactgcaattataacaactgcagcattaattaatgctttagatatttctaaaaaaaaaattgataaggtaaaaattgtagtcaacggagcaggagcctctgctcaagcttgtgcgaacttgttcaagagctcaggtgttaaaaatgaacatattatcatgtgcgatagtaaaggagttatctataagggacgtaaaaatatcgatcaatttaagtcggcttttgctattgaaactaaatttaggactttagaagaggcaattaaagatgctgatgttttcttaggtctatctgctaaagatgttgtgtcgaaggagatggtcaaatcgatgtctaaaaatccgattatttttgcttgtgcaaatcctgatccagagattaaaccggaacttattaaagaggtaagatctgatgcaattattgccaccggaagatctgattatcctaatcaagtaaataatttaataggatttccatatatttttagaggagcgcttgacgttagagcaaaagagattaatgaggaaatgaaagtagctgcggcaaacgccatagcactccttgcgcgagaaaatgtaccagatgaagtagtatctgcttatggaggtgatagaccaaggtatggtaaagattatattattccctccacatttgatcccagattaataagtgttatcccttcagcagttgcaaaagctgcaatgaaaagtggtgtggctagaaaaaatattacagatctagagctatacaaagatcaattaactaatagattagatccctacatgtcactaatg

SEQ ID NO: 203499 - DNA, 955 bp, Unknown
  Bacterial polypeptide expressing nucleotide sequence isolated from the Sargasso Sea
ttagagtttcataatagtaacaaatcaggcaagattgagattatttcatcaaaaccaatgacttcaaaaagagatctagctttggcttattcgcccggtgttgctgcaccagtaaaagctatagctgaaaatcctgataaagcttacgactacacaactaaaggcaatttagttgctgttatcagtaacggtagcgcaattttaggattaggcaatttaggcgcaattgcatcaaaacctgtcatggaaggaaaggcagttttatttaaaagatttgcagatatagattcaatagacatagaaatcgacactaatgatacagaggaaataattagatcaataaaaaatatttctaaaagttttgggggaattaatcttgaagatataaaagctcctgaatgttttattatagagagaaaattaaaagaaatattagatattccagtttttcatgatgaccagcatggtactgcaattattacaagtgctgctttaataaatgcatgcgatattgctaaaaaaaaattaaacgaagtaaatgtggttattaatggtgcgggtgcctctgcaatggcatgtgcaaaacttttcattaattcaggtgttgataaagataaaattaaaatgcttgattcaaaaggtgttatttacaaaggcagagataacttaaatgaatggaagaacgagttttcaattaaaactgatgatagaaatttaaatgatgcaataaaaaatgctgatgtttttttaggtttatctcaagcgggagttcttaaaaaaaatatggtaaaaagtatggcaaaaaatcctataatatttgcttgtgctaatcctgatccagagattactcctgaagaaatcgaagaagtaagaaatgatgcaattattgcgactggcagatcagattatcctaatcaggtaaataatttaattggctttccaatatatttttaga

SEQ ID NO: 203500 - DNA, 240 bp, Unknown
  Bacterial polypeptide expressing nucleotide sequence isolated from the Sargasso Sea
tatgtcaaaaaaaatatcattaattggagctggacaaattggtggaacacttgcacacttaattggtttaaaggaactagtagatgaagttgtaatgtttgacgttgcaagtggtattgcaaaagggaaagcgttagatatagctcaatcatcatcggtcgaaggttttaatgttaaattatcaggaacagataattacgaagatattaaagactccgatgttattattataaccgcagg

SEQ ID NO: 203501 - DNA, 694 bp, Unknown
  Bacterial polypeptide expressing nucleotide sequence isolated from the Sargasso Sea
atgaaaaaagtttttttagtaactggttcatcaagtggcataggtaaagcgataactaaaaaccttcttaaaaaaaaatataatgttgtaggtatatcaagaagcaaaaatcaaatattcaacaaaaactttacacatataaaaactgatttgaaaaatattaactctgttaataaaatttttgaaatattaaaaaaaagaaatattaaattagatggtttggtaaataatgccggaattaatttgccaaataaatttaataaaattagtcttgatgattatgaaactgttttaaatgtaaatattagagcacctttttttttattacaaaaattattgcctttaattaaaaaaaagggaagtattgttaatattagttcttttagctcttattcagggggaccttattcaactcattatgcaatatctaaatcaggaatagatgctctaacaaagaacctggctattttttttggagataagaaaataagagttaatgccgtctctccaggattaattagaactaaattagcaaaaaattttacaaaacacccttattttaagagaattctcttaaaaaggataggggaaacacaagaaatatcagatgtagttgaatttttactttctaaaaaatcaagttatataaatggacagatcatcaatgttgatggaggaatgttttcaaaataat

SEQ ID NO: 203502 - DNA, 317 bp, Unknown
  Bacterial polypeptide expressing nucleotide sequence isolated from the Sargasso Sea
catggaatttcaagacaagaacatcgtcattaccggcggtgccagcggcatcggcctggcggtggcaaaacaactggccaaagcgggcgcacgcctgttcctgatgagcaggaaccagcaaaaggccgacgccgctctagagatactgggggcttcggcgcagttcatcttttgcgatgtggcgtcgcacacgtcggtagccgaggcattcgcgacggtggatggcgaggtggatcagttgcactttgcaatcaacaacgccggcattaccgccccctacgcaccgatcgcgaccagcgcaccgcaggattgggaca

SEQ ID NO: 203503 - DNA, 925 bp, Unknown
  Bacterial polypeptide expressing nucleotide sequence isolated from the Sargasso Sea
ccgttatcgcgatgaaatttgctcatttaacgacgatattcagggcaccgcggcggttaccgtcggtacgctgattgcggctagccgcgcggccggaagccagctgagcgaacaaaacatcgtcttcctcggcgcgggttccgcaggatgcgggatcgccgagcagatcattgcgcaaatccagcgagaaggtttaagcgaagaagcggcgcgtcaacgcgtattcatggtcgatcgctttggcctgttaaccgacaaaatgccgaacctgctctccttccagaccaaactggtgcaaaaacgcgaaaatctgcagcactgggatacacaagaagatgtcctgtcgttgctcgatgtggttcgcaacgttaaacctgacatcctgatcggggtttccggacaggttggtctgtttaccgaagagatcatccgcgaaatgcataagcattgtccgcgtccgatcgtcatgccgctgtctaacccgacttctcgcgtagaagccacgccgcaggatattatcgcctggaccgaaggtaacgcgctggttgcgaccggtagcccgtttgcaccggtactgtggaaagagaaaacttacccgatcgcgcagtgtaataatgcgtacatcttcccgggtattggccttggcgtgattgcttctggcgcgtcgcgcatcactgatgaaatgctgatgtcggctagtgaaacgctggcacagtattcaccgctggtgctcaacggtgaaggactggtgctaccggaactgaaagatattcagacggtttctcgtgccattgcctttgccgtcggtaaaatggcccagcagcaaggtgtggcggtgaaaacctccgccgaagcgttgcaacaggctattgacgataatttctggcaggcggaatatcgcgactaccgtcgtacttctatctga

SEQ ID NO: 203504 - DNA, 395 bp, Unknown
  Bacterial polypeptide expressing nucleotide sequence isolated from the Sargasso Sea
tatggagcttttaaagaataaaacaacaattataactggggcttcaagaggaattggaagggggatttctttaattcttgcaaagaatggttcaaacattgcttttacctacatgtcctctgtaaatgaagctaattcattagaattagagttaaaaaaatataatgtaaaggtcaagaaatataaaagtgacgcatcggattttaaacaatctgaaaaattaatttctgatataattgatgattttggagattttgatattttaataaataatgcaggtattacaaaggataatcttttgatgagaatggatgaaaaagattttgataatgtaattagggtaaatttaaaatcagtctttaatatgtctaagtcagtacaacgtcattttttaa

SEQ ID NO: 203505 - DNA, 920 bp, Unknown
  Bacterial polypeptide expressing nucleotide sequence isolated from the Sargasso Sea
taatcttgatcaatggaaatcaactcatgcaatagataccaaattaagaactttaaaagaggcaataaaaggtgcagatgtatttttaggtttatctacaaaagatatacttacaaaagatatggtaaaatcaatggcaaaaaatccaattatttttgcatgtgcaaacccagatcctgaaattaatcctgaagatgtacatgaggtaagggaagacgcaattgtagcaactggtagatctgattatccaaatcaagttaataacttaataggatttccgtatattttcagaggcgctttggatgttagagcaaaaacaattaatgaagaaatgaaagttgccgcggcacacgcaatagctgaacttgcaagagaatatgttcctgatgaagttgtagctgcaatgggtggagaaagaccaacatacggaaaagattatataattccatcaacttttgatccaagattaattagcgtgataccagttgcggtagcaaaggctgcaataaaaagtggagtatctagaaaaaagatagaaaattttgaaatttacaaagatcaattaaaacaaagactagacccatcgacaaccatcatgcaaggtgtaaatactcaaataaaaaaatctcaaaaaaaagttgtttttgctgacggcgaggatgaaaatacattaaaagcagcaatagctttcaaaagtaatggtctcggaattccagtattaatagctaaaaaagagattgttaaacaaaaacttaaagaaattggtttggatgaaaattaccaaatagaaatagttaactccactgacaaagaaaaaagagagaaatatgcaaaatttctttatgaaaaattgcaaagaaaagaaggtttgcttgagagagactgcgatagattagttagaaatgacagagttatttggg

SEQ ID NO: 203506 - DNA, 523 bp, Unknown
  Bacterial polypeptide expressing nucleotide sequence isolated from the Sargasso Sea
atgagttttaaaggaaaaaaaattttagttacaggagcaactggaggaatagggggtgcaattgttaataattttttatcattagatgcaacagtgctgggaactggtacaaacgcagaaaaattagattcactgaagagtaaatatcccaatctattaaccgaacaatttgatatatcaaaacatgagaaaatcgaagaatttattgataaaatatattcaagtatgaatggcctagatatactagttaataatgctggagtgactaaagataatttatctctaaggatgaaaaaagaagaatggcaaaaagtattagatgttaatttaacctcaactttccatttatgtaaattcgcaattaaaaaaatgcttaaaaataaatttggtagagttgtaaacataacatcaatagttggtcatactggtaatattggtcaagttaactactctgcctcaaaagctggtattgttgccatgtctaaaagcttagctatagaatatgcaaaaaaaaatataacaa

SEQ ID NO: 203507 - DNA, 703 bp, Unknown
  Bacterial polypeptide expressing nucleotide sequence isolated from the Sargasso Sea
ctgagtggaaaagtttacgttgttacaggtacaacttccggaatagggcttgctacagtaaagcagctggcgaaacagtctgcgacagtcatatgtgcttctcgtaatgttgatcttgctaataaaatcattttagagactaccaatgagcacacaaatagtaagcttcaatgtattcatcttgatttaacctcgttggcatctgtaagaaatttttcaaaaaattttacctccaagtttaaaaagcttgacggtttagtaaataatgcaggtatcatgcatactactgaacaaactacggatgatgggttcgaattgcagtttggggtgaattttctgggtcattttcttttaacggagctcttattaccaacgctcgcaaagacaaaagactcaaggattattcatacatcgagtgtgatgcatgatagggcttcgatagaactcgatgatctaaatttcaagaagcggaaatactcgcgagtcagagcttacaatcaatcaaaactagcccaaattctctatgcaaggtatcaagcaaagcttgcgaaaaagtcaaatatcacctcggtaagtattcatcccggctgggttcaaactccacttataaaacataccttgccagttttctttcaaaatgtgttattgaagcctttgctggtaatgggtggaatggtcaatgttgaattgggatgtcaaacaa

SEQ ID NO: 203508 - DNA, 934 bp, Unknown
  Bacterial polypeptide expressing nucleotide sequence isolated from the Sargasso Sea
gaagaaaaaaatttaaatgaatggaaatctgaacatgcaatagaaacaaaaattcgaacattagatgatgctataaaaggtgcagatgtttttctcgggttatctaaagctggagtgttaaaaaaaaatatggttaaaaaaatggccaaaaatcctataatttttgcttgtgccaatccagatcctgaaattacacccgaagaaattgaagaagttagaaacgatgcaataatagcaactggaagatcagattatccaaatcaagtaaataatttaattggtttcccttacatttttagaggagctctagatgttagagcaaaaacaattaatgaagagatgaaactagctgcatctaatgcgatagctacactagcaagagaaagggttcctgatgaagtggtcgctgcgatgggtggtgatagacctaaatatggtaaagattatataataccttcaacatttgatccaagactaataagtgttattccagttgcggtcgctaaagcagcaattaaaagtggagttgccagaaaaaaaattgaaaattttgatacatactctgaccaactaaaacaaaggctagatccttcagtaactataatgcaaggaattaattcacaaattaaaaaaacacaaaaaagagtagtatttgttgatggtgaagatgaaaacacacttaaagctgcaattgcttttaaaaatagtggattaggaattccaataatagttgctaaagaaaaagtcgtaaaagaaagattaaaagagattggatatagtgaaaattttaatattgaaatagtaaattctgcaataaaagaaaagagagaaaagtactctaaatatttatttaagaaacttcacagaaaccaaggaatgcttgaaagagattgtgatagaatggttagaaacgacagagtaatttggggagcat

SEQ ID NO: 203509 - DNA, 396 bp, Unknown
  Bacterial polypeptide expressing nucleotide sequence isolated from the Sargasso Sea
attggtagcccgtagcggcgatcagttggaatccgtggcaaaacagatccgtgattcaggaggccaagcttatgtccatcctgcggatctgaccaagatggaggaaatccgtaaactcgaagaactcgggcctttcaccattctcgtcaacaatgccggcatcaaccttccccaaagctttgtggaggttaaagaaaatgatttcgatgatatcctcgatcttaatgtgaaatctgctttttttgttgcccaaagtgttgccagggggatgatccaggcaggacgcggaggttcgatcatcaatatgtcgagtcagatgggtcacgtcggcggacgcaatcgatccgtctactgtgccaccaaacatgcgatggaaggattcagtaaagggatggc

SEQ ID NO: 203510 - DNA, 361 bp, Unknown
  Bacterial polypeptide expressing nucleotide sequence isolated from the Sargasso Sea
aatgattttggatagatttaaactaaataacaaaactgctctaataactggtggaacaagaggaataggtttagctatagctcacgcatttggtgaagctggtgcgaaattatttatagtgagtcgtacagataataaaaaaggtataaaaagcctaatagatgctggatataatgcaaaattaattgaagctgatttaagtgattcaacaaaacctaatgaaatagttaacttaataataaataaaaaagaaactatagatattcttgttaacaatgcaggagtagctcaacatggtgaaatagaaaactttagtgatgaaaatcttgataaaataatgaatacaaatgtaaaaggttaa

SEQ ID NO: 203511 - DNA, 695 bp, Unknown
  Bacterial polypeptide expressing nucleotide sequence isolated from the Sargasso Sea
aatgtcaagaaatccaataatatttgcctgtgctaatccagacccagaaataactccagaagaaattgaacaagttagagatgatgcgataattgcaactggtagatccgattatccaaaccaagtaaataacttaattggttttccttacatttttagaggagccttggatgttagagcaaaaacaattaatgaagaaatgaaaatagcagcatcgaatgcaatagcttcattagcaagagaaagggttcctgatgaagtggttgctgcaatgggaggtgaaagaccaaaatatggaaaagattacataataccatcaacatttgatccaagattaattagtgttattccagtcgcggttgctaaagcggcaattaaaagtggtgtagccagaaaagaaattaaaaatttcgaaatttattctgaacaattaaaacaaagattagacccttcagtaactataatgcaaggaattaactcacaaattaaaaaaacgcaaaaaagagttgtatttgttgatggtgaagatgaaaatacacttaaagctgctattgcatttaaaaatagtggattaggaattccaataattgtagcaaaagaaaaagtagtaaaacaaagattaaaagaaattggttatggtgaaaactttaatattaaaatagtaaattctacaataaaagagaagagagaaaaat

SEQ ID NO: 203512 - DNA, 858 bp, Unknown
  Bacterial polypeptide expressing nucleotide sequence isolated from the Sargasso Sea
ggattaaattggcattcttcctggtccacccaaaataagtttactttcaaccttttgaaaggaaccacttttaaaattaatacaatattaaattatcgagaaagtcaagattacaactttgcactccaattactagaggatgctcaaataactaattttaatcgaggaaggtttctaggtctaagtatatcacatacactatcccctacatcctttttgcaggtaaatgtaagtgagaataaatacaattatgaatcctatttatttgaagatcctttagataatagatatataacacctgacagtttatttcttgcgcgcttggaaaaccggataccagaccatattattgagcaatacggagatcaggtacaatactttcctgcgtattctctttatagagcaggtgtagacaacagacgctttaaaagagagacaaaaacaaataattataaattggactttacaagccaaataaataaatataatcaggtaaaacttggtttagatttttcatctcattctctgatgcttgatacatattctcttctggattccactttaacggatcaggtatacacacctattattccagataaagaaagctttacgagatcatattacgttcgtaaaccaacagagttcgccatatacgcgcaggataaaatagagtatggggacatgatcattaatttgggattaaggtatgaaagttttaatcccaatacaaaaattccaaataatattcatgaaccttatataaaagatcctagaaatccagcactcgatactcttactaatgtagagttggaaaatattaattggggagatatatcttatactgaaattgatagtaat

SEQ ID NO: 203513 - DNA, 502 bp, Unknown
  Bacterial polypeptide expressing nucleotide sequence isolated from the Sargasso Sea
gatgcctatacttttaaatggcggaacgtccgtaacaataaacgaagctacaaagggaataaaacttggcaccctttcgggtggcaatggtacctatgaaatatattatagtgaagatttttatacaggtcttttcaaaacaaatgcttctaatgcacaacttatagacggcaatgagctttttttagatgataattggtatttagattatgaatctaaaacctacacaaaacatatagttaaccagaataatggaaaaataagtagtactacttataattcctactctccaacaaatgctggattaaatcctacagttagaattaaaagtggatctgaaaaccagattttcacactatccatcactgacaaaaatgaagctattactgtatctacaccaacacccctgattcaaaatagatatggtgcagtcgtagctcaagtaagtcctgcagataattattttaatactgtgtacttccaaggtccctcattttttgaa

SEQ ID NO: 203514 - DNA, 963 bp, Unknown
  Bacterial polypeptide expressing nucleotide sequence isolated from the Sargasso Sea
accgcgtctgttcatatgctggctttagccatagcctttgacctttatggaatagaatctatagagttctacaaaacaaacccctatcggtatgtacgtacaaatctgactgtaagtagacttttaggaattcacaagttttacatgacttgggccatgtatgcattcacatgtgaagctttaggccaaaaaatgatgtatccagacaggttccctccaggagctgatccagattctatattaatcaataaaaataactggcaaaatcttgaaactcctaacttcaacgaagggatcccaaaaattgtcgatggtatcctagaagttacatatgagttaactggaataccaccccttttacaaatttcagcaccatatagtcttgccgctgatatatatggacaagaaccattactagctgatttggttaatgatcctgatacagttaatgccatgctagatcatttaggtaacaaactgctcgcaccttggatggatcatcattttcaaaaatttccaactggatgggttgagttatctgatgcatcaggatcaccattttttattggacctgataactgtacggatatgtcaatccgctcaattaagcatatgctaaataataaaaaatacataaaacgtgtatttgacaacaattttagaggtgattttgtagcagaagtgaaaaagaaaggtagatcctctagacgaagtcctaaagcaattatttcaaataatcaaaataaattaattgaactaactaatgctaaaataagtgtaaatcccgtttttataatgagactcgaagcagacaaagttgatatttcattctatgaaaaacaggccatattgcataatattccacttacatcaggtatcgggtctcctcagatagatagaaacagtattgagaatcttgattctgctaaaacccaaattagaaatgtaagccgaagtttcgta

SEQ ID NO: 203515 - DNA, 685 bp, Unknown
  Bacterial polypeptide expressing nucleotide sequence isolated from the Sargasso Sea
atgactaattttaaaaacaaagttgctttagtaacaggtggatcttctggcatgggagctgctacagcaaatatattagctgataaaggtgcaagagttttttgtgctcaacgtaggaaatcatcacatgaagatatcttgattgatcttaaggatagtaaagcgcctgaaaaaattatttcgaaaattaatgatactgttggaagattagacatattaataaataacgctgggattatgaaggaaaatacagttgaagaaattacattagaagaatggaacaatcatttaatagttaatttgactgctccttttttattaattaaatacgcaatgcctcttttacaaaaaaataatggatcgatagttaatgttggttcaattgaaggtatagctaacaatcctcgtcatccagcatatggcgcttccaaagcaggattacatggattaacaagagcgatagctgttgatcatagttcaaaaggagtaagatgtaatgccgtagcacctgggtggataaatacaaatctcaattcagattttatcaaaagccaaggagataataaaaaatttaatgaaaaattaaaatctattcatccaattggaagaataggcaatccaaaagaagttgctcagttaatatgttggcttgtttctgaagaggctagttttgttaccggtcaag

SEQ ID NO: 203516 - DNA, 691 bp, Unknown
  Bacterial polypeptide expressing nucleotide sequence isolated from the Sargasso Sea
aatgttaagaatcgcgttatatataacattactcagctttattatgtctaattttgaaacgtggtatactaatccattagatcgtatttttagtagaacatcacaaagaatgacatttagagagcctattgaatttactccatttgatataaaaatgggaatgcttacatatggtggttctgattactgggaccaaggatttggaggcaatagtcttggaatttctcctgttttattagattcttcaaattatcaatattcaggattagaaactaatgcatctaggaagtgttatttgttagaaattgatatggtgaaaatcaaccttccaaattacatatatactcaaaattatttagattttcaatttggactagggtataaaatgattggcttatttgaaaagccggggattgacttgcctagtgatttccttgaaggttcagatacggacccaacaggcgtagatagaggtatttataagtacaggccatttattcaagattacaatattaacacaacaattaattggcatttttatgattttattttaggatatttatatcattctattgggttagcaaaagtatctatttatgaatctgaaggtggtgataaatatttagatggtacaggaattggtgaatcatttggaataggttttaaggctctctttaaaaagtcgttatga

SEQ ID NO: 203517 - DNA, 964 bp, Unknown
  Bacterial polypeptide expressing nucleotide sequence isolated from the Sargasso Sea
tgaagctttaggtcaaaaaatgatgtatccagacagattcccttcgggagctgatccggattcaatattaatcaataaaaataactggcaaaaccttgaaactcctaacttcaaagaaggtattccaaaaattgtcgatggtatccttgaagttacatatgaattaactggaatacctcctctcttacaaatttcagcaccatatagtcttgcagctgatatatatggacaggaaccattattagctgatttagttaatgatcctgatacagttaatgccatgttagatcatttaggtgacaaagtgctagcaccttggatggatcatcattttcaaaaattcccaaccggatgggctgaattatctgatgcatcaggatcaccattttttattggacctgataattgtaaagatatgtcaatccgctcaattagacatatgctaaagaataaaaaatacataaaccgagtatttgacaacaattttagaggcgatttcgtcgcagaagtgaaaaagaaaggtagatcttcgaggcgaagttctaaagcaaatatttcaaacaatcataataaattaattgaactaactaaagcaaaaataagtgtaaatccggtttttataatgaggcttgaagcagacaaagttgatatttcattctatgaaaaacaagcaatattgcataatatcccacttacatcaggtatcgggtctcctcagatagatagaaacagtattgaaaatcttgattccactaaaatccaaattagaaatgaaacccgaagttttgtagaatctatcaaaaaagtatgtgaaactattgatttacctgaagacaatcatgttggagaatcatggcctagtcacatatattttgaagacgttaacggacaatctcaatttgaactggttgaaataatacttgatgaggtttataaatctgaaccaatagttatgaaaaaatga

SEQ ID NO: 203518 - DNA, 367 bp, Unknown
  Bacterial polypeptide expressing nucleotide sequence isolated from the Sargasso Sea
atgaggttagatctggacgcaataattgcaactggcagatctgattatcctaatcaagtaaataatttaattggctttccttatattttcagaggcgcattagacgttagagctaaggaaattaatgaagaaatgaagattgctgcagctaaagcaatagctttattggctagagaggatgttccagacgaagttgtttctgcttatggtggagataggcctaaatatggaaaaaattatattataccttcaacatttgatccgagattaataagcgtaattccatcagctgtagctaaagctgccatgaaaagtggagtagcaagaaaaaaaatccaggactttgatctttataaagatgaattga

SEQ ID NO: 203519 - DNA, 907 bp, Unknown
  Bacterial polypeptide expressing nucleotide sequence isolated from the Sargasso Sea
atgaatgccgatcaaaatttagtgaatatgccaactattggttttggaacttatttaatcccaaatgaggaggcacagaaaactataagtatagcactcaaaattggatataggcatattgatactgctgaagtttacagaaatgagatgggtatagggttaggtcttaaagacacattctctcaactttctcttcaaagagatgaggtattcgttaccagtaaggtttttcctggaaatccaagttggagcagagagccaaaaaattataagatgtgtattgaggcttgtgacagcagtcttaaaaagcttaatcttgactatcttgattgttatctaattcatgcacctttctgtaaggacttaagactagagcaatggaaagcattatgtgatctcaaaaaggaagggaaaaccagaactataggtgtctcaaactatagtcagttacatattcaagagataattaatgaaggactagaagttcctgaatataatcagatcgagttacacccttggtgccagaaagaagaattagtttcctttttgaaagagaaaaatataaaggtagtagcctacagctcattagttcccttggagggatggagggcaaagcccaatcaagatagtgcaaaatctcaaagcatgaaagaggatggtgctgataattcttctccatttaagagaatggcaaaaaagtatggcgtgtctgaggcacagatattgctcaagtggggacttcaaatgggctttgtgattttaccaaaatcttcggatgaaaacagaattagagaaaactttgatctttcctttcaaattgatgataccgatatgaaagaaataagtactattgataaaggcgacggtattgcatggccaaatggtgatccttgtaactctgagtaga

SEQ ID NO: 203520 - DNA, 748 bp, Unknown
  Bacterial polypeptide expressing nucleotide sequence isolated from the Sargasso Sea
atgagattaaacggcaaaagagcaatagttactggggctgcttctggatttggtgctggcatcgctaaaaaatttattgaagagggcgctgaggtaattattgcggatctaaatgagaaaatggcacgaaaagttgctttagatcttggtgaacgcgcttatccatttttggttgacgtttcaaaaagtaaatccgtagcaaagttgaaagatttttcattatcgcactttggcatacctgacattatcgtaaacaatgcaggaataacacatacccctgacgccttggaaaatatttcagaagatgactttgataaagtattttttgttaattgtaagtcggtttacctaatggctcagctatttgtaccagaaatgaaagaacaaaaatctggggtttttctaaatgttgcatccactgcaggcgtttcccctcgaccaaatttaaattggtataatgcatctaaagggtggatgaacactgcaacgaaaactatggctatcgaactcgccctccacggtataagagtcaatgcaattaacccagtagcgggcgaaaccccgctgttagccaccttcatgggcgaagataccccaatgatacgatctaaatttctatcaaccataccccttggaagattttcaactccagaagacatggggaatgccgcgtgtttcctttgctctgatgaagcatcaatgataactggcgtttgccttgaggttgatggaggacgctgtatatgac

SEQ ID NO: 203521 - DNA, 1150 bp, Unknown
  Bacterial polypeptide expressing nucleotide sequence isolated from the Sargasso Sea
atggctgctaaattttttattccttccgtcaacgtattaggcaaaggcgcagtagatgatgctattggtgatatcaaaaccttaggctttaaacacgcgctaattgtgacggataaacctttagtcaatattggtctagtcggtgaagtggtcgaaaaactcggccaaaatggtattacctcaaccgtgtttgatggcgtacaacctaacccaaccgtcgggaacgttgaagccggtctggcactgttaaaagccaatcaatgcgattttgtgatttcactcggtggcggctcaccacacgattgcgctaaaggtatcgctcttgtggcaaccaacggtggcagcatcaaagactacgaaggcttagaccaatccgctaagccacaactgccattagtagccattaacaccaccgccggcaccgccagtgaaatgacccgtttttgtatcatcactgacgaagctcgccatatcaaaatggcaattgtcgataaacacaccaccccattactgtctgtgaatgacccagagctgatgctgaaaaaaccagcaagcctcactgctgcaacgggcatggacgcgctgacccacgcggttgaagcctatgtgtctatcgctgcgaacccaattaccgatgcctgcgccattaaagccattgaacttatccaaggcaacttagtgaatgcggtaaaacaaggccaagatattgaagcccgtgagcagatggcctatgcgcaattcttagcgggtatggcctttaacaacgccagcttaggttatgtgcatgccatggcgcaccaattaggcggtttctatgatctgccccacggtgtgtgtaacgccctcttattaccccatgtgcaagaatacaacgctaaagtggtaccgcatcgcttaaaagatatcgccaaagcgatgggtgtcgatgttgccaatatgacggatgagcaaggtgctgcggctgcaatcaccgcgattaaagccctatccgttgcggtaaatattccagaaaacctgacgttactcggggttaaagcggaagatattccaacgctggctgaaaacgccttgaaggatgcctgtggtttcactaaccctaaacaggcaacccatgaagagatctgccagatcttcacgaatgcgttataag

SEQ ID NO: 203522 - DNA, 1363 bp, Unknown
  Bacterial polypeptide expressing nucleotide sequence isolated from the Sargasso Sea
aatgaaaaacgtgatgagctcactaaagagcggagactggcgcgcactggtggcgtgttttctctacttcgacaccggcttcacggtctgggtgctgtacggaccgctcgcgccgttcatcagcaagagcattgccatgacgcctgcgcagcaaggcttgctggtcgccgtaccggtgctgtcggcggcaatcctgcgcgtgacgctcggtaacctctatcaatcggcgcatggcaaacgcattgcgctgatgggcgtgttgctttcggcggtgccgaccatcgtgctgccgttgttgccgttcgtgccgtcatacaccttgctgctggtgctcggcgtcttcctcggcgtgggtggcgcgagcttcgcggtggcgctgccgatggccggcagcaactatccgccgaaagtgcagggcctcgtgctgggactcgccgctgcgggcaacatcggtgcggtgctcgacggcttcctgtttccccaactggccgcgcactacgggtggcaaatggccactgccggcgcgctgccgttgctcgccatcgccggtatcacgctgtacttctgggccaacgattccggcatcaagtcgggcagcgtgctgcgtgcgttcggtagcttcgtgatcacgctcgccggtttgatcgtgctcgtgctgctggttgaagcaggcatgttcggctcgggcaagaccggcgtgctgctgttgccggtgatcggcgcgctgctggcgattgcggtattgcccaagcgctaccgcacggtgctcggcgagcgcgacacgtgggtgattatgctggtgtacagcatcacgttcggtggttttgtcggtatgtcgtcgtatgtttcgctgctgctgacgaatctgtatcaactctccaagatcgacgcaggtctgttcatggcgctgctggccgcgaccggcgcgatcgtgcggccgctcggcggattgattgccgataagatttccggcgtgcgtgccttgaccttcctgctcgcgatcatttcactgtgcgacctcgtctttgccgccgcgatgccttcggtagtgggcgggatcgcgctgttgctgtgcctgtacgtggccttcggtctgggcaatggcgcgaccttccaactggtgccgcatcgttgggcgggccgcaccggcctgatgtcgggcattgtcggcgccgcgggcggcattggcggcttttatctgccggttgtaatgggcatcgcgaaggaaagcaccggcagctatcagatgggcttcgcgactttcggcgcgctggccgcttgcgcgttcctcgcgatcgtcgcactgcgccgtccgtggatggcgtggtcgatgcatggcagtgtgatgcacgcgcacgcaacg

SEQ ID NO: 203523 - DNA, 2005 bp, Unknown
  Bacterial polypeptide expressing nucleotide sequence isolated from the Sargasso Sea
tgggagggtaaagcagttttatttaaaagatttgcagacatagatgctattgatttagaaattgacagcaaagatcctgaggaaatagttaatagtataaaaaattttgccgtaagttttggaggtattaaccttgaagatatcgctgcaccagaatgttttattattgaggaaaatttaaaaaaaatacttgatataccagtatttcatgacgaccaacatggaactgcaattatcacatcagcagcacttattaattcaattcacattactaaaaaaaaaatttctaaaattaaagttgttgtaaacggtgcgggagcatcagctatggcttgttcagatttatttttaaaattaggagttacaaaaaataatttaactatgatagacagtaaaggagtaattagttcaagcagaaaagtattgaataagtggaaattaaagtatgcaaaaaaaacaaaggataaaactctaagtgattcattaaaaaatgcagatgtttttttggggttatcatcagctggtattctcaaaaaagaaatggttaaacagatggccaaaaatccaatcatatttgcctgcgctaacccagatccagaaattttacctgaagatgtattcaagattagaaaagatgcaattatagcaacaggaagatcagattatgcaaaccaggtgaacaatttaattggttttccttatatatttagaggagcgcttgatgtaagagctaagacaataaatgaagaaatgaaaattgctgcagctaatgcaattgctaaattagctagagagagagttccagatgaagttgcagcagcaatgggaggagacaggcctaaatatggcaaagattatattattccttctacatttgatccaagattaataagtgtaattccagtagcagtagcaaaagctgcaataaaaagtggagttgccagaaaaaaaattgaaaattttaatatttactctgaacaattgaaacaaagattagacccatcggtaactattttacaggggataaattctaaaattaaaaaaaatcaaaaaactgttgtattcgctgatggggaagacgaaaatactttaaaagctgcaattgcttttaaaaatagtggactaggaactcctataattgttgcaaaagaaaatattgttaaacaaagattaaaagaaattggatatggagaaaatttagatattaaaattgttaattctactgataaaaaaatgagagataaatatttaaaatttctctataagaaaatgcacagagatcagggtttacttgagagggattgtgacagaatgattagaaatgatagagttatttggtcatcttgtatggttgaatgtggagatgcagatgcaatggttacaggcaatacaagaagatattcccaatcgttagaaaaaattaaaaaagtaattcctgttagaaaaggtgaaatcatgtttggattaaacatggtagtaagtaaaggaaagactgtatttattggagacacatcagtaaatgaatatccttcctctgaagaattggctgatatagcaatttcgtcagcaagagttgtaagattatttggatttgatcctaaagtagcatttttatctcattcaacatttgggcaaccaataactagtagaacaaaacatataagggatgctgtagaaatattaaaaaaaagaaaagtagattttaaatttgatggtgacatgcagccagatgttgctcttaatgaagaatattctgatttatacccattttcagaaattgtgggaaatgcaaatattttaataatgcctggtcagcatagtgcagcaatttcaaataaaattatgaaaacattgggtggtgctaaaattattggtcctctattaattggtttagctcaaccaatagaaattgctccattaagatcttctacctctgaaatattagatctagcttctgttgctgcctattcagcaggggttattaattatcaaaaaacaaaataaa

SEQ ID NO: 203524 - DNA, 772 bp, Unknown
  Bacterial polypeptide expressing nucleotide sequence isolated from the Sargasso Sea
catgcgcctaaaaaatagaatagcaatcgtcacaggagctgctgggggtattggagaagcagttgctcacctctttgcccagcatggggcagatgtaatggttgctgacctcaatagtgtgggtgtgtcggaaacatcaaaatccattagggataaaggtggtctggctcattcaatagaagtcgatgtatcagatgtgcgatcggttgagaatttaattgcggaaacaataaggatttttgaaaccatagacattctagtaaatgtggcaggtgtaggagggtttggtcattttacagaagttagcccagatgaatttgatcggataatgcgcattaacgtaagtgccagcttatattgtgcgcaagctgctgcaaaagagatgttaaaaaataaatatggaagaattatcaacgtcgcctcgatagcgggggagagggcgggtgaacatagaacagcgtatggtacttcaaaagctgctgttattgggttaacgaaacaaggagctcgggatttgggaaggcacggtataacagtaaatgctatagcgcctgggcctgttgataccccgcttacgcgacaagttcacactgaaaagacgagagctaattatcttaaagtgatcccagcaggacggtacggtacagttgatgagatggccgatgctgctttattcttagcgggcgaggcggccggttacgtgaatggacacacattatttgtcgatggcggttatgtctcagctggtgttgcagaagcggatgctatttga

SEQ ID NO: 203525 - DNA, 542 bp, Unknown
  Bacterial polypeptide expressing nucleotide sequence isolated from the Sargasso Sea
tatgaatattaaattcgatgacaaagttgccattgtaactggcgctggcggtggtattggcaaacaacatgctttagagcttgctaaaagaggtgcaaaagttgtggtcaatgatcttggaggaagtgttgatggaagtggaacaagtgatgctgctgaggctgttgttgatgaaattacttcaaaaggcggtgaagccattgccaatggtgccagcgtaactgatttagaagcagttaaagaaatgactcaacagacaattgataaatggggacgaatagatattcttgtaaataatgcaggtatattaagagataagagtttccataaggtaacactagatgattttaatttagtaatggatgttcattttcaaggaacattaaattgtacacatacaatttttccaataatgagagaacaagagtacggcagaattatctttacaagttcttctagtggtgtttttggaaactttggtcaaacaaattatggttctgcaaaaatggcaatggtaggtcttatgaatactctaaagttag

SEQ ID NO: 203526 - DNA, 1576 bp, Unknown
  Bacterial polypeptide expressing nucleotide sequence isolated from the Sargasso Sea
atgacaaaaaaatcaaaaattgatcattacacagataaagaagcattagattttcataataagggaaagtctggcaaaattgagattatttcttcgaaatctttaacaactaaaagagacctttctctagcttattctcctggggtggcggttccagttaaagaaatctcaaaaaatccagatgccgcttatgaatatacaagcaaaggaaacttggtagctgtaataagcaatggttctgcaatcttaggattgggaaatttaggtgcattggcatccaaaccggttatggaaggtaaggctgttctatttaaaagatttgcagatataaatgctatcgatattgagatagataataaaaattcagacgaaataattaaatgtattcaaaatattggaaatagttttggtggaataaatttggaagatatcgctgcaccggattgttttattatagaaagaaaattaagggaaactttagatatacctatctttcatgatgaccaacatggtacagcaattattacatctgctgcactaattaatgctttggacatttctaaaaaaaaacctggagaggtaaaagttgttgtcaatggtgcaggagcttctgcattagcatgcgcaaatcttttcaaaagtattggcattaaaactcaaaatataattatgcttgatactaaaggtgtaatttataagggtagagataatgtggatcagtttaagtcagcatatgcagttgaaacaaaacttagaactcttaaagaggcaataaagggagcagatgtttttttaggcttgtcagcaaaggatgtattaactcgagaaatggtaaaatctatggcaaaaaatccgatcatatttgcctgtgcaaatccagatcctgaaataaaacctgagttagtagatgaagtaagatcagatgcaattgttgctacaggaagatcggattatccaaaccaagtaaataatctaattggttttccatatatctttagaggtgctcttgatgttagggcaaaggaaattaatgaagaaatgaaaatagctgcggcaaaagctatagcgggactagcaagagaagaagttcctgacgaggttgtaaatgcttatggaggagaaaggcctcgttacggaaaagaatatattattccatcaacttttgatcctagattaattagcagaatacctgctgcggttgcagaagccgcaatgaaaagcggggtagcaagaaaaaaaatttcggatatcgaagcttacaaagatcaattaactaatagacttgatccttctatgagcatcatgcaaggaattaattcacaaattaaaaaaagacctaagacagttgtttttgcagagggcgaagatgaaaatatgttaaaagctgcaattgcttataaaaatagtcgtttaggaacaccgatagtaattgggaatgaaaaaagagtaaaagaacagttaaaagaaatcggactagatgaaaattataaaattaaaattgtaaactcaactgacaaagacaaaagagaactatataaaaaaaaattatatagtaaattgcagagacaaggtcttt

SEQ ID NO: 203527 - DNA, 859 bp, Unknown
  Bacterial polypeptide expressing nucleotide sequence isolated from the Sargasso Sea
atggctaaaaattcaaaagatatcttgcgtaaagccgctttagattatcatgcgcaaccgagaccgggtaaactagaaatacgagctacaaagccgatggccaacgggcgtgacctggctcgggcttattctcccggtgtagccgaagcctcaattgccatagacaataatcctgatgacgtaagtaaatacacctctcgagccaacttagtagcagtggtgagcaatggttcagctgtcttaggattaggtaatattggagctcttgcttcaaaacctgtaatggaaggaaaagcagttctatttaaaaagtttgccaatattgactgttttgatttagaggtaaacgaaaatgaccctaaaagacttgcggatatcatctgcgctcttgaaccaacttttggcgctataaacttagaagatatcagagcaccagattgctttgatgttgaaaaaatttgtagaagcaggatgaaaattcctgttttccatgacgaccagcacggaacggcaatagttgtctgtgcagctgctaaaaatgcacttttggttgccaaaaaacaatttgaaaacattaaaattgtgtccacggggggaggtgctgccggcatagcctgcctgaacatgttggttaaactgggcgttaagaaaaagaatatttggctcttggacaagcatggattagtctacgaaggtcggtcagtagatatgaattctgaaaaatctgcttttgctcaatacactgactttagaactttgcaagaagtaatcaaagacgcagatatgtttttaggtctatctggacctaatgttttaaagcctgctttaataaaaaaaatgagtgcaaagccaatcattt

SEQ ID NO: 203528 - DNA, 2290 bp, Unknown
  Bacterial polypeptide expressing nucleotide sequence isolated from the Sargasso Sea
aatgaaaaaaaacaaaattgaacattattcggataaagaagctcttgaatttcatatttcaaataaatctggcaagattgagataaattcatcaaaaccaatgatatcaaaaagagaccttgctttagcatattctcctggggtagcagcaccagttaaagaaatttataaaaactctgagagagcatatgattatacaactaaaggcaatttagttgcagtgataagtaatgggtctgcagtattaggactaggaaatttaggtgcaatcgcttcaaaacctgtaatggaaggaaaggctgttttatttaaaagatttgcggacattgatgctattgatttagaaattgatagtaaagatcccatagaaataattaatagtattaaaaactttgctgtaagttttggtggtattaatcttgaagacattgctgctccagaatgttttataatagaggaaaatcttaaaaaaatacttgatataccagtatttcatgatgaccaacatggaacagcaattattacatcagcagcattaattaattcaatacatatcactaaaaaaaaaatttctaaaattaaggttgttgtaaacggtgcaggcgcatccgctatggcatgctcagatttatttttgaaattaggtgtaaaaaaaaataatttaacaatgatagatagcaagggggtaattagttttgatagaaaaggattaaataagtggaagttaaaatacgcaaaaaaaacaaaagataaaaatttatatgacgctttagaaaatgcagatgtttttttaggactatcatcagcaggcatacttaaaaaagaaatgattaagagaatggcaaaaaacccaattatatttgcatgtgctaaccctgacccagaaattttaccagaggaagcttacaaaattaggaaagatgcaattatagcaactggtagatcggattatgcaaaccaagttaataatttaattggttttccatatatatttagaggggcgcttgatgtaagggcaaaaacaataaatgaggaaatgaagatttctgcagctaatgcaattgctaagctggctagagaaagagttccagatgaggtagcggcggcaatgggaggggacaggcctaagtatggtaaagattatattattccatccacatttgatccaagactaataagcgtaattcctgttgcagtagcaatagcagcaattaaaagtggagttgctagaaaaaatattgaaaattttaatttatactctgagcaattgaaacagagattagatccatcagtaacaatactacaaggtataaattctaaagttaaaaaaaatccaaaaactgtagtatttgctgatggtgaggatgaaaatacgcttaaggctgcgattgcatttaaaaatggtggactaggcactccaataattgttgcaaaagagaatgttgttaaacaaaggttaaaggaaattggttatagagaaaacctggacattaaaattgttaactctacagacaaaaaattgagagaaaaatatgtaaaatttttatttaaaaaaatgcaaagagaccaaggcttacttgaaagggattgcgatagaatgattagaaatgacagggttatttggtcatcatgtatggttgaatgtggtgatgccgatgcaatggtaacaggtaatactagaagatattctcaatcacttgaaaaaattaaaaaagtaattcctcctagaaaaggagaaataatgtttggattaaatatggtagttagtaaaggtaaaactgtttttattggtgatacatcagtaaatgaatacccttcgtcggaagaattagctgatatagcaatttcttctgcaagagttgtaagattatttggatttgatccgagggtagcttttttatctcattcaacgtttgggcaaccaataacaagtagaacaaaacatataagagatgcagtagaaattttaaaagaaaaaaaagtagattttaaatttgatggtgacatgcaacctgatgttgctcttaatgatgaatactctgatttgtatccattttcggaaatagtgggtaatgctaatattttaataatgcctggtcaacatagtgccgctatctctaacaagattatgaaagcattaggtggtgctaaaataattggcccattattaataggtcttgctcaaccaatagaaattgcaccgttgagatcatctacttctgaaatattagatttagcatctgttgcagcttattcagctggtgtgataaaatataaaaagacttattaa

SEQ ID NO: 203529 - DNA, 901 bp, Unknown
  Bacterial polypeptide expressing nucleotide sequence isolated from the Sargasso Sea
atgagcattgaatttaatgataaagttgcaattgttacaggagcaggcgggggcattggtaaagagcatgctttagagcttgcaaggagaggggctaaagtagtagttaatgatcttggtggaagcgttgatggcagtggtgcaagcgatgctgctgaagaagtggttgagttaattaaatctgaaggtggcgaagccatatctaatggagctagcgtaactgatttagatgcagtgaagaatatggtgcaacaaacaatggatgaatggggcagaattgatattcttgtaaataatgctggtattttaagagataaaagttttcataaagtttctatagaagattttaatttagtaatggatgttcattttcaaggcagtttaaattgcacgcatactatttttccaataatgagagaacaagaatatggtcgtattatttttacaagttctgctagtggtgtgtatggaaattttggacaaaccaattatggatcagcaaaaatggcaatgattggcttgatgaatactttaaaacttgaaggacaaaataaaaatatttttacaaactcaatcacaccggttgcatacaccagaatgacagagggattgatacctgaggattttggtcaaaatttaaaatcagaatatatcaccccagctgtaatatatttagcaagcgatcaagctccaaatggagtgattatagctgcaggagcaggagttttttctagaataaatattcaagaaagcatgggtgtctcccttggtactggcgaagatatgacaccagaaaatattcatgctaattgggataagatttctgatatgacaaatgcaagagctcttcaaaatggaggagagcagacattaaagttttttgagttaattaataagtaat

SEQ ID NO: 203530 - DNA, 931 bp, Unknown
  Bacterial polypeptide expressing nucleotide sequence isolated from the Sargasso Sea
catggcgcaggacgtcaattccccggactacaccatcggcgttatcggcaccggaaccatgggccgcggcatcgcgcaaatcgccgtgactggcgggtttcaagtgaaaatgtacgatgcacaggacggagcggccgtcaaagccgaagagtttattcaccgcatggtcaaccgggcagcggaaaaaggtcagatgtccgaagacgatgcgaaggcggcaaacagccggctgcagatcgttagcggcctggcggaatttgccgggtgcggcatggtggttgaggcaattgtcgaaaatctcgatatcaagaagggattgttcaacgaactcgaaggcattgttgccgaagacacgattctggcatcgaacacctcgtccctgtccgtgacgcagattgccgccggctgcgacaagcccgaacgggtcgccgggtatcatttctttaacccggtgccgctactgaaagtggtggaggtcgtcaacggccagatgaccgcgccctgggtggccgaaaagctggactctatatcccgcaaatgcggccacgaacccgtccgcacccaggacacgcccgggtttctggtcaatcatgcaggccgaggactttacaccgaaggtgcgcgcatcctggccgagggcatcgcggaaccgcacaacgtggatgacgtgctccgcgagggcggggcgaatttccgaatggggccgttcgagctgatggataccaccgggctcgatgtgtcgggcgtggtgatggaatcgatctacgaacagttttatcaggaacagcgcttcaagccgcaggcgtttatccgcaaccgcatggcggcaggcctttatggcctcaaggtggggcagggattttatacctacgaagacaacaggaaggtcctgccggaagagtcggcgccgccgacggacctgcccgaaagc

SEQ ID NO: 203531 - DNA, 823 bp, Unknown
  Bacterial polypeptide expressing nucleotide sequence isolated from the Sargasso Sea
atgaaatctatattagttacaggatcttcttcaggaattggagctgcaatatgtgaacacttctcacaaattggttggaaagtttttgggagtgtacgaaatcaaaatgatggggataaactaacagatatatgtggagaaaatttcactcctcttatttttgatgtcacagacattaacgcaattaatgaggcggctaatttagttgaatctcatttgggcaaaaatggcttaaattgtctcgtaaataatgcaggtattaatatttctggtcctatggagtatgtagaatctgatgaagtaagaaaagtctttgaagtcaatgtaatgggaccattaaattgctcgcaatcattcctgccagcacttaaaaaatctacatcatcaacaataattaatattagctcaatggccggtaagattggtcttccaatgcagggatcatattgtggcagtaagtttgcacttgaaggaatttctgaatcaatgcgcagagaacttcaaattcataatatcaaagtagttgtaattggtcctggtgcaattgaatcatcaatttgggataagtttgaaaaagatgagatggaagaacaatataaggatacagaatatacatcagcaataaaaaaaatggacggcactcttaaaagagcaagaagcatagctattccagctcatcgagtagccaaaaaagttgagaaaattgttaattctaagaatcctagaccaagatatgtagttgctggcataacagacaaaatgttaaatcttattccaagaaagatccttgatagagcttttaagaggttattaacgaaataac

SEQ ID NO: 203532 - DNA, 877 bp, Unknown
  Bacterial polypeptide expressing nucleotide sequence isolated from the Sargasso Sea
atggtttgtgataatttggaaataagaaaaattacagtaattggttctgggacaatgggtgcaggaattgctcaggtttgttgtgagagtgggtttgaaactattctttttgataaatatccagaaagtatcaaaaatggaattgctaaaattaatgcattctgggataaaggaattagtaaagggaaaacaaccacagaacaaaaagaaatttggtcatcatttttgaacacatctgataaattaatttctgcagtttctgatgctgatttagtaattgaagctgtacccgaaattatcgatttaaaaataaagatttttcaagaacttgatgagtttacaaaacctaattgtattttagcgacaaatacatctagtctctcaattacaaaaattgctaaatcaacaaaaaatccaaaaagagttattggaatgcatttttttaaccctgttcctttaatgaaattacttgaaattattaagcataacgaaatttcaaatgaaatagttgaaattacaaaaaacattgcaagttcaatgaataaaactgcaattgtggtaaaagatagtcctgggtttgccacctctagattaggtgtagtcttagggaatgaagcgattagaatgcttgcagaaggagttgctagtgcatcggatattgattatgctatgaatttaggatatagacatccaatggggccactagagctttcagatttagttggtttagatgttagaagagatatattactcggtcttgctgaagccactggagattcttcttatttaccacatccattattagagaaattagttgagaaaggagaattaggaaaaaaaactgataaaggtatatacaattggataaataatcaaa

SEQ ID NO: 203533 - DNA, 769 bp, Unknown
  Bacterial polypeptide expressing nucleotide sequence isolated from the Sargasso Sea
atgtttaatctaaaagacaaagtagctatagtcacaggtgcatctagaggaattggcaaggcaatagcaattcaattatcaaatgctggggcaaaagtggtagtttcttcaagaaagcttgaggaatgcgaaaaggttgctgatgaaataaaaaatatgggcggaaaagcagacgtgattccctgccatgttggcagaaaagatgaaatttgcaacttagtaaaagaaaccattaataagtataatagtatcgatattctggtaagtaatgccggcacaaatccagcctttgggcctttggcaaagctgaatgatgaagcctttgataaagttttggatgttaacctcaagtcatctatttggttagtgaatgaagctagcccttatttaaaaaaaaataaaacaagttctataattataatgtccagtatttctgctctttttgggacaaaggatattggcgcttatggaatttcgaaagctgcagaagtttctttagttaaaaatttggcagtagaattggggcctcatggaataagagtaaacgctatcgctcctgggttaataaaaacagagttctcacgtgctttatggtctgataaagacaagttaaaaaaacaaaatgaaaatacaccacttcaaagaattggtcaccccgaggatatatctggcattgcacattttttagctagtgacgcatcatcttttattactgggcagctaattgtcgctgatggtggcgaaacaattacatcaactttaacttgat

SEQ ID NO: 203534 - DNA, 754 bp, Unknown
  Bacterial polypeptide expressing nucleotide sequence isolated from the Sargasso Sea
atgaacagactaccaaataaagttgccttaatatcaggtggtgcaagaggaataggtgaatatgcagctcgattattcgtaaaagaaggagcttctgtgattattggagacaaagatttatctaaatgtgaaaaaactataaaagaattacaaaaagagggttatgattgttcagcagtaccattagatgttacaaaagaatctgattgggttgatgctatttcttatatagaatctaaatataataaacttgatatactcgtcaataatgctggaatctatagtactattccaatcgaagaaacccctttagatgattttaatagtgtaatctcagtaaatctgacaggattatttctaggtacaaagcattctatacctgcattaagaaaagctggtggaggctctattgtaaatatgtcatcaactgcaggattagttggtaattcgggtagcggagcttatggtgcatcaaaaggaggagtaagatcgtttacaaaatatacagctgtacagcatgctgtagagaatattcgagcaaattcaatacatccagggccaattgaaacagatatgctagctgataaattttctgatttagaaagtagatctgcatcagaatcaaaaatacctatgggaaggataggaactgctaaggaagtagctatggcgatcctttttcttgcatctgacgaatctagttatataactggagctgaattaacaatagatggaggacttacagctagataag

SEQ ID NO: 203535 - DNA, 739 bp, Unknown
  Bacterial polypeptide expressing nucleotide sequence isolated from the Sargasso Sea
atgaataatttaaaggataaaaatataattgttactggcgcatctggagggataggaaactcaattgttaaaaaattatatgaaagtggtgcaaatattttagctactggtacaagaattgaaaaacttgaacaattaaaaaaagattttgaaaaaattaatattttaaaatttgatatatctgaaactcaaaaaattgaggagtttatcgatgatgcaaccaaagaattaggaggcagtttggattgtattataaataatgctggtatcacgcaagataacttggcaattagaatgagtttggatgagtggaaaaaagtaatagatcttaacctaacatcaacatttttgatcagtaaatttgcaattaaaaaaatgttgaaaaataaatttggtaaaattgttaatatcacttctgttgttggacatactggtaatttaggtcaagccaattatactgcatcaaaagcagggataattgcaatgtctaagagcttagcaattgagtatgctaagaaaaatatcaatgttaattgtatctcacctggatttattaaaactgcaatgactgataagatagatgaaaagtttaaagaaacaattatagcaaaaatcccctcagctcgccttggagagcctgatgatattgcaaatgctgtagtatttttgtgttctaaccaagcagattatattaatggtgagacattacatatcaatggcggaatgtatatggcttgac

SEQ ID NO: 203536 - DNA, 748 bp, Unknown
  Bacterial polypeptide expressing nucleotide sequence isolated from the Sargasso Sea
atgaactcactcacaggcaagaccgcgctcgtcaccggtgcttcgcgcggcatcggccgggccaccgcgttgacactggccgcggccggcgcgcaggtcctggttcactacggcagcggcgaaacggacgcgacggctgtggtcgacgagatccgccgcgccggcggcaaagccgagacgatcgcaaccgacctgcgttcgccggacggtccccacaagctcgccgagcgtgttcgcaccatcatcggcggacggctggatgttctggtggccaatgccggcatcgccagggccgcgtcgatcgaggagacgacggtcgaggacttcgacgcgctcttcgccgtcaacgtgcgtgcaccttttttcctcgtgcagcaactactgcccgctctgtgcaaaggaagcagcatcgtcctgctgtcctcgctggcggcacgcgcctcggtcggcacgctctctgcctactcggccaccaagggggcggtcgatacgctggtgaagcactgggccgcggcgctcggcccgcgtggcatccgcgtcaacgcagtggcgccgggcgtggtggagaccgagatgtcgagcttcaccaagacggacgccggccgcgaggcaaccctcggcatgcaggcgttgcaacgcctggcccaacccgacgacatcgccagcgtcgtcgcgttcctggcctcggaccagtcgcgctggatcaccggtgacacgttgcgcgtggatggcggctccaagctctgag

SEQ ID NO: 203537 - DNA, 904 bp, Unknown
  Bacterial polypeptide expressing nucleotide sequence isolated from the Sargasso Sea
tatgagcattgaatttaatgacaaagttgcaattgtaactggagcaggtgggggcattggtaaagagcatgctttagagcttgccaggagaggagctaaagtagttgttaatgaccttggtggaagtgttgatggtagcggcacaagcgatgcagctgaagaagtagtcgaattaataaaatcttcaggtggtgaggcgatatctaatggagcaagtgtcactgatctaaaagcagtaaaagagatggttcaacagacaatggatgaatggggtagaatcgatatcctcgtaaataatgctggtattttacgagataagagtttccataaagtttctatagaagattttaatttagtaatggatgttcattttcaaggaagcttgaattgcacacatacaatttttccaattatgagagagcaagaatatggacgtattatttttacaagttcagctagtggtgtatatgggaattttggtcaaacaaattatggttcagcaaaaatggcaatgattggcttgatgaatactttaaaacttgaagggcaaaataaaaatatttttacaaattcaattactccggttgcatatactagaatgacggaaggattaatacctgaagatttcggtaaaaatttaaaatcagaatatataactcctgctgtaatttatttagcgagtgatcatgcgccgaatggagtgattattgcagctggagcaggagttttctctagaataaatattcaagaaacgatgggtgtttctcttggtactggagaggatatgactcctgaaaatattcatgctaattgggacaaaatttctgatattgaaggtgcacgaactcttcaaaatggtggagaacaaactcttaaattttttgaattaataagtaaggaataa

SEQ ID NO: 203538 - DNA, 708 bp, Unknown
  Bacterial polypeptide expressing nucleotide sequence isolated from the Sargasso Sea
aatgaatcagattaatcttaaaggcagaaccgcaatcgttactgggggagcacaaggatttggtttagctatagtaaagcgttttattgcatcaggtgctaatgtcattatttgggataatgatgaagattgtatgagtaagattgatttaaaaaactgtttaaagtttaatatagatataacttcatttgaaagtataaataaaggcttagatttaagtttgaaaaattcagataaaatagatatcctggttaataatgcaggtattgcaggacctagctttaaaacatgggaatatccaattcaagaatggcaaaaagtaattgatattgatttgtcaggtgttttttattgttgtaaagcaattgttccacacttaaaaaaaaataactatggcagaattgttaatatttcttcaatagcaggaaaagaaggaaatccaaatgcgatgccttatagtgcggctaaagctggtgttatagcactaactaaatcacttggtaaagagttagctgaacataatatttctgttaactgcgttacaccagccgcagccaaaactagaatttttgaccaaataagtcaggaacacatagactatatgttatctaagataccaagaaatcgttttgtacttttagaagaacttgcatcacttgtttcgtggatggtttctgaagaaaattcatttactacaggggcagtttt

SEQ ID NO: 203539 - DNA, 985 bp, Unknown
  Bacterial polypeptide expressing nucleotide sequence isolated from the Sargasso Sea
aatgaaaaaaaagaaaattgaacattattcagataaagaggctttagattttcataatagtaataaatctggcaagattgagattattccttcaaaacctatgacaacaaaaagagatttggctttagcctattctcctggtgtcgcagctccagttaaagcaatatcagaaaatccagatgctgcttatgactatacaagtaaaggaaatttagtggctgttataagtaatggttcagcagtcctaggaatgggaaatttgggtgctttagcttcgaaacctgtaatggaaggaaaagcagtattatttaaaagatttgctgatattaactctattgatattgaaattgactcatcaaatacaaatgaaattattaatagtattaaaaatattgcaggtagttttggaggaataaatttagaagatattgccgcacctgactgttttgttattgaagaaaaattaaaaaaaatattagatatcccagtatttcatgatgatcaacatggtacagcaataataacaactgctgcattaattaatgcacttgatatttcaaaaaaatcaataaaaaaaattaaagtagttgttaacggggcaggagcatcagctatagcttgcactaatttattaaaaaaaactggaattcctaaaaaaaatataacaatgcttgatagtaaaggtgttatatatcgaggtagaaaaaatgttaatcaatggaaatcagcccacgcaattgatacaaaaaaaagaactttatctgaagctatagacggtgcagatgtttttttaggcctatcttctaaaagtattttatcaaaaaaaatggtaaaaaaaatgtctaagaatccaattatatttgcttgtgcaaatccagatcccgaaataactcctgaagaagttgaagaagtaagaagtgatgcaataattgcaacaggaagatctgattaccccaatcaagttaataatcttattggttttcct

SEQ ID NO: 203540 - DNA, 1168 bp, Unknown
  Bacterial polypeptide expressing nucleotide sequence isolated from the Sargasso Sea
atggagtcgagcaacacaatgacctctcgcaatttcagcatcgagactatcggcattgttggaaccggtgcaatgggccgcggcatcgctcaaattgccgcgctggcgggtctcgccgtgcgtctttacgatacgaatcccgccgcgatcggcgccgcgcgcgactaccttgccgagactttcgccaaattgaccgccaaaggcaagctcgaccaggcccgctcgctcgccgcgctcgcgaacgtgagcggcgcgcaggtcatcggcgatctggccgattgcgatctgatcgtcgaggcgatcgtcgaaaaactcgatgtgaagcaggccctcttccgcgagctcgaaacagtggtgagcggccggtgcgtgctggcgtcgaacacttcatcgctgtcgattacggcaattgccgcgggttgcacgaatccgtcgcgggtagccggctatcacttcttcaatccggttccattgatgaaagtcgtcgaggtaatcgacggcctgcgcagcgatcctgccgtgggcgacgcgctgatggatcttgcgcgccgcatggggcacacgccggtgcgcgcgaaagatatgcccggtttcattgtcaatcacgccggccgcggcatgaataccgagggtttgcgggtggccggcgaaggcgtggcgagtttcgccgacatcgaccgaatcatgcgcgagcaggcaggctttcgcctcggcccgttcgaactgctcgatctgaccgcgctcgacgtttcgcatccggtgatggaatcgatctatcatcagttctatgaggagccgcgtttcaccccctcgccaatcacgggcacgcggctcgcgggcggactgatcggccgtaaaacgggcgaaggcttttaccgctatgaagacggcaagcagcaagtgcccgcggaagcgcccgcgccgactgagctgccatatagcgtgtgggtcagcaagcgctatccgcaagcgcatgaagcggtcgtacaactcatcgccaaggccggcgtcaagctcgacgaaggcgccacgcccgcagcggactcgctgatcgtcgtaacgccgttcggtcatgacgcgaccaccgccgccgtcgaagaagcactcgatgcaacgcgcgttgtcgctatcgataccctattcccgctagccatagcgccgcaacgcg

SEQ ID NO: 203541 - DNA, 683 bp, Unknown
  Bacterial polypeptide expressing nucleotide sequence isolated from the Sargasso Sea
aatgtcagatagattgaagaataaagttgggttgatttcaggagctgctcaaggcttaggtaaagaaatggctaaagcaatgatttctcagggtgcagatatcataattactgatattaatgagggtgctcttgaaaaaacttcaaaagaattatcatgtaagtattttcttcttgatgttacaaaagaggaccaatggaaagatgtaataaaaaaaattaaagaggattttggctcattaaacattctcgtaaacaatgcaggaatagctgggggaggagatgttgaaaatacagaccttgaatcttggcatcaagttcacagtgtcaatcttgactctgtttttctaggatgtaaatattcccttccattgatgagagattcaggaaacggttcaattattaatatttcatcaatgtcaggaattgtagcttcacataacacatctgcatataattcttctaaagctgcagtaagacatctttcaaagtcagttgccttacactgcgcaaaatcaacaaatcttgttagatgtaattctattcatcctgtttttacaagaacagcaatggttcaaagcatgatcgattctttacctgatagaaatattgaagaaaaacttgtaaaacaaattccaattagaaaattggcagagccaattgatattgcaaaatgctgcagtt

SEQ ID NO: 203542 - DNA, 619 bp, Unknown
  Bacterial polypeptide expressing nucleotide sequence isolated from the Sargasso Sea
ctgaggttaaagaaaaaggtggtaaagccattttttataaaacaagatgttgtttcaacagaagattggaaaaatgttatagatgtttcaatatcagaatttagtaaaattgatatattggtcaataatgctggaatagcgttaatagggcctttcgaagaattttctgaagatcaatgggatcaacaaatcaatgtgaatttgaaatctgtttttcttggttgcaaggctgttatacctgagatgaaaaaaaataactcgggctcaataatcaatctttcatcaatagccggtttagtaggtcttcaaggatgtgcagcttataatgcgagtaaaggaggagttagattactaaccaaatcaatcgctattgaatatggacccaacaaaataagatgtaattctattcatcctggttttatggccacaaatatgaatgatccgaaaaaaattgaagaacgcggtagagattttgaagcaattattgaaacaattcctctaaaatctatgggtactgcagaagatatcgctaattgtgctctatatctagcctcagatgaatcatcatatgttacaggaagtgagtatgttgtcgatggcggttggacaactcgttaat

SEQ ID NO: 203543 - DNA, 670 bp, Unknown
  Bacterial polypeptide expressing nucleotide sequence isolated from the Sargasso Sea
atctgtgatgccgacaccaacaatctggtgcagtccctcaaggaaaatcctggctggaatggaatccaatgtgatgtctccaatgagaatcaagtggatcagctttttgaagagatgaaagactccttcggagatttggagatactggtcaacaatgctggaattgccggacctactgccccggtggaagaaatcgatccggacgaatggcgacgttcagtagaggtcaacatcaacggtgctttctattgcacaagactcgcgacacctttgctcaaaaactcccaaaaagcttcgatcatcaacatctcctcggtggctggacgccttggctttgcccgccggcttccatatgcctccaccaaatgggccatgatcggtttcaccgaaagtcttgccaaggaactcggtccctcaggaattcgggtcaacgcgttgcttccaggaatcgttgaaggtccccgtatcgaaggagtttttcaagcaagggcagagagtgagggagtgccttatgaagaagtgcgggatagagtattgaacaatgtttctatgaagcgcatggtcagcgcaggagatgttgcagaaatggcggtcttcctctgctctgaagccggaaagaacatttccggtcaatcgatcagtgtctgtggaaatgtcgaaaatctttaat

SEQ ID NO: 203544 - DNA, 2223 bp, Unknown
  Bacterial polypeptide expressing nucleotide sequence isolated from the Sargasso Sea
tatgacaaaaaaagatagagaagagcatttcagcgaaaaagaagcattagtgtttcatacccaaggtaagccaggcaaaatagaaattaaagctacgaaacctctagagacacaaagagacctttcattagcttactctcctggtgttgcggctcctgtaaatgctatagcagaagacataagcacagtttacgactatacaagcaagggtaatatagttgcagtaatatcaaatggaactgcaatattaggccttggaaacttaggagctcatgcatcaaaaccagttatggaaggaaaatctgttttatttaaaagattttcagatattgactcaattgatttagaaattgataccgaggatgctgaaaaatttattaactctgtaaagtatttaggaccttcttttggaggaataaaccttgaagacattaaagctcctgagtgttttataatcgaagactcactaagagaacaaatggacatacctattttccatgatgatcaacatggaacagcaattatatctgctgcagcacttataaatgcaatggaccttacaggaaaaaaaattaatgaagccaaaattgttgttaatggagcaggtgctgcaggtattgcatgtctggagctcttaaaagcgatgggtatgccaaatgaaaatgcaatattatgtgataccaaaggagttattcatactgaaagaaaagaaaatatgaaccagtggaaatctgcacatgcagtgaaaacaaagtgtagaactcttgaagatgcattaaatggagctgatattttttttggtctctcaattggcaatatcattagtcaaaaaatggttttatctatggcagaaaaaccaattatttttgcaatggctaatcctgaacctgaaatattgcctgaaaagattaaagaatgtagaaaagacgcgattattgctactggaagatcagattatcctaatcaggttaataatgtcttaggattcccctatatatttagaggtgcattagatgtaagggcaaaaacaattaatcttgaaatgaagattgctgcggctaaagcaatagctgatcttgccaaggaagatgtaccagatgaggtagccaatgcttatcctgggaaaagacctcaatacggtccagattacattatcccttctccctttgatccaagacttattagtaaggttcctccagcggttgctagagccgctatggatactggtgttgcaaggaaagcaattgttgatattgaaaattactcgaatgaattatctgctaggctcaatccttctgctggtcttctacaaaaagtttttcaagaagtaaaagaaaatccaaaaagagtaatttttactgaaggtgaagaagaagacatgatcagagctgcagtaatttttctcaacaatagaatgggtactccgatattaattggaagagatgacgtcataaaagataaaatgcaggaaatgggattagatttttttgatcaaatggaaattcacagtactaggaataaatctgaacatgacaggtacgccgaacatatctatcatcgtttacagagaaaagggtttttaaaaaaggattgtttagatctactcaatcgggaaagaaatgtttttgcagcatgtatggtatctttaaaagaagcagatgcaatggtctgtggtttaacaagaagttatgctgcgtcattagaaagtattgagtatgttctggatccaatacctaataaaaccattcttggcctgactgtgatgttatgtaatggaagaactatttttgtcgctgactcgaatgtacatgatatgccaaatgcttcacaattagcaaacataacacaagaaagtgctgaggtagtaagagaaatatttgggattgaaccaagagctgctctggtttcatactcaaattttggaaagccttttactgagagatcagtatacatgagagatgcaaaaaaaattcttgatgagagaaatgtaaacttcgaatacgacggagaaatgggtgctaatactgctttaaatgaaaatttaatgagtctttatcctttttgtaaattaactgggcctgcaaacttgttaattatgccagctattcacagtgcaagcatatcaactaagatgcttcaggaattaggaggaggtacactagttggaccatatttggttggctttaaagaaagtatacaaattgcacctttaggagcaaatgt

SEQ ID NO: 203545 - DNA, 1293 bp, Unknown
  Bacterial polypeptide expressing nucleotide sequence isolated from the Sargasso Sea
tctggacgaactcacagcccgggtagatgagagtgtccaaagtcgagctaagctcgcccaagtaatggtggacaagattttttcgttttctgaactaggtcagcaagagatcgaaacatctgcgtacgtaactggaatgttggaagagaatgggttttccattgagcgcggggttgcgggtatccctactgcttgggttgctcggtggggctcgggccggcctgtcatttctttcggttcagacatagacgggattccaaaagcgaaccagaaaccgggtgttgcttatgccgaccctcttatttctggtgcgcctggacacggtgaagggcacaactcaggacaagctgtaaacgtggtagctgcactttccctaaaggacttgatggaatctgagggtatccaaggaacgctagttttgtggcctggcgttgctgaggagcagttagctagtaaggcttggtacgtaagagacggcgtccttgatgacgtggatgtgacgctgtttacccatgtgagctcgaacttgggcgtgagttggggtcaagctggtggaacggggctggtctcggtcgagttcagttttgagggtgaagctgcgcacggggcaggcgcaccatggcgaggccggagtgccttggatgctgtcgaactaatgaacgttgcttggaattttaaacgcgagcacctgcgcccggatcagaggtcgcattacgtcattactgacggtggcgatcaacccaatgtcgtgccggtttcagcgtcggtctggtactacttccgggagatggattatgaggacatccagagaaactatgataccgccgttagaatagccgaaggcgcggcgatgatgaccgacactgagatgagttaccgcgtgcgcggagcggcgtggcctcgtcacttcaatcgaaccgtcgcagaaacgatgtatgaacacattgaggaggttggtctcccggagtggaccgaagacgatcacgcgttcgctgaagccgtgcagcagtcggtgggaggtattccgtctggaatgcctatgtccctaggtcctatcggtgtgccaggtccacgccgaagcggtggctcagacgacataggtgatattgcatggacgatgccaacggtgacgatgcgttttccgtccaatgtcccaggactccccgggcaccactggtcgagcgcaatggccatggccacgccgattgctcacaagggtgccgttgcaggagctcgcgttatggctaggactgctcttcagttattcatgatgccagagctggttgatgaggc

SEQ ID NO: 203546 - DNA, 544 bp, Unknown
  Bacterial polypeptide expressing nucleotide sequence isolated from the Sargasso Sea
atgtcgttaacaaattttagtcgatcgatatcgggacatatcgcggttgttacaggcgctgcaagtggaatgggagaggcgactgctaagttgtttgcgagtgaaggcgcgctggtggcagctattgatgttaacgaggaggggttgaatcgagttgtcgatgaaatttcctcggaaggtaaatctgccaagggatggatattagatctttctgatggaggggaaataaagcgtgttttcgacgaaatcgctgaacactttggtggaatcgatatattggtgaataatgccgggatttcaattccctcgcctatcgatgacgataattacgagagcaattggtctagatctatggacatactgattacagcccagaccaagacgattcgagcttccttgccttatataaggaaatccgacaatcccagaatcgttaatatcgcatctactgagggttttggggctacaaagtttggtagtccttacactgctgccaagcacgctgtaatcgggttgactcggtcgttagctgttgagttaggca

SEQ ID NO: 203547 - DNA, 799 bp, Unknown
  Bacterial polypeptide expressing nucleotide sequence isolated from the Sargasso Sea
aatggaaattaataatttatttaacatcaaaggaaaaattgcagttgttacaggtggctcaagaggtattggagaaatgattacttcaggctttctagcaaatggcgtaaaagtttatatttctgctagaaaagctcctgctttaattgaaaaagctaaagaattaactgataagttcggtcaagaatgtatagcagtaccttgtgatcttagttcaatcgaaggaatggaggaatttactgatttaatttctcaaaaggaagagggcgtagatttcttggttaataatgcaggagcagcatggggagaaccgtatgaaactttttctgaaaagggttgggataaagtcatggatttaaacgttaaaagtatgttttttcttacacaaaaaatgacaaacttattactggaaagagcttcattagaagacccttcaagagtaatcaatattggctctattgatggtctcaatgtacctgctttagaaacattctcctatagtgcatccaaagcagcagttcaccatctaacaagagtaatggcagcaaaattagttaaagaaaacattcttgtaaatgctattgcaccaggaccatatccaagtgcaatgttaggatccgcagttaatcacgactattctgaaatcgaaaaaagaaacccaagaaaaagagttggttcagctgaggatatagcaggacttgcaatttttttatgttcaagagcaggtgcttatacagttggagaaactattacatctgatggcggtatagtcaaaactgcaagtcataatttgagttaa

SEQ ID NO: 203548 - DNA, 934 bp, Unknown
  Bacterial polypeptide expressing nucleotide sequence isolated from the Sargasso Sea
atgagcaaactagttgaaggaaaagtcgccctagtcactggagcggctggtggtataggtcgtgagcatgcgttgatgctagcttcacacggggcgaaggtcgttgtaaacgatcttggaggcgaccgccatggagtaggtgaagatctttctgctgctcagaaagtagtcgaagaaattaaatcattcggcggcgaggcagttgtaaatggtgggaatgtcgcagattttcaagcagcaaaggaaatgatcgatcaagctgttgatactttcggagatctcaacatcgtcattaataatgctggaattcttcgagaccggatgctcttttctcttagcgaagatgattgggatgccattatgagcgtgcacttaaaaggaactttcggcccatcccaccacgcagcagtttattggcgtaatcaagcgaaagcaggtgaggaaacctacggaagaattattaacacttcatcaccttcaggtatctacgggaacataggacaaagtaattacggaactgcgaaagcaggcattgcagcatttacggttataacagcaatggagttagcgaaatacaatgttacggtgaatgcgcttgtccctgccgccttgtcaagaatgactgaagatctggtcggaatggatggcctgactgatgaacagaaggaagcgatgtctccaaggtggcaagctgtaacggcaacgtggctttgtagcgaggaagcaagtaacgtgaccggtcgactattcgacattcgaggaaaccagttgggtattgcggaagggtggaccttaggtccaagtggtacccaacctgatgatccaaccgacctcgggcctctcatggaagaactgatgtccgaagcaacacttaacgcgaatatgggtgggaaaccacaaggtggaaatggacgaccagagaacgaaatttagc

SEQ ID NO: 203549 - DNA, 1522 bp, Unknown
  Bacterial polypeptide expressing nucleotide sequence isolated from the Sargasso Sea
atgacacaacatcacactaatgcccttgttaaagggctaaaccaacaaagcttggcatatatgccaagccatgtagacacccctagctacgaccgcagaaaagtaaaagcaggtatagttcacattggcgttggcggttttcaccgtgctcaccaagccatgtatattaatgagttattaaaaacgccaggttctgagcaatggggtatttgtggtgtaggcttgcttgaagcaaatcgtgtacttcgcgatgtattaaagcagcaagactacctttacacattaacggtaagacacccaaatgggacaatagacaataccgttataggttctatgattgattttttgtttgcgcctgaaaacaaacaagctgttattaataagctcgcacaccctgatactaaaattgtgtctttaactattactgaaggcggatacaactttaacccagtaacgggtgagtttgattatgcaaacccagacataattaatgacattaataatccaaacgatcctattactgcatttggatatatagcagctgcgttgaagctacgtaaagaacaaggccttaatgcgtttacagtacagtcttgcgataacattcaacataatggcaatgtaacgcgcaaaatgttactcgcttttgccgcagagcaagatgcagcattaagtgaatggattgctgctaatgtaatgtttcccaatgctatggtagaccgaattacgccagtatctaaacaaagtgatattgaatacgttgttgatgcttacggtgttagcgatgaatggccaataacgtgtgaatcgtttacacaatgggtaattgaagattcattttgtgacgggcggccaaattgggataacgctggtgctcaatttgtaaaagatgtaaccccttttgaaaccatgaaaattcgcttattaaatgcaggccactcagtactgggtttactgggatctgtacatggctatggcacaattgacgaaacagtatcagatcccttatttgcaaagtacttacgtgcgtttatggataaagaagtaacgcctaacctagagcaattagaaggcattgatcttgaaatctacaaagacacacttattgagcgttttgcaaaccctaatattaaagacagcttatcgcgtatttgttctgagagtgcagctaaactacctaagtttttaattgccactattaacgaaaacctagcgcaagggcgagatgtatcactagctacactcgttattgctgcatggtgtttttatagcgacaaaggggaagatgagcaaggcaatacgcttgaagtaattgatgcaatgcaaagcgagctttataaagctgctgctaaaacgactactgataaccttgcatttttatcgctaacaagcttatttggcgatttaaacacgcaaagcgcctttacgtctcactacaaaaacaatgtagacgcgttatacgcaccagcaagcaaaataaaagcaattatgaaaaacgtgcttgagcctaaaggtaactaat

SEQ ID NO: 203550 - DNA, 916 bp, Unknown
  Bacterial polypeptide expressing nucleotide sequence isolated from the Sargasso Sea
catgattacaattattggtgcaggcaaagttggtggagatgcagcactattttcagcattaagaagattagatgatgaaatattactactagatatcgcagaaggacttccacaaggagaggcaatggatctaaatcacatgttatcagaacagggaattgatgttaatgtaaaaggttcaaacaattatgaggacatgaaaggttccaaaattgtagtggtagttgcaggtgcaggaagaaaacctggaatgacaagaatggatttgttaaagattaacgcaggagttgtaaaagacgttgttggtaacataaagaaatttgcagatgatgcaatgattattcctgttacaaatccattagacccaatggcacaaattgcatacaaaacttcaggatttgatagaagcagagtttttggaatgggtggaatgttagacttatcaagattcaaacaattcatacacgaagcaacaggatattcccgtgaatcaacaaaagcattagtgattggagaacatggtgaaaacatgttaccattaacaagatttgcaacagtatcaggaattccattacctacattacttccaaaagaaaaacttgatgagatttttacagcaacaaaaggtgtagctgcagaagttatcaaactaaaaggagcaacagtacatgcaccaggaaacgcaatttcagccatgatagaatcagtagttcaggacaaaaaacaggtaattccagtttcaactaacttagatggtgaatatggacaaaaagatgtttcaattggagttccagcagtagttggaaagaatggggttgagaaaatactagaattagaattgaacgatgaagaaaaagaatggttcaacaaaggggttgacagtgtcaaaaatgcattgtcaggtgttgaattttaa

SEQ ID NO: 203551 - DNA, 763 bp, Unknown
  Bacterial polypeptide expressing nucleotide sequence isolated from the Sargasso Sea
atgaactcgcattctgacaatatactcaaaaatgaaataacactggtcactggtgcatctagaggcattggtgctggaattgctaaattatttggtgaatctggctcttacataattgggactgctacgacacaggaaggcgcggatgcaataacccagagagtaaataatggtgtttccaaaggtgagggggttgtattggatgtttccaactcagaagatgtaaatagaatcatcaaggaaatgaaggaaagagacctactgccttcaatacttatcaataatgcaggcatcagcttggaaagtcttttgatgagaataaaggacgatgactggaaaaaaattattgatacaaacttatcctctgcattctatttatgcaaagctgcggtctcaggaatgatgaaaaatagaaaaggaagaatcattaacattggctcagttgtgggatcaatcggtgcaatagggaatgctcattacagtgcaagcaaagcggcacttcttggattcacaaaatcattggcattagaggttgggtctagaggcatcaccgttaataatatagcgcctggctacattactacagatatgacaaaagacatcaaaagcgagctcagcgaggcattgatgaataagatcccgatgaatcgttttggctcacctgaagatgttgctaaagtggcactatttttggcctcagaatcgggctcttatataactggacaaaccattcacgtaaatggcgggatgcacatggaatgat

SEQ ID NO: 203552 - DNA, 742 bp, Unknown
  Bacterial polypeptide expressing nucleotide sequence isolated from the Sargasso Sea
atgaataaaatagatttaaaagataaagtagcggttgttacaggaggagcacagggatttggccttgctatagttgaaaaatttttagcttctgatgctaaagtgattatctgggataaggataaagaaatgatgagctctttaaatctaggagataatgttcatacggttgaagtagatgtaacaaattttgatagcgttactaaagcaacggaacaatctcttaaaattcataattctatagatatattagttaataatgcaggtatagcaggtccaagttttaaaacatgggaatatcctatagatgaatggcaaaaagtaatagatattgatttaagtggagtattttactgttgcaaatcagttgttccgcacatgattgagaagaattatggaaaaattgttaatatagcttcgattgctggaaaagaaggaaatcctaatgctatgccatatagtgcagcaaaggcaggagtaattgctcttacaaaatcacttggcaaagaattagcagataaaaatattgccataaattgtgtaacccctgcagcagctaaaacaagaatatttgatcaaataagtcaagaacatattgattatatgctttctaaaatacctcgaaatagatttgtaaaagtcgaggaacttgcatcactagtagcttggatgtcttcagatgaaaattcttatactactgcaggagtttttgatttaagtggaggaagagcgacttattaat

SEQ ID NO: 203553 - DNA, 799 bp, Unknown
  Bacterial polypeptide expressing nucleotide sequence isolated from the Sargasso Sea
aatggaaatcacaagtttatttaacatatctggaaaagttgctgttgttacaggcggttcaagaggaattggagaaatgataactgctggctttttggcaaatggggtaaaagtttatatttcagcaagaaaagctccggctttgattgaaaaggctagagaattgtctgaaaaatataatcaagaatgtataccagttccatgtgacttgagttcaatggatggtattgatgagtttgttaatcagattactgaaaaggaagatgccattgattttttagttaataatgcaggagctgcatggggcgaacctctagaaagtttctctgaaaaaggctgggataaggtaatggatctaaatgtgaagtctatttttttcttaacacagaaatttaaaaacttattgtctaaaaatgctagtgatgatgatccatccagagtaattaatataggctctatcgatgggttaaatgttccatcaatggaaacatatccctatggagcatcaaaggctgctgtccatcatttaacaagagttttggctgcaaaattagttaaagaaaatattttggttaacgctattgctcctggaccttatccaagtgacatgctcggaccagctgtaggttatgattattctgaaatagcaaaaagaaatccaagaaaaagagttggaactccagaagatatggcaggattggcaattttcttatgttctcgagctggagcatatactgttggtgagaccataacatctgatggcggaatagttaaaaccgccaatcatgatcttagctag

SEQ ID NO: 203554 - DNA, 772 bp, Unknown
  Bacterial polypeptide expressing nucleotide sequence isolated from the Sargasso Sea
tatggaattaaaagataaagtagctcttgttactggtggtgcatctggcttaggacaagcaactgtagaagcttatgtagctaaagaggctaaggcagtaatattagatattaatgaggataaagccaaagagataataaataatttgggagaagataatgttatgtttatctctactgatattatgaaagaagatcctgtaatagaggcagtcaatcaaataaaagaaaaatttggaggtctgcacattgcagttaattgtgctggcactggatatccaggaagaatattaggtaaagaagcaccccatcccttagatgcctttcaatttatagttaatttaaatcttgttggaacctttaatgtaatgagaatagctgctgagttaatggataaaaatgagcctgatcaaaaaggtgagaagggggtaatcattaatacagcttctatcgcaggtattgagggacaaattggtcaatcagcatatagtgcatcaaaagctggtgtaattggattaacaataactgctgctagagatttagcaaggcatgcaataagagtttgcactatagcgccaggaatttttgatacacctttaatgcaattagcaccagataaagttagagaacctttattggagtcaacccagttccctcatcgatttggccagcctaatgagtttgctgatttagcagtgcatatagtagagaatacatatctgaatggtgaaacaattagattagattctggtatgaggatgaagcctagataa

SEQ ID NO: 203555 - DNA, 1339 bp, Unknown
  Bacterial polypeptide expressing nucleotide sequence isolated from the Sargasso Sea
atgacaaaaaaatcaaaaattgaccattatactgataaagaagcacttgagtttcataataaaggaaagtctggcaaaattgagataatttcttctaaatctttaactactaaaagagatctttctcttgcttactctccaggtgtagcagttcctgttttagaaatttcaaaaaaccctgatgctgcatatgagtacacaagtaaaggaaacttggtggctgtgataagtaatggttcagctattcttggattaggaaatttgggtgcattggcatcaaaacctgtaatggaaggaaaagctgtattatttaaaagatttgccgatattgatgcaatagacattgaaatagacaataagaattctgatgagataattaaatgtataaagaatattggaaatagttttggtggaataaatttggaggatatagctgcgccagattgttttgtaattgagaaaaaattaagagaaagtttggatattccgattttccatgacgaccagcatggtacagcgattataacttctgctgctctaataaatgcattagatttatcaaacaaaaaaccgagtgatgttagaattgtgataaatggcgcaggtgcttcagcattggcttgtgcaaatctatttaaaagtattggtataaaaactaagaatataattatgcttgacagaaaaggagttatttataaaggcagagataatgtcgaccagtttaaatctgcatatgcagttgaaacaaaattaagaacacttaaagatgcaataaaaggtgctgatgtatttttaggtttatcagcaaaaaatgttttagataaagatatggtaaagtctatggctaagaatcccattatatttgcatgcgcaaatccagatccagagattaaacctgaattagttgatgaagtgagatcagatgcgatagtagcaactgggagatctgattaccctaatcaagttaataatttgattggatttccatatatatttcgtggtgcactagatgtaagagcaaaagaaataaatgaagaaatgaaaatagcggcagccaaggctatagctacacttgctcgtgaggaagttccagatgaggtagttaatgcttatggtggagagagacctcattatggtaaagaatatattattccgtccacttttgacccaagattaattagtcgaatacctgcagcagtcgcgcaagctgccatggatagtggagttgcaagaaaaaaaattgtagatattgagtcatacaaagatcaattaaccaacagacttgatccgtccatgagcatcatgcagggtattaatgctcaggtaaaaaaaagaccca

SEQ ID NO: 203556 - DNA, 946 bp, Unknown
  Bacterial polypeptide expressing nucleotide sequence isolated from the Sargasso Sea
aatgaaaataaaagcagcagttgttcgtcaaaaaaatggtccatttggactcgaaaatgtagtccttaatgagcccgctgaagatcaaattcttgttcgagtagttgcgactggaatgtgtcataccgatctgatttgtcgtgatcagcattacccggttccgcttccgatggtgtttgggcatgagggagctggcgtggttgagaaggttggatcttctgtcaaaaaagtacagccgggcgatcatgttgttttgactttttatacttgtggtggttgtgaagcatgcctttccggtgatcccacaagttgtgccaactctttcgttcccaattttatggggcgctcagttgccggtgagtgcaccattcatgaacacgatggccaggaagttggggcgagttttttcgggcagtcttcctttgcgacttatgctttgtcttacgaacgcaacacagtgaaggtcactaaagacgtcccgcttgaactccttgggccgcttggctgcggcattcaaactggcgcagggtctgttctcaatgcactgaaacctcctgcgggctcggctatcgtgatcttcggtgctggggccgtaggtctttcagcagtgatggcttccgccgtggccggatgtacgaaaatcattgctgtcgatgtcaaggaaaatcgactgaaattagctcgtgaggttggagcgacccatgtgattgatgcaaccaatactgatccagttgaggagatcaagaaattgtgcgctgatggggctccgtatgttttggaaaccagcggtttgccttctgtgctttcgcaagcgatcttgagctcctccataggcggtgagattggtattgttggtgcgccaccaatggggactacagtccctgttgatgttaattttttactatttaaccgtaagctccgaggaattattgagggtcaagctgtt

SEQ ID NO: 203557 - DNA, 901 bp, Unknown
  Bacterial polypeptide expressing nucleotide sequence isolated from the Sargasso Sea
tatgacaataagatttgatgacaaggttgcaattgttactggagcaggtggcggaataggaaaacaacatgcacttgagttggctaaacgaggtgcaaaagttgtagttaacgacttgggtggttccgttgatggaagcggagcaagtgatgcagccgaagaagtggtcgaactgattaaatctgatggaggagaggccatatctaatggagcaagcgttacagatataaatgctgtaaaaaatatggttcaacaaaccatggaagaatggggaagaattgatattttagtaaataatgctggaattcttagagataaaagttttcataaagtaacgcttgaagattttgagctagtaatggatgttcattttcaaggaactttaaactgtacacactccgtttttccaataatgagggagcaagagtatggaagaattatatttactagttcatcaagtggagtatttggaaattttggtcaaacaaattatggttctgcaaaaatggcaatgatcggactcatgaatactcttaaactggaaggtcaaaataagaatatctacacaaattcaattacaccagttgcatacactaggatgactgaaggcttaataccagaggactttggtcaaaaccttcaacctgaatttattacacctgccgttatttatttagctagtgaagatgctccaaatggtgcaattatggccgcaggtgctggcgttttttctagaatatttatccatgaaactatgggagtttctcttggtatgggagaagatatgactccagaaaacattcaagctaattgggacaaaatttcagacatgaaagatgcaagagccttacaaaatggaggagaacaaactttaaaattttttgagctcatcaataaataa

SEQ ID NO: 203558 - DNA, 823 bp, Unknown
  Bacterial polypeptide expressing nucleotide sequence isolated from the Sargasso Sea
catgaaatctatattagttacaggatcttcttcaggaattggagctgcaatatgtgaacacttctcacaaattggttggaaagttttcgggagtgtacgaaatcaaaatgatggggataaactaacagatatatgtggagaaaatttcactcctcttatctttgatgtcacaaacattaatgcaattaaggaggcggctaatttagttgaatctcatttgggcaaaaatggcttaaattgtctcgtaaataatgcaggtattaatatttctggtcctatggagtatgtagaatctgatgaagttagaacagtatttgaggttaatgtaatggggccattaaattgctcgcagtcatttctgccaatgctaaaaaaatcctcttcagcaactataattaatataagctcaatggccggtaagattggtcttccaatgcagggatcatattgtggcagtaaatttgcacttgaaggaatttctgaatcaatgcgcagagaacttcaaatccataatatcaaagtagttgtaattggtcctggtgcaattgaatcatcaatttgggataagtttgaaaaagatgagaaggaagaacaatataaggatacagaatatacatcagcaataaaaagaatggatggcacacttaaaagagcaagaagtatagctattccagctcatcgagtagccaaaaaagttgagaagattgtttattctaagaatcctaaaccaagatatgtagttgctggcataacagataaaatgttaaatctcattccaagaaagatcctagataaagcttttaagaggttattaatgaaataa

SEQ ID NO: 203559 - DNA, 901 bp, Unknown
  Bacterial polypeptide expressing nucleotide sequence isolated from the Sargasso Sea
atgacaattagattcgatgacaaggttgcaatcgttacaggtgctggaggcggtattggtaaagaacatgctcttgagcttgcaagacgtggagccaaagttgttgttaacgatcttggcggaacggtagatggaagtggtgcaagtgacgctgcaaatgaagttgttgatctaataaaatctgagggtggtgaagcaattgctaatggtgcaagtgtcacagacttagatgctgtaaaagcaatggtgaatcaagctatggatgaatgggggagaatagatatattagttaataatgctggtattttaagagataaaagcttccataaagttactttagaagattttaatcttgtaatggatgtgcactttcaaggaagtttaaattgcactcatactgtatttccaattatgcgtgagcaagaatatggaagaattgtttttactagttcatcaagtggcgtatttggtaattttggccaaacaaattatggttcagcaaaaatggcaatgatagggcttatgaatactttaaaattagaaggacaaaataagaatgtctttactaattcaattacgcctgttgcctataccagaatgacagaaggcttaattcctgaagactttggtaaaaaccttcaaccagaatttgttacacctgcagtaatatatttagcaagtgagaatgctccaaatggagtaataatggctgcaggtgctggtgttttttcaaggatatttattcatgaaacaatgggtatttctcttggtatgggagaagatatgactccagaaaatatacaggccagttgggataaaatatctgatatggaagacgctcgtgctcttcaaaacggaggcgagcagactctaaaattctttgaacttataaataagtaaa

SEQ ID NO: 203560 - DNA, 1684 bp, Unknown
  Bacterial polypeptide expressing nucleotide sequence isolated from the Sargasso Sea
aatgaaaaaaaataaaattgaacattattctgataaagaggcgctcgaatttcacaattcaaataaatctggcaagattgagataaattcatctaaaccaatgacatcaaaaagagacttagctttagcatactctcctggtgtagcagcaccagtgaaagaaatttataaaaatccagaaaaagcttatgattatacaactaagggtaacttggttgcagtaattagcaatggatctgcaattttagggttgggtaacttaggagcaattgcatcaaaacctgtaatggaaggcaaagcagtattatttaaaagatttgcagacataaatgctattgatttagaaatcgatagcaaagatcctgaggaaatagttaatagtataaaaaattttgctatcagttttggaggtataaatcttgaagatattgctgcgccagaatgttttataatagaagaaaatctaaaaaaaatacttgatataccagtatttcatgatgaccaacatggaacagcaattattacctctgcagcacttattaattcaattcatattactaaaaaaaatatttccaaagtaaaagttgttgtaaatggtgcaggagcatctgcgatggcatgttcagatttatttttgaagttaggagtaaaaaaaaataatttaacaatgattgatagtaaaggggtaattagttttcatagaaaaggactaaacaagtggaaattaaagtatgcaaaaaaaacaaaagataaaactctgagtgatgcattaaaaaatgcagatatttttttaggattatcctcagcagggattctcaaaaaagaaatgattaaacaaatggcaaaaaatccaattatatttgcatgtgctaaccctgatccagaaattttaccagaagaagcttacaaaattagaaaagatgcaattatagcaacaggtagatctgattacgcaaaccaggttaataatttaattggttttccatatatatttagaggggcacttgatgtaagagcaaaaacgataaatgaggaaatgaaaatttctgcagcctacgcaattgctaaattagctagagaaagagttcctgatgaagttgcagcagcaatgggaggagacagaccaaaatatggtaaagattatattattccatccacatttgacccaagactaattagtgtgattccagtagcggtagcaaaagctgcaattaaaagtggagtagctagaaaaaaaattgataattttaacttatatgctgaacagctaaaacacagattagatccatcagtaactattcttcaaggaataaattctaaagttaaaaaaaatcaaaaaactgttgtgtttgctgatggcgaagatgaaaatacacttaaagctgcaattgcctttaaaagtggtggcttaggaactccaataattgttgcaaaagagaatattgttaaacaaagactaaaagaaattggttatggagaaaacttagatattaaaattgttaattctactgataaaaaattgagagcaaagtatgtaaaatttctttttaaaaaaatgcacagagaacaaggtttacttgagagagattgtgataggatggttagaaatgacagagttatttgggcatcctgtatggttgagtgtggagatgccgatgctatggtcacaggtaatactagaaga

SEQ ID NO: 203561 - DNA, 1654 bp, Unknown
  Bacterial polypeptide expressing nucleotide sequence isolated from the Sargasso Sea
aatgacagcgaaagaagtaaaatttggtgatagcgcgagaaaaagactagctgcgggcgttaacattcttgcaaatgcagtaaaaactacactcgggccaaaaggaagaaatgtagtgctggacaaatcttttggagcacctactgtaactaaagatggtgtatcagttgctaaagaaatagaattgaaagataaatttgaaaatatgggagcacaaatggttaaagaagttgcttctcaaacttcagatgtagctggtgacggtacaactaccgctacagttgtagcacaatcaatactaagagaaggtctaaaatgtgtggctgctgggatgaatcctatggatttaaaacgtggtattgataaagctgtcacatctgcggtcgaaaatctccaaaaaatgtctaagccttgtactgatcaaggcgcaattgaacaagtaggaaccatttcagcaaactctgatactaatattggatctataatcgctgaggcgatgggaaaagtcggcaaagagggcgtgattactgtagaggaaggtcaatctcttgaaaatgagttagatgtggttgagggtatgcagttcgatagaggttatctatctccatattttgcaactaatcaacaaaacatgtcaactgaattagaggacccttttgtacttctctatgataagaaaatatctaatattaaagatatgctacctatcttagaaggggtagcaaaagccggaaaaccacttttaataatagctgaagatgtagaaggtgaagcacttgctacccttgttgttaatagcatcagaggaattgtaaaagttgcggctgtaaaagcaccaggttttggagatagacgaaaagctatgctcgaagatatcgctattttaactggtggtactgtaatcgctgaagaagtaggattaagtcttgaaaaagctgatcttagtgttttaggttcagcaaaaaaagttaatgttactaaagaaaacactactattattgatggcggcggtaaaaaggacgcaatagaatcaagagtgaatcaaatacgagcacaaattgaggaagctacatcagattatgataaagaaaaaatgcaggaaagagtcgctaaactagctggcggtgttgctgttatcaaagttggcgcagccacagaggtagagatgaaagaaaaaaaagctagagttgaagatgctcttcatgcgacaagagctgctgttgaagagggagttgtacctggcggaggtgttgcaatgatcagagcaagggcatcacttgataaattaacaggagataatccagatcaagatcaaggtatacaaatagcacgtaatgctatgcaggagcctcttaagcagattgtttcaaacgctggtcttgagggttctgttatattagctaaagttgaagagggcaaggattcatttggatataatgctgcctcgtcagagtatggtgatatgctcaaaatgggtattctggatccaactaaagttactaggtctgcacttcaaaatgctgcatctatagctggattaatgattacaaccgaatgtatggtaactgagttagctaaagaggatgataatgcaccagcagcgcctgctatgccagatatgggcggcatgggcggcatgggaatgggtatgtaa

SEQ ID NO: 203562 - DNA, 646 bp, Unknown
  Bacterial polypeptide expressing nucleotide sequence isolated from the Sargasso Sea
tatgacagatttaaaaggtaaaaacattattgttacaggtgcttcgggaggcattggatattcaattattgaaaaattaaacaaagttggagcaaatattttagcctctggcacgaaaatagaaaaacttgatgagttaaaaaacaaatttgaaaatataaaaacgttaagatttgacatttctcaaagtgataaaattgaagcatttatagaaaatgcaacaaaagaacttggtggaaatttagattgtattattaataatgcaggaatcacccaggataaccttgcaataaggatgagcttagaagaatggcaaaaagtaattaatattaatttaacatcaactttcttaatgagcaaatctgcaattaaaaaaatgcttaaaaataaatcaggtaggattgttaatattacatctattgtaggtcatacaggaaatttaggtcaaaccaactatgctgcatccaaagcaggtataattgcaatgtcaaaaagtttggcgatagaatatgcaaaaaaaaatataaatattaattgcatttctccaggttttattaaaacgtcaatgaccgacaaattagatgataaatttaaagaagctatagtatcaaaaataccatcagcgcgtcttggacaccacagatga

SEQ ID NO: 203563 - DNA, 1426 bp, Unknown
  Bacterial polypeptide expressing nucleotide sequence isolated from the Sargasso Sea
cttgatagtaaaggtgtactttacaaaggtagagataatttaaatcaatggaaatctgaacatgcgattgaaacaaaagatagaaccctagatgatgcaataaaaaatgccgatgtttttttaggattatcctcaaaaagtattttgtcaaaaaaaatggtaaaaaagatggcaaaaaatccaattatatttgcttgtgcaaatccagatcctgaaattacacctgaggaagttgaagaagttcgtaatgatgcaatagtagcaactggaagatcagattatccaaatcaagtaaataatttaattggatttccatatatttttagaggagctttagatgtaagagctaaaacaattaatgaagatatgaaaatagcagcagctaaagctattgcagaacttgcaagagaagatgtaccagatgaagtggtggctgcgatgggaggagaacgaccgaagtatggaagagaatatattattccatcaacttttgatccaagattaatttgtgaaatacctacagcagttgcaaaagctgctattaaaagtggtgttgcaagaaagaaaataaatgattttgagatttataaagaacaactaaaacaaaggctcgatccatcagtaacaatcatgcagggtataaataatcaaattaaaaaaaatcaaaaaaaaattgtttttgcagatggtgaagatgaaaatactttaaaagctgcaatagcttttaaaaatagtaagtttggtatacctatacttgttggtaaaaaagaaaaaataaaagaacaacttaaaaatattggatatagcgaaaatttagatatcgaaatagttaattcaactgacaaacaaaaaagagaaaaatacgcaaattatttatttaaaaaactgcaacgaaaagaaggtttactagaacgagactgcgatagaatgataaggaacgatagagttatttggacttcctgtatggtttcatgtggtgacgccgatggagcggtaacaggaaatacacgaaaatatgctacttcattagaaaagatcaacaaagtaattgatgcaaggccaggtgaaataatgtttggtttaaatatgattgtaaatagaggaaaaacagtatttgttggagatacaagtgttaatgaatatcctacctccgttcagcttgcagaaatagctatttcttctgcaagagttgtaagattgttcggatttgaccctaaagttgcatttgtttctcattctacatttggacaacccgcaacaagtagaacaaaacatataagagatgcagtggaaattttacaagagagaaaagttgattttcaatttgatggggatatgcagcccgatgtggctttgaatgaagaatataaagaactttattctttttcaggaattgtaggaaatgcaaatatattaattatgcctg

SEQ ID NO: 203564 - DNA, 772 bp, Unknown
  Bacterial polypeptide expressing nucleotide sequence isolated from the Sargasso Sea
aatgaaattaaaagataaagtggcactagttacaggtggcgcatcaggattaggtcaagcaactgttgaagcatttgtggcaaaaggcgctaaagtagttattttagatattaatgaagacaaagctaacgcaattattaaagatttaggcgatgataatgttctttttatctctacagatattatggaagaagatcctgttgttgatgcagttaatcaaataaaagataaatttggagcattacatattgctgtaaattgtgctggtacaggctatccaggaagaatacttggaaaagaagctcctcatccacttgacgcatttaaatttattattaatttaaatcttgtaggaacatttaatgttatgaggattgcagctgaattaatggataaaaacgatccaggttcaaaaggtgaaaaaggagtaataataaatacagcatctatagcaggttatgaggggcaaattggtcagtctgcatacagcgcatcaaaggcaggcgttattggtttaaccttaacagctgcaagagatttagctagacatgctgttagagtatgtactatagctccaggtattttcgatactccattaatgcaactagcaccagataaagtaagagatccattattagagtcgactcaatttccccacaggttcgggcaaccaaatgaatttgctgatttagcaattcatattgtagaaaatgcttatctaaatggtgaaactattaggcttgactccggaatgaggatgaagcccagataa

SEQ ID NO: 203565 - DNA, 760 bp, Unknown
  Bacterial polypeptide expressing nucleotide sequence isolated from the Sargasso Sea
atggggtttaatcgggaaattgccattgtcactggcgctgcaaggggaataggaaaggcaacctctttaagatttaaaaaagaaggattcactgtcattgaaacagacattcttcctgattcggaaaataagggagtttccgaaaaaccgcaaatggagcccaaaggtgaaactatgattcatgatgtgtccgatgaagcatcatggtcagaattagttgaatctgtttttaaaaagtatggaagaattgacatattagtcaacaatgctggaatcgggacgcttccggatttcgaagaggaagatgaaagcggttgggatgagatgctctctgtcaatgcaaaatccatttggttaggaattaaatcagttgtttccataatgaagtctcaacaatccggttcaatagttaatgtttcaagcatttttggagcctcagggggttttggtaaatcttcttcctatcatgccagcaagggggcggtcagcgcactgacccgtaatgcagcgataaggtatgctaatgacaacattcggatcaattcagtgagtcctggtttcatcaaagtcttgcgtgaggaaaagaccattgaggaggctggagacacaatgtctcaggatattatttcgcgaactccaatgggccgctggggggatgctgacgaggttgctgcagccatctattttttagcaagctcagaatcaagttacatcacaggagcagaactctttgtggatggcggctggatggcaacatgaa

SEQ ID NO: 203566 - DNA, 736 bp, Unknown
  Bacterial polypeptide expressing nucleotide sequence isolated from the Sargasso Sea
gatggataagaagatagctttaattacaggtgcctcaagaggaattggacaaaatattttaaaaacactttccaaagaatatattgttattggaacaggcactagtaaagatagcgtaagcaagattaatcaattaattttggacttaaaggctgatggcaaaggtctaattttgaacaatgaccctaatactttagaggatttatttaacgaaattttatcttcgtacaataaaggacctgacattttaataaataatgctgggattacctcagatactctttttataaaaatgtcagaagataagtggcagagtgtaattgaaactaatttaaatctgacttttaaggtaactcaaactttcattaagcaaatgataaaaagtaaatatggtaagatcgtttttataacgtctgtcgtcggacacactggaaaccctggtcaaactaattatgttgcaagtaagtctgctctcataggcttttccaaatcacttgcaatcgaagtagcgtcgagaaatattaatgtaaattgcatttcaccaggatttataagtacagatatgacagataatttaaatgataatcaaaaagacgctattttaactaaagtgccgatgaaaaagcttggaaagccagatgacatttcaaatgctgtactattcttagtatccgataaatcttcttacattacaggtgaaacaatacatgttaatggcggtctatttatgccttaa

SEQ ID NO: 203567 - DNA, 760 bp, Unknown
  Bacterial polypeptide expressing nucleotide sequence isolated from the Sargasso Sea
catgagcggcaaggtgaccgccattaccggcggcgcgcgcggcatcggtgcgcagactgcccgcaccctggcggcggccggttcggcaatcgcggtgctggacgtgctgacggagccgggcgagaaactggtcgccgagatcaacgagtcgggcggccgcgcggcgttctggaagatggacgtcacgcaggaagagaacgtgcagcgcgtgttcggcgaaatcgccacgcgctttggacggctcgacgcgctggtgaacaacgccgggatcgaaggggcgaatctgcccacgcacgaaatgacgctgcagcaatggcagaaagtcatcgacgtcaacgtgacgggcgtgttcctctgcaccaagtacgcgattccgcacatgctgacggcgggcggcggctcgatcgtgaatctgtcgtcgatgtatgggctggtcggcggcccggacgtgccggcataccacgcctcgaagggcgcagtgcggctgatggcgaagaccgaggcgatgctgtacgccgcgcagaacatccgcgcgaattccgtgcatcctggctttatccgcacaccgctgctggaagaggcgttcgaaaagctcggtgacccggagcagattttcgcgcatatgaaaacgctcgtaccgctcgcgaagatcggcgatccgcaggatatcgcggcgggcattctgtatctggtgtcgccggccggccgctatgtgaccggcacggaactggtgatcgacggcggctacaccgcgcgctag

SEQ ID NO: 203568 - DNA, 733 bp, Unknown
  Bacterial polypeptide expressing nucleotide sequence isolated from the Sargasso Sea
aatgacagtagataataaaattgtactaattactggagctaatcgtggcattggacattctatcatgtcagcttttatcaatgctgggtatatcgtagtaggaacttctagatctaacgatggcgttaaaaaaatcaatgatacaattggtgatccttctaaaggttgtggtattaaaatggatgtaacttctgaaaatgatattcaatctgcaaacaaattaatcagagataaattcggaataacaacaattttaattaataacgcaggtgttacaaaagataatctgcttatgaggatgtctagtgaagagtggaatgatgttatagacacaaatttaaattcattatatagagttacgaaagaattcataagagaaatgatgaaacaaaaaacaggtagaattattaatatcagttctgtagttgggatgagcggcaatgctggacagagcaattattcttcatctaaatctgcaatatatggatttacaaaatctttggcaaaagaggttgcaagcagaaatataaccgtaaatgcaatatcacccggttttatagaaactgacatgactgataaattatcagacgaacaaaaacaagccattataagcgcaattccactatcaagaatgggatcagctaaagatattgcagatattacattatttttggcctctgatagtgcttcttacatcacaggagaaaatattaatgtaaatggcggattatat

SEQ ID NO: 203569 - DNA, 760 bp, Unknown
  Bacterial polypeptide expressing nucleotide sequence isolated from the Sargasso Sea
atggatttaaaagataaggttgtcgtcatcactggcggcgcgggtggtttaggcttagcaatggcgcacaattttgcgcaggcgggcgctaagttagcgctgatcgatgttgatcaagaaaaactcgagcgcgcctgtgccgatttaggctcagccaccgaagtccaaggttatgcgttagatattaccgacgaagaagatgtggtcgcaggttttgcttacatattggaagatttcggcaaaatcaacgtattagtgaataacgccggcatcctgcgcgatggcatgttagtcaaagccaaagatggcaaagtgactgaccgtatgtcattcgaccaattccaatcggtgatcaatgttaacctgactggtaccttcctctgtggccgtgaggcggctgcggcgatgatcgaatcgggtcaagccggggtgattgtcaacatttctagcctcgccaaagcgggtaacgtaggccaatcaaactacgcagcctctaaagcgggtgtggcggctatgtctgtgggctgggcaaaagagttagcccgttacaatatccgtagcgctgcggtggctcctggggtgattgccactgaaatgaccgcggcgatgaagccagaagcgcttgagcgtttagagaagctcgtgcccgttggccgtttaggccaagcggaggagatagcctctaccgtacgctttatcatcgaaaacgattatgtaaatggtcgtgtctttgaagtggatggcggtatccgtctgtaat

SEQ ID NO: 203570 - DNA, 901 bp, Unknown
  Bacterial polypeptide expressing nucleotide sequence isolated from the Sargasso Sea
atgtcaataagatttgatgatagggttgcaattgtcacaggtgctggtggtggtataggcaaagaacatgcaattgagttagcaagacgaggagcaaaagttgttgtaaatgatcttggtggaagtgttgatggcagtggtgccagtgatgcagcaaatgaggtcgtagatattattaaatctgaaggtggcgaagctattgcaaatggtgctagtgtcaccgatctggatgcagtaaaagaaatgactaatcaaaccatggaaaagtggggaagaatagatattttggtaaataatgctggaattcttagagataaaagttttcataaagtaactcttgaagattttaatttggtaatggatgttcattttcaaggaagcttaaattgtacacatacaatttttcctattatgagagaacaagagtatggccgcattgtttttacaagctcctcaagtggtgtttttggtaactttggccaaactaactacggctctgcaaagatggcaatggtcggccttatgaataccttaaaaattgaaggtcaaagtaaaaatgtttttacaaactctattacacctgttgcttatacaagaatgactgaaggtttaattccagaagactttggcaaaaatcttcaaccagaattcgttacacctgcagtaatttatttatcaagtgaaaatgcacctaacggagccattatggctgctggtgcaggagttttctctagaatattcatacatgaaactatgggggtatctctgggtatgggtgaagacatgacacctgaaaacatcgaagctaattgggacaaaatttctgatatgacagatgcacgagctcttcaaaatggaggagaacaaactcttaaattttttgaattaatcaacaaatagc

SEQ ID NO: 203571 - DNA, 754 bp, Unknown
  Bacterial polypeptide expressing nucleotide sequence isolated from the Sargasso Sea
atggctaatcgattaaaaggaaaagttgctctcatcactggaggagcagcaggatttggtaaaaaaaccgctgaaacacttaaggctgaaggcgcagttgtctacatctcagatattaatgttgaaggtggagaaaaggtcgcaaaagactttaatgtaaattttctacagcaggatgtaactaatactgatgactgggaaagagtaattaatgaaataaaaaataaagaaggcaaacttcatattcttgtaaataatgctggcattggttacatgggcgatgttgaatcaacaactaatgaagcttgggatatggtacataaagttgacttagattcggtcttctatggttgcaaatatgcactgccattgatgagagattctggtaatggatcaataattaatatttcatcaatctcagggattgttgctggccataattttactgcttataacagtgctaaagcggcagtaagacacttatctaagtctgtagctctgcattgcgctagaactactgatttagttagatgtaatagcgtacacccagtttttgcaaggacagagatacttgaagctttactaagcgacacttcaaatgacatgttaaccaaattagagcgtcaaataccagtaagaaagttagctgaagtagatgatattgctaacgcaatactttttttagcgtcagatgaatcaaaaatgattactggaactgaaattgttatagacggaggtctttcagctcaatgat

SEQ ID NO: 203572 - DNA, 1042 bp, Unknown
  Bacterial polypeptide expressing nucleotide sequence isolated from the Sargasso Sea
gatgaaagcactcgtctaccacgggcccgggcgcaaggcgctcgaggagcggccgatgccggagctgcagtcgcccaccgacgcgctcgtgcgcgtgacgcgcacgacgatctgcggcaccgatctgcacatcctcaagggcgacgtaccgacttgcgaacccggccgcattctcggccacgaaggggtcgggatcgtcgagcaggtcggcgccgcggtcgatgcgctgaagccgggcgatcacgtgctgatttcctgcatctcgtcgtgcggccgctgcgaatattgccggcggggcctctattcgcattgcacgaccggcggctggatcctcggcaaccggatcgacggcacgcaggccgagtacgtgcgcatcccgcatgcgcagacgagcctctaccggattccgccgggcgcggacgaggaagcgctcgtgatgctgtcggacatcctgccgaccgggttcgaatgcggcgtgctgaacggcaaggtgcagccgggctgctcggtggcgatcgtcggcgcgggtccgatcgggctggcggcgctgctgaccgcgcagttctactcgcccgcgcggatcatcatgatcgatccggacaacaaccgactggacgtggcgcagcgcttcggcgcgaccgactgcatcgacggccgcgccggcgacccggtggcggaagtgatgaagctgaccgacggcgtcggcgtcgattgcgcgatcgaggcggtcgggattccggcgacgttcgagatgtgcacgtcactggtggcgccgggcggcgtggtcgcgaacgtcggcgtgcacggggtcaaggccgacctgcacctcgagaagctgtgggatcgcaatatctcgatcacgacccggctggtcgacacggtcagcacgccgatgctgctgaagaccgtgcgcgccgggcgcctcgatccgaaacgcctgatcacgcaccggttctcgctcgacgacgtcgagcgcgcgtacgacacgttcggccgcgccgcgcaaacccatgcgctgaaggtcatcatcgaagtcggttga

SEQ ID NO: 203573 - DNA, 1108 bp, Unknown
  Bacterial polypeptide expressing nucleotide sequence isolated from the Sargasso Sea
gatgaagacgaaagcagcgattgcatggaaggcgggcgcgccgctgacgatcgaggaagtcgatctcgaagggccgcgcgccggcgaagtgctgatcgaggtgaaggcgacgggcatctgtcacaccgactactacacgctgtcgggcgccgatccggaagggatcttcccggcgatcctcggtcatgaaggcgcgggcgtcgtggtggacgtcggccccggcgtcgggacgctgcgcaagggcgatcacgtgatcccgctctacacgccggaatgccgcgagtgcaagttctgcctgtcgcgcaagaccaacctgtgccagaagatccgcgcgacgcagggcaagggcctgatgcccgacgcgacgtcgcgcttctcgctcgacggcaagccgctgttccactacatgggtacgtcgacgttctcgaactacatcgtcgtgcctgaaatcgcggtggcgaaggtgcgcgaggacgcgccgttcgacaagatctgctacatcggctgcggcgtgacgacgggcgtcggcgcggtcgtgtactcggcgaaggtcgaggcgggcgcgaacgtcgtcgtgttcggcctcggcggcatcggcctgaacgtgatccagggcgcgaagatggtcggcgcggacaagatcatcggcgtcgacatcaacccgaagcgcgtcgagctcgcgaagaagttcgggatgacgcacttcatcaacccgaacgaagtcgagaacgtggtcgaccacatcgtgcagctcaccgacggcggcgccgactactcgttagagtgcgtcggcaacgtgaagctgatgcgccaggcgctggagtgcacgcacaagggctggggccagtcgttcatcatcggcgtggcggcagcgggcgaggaaatcagcacgcgcccgttccagctggtcacgggccgcgagtggaagggttcggcgttcggcggcgcgcgcggccgcaccgacgtgccgaagatcgtcgactggtacatggaaggcaagatcaacatcgacgacctgatcacgcacacgctgccgctcgagcggatcaacgaaggcttcgacctgatgaaggccggcgagtcgatccgctcggtcgtgctgtactga

SEQ ID NO: 203574 - DNA, 1621 bp, Unknown
  Bacterial polypeptide expressing nucleotide sequence isolated from the Sargasso Sea
aatgacaaaaaaatcaaaaattgatcactacacagacaaagaggcattagagtttcataataaaggaaagtctggcaaaattgagattatatcatcaaaatctttaactactaaaagagacctatctctggcttattcacctggtgttgctgttccagtaatggaaatttcgaaaaatccagatgccgcttatgaatacacaagtaaaggaaatcttgtagcagtaataagtaacggttctgcaattttaggtttaggaaatttaggtgctctggcatctaagcctgttatggaaggaaaagcagttttgtttaaaagatttgcagacatagatgcaattgatattgaaattgataataaaaattcagatgagatcattaaatgcatacaaaatattggaaatagttttggtggaataaacttagaagatattgctgcaccagattgtttcattatagaaagaaaattaagagaaactttagatattccaatatttcacgacgatcaacacggcactgcaataattactactgcggctttaattaatgcactagatatatcgaaaaaaaaagttagtgatgtaagaattgttgtaaatggagcaggtgcttcagcaatagcatgcgcaaatcttttcaaaaaaattggtattaaaaaagaaaatattatcatgctagatagaaaaggagttatttataagggtagagataatattgaccagtttaagtctgcttatgctgttgatacaaaactacgaacactttctgaagctatagacggagcagatatctttttgggtttatctgccaaaaatgttttaacaaaagagatgatcaagtctatgtctaaaaacccaataatttttgcatgtgctaatccagatccggagatcaaacctgaactagtcgatgaagtaagatctgatgcaatagttgcgactggaagatctgattatccaaatcaagtaaataatttaattggttttccatatatttttagaggggctcttgatgtaagagcaaaagaaataaatgatgaaatgaagattgctgcagcgaaagcgattgctacgcttgcaagggaagaagttccagatgaagtagtaaatgcatatggaggagaaagaccccactacggaaaagattatattattccatctacttttgatccaagattaataagcagaatcccttctgcagtagcggaagcagcaattaaatcaggcgtagcaagaaaaaaaattgtagatatcgaagcatataaagaccaattaacaaatagacttgatccatcaatgactattatgcaggggataaatgctcaaataaaaaaaagaccaaaaactgttgtttttgctgagggtgaagaccaaagtatgcttaaagccgctgtagcttataaaaatagtaaattaggtattcctattttaattggaaatgaaaaaagagttaaggaacagttaaaagaaattggtttagatgaaaattataaaattaaaattgtaaattctacagataaggacaaaagagaaatatattcaaaaaaactttattctaaattgcaaagaaaaggattgttagaaagggatgtagatagactaattcgaaatgatcgaatcata

SEQ ID NO: 203575 - DNA, 742 bp, Unknown
  Bacterial polypeptide expressing nucleotide sequence isolated from the Sargasso Sea
catgaaccgacttcagggcaagcgtgcactcatcacgggcggcagccgcggcatcggtgcggcgatcgcgaaacggctggcggccgatggcgcggacgtcgcgattacctatgagaaatcggcggagcgggcgcaggccgtcgtcgccggcatcgaggcgctcggccgtcgcgccgttgcgatccaggccgacagcgccgatccggtggccgtacgcgacgcggtcgatcgtgcggcggaggcgttcggcggcctcgacattctcgtcaacaacgcggggattttccgggccggcgcgctggacgacctcacgctcgacgatatcgacgcgacgctgaacgtgaacgtgcgcgcggtgatcgtcgcgtcgcaggcggcggcgcggcatctcggggagggcgggcgcatcgtgtcgaccgggagttgccttgccacgcgcgtgcccgatgcggggatgagcctctatgcggcgagcaaggccgcgctgatcggctggacgcaggggctcgcgcgcgatctcggttcgcgcggcatcacggtcaatatcgtgcatccggggtcgacggataccgacatgaacccggccgacggcgaacacgccggtgcgcagcgttcgcggatggcgatcccgcagtacggcaaggccgaggacgtcgcggcgctcgtcgcgttcgtcgtcgggccggaagggcggtcgatcaatggcaccgggttgacgatcgatggtggtgcgaacgcgtga

SEQ ID NO: 203576 - DNA, 496 bp, Unknown
  Bacterial polypeptide expressing nucleotide sequence isolated from the Sargasso Sea
aatgtatttaaaaaagtataaccttaaaaataaagtagctttggtaactggggcaggcaaaggattaggtaaagcttgtgctatagctcttgcagaggctggagcaaatttaattataattagcagaacaaaaaaagacttagacaaagtttctaaaattatcaaaaaattcaaggttaaatgtaaatcttatgtttgtgatgtgactaattacaatcatataaaatcaataattaatgaacaatcaagaattgatatattaataaacaacgcaggaaataatattcccgaacattttactaaagttaaaactagaaatatggaatatctcgtaaaagtaaatactattgcaacttttaatatagcgcagttatgtgctcttaaaatgattaaatctaaaaatagaaaaaaaataggaggagcaattatcaatatgtcatctcagatgggtcatgttggaggtccaataagaagtgtatataatatgacaaaattc

SEQ ID NO: 203577 - DNA, 668 bp, Unknown
  Bacterial polypeptide expressing nucleotide sequence isolated from the Sargasso Sea
tatgagtcggaacatagctttaattacaggtgccagccggggtttaggtaaaaatgcagctttagctttggccaaagccggtgtggatttaattattacgtatcacagcaaagccgacgaagcagcagctgtggtggctgaagctcaatggttgggccgaaaggcggtagccattcagctggatactggcaatgtgtcgtcttttacagatttttcagcacaattaaccgcccatttgcagcaagtttggcaacgtgatcagtttaactttttagtgaacaatgcaggttttggcgctcaggcagcactggcggacaccacagagcagcaatttgatgcgctgatgaatgtacattttaaaggggtgtttttcttaactcagcaattgttgccacagattgcagatggcggccgtattctgaacttctcatcaggtttaacccgttttgccttgcctggttatggcgcttatgccgcgatgaaaggtgctgttgaagtcttcagccgttatctggcgctggagtctggcgctcgtggtatcagggtaaacaccctggcacctggcgctattgaaactgattttggcggtggcgcagtgcgcgataacgctactattaatcagtatattgcctcacaaactgcattgggccgcgttggttaccagacga

SEQ ID NO: 203578 - DNA, 160 bp, Unknown
  Bacterial polypeptide expressing nucleotide sequence isolated from the Sargasso Sea
ggataaaatacagcaaggcttgaagcgcgccattcccatgaaacgtcttggtgtgccggaggattacgcaggcatggttgcctttctggcgagtgatgatgcgggctatataacaggccaaacgatcagcgtctctggcgggttaacgatgcacggttaa

SEQ ID NO: 203579 - DNA, 778 bp, Unknown
  Bacterial polypeptide expressing nucleotide sequence isolated from the Sargasso Sea
atgaagattgttagagctaagtttgaaggcgaaatcttttatggtgaacttaccgaagaaggaattattcgctacgaaggctcacctcttgttgtttgggagcctactgaagagaagtataatattgatgaaattcagttattagcgccagttttaccaagtaaagttacagctgttgcaaaaaattatgaaaaacatgcagttgagttaggagttcataattataccgcaccaaaaaatcctgtattttttaacaaaccttcaacatccgtaattggtactggtgaatcaatcatatatccaccaataggtcaacatgttgatcatgaggctgaattagctgtagtaattggaaaactcagtaaaaaccttacaaaggataattggatggatagtgtcctgggatttactattgctaacgatttatcagaaagagttttacaaggacaagatggaacatttaatggtaattttacaagagcaaaaagttttgataccttttgtcctttaggtcccgtaatacaaactaattttgagcagaatccagagttgggaattaaatgctttgttaatgatgagctaaaacaagatggaaatactaaagatatgatttttagtgttggtgaaattttggagtttgtttcatcaataatgactcttttgccaggagatgttgttcttacaggtactcccgaaggagtctctaaagttaagccaggtgatgaaataaaaatagaaatagagactattggcacactgataaatccagttaaataat

SEQ ID NO: 203580 - DNA, 520 bp, Unknown
  Bacterial polypeptide expressing nucleotide sequence isolated from the Sargasso Sea
atggagcaccctttgcatgcactcgtaaataatgcaggaatttcgcctaaaggaaataagaataaaagactagatactataaacactccactagaatgctggcagcaagtttttcaagtcaacttttttgcaccaattttattagcaaaaaatttaaaatctagtttacaaaaagaggcaggaagtattgtaaacgttacttcaatagctggaagcagagttcatgaatttgcaggttcagcttatgcaacatcaaaagctgctttaagtgctcttacaagggagatggctgctgattttggcccatcaggcattagagtgaatgcaattgcacctggtgaaatcaaaacagatataattacacctgaaagcgaagagcttattgttcctaaaattcctcttggtaggtttggaacaccagaagaagttgcacaaactatttactttttatgcagtgatatgtcacactatttaaatggatcggaaattcatataaatggtggacaacatgtacgataac

SEQ ID NO: 203581 - DNA, 2290 bp, Unknown
  Bacterial polypeptide expressing nucleotide sequence isolated from the Sargasso Sea
aatgaaaaaaaacaaaattgaacattattctgataaagaggctctcgaatttcataattcaaataaatctggcaagattgagataaattcatcaaagccaatgacgtcaaaaagggatctggctttagcatactctcctggtgtagcagcaccagttaaagagatttttaaaaatccagagctagcatatgaatatacaactaaaggaaatcttgtagcagtcataagtaatgggtctgcaattttaggattaggaaatttgggggcaattgcttctaaacctgtaatggagggtaaagcagttttatttaaaaggtttgctgacatagatgctattgatctagagattgatagcaaagatccgactgaaataatcaacagcataaaaaactttgcagtcagttttggaggcattaatcttgaagatattgcagctccagaatgttttataattgaggaaaatctgaaaaaaatacttgatatacctgtatttcatgatgatcaacatgggacggcaattattacgtcagcagcacttattaattcaatacatatcactaaaaaaaaaatttctaaaatcaaagttgtagtaaacggtgcaggagcatctgctatggcttgctctgatttatttttaaaattaggagtaaaaaaacaaaatctaacaatgattgatagtaagggagttattaatttaaatagaataggattaaataagtggaaacagaaatatgcaaaaaaaacaaaagataaaaatttaaatgatgcattaaaaaatgcagatgtttttttaggtttatcgtcagccggaattttgaaaaaagaaatgatcaaaaaaatggcaaaaaatccaattatatttgcatgtgctaatcctgatcctgagattttgcctgaagaagcatacaagataagaaaagatgcaattatagctacaggaagatcagattatgcaaaccaagtaaataatttaattggtttcccatatatatttagaggtgctcttgacgtgagagcaaaaactattaatgaagaaatgaaaatttctgctgctaatgctattgctaaattagctagagagagagttccagatgaagtagccgcagcaatgggtggggatagaccaaaatacggaaaagattatataattccatctacatttgacccaagattgataagtgtaattccagtagctgtggcaaaagctgctattaaaagtggtgtagccagaagaaaaattgaaaattttagtttgtattctgaacaattgaaacaaagattagatccatcagtaactattttacaagggattaactctaaaattaaaaaaaatcaaaaaactgttgtgtttgcagatggtgaagatgaaaatactttaaaagctgcaattgcatttaaaaatagtggactaggaactcctataatcgttgcaaaagaaaacgtcgttaaagaaagattaaaagaaattggatatggagaaaatttagatattcgaattgttaattctaccaataaagaaatgcgagacaaatatgtaaaactactatttaagaaaatgcacagagatcaaggtttgcttgagagagattgtgatagaatggttagaactgatagagttatctgggcatcatgtatggttgaatgcggagatgcagatgcaatggttacaggtaatacgaggaggtattctcaatcgttagaaaaaattaagaaagtaattcctgcaagattaggtgaaattatgtttggattaaatatggtagtgagtaaaggaaaaactgtatttattggggacacatcagtaaatgaatacccgacatctgaggaattggctgatatagctatttcatctgcaagagttgtgagattatttggatttgatccaaaagttgcttttttatctcattcaacattcggccagccaattacaagtagaacaaaacatattagagatgctgttgaaatattaaaaaaaaggaaagtagattttaagtttgatggagatatgcagccagatgttgctcttagtgaggaatattctgatttgtatcctttttcagagatagtaggtaaggcaaacattttaattatgcctggtcaacatagtgcagcaatttctaacaagattatgaaaactttagggggtgcaaagattgttggtccattattaatcggtcttgcacaaccaatagaaattgcacctttgcgatcttctacctctgaaatattagatttagcatctgttgctgcttattcagctggagtaattaattataaaaaaacaaaataa

SEQ ID NO: 203582 - DNA, 721 bp, Unknown
  Bacterial polypeptide expressing nucleotide sequence isolated from the Sargasso Sea
tatgaagaatgttttaattactggagcgacaggcggaatagggtcatcaatcttaaaattgttttacaaaaataattacaatttatgtgttacaggcactaacatggataaacttaatgaaattgcagttaattataaaggaaaagttaaatgtatctcatgcaaccttaacgacgcattagaaatagagaatctagtccagcagtctaatgaatattatggatcaactgatatactcattaacaacgcaggaattactaaagataatctttttttaagaatgaaagatgaagaatggaacgatgtaattaatatcaatttaaattctaattttaagctaacaaaacaaattttaaagggcatgataaaaagtcgctggggaagaattatcaatatttcatcagatgccgctaagattggaaatgctggtcaagcaaattatgttgcttctaaatctgcaattgaaggccttacaagaacactggcaaatgaagtagcttcaagaggtataacagttaactgtgtttcaccaggttttgttgatactgacatccttgaaacaattgataaaaaagtattgcaaaatatggtagaaaaaattccccttggaagaatgggaagaattgatgaaattgcctctgcagtttattttctttcttcggaagaatcagcttatattacagggcaagtgcttcatgttaatggtggcttgacaatgtga

SEQ ID NO: 203583 - DNA, 536 bp, Unknown
  Bacterial polypeptide expressing nucleotide sequence isolated from the Sargasso Sea
ggaaactacaattaatacatatggaaaaattgacatacttgttaataatgcaggaataaatcctgtatttgatcgtcttgagaatgctgatgaaaaactcttcaataaaatactagatataaatacaaaatcacctttcaaactatcaaacatagtgtttaaatacatgaaggaaaataaagcaggatctataatcaatatatcatcacttgagggacataaacctgataaagggttgggcgtatattctattagtaaggctgctatttcgatgcttactaaatctcaggcaaaacagtggggaaaatatggagtaaggtcaaatgcaatttgtcccggattaatcagaacaaaattaagctcagtactctggcaaaatgaggaaatgttagaagcgtggcttggtgatcttccaattcgaaggccaggagatcctgatgaaatatctggaatggcactatatttagcttctgaagcttcgagttatacaaccggagagacatttaatatagatggtggttacatgataaattaat

SEQ ID NO: 203584 - DNA, 757 bp, Unknown
  Bacterial polypeptide expressing nucleotide sequence isolated from the Sargasso Sea
tatgtcagaaagattaaaagataaagtagctcttattacaggaggagctcaaggattaggaaaagagatggcaaaatcaatgcttgcagaatctgcgcatgtgattattgctgatattaatgaagctaaattagttgaagcagcaaaggagctatcatgctctcatcttctactagatgtcactaaagaagaacaatggcagtcagttataaaacaaataactgatgataccggctctctaaatattttagtaaataatgctggtattggtgggggtggcgatgttgaaatgaccgattctgaaacctgggatttagtacatagagtaaacttagattcagttttcttaggatgtaaatacgcattacctttaatgagagagtccggaaatggctcaataataaatatttcatctatgtcaggaattgttgcttctcacaatactgctgcatacaattcttctaaagctgctgtaagacacctttctaaatctgtagctttacattgtgcaaaatcaaccaatcttgttaggtgtaattcaattcaccctgtatttacaagaacagcaatggttcaaagcatgattgactcagcgccagagagagatatagaaaataagcttattcaacaaattcccattagaaagcttgcagaaccaatagatattgccaatgctgcagttttcttagcttcagatgaatcatcttttatcaccgggactgaattattagtcgatggaggcttgagcgctacataa

SEQ ID NO: 203585 - DNA, 757 bp, Unknown
  Bacterial polypeptide expressing nucleotide sequence isolated from the Sargasso Sea
atgacagaaagacttaaaggaaaagtagcactcattacaggtgcagcccagggtttgggtaaagaaatggctaattcaatgattgaagagggtgcagttgtatttattagtgatattaatgagagcgaattaaaaaaaacatgtaacgaactatcttgccaaggcattaatttggatgtgaccaagtctgaagactggatatctgcaattgaatttattaaaaatgaagccggatctctaaacatattagttaataatgcaggtattggtaatggtggtgatattgaatctaccgatatcgaaacatggaaattagtgcatagtgtaaatttagattcagtatttcttggttgcaaacatgccattgaactaatgagagactctggagatggctcaattataaatatttcctcaatgtctggtattgttgcctcacataatacttctgcatataactcctctaaagctgcagttagacatttatcaaaatcaatagcacttcactgtgctaaaactactaatctagttagatgtaattccattcatccagtatttactagaactgcaatggtgcaaaccatgattgatgctgctcctgagagaaacattgaacagaagcttattcaacagattccaataagaaaacttgctgaacctaaagacattgctaatgcagccgtttttcttgcatctgatgaatcatcttttataacagggacggaattgttaatagatggaggtctgagcgcaacttaaa

SEQ ID NO: 203586 - DNA, 757 bp, Unknown
  Bacterial polypeptide expressing nucleotide sequence isolated from the Sargasso Sea
atgacagaaagactaaaaggtaaagtagctcttatcacaggcgcagctcaaggcttaggtaaagaaatggctaattcaatgattgaagagggcgcagaggtatttatcagtgatattaatgatagtgaattaaaaaaaacatgtaacgaactatcttgccaaggcataaatttagacgtcactatgtctgaagactggatatctgcaattgaatttattaaaaatgaagccggatctctaaacattttagtaaacaatgcgggtattggtaatggtggtgatattgaatctactgatatcgagacatggaaattagtacatagtgtaaatttagattcagtatttcttggttgcaaacatgctattgaactaatgagggactctggagatggctcaattataaatatttcctcaatgtctggtattgttgcctcgcacaatacttccgcatataactcctcaaaggctgcagttagacatttatcaaaatccattgcacttcactgtgctaaaacaaccaatttagttcgatgtaattctattcacccagtatttaccagaactgcaatggtccaaaccatgattgatgctgctcctgaaagaaacattgaacagaagcttatccaacagattccaattagaaaacttgctgaacctaaagacattgctaatgcagctgtttttctagcttctgatgaatcatcttttattacaggtacggaattattaatagatggaggcttgagcgcaacttaaa

SEQ ID NO: 203587 - DNA, 512 bp, Unknown
  Bacterial polypeptide expressing nucleotide sequence isolated from the Sargasso Sea
aacccccgaggctctggtcaacaatgctggaattctcgaccttcagacccgtgtcgttggcatgaatgcagaaaggatccaaaggatctttgcagtgaaggtcacaggatccttcctttgtgcccgcgaggccgtgaaacggaggtcgacaaaatttggagggaagtgcggatccatcgtcaatctttcctcgggagcggcaaagtacggttccccgggggagtatgtggattacgccgcatcgaaagccgccattgacaccctgaccatcgggctcgccaaggaggttgccgaagaaggcatccgggtcaatgccgtccggccaggattcatcgacaccgaaatccatcagtccgggggagaaccggatcgcatggaacgggtccgcccgctggttccgatgaaaagggtggggcaggcagaagaggttgcggatgcaatcatgtggctgctttctgataaggcctcctacaccaccggaacgattcttgatgtcagcggaggacgttaaa

SEQ ID NO: 203588 - DNA, 124 bp, Unknown
  Bacterial polypeptide expressing nucleotide sequence isolated from the Sargasso Sea
catgaaagatttattttcaatagaaggcaaggtggctttggtcactggaggttcgagaggaattggtagcatgatcgctgctggctttctagcttcaggagcgaaggtttacataagctcaaga

SEQ ID NO: 203589 - DNA, 1759 bp, Unknown
  Bacterial polypeptide expressing nucleotide sequence isolated from the Sargasso Sea
tttgctttttcattctgagggcaagccaggtaaaatagaaataaaagccaccaaacctcttgaaactcaaagagatttgtcgcttgcttattctccaggcgttgcgtctcctgtaaatgcgatcgctgaaaatattgatactatctttgactatacaagcaaaggtaatttgataggggttatatcaaatggtacagcaatattaggtttagggaacttaggcgctcatgcatctaagccagttatggagggtaaagccgtactttttaaaagatttgcagatatcgactctattgatttagaaatagatactgaggatgcggatgaatttataaattcagtaaagtatttaggacctacatttgggggtattaatcttgaggatataaaagccccagagtgttttataatcgaagatactcttagagagctgatggatattccaatttttcatgatgatcagcacggaactgcaattatttcagctgctgctcttattaatgcattagaccttgtcggaaaagatcttaggactgctaaaattgttgttaatggagctggcgctgcaggtatcgcctgtttagaactcttgaaagcaatgggaatgccaaatgaaaatgcaattctgtgtgataccaaaggagttattcatactgaaagagaaggaaatttaaaccaatggaaatcagctcatgcaaacaaaacaaatttaagaacactagaagaagctctagtagagtctgatattttttttggtctttcaaaaggaggaattgtttcccaaaagatggttgagtccatgaatgataaaccgatcatatttgcaatggcgaatccagaacctgaaatacttccagaaatagttagagaggtgcgtcctgatgcgatcattgcaactggtcgatcagattatcctaaccaagtaaataatgtactaggttttccatatatttttaggggtgcactagatgttagagcaactacaattaacttagaaatgaaaattgctgctgcaaaagctatagcatcactcgctaaagaagatgttccagatgaagtggccaatgcatatccaggaaaaagacctcaatacggaccagactatattataccatcaacatttgatccaagacttataagtaaggttccgccagctgtagcaaaagcggccatggactcaggcgtagctcgaaaagcaatagtagacatggaatcatatacaaataggctttctgcaagattaaatccatctgcaggcctgcttcaaagtatttttcaagatgtaaaagaaaatccaaaaagagttatttttgctgaaggtgaagaagaagatatgatcagagcggcagctatattcttaaataatggaatgggaactccaatattaattggtagagaagaaattataaaagacaagatgaacagtattggtctagatttttttgatcaaatggaaattcataatacgagaaataaatcaagtcatgatagatatgcggaacatatatatcaaagacttcagcgtaaaggttttcttaaaaaagactgtttagatttattaaaaaaagaaagaaatgtttttggtgcatgcatggtatctttaaaagatgctgatgcaatgatttgtggtctcaatagaagttatgcattatcactagagagtattgagtatgttttagatccaatacccaacaaaactattttgggcctaactgtaatgttgtgtaatggacgaacaatttttgttgctgatacaaat

SEQ ID NO: 203590 - DNA, 1378 bp, Unknown
  Bacterial polypeptide expressing nucleotide sequence isolated from the Sargasso Sea
gaagttaagaaatgatgcaattgttgcaacagggagatcagattaccctaatcaagtaaataatttaatcggatttccttatatctttagaggagctttagatgttagatccaaaactataaatgaagaaatgaaagttgctgcagctaatgcaatagctaagcttgcaagagaagatgttcctgatgaagtggttgcagctatgggtggagaaagacctcattatggaaaagattatattattccatcaacatttgatccaagattaattagtgtaatcccagcagctgtagcaaaagcagctatagatagtggagttgctagaaaaaatatagatgattttgatgcttataaagatcaacttaaacaaaggctagatccgacagtaacgattatgcaaggtataaattcatttattaaaaaaaatcagaaaaaaattgtttttgcagatggtgaagatgaaaatactttaaaagctgccatagcatttaaaaattcaaaattaggtattccaatcttagtcggtaaagaaagtaaaattaaagaacagataaaaaatattggatacagtgaaaattttgacattgaaattgttaattcaaaagatgaagaaaagagaaaaagatacgttaaacatttatttgaaaagttacaaagagagcaaggattattagaacgagattgtgaccgaatgatcagaaatgatagagttgtttgggctactagtatggttgcctgtggggatgctgatggtgctgtaacagggaatacaagacgatttggtgcttcatttgaaaaaattaagcaagttgttgatgtaagaaaaggtgagattatgtttggtttaaacatgatcgttcataaagggagaactatttttgttggtgatacaagtgtccatgaatatccaacttctgaacaaatggctgaaatggcgatatctacagcaagagtagttagactttttggatttgatcctaaagttgcttttgtatcccactctacatttggacaacctcttactagtagaacaaaacatattcgaaacgcagttgagatattaaaagaaagaaaagtagactttgaatttgatggagatatgcagcctgatgttgctcttaatccagagtataaggaactttatccttttgcaaagatagttggtaaagcaaatattttaataatgcctggacaacatagtgcagcaatttcttacaaattaatgaaaactataggtgaaacaaaagtgattggaccattattaattggacttgggcttccgatagaaattgcaccattaagatcatcaacttctgagatacttaatttagcatcgattgctgcttattcttcccaagtaattgattacaaaaaataa

SEQ ID NO: 203591 - DNA, 853 bp, Unknown
  Bacterial polypeptide expressing nucleotide sequence isolated from the Sargasso Sea
aatggttaagacaattgcaataattggtgcagggggagcaatgggcaaatggttctcagagtatttttcaaaaaaaggattcgaggttaccggttttgataatacaaatccagttgcaaaaaatattaaaaaagcaaattcactcattagtgcaattttgaatgttgattatgttttattatcaacaccaactaaaaaaacaccagaaataatcagattgattgcaaaagagatgaaaagagaatcatatctcatagacattacttctcaaaaatcaaaaacagcaactgcattaggaaaaattcctgcaaaagtttcaccaatttgtatacatccaatgtttggtccaggtgcaaaaaatctaaaaaatcacaatattgttttagtgccaattaaggatggaaaaaaggaactaaatgttgcaaaaactctgttcccagacggtaattttgttacaattgactcaactgaacatgataaaaaaattgcaatgattctagggttgactcatttaatcaatattgcatttgcaaatattttagcaaaagatgacaagatatcacttacagaaaaaatggctggaactacgttcaaagctcagaaaatattagcagaaagtataatgacagaatcaccagaattaattgagactataatatcaaacccagaaattagaaaagttgcagaagaattctggaaggatgtaggaagattgttagcatctgctcaagaaggaaaaggtgaggagattattgattacatcaacacgaataaagaaaaaatttctcaaaatgttgacctagaaaagtcctacaagaaattaacaaagatggtcaatacaattgataaataa

SEQ ID NO: 203592 - DNA, 766 bp, Unknown
  Bacterial polypeptide expressing nucleotide sequence isolated from the Sargasso Sea
atgggacgattaactgataaagtagcaatagtgacaggtggtgcatcaaatccaggtcttggacattcaacaattcataagtttgcagaagaaggtgcaaaaattgttgtgacagatattgatgttgaaggtggtgaaaaaacagtttctgaggttaaagaaaaaggtggtaaagccatttttataaaacaagatgttgtttcaacagaagattggaaaaatgttgtagatgcttcactatcagaatttagtaaaattgatatattggtcaataatgctggaatagcgttaatagggcctttcgaagaattttctgaagatcaatgggatcaacaaatcaatgtgaatttgaaatctgtttttcttggttgtaaggctgttatacctgagatgaaaaaaaataactcgggctcaataatcaatctttcatcaatagctggtttagtaggtcttcaaggatgtgcagcttacaacgcaagtaaaggaggagttagattactaacaaaatcaatcgctattgagtacgggcctaataaaataagatgtaattctattcatcctggttttatggccacaaatatgaatgatccaaaaaaaattgcagagcgcggtagagattttgaagcaattattgaaacaattcctctaaaatctatgggtactgcagaagatattgctaattgcgctctttatctagcctcagatgaatcttcatatgttacaggaagtgaatatgttgtcgatggtggttggacaactcgttaat

SEQ ID NO: 203593 - DNA, 793 bp, Unknown
  Bacterial polypeptide expressing nucleotide sequence isolated from the Sargasso Sea
aacgacttaggtggttccgttgacggaagcggagcaagtgatgcagccgaagaagtggtcgaactgattaaatctgatggaggagaggccatatccaatggagcaagcgttacagatataaatgctgtaaaaaatatggttcaacaaaccatggaagaatggggaagaattgatattttagtaaataatgctggaattcttagagataaaagttttcataaagtaacgcttgaagattttgagctagtaatggacgttcattttcaaggaactttaaactgcacacattccgttttcccaataatgagggagcaagaatatggaagaattatatttaccagttcatcaagtggagtatttggaaattttggtcaaacaaattatggttctgcaaaaatggcaatgatcggactcatgaatactcttaaactggaaggtcaaaataagaatatctacacaaattcaattacaccggttgcatacaccaggatgaccgaaggcttaataccagaggactttggtcaaaaccttcaacctgaatttattacacctgccgttatttatttagctagtgaagatgctccaaatggtgcaattatggcagctggtgctggcgttttttctagaatatttattcatgaaactatgggagtttccctagggatgggagaagatatgactccagaaaacattcaagctaattgggataaaatttcagatatgaaagatgcaagagctttacaaaatggtggagaacaaactttaaaattttttgagcttatcaataaataat

SEQ ID NO: 203594 - DNA, 781 bp, Unknown
  Bacterial polypeptide expressing nucleotide sequence isolated from the Sargasso Sea
atgacaggaagagtagaagggaaaatgtcttttgttactggtgcggctcaagggcttggcgaggcaatagcctatatgttagcaaaagaaggctcaaaagttgtattggctgatattaatgaagaaaaactaactggagtagaggataggattaattctgattttcctggtaaagccttttcagtgaaacttgatgttacttctgaggatcagtggaaggaaacgcttaatgaagcagaaaaattaatgggcggaataaatattcttgttaataatgcaggcataggcggtggctcaacagtagaagaaactgattatgaaattttcaaacaggttatggctgttgatactgactcagtctttctaggctgtaaatacgctataccgattatgaagaattactctcctggctctataattaatacttcttctatatctggcttaattgcgggtcataatatggcggcatataatacagcaaaagccggtgtatggatgttgacaaaatcagtggccttgcactgtgcaagatctgcatacaatattcgatgtaattccattcatccaacttttattgatacacccatcttagacgcaatggttgaaagatcgagttcagaaaaagaacaagttatgatgaagttggctagacaggtaccacttggaaaagtgggtgaaccagatgatgttgcttacacagttttatttttagctagtgatgaatcgaaattcataactggtgctgagattaaaatagatggtggcattagcgcaatgtaat

SEQ ID NO: 203595 - DNA, 645 bp, Unknown
  Bacterial polypeptide expressing nucleotide sequence isolated from the Sargasso Sea
tatggaaagtaaaaaagtaatagttacaggaggaaatagagggattggtaaaggaattgttctatctctcttggagcatagttatcatgtgctagctacctctagagattcaaaaaaatttgatatttctcatccaaatttaaaattggcagatttggatgtttgtgatgatgaatcagtattgaagtttcaagaaattgtaaacaaatatgatccagatatattgataaataatgctggtgttactaaagatagccttttcttaaggatgaccgaggatgattggaatgaagttatcgatactaatttaaatagtgtatttagaatcactaaattagtagtgaaagcgatgttaaaaaagaaatggggaagaataatcaacattagctctatatcaggttccatgggaaatcctggtcaaacaaattattctgcatcaaaagcaggcgtagatgcttttacaagatcattggcaaaagagcttggatcaagaaatattactgtgaattccattgctcctggatttattcaaactgatatgaccgaaagcataattaatgaggatttagtaatgaaaattcctttgaaaagggtaggcaatgttgatgatgttgcttcaatgggtaaacttttggcatcagaaga

SEQ ID NO: 203596 - DNA, 901 bp, Unknown
  Bacterial polypeptide expressing nucleotide sequence isolated from the Sargasso Sea
tatgacaattagattcgatgacaaggttgcaatcgttacaggtgctggaggtggtattggtaaagagcatgctcttgaacttgcaagacgaggagctaaagttgttgttaacgatcttggcggaaccgtagatggaagtggtgcaagtgacgctgcaaatgaagttgttgatctaataaaatccgagggtggtgaggcaattgccaatggtgcaagtgtcacagacctagatgctgtaaaagcaatggtgaatcaagctatggatgaatgggggagaatagatatattagttaataatgctggtattttaagagataaaagctttcataaagttactttagaagattttaatcttgtaatggatgtgcactttcaaggaagtttaaattgcactcatactgtatttccaattatgcgtgagcaagaatatggaagaattatttttactagttcatcaagtggcgtatttggtaattttggtcaaacaaattatggttcagcaaaaatggcaatgataggacttatgaatactttaaaattagaaggacaaaataagaatgtctttactaattcaattacacctgttgcttataccagaatgacagaaggcttaattcctgaagactttggcaaaaaccttcaaccagaatttgttacacccgcagtaatatatttagcaagtgagaatgccccaaatggtgtaataatggctgcaggtgctggtgttttttcaaggatatttattcatgaaacaatgggtatttctcttggcatgggagaagatatgactccagaaaatatacaggccagttgggataaaatatctgatatggaagacgctcgtgctcttcaaaacggaggcgagcagactctaaaattctttgaacttataaataagtaa

SEQ ID NO: 203597 - DNA, 1158 bp, Unknown
  Bacterial polypeptide expressing nucleotide sequence isolated from the Sargasso Sea
atagaagaagttagagatgatgcaattgttgcaactggtaggtctgattatccaaatcaagtaaataatttaataggttttccatatattttcagaggagctttagatgtaagagctaaaacaattaatgaagaaatgaaaattgctgctgcaaacgctatagctactttagctagagaagatgtgccagatgaagttgtggctgcaatgggaggagaacgtcctaaatatggaaaaaactatattattccatcaactttcgatccgagattaatttctgaaatacctctggctgttgcaaaagcagcaattaaaagtggagttgcaaggagaaaaattgacgattttgaaatctacagagatcaacttaaacaaagattagatccatctgtaacaattatgcagggaattaactctcaaattaagaaaacacagaaaaaaattgtttttgcagatggtgaagatgaaaatactttaaaagctgcgatagcttttaaaaatagtaaattaggaattcctatattggttggtaaaaaagaaaagataaaagagcaacttaaaaacataggttatagcgaaaatttaaacattgaaataacgaattctaatgacaaagaaaaaagagaaaaatatgtaaactttttatttgaaaagctccaacgtgagcaaggtcttctacaaagagactgtgatagaatggtaagaaacgatagagtaatttgggcgtcgtgtatggtttcatgtggtgacgctgatggcgctgttacaggtaacacaagaagatttggaacttcttttcaaaaaataatcaaagttatcgactctagaccaggtgaaataatgtttggattaaatatggttgtgaataaaggtaaaactgtttttattggagacacaaccgttcacgaatacccaacttctgaacagttggcacaaatagcagtatcagcagctagagttgtaagattgtttggttttgatccaaaagtagcgtttgtatctcactctacatttggtcaaccaataactagcagaactaaacatattagaaatgctgtagaaatattaaaaagtagaaatgttgattttaaattcgacggagatataaagcctgatgttgctttagacgaggcatataaagaattattccttttcaga

SEQ ID NO: 203598 - DNA, 751 bp, Unknown
  Bacterial polypeptide expressing nucleotide sequence isolated from the Sargasso Sea
atgacaaattttaaaaataaagttgcgcttgtcactggaggatcttcaggcatgggggccgctactgcaaatcagttagctaacaaaggagctaaggtattttgtgcccaaagaacaaaatctttgcatgaagacattattatagatcttaaagatatagatgcttctaaaaatattatttctgaattatctaaaaaaacagataagttagatatattgataaataatgctggagttatgaaagagaatactgttgaagaaacttctttagatgaatggaatgaacatctaactataaaccttacagttccttttttattaatcaaacattctatgtaccttttgaaaaaatcaagaggatctattgttaacgtaggttctattgaaggcaaaggtaataatccaggtcactctgcatatggcgcttctaaagctggcttacatggtttaactagagcagttgctgtagatcatggtaaagatggagtaagatgtaatgcagttgcacctggatggatagacacagaattaaataaagaatttattaaaaatttaggaaatgaaaataattttcatgaaagattaaaaaatattcatccaattggaagaactggcaatccagaagaagttgcaaatcttatttgttggctatcttctgatgatgcaagttttgtaactggacaagtttgggcaatagatggaggaagaatgattaaattaagtttaccagaaaataaatataatgattaat

SEQ ID NO: 203599 - DNA, 415 bp, Unknown
  Bacterial polypeptide expressing nucleotide sequence isolated from the Sargasso Sea
tatgagcaatcggttcgaaggtcgggtagctatcgtcaccggtgcaggaaacggcctgggtcgagcacatgcccttggtttggccgctcgtggcgtcaaggtcatggtgaacgatctcggaggcgcgcgtgacggacgtgatgcgagtacatccccggctgaagcggtcgtccaggaaattcgagctgctggcggtgaggcgatggcgaatggagccaatgtcgcaaggttcgaagaagttcaagcgatgatagccgcggcacagaacgcttgggggcgcgtggacatcctggtcaacaatgccggcattctgtgcgatgcgactttcgccaggttgtcgctggacgatttttgggccgtgatggacgtccatgtgcgaggcacagttaattgcacgaaggcggtctgggatctt

SEQ ID NO: 203600 - DNA, 865 bp, Unknown
  Bacterial polypeptide expressing nucleotide sequence isolated from the Sargasso Sea
cgtccgaagcagtacccgccgcagtgccggccgcggcaaccgccgggcaccgcaaccccaggcggcaagccgtgaagaaagcgcggcgccgcgcacccgcaccagcgcgatcgatcgcgccgtgcagattctcgacgcgctccagcaagcgaaccgtcccgccaccgcgtatgaagtcgcgcgcatggtcggcgcgccactctccaccgtgtattcgatcatcaacgatctggtcgagaagaacctgttggcccggcgcatggacggcacgatctggctcggctcgcgtctgtatggttatggtttgacgtatgcgagttcgctcgactaccttgcggtcgctcacgaagaaatgcagcggctctcggcggaagtcgaagagaccgtgcaggtgtgcggactcgaagacggcatgatggtcgtgcagcaaatggccgaaggtcccgggcattttcgggtgacttcgcgagtaggcagccgcgtgccgctcaactggaccgcgtccggccgtttgctggtcgggcatctgccggatgccgaacgggtcgccttcttcgcacagcacgcgcaaagctcgccgaccggccgcgcggaaacccggccgcaagtgctcgcgcagattgcgcgcgaagcgttggaggcacgcctgtcgattcagatcggcgaatcggatgcgtccgtggcatgtctcgcggcgcccgtgctcgataacaccggcgcgtgcgtcttcacgatttccatcgtgatgcccgaggcaaaagccgcgctcggcaccgagcgtttcgcgcaagccgtgcaggcagtggccgcccgcatcgaagcgcgcctcggctggcggcatcgcgagcaggaaccggcggcgtaa

SEQ ID NO: 203601 - DNA, 769 bp, Unknown
  Bacterial polypeptide expressing nucleotide sequence isolated from the Sargasso Sea
catgacccaagctctgaaaggcaaacttgctctcgttacgggcgcttcgcgtggaatcggtgcagctattgcggcgcgtcttgcgcaggacggcgcatcggtgatcgttcactatgcgtcgagtgcggcgcgggccgaagcagtcgtcaaggcgatccgcgatgccggcggcgaggctgaagccgtcggcgccaacctgtcgcaaccagaaggcatcaagaatctcatcgatgcgctgaacggcgcgtttggcggccgcttcgaggggcggctcgacattctcgtcaacaacgccggcacggtggagtacggacccttcctcgattcttcggacacgtcttacgacacacatttcaacctgaatgttcgtgcgccgatcgaactggcaaaagacgcggcggcgcgaatggtggcggccggctggggacgcattatcaacataggttcggcctttggcgaagccgcgccgctgcccggtgtaacgctctacatcgcatcgaagttcgccatcagaggcttcactcgcgggctatcgcgcgagctcggcaaatatggcgtgaccgtgaatgccgtgcaacccggcccgatcgatacagaactggctccgcagcccggcacggaagaccacgccacgatgacgaagctcgcgagcgtgggccgtttcggcaaaccggcggaaatcgctgcagctgtagcgtatctcgcgagccccgaagcaggctacacgaccggcgagagcctgacggtcgacggcggatggatcgcctga

SEQ ID NO: 203602 - DNA, 347 bp, Unknown
  Bacterial polypeptide expressing nucleotide sequence isolated from the Sargasso Sea
aatggaaatcacaagtttatttaacatatctggaaaagttgctgttgttacaggcggttcaagaggaattggagaaatgataactgctggctttttggcgaatggggtaaaagtttatatttcagcaagaaaagctccagctttgattgaaaaggctagagaattgtctgaaaaatataatcaagaatgtataccagttccatgtgacttaagttcaatggatggtattgatgagtttgttaatcagattactgaaaaggaagatgccattgattttttagttaataatgcaggagctgcatggggcgaacctctagaaagtttctctgaaaaaggctgggataagg

SEQ ID NO: 203603 - DNA, 910 bp, Unknown
  Bacterial polypeptide expressing nucleotide sequence isolated from the Sargasso Sea
aatgctatctataaataaaaaaatcacattgctatgctgtgataatattagagaaaatggaaaaatgttacaagactgtttaaaacaatatttatcagcatctaaagaatatgaacttttagaatggatagaagaaaatgtcagttttccctcttgtgttgttgatcgaattactcctagaacaccagaatttttaaagtctgatataatggaaaaatttaatttgaaggaaaattgcggtgtgatagctgaaccctttattcaatggatagtagaggataacttcataaatgaaagaccgaagcttgaagatgttggtgtgaagtttgtgaaggatgtatttccctatgaagaagctaaaattagaattctaaatggagctcacttagcattaagttattttggagcacttaaaggttatacaacttatgatgaggcaatatcagataaaaatttagaacaatttttctttgaaattcaacaaaaggaaatattaccagcgcttgctcataaaccctttgatttagaagaatatatgatcacaatttatgaaagatttaaaaataaaaatattgctgataaattagaaagaattgcaatggatggtgtaggtaaatttcctatatttatattaccaactatacataattgctttgaaaaaaatattattcctgaaaattgtattgatgcaattgcaagttggtatgtttttatgttaaaaattaaagataaaaaattaagttttgaatactatgaaccaagttgggaatggatcaaatattttctagaagaaaataaaattgttgaatttacaaattgtgtagaactatggggcaacacaccaaaacaattttcttcattttctgaaattttagaaaaaaaaataaattttttaaaagatatttattaa

SEQ ID NO: 203604 - DNA, 781 bp, Unknown
  Bacterial polypeptide expressing nucleotide sequence isolated from the Sargasso Sea
atggatttgaatttggctggtaaaaaggcgttgataacgggcgcgtcaaaaggcatcggtcttgctatcgcaaagcggtttgctatagaagggtgctcggtaattttggttgccagaagagaagacgacctgaaacaggctcaacgggacatattgaaaacagaccagagtgttggcgtcgactatcgcgctgcggacctatccaagaccagtgaggttaatgccctagccaaggaacaagcggaaattgatatccttgttaataatgctggcgccattcctgctggaaacattaaccgtgttgatgaggtcacctggcgtgaggcatgggacctgaaactattcggctatatttcgttctgccgtgaaatctatgccagtatgagtgcaagacgagatgagccagggcaaagagtaatcttaaatatcatcggtgcgggtggtgagcgaccctcatcgggttatattgctggcgctggggctaatgcaggcctaatggcaatcacccgagcaatgggcggcgtctcccgaaaacacggtatccgtgtgttgggaattaaccctgggcagatcgtgacagagcgccttgaaaccatgcagcgcgttttagccgaagaaaaatttggtgacgctgagcgctggaaggaagtgtgggatcccaattatccgcccggacgagtcgaacacatagctgatgcttcggccttccttgtgagcgatttgtcatcaaatacaacggggacgatcatcacgatagacggagggcattgtgcacgatgat

SEQ ID NO: 203605 - DNA, 373 bp, Unknown
  Bacterial polypeptide expressing nucleotide sequence isolated from the Sargasso Sea
tatgttaacaaataagacagccatcattaccgggagtaacagaggtataggaaaagcaatattagagatttttttaaaaaacaatgctactgtttgggcttgttctagaaattataacgagaatgattataaagatttaattaatacttatgtaaataaaattaattttattagttttgatttagaaaatattgaagaagtaaaaaaatctgcaaatattattatcaaagagaatgataaaatagatattttagttaataacgccggcataatacattctagtttatttcaaatgaccaatattgatgatatgaaaaatctttttgaaattaattatttttctcaacttgcttttacacaaattataatttaa

SEQ ID NO: 203606 - DNA, 928 bp, Unknown
  Bacterial polypeptide expressing nucleotide sequence isolated from the Sargasso Sea
catgggcggcgagcacgagaaagcggtgatcaggtttcatgataaccggatcaaaaaagaccattggcgcggcgcccggcaggcagccgaagataccggcaacgcgagaccggccgcgatgggccgccggctcgactggcacgaggagacacgcatgaccaacgcgcttgaacggttccgtctcgacggtcgccgcgcactgattaccggttccggccgcgggatcgggctgacgctcgcccgggggctggccgaggcgggggccgcgatcgtcatcaacgatcgcaatgaggagaaggccgcgacgctcgtgcagcacctgcgcgaggaaggcttcacggccgactacgcggtattcgacgttgccgagcatgcgcaggtgcgcgcggcgatcgacgatttcgaggcgcgcgtcggtgcgatcgacatcctcgtgaacaacgcgggcatccagcgccgcgcgccgctcgacgcgttcgagcccgacgactggcatgcgctgatgcgcgtgaacctcgacggcgtgttcaacgtcgcgcaggccgtcgcgcggcacatgatcgcgcgcggccgcggcaagatcatcaacatctgctcggtgcagagcgagctcgcacggccgacgatcgcgccgtacgcggcgaccaagggcgcggtgcggatgctgacgaaagggatgtgcgcggactgggcgcgccacggcatccaggcgaacggcctcgcgcccggctatttcgaaaccgaactcaaccgcgcgctggtcgacgacgcggcgttctcggactggctgtgcaagcgtacgccggccggccgctgggggcgcgtcgacgagctgtgcggcgcggcgatcttcctcgcgtcggctgcatccgatttcgtgaacggccagacgctgttcgtcgacggcgggctgacgagtgccgtctga

SEQ ID NO: 203607 - DNA, 712 bp, Unknown
  Bacterial polypeptide expressing nucleotide sequence isolated from the Sargasso Sea
ggtcgcactgattaccggaggtcgaagcgggatcggtcttgcctgtgcgcaaaagctatcgcagtcgggctacgaggtgattacagcgcaacgtactccggctgacacctttcatagcattgaagcagacttttcagaccccgacacaccgaaacgtgttatccaacaggttatcgatcggcacggccgtctggacgccctcgtcaacaatgccggtatcatgctggaggacacggtcgaaggcatgtccctggcggactggaaccgaacactcaatatcaacctcacggcgccgtttctactgatcaaatacgccttacctcatctacagggcgagggcgctatcgttaacatcggctcgattgagggactcggatctaacccccaacacgccgcctactgtgcatccaaggcaggcctgcatgccttgacacgggccgtggcggtcgacgctggccctcagggcattcgctgcaacgccattgcgccgggctggattgataccgaactcaatgaagaatttatcgaatcaatggccgacccaaagactttcaggaaacagatcggaggaattcatccattacgccgtacgggcaaacctgaggaagtcgcggcactggttgcctggctggtgtctgaagaagcgtcattcgtcacgggccagatatacaccgttgacggcggccgtctcgcccaactgccgctgccgtag

SEQ ID NO: 203608 - DNA, 670 bp, Unknown
  Bacterial polypeptide expressing nucleotide sequence isolated from the Sargasso Sea
atttgctgaagagggagctaaattaatattagctgacattaataaagatttattagataaagtttcaaaagatttagatcaagattttttctatgttgatgtagcaagttctagcagtatgcaaagtttgtctgaatatatattaaataaatatggaagaattgatattatggtaaataatgcaggcataactcatttacccaaaccccttgaaaatgtaaccgaagaagagtttgataaagtttttagagtaaattcaaagcctgtttttttttgtggaaaattttttgttccacatatgaaaaaagaaaagaaaggatcaattcttaacatttcttcaactgcaggactgtctccaagaccaaatttaaattggtataacgcgacaaaaggatggatgataacagcaaccaaagctatggcagtagaacttgctccttataatgtaagagtaaattcactagcaccagtagctggtgaaactccactacttaaatcttttttgggagaagataccccggaaagaagaaatgctttcttatcaacaattccaattggtaggttttctactcctaaagatttaggtaatgctgcctgctttctttgttcagatgaagctagcatgataacaggatcaatattagaggttgatgggggaagatgtatttaa

SEQ ID NO: 203609 - DNA, 445 bp, Unknown
  Bacterial polypeptide expressing nucleotide sequence isolated from the Sargasso Sea
catgtcaataagatttgatgatagggttgcaattgtcacaggtgctggtggcggtataggcaaagaacatgcacttgagttagcaagaagaggagcaaaagttgttgtaaatgatcttggtggaagtgttgatggtagtggtgccagtgatgcggcaaatgaggtcgtagatattattaaatctgaaggtggcgaagctattgcaaatggtgccagtgtcaccgatctagatgctgtaaaagaaatgactaatcaaaccatggaaaagtggggaagaatagatattttggtaaataatgctggaattcttagagataaaagttttcataaagtaactctagaagattttaatttagtaatggatgttcattttcaaggaagcttaaattgtacacatacaattttttcctataatgagagagcaagagtatggccgaattgtttt

SEQ ID NO: 203610 - DNA, 781 bp, Unknown
  Bacterial polypeptide expressing nucleotide sequence isolated from the Sargasso Sea
aatgactggaagagtagatggaaaaatgtcttttgttactggagcggctcaagggcttggtgaagcgatagcatatatgctagcaaaagaaggttcaaaagttgtactagctgatattaatgaagaaaaattaactggtgttgaagatagaataaattctgattttccaggaaaagctcattcagtaaaacttgatgtcacatctgaagatcaatggaaggatacacttaatgaagcagaaaaattaatgggaggaataaatattcttgttaataatgcaggcataggtggtggttctacagtagaagaaacagattatgagatattcaaacaggttatggctgttgatactgactcagtatttttaggttgtaaatatgctatacctattatgaagaattattctcctggctcaataattaatacttcttcgatatccggtttaattgctggccataatatggctgcatataatacagctaaagcaggcgtatggatgctgacaaaatcagtagctttgcattgtgcaagatctgcgtataatattcgatgtaactcaattcacccaacttttattgatacacctatcttagatgcgatggtagaaagatctaattcagaaaaagaacaggttatgatgaagttggcccgacaggttcctctcggaaaagtgggtgagcctgatgatgttgcttatactgttttattcttagctagcgatgaatcaaagtttataactggtgcagaaattaaaatagatggtggcattagtgcaatgtaa

SEQ ID NO: 203611 - DNA, 1225 bp, Unknown
  Bacterial polypeptide expressing nucleotide sequence isolated from the Sargasso Sea
ttggcaaaaaatccaattatatttgcttgtgcaaatcctgacccagaaattacaccagaggaaattaatgaagtaagagatgatgcaattatagcaacaggacgctctgattatcctaatcaggtaaataatcttataggatttccttatatttttagaggagctttagatgttagatcaaaaacgattaacgaagaaatgaaagttgctgctgctcaggcaatagctaaacttgctagagaagatgttcctgatgaagtggttgcggccatgggaggtgaaagaccccattatggaaaggactatataattccttctacatttgatccaagattaataagcgtaatcccagccgcagttgcaaaagcttcaattaaaagcggagtagcaagaaaaaaaattgaagatttcgagatttataaagatcaacttaaacaaagactagatcctacagtaacaataatgcaaggtataaattcatttattaaaaaaaatcaaaaaagaattgttttcgctgacggagaagatgaaaacactttaaaagcagcaatagcgtttaaaaattctaaattaggtatcccaattttagttggaaaagaaagtaagattaaagagcagattaaaaatattggatataatgaaaattttgacattaaaatagtaaattcaaaagatgttgaaaaaagaaataggtatgtgcaacatttatttaaaaagcttcaaagagagcaaggtctacttgaaagagactgtgatcggctagtaagaaacgatcgagttatctgggcagcttgtatggtagcttgtggagatgcagacggggctgtaactggaaataccagacgttttggagcttctctagaaaaaattaaacaagttgtaaacgtaaggcaaggagaaataatgtttggattgaacatggtggtgcataaaggaaaaactatttttattggtgatacaagtgtacatgaatatccatcttcagaacagatgtccgaaatagctatatccacagctagagtagtaagactttttggttttgatcctaaggttgcctttgtttctcattcaacttttggacaaccagttacaagtcgcacaaaacatatcaggaatgctgttgagattttaaaacaaaaaaaagttgattttgaatttgatggagatatgcaaccggatgttgctcttaatgaagaatacaaaaatctttatccattttctaaaa

SEQ ID NO: 203612 - DNA, 1198 bp, Unknown
  Bacterial polypeptide expressing nucleotide sequence isolated from the Sargasso Sea
ctgacaggcaccgatctgctcaacgatcgcaatctcaacaagggcaccgcctttaccgaacaggagcgcgccgacttcgagctcgacggcctgttgcctccccaggtgcaaacctttgaagcccagctggatcgggtctatcagggctttctgagcgcctgcagcgacatcgagaagtatcagaacctgcgggcattgcaggatcgcaacgagaccctgttctatgccctgttggcgcgccatgtggaggagatgactcccatcatctataccccgaccgtgggcaaggcgtgtcaggagttcagccaccgctaccagaaggcgcgcggtctctacatcaccccgaagaacgtcgatgacatgggctccctggcccgtcagctggatgccaaatcggtgcgcatcatcgtcgtgaccgacagccaggggatcctggggatcggtgaccagggggtgggcggcatgggcattcccatcggcaagctctccctctataccctggctgccggcattcaccccgcctgctgcctgcccatcgcgctggacgtgggcaccgacaatcaggcgctgctggatgatcccatgtacctgggtcagccccacaagcgcattcgcggcaaggagtacgacgacttcatcgacaagttcgtggccggggtcaagcgccacttcccgaacgccgtgctgcagtgggaggatttcagcaagtccaacgccttcaacaatctctcccgctatcagcagtcgctgccgtccttcaatgacgacatccagggcacaggtgccgtggtgctggcgggcatcataggggcggtcaaggtcaagggcgagaccctgggccagcagaactacctggtctatggcgccggtgccggcggggtcggagtggcggatcagatctgtgcgggcatgatccgcgaagggctggatccgcaggcggcccgcgatcgcatctatatcctggatacccaggggctggtgtgtgacaaccgcgaggggctcgacgagtacaaacgccgctacgccaagcctggcctgctgctggctggctgggacaccgaggtgccgggcaaggccaacctgaccgacgtgctgcgccacgtgccgatcaccgtgctgctgggcaccagcggttcgggtggcgccttccaggaggagcacgtgcagctgatgcaaaaacactgcgcgcgccccatgg

SEQ ID NO: 203613 - DNA, 517 bp, Unknown
  Bacterial polypeptide expressing nucleotide sequence isolated from the Sargasso Sea
atgaagaaatcgccactgtacactgcgtattcaggttcagcgttattggaaacgccattgctgaacaagggcagtgctttcactgtagaagaacgtcaggcatttaacctggccggtttattgcctccacgctatgaaaccattgaagaacaggtaagccgtgcttatatgcagtacaaaagctttgacacagcaattaacaagcatatttatctgcgggtaattcaggacaataacgaaaccttattttatcgtttgttgcagcagcacttagaagagatgatcccgattatctatacgccgactgtcggtgatgcctgtgaacagttttctgatatctatcgtagtgcccgtggtttatttatcagctacaacgaccggtatcagttggacgacgtattgcgcaatgcaacgaagcgcaaggtaaaggttattgttgttactgatggcgagcgcgttctgggcctgggcgaccagggtatcggtggcatgggtatttctatcggtaagttatcac

SEQ ID NO: 203614 - DNA, 502 bp, Unknown
  Bacterial polypeptide expressing nucleotide sequence isolated from the Sargasso Sea
gatgattttaaaaaataatgtggctttagttacaggtggtgcgtctggtcttggtcgagcaacagttgaacattttgtaaacaatggcgcaaaagtagcaatcttagatttaaataaagaaaacgcactggaaataattgaaaatcttggtgaagataacgtatgttttattgaaacaaacgtcatggaagaagagtctgttcaaaatgctattacagctataaaagataaatacaaaaaattacactttgtaattaattgtgcaggaacaggatacggagcaagaattcttggaaaagataaacctcatccattagaccattttaaatttatcatagatcttaatcttgttggtacctttaacgtaatgagattagctgctgaacttattgataaaaatgatccttcaattgatggtgaaaaaggagtaataataaatactgcctctgttgccggctatgaaggacaaattggtcaatctgcttatagcgcttcaaaagcc

SEQ ID NO: 203615 - DNA, 223 bp, Unknown
  Bacterial polypeptide expressing nucleotide sequence isolated from the Sargasso Sea
atgagtaaaatatctttaatcggtgcaggtcaaataggtggaaccttagctcacttaattggaataaaggaattagcaaatgaagtagttttatttgatgttgcaagcggtattgcaaaaggaaaagcactagatattgcacaatcatcatctgtagacggttttgatgttaaattttctgggactgatgattataaagacattaaagactcaaaggtaatca

SEQ ID NO: 203616 - DNA, 691 bp, Unknown
  Bacterial polypeptide expressing nucleotide sequence isolated from the Sargasso Sea
aatgaggccggcaggaagagctcaaaatgaatctctttatttcaattatcctttttttagtgctccacaaggaaaaaagcgtgatcatttaaagagtaatgctcaggttgccatcgttggagctggtccaattggtatgactgcagctttagctttagcgcgtgagggtgttaaatctgttttatttgataacaaaagtactttcaatgacggcagtcgtgctatttgtgtagcaaggtcaagtttttatatttttgaagcattaggagtttcatcagcttttttgggaaaatctttaggttggacaactggccattcattttatagaggacaaaaaatattagagtttcaaatgcctgatagtagtgaagagaaattccgtccaatgtataatattcaacaacaatatattgaaaaatttctttgggatgcagtatctgtaaatcctcttattgaaacacgctggcaaagtgaaattataggtataaaaaagaaaaaaaataaatgtactttaagaataaaagacccagaagaaatctatgacatgtcttcaaattgggttcttgcgtgtgatggcgcgcacagtagtatccgaaaatttcttggtcaccgattaaaaggggaaaactatgagggtcgttatgtaatagttgatattaagatggaacatgattatcccacaatcgacgtg

SEQ ID NO: 203617 - DNA, 1389 bp, Unknown
  Bacterial polypeptide expressing nucleotide sequence isolated from the Sargasso Sea
aatggcaaaaaatcctataatttttgcatgtgctaatcctgatccagaaattacaccagaggaaattgaagaagtccgtgatgatgcaattattgctactggaagatctgattacccaaaccaagttaataatttaattggttttccatatatttttagaggagccttagatgtaaggtcaaaaacaattaatgaagaaatgaaagttgcagcagcgaatgctatagctaaactagctagagaagatgttccggatgaggtggtagcagcaatgggaggtgacagaccccattatggtaaagattatataattccatctacttttgatcctagattaattagcattataccttctgctgttgctaaagcagctatagatactggtgtagctagaaaaaaaatagaaaattttgatgtataccaagaacaattaaaacaaagactagatccaactgtaacaataatgcaaggtataaatagttatattaaaaaaaatcagaagaaaattgtatttgctgatggtgaagatgaaaatacacttaaagccgcaattgcattcaaaaattctagattaggaattcctatattgataggaaaagaggaaaaagtaaaagaacaaataaaaaaaattggttacaatgaaaattttgatattgaaatcgtaaactctaaaaacacgtctaaaagggaaaaatatgtaaaatatttatttgaaaaacttcaaagagaacaaggtttattagagtgggattgtgacagactggttagaaacgatcgagttatctgggcatcttgtatggttgcttgtggagatgctgatggagctgttacaggaaatacaagaagatttggtgcttctttagaaaagatcaaacaagtagtggatgctagacctggtgaaataatgtttggactaaatcttgttgttcataaaggtaagacaatttttgttggtgatacgagtgttcatgagtatccaagttcagaacaaatggtagaaatggcaatttcagctgcaagagtagttagattatttggatttgatcctaaagttgcatttgtttcacactctacttttggtcaaccatcaaccagtaggacaaaacatattaaaaaagctgttgaaattttaagagaaaaaaatgttaattttgaatttgatggcgacatgcagcctgatgttgctcttaacgaagaatataaaaatttatatcctttttcaaaaatagtcggaaatgcaaacattttaataatgccaggacaacatagtgcagcaatttcatataaaatgatgaaaactttaggtgatacaaaagtgattggaccccttttgattggtttaagattgccgattgaaattgcaccattaagaagttcaacttctgaaat

SEQ ID NO: 203618 - DNA, 1033 bp, Unknown
  Bacterial polypeptide expressing nucleotide sequence isolated from the Sargasso Sea
tatgagaactcgtgctgcagttgcaatagaagctggaaaaccactggaagtgatggacgtcaaccttgaagggcccaaggctggtgaagttttagttgagataaaagctactggcatatgtcatacggacgaatttactttatctggttctgacccggaagggctgtttccggctatcctgggacatgaaggagctggtgtagttgtagaagttggccctgatgtttttgacctaaaagttggagaccatgtaatcccgctatatactcccgaatgcaggcagtgtgaatattgtctccatcccaaaacaaatctttgtcaagccattagagaaactcaaggacgaggcttaatgccagacggcactactcggtttagtatgttggatggtactccaattctacattacatgggctgctcgaccttttctaatttcaccgttttacctgagatcgctttggctaagattaattcaaaggcaccgtttgataaagtttgctatattggttgtggtgtaacgactggaattggtgctgttattaatacagccaaagttgaaattggaagtcggaccattgttttcgggttgggaggcattggccttaacgtcatacaaggacttaggttagcaggtgctgatcaaattgtaggagttgacctaaacccgcagaaatcaaaaatggcgaaaaaattcggtatgacggattatgtgaatccaaacgaagtttctggggatctggttcaacatttagtaaatataacgaaaggtggtgcagattatacgtttgatgccactggtaatgttgaggtgatgcgagcagcgttagaaagtgctcacaaaggttggggtgaaagtataataattggagtagcccctgcaggagcggaaatttctactcgcccatttcagcttgttacaggtagagtatggaagggaacagcctttggaggggcacgcggtcgcacagatgttccaaaaattgtggactggtatatggacggaaaaatcgagatcgatccgatgattactcac

SEQ ID NO: 203619 - DNA, 339 bp, Unknown
  Bacterial polypeptide expressing nucleotide sequence isolated from the Sargasso Sea
catgaaaaatcttttttctgtagaagggaaagtagcaatagtaactggcggttccagaggtataggtgaaatgatcgcagcaggttaccttgccaacggagctaaagtttatatcagttcgcgaaaagcggacgcatgcatagctaccgcagccagattggttgatgaatttggtggtgaatgcattcccatttccgcggatctttccaatctcgacggaatcaataattttgtacaagaattttctaaacatgaaacaagtctagatattcttgttaacaatgccggagtcgcatggggggcacctcttgaagagtttccagaattgggttgggacaa

SEQ ID NO: 203620 - DNA, 460 bp, Unknown
  Bacterial polypeptide expressing nucleotide sequence isolated from the Sargasso Sea
catgaaagatttattttcaatagaaggcaaggtggctttggtcactggaggttcgagaggaattggtagcatgatcgctgctggcttcttagcttcaggagcgaaggtttacataagctcaagaaaagcagaggtatgtgatgaaaccgctaaaaaattaagtgaggaatacggaggtgaatgtatttcaatacctgccgatgtatctaatgttgaagggatagaggcattagctgatgccataaaaacaaaagaggacaaacttgatattttaataaacaatgccggtgttgcttggggtgagcctatcgatacctatccagaaatcggttgggataaagttatggatactaacgtcaaaggtatcttctttttaactcaaaaactattaccacttttaagggaagcaggtaaagacgacccggctagggttatcaacataggttcaattgatggtctt

SEQ ID NO: 203621 - DNA, 921 bp, Unknown
  Bacterial polypeptide expressing nucleotide sequence isolated from the Sargasso Sea
atttattatgtggatctgatagaaatcaattttacaatggaagccctcaatgtattccaggtcatgaaggagctggagtaattgtagataaaggaaaaaaagctaaatttgatattggtatgaaaggcgctgtatacttatatgattattgccataaatgtcgaagttgccaattaggattaactaatcaatgtttgcataaaaactgcgattatggctttaatgttgatggtgctttttgtgaatattaccttgtaaatgattatgttttttttcccgttgatgaaagtgttgatgtaataaatgcaacattgcttttagacgtgatgggtactggtggccatgctacaaaaagagcacaattaattcataaagatattcaatcagtactaataaacggcgcaggacctatcggtcttggacttttagcaatgagtaaattaacttttgcaaaagatttacctgttttaataaatgatgttaaatcatctagattgccattagcagaaaagatgggtgggttacctatagacttatcaaaacaatctttagaagagggtatggagcaacacggaattaaaaatcctgatgttgctattgatgcaacaggtaaagctgtggctaggaaaaatgctcttcaagctttagctaaaaggggtgtgttagttatggttggtaatggtgaaggtttggaatttgaacaatatccagatatgggaggtccagaaagaagcattcttggtagtgaatatttttcttataatgagatggatgcaaatcatgaattacttaaaaataatcaagaatatttatctcaaataattacacataagtataacattgaagatgtccaaaaatcatatgaacattttttctctcctgaatctgatgcaggtaaaatagctgttgttcataactaat

SEQ ID NO: 203622 - DNA, 655 bp, Unknown
  Bacterial polypeptide expressing nucleotide sequence isolated from the Sargasso Sea
gctaaattaaatgtggaagtaagtttttatcaaatagatgttgcaaacgaaaattcatggattgaattttctaattttttaaaaaataagaaaattcttacagatatactagtaaataatgcgggtatttggattggtaaagatattgataatgtatcgctagaagaatatcagagacttatatctattaatttaactggtgtatttcttggtattaaatatttagtaccctttttaactgaggcaggtaaaaaaacaaaatttggaagtactataattaaccttagttctgtagctggtcttgttggttctcaacttgacccattatattcaatgacaaaaggcggtataactactttcacaaaatcaatggcaatatattttggaaaaaataaatttccaatcagaattaatcaagttcatccaggaattatagaaactgacatgggaacacaagtatataaagcaagaattagtcaaaacccagagatgacaacagaagagtctattttagctggcattaatcaaacgcctattggtcgtcttgggacagctgatgaagttgccaaaacaattttatttctatcctctgataactcaagttttatgacaggatcaagtcttgttgtagatggaggcttaactgcacaatagg

SEQ ID NO: 203623 - DNA, 793 bp, Unknown
  Bacterial polypeptide expressing nucleotide sequence isolated from the Sargasso Sea
aatggatcttggaattaaaaataaagtggcacttgttacagctgcaagtcagggtttgggtaaagcttcagcaatagaacttgccaatgagggggttaagctagctatttgctcaagagataaagagaaaataaatcaaaccgctggtgaaattaaaaatttatcaggcgcagaagttctcgcagttaaagctgatttagacaacacagatgatatagagaatctaataaaagaaatagaaaagaaatttaataaggttgatattcttgttaataatactggaggtccaaaagcaggtttttttgatgatctttctgatgaagactggttgaaaacatttgagtcaactttcttatctgcagttcgagttactagaaaagttttaccttttatgaaaaagaataaatggggaagaataattaatataagttcagtatcagcaaaacagcctatagacaatcttatgctatctaatggagtaaggatgtctatacacggttgggcaaagacattatctaatcaggtagcttctgataatatcttgattaataatgtatgccctggttttactcacacagaaagagttgatggacttataaaagcacaactgaagaattcaaactcatcacgcgaggatatcatagaatctattgcaagtgatattcctgcaaaaagagttggtcaagctgaagaacttgcggctttagttacatttctatcctctgaaaaggctagctatataactggtcaatcaattgcagttgatggaggtatttctagtcttccaatatag

SEQ ID NO: 203624 - DNA, 499 bp, Unknown
  Bacterial polypeptide expressing nucleotide sequence isolated from the Sargasso Sea
atgaaaacaaaagcggcagttgcctttgaagctggtaaaccactggaaattgtagaacttgatcttgaaggccctaaagaaggagaggttttaatagaaattaaggcttctggaatttgtcataccgatgcatacactctgtcaggagcggatccagaaggtatcttcccttcaatattaggacatgaaggagctggtgtggttgttgaaaagggcccaaatgtaaaatcattggacgtgggtgatcacgtaattccattatacactcctgaatgtcgagaatgtgagtattgtcttaacccaaaaactaatctatgccaatcaataagaactactcaaggtcaggggcttatgccagatggtacaagccgtttttcatataatggaaaaaaaatatatcattatatgggtacatcgacattctcacaatttacagtaatgccagaaatcgctgcggcaaaatttcagaaaggctcctttgacagatatgttatgtagg

SEQ ID NO: 203625 - DNA, 643 bp, Unknown
  Bacterial polypeptide expressing nucleotide sequence isolated from the Sargasso Sea
ttgaaagataaaattgatatagatgaaacaagctatgatgagcaagaagccctaaagttccactctgaaggaaggccaggtaaaatagagattaatgctactaagccaatgtcaacgcagagggatttagcattagcatattcaccaggggtagcggcccctgtattggcaatatctgataatcctgatagcgcatatgattatactactaaaggaaaccttgttgctgttatatctaatggctctgcgattcttggtttaggtgatcttggtcccttagcctctaaaccagtaatggaaggtaaagccgttttatttaaaagatttgcagatgttgactctattgatattgaaattaatgaaaaagatcctgacaaaatttcggatattattgcaagtcttgaaccatcttttggcggtataaatcttgaagacataagtgcaccagattgttttattattgagagcaaattaagagaaaaattaaatatacctgtctttcatgacgatcaacatggtactgcaattatatcagccgctggaattattaatgcacttgatcttactggtaaaaatataacagacatgaaagttgttattaatggagctggggctgctgggattgcatgtcttgagttataaa

SEQ ID NO: 203626 - DNA, 287 bp, Unknown
  Bacterial polypeptide expressing nucleotide sequence isolated from the Sargasso Sea
tatggaaagattgaaaaacaaagttgcaatcgtaagcggtggcgcgaatggtattggaagagctgtttgctctagatttgttaaagaaggcgcgagagttatagtggcggatttgaaagaggatgctggaaacgagcttgtttcagaactcggcagcgcggcaagtttttttaaactggatgtaagaaataatgaagaatggaaagaattagcaaaacatatattaaaactacatggaagcttcgatatcctcgtcaataatgcgggtatatgtcaactaccgatca

SEQ ID NO: 203627 - DNA, 754 bp, Unknown
  Bacterial polypeptide expressing nucleotide sequence isolated from the Sargasso Sea
atgttaaatttaaacggtaaaacagttttaatcacgggagccagccgaggtattggagaagcagcagccaaaacttttgctcaagctggcgcaaacgtcatgctgaccgcacgaaacgcagataaattaaagaatataaaaaaaaaattgggcgatcgaactgaatattttgcaggcgatatctctgacccaaatattgtaagtcagctggtagatttttgctattcgcattttggtgctctcgatattttgataaataatgccggaacaattcagcctattgggcttatccatgagataaaaccagaagactggtcgagtgttattgatacaaatcttaaaagtattttttatacaataaatgctgttttgcccgaaatggtcaaaaatggtgaagggacaattttaaatgtgagctccggagcagctcataatcctttgacggcttggagccactattgcgcttcaaaagctggtgctgcaatgcttactcagtgtttacatactgagtattttgaacatggaattcgagcaataggtctttcacccggtactgttgccacccaaatgcaacttgaaataaaagagagcgggatcaatcaagtaagcgcattagattggagcgtgcatataccggcagactggcccgcaaaggctcttttgtggatgtgtagttcagaggcagatgaatttgttggaaaagaaatttcactacgcgatgaggtaattcgtcagaaagttaatctaatttgat

SEQ ID NO: 203628 - DNA, 769 bp, Unknown
  Bacterial polypeptide expressing nucleotide sequence isolated from the Sargasso Sea
atgtatttaaaaaaatataacttaaaaaataaagttgcattagtaactggagcaggcaaaggtcttggtaaggcttgtgcaattgcattagcggaggcaggtgctaatttagtaataataagccggactcagaaagatttaaatcaagtctcaaaaattataaaaaaatttaaagttaaatgtaaaagttatctttgtgatgtaactgattatggtcaaattaaatctattattgataaaattcctaagattgatgtattaattaacaatgcagggaccaattttcctgagcattttacaaaagttaaaagatcaaacatggaatacatggttaaaataaataatgtagcagcgttcaacctcgctcagctttgtactttaaaaatgttaaaaacaaaaaacagaaaaaaaataggcggatcgatagttaatatgtcatctcaaatgggtcacgttggaggacctattaggagtgtttataatatgaataaacatggtttagaagggttaactaaaggtatggcgatcgacttagcgaaatataatattagagtaaatactgtgtgcccaacttttgttgtaacacctttgacttcaaaatttttaaagaataagaaatttaaaaaagaaactttgaataatattcctttaggtagatttgcagaaatgtcagaaatcgcatcaacagtagtttttcttgcttctgacgcagcatcaatgattacaggaacttcattgttagtagatggtggatggacagcaaaataat

SEQ ID NO: 203629 - DNA, 742 bp, Unknown
  Bacterial polypeptide expressing nucleotide sequence isolated from the Sargasso Sea
atgagattaaaaaataaagttgcaataataacaggatcggcctcaggttttggcaaaggaatagctaaaaaattttcagatgaaggggcaaaactgatactagttgatattaatttaaaattattaaaaaaagtttcaaaatcattatcccaagaccactttgttgcagacgtatcaaaagaatcaaattttagatccttattaaaatatgttctcaaaaaatataagacaatagatataattgtaaataatgctgggattactcataaaccaaaaaatatggaagcagtaacaggaaaggaattcgataaagtatttaatgtaaatgctaaatctgtttatctaagtgccaaatattttgttcctaggatgaagaagttaaggagaggagtaattttaaatgtagcatcaacggcaggtctatcgcctaggccaaaattaaattggtacaatgctagcaaaggatggatgattacagcaacaaaagctatggctattgaacttgccccttttaatgtaagagttaatgcaatcgcacccgttgcaggagtaacaccattattaaaatcatttatgggtggaaataccccccaaaaaaaaaaagcatttttatcaacaattccaatcggtagattctctacccctcaagatatgggaaatgcagcatgttttttatgctcagatgaagctactatgattactggaacgatattagaagttgatggaggtaggtgtatttaaa

SEQ ID NO: 203630 - DNA, 823 bp, Unknown
  Bacterial polypeptide expressing nucleotide sequence isolated from the Sargasso Sea
atgaaatctatattagtcacaggatcttcttcaggaattggagctgcaatatgtgaacacttcacacaaattggttggaaagttttcgggagtgtaagaaatcaaaatgatggggataaactaacagatatatgtggagaaaatttcactcctcttatttttgatgtcacagacatttatgcaattaatgaggcggctaaattagttgaatatcatttgggcaaaaatggcttaaattgtctcgtaaataatgcaggtattaatatttctggtcctatggagtatgtagaatctaatgaagtaagaaaagtcttcgaagtcaatgtaatggggccattaaattgctcgcaatcattcctgccaatgcttaaaaaatctacatcagcaacaataattaatataagctcaatggccggtaagattggtctgccaatgcagggatcatattgtggcagtaaatttgcacttgaaggaatctccgaatcaatgcgaagagaacttcaaatccataatatcaaagtagttgtaattggtcctggtgcaattgaatcatcaatttgggataagtttgaaaaagatgagaaggaagaacaatataaggatacagaatataaatcagcaataaaaaaaatggatggcactcttaaaagagcaagaagtatagcaattccagcttatcgagtagccaaaaaagttgagaaaattgtgaattctaagaatcctaaaccaagatatgtagtttctggcataacagataaaatgttaaatctcattccaacaaagatccttgatgcagcttttaaaaggttattaacgaaataac

SEQ ID NO: 203631 - DNA, 502 bp, Unknown
  Bacterial polypeptide expressing nucleotide sequence isolated from the Sargasso Sea
ggttcggtcccgttggagcatttcggcaaaatcgacggtctggtcaacaacgcggggatccttcacccgatgggattggaagacgaccgtgaagaattgctcgatgatatgtgggaagtcaacgccaaagccccattgcgactcacccgtctgacttttcctcacctcaaaaaatgcgggcgcggaagggtcatcgatgtgatttccatgtctggaaaacgtgtcaaaggaaactggatcggatactcaatgagtaaatttgctgcactggcggcctcaagaaccgcacgcatgcagggatgggaggatgggatccgggtgactgccatttgccccggctttgttcaatccgatatgaccctcgaaaatgccacggattatccgcaggaacagatgtcccggcctcaggacctagctctcatcgtcagttccctactccaactcgacaacgaatctgcaattcccgaggtgatgatgaattgtgtctttgaggcaatgtaaa

SEQ ID NO: 203632 - DNA, 436 bp, Unknown
  Bacterial polypeptide expressing nucleotide sequence isolated from the Sargasso Sea
gatgtcaaatgaaaaacttaaaggtaaaaaagcaattgtaacaggagggtcaagaggaatagggcgtggagttgctctaacgcttgccgctgcaggagcagatgttgcattttgccatcacaaagacaatgataaggctaaagaaacttcatctgaaattgaaaaacttggtcgtaaaagttttgctgcagaatgtgatgtttcatcaatttcatcagttaaagaattttatgcaaatgcggtaagccagatgggtgatattgatatcttggttaacaatgctggtcataacataactgagaattttgaagaaataagcgaagaaagtttcgacagaatgttgaacgttcatgttaagggtactttctttatgacgcaggcagtttataaagatatgaagaaaagaggtgctggacgtattataaatatcacttcg

SEQ ID NO: 203633 - DNA, 496 bp, Unknown
  Bacterial polypeptide expressing nucleotide sequence isolated from the Sargasso Sea
catgagtacgaaacaacctctttatacctcctacgcaggtccagctttattagaaactccgttgttaaataaaggcagcgccttcaccaaagaagaacgtatcgcttttaacctgattggtttattgcctccacgttacgaaactattgaacagcaactggcccgtgcttatatgcaatattccagtttcgctgaacctatcaacaaacatatttacctgcgtgccattcacgataaaaacgaaactttgttttatcgtcttgtgaaagagcacctggaagaaatgatcccggtgatttacacaccaacagtaggggacgcctgtgagcgtttctctgctatttaccgcagtgcgcgtggtatttttgtttcctacagcgaacgtgagcatatggatgacatactgcgcagcgtcaccaagaaaaaagtaaaagtcatagtagtgactgatggcgagcgtgtactgggcttaggtgaccagggcgtgggtggcatg

SEQ ID NO: 203634 - DNA, 952 bp, Unknown
  Bacterial polypeptide expressing nucleotide sequence isolated from the Sargasso Sea
actaagcccaacccgaccatgaccaacgtggaagcgggcctggccatgctcaaggccaatggctgcgactgcgtcatctcactgggcggcggctcgccccacgactgcgccaagggcatcgccctggtggccgccaacggtggcagcatcaaggattatgaaggggtggatcgctccgccaagccgcaactgccgctcatcgccatcaacaccaccgccggcaccgcttccgagatgacccgcttttgcatcatcaccgacgaggcccgccacgtgaaaatggccatcgtcgacaagcacgtcaccccgctgatgtcggtcaacgaccccgagctgatgctggccaagccggccggcctcaccgccgccaccggcatggatgcgctgacccacgctatcgaggcgtatgtctccaccatcgccaccccggtgaccgatgccagcgccatcatggccatccagctcatcgccaaacacctgcgcaccgcggtcaaccacggcgacgatctgcacgcccgcgagcagatggcctacgcccagttcctggccggcatggccttcaacaacgccagcctgggttacgtgcacgccatggcccaccagctgggcggcttctacgacctgccgcacggggtgtgcaacgccgtgctgctgccccacgtgcaggcttacaacgcccaggtgtgcgccggccggctcaaggatgtagcccgtcatatgggggtggacgtgagcgccatgaatgatgagcaaggggccgccgccgccattgccgccatccagcagctggctcgcgacgtcaagatcccaaccgggctggagcagctcggcgtcaaggccgatgacttcaacctgctggccgagaacgccctgaaagacgcctgtggcttcaccaacccgaaacaggcgagccacgaagagatcgtcgccatcttccgcgccgccatgtaag

SEQ ID NO: 203635 - DNA, 352 bp, Unknown
  Bacterial polypeptide expressing nucleotide sequence isolated from the Sargasso Sea
ctgaattcatttcaactgaatggccaccatgccctggtcactggggcgggacgtggactaggtgaagcctgtgccctggctcttgccgaagcaggtgccgtaatcacactagtagcccgcagcaacgaccagctggaatccgtggcaaaacagatccgtgattcaggaggccaggcttccgtccatcctgcggatctgaccaagatggaggaaatccgtaaactcgaagaactcgggcctttcaccattctcgtcaacaatgccggaatcaaccgtccccaaagctttgaggtggttaaagaaaaggatttcgatgatgtcctcgatcttaatgtgaaatctgctttttttg

SEQ ID NO: 203636 - DNA, 178 bp, Unknown
  Bacterial polypeptide expressing nucleotide sequence isolated from the Sargasso Sea
tatgaaagatttattttcaattgaaggaaaagtggctcttgtgaccggtggttcaagaggtattggagaaatgatagcggctggctttttagctaatggagctaaagtttatataagttcaagaaaagcagaagtatgtgacgcaacagcagaaagattagcaaaagagtatggagaa

SEQ ID NO: 203637 - DNA, 1984 bp, Unknown
  Bacterial polypeptide expressing nucleotide sequence isolated from the Sargasso Sea
atgattatcaataaaattgcagatgaacttagcgttcaaccttcgcaagtaactgccgctgttaaacttcttgatgaagggtctaccgtaccttttatcgcgcgctaccgaaaagaagtgacacaaggccttgatgacacacagctgcgtaccttggagcagcgcttaacctacctgcgagagcttgaagagcgccgcgatgtaatccttaaatctatagaggaacagggcaaactgaccgacgagcttaaaagcagtatcactagtgctgacagcaaaactaccttggaagatttgtacttaccgtacaagcctcgcaggcgcactaaaggccagattgctattgaagcaggccttgaacctttagctgataccttattttctgccccagataccgatgctgaaagtgcagcaagcgaatacgttaacgcagatagtggcattgctgatacaaaagcagcattagaaggcgcccgctatatcttaatggagcgcttcgccgaagacgcaacactgctggcaaaagtgcgcaagtacttaactgaaaatgcttatgtaaaaagcacggttgtatcaggtaaagagcaagaagccgccaaatataaagactatttcgaacacagtgaaaagtacaagaacgtaccatctcaccgcgcgttggcgatgtttagaggccgcaacgaaggcatgctacacattcagctagatgccgacccgcagtcagaagacaacggtccgtcgcattgcgaacaaattattgccagccactacgatattatgcaccgcggccgtggcgcagatgacttcttggctcaagttgtacagtggacgtggaaaatcaaaattggtttacacatggaaactgagctattcagcgcccttagagaacgcgctgaagaggaagccattgaggtatttgctaaaaacttaaacgacctgttgatggctgcacctgcaggtgcaaaaaccactatgggtttagatccaggtttgagaaccggcgttaaggtagcggtcgtagacagcacaggaaaagtggtcgcaaccaacaccattttcccgcatgcaccacaaaaccagtgggataaatctattcgcacgctcaccacgttgtgcaagcaatacaaagtagatttaatcagcattggcaacggtactggctcgcgcgagacagacaaactcgttggtgaaatgctcaagaacaacagcgagcttactgcacaaaaaattatggtcagtgaagcgggtgcatcggtgtattcagcctctgagcttgcttcaaaagaattgcctgaccttgacgtgtcaatccgcggcgcagtgtctatcgctcgacgcttgcaagacccgctggcagagctggttaaaattgaacctaaagctattggtgtaggccaatatcagcatgacgtaagccaaagccagttaggcaaatcgctagaccgtgttattgaagactgtgtaaacgccgttggcgttgacttaaacactgcatcgcccgcgcttttgagctatgtatcgggcttaaacaaaaccctagcgcataacattgttaatttcagagacaccaatggtgctttcccagaccgtaaagcgctattgaaagttgaacgtttagggcctaaagcctttgagcaagcggcaggcttccttcgcattgtaaacggcacaaacccacttgatgcctctgcggttcaccccgaagcgtacccagtagtagataaaattgtagatacgaccgctgttgctgttaatgacatcatcggcaataccgagcttctaaaaagcctgtcgccagacacctttaccagcgacgcattcggtttgccaacggttaaagacattctaaaagagctggataaaccaggccgcgatcctcgtccagagtttaaaactgccgcgtttaaagaaggcgttgaaaccattaacgatcttaaaccaggcatgattttagagggtgtggttagcaacgtagccaattttg

SEQ ID NO: 203638 - DNA, 823 bp, Unknown
  Bacterial polypeptide expressing nucleotide sequence isolated from the Sargasso Sea
catgaaatctatattagttacaggatcttcttctggaattggagctgcaatatgtgaacacttctcacaaattggttggaaagttttcgggagtgtgcgaaatcaatatgatggggataaactaacagatatatgtggagaaaatttcattcctcttatctttgatgtcacagatatcaatgcaattaaggaggcggctaatttagttgaatctcatttgggcaaaaatggcttaaattgtctcgtaaataatgcaggtattaatatttctggcccgatggagtatgtagaatccgatgaagtaagaagagtctttgaagtcaatgtaatgggaccattaaattgctcgcaatcattcctgccaatgcttaaaaaatctacgtcagcaactataattaatattagctcaatggccggtaagattggtcttccaatgcagggatcatattgtggcagtaagtttgcacttgaaggaatttctgaatcaatgcgcagagaacttcaaattcataatatcaaagtagttgtaattggtcctggtgcaattgaatcatcaatttgggataagtttgaaaaagatgagaaggaagaacaatataaggatacagaatatacatcagcaataaaaaaaatggatgtcactcttaaaagagcaagaagtatagctattccagctcatcgagtagccaaaaaagttgagaaaattgttaactctaataatcctaaaccaagatatgtagttgctggcataacagataaaatgttaaatctcattccaagaaagatccttgataaagcttttaagaggttattaacgaaataa

SEQ ID NO: 203639 - DNA, 722 bp, Unknown
  Bacterial polypeptide expressing nucleotide sequence isolated from the Sargasso Sea
tactggggctgctcaaggcttgggcaaagagatggcaaaagttatgatagcccaaggcgcaaatatagtaattactgatattaatgagtctattcttgaagaagctgcagaagaattatcttgtgaaaaaattgttcttgatgtgacaaaagagaatcaatggaaaagtgttatatcacaaattgataaacaattcggttcattgaatatattagtaaataatgctgggattggtggtggaggagatgttgaacagactgatatagattcttggcatcaagttcatagcgtaaatttagattcagtttttcttggctgtaagtatgcacttccattaatgagagactccggaaatgggtcaataataaatatttcatcgatgtctggaattgttgcctcacacaatatgtcagcatataactcttctaaggcagctgtaaggcatttatcaaaatcagttgcacttcattgtgctaaatctaccaatacagtgagatgtaattctattcatcctgtatttacaagaactgctatggtgcagagtatgattgattctgcacctgatagaaatattgaagagaagttggtaaaacaaattccgctaagaaagttagcagaaccgattgatattgcaaatgcagctttatttttagcatcagatgagtcttcctttataactggaacagaattgattgttgatggagggttaagcgccacataaa

SEQ ID NO: 203640 - DNA, 754 bp, Unknown
  Bacterial polypeptide expressing nucleotide sequence isolated from the Sargasso Sea
tatggctaatcgactaaaaggaaaagttgctctcatcacaggaggagcagcaggattcggtaaaaaaaccgctgaaacgctaaaagcagaaggcgcagtagtatacatctcagacattaatgttgaaggtggagaaaaagttgcgaaagactttgatgtaaattttctacagcaggatgtaactaatacagatgactgggaaagagtaattaacgaaataaagaacaaagaaggcaagctaaatgttcttgtaaataatgctggtattggctatatgggagatgttgaatcaacaactaatgaagcttgggatatggtccataaagtagatcttgattcagtgttttatggctgtaagtacgcacttccattaatgagagattcaggcaatggatcaataattaatatttcatcaatttcaggaattgttgccggacataattttacagcttataacagtgcaaaagcagcggttagacatttatctaaatctgtagctcttcattgtgccagaaccactaatttagttagatgtaatagcgtgcaccctgtgtttgcaagaacagaaatacttgaggccttattaagtgatacttcaaatgatatgttgagtaagttagagcgccagatacctgtaaggaaattagctgaagtagatgatattgctaatgcgatattatttttagcatcagatgagtcaaaaatgattacaggaacagaaattgtaatagacggagggctttccgctcaatga

SEQ ID NO: 203641 - DNA, 1018 bp, Unknown
  Bacterial polypeptide expressing nucleotide sequence isolated from the Sargasso Sea
aatgccaaaaaaaacagaaattgatcattatacagataaagaggcacttgattttcatataaaaggtaagtcaggcaaaattgagattaattctagcaaacctctcacaacaaaaagagatctatctcttgcttattcccctggtgttgcagctccagtaaaagaaattgccaataatccagatcttgcttacgattatactagtaagggcaatctagtggctgtcattagcaatggttctgcaatcttaggtcttggtaatttgggttccttagcttcaaagccggttatggagggaaaatctgtattgttcaaaagatttgcagatatagactctatagatatagaaataaataatagtaatcctgaagaaataattaacactatcaagaatatcgggggaacctttggaggaataaatttagaggatattgcagctcccgattgttttatcatagaacaaaaacttaaagaacttttagatattccgatttttcacgacgatcaacacggtacagcaataattactacagcggctcttattaatgcattagatatttccaaaaaaaaaatagatgaagtaaaagttgttattaatggagcaggagcatctgctcaggcatgcgcaaatttgtttaaaagctcaggtgtgaaaagtaaaaatattacaatgtgtgatagtaaaggagtcatctataaaggtcgtaaaaatattgatcaatttaaatctgcatttgcaatagataccaatctccgaactttagaggatgcaatgaaaggagcagacgtatttctaggtttatctgctaaagatgttgtttcaaaaggtatggtaaaatcaatggctgaaaaaccaatcgtatttgcttgtgcaaacccagacccagagataaaacctgagctaattcaagaggcaagatctgatgcaattattgctactggtagatctgattatcctaaccaagtaaataatttaatcgggtttccatatatttttagaggtgcattagatgttcga

SEQ ID NO: 203642 - DNA, 367 bp, Unknown
  Bacterial polypeptide expressing nucleotide sequence isolated from the Sargasso Sea
tatgggaagactaaacgacaaagtagcaatcatcacaggtgccggaagaggcataggaaaagaaatttgcttatatctcgctaaagaaggagcaaaaattgtagtaaatgatctaggcggagatagagatggtacgggaggcggaaaaatagctgatgaagttgtaaatgaaatcaatgacttaggaggagaagctgtagctaattatgattctgtaggtacagttgagggaggtaataatatttttagttctgctatggatgcctttggtcaagctgatattctagtaaataatgccggcatactaagagatagaactctttacaacatggaagagtctgattgggatctcattatggaagtccat

SEQ ID NO: 203643 - DNA, 748 bp, Unknown
  Bacterial polypeptide expressing nucleotide sequence isolated from the Sargasso Sea
atgacgaaagccgttctgatcaccggtggcagccgcggcattggccgcgcgaccgcgcgtttgctgggcgcacagggctggtcggtgggcgtgaactatgcgcaaaacctggcggcagcgcgggaaaccgttgccgacgtggaacgtgccggcggccaggcgctggcgattgccggcgacgtcgccagtgaagccgatgtgatcgcgatgttcgacgcgctccagcaaaagttcggccggctcgatgcactcgtcaataatgccggcattgtcgcgccgtcgagtcagcttgcggacatggacctggcgcgcctgaagcgtatgttcgacgtcaacgtgctcggcgcctacctatgcgcacgcgaagcggcgcgccgcatgtcgaccgcccgtggcggcgcggggggcgtgatcgtgaacatctcgtcggcggctgcacgtttaggttcaccgaacgaatacatcgactatgccggctcgaaaggcgcagtcgacaccctgacaattggcctcgccaaagaactcggcccgcagggtgtgcgcgtgaacgcggtgcgccccggcctgatcgacaccgacatccacgcgagcggcggcaagcccgagcgcgccgcccagctcggcgcgaccacgccgctcggccgccccggcagcgccgacgaggttgccgagtcgatcgtctggttgttgagcgacgccgcctcgtacgtgacgggcgcgctgctcgacgtcaccggcggccgctgag

SEQ ID NO: 203644 - DNA, 754 bp, Unknown
  Bacterial polypeptide expressing nucleotide sequence isolated from the Sargasso Sea
tatgcgactcgaaggaaaagtagccttggtgacgggcgcggcttcaggcattggagcagcaaccgccgaactttttgtgaaagaaggcgcgcgggtcgtgttagcggaccgcaatctcgaccaggcgcggcgcgtggctgcggcgctgggcgagcgcgcactcgcggtgggcgccgatgtggtcgtgtcgcagcagattcgcgacgcggtgggcgccacgatcagtgcgttcggcggtcttgatatcctggtcaacaacgcgggattggggattcgcgggaccgtcgtgaacacggaggaagacgactgggaccgcattatggaggtcaatctgaaaagcgtttttctctgttcgaagtatgcaattcccgagattgcgcggcgtggcaaaggggccatcgtcaatatttcgtccacggccgccgtgtgcggcattccggaccgcgcggcgtacgtcgcggcgaagggtggcgtggctgcgttgacgcgttcgatggcgctcgatcacgcggagcagaacatccgcatcaacagcatcgcgccaggcgtgatctggtcgagctactacgaagagatgctgcgctccgtgcccgatccggacggcttcgtcagcggactgaaggcgcgtgcgccggtcaaccggatgggacagccgcatgagattgcgacgatggctttgttcctcgcgtcagacgagtcgtcgttcgccacgggcgcaatgttcacggtggatggcggctataccgcccgatag

SEQ ID NO: 203645 - DNA, 760 bp, Unknown
  Bacterial polypeptide expressing nucleotide sequence isolated from the Sargasso Sea
gatggaattaaaagacaaagtaataattataacaggtgctgggcagggtttagggcgacaattcgcactggactgcgcgttaaacggaatgaaagtagcacttgcagatatcgatgcagaggcgatggaaaaaactcgcaaggagtgcgaagctaaaggagtccaagcaagaggctacgaacttaacgttacaatagagtctgaagttgaggcagtatattctcaggtcgtaagggatttcggcacacttgacgccactgttaacaacgctggaattttacgtgacagcctacttgtaaaggaaaaagatggtgaaatcaggaagttccctctttccaaatggcaggaggttatcgataccaacctcacaggcgtctttctttgcggacgtgaggcagcagctcagtttgttaaactcaaaaaaacaggtgtgatcgtaaacattgccagtgttgcacgttctggaaatttcggacagagtaattattccgcagctaaagcaggagtttcagctatgacagttctttggggaaaggaactcgcgcagcacggaataagagtggcaggggttgcgcctggttttactgcaacagagatggttgtttcactgcgtgatgatgtaaaggaaaaattctataagagtattcctctaagacgctttgctgagcctactgaaatgtccgatggagttctttttatcctcaaaaatgaatattttaccggccgtatgcttgaaattgacggtggtgtcagaatgtga

SEQ ID NO: 203646 - DNA, 757 bp, Unknown
  Bacterial polypeptide expressing nucleotide sequence isolated from the Sargasso Sea
atgtcagaaagattaaaagataaagttgcacttattactggtggagctcaagggttaggcaaagagatggcaagattaatgcttgcagaatctgcaaatgtaattattgctgatattaatgaaagcacattagctgaaacagcagaagagttgtcatgttctcaaatattattagatgtaacaaaagaaaaacaatggcaagaagttataaaaaaattaactaatgattttggtgctttaaatattcttgttaataatgcaggaattggaggaggtggtgatgttgagtctactgatttagaagcatggaatatagtacatcaagtaaatttagattcagtttttttaggctgcaaatactcactacccttaatgagagaatctggaaatggatcaattataaatatttcatctatgtcaggaatagttgcatctcataatactgcagcatataactcttcaaaagctggagtaagacatctttctaagtctattgctttgcattgtgcaaaaactacaaatcttgttagatgtaattctatacatccagtatttacaagaacttctatggtccagagcatgattgatgcggctccagagcgagatattgaaaataaacttattcaacaaattcccatcagaaagcttgcagagccaatagatattgcaaatgcagcagtttttttagcctctgatgaagcatcttttattactgggacagaattattggtagatggtggattaagcgctacttaat

SEQ ID NO: 203647 - DNA, 658 bp, Unknown
  Bacterial polypeptide expressing nucleotide sequence isolated from the Sargasso Sea
catgggtagattagaaaacaaagtaattattgtgacaggctcagcgacaggacttggtctcgcggacgccagagctctgatcgcagaaggggccagggttataatgaccgatatcgatgtcgataaaggaaccgaagaggctaaagatctcgatgcaacttttttcgcgcaagatgtctctaaagaatcaagctggctggaattgatgaccgttgtgcaaaataaattcggtcgacttgatggattagtgaataacgccggtattgcgcctattgccaatatagaggaagtaacagccgaatcatggcgacaggttttgggtattcatttggatggcactttgtggggctgccagggagccataaaattaatgaaagagggtggcggtggttcaatagtaaatatgtcctcaacagctgctttaatcgggattggctcatatctggcttattcagcagcaaaaggcggaattcgttcaatgactaagtcgatagccatccattgccgacagaagaaacttaatattagatgtaactcagtccaccctggctcgattaatacggcaatggttcagcatgcgttaaaagaactagttggtaaagatctattggcagaggaagatcctgagaagactcgaatagaaatgggaattggagaa

SEQ ID NO: 203648 - DNA, 1270 bp, Unknown
  Bacterial polypeptide expressing nucleotide sequence isolated from the Sargasso Sea
ggagccttagaaaaggaaatggttaaaaaaatgtctaaaaatccaattatttttgcatgtgccaatcctgatcctgaaattactcctgaagaaattagtaaagttagagacgacgctattgttgcaactggaagatctgattaccctaatcaagtaaacaatttacttggatttccatatatttttagaggcgcattagatgttagatcaaaaactataaataaagaaatgaaaattgcagcagctaaagcaattgctaaacttgcaagagaagacgttccagatgaagttgttgctgctatgggtggtgatagacctcactatggaaaagattatatcataccttcaacattcgatccaagattaataagtgttattcctgaagctatcgccaaagctgctatgagcactggtgtagcaagaaaaaaaatagaagattttgaattatacaaagatcaactaaaagaaagattagatccaactgtaactataatgcaaggtattaatacctatattaaaaaaaatcaaaaaaaaattgtattcgctgatggcgaagatgaaaatactctaagggctgcaatagcttttaaaaattcaaaattaggaattccgattctagttggaaaagaaaataaaataaaagaacaaataaaaaatatcggctataatgaaaattttgatattcaaattactaactctaaagatgtaaaaaaaagaaatagatatgtaaaccatctatttaaaaaattacaaagagaacaaggtttattggaaagagactgtgatagacttgttcgaaatgacagagttgtgtgggcaacaagtatggtttcttgtggagatgcagatggggctgtgacaggaaatactagacgatttggagcttctctagaaaaaataaagcaagtagttgatgtaagagatggggaaatcttatttggactaaatatggtagtacataaaggaaaaactatttttgttgctgatactagtgtccacgaatatccaacttcagaagaaatggtaaaaattgcaatttctaccgcaagagtagtaagactttttggctttgaaccaaaggttgcttttgtatctcactctacatttggtcaacctcttacaagtcgaaccaaacatataagaaaagctgttgatattttaaaagaaaaaaaagttgacttcgaatttgatggtgacatgcagcctgatgtagctttaaattcagaatatatagaacgttatcctttttcaaaaattgtggaaaagcaaa

SEQ ID NO: 203649 - DNA, 365 bp, Unknown
  Bacterial polypeptide expressing nucleotide sequence isolated from the Sargasso Sea
catggttaggaatcctaaaaccgttattttgaccggagcaagccgcggaattgggcattccacagttagcttttttagcaaaaaaaattgggaagttataacctgctccagagaacagccaccagaagaatgccgtagggatcctaattggtctcatcatattacagcagaccttgaagatggtaaaagcctcgacaatttcgtcactgaggctaaagggcttctcgctgaaaaaccactacacgccttggtcaacaatgctggatggtctcctaaatcaccgacacaagaacgattgggatgtttaaatggcgatcttgaggcctggagacgagtgtttgaacttaatttttttgctcccctaa

SEQ ID NO: 203650 - DNA, 327 bp, Unknown
  Bacterial polypeptide expressing nucleotide sequence isolated from the Sargasso Sea
tatggctaatcgattaaaaggaaaagttgctctcatcacaggaggagccgcaggattcggtaaaaaaaccgctgaaacgctaaaagcagaaggcgcagtagtctacatctcagacattaatgttgaaggtggagaaaaagttgcaaaagactttaatgtaaattttctacagcaggatgtaacaaatacagatgactgggaaagagtaattaacgaaataaagaataaagaaggcaagctaaatgtccttgtaaataatgctggcattggctatatgggagatgttgaagcacaactaatgaagcttgggatatggtccataaagta

SEQ ID NO: 203651 - DNA, 409 bp, Unknown
  Bacterial polypeptide expressing nucleotide sequence isolated from the Sargasso Sea
atgaaaaaaatttctgttatcggtgcaggggtaattggctcaggatggatcataagatttttagctcacgataagaaagttacagcatatgataaagatttaaaattaaaaaaaaaaattattgcagaaataagaagaacttggccatatgttaaaaaactttttaataaaaaaaaacttaaacttaaaaactttagatatgtaacatctttaaaggaagctttaaaagatgcagattttatccaagaatgtgcaccagaaaattataagttaaaaactaaattaatggaaactattggaaattattccaaacctaatgccattatctcttcaagttcttcaggtttacttccatcaaagatttattcaaaatgtaaaaatccttcaagaactattatagctcacccat

SEQ ID NO: 203652 - DNA, 781 bp, Unknown
  Bacterial polypeptide expressing nucleotide sequence isolated from the Sargasso Sea
atgacagcaggacaatcagcagacgccgtttcgaaaatcgcaatcgtgaccggcggcagtcgcggcttggggcgcaataccgtgctccatctcgcgaagcgcggtgtcgactccttattcacttatcgcgccaatcaggcagaagccgaaaagctggtcggtctggtcgcggaggaaggtcaaagagcgattgcgttgccgctcgataccggcaaagtgacgacgttcgattcgttcgtggagcaggttcgggcgtcgctcgcccagtggggcgccgagcgtttcgattatctcgtcaacaacgccggcatttcgcaccacgcgccgttcgacaagacaaccgaggaagaactggacgcgctctacaacgtccatttcaagggcgtgttttttctgacgcagaaactcctgccgcttatcaatgacggcggccgcatcgtgaatatctcctcgggcctgacccgtatcgcttttccgggcagtgcgccgtatgcgtccatgaaaggcgcggtcgaggttctgacgcgttatctggcgaaggaactcggtccgcgtcgaattgctgtcaataccgtcgcgccaggcgcaatcgccacggacttcagcggcggcatggttcgcgacaatcctgagatcaacaagctcgtggcggatgcgacggcgctcggccgtgcgggtctgcccgacgatatcggaccgatgattgcggcgctgctgtccgaagataaccgctgggtgaatgcccaacgtattgaagtatcgggtggcatgtctatctagg

SEQ ID NO: 203653 - DNA, 1162 bp, Unknown
  Bacterial polypeptide expressing nucleotide sequence isolated from the Sargasso Sea
aatgaaaaaaaataaaacagaacattatactattaaagaggctttagatttccattctcaaggaaaagctggaaaaattgaaattactccatctaagccaatgacaactaaaagagatttagctcttgcatattcaccgggagttgcatcaccggtgcttgaaattagtaaagatatcaatttagcttatgattatacttcaaaaggaaatttggtagctgtaataagtaatggatctgcaattttaggtttaggaaatttgggagcagcagcatcaaaaccagttatggaaggcaaagcggttcttttcaaaagatttgctgatattgactcaatcgatattgaaattgatagcaacaataacgaagagattattaacacaattaaaaatatctcatccacttttggtggaattaaccttgaggatatagctgcacctgattgttttataattgaaaaaaagcttaaagagataatagatattcctatatttcacgatgaccaacatggaacagcaattataactactgctggattaataaatgccttagatattactgggaagtcaatcaaggatataagagttgttgtaaatggtgcgggtgcatctgcaattgcatgctcagaattatttaaaaattcaggggttaaaaaagaaaatttaatcatgtgtgaccgtaaaggagttatttacaaaggaagagataaattagatcaatggaaaacaaaacacgcagtagaaacaaaatttagaactttgaaagatgcaataaaaggagcggacgtatttttaggcttatcagcaaaagatgcacttacaaaagatatggttaaatcaatggcgaagaatccaataatttttgcatgcgctaatcctgaccctgaaatcactcctgaaaaagttgaagaagtaagatcagatgctattattgcgactggtcgttcagattatccaaatcaagtaaataacttaattggttttccttatatatttagaggtgcattagacgtaagagccaaaataattaatgaagaaatgaaagttgctgccgctcatgcaattgcaaatcttgcaaaacaaagagtgcctgatgaagttgcttctgctatgggaggcatccgtcctatatatggaaaagaatatattatcccatctactttg

SEQ ID NO: 203654 - DNA, 490 bp, Unknown
  Bacterial polypeptide expressing nucleotide sequence isolated from the Sargasso Sea
atgaagattgtaagggctaaatatcagggcgaaatattttatggtgaattgcacgaaggtgaagttttaagatatgaagggtcacctttagtaatttgggaaccaactgaagaaaagtattctcttgaagaaatacaacttcttgctccagttcttcctagtaaagtaacagcagtagctaaaaattatgaaaaacatgctgttgagctgggagtacatgactacaccgcaccaagcaatccagtcttctttaataaaccttcaacttcagtaattggtacaggagagaatataatttatccaaaaattgctcaacatgtagaccatgaagcagaattagcagttgttattggaaagctcagtaaaaacctaactcatgataactggatggaacatgtacttggttttacaatagctaacgatttatctgaaagagtacttcagggccaagatggaacttttaacggtaacttacaagagcaaaaagttt

SEQ ID NO: 203655 - DNA, 569 bp, Unknown
  Bacterial polypeptide expressing nucleotide sequence isolated from the Sargasso Sea
tgaagactggatatctgcaattgaatttataaaaaatgaagctggatctctaaacatattagttaataatgcaggtattggtaatggtggtgatattgaatctaccgatatcgaaacatggaaattagtgcatagtgtaaatctagattcagtatttcttggttgcaaacatgccattgaactaatgagagattctggagatggctcaattataaatatttcctcaatgtctggtattgttgcctcacataatacatctgcatataactcctctaaagctgcagttagacatttatcaaaatcaatagcacttcactgtgctaaaactactaatctagttagatgtaattccatccatccagtatttactagaactgcaatggtgcaaaccatgattgatgctgctcctgagagaaacattgaacagaagctaatacagcagattccaataagaaaacttgctgaacctaaagatattgctaatgcagccgtttttcttgcatctgatgaatcatcttttataacagggacggaattgttaatagatggaggtctgagcgcaacctaaa

SEQ ID NO: 203656 - DNA, 571 bp, Unknown
  Bacterial polypeptide expressing nucleotide sequence isolated from the Sargasso Sea
gttgtttcaacagaagattggaaaaatgttgtagatgcttcaatatcagaatttagtaaaattgatatactggtcaataatgccggaatagcgttaatagggcctttcgaagaattttctgaagatcaatgggatcaacaaatcaatgtgaatttgaaatctgtttttcttggttgcaaggctgttatacctgagatgaaaaaaaataattcgggctcaataatcaatctttcatcaatagctggtttagtaggtcttcaaggatgtgcagcttacaatgcgagcaaaggtggtgttagattactaaccaaatcaatcgctatagaatatggaccaaacaaaataaggtgtaattctattcatcctggttttatggccacaaatatgaatgatccaaaaaaaattgaagaacgtggtagagattttgaagcaattattgaaacaattcctctaaaatctatgggtactgcagaagatattgctaattgcgctctttatctagcctcagatgagtcttcatatgttacaggaagtgaatatgttgtcgatggcggttggacaactcgttaat

SEQ ID NO: 203657 - DNA, 793 bp, Unknown
  Bacterial polypeptide expressing nucleotide sequence isolated from the Sargasso Sea
atggatcttggaattaaaaataaagtggcacttgttacagctgcaagtcagggtttgggtaaagcttcagcattagaacttgccaatgagggagttaaattagctatttgctcaagagatcaagataaaataaaccaaactgctgaggaaattcaaaatttgacaggcggagaagttctagcggttaaagctgatttagacagcacagatgatatagaaaatctaataaaagaaatagaaaacaaatttaatactgttgatattcttgttaataatactggaggtccaaaagcaggtttttttgatgatctatctgacgaggattggttaaaaacatttgaatcaactttcttatctgcagttcgggttacaagaaaagttttaccttttatgaaaaagaataaatggggaagaataattaatataagctcagtatcggcaaaacagcccatagacaatcttatgctgtctaatggcgtgaggatgtctatacacggatgggcaaagacattatctaatcaggtagcttctgaaaatatcttgattaataatgtatgtcctggttttactcatacagagagagttgatggacttataaaagcacaagtggagaattcaaactcgtcacgtgaggatatcatagagtctattgcaaatgatattcctgcaaaaagagttggtcaagctaatgaacttgcggctttagttgtatttctatcctctgaaaaagctagctacataacaggtcaatcaattgcagttgatggaggtatttctagtcttccaatataat

SEQ ID NO: 203658 - DNA, 739 bp, Unknown
  Bacterial polypeptide expressing nucleotide sequence isolated from the Sargasso Sea
atgaatgatttaaaagatagaataattatgatcactggtgcaagttcaggttttggaaaagaaactgcaaagatgtgcgttgctttgggagccaaggtagtgcttggcgcacgaagagaagataaacttaaggaattatgtgacgagttgggctctgattcatcaatttataatgtaactgatgtaacttccaaagatcaaatgcaagctttggccgattatggcattaaaaattttggaagaattgattcattagtaaataatgccggaattatgcctttatcgcttctcaagaagggaagaactgacgaatgggaccaaatgatcgatgttaacattaaaggcgttttgtacggaatagattcggtttactcacatatgcttgagagggagtcagggcaaatcataaatgtttcatcagttgctggaaaaagagtgatgccaggaagtgcagtgtattctggaactaaatatgcagtaagagctatttcagaaggtttaaggatagagtcttctggcaagatacaagtaacctgcatatatccaggagcgtttaagacagagcttgcattctctataaaagacgaatcaatgttagaggctctgatgagtagaggcattggagaagttgctcaacctgcggaaagagttgcagagtcaataatttatgctcttcaattagatccaggagtttcagttaatgaaatagttataaggcctactgctcaagacgcataaa

SEQ ID NO: 203659 - DNA, 310 bp, Unknown
  Bacterial polypeptide expressing nucleotide sequence isolated from the Sargasso Sea
atgaaagatatattttctattaaaggtaaagtggcattggtcacggggggctcaaggggtatcggaagcatgatcgcagcaggctttttatcctccggagcgaaagtttatatcagttctagaaaagcagatgcttgcgatgaaactgcaaaaaaactcagcgaagaatacggaggtgagtgcatatccattcccgcagacgtttccaatgttgaaggcatagaagctctagctgatgcgatcaaagcaaaagaggacaaacttgatattttaattaacaacgccggagttgcttggggagaacaataga

SEQ ID NO: 203660 - DNA, 1094 bp, Unknown
  Bacterial polypeptide expressing nucleotide sequence isolated from the Sargasso Sea
catgaaaaaagatcaacaaagaagggcatcattaatttatcatgcaaaaccaaaagcaggtaaaattgaagtagttccaacaaaacaatatagaacacagagagatctatcacttgcatattccccaggtgtggcaattccttgtcaagagatccaagataaaattgaaaatgtttataagtacacaaataagggaaatttagttgctgtaatttcaaatgggacagcagttttaggtcttggaaatattggtcctgaagcatcaaaacctgttatggaagggaaagcactacttttcaaaatttttgctgatatagatgtttttgatattgaaattgacgcttcagatcctgacgaattcataaaggccgttaaatccatttcaccaacatttggaggaattaatcttgaagacattaaagcaccagaggccttttacattgaacaaaaacttaaggaagagttatcgattccggtaatgcatgatgatcaacatggaaccgcaattatttcatgtgctgcacttttgaatgcacttgaattagccaacaaaaaaattgataaaataagagtagtagtttctggagctggagctgctgcaatttcatgtacaaagttatataagtcttttggagttaatgagaaaaatattgtcatgatcgatagtcgaggtgtaatcaataataaaagggaagatttgactgaagaaaaaaaggaatttttaacaaatagaaaaattaatactttggaggaggcaatggttaattcagatgtatttattggtctttcccaggggaatatacttacacaaaagatgttgctttctatgtctaaaaatccaattgtttttgccatggcaaatcctgaccctgaaattaattatgatcttgcatgcaaaactcgtgacgatattataatggcaactggaaggtctgatctcccgaaccaagtgaataatgttttaggattcccatttatttttagaggcgcccttgatgttagagcgaaaaaaattaatgaatcaatgaaaagagcagctgtattggctttggctgatcttgccaaggagcttgtacctgagcaagttaatctgc

SEQ ID NO: 203661 - DNA, 1216 bp, Unknown
  Bacterial polypeptide expressing nucleotide sequence isolated from the Sargasso Sea
gatgtatttttaggtttgtctgcaaaaaacatattggataaagatatggtaaaatctatgtctaaaaatcctatcatatttgcgtgtgcaaatcctgatcctgagattaaacctgaattggttgacgaagtaagatcggacgcaatagttgcaactggtagatcagattacccgaatcaagttaataatttaattggcttcccatatatatttcgtggcgctctagacgttagggcaaaggaaataaatgaggaaatgaaaattgcagctgcaaaagagatagctgcgctcgctcgcgaggaagttcctgatgaggtagtaaatgcttacggaggagatagacctcattatggaaaagaatatattatcccttccactttcgatcctaggttgataagtcgaatacctgcagcagttgcgaaagctgctatgagtagcggtgttgctagaaaacaaatttcagatattgaggcttataaagatcagttaagtaaccgacttgatccatccatgagtatcatgcaaggaattaatgcccaggtaaaaaaaagacccaaaactgttgtttttgctgagggcgaagatcagaatatgctcaaagcagcagtagcatataaaaacagtcgattaggaactcctgttgtaattggaaatgaaaaaagagttaaagagcaattgaaagaaataggtttagatgaaaattacaaaattaaaattgttaattctactaacaaagaaaaaagagagatatatacgaaaaaattgtacgcaaaattgcaaagaaaaggtctactagagagagatgtagacagattaataagaaatgacagagttatttggggatcttccatggttgaatgcggagatgcggatgcaatggtaacaggaaatatcagacattacgctgcatcaattgaaagtttaaaaaaggttgttgaggctagacctggtgaaatactattcggtttgaacttactaattactcctaaaaaaactgttttcattgcagacacacaagtaaatgactttccatctgcggaacatttgataaaaattgcaacatcaagtgtgagggtagctagattattcggatttgaccctaaagtagcgtttttatctcattctacatttggcaaaccttcatccagaaatacaaaacatgtaagagaagctattgaaattttaaaaaagactaatgttgattttgattttgatg

SEQ ID NO: 203662 - DNA, 1024 bp, Unknown
  Bacterial polypeptide expressing nucleotide sequence isolated from the Sargasso Sea
aatattactatgtttggatcgtaaaggtgttatttataaaggaagagataatttaaataagtggaaatcttcacatgctatcaaaacaaaagatagaactttaaaagatgcaataaaaaatgctgatgtatttttaggactatcatctgctggaagcttaaaaaaagagatggttaaactaatggctaaaaatccaattatatttgcttgtgcaaatcctgatcctgagattactcctgaagaagtagaaagtattagagaagatgcaataatggcaactggaagatcggactatccaaatcaggttaacaatttaattggttttccatatatatttagaggtgctcttgatgtaagagccaaaataattaatgaagaaatgaaaattgctgctgcaaatgcaatcgcttctttagctagagaaagagtccccgatgaagtggtcgctgcaatgggtggtgaaagaccaacatatggaagagattacattataccttcaacttttgatccaagattaataagtgtaatacctgtagcagtagctaaagctgcaataaagagtggtgttgcaagaaaaaaaattgaaaattttgatatttattcagaacaactaaaacaaagactcgatccatctgttacaattatgcaaggtataaataatcaaatcaaaaaaactaataaaaaggtagtatttgcagatggagaagatgaaaataatttaaaagctgcaatagcatttaaaaatagtggtttaggtactccaataattgttgcaaaagaagaaataataaaaaaaaaattaaaagagattggttacagtgaaaattttaatattaaaattataaattcaaaaaacaaaattctcagagaaaaatatgtaaaatttctttttaataaacttcaaagaaaagaaggtttgttagaaagagattgtgataaaatgataagaaatgatagagtaatttgggcatcatgtatggttgaatgtggagacgcagacgcaatggtaaccggaaatacgagt

SEQ ID NO: 203663 - DNA, 511 bp, Unknown
  Bacterial polypeptide expressing nucleotide sequence isolated from the Sargasso Sea
tttagtaaataatgctggaattggaggaggagataacgttgagtcaacagatattgaaatgtggcataaagttcatgatgttaatctaaattctgtttttctaggatgtaaatatgctttacctttaatgagagaatctggcgatggctcaattataaatatttcatcaatgtctggaatagttgcttctcataacttagcagcttataactcttcaaaagcggctgttaggcatctatctaagtcagtagctcttcactgtgcaaagacaactaatttagtcagatgtaactcaatacatccagtttttgcaagaacagatatggttcaaacattaattgattctgcaccagatcgaaatatagaggagaaacttgtaaaacaaattccattgagaaagcttgcagaaccaattgatattgcaaatgcagcagtttttttagcatcagatgagtcgtcattcattactggaactgaattattaatagatggtggattaagcgcaacatag

SEQ ID NO: 203664 - DNA, 1074 bp, Unknown
  Bacterial polypeptide expressing nucleotide sequence isolated from the Sargasso Sea
tttttaggtttatcatctgcaggagttttaaaaaaagatatgataaaaaaaatggcaaaaaatccaattatatttgcctgtgctaatccagatccagaaataaaacctgaagaaattgaagaagttaggagtgatgcaataattgcaactggaagatcagattatccaaatcaggtaaataatttgattggcttcccatatatttttagaggtgcattagatgtaagagcaaaaactataaatgaagaaatgaaaatagcagcagtaaatgccatcgcatccttagctaaaaaaagagttccagatgaagttgtagcagccatgggaggagaaagacctaaatatggaaaagattatataataccatctacatttgatccaagattaataagtgttataccagttgcagttgctaaggcagctataaaaactaaagttgcaagaaaaaaaattgaaaattttgaaatttatactgaacaattaaaacaaagactagatccttctgtaacgattatgcaaggtataaactctaaaattaaaagaaatcaaaaaagagttgtttttacagatggtgaagatgagaatacattaaaagctgcaatagcatttaaaaatgctgaactaggaattcctataattgttgctaaagaaaaaattgttaaacaaaggttaaaagaaattggatatggagaaagcttaaatattcaaattataaattctacagacaaaaaaaagagagagaaatatgtaaaatttctttttaacaaacttcatcgagaagaggggttgcttgaaagagattgtgatagaatgatcagaaatgacagggttatttggggatcttgcatgcttgcatgtggcgacgctgatgcaatggttactggaaatagccgtagatatgctcaatcactagaaaaagttaataaagtagttgcagcaagaccaggtgaaataatgtttggactaaatatggttgtaaataaaggcaaaacagtttttattggagatactagtgttcatgagtatccttcctcagaacaattggcagaaattgcaatttcttcagcaagagtt

SEQ ID NO: 203665 - DNA, 517 bp, Unknown
  Bacterial polypeptide expressing nucleotide sequence isolated from the Sargasso Sea
ttgaatgtgcttgtgaacaatgccggtattggttttatggccgatgtagaggcaacaacagaggaagaatgggaattggttcacaaagttgatcttgattcagtatttcttggttgtaaatatgcaattccactgatgagagaatctggcaatggttcaatcatcaatatctcatccatatctggtattgttgctgggcataattttgcagcctacaacagtgcaaaagctgcagtaagacatctaaccaagtccgtggcacttcactgtgctagaacgactgatacagtgagatgcaacagtgttcacccagtttttgctcaaaccgagatgatgaaatcattttttgataaccccaatgatgagcttgtatcgaaaatagagagacaaatccctctcagaaagttagtcacagtcgaggatgttgccaactcaattctatttctcgcaagcgatgagtcaaaaatgatcaccggatctgagttggtaattgatggaggcttatcagctcaataat

SEQ ID NO: 203666 - DNA, 382 bp, Unknown
  Bacterial polypeptide expressing nucleotide sequence isolated from the Sargasso Sea
aatggaaatcacaagtttatttaacatatctggaaaagttgctgttgttacaggcggttcaagaggaattggagaaatgataactgcaggctttttagcaaatggagtaaaagtttatatttcagcaagaaaagctccggctttgattgaaaaggctagagaattgtctgaaaaatataaacaagaatgtataccagttccatgtgacttgagttcaatggatggtattgaagagtttgttaatcagattactgaaaaggaagatgccattgattttttagttaataatgcaggagctgcatggggcgaacctctagaaagtttctctgaaaaaggctgggataaggtcatggatctaaatgtgaagtctatttttttctta

SEQ ID NO: 203667 - DNA, 910 bp, Unknown
  Bacterial polypeptide expressing nucleotide sequence isolated from the Sargasso Sea
atgggtgttttaaatgggaaagtaggcgtcgtaactggagctggaagaggcataggaagagaaatctgcctaagttttgctcaagaaggagccaaagtagtagtgaacgatttaggtggagatagagatggttctggtgaaggaaaaattgctgatgaagtagttaaagaaatacaagacttagggggtgaagcggtcgcaaattatgactcggtaggcactgtagaaggaggagagaatctgttcaaaactactatagatgcctttggagaaatggatttcttagtaaataatgcaggaatactaagagatagaacactttataatatggaagaaagtgattgggatgcaatcatggaagttcaccttaaaggtcattacaattgcacacgcccttttgtaagatacataagagacgaaaatagattgaattgcagaattttaaatatgtcttctgtctcaggtctgtatggaaattttggtcaaactaattatggtgctgctaaagctggaatcgctggattctctagatcattagccttagaagtagctaaatacaaatgtactgtgaatactatttcgccgggtgctgctaccagattaaccatagatttaattgaagcagctggacgtgaatacgatgaaaatgattggactcaaggtcctgaacaaatagctcctgttgtaacttggctgtgctctgaagaagctaacgatataacctctcagataatacattcacaaggaggtattctaggaatcatgcaacaacctgcggtaattaaatcttttactagtgataatttatggactatagatcaattaaatcaattgatgccagaacttatagaggcaaaaaagcatcacgatgctgaagtagaagaaaaaggaaaaccgtcaaaaacttaaa

SEQ ID NO: 203668 - DNA, 799 bp, Unknown
  Bacterial polypeptide expressing nucleotide sequence isolated from the Sargasso Sea
atgagtgaactaaaaggaaaaacagcttttatatcaggaggttctagaggaataggagcgtctattgcttctctgttcttagacgagggtgcaaatgttttaattactgatattttagaagaggaaggtgttagagcagtagaaaatttatcaggtaaaaaagggaatattagttttatttcacatgatgtaacagacgaagactcatggaaagaagcagtttcatactgtattaatgaattcgggggactaaatattctcgtaaataatgcagggatttattcaagctctacagttgaagagacatctattgaagaatggaaaaaaatgttcacggttaatgttgagggagtatttttgggtacaaaatcagttcttgaggagatgaaaaagagcagcctagataatgatagtggttcaataataaatctttcttctattgcaggattggtaggatcagctggtcatggagcatacacagcttccaaaggtgcagttaaattatttaccaaaagttgtgcaattgaatttgcagatctagattacaacataagagttaatagtattcatccaggagtaatagaaacaaaaatgggagctcaagtagtgagcaacgtaagtgaaaacttagagttaggaaacaacgaagctaaagaaatgactgctttaatgcatccagttaaaagaatgggtgtgccagaagaaatagctcaattagcactattcttagcttcaaatagaagttcatttattactggagcagaaatggtaatcgatggtggttttacagctaaataac

SEQ ID NO: 203669 - DNA, 1510 bp, Unknown
  Bacterial polypeptide expressing nucleotide sequence isolated from the Sargasso Sea
tatggagttcaatgctgaagctgacgaccttttaatcgggattgtcggcggcggtgccatgggccaaggcatcgtgcaggtatctctcgaaggaatgatgcgtgttgttttatttgatgccaaaccagatggatctagtgaggcgagggatgctgtttttagccggttggaaaggaatgtagagaaaggtcgccttgaaaaagatgctttagataaaatgaaagagaacttgattattgctaaagatttctctggattttctaaatgcaacgtagtcgtagaagctgtttttgaagacatagacgtcaagcttgatgtttttaaagaaatagagacagaagttgcgccaaattgtataatagcatccaatacgtcctccctgccaattgcgtctcttggccgatattgtcagcatcaaaaccgatttgcaggacttcattttttcaatcccgtgccattgatgaaattagtcgaagtaattaaggggccctcaacggaagattgggtaattgagggtttaacgaatctaggaaaacgtatgggaaggacaccagtcgttgttagagacgctccgggatttttagttaacaccggcggtcgctcatttaccactgaagctttgcatattcttcatgagggggttgcaaacccagcgcagattgatgctgttatgcgagagtgtgcgcatttcagaatgggcccttttgaattaatggatcttacaggtgttgatatcaattatccggcttcgcttattatgcatgagcaaaactcttatgatcccagaataagaacagtcccctatcataagtcactttttgatgcaggccgttttgggagaaaaacagggcagggtaactatcaatataacagtgatggtgagataattgatgccccaagcccagattatgttgttacaggaaaagaagctgaaaaagtaattctcttatccgaagacgacatattcactgacatatttgccggttgtaatatgacaaccattgatgatgatgttagcccaattgttgtctcgcttcttggaatggattgtgcgacgtttgcgagcgtaaatcatatagatcatcggcggcttgtagcagtggataccacgggagacctctccagccgtattactctgatgactgctcccggatctaacctagctaatttagacgcagtggcgggattaattcgcaacaatggcagaaatgttacggcgataaaagactctcctggttttatagctcaaagaattagagctatgataggaaatctaggatgcgagatggccaatattcatcttgctagtcctgaggatatcgacttggcaatgaagttaggcttgaactatccgatgggcccgttggagatcattgaagattttggtgtaaagcaaactcatgagatcatgctaactatgcaagagattacaggtgatgatcgttatagacctagtccttggttgcggcgacgagcattgctgggactgactgcttacactccagcttga

SEQ ID NO: 203670 - DNA, 760 bp, Unknown
  Bacterial polypeptide expressing nucleotide sequence isolated from the Sargasso Sea
atgggcagattagaaaaaaaagtaattattgtgacaggagcagcgacaggacttggtctcgcggacgccagagctctgatcgcagaaggggccagagttataatgaccgatatcgatgtcgataaaggaaccgaagaggctaaagatctcgatgcgacttttttcgcgcaagatgtttccaaagaatcaagctggctgggattaataacctttgttcaagagaaattcggtcgacttgatggattagtgaataatgccggcattgcgcctattgcccatatagaggaagtaacagccgaatcatggcgacaggttttgggtattcatttggatggcactttgtggggctgccaaggagccataaaattaatgaaagagggtggcggtggttcaatagtaaatatgtcctcaacagctgctttaattgggattggctcatatctggcttactcagcagcaaaaggcggaattcgttcaatgactaagtcgatagcaatccattgccgacagaagaaactcaatattagatgtaactcagtccaccctggctcgattaatacggcaatggttcagcatgcgttacaagaactagttggtaaagatctgttggcagaggaagatcctgagaagactcgaatagaaatgggaattggagaaccggacgatgtcgctcatatgatagtttacctgatgtcagatgaatcaaagcatgtaaacggagcagagatggtcgtcgataacggagacacagtaatctagg

SEQ ID NO: 203671 - DNA, 901 bp, Unknown
  Bacterial polypeptide expressing nucleotide sequence isolated from the Sargasso Sea
tatgacaataagatttgatgacaaggttgcaattgttaccggagcaggtggtggaattggaaaacaacatgcacttgagttggcaaaacgaggagcaaaagttgtagttaacgatttaggtggttctgtcgatggcagtggagaaagtgatgcagccgaagaagtggtcgagctgattaaatctgatggaggagaggccatatctaatggagcaagcgttacagatataaatgctgttaaaaatatggttcaacaaacgatggacgaatggggaagaattgatattttagttaataatgctggaattcttagagataaaagttttcataaagtaacccttgaagattttgagctagtaatggacgttcatttccaaggaactttaaactgtacacattctgttttcccaataatgagggagcaagaatatggaagaattatatttaccagttcatcaagtggagtatttggaaattttggtcaaacaaattatggttctgcaaaaatggcaatgatcggactcatgaatactcttaaactagaaggtcaaaataagaatatctacactaattcaattacaccagttgcatacaccaggatgactgaaggcttaataccagaggactttggtcaaaaccttcaacctgaatttattacacctgccgttatttatttagctagtgaagatgctccaaatggtgcaattatggctgctggcgctggcgtcttttcaagaatatttattcatgaaactatgggagtttctcttggtatgggagaagatatgactccagaaaacattcaagctagttgggacaaaatttcagacatgaaagatgcaagagccttacaaaatggtggagaacaaactctaaaattttttgagctcataaataagtaa

SEQ ID NO: 203672 - DNA, 2263 bp, Unknown
  Bacterial polypeptide expressing nucleotide sequence isolated from the Sargasso Sea
atggataaaaacataaaaataaaacgtcaggaagctcttgattatcataaacaagacaagcctggaaaactagaggttcaagcaacaaaaactcttaatagccaaagagacttatcactcgcatattctccaggtgttgctataccttgtgaagagatacatgaaaaaccaactcttgcttatgaatatacttcaaaaggtaatttagtagccgtaatcactaatggcactgctgttttaggtttaggtaacattggtgctcttgcgtctaaaccagttatggaaggtaaatccgtactttttaaaaaatttgcggacattgattcaatagatcttgaagttgatagtattgatgtagataaatttataaattgcgttcaggttttagagccttcttttggtggaattaatttagaggatattagggcaccagactgttttctgattgaacaaaagcttcgtgaaaaaatgaacatcccagtttttcatgacgatcaacatgggacagcaattataactgctgcaggaattattaatgcatttcatctaactaacagagacataaaaaaagtaaaaatagtttgtaatggtgctggtgctgcctcgatagcctgtgttgagttactcaaagcattaggtgttccaaatcaaaacatcattttgatagatagaactggagtaatttataagggtaggactgaaaatattaatcaatggaaatctgctcatgctgttgaaacagattcccgcactcttgaagatgcactaatcgatgcagatgcatttattggtctttctataggaaatttacttaatgccagtaaaattaaatatatgaaaaaacaacctataatttttgctatggccaaccctgaaccagaaataatgcctgatgaagttaggaaggttttcccagatgcaattattgcgactgggcgatcagatttaccaaatcaagttaataatgttcttggatttccatatatttttagaggagcattagatgtaagagcaactacaataaatgaagaaatgaaaaaagcagcagtttatgctattgctaatttggcacgagaaaatgttcctgatgaagtaagtaatgcatatggtcaggataaaataacttatggagttgattatataataccagctccatttgatccaagactaattgttgaagtttcatcagctgttgctaaggctgcgatagatagtggggtcgcaactaatccaataaaaaatatagctctttataaaaaacagctggcgagaaggctaaacccaacagcaagcatgcttcaaagagtatctgataaagtgtctaatcttaagaaaagaattgtttttgctgaaggtgaagaagagagagctattaaatctgcgcttattattcaaaatagcaatttggggaagcctattttaattggaagagaaaaatatataaatgagactgcaaagaaaatagggctcgatggtattgctaatttagaaattcataatgcagcattatctgaaaaaaataatgtttatagtgattttttgttcaaaaagcttcaaagaaaaggatatttatatagagactgccaaaggatggttaaccaagatagaaatgtatttgggtcatgtatggttgcgatgggtgatgctgatagtcttgtaagcggattaacaaggtcatttaatgacactctaaatcatataactagagtgatttcttctaaagataataaaaatattattggtatgtgtatggttgtaagtcgtgataaaacagtttttattggtgatacaaatattattgaaagacccaaacctgaagagctagcggacatagctgaacagatggctttttcagtttctcaactgggctataaacctcgtgttgcatttactagttttgcaaattttggtagtccatcccttccttcaacatcatcagcccgagaagctgtaagagttcttgaaaatagatctgtcaactttgaatttgatggagaaatgtctgtagagattgctctcaactttcagctaatgaaaaaaaactaccctttttgcaaactgactgacgaagcaaatattttggtcatgcccggacttcactctgcaaacatatcttttaagttgcttcaaaaccttggtggtggatctgtaattggacctattttacttggcagtgagtttccaatgcaaatagttcaaatgggagcaagcgtcaacgaaataactaatgcagcaatcttcagcgcttatgatgctctttaat

SEQ ID NO: 203673 - DNA, 760 bp, Unknown
  Bacterial polypeptide expressing nucleotide sequence isolated from the Sargasso Sea
aatgagcacagatttaaacagacttgataatgaaataacgctgataacgggtgcatcaagaggcattggtgctggcattgcaaaattatttgctgagtcaggttcatatgtcataggtactgcaactacaaaagaaggagcagaatcaatatcacaaagattcaatcaagatagcactaaaggagaaggtatcgtcttggatgtttctaactctgatgatgtcaacaaaatgatcaaggatctaaaggaaagagacttattgccctcaatactcattaataatgcaggtatcagcttagaaagtcttttgatgagaataaaagaagatgattggaaaaagatcatagatacaaacttatcttcagcgttctatttatgtaaagctgctgtgtcaggaatgatgaaaaatagaaagggaagaatcatcaatattggttcggttgttggatccataggtgcaataggaaacgctcactatagtgctagcaaagctgcacttcttggttttacaaaatcactggcattggaagttggatcaagaggtattacggtcaataacattgcacctggatatatcacgactgatatgacaaaagacattaaaagtgaactgagtgatgcactaatggaaaagatccctatgaatcgatttggatctcctgaagatgttgccaaagttgctctttttttggcttcagaatcaggttcctacattactgggcaaactattcatgtgaatggtggaatgcacatggaataa

SEQ ID NO: 203674 - DNA, 742 bp, Unknown
  Bacterial polypeptide expressing nucleotide sequence isolated from the Sargasso Sea
tatgaggttaaacgaaaaagtttctataataactggagccgcttcaggatttggaaaaggtatagcaaaaaaattttctgaagaaggtgctaaattaatactagccgatatcaataaagatgaattagaaaaagtttcaaatgatttaaatcaagatttctttcaggttgatgttgcaagttctaaaagcatgcaggaattatcagaatatgtaattaaaaaatatgaaaccattgatattatggttaataatgcaggtataactcatttgccaaagcccatggaagatgtaacagaagaagaattcgataaagttttttctgtaaattcaaaatctgtttttttttgtgggaaattttttattcctcacatgaaaaaaagaaaaaaaggatcaatacttaatattgcttcaactgccggtctttctccaagacctaatctaaattggtataatgcaacaaaaggatggatgattaccgcaactaagactatggcaatagagcttgctccttttaatgtaagagttaattcgctcgcacctgtggcaggagaaactccacttcttaaatcttttttaggagaagatacgcccgagagaaggaatgcttttttatcaactattcctttaggaagattttctactccccaagatttagcaaatgcagcttgtttcctttgttcagaagaggccaatatgataactggttccatattagaagtagatggaggaaggtgtatatag

SEQ ID NO: 203675 - DNA, 2287 bp, Unknown
  Bacterial polypeptide expressing nucleotide sequence isolated from the Sargasso Sea
aatgaaaaaaaataaaattgaacattattcagataaagaggcccttgaatttcataatttaaataaatctggcaagattgagataaactcatctaagccaatgacatcaaaaagagatttggctttagcttattctccaggggtggctgcaccagttaaagaaatatacaaaaatccagatcgagcatatgattatactactaaaggtaatttggttgctgtaataagtaatggatcagcaattttgggattaggaaatttaggagcaattgcttgtaaacctgtaatggaaggtaaagcagtattatttaaaagatttgcagatatagacgctattgatttagaaattgatagcaaagatcctaaagaaatagttaatagtataaagaactttgcagttagtttcggcggtatcaatcttgaagatattgcagctccagattgttttgaaattgaggaaaatttgaaagaaatacttgatataccggtgtttcatgatgatcaacatggaactgcaattattacatcagcagctttgatcaattcaatacatattaccaaaaaaaaaatttcaacaattaaagttgttgtaaatggagctggtgcatctgctatggcttgttctgatctatttataaaattaggggtaaaaaaaaataacttaacgatgatagatagtaaaggggtgatcagttatgatagaaaaggattaaatagatggaaattaaaatacgcaaaaaaaacaaaaaataaaaatctaaatgacgcattacaaaatgcagatgtatttttaggtttatcttcagcaggtattttaaaaaaagaaatgattaaaaaaatggcaaaaaatccaattatatttgcatgtgctaatcctgatccggaaattttacctgaggaagcatacaaaatcagaaaagacgctataattgcaacaggaagatcagattatgcaaatcaagtaaataatttaattggctttccatatatatttaggggagcacttgatgtaagagcaaaaacaattaatgaagaaatgaaaattgctgcagctaatgccatagcaaaattagctagagaaagggttcctgatgaagttgctgctgctatgggaggagatagacctgaatacggaaaagactatattatcccatctacattcgatccaagactagtaagtgtaattccggtagcagtagcaaaagctgctataaaaagtggagttgctagaaagaaaattgaaaattttagtttatattctgaacaattaaaacaaagattagatccatcagtaactattcttcaaggtataaattctaaaattaaaaataatcagaaaacagtagtatttgctgatggagaggatgagaatactcttaaagctgcaattgcttttaagaatagtggattaggaactcccataatagtcgccaaagaaaaaattgttaaacaaaggttaaaagaaattggatatggaaaaaatcttgatattaaaatcgttaattcaactgataaaaaaatgagagataaatatgtaaagtttctctttcagaaaatgcatagaaagcaaggtcttcttgaaagagattgtgatagaatgatcagaaatgacagagtaatttggtcatcttgtatggttgaatgtggagatgcagacgcaatggttactggaaatacaagacgatactcccaatcattagaaaaaattaaaaaagtaataccccctcgagagggtgaaataatgtttggcctaaatatggtagttagtaaaggaaaaacggtatttattggagatacatctgtaaatgaatatccatcatctgaagaattggctgatattgctgtctcagcggcaagagttgtaagactatttggatttaatccaaaagtagctttcttgtctcattcaacttttggtcaacctataacaagtagaactaaacatataagagatgctgtagaactattaaaaaaaaggaaggtagattttaaatttgatggcgacatgcaacctgatgttgctcttgatgaagaatactctgatttatacccattttcagaaatagtaggcaatgcaaatattttaataatgcctggccaacatagtgcagcgatatcctataaaattatgaaaactttaggcggtgctaaagttattggtccattgttaataggtcttgctcaacctattgaaattgcgccattaagatcttccacttctgaaatactaaatttagcttctgttgctgcttattcagctggagtaatagattataaaaaaaaataa

SEQ ID NO: 203676 - DNA, 751 bp, Unknown
  Bacterial polypeptide expressing nucleotide sequence isolated from the Sargasso Sea
atgataaagtttgatctaagtaacagagttgcagttataacaggtggagctcaaggttttggatttgcaatagcggaaagattcattcaatcaggagcaaaagttgttatatgggatattgatgaacaagaagcaaagaaagcagttgaaaaaataaattcagaaaacataagttataaaattgtaaatgtatgtaactttgaagagatttctaaaagcttaaaagatattgagactgaacataataaaatagatatctttgtaaacaatgctgggataactggtatgaacaaaacagttgcagaatatcctattgaggaatgggaaaaagtaattcaattaaatttaaatgcagtattttactgttgcaaagcagttgttccttatttggaaaaaaataattatggaagaatagttaatattgcatcaattgctggaaaagaaggcaatcctaatgctggagcttatagcacatcaaaagctggagttattggtttaacaaaatctctaggaaaagaattagcattaaaaaatatagcagtaaattgcgtaacaccagcggcagcaaaaacaagaatatttgatcaaatgaccgaagagcatataaattacatgctttcaaagattccaagaaataagtttgcaaaagttaatgaattggcttctttagttacttatttagcaagtgaagaaaattcttttgctaccgcagcagtttttgacttgagtggaggaagagcaacttattagt

SEQ ID NO: 203677 - DNA, 802 bp, Unknown
  Bacterial polypeptide expressing nucleotide sequence isolated from the Sargasso Sea
aatgaaaaccaaggccgctgtcgcttttgaaagcaagaaaccactcgaggttgtggacattgatttggaaggacctaaagaaggagaggtgctagttgaaattaaagccacgggtatctgccatacagacgaattcactttgtctggcgccgatcctgaaggcatctttcccgcagttctgggtcatgagggtgcgggaatagttgttgatgttgggtctaacgtgaagagcgtgaaggaaggcgatcacgtaattccgttatatacgcccgaatgccagacatgcaatttttgtctcaacccaaaaacaaatttatgccaagccataagagtgacacagggtcgaggccttatgccagacggttcctcccgattttcataccagggaaaacagatttttcattatatggggacttccactttttcaaactacaccgtactacctgaaattgcattagccaaaattaataaggccgctgctttcgacaccgcttgctacgtagggtgcggagtaacaaccgggataggggcggttatttttactgctaaagctgaaacaggatgtaaagcggtagtattcggtctagggggaatcggcttgaacgtcattcaaggtctaagaatgatcggggctgaacaaattgttggagttgatctcaacaacgacaaaaaaacttggggtgaaaagttcgggatgaccgatttcgtaaatccgaccgcaatagcgggagatttaacagaacatatcatccaaataacagaagggggagccgactacagctttgagtgtgtcggcaatccc

SEQ ID NO: 203678 - DNA, 430 bp, Unknown
  Bacterial polypeptide expressing nucleotide sequence isolated from the Sargasso Sea
gttgaactccaaatctgtgcgaaaaatctttattgtcgtgttagctataaaaccacacaacttcaccctagagtttgaacaagagggagaaaaggtgaagacaagaaaagtcgcttttgtaacaggagcgagcagaggaataggtagagcatgcgcagtggcattagctcaagctgggtatgacgtagcggtttcggcacgaaccatgatcgatggcacagcattcctcgatgatggagtaactcctgtctcaggtggactcgacacaactgttgaccaaatacgtgcagctggccaagaaggccatccgatacaaatggacctactagatcgtgactccgttattcatgcagctgacgaagccatcgaacactttggccgtatagacgtgctcgtcaataacgccatctatcagggcccaggggcgatg

SEQ ID NO: 203679 - DNA, 751 bp, Unknown
  Bacterial polypeptide expressing nucleotide sequence isolated from the Sargasso Sea
aatgataaagtttgatctaagtaacagagttgcagttataacaggtggagctcaaggttttggatttgcaatagcggaaagattcattcaatcaggagcaaaagttgttatatgggatattgatgaacaagaagcaaagaaagctgttgaaaaaataaattcagaaagcataagttataaaattgtaaatgtatgtaactttgaagagatttctaaaagcttaaaagatattgagactgaacataataaaatagatatctttgtaaataatgctgggataactggcatgaacaaaacagttgcagaatatcctattgaggaatgggaaaaagtaattcaattaaatttaaatgcagtattttactgttgcaaagcagttgttccttatttggaaaaaaataattatggaagaatagtaaatattgcatcaattgctggaaaagaaggcaatcctaatgctggagcttatagcacatcaaaagcaggagttattggtttaacaaaatctctaggaaaagaactagcattaaaaaatatagcagtaaattgcgtaacaccagcggctgcaaaaacaagaatatttgatcaaatgaccgaagagcatataaattacatgctttcaaagattccaagaaataagtttgcaaaagttaatgaattggcatctttagtaacttatttagctagtgaagaaaactcttttgcgactgcagcagtgtttgatctaagcgggggaagagctacttattaa

SEQ ID NO: 203680 - DNA, 1150 bp, Unknown
  Bacterial polypeptide expressing nucleotide sequence isolated from the Sargasso Sea
tatggctgctaaattttttatcccttccgtcaacgtattaggcaaaggcgccgtcgatgacgctatcggagatatcaaaaccttaggctttaaacgcgcgttaatcgtgacggataaacctctagtcaagattggtctggtcggtgaagtggccgaaaagctcggtcaaaacggcattacttcaaccgtgtttgatggcgtgcaacccaacccaaccgtcggtaacgtcgaagcaggtcttgcactattaaaagccaatcaatgtgattttgtgatttcattaggcggtggttcaccccacgattgcgctaagggtatcgccctggttgccaccaatggcggcagcatcaaagactacgaagggttagaccaatccactaaaccacaactgccattagtggccattaacactactgctggtaccgccagtgaaatgacgcgtttttgtatcatcactgatgaagctcgccatatcaaaatggcgattgtcgataaacacaccaccccattattgtctgtgaatgaccctgagctgatgctgaaaaaaccagcgagcctcaccgccgcaacaggcatggacgcgctgacccacgcggttgaagcctatgtgtctatcgctgctaacccaattaccgatgcctgcgccattaaggccattgaacttatccaaggcaacttagtgaatgcggtcaagcaaggccaagatattgaggcccgtgagcaaatggcctatgcgcaattcttggcgggtatggccttcaacaacgccagcttaggttatgtacatgcgatggcgcaccaattaggcggtttctacgacctgccccacggtgtgtgtaacgccctattattaccccatgtgcaagaatacaacgctaaagtggtaccagatcgcttaaaagatattgctaaggcgatgggtgtcgatgtaaccaatatgacggatgaacaaggtgcagcggcggcgatcgccgcgattaaggccctatccgttgcggtaaacattccagaaaacctgacattactcggggttaaagcggaagatattccaaccctggccgaaaacgccttaaaagatgcctgtggtttcactaaccctaaacaggcaacccatgaagagatctgccagatcttcactaacgcgttataa

SEQ ID NO: 203681 - DNA, 144 bp, Unknown
  Bacterial polypeptide expressing nucleotide sequence isolated from the Sargasso Sea
catgagtctgcaaggtaaagtcgcactggtcaccggcgccagccgtggtatcggtcaggcaatcgctctggaactgggtcgtcagggcgctatcgtcatcggcactgcgaccagcgcctcgggtgccgagcgtatcgccgaaac

SEQ ID NO: 203682 - DNA, 796 bp, Unknown
  Bacterial polypeptide expressing nucleotide sequence isolated from the Sargasso Sea
atgcgggaaccggatctcatggaactgaaagataaggtggcgctcgtcactggtggtggcagcgggatcggtgcggagatcgcgcggcagctggctggagctggcgcagctgtcgtaatttcggacattaaccttgatgcggcagaagcagtgaaatcgggcatcgtcggtcaagggtataaagcaatcgccgtcgagcacgatgtgaccagcgcaacatccgccttcgagctcgtcgccaaggcggaagcggaccttggagcaattgatatcctggtcaacaatgccggtgtcagcggcaactcgccgtttcttgagatgacggaagaggagtgggaccgtgtcgtcaacattaatctgaagggacacttcctcactacccgcgcggttcttcctggtatggttgctcgatcctatggcagggtgatcaatatgtcgtcgatctgcggaaaacagggctacccaaacatagctcattactgcagttcgaagtttgcaattattggcttcacgcagagccttgcaaaagagttcgctgcatccggcataactgttaattctatctgccctgggattatcgacacgccaatcaaccagcatgtcgtcggccggatcgcgagtgatgccggtgtttctcgcgattccgcttggctcgacctagtctccaatatcccacaaggccatccgcagacttgcctcgatgtcgcaagaatgactctttatctggcttcggattgggcagccaatatgactggcggttcatatcatgttgatggcggctgcgtcatgacgtgac

SEQ ID NO: 203683 - DNA, 904 bp, Unknown
  Bacterial polypeptide expressing nucleotide sequence isolated from the Sargasso Sea
catgactataagattcgataataaggttgcaatcgttactggcgcaggtggaggcataggtaaacaacatgctcttgagcttgcaaaacgaggtgcaaaggttgttgtcaatgatcttggtggaagtgttgatggtagtggagctagtgacgcagcagaagaggttgttgagcttattaaggctgaaggaggagaggctatctccaacggtgcaagcgtgactgacttggatgctgttaagggaatggttgatcaaaccatgagcgaatggggaagggttgatattcttgttaataacgctggtattttaagagacaagagcttccataaagttactcttgaagactttaatcttgttatggatgttcattttcaaggaagcttaaattgcacacacacagtttttccaataatgagagaacaagaatacggtcgaatcatatttaccagctcttcaagtggagtctttggtaattttggtcaaacaaattatggatctgcaaaaatggcaatggttggattaatgaatacacttaaaatcgaaggtcagagtaaaaatgtttttacgaactccataactcctgttgcatatacaagaatgacagaaggcctaatacctgaagattttggtaaaaacttacaaccagagtatgtaactccagcagtaatctatttagccagtgaaagtgcccctaacggagccataatggctgcgggtgcaggcgttttttcaagaatatttattcatgaaactatgggtgtttcattgggtatgggcgaagatatgaccccagaaaacattcaggcaaattgggataaaatctcagatatggaagatgctagagccctccaaaatggtggagagcaaacccttaagttttttgagctaattaatcaaaagtaa

SEQ ID NO: 203684 - DNA, 760 bp, Unknown
  Bacterial polypeptide expressing nucleotide sequence isolated from the Sargasso Sea
gatggatttaaaagataaggttgtcgtcatcactggcggcgcgggtggtttaggcttagcaatggcgcacaattttgcgcaggcgggcgctaagttggcgctgatcgatgtggatcaagaaaaactcgagcgcgcctgtgctgatttaggctcagccaccgaagtccaaggttatgcgttagatattaccgacgaagaagatgtggtcgcaggctttgcttacatattggaagattttggcaaaatcaacgtattagtgaataacgccggcatcctgcgtgatggtatgttagtcaaagccaaagacggcaaagtgactgaccgtatgtcatttgaccaattccaatcggttatcaatgttaacctcactggcaccttcctctgtggccgtgaggcggctgcggcgatgatcgagtctggtcaagcaggggtgattgtgaacatttctagcctagctaaagcgggtaacgtaggacaatctaattacgcggcctctaaagcgggtgtcgcggcgatgtctgtgggctgggcaaaagaactggcgcgttacaatattcgtagcgcggcggtagcacccggggtgattgccaccgaaatgacggcggcaatgaaacctgaagccttagagcgtttagagaagcttgtgcccgttggccgtttaggccaagcggaggagatagcctctaccgtacgctttattatcgaaaacgattatgtaaatggtcgtgtctttgaagtggatggcggtatccgcttataa

SEQ ID NO: 203685 - DNA, 237 bp, Unknown
  Bacterial polypeptide expressing nucleotide sequence isolated from the Sargasso Sea
tttgttcagggcatggtcgctaacgcggtcactaagaacggcgccattctacgggctggtcaacaacgctggcatagtccgcgccgcgatgatcaacaagatgcctatcgatacctggcaggaggttattgacgtcaacctgtccggcgtattctactgtctgcaggcggtgggccgccacatgtatcagcgccatgaggacggcgacacgagtccggcgtccatcgttaacatctc

SEQ ID NO: 203686 - DNA, 889 bp, Unknown
  Bacterial polypeptide expressing nucleotide sequence isolated from the Sargasso Sea
aatggcacttaattggcgtttaccagttcatgttagtaggcaatatgatatttggcttggtagaaaatatttaggaggcaggtatatgagggtcattgtaacgggggctagcccaggtattggcgggtctacgattcgaaaattagcacaaatagcgaatcaaaagaatgagaaattacaaattgcagcttgtgagatcaggttaacagatgatctaaaatcccttgctgacgaagtaggaagattgggagctgacataaaggtgctaataggagatctctctgaggcacagtgtccagcgaaattagttgatgatgcactcaaggcgtttggtgggttggacgcagtagtgagtaatgcaggtataacgagccctgctcctctgatagatctttctgtgtcaaaatgggacaaattattgaatgtgaatacccgcgcaacgctgcttctggcgcaagctgcataccctgcgcttaaagagtcaaagggggccttagttgctgtcgcatccatgtcggggatgggagcgcacccaggtatgggggcatatagtcctagcaaagccgccttgatatctctttgtcaggtacttgcacaggaatgggcatgtgatggaataaatgtaaatacggtttcaccgggaatgatccgcacccctttaacacagaaagtttatgaaaataaccagatagccaaagaaagagccgctttagtgccatggggcagggtaggaaatccagaagatatatccaacgtaatcagttttctattgtcgtccgaggccaattatataacgggccagaatatcctagtagatggaggcttcgtcgattctttgtatcgtcatatcccaggtttacccgatagtagtgaaattgataagacttag

SEQ ID NO: 203687 - DNA, 931 bp, Unknown
  Bacterial polypeptide expressing nucleotide sequence isolated from the Sargasso Sea
gctggcgtcagccaggacaccttcctggcgtcggcctgggcgaaagtccgtaccctgcgcctggcagatggcccggatgaggttcacctggattccgtcgccaaacttgaattgcgtcagtatcgctgaaacagctgttacccagagtaataaggattcggaaatgactaatccattatttgatatgaccgggaaagtggctgttatcacaggctccaccaagggcattggccgggccattgccgaagaaatggcccgttgtggtgcccgggttgtgatctccagccgtaaggcggaagcctgtgaacaggtagccagtgaaatgcgggcccagggctttgatgccatggccatcgcttgccacgtcggcaagaaggaggacctgcaaaacctggtcgacaaaactaacgaagcctggggcaccatcgacgttctggtttgcaacgccgcgaccaacccggtgtatggtccgaccgcggaaatgaccgacgatgcctgggacaagatcatggacaccaacgtcaagggaaccttctggctcaccaatatggtgctgccacagatggccgaaaaaggctcaggttctgtggtgctgctgtccagtattgccggtattcgcggcaacaccactatcggcacttacggtgtgtccaaggcggcagaagctgccctggcgcgcaacctggccattgagtgggggccgaagggtatccgtgtaaacagcattgcgccgggcctgatcaagaccgattttgccaaagcgctttgggaagacccggttcgcgtaaagcgggcagaagacaaaaccccgcttcggcgcatcggtgatccgatcgatattgccggcctggctgttttcctggcgaccccggccagtgcctacattaccgggcaggtgattgttgccgacggtggtgaaaccatctgctga

SEQ ID NO: 203688 - DNA, 931 bp, Unknown
  Bacterial polypeptide expressing nucleotide sequence isolated from the Sargasso Sea
catgttgcggatatcgcccgctgagcggcccgcacgcacatcacaggagacaacgatgaccgattcccgaaccagcgtactggccggcaagtgcgcgctcgtgacgggcgcaagccgcggcatcggccgtgcgatcgcgcagcgcctcgcgtccgaaggcgcgaccgtcgtcgtgacggcgcgcagcctcatgcaatcggcgacgaccgccggcacgctcgccgaaacagttgcgctgatcgagcaggccggcggccgcgcgatcgcgcttgcggccgacctgtcgaacgcagccgagcgcgatgcgctcgtcgggcgcgcggcgcaagccgccggcggcctcgacattctcgtcaacaacgcgggcgtggccgactacgcgtgcgtcgacgcgatgccgatgacgatgttcgacacgacgatcgaacactatctgcgcattccgttcgcgctggcgcaggccgcgatcccgctgatgcgcgcccgtggcgcaggctggatcgtcaacgtcggctcggtgacggcgctgccgccgctgcggccgttcgacgatttctcgcgtgcgggcggcgcgaccgtctatgcggcggtgaaagcggcgctgtcgcgcttcacgcaggggctcgcggccgaactcgaagccgacggcatcgcggtgaatctcgtcgcgccgagcacggcgatccgcacgccgggcgccgcgcgctacatccctgaaggctatccgaccgaggacgtcgcgtatctcgccgaaaccgcgctcgcgctgtgccgcctgccggcgcgcgaacgcacgggcctcgtcacgcacagcctgcatttcccgctcgcgcagcaactcgcggtgcgctcgctcgacggccgcacggtgctgccgccgccggtggttcccgcgtatgcgcatccccacatcgacccgacaggactttga

SEQ ID NO: 203689 - DNA, 802 bp, Unknown
  Bacterial polypeptide expressing nucleotide sequence isolated from the Sargasso Sea
catgacgcaagcacatcgcggtaccgccctcattaccggcgcctcgtcgggcatcggcgccgtctacgcggaccgcctcgcgcgccgcggctacgacctgatcctggtcgcgcgcaaccgcgaccgcctggccgccctcgccgaccgcatcacgaacgagacgcagcgcagcgtcgagatcgtcgacgccgacctcaacaaccgcgccgcactcgccgccgtcgaggcgaagctgaagcaggatgcgagcatcacgctgctcgtgaacaacgcgggcatcggcacgcacacgccgctgctcgacagcgacgtcgacgcgatgacgcggatgatcgacctgaacgtaaccgcgctgacgcgcctcacctatgcggccgtgcccggcttcgtcgcccgcggcaacggcgcggtgatcaacatttcgtcgatcgtcgcgatctcgccggaaacgctgaacggcgtgtacggcggcagcaaggcgttcgtgctcgcgttcagccagtcgctgcatcacgaactcgccgacaagggcgtgcaggtgcaggccgtgctccccggcgcgaccgccaccgatttctggcagacgggcggcctgccgctcgagcacctgccgaaggaaatcgtgatgtcggcgaccgacatggtcgacgcggcgctggtcggcttcgatcgtggcgaactcgtgacgatcccgtcgctgcacgcgggtgacgaatgggccgcgtacgaggccgcgcgccgcacgatggcgccgcacctgtccgccgacacgcccgcgccgcgctattcgacggcaggctga

SEQ ID NO: 203690 - DNA, 721 bp, Unknown
  Bacterial polypeptide expressing nucleotide sequence isolated from the Sargasso Sea
atgtcatctcgcacctatctcgtcaccggcgcatcgcgcggcatcggcctcgcgatcagcacgttgctcgcacggcgcggccatcgcgtcatcggccttgcgcgtcacgcgcagggcatcgacttccccggcgagttgcgcgcatgcgatctcgccgacctcgaacagacggcggccgttcttgcacgcatcagcgagcagcacgatgtcgacggcatcgtgaacaacgcgggcatcgtgttgccgcaaccgctcgggcagatcgatttccagtcgctgcagaccgtgttcgatctcaacgtgcgggccgctgtccaggtgacgcaacactttgcggaggcgatgaaggcacgcggccacgggcgcatcgtcaacatctgcagccgcgcgattttcggcagcctcgatcgcaccgcgtattccgccgcgaagagcgcgctcgtcggctgcacgcacacgtgggcgctcgaactcgccgaacatggcgtgaccgtcaacgcggtggcgccgggtccgatcgagacggaactgttccggcagacgcggcccgtcggcagcgaagccgaacgcaaggtgctcgcgacgattcccgcacgccggctcggcacgcccgacgacgtggccgcggcgattgcattcttcctgtcggacgaggccggcttcgtcaccgggcaggtgctggccgtggacggcggcggcagtctcggcgggcgtagttgac

SEQ ID NO: 203691 - DNA, 715 bp, Unknown
  Bacterial polypeptide expressing nucleotide sequence isolated from the Sargasso Sea
atggatatcaagaacgccaccgttttcatcaccggtgccaatcgcggcctgggtctggcttttgcgcgagaggcacgtcgtcgcggagcggcgaaagtctatgcgggcatgcgcaacacgagcggtttcgacgagccgggcgtggtgccggtcaggatcgacgtcacggatccggcatcgatcgccgaggccgcgaaactggcggccgatacgacgctgctggtcaacaacgcggggattgccgcgctgatcgacgggcctctggcggccgacatggaagcgcaatccgcccgcatgttcgatacgaactactacggcgtggtgcgcgtcacacaggccttcgagccgatcctggcggcccggccgcatgccgccatcatcaacgtgctgtccgacatcgtgtggcttccgcggccctatctggcgccgtatgctgcgtcgaaggccgccgcgtggagttacacgaaccagcttcgcctgtctctgcacgagcgcggcatccaggtgctcggcctgcacgtcgggttcgtggataccgacctgacccacggcatcgacgtgcccaaagccagcccggaggacgtcgtgcgacagacttacgacgcgctcgccctcggcaagagcgaggtgatggccgacaagggcaccgcgttgctgaagagtacgctcgcggccgagatacccggctacatcacgccgccggcagggctttgaa

SEQ ID NO: 203692 - DNA, 209 bp, Unknown
  Bacterial polypeptide expressing nucleotide sequence isolated from the Sargasso Sea
tatgagcaagatatctttaataggagctggacaaattgggggaacattagctcacttgattggaaccaaagaattatcagatgaagtagttttatttgatgttgcgagcggtatagcaaagggtaaagcactagatattgcacaatcatcatctgtggatggatttaatgtaaaattttcagggaccgataattataaagatataaaaa

SEQ ID NO: 203693 - DNA, 748 bp, Unknown
  Bacterial polypeptide expressing nucleotide sequence isolated from the Sargasso Sea
cctgaattcatttcaactgaatgaccaacatgccctggtcaccggggcgggacgcggactgggcgaagcctgtgccctggctcttgccgaagcaggtgccgaaatcacactggtagcccgcagcagcgaccaactggaatccgtggcaaaacagatccgtgattcaggaggccaggcttccgtccatcctgcggatctgaccaagatggaggaaatccgtaaactcgaagacctcgggcctttcaccattctcgtcaacaatgccggcatcaaccgtccccaaagctttgagcacgttaaagaaaacgatttcgatgatgtcctcgatcttaacgtgaaatctgctttttttgttgcccaaagtgttgccagggggatgatccaggcaggacgcggaggttcgatcatcaatatgtcgagtcagatgggtcacgtcggcggacgcaaccgatcggtctactgtgccaccaaacatgcgatggaaggcttcagtaaagggatggcactggacctcgcggcacacaagatccgcgtcaacaccgtctgcccaactttcattgaaaccgcattgaccaagcctttcatggaaaaccaggaattcatgcaggatatcctcaatcgcattcccctcggccatgttgggcagccagaagatgtggcaggagcggttctgtatctggcctcggatgcaagccgcctggtcagtggttcttccatcaaggttgatggtggctggaccgccgtttag

SEQ ID NO: 203694 - DNA, 802 bp, Unknown
  Bacterial polypeptide expressing nucleotide sequence isolated from the Sargasso Sea
tatggcggttgaacactcaagcttaaaaggcaaggtagggctgatcaccggctccaccagtggaataggtttagcaacggcgcatgtgctggcggagcaaggttgtcatcttatcctgcacgggttaatgccagaggccgaggggcggcgcctcgcggcggagtttgccgagcaatatcatattcacacttatttcagtaacgccgatctgcgggatcccgagagtattcatgcctttatggatgcgggcgttaaggcgttgggcagtattgatattttggtgaataatgccggtattcaacacactgagaatgttgctcatttcccgattgataaatggaacgatattatcgccattaacctgtcctcggcctttcataccattcaacaagccgtgcctgcgatggccgaaaagcgttggggccgaattatcaatatcgcctcggtgcatggcttagtggcctcggtcaacaaggcggcctattgtgcggctaaacacgggattgtcggcttaaccaaagtcgtggctattgagtgcgccgagcaggggattaccgtcaatgcgatttgccctggctgggtggatacgccgctgatcaacaagcagatcgaggccatcgccagcaataagggtttaagttacgacgaagctaagtaccagctcgtcacggcaaaacaacccctgccagagatgctcgacccacgtcagattggcgagtttgtgctgtttttatgtagcagtgcggcgcggggaattacgggcgcatcgctggcaatggacggcgcttggaccgcgcaatag

SEQ ID NO: 203695 - DNA, 202 bp, Unknown
  Bacterial polypeptide expressing nucleotide sequence isolated from the Sargasso Sea
aatgagtaaaatatctttaattggtgcaggtcaaattggtggaactcttgcacacttgattggaacaaaagaacttgttgatgaagttgttctttttgatgtagcaagcggaatagctaaaggaaaagcattagatatcgctcaatcatcatcagttgatggttttaatgtaaaatttttgggttcagatgattataaggat

SEQ ID NO: 203696 - DNA, 2791 bp, Unknown
  Bacterial polypeptide expressing nucleotide sequence isolated from the Sargasso Sea
gatgttgatagaagaaccagacacgcagttttttttgattacaacaaggatggtttacttgacctatatctactgaatcatccaccaaacacaggaaatttttcaccttttttaggaactgacatgaaacttccagagtataatcttcaactttttgaaaataaagaaggttactttgaagatgttacagcaaaagctggattggatcgatccggttttcctaatgctgcagtaataggagattttaataaagatggttggccagatatatatgtagcgaatgattttgaagctcctgattttctttactataataatcaagatggaacctttgactacaagactgaatcatctttaagacatacatctttttacagcatgggagttgacgcagctgatataaataatgattcacatttagatttgatggttttggatatgactgcagaagataattttagactaaaatcaaatatgagtggcatgaacccagattcgttctggaaagttgttaatgatggaggtcattatcaatatatgtttaacaccctccaattaaacaatggtaatgaaacctttagcgacatagctcaatttacacagacagctgctacagattggagttgggctagtttggttgcagactttgataatgatggaaataaagacatttatatcacaaacggcttgctaagagatattagaaatactgatgctgataaaaaaatatcagatttggtttcaaaaacttttaataaatacatcattgaaaatcctgataattcaaatgtgagtatttgggacgtcattgatttacaagaacttttaaattttctaccatctcaaaaactcaaaaactatttctataagaactatggtgatttgaagtttaaaaatgaaattgatcaattaggtcttggagatccttcattctcgcatggtgcatcatacgctgatttggataatgatggtgatttagacttaatcgtgagtaacgtaaatgagaaagcatttatctatagaaataattctgataaaaactttgtaaggttaaaacttgaggatgatagtcctacatttggatcaaaagtttcgatttatcacgataataattttcaatttttcgaaacaactaatgttagaggaatatattctacaagtgagaatgttgttcattttggaatcaataactcaaaaacagtagatagtattttaatcgagtggcctgaccaatccacacaaaaaattttaaagccaaaagtcaatagactacttaaaataaagaaaaaaggagcaaaagcagatttagaattaattaaagaaaattcgactaagtttcaagaggataaatcaattttaaaatatgttcatcaagaaaattattttaatgactatgataaacaagttctattgcctcataaactatctcaattgggacctgcattagcaaaaggagatataaatggagatggtttagaggatttatttataggaggtgcttctggacaagaggctacagtatatattcaaaatgaaaatagttttgataaagttggaaatgatatatggacaaaacataaagcactggaagatattgatgctgtattttttgactcagataatgatggagatttagacttatatgttgtttcaggcggaaatgaatttatgcccaattcaagcacatatttggataggttatatataaatgatggtcttggaaattttgattttagaagagatttattgccttcaaattataaaagtgggtcagttgttaaaccccatgacttcgataatgatggtgatttagatttatttattggaagcagaatgaaaccgtggaattatcctgaacctgcctcaagttttatgcttataaatgataacggaaattttataaactatgatgacaaaaatcaagcatttaaagatttaggactagttacagatgcagagtggtttgattttgataacgatggagattctgatattgtcgttgttggagaatggatgccaataacagttattgtaaatcaacaaggtcaatttacaaaacaagagctaaacactaacctaggatgttcctcaacaggttggtggtatagtgtcgaagttggtgatttaaataatgacaatcttcctgatcttattgtcggtaatttaggtttgaattataaatacaaagctagtgttgatgagccttttgaagttttttatgatgatttcgatgacaatggtaaaaaagatattgtactagcctattataattatggaatccaattccctttgagaggattttcctgttcatcacaacaagtacctgatttacaagataagtttaagaagtacgatatttttgcctcacttgatgttcaacaagtatatggagaggaaaatctggaaaatgctttaagactttctgtaaatacatttgaaagtgctacacttataaataataaatctttttttgattttcgtcccctgcctaattatgcgcagttctcatctgtaaatgatattataatcaaagattttgataatgataaggtgaatgacttactaattgtaggtaatatgtatcatgctgagattgaaactgcaagaaatgatgctggaaatggtctacttcttaaaggaaatggagatggaagttttaatgaaattccaacattaaaatcaggcttttttacacctggtgattcaaagaaggcaatatctttaactttaggaaataaggaaattatattagttgcgaataatgatgaccgcctccaaatttttaaataac

SEQ ID NO: 203697 - DNA, 3559 bp, Unknown
  Bacterial polypeptide expressing nucleotide sequence isolated from the Sargasso Sea
atgcatcttaaaagaaaactaaacttattattttctgcattttcaacagttattttagttgcatgcggaggcggtggcggtagttcagcaccaacaccagcaccaacaccagcaccaacaccagcaccaacaccggcaccaacaccagcaccaacaccggcaccattggaggcaagtttattatcaacaactattgctggaagtgcatatgacattatccaaatttcaaatgctaattcaggatcaacacccggcggtacagcagatgcaggcataaaaacagtatatgtttatacgccagatggttctgataatggagttgcaacttatgagggtactgtatggccttatgtaacatatagtcaggctgcaggaactatcgttgtacctgatagtattactgctacgttctctgtaaattcagaaaaccatgtcttaatcaataaccagcctgtatatcaatatgcaggagatgatgcaggttcagatgtaaatgggaatggtaatggtggtgtttggtatgcaattcaagcagatggaacaagcttagagccagattcaacaccagcaccaacaccggcaccaacaccagcaccaacaccagcaccaacaccagcaccaacaccagcaccaacaccagcaccaacaccggcaccaacaccggcaccaacaccggcaccaacaccagcaccaacaccagcaccaacaccagcaccttctggcctagctgtgggtggtgacataggtgtaagtggaccttttgctttagattcagatgttaatagcccagatattaccaatgtagaaaatggatttactaatagggctcaatttgtagaggctaatgcaacaattcttggttggatgggaaatagcgatgagttagaagtattccaagttttagctcaaagtggaggttcagtagctttagagctagaaataataaatcatgatggcgatagtggtgatacaacaaataacactgatatagatatttatgtagttgatactgaagaggtaactgtttcttctggagcaggtttaggaaaaactgaaacagcagagatacctgcaggtaatgggactatttattatttgattatagatcactggagaggttataacactgtaccttcatcttacgtaataactcagacaccaaattttgcaacttcaactgagcaaaaagaagcaactgacagatcaaatgccgattttagtttagataaaatattagttgtcaaaaaatcaatgccacctgaaatggttatcgattttaatgcaactgaaaatgagcttctagagtcaatggggaatagatcaggaggattagtcgaaattacccctgaagaattaagcaatatggcagggctaccagcagatgaaagctattcttcaagactgaaagaagacttccctgatgctcataaaaaaggtagatggcagaaagctttatctattttgcagtcccgatcaccaagtttagctattgagccagattggaaaatttatacccatgcagacccatttgtagctgatcctagttataacacttatcaatggtggaattttgatgtaaccaatcttccagaaggtttagatattattggtcaagaagttaagccagtaaatgttggtgttttggactcaggaagccctagcctagatgatccaagttttgagagatcaactttccttcctgattggggttgggatatggaagacaatgatactaatccaatggatgaagaatttttactatcagactttagtcatggaattcatgtcggcagtacaatagcaatgctgaatgatgggttagatggcaatggaatgggagcaaggataactccaattagagtttgttatcagggtggctgtggaaatacttatgatgcttatttatttgttaatggtgatgccaatcaatctaatacttatttcaaggaaagagtaggagataatcttggcataccagtaaatcaagtaactgaaaaattacattctataaatatgagttatggtggtggcggtagtcaaacctcgcaagcttgcgttaaattagcagagctatcagaaacaggcatattagttgtctcatcatcgggtaatagtggtataggttctattggatatccttcatcttgtcctactgtatattcaattggtgcaactaatggaacagatagaagatcaagttactcctcaacaaatcaatatatagattttgctgccccaggtggagaatattcagattggaatgctgatggtgttgatgatttagtttatgcctatgcttattgggaaaattatgtaatgaatagcaataatggtaattatatgattggcgctcaaggcacatcaatggcttcacctcatgctgctggaatacttggactaataaaatactactatgaagaagtagctaaaccattccaaacaaatacttcgttaccaacagtactcaaatatacccaagtagataaaatgttaagagctaacttacttactaatgatgtaaataaagaagcaagagataatgatccaactgctagacctggctgggatgaacatttaggttacggaataattgatttagagaaaagtcttaaatctattaatgcctttaatagtggttattttacaagttttgataatcttccttattatgaaggcccatcattagtagctttagatgcagctagttcttatgaaggaacatttactataactcctaatggtgcagctggcccaggattcaatacagtttcatatacttatgtagacgaatttttagatgtgactgataatggctcaacctttacagttaagaaagatccagattattcatgggcaggctgggtaaatacaccaatcacttttagcttccctatggaagcaggggcaggagttccatatgatggttatgaattgctatcagttggagttaatgtgatctttcatgtaataggagatgcatacgatgttaatttccctactcttaaagcccgacttcttgatgatgttggagtattagtcgctgaatctacttcttcagttactgatggagtgggagcgtttgtatttgatgaattgacagcaggaacttatagactttctattggttcagatataaatggagataattcatggggtggtcctggagaaatgtctggttctagtgatttatttcaaattacagatacaaatgtcactgttgatataaatcttgctcctgagaaaacgggggttgcaaatagtgcacctgtaatcacatccaacccaacaactgttgctttcgtaggatcaacatatatttatggtgtagatgcttccgatgctgatgatgatgatcttacatatacattaactgtttatgattcatcaggagatgaggttgattctttcttatcttttggtgcatttccatggccggcaacaactctatcagggacaccaactgctgatgatataggtgtgtatacggtaagaatagtagttacagatggtactgatgctgctgttcaagaatacagcctagaagtcaaacaaagttaat

SEQ ID NO: 203698 - DNA, 172 bp, Unknown
  Bacterial polypeptide expressing nucleotide sequence isolated from the Sargasso Sea
atgacaaaaatatctttaattggtgcaggccaaataggtggaactcttgcacatttaataggaacaaaagaactagttgatgaagtagttttatttgatgtagctagcggtattgcaaaaggaaaagcattagatattgcacaatcttcatctgtagatggtttcaatgtta

SEQ ID NO: 203699 - DNA, 913 bp, Unknown
  Bacterial polypeptide expressing nucleotide sequence isolated from the Sargasso Sea
catgaatcattgcatatatgacattgaggatgagttcagtcgaagccagaattctttccacgaaccgacacccggtcggctcaattcacggaaaggaaaaatcatgaccacttccacgaaaggcaccgcgctgatcactggcgcatcggctggcatcggtgcgatttacgcagaccgccttgcgaaacgcggctacgacctcgtcctggtagcgcgtaaccaggaccgtctgaacacgctcgcgcgccgcctcatggccgaaaccggccgctcggtcgagaccgtcgccgccgatctgaacgacaaggcggcgctcgcgaagatcgaagacatcctgcgcgagaacagcaacatcacgatgctggtgaacaacgcgggcatcggctcggtcgcatcgattctcaacggcgacgtcgacacgatggagtcgatgatcaatctgaacatcaccgcgctcacgcgcctgacttacgccgtcgcaccggtgttcgccggcaagggcacaggcaccatcatcaacatcagctcggtcgttggtatcgcggtcgaactgctcaacggcgtgtacagcgcatcgaagtcgtatgtgctgagtttcggtcacacgcttcagcgcgacctggcggacaagggcgtgcgcgtgcagaccgtgctgcctgcagcgacggcgaccgagttctgggatgtggccggctacgcgaagcagaaggaggccgccagcacgatgacggccgacgacctggtggatgccgcgctcgcgggcctcgatcagggcgagctcgtgacgatcccgacgctgcacgacggcgacggctggacgcaatgggaagcggctcgccgcgcactcactccccagttcgccaacgccaaggccgctccgcgctacatcgcggatgccgggaccggcgcttga

SEQ ID NO: 203700 - DNA, 1111 bp, Unknown
  Bacterial polypeptide expressing nucleotide sequence isolated from the Sargasso Sea
attagcatcaaaaccagttatggaaggaaaggcagttttatttaaaagatttgctgacatagactcaattgacattgaggtaaacagtaatgaccctgacgagataattaatacaataaaaaatatttctggaacttttggaggaattaatcttgaagatatagcagctccaaattgttttataattgaaaaaaaattaaaagaacaactggatattccaatatttcatgacgaccaacatggtactgctataatcacaacagctgctctaattaatgctttagatatttctggaaaaaaaattgacaaagtaaaggttgtaataaatggagctggagcttctgctatagcttgcgcgaatctatttaaaacacttggagtcaaaccaggtaaccttattatgtgtgacaggaaaggcgttatctacaaaggaagagacaaagtagataaatttaagtctgcttttgcaactgatacaaaatttagaaatttaaaagatgctatgaaaaatgctgacatatttttaggcttgtctgcaaaagatgtcgtttcagttgacatggttaagtccatggaaaaaaatccaataatttttgcatgtgctaatccagacccagaaattaagccagaaataattcatgagattagatctgatgctatagtagccactggaagatctgattatcctaatcaagtaaataatttgataggatttccatatatatttagaggggcgcttgatgttagagctaaagaaataaatgaagaaatgaaaatggctgcagccaaagccatagctttgcttgcgagagaggaggttccagatgaagttgtttctgcatatggaggtgaaagaccaaaatatggaagagaatatattattccttctactttcgatcctagattgattaggattattcctgctgctgtagctaaagctgcaattaaatctggtgtagcaagaattaaaattaaagattttgaaaattacaaagagcaactaagttatagactggatccctctttgtccattatgcaggggattaacgcttatgtacgaaaaaaaccaaagactgtagtttttgccgaaggggaggataaaatatgctaa

SEQ ID NO: 203701 - DNA, 808 bp, Unknown
  Bacterial polypeptide expressing nucleotide sequence isolated from the Sargasso Sea
cggtatcgcgcagacctgttcggtgcgcggctatgacgtgataatgcaggacgtctccgacgaggtggtccaaaaaggattgggcagcattcagaatagcctcggacgccttctcgggaaagagaaaatcagccaggccgaccacgacgacgcgttgggacgaatccagacagcgaccgatatcagcgcgatgtccgggtgcgatcttgttgttgaagcagcgagcgaaaacatggacattaagatggggatcttcccgcgtctgaacgagatctgtcccgatcacaccatcctcgcatccaacacctcatcgctttcactgacccgcatcgcggccggaagcggtcgtcccgatcgggtggtcggaatgcacttcttcaatccggtaccgctaatggctctggtggaagtgattcgggcgctacagacttcggacgagacttacagtgcgatcgacaccctggcgcgtgatcttggcaagacccccgtcagcgtaaaagacagccccggctttgtcgtgaatcgaatgctggtgccgatgatcaacgaggcggttttcattctttacgaaggcctcgcccaagctgaagatatcgacgccgccatgaagttaggggcagcccatccgatgggtccactgacactagccgatatgattggcctggacgtgtgcttgtgggtaatggatgtgctgcatcaggagtttggggattccaagtttcggccatgtcccctgcttaaacagatggttgatgccgggtatcttgggcgcaagagcggtcggggcttttacgactacagcaaataa

SEQ ID NO: 203702 - DNA, 1541 bp, Unknown
  Bacterial polypeptide expressing nucleotide sequence isolated from the Sargasso Sea
cttggctttagcatattctccaggtgtggcagcaccagttaaagaaatttataaaaatccagagaaagcatacgattatactactaaaggtaacttggttgcggtaattagtaatggatccgcaattttagggctaggtaacttaggagcaattgcatcaaaacctgtaatggaaggtaaagcagtattgtttaaaagatttgcagatatagatgctattgatttagaaatcgatagtaaagatcccaaagaaatagttaatagtataaaaaattttgctgtcagttttggaggtataaatcttgaagatattgctgcgccagaatgttttataatagaggaaaatttaaaaaaaatacttgatataccagtatttcatgatgaccaacatgggactgcaattattacgtctgcagcacttattaattcaattcatattactaaaaaaaatatttctaaaataaaagttgttgttaatggtgcaggagcatctgccatggcgtgctcagatttatttatgaaattaggggtaaaaaaaaataatttaacaatgatagatagcaaaggggtaattaattttgatagaaaaggattaaataagtggaaattaaagtatgcaaaaaaaacaaaagataaaaccctaagtgatgcattaaaaaatgcagatgtttttctaggattatcctcagcagggattttaaaaaaagaaatgatcaaacaaatggcaaaaaatccaattatatttgcatgcgctaacccagatccagaaattttaccagaggaagcttacaagattagaaaggacgcaattatagcaactggtagatcggattatgcaaaccaagttaataatttaattggttttccatatatatttagaggtgcactcgatgtaagagcaaaaacaataaatgaggaaatgaaaatttccgcagctaatgcaattgctaagttagctagagaaagagttccagatgaggtagcggcagcaatgggaggagacaggcctaaatatggtaaagattatattattccatccacatttgatccaagactaataagtgtaattccagttgcagtagcaaaagccgcgataaaaagtgaagttgctagaaaaaatatagaaaattttaatcaatactctgaacaattgaaacaaagattagatccatcagtaacaattctacaagggataaattctaaagttaaaaaaaatccaaaaactgtagtgtttgcagatggtgaggatgagaatacgcttaaggctgctattgcatttaaaaatggaggactaggaactccaataattgttgcaaaagagaacgttgttaaacaaagattaaaagaaattggttatggggaaaaccttgatattaaaattgtgaattctactgataaaaaattgagacacaaatatgtaaaatttctttttaaaaaaatgcatagagagcaaggtttgcttgaaagagattgtgatagaatgattagaaatgatagagtaatttgggcatcttgtatggttgaatgtggagatgcagatg

SEQ ID NO: 203703 - DNA, 1120 bp, Unknown
  Bacterial polypeptide expressing nucleotide sequence isolated from the Sargasso Sea
aatgaggttcataaatcatattagtcttaaatttaccttaatagtatatttaatttacctaatgaaaaaaaacaaaattgaacattattcagataaagaggctcttgaatttcataattcaaataaatctggcaagattgagataaactcatcaaaaccaatgacatcaaaaagagacttggctttagcttactctccaggtgtggcagctccagttaaagaaatttttaaaaatccagagcgagcatatgattatactactaaaggaaatttggttgcagtgataagtaatggatctgcaatcttaggattaggtaatttaggagcaattgcatcaaaacctgtaatggaaggtaaagcggtattatttaaaagatttgcagatatagatgctattgatttagaaattgacagtaaagatcctgaagaaatagttaatagtataaaaaattttgctgtaagttttggaggtatcaatcttgaggatattgctgccccagagtgttttattattgaggaaaatttaaaaaaaatacttgatataccggtatttcatgatgaccaacatggaacagcaattataacatcagcggcgctcattaattcaatacatattactaaaaaaataatttctaaaataaaagttgttgtaaacggtgctggagcatctgctatggcttgcacagatttatttataaaattaggagtaaaaaaacaaaatttaacaatgattgatagcaaaggtgtaattagtttagatagaaaaggattaaataagtggaaattaagatatgcaaaaaaaacaaaagatacaactctaagtgatgcattaaaaaatgctgatgtttttttgggactatcatcagcaggtatcctaaaaaaagaaatgattaaaaaaatggcaaaaaatccaattatatttgcatgtgctaacccagatccagaaattttaccagaggaagcttataagattagaaaagacgcaataatagcaactggtagatcagattatgcaaaccaggttaataacttaataggttttccttatatatttagaggggcgcttgatgtaagagcaaaaacaataaatgaagaaatgaaaattgctgcagctaatgcg

SEQ ID NO: 203704 - DNA, 595 bp, Unknown
  Bacterial polypeptide expressing nucleotide sequence isolated from the Sargasso Sea
aatattggagaaaatcatttttattataaagtagacttatcaaacgaagataatcttcaaaaatgtttagataatgtttcaaaagagcacaaaggtatatcagtaatcgtgaataatgctggaataacgcatgatggtctaattatgagaatgaattatgaacaatggtcaaaagtaattcaaactaatttaagctctaattatcaaattattaaaaccttattacctaatatgttatctaacaaatatggtaaaataattggaatatcatcaatagttggttccacaggaaatccagggcaggcaaattatgtagcatctaaatctggtttaagcggtctgtataaatcaatagctttggaagtagcaagaagaaatataaatgtaaacttagtttcccctgggtttatttccacatcaatgacagaaaaattaaatgataatcaaaagaatgattatctttcaaaaatcccaatgatgaggtttggaaatcctaaagatgttgcaaatttagtattttttttatcaacagatgatgcttcatatattacagggcaaaatttccatgttaatggtggaatgttaatggtttaat

SEQ ID NO: 203705 - DNA, 760 bp, Unknown
  Bacterial polypeptide expressing nucleotide sequence isolated from the Sargasso Sea
tatgagtttattgaaagataaagtagcaattgtaacaggaggaaatggtggtattggtttaggcattgcagaaggtttagcagatcaaggtgctactataataattgctgcaagaaatgaagaaaaaaacaaagatgcaattaaaaaaatcaagctatcaagtaaagacagtgaaacttttaaattagatgtaaacgatcaggattcaataaataatcttatgaaatttactaccgaaaaatacggaaagatagatattttagttaataatgcagggataagcagaagaagtgatgaacctcatttattgtctagaaatgactggaatgatgttatagatacgaacttaaattcaatacatcatatgacttccgcagtttttccttatttgaagaaaaataaatctggcaaaatcataaatataggttcaatgatgtcgatttttggaaatgctaattctgctgcatatgctgcaagtaaaggtggtgtagttcaatataccaaaagttgtgccatagcttgggcaaaatataatattcaaatcaatgcaattctaccaggttggatagtaacagatatgactaatgaattcaaaagagtaaatcctacaagatacgcaactattgcaggaagaactcctgctgaaagatggggattacctgaagatatggcaggtactgcaatttttttatcaagcaagtactcagattttgtaaacggtgtttctattcctgtagatggtggttatagtgtaatgtag

SEQ ID NO: 203706 - DNA, 826 bp, Unknown
  Bacterial polypeptide expressing nucleotide sequence isolated from the Sargasso Sea
cgagcaagggtaatctatgttgcagtaataagtaatggttctgcaatactaggaatgggaaatttaggtgctctggcgtctaaacctgtaatggaaggtaaagcggttctatttaaaagatttgctgatattgactctatagatcttgaaatagactcttctgatcctaatgaaattattaatagtataaaaaacttttctccaagttttggaggaataaatcttgaagatattgcagccccagactgttttataatagaggaaaaactaaaagaaattttagatataccagttttccatgatgaccaacatggtacagcaattattactaccgctgctttaattaacgctctagatataagtaaaaaatcaattaataaaattaaaatagttgtgaatggtgctggagcttctgcaatggcttgtgcaaatttatttaaaaaaagtggagttccccaaaaaaatataactatggttgatagaacgggagttatttttagaggcagagaaaatttaaatcaatggaagtcaagtcatgctattgaaaccaaaaatcggacgttaaatgatgcaattaaagatgcagatgtctttttaggtttatctgcaaaaggtgctttaactaaagatatggtaaaaaaaatggcaaaaaatccaattatatttgcctgtgcaaatccagatcctgaaataactccagaagaaatagaagaagtaagaaacgatgcgataatagcgactggtagatcagattatccaaaccaagtaaataatttgattggttttccatacatattcagaggtgctttagatgtaagatcaaaaa

SEQ ID NO: 203707 - DNA, 505 bp, Unknown
  Bacterial polypeptide expressing nucleotide sequence isolated from the Sargasso Sea
ttgagaaatagtaaaccaaaaattgccttaattacaggtggcgcatcaggactaggatatagtatcgcaaaaagacttaaaaaatctttatatgaaattattatagttgatattgataaaaagaagattgctgaaagtacttctaaaataaaaaattctaaagggtatttatgtgatatttcaaaagaaagttctgttttaaatttaattaatgacatttcaaaagattataaatatttccctagtttacttgttaataatgctggaatagttagattcagtgattttttagaacacccagtagatgattttaaaaaagtaattgaagttaatctaattggcactttcctgatgtctcaaagttttggtaaaaaaatggtaaagatgggtaaaggttgtataattaatattacatctctaaatgctttttcacccagtccagacgctggcgcatatccttcaacaaaagcagcaattgctactttaacagagcaaatggcatatc

SEQ ID NO: 203708 - DNA, 769 bp, Unknown
  Bacterial polypeptide expressing nucleotide sequence isolated from the Sargasso Sea
catggaaaaaacccaactgttcgacctcgacggcaaagttgccctggtaaccggcgccagccgcggtatcggcgaggcgattgccaagctactggcccagcagggtgcgcacgtgatcatctccagccgcaagatcgatgactgccaggccgttgccgacgccatcgtcgccgccggcggcaaagcctccgcactcgcctgccacatcggcgacatggatcagatcgttgccaccgttgccgccattcgcgagcagttcggcaagctggatatcctggttaacaacgccgctgccaacccctacttcggcaacgtgctggacaccgatctgggcgccttccagaagaccgtagacgtcaacatccgcggctacttcttcatgtcggttgaagcgggcaaactgatgcgcgaaaacggcggcggcaacatcctcaacgtagcctccgtcaatggtgtggttcccggtcagctgcagggtatctactcgatcaccaaggcagcagtcatcaacatgaccaaggtattcgccaaggagtgcgctcagttcggcattcgctgcaacgccctgctgccgggcctgaccgacaccaagttcgcctccgccctgaccaccaacgacgctatcctcaagccggcactgcagcgcatcccgctggcccgtgcagcggatccgaccgaaatggcaggcaccgtgctgtatctggtcagcgacgcctcaagctacaccactggcgctgcgatcaacgtcgacggcggcatgctcgcataa

SEQ ID NO: 203709 - DNA, 857 bp, Unknown
  Bacterial polypeptide expressing nucleotide sequence isolated from the Sargasso Sea
cacatttggcggcattaacttagaagacattaaagcgcctgaatgctttgaaattgaacaagagctaattaagcgctgtaaaattccggtatttcatgatgatcagcacggtaccgctattgtaactgcagcgggcatgcttaatgctctggaaattcagggtaaaagcatagagagcgctaaaattgtgtgtatgggtgccggtgcagcagcggtcgcttgtatggaactgcttataaagtgtggtgcccagcgtgagcgtatttatatgctagacagaaaaggcgttatccatactcgtcgcgaagacttaactgagcacaaaaagctatttgctaacaatactgacaagcgtacgcttgaagatgtaatggaaggcgcggatatttttgttggtgtgtcaggaccggatgttttaccaccagaaacactggccttgatggctgaaaacccaattgtatttgcatgttctaacccagaccctgagataaagcctgaacttgctcacgaagtacgtaaagatcttattatggctaccggacgctcggactaccctaaccaggttaacaacgtactgtgtttcccgtttattttccgtggagcactagatgttcgtgcaacggccattaacgatgaaatgaaagtagcggcagtagaagcccttcgtgctatcacgaaggagcctgtaccagaagaagtactagctgccagtaagagtactagtctgacatttggtaaggagtacattattcctaaacctatggacccgcgtttatgcgagcgtattgctaccgccgtatctaaggctgcgattgaatctggcgttgcacgcgtgcctgaaagcccagaagaataaa

SEQ ID NO: 203710 - DNA, 413 bp, Unknown
  Bacterial polypeptide expressing nucleotide sequence isolated from the Sargasso Sea
gatgcgtctgaaaggaaaagtggcgctagttaccggagggaataaaggtataggtgctgccgtcgtgaggcgttttgccagcgaaggagcaagagtatggtcgggcgacattgtaacggacaagacaaacaacttttcggatgatcttgcagataaaacagaaactatagttcatgaaaccttggatgtaacaagccacgattcctggcaacttattataaataaaatagtccacgaaaccggtaagattgacattctcgtaaacaatgcgggtatttacgatcgtagatcaattgaagaaacaaccgaagaacaattcgataagatgctagcagtaaatacaaaaggcccttttctcggaataaagcttgcactcgaggcactcaaagcaagcgggaatgcgtccatagtaa

SEQ ID NO: 203711 - DNA, 883 bp, Unknown
  Bacterial polypeptide expressing nucleotide sequence isolated from the Sargasso Sea
tcaggagatgacccagaaggaatttttccttcaattctaggacatgaaggtgctggaatagtagttgatgttggcccagatgttacaagtgttaaaaaaggggatcaagtcatacctttatatactcctgaatgtagacaatgtaagttttgtctttctggaaaaacaaacttgtgccaagcaattcgtgaaactcaagggaagggtttgatgccagatggtacttctcgtttttcattaaaaaataaacctatttatcattatatgggaacttcaacattttcaaactatacagtcttaccagaaattgctttagctaaggtaaggaatgatgcaccacctgaagttatttgctatattggatgtggtgtaactactggaatcggtgctgtaattaatactgccaaggtaactcctggttcaaatgtagttgtttttggcttaggcgggattggtcttaacgtgattcaaggcgcaaggttagtgggtgcaaataaaattattggtgtagatataaacgaaaagaaaaaaagtcttgctgagaaatacggtatgactgatttcgttaatccaaataattatgaggacaaacttatacagcatctggttgaaattacagatggaggggcagactattcctttgagtgtatcggcaatacagaaactatgagacaatcattagaatgctgtcataaaggatggggagaaagcacaattattggtgttgctggtgcaggtcaagaaattgcaaccagaccttttcaattagtcaccggaagagtatggcgaggctcagcttttggtggggcaaaaggtagaacagatgttccaaaaattgttgattggtatatggagggtaaaaatgagatagattcaatgataa

SEQ ID NO: 203712 - DNA, 943 bp, Unknown
  Bacterial polypeptide expressing nucleotide sequence isolated from the Sargasso Sea
gcagcatatgactatacaagtaagggaaacttggtagctgtaataagtaatggttcagcaattctaggtatgggtaatttgggtgctttggcatcaaaacctgttatggaaggaaaagcagttttgtttaaaaggtttgctgatatcaattctattgatattgaaattgactcatctaacactagtgaaattattaaaagtattaaaaatatttcaggtagttttggtggaataaatttagaagatatagcagcccctgattgttttgttattgaagaaaaattaaaagagatattggatattcctgtatttcatgatgatcagcacggaacagctataataacaactgcagctctaattaatgcacttgatatatcaaaaaaatcaataaaaaaaattaaagtagttgttaatggagccggagcttcagcattagcttgcactaatttgttaaaaaaaacaggcataccaaaaaaaaatataataatgcttgatagtaaaggtgtcctgtatcgaggtagaaataatcttaataaatggaaatcagcacacacaattgaaacaaaaaaaagaactcttgaacaagctatcgatggtgcagatgtttttttaggattatcctctaaaagtattttgtcaaaaaaaatggtaaaaaaaatggcaaagaatccaattatatttgcatgtgcaaatcctgatcccgaaataacaccagaagaggttgaacaagtaagaaatgacgcaatagttgcaacaggaagatctgattaccctaaccaagttaataatcttattggttttccttacatatttagaggagcattagatgtgagagctaaaacaattaatgaagagatgaaagttgcagcagcaaatgcaatagcatcattagctagggaaagagtaccagatgaagttgttgctgcaatgggaggtgacagac

SEQ ID NO: 203713 - DNA, 904 bp, Unknown
  Bacterial polypeptide expressing nucleotide sequence isolated from the Sargasso Sea
aatattgatgaaattgtaaatagtattaaaaatttttcatctagctttggaggaataaatttagaggatatagccgcaccagactgttttgtaattgaagagagattaaaaaaattattaaaaattcctgtatttcatgatgatcaacatggaacagcaattattacgtctgcggctttaataaatgctttagatttagcaaaaaaagaaattaagaaagtaaaaatagtaattaatggagctggcgcatctgctatggcatgctctaatttatttaaaaaaaatggagtgccacaaaaaaatatcacaatgcttgatagaaagggagttatatacaaaggtagaaagggtttgaatgtttggaaatctgctcatgcaacacacaccaaacatagaaatctgaaagacgcaatagaaggtgctgatgtttttctaggattgtcttcggcaggagctcttaaaaaagaaatgattaaagtaatggcaaaaaatcctatagtttttgcatgtgcaaatcctgatcctgaaataactccagaagaaattgaagaagtaagagatgacgcaattgtagctactggaagatcagattatcctaaccaggtaaataatctattgggctttccgtatattttcaggggtgcattagatgtaagggccaaaacaattaatgaagaaatgaaattggctgctgttcatgcaatagcaagcttagcaagagagagggttcctgatgaagttgctgctgccatgggaggagagagaccagtatatggaaaaaattatataataccctctacttttgacccaagattaattaatgtgatctcaattgcagttgcaaaagcagctataaaaagtggtgtagcaagaaaaaaaattgagaattttgatttgtattctg

SEQ ID NO: 203714 - DNA, 859 bp, Unknown
  Bacterial polypeptide expressing nucleotide sequence isolated from the Sargasso Sea
gatgaaaactaaagcagcagttgcttttgaagcaggaaagcccctagagatatgtgaagttgatctagaaggtccaaaaagcggtgaagtgcttatagaattaaaagctacaggcatttgccatacagatgcctttactttgagcggtgaagatcctgaaggagtattcccttctatccttggtcatgaaggagcaggagttgttgttgaagtaggtgcagatgtatcttctctaaaaccaggggatcatgtaattcctttatacacagctgaatgcagaaaatgcgaatactgccttaaccctaaaactaatctttgtcaggctgtaagagaaactcaaggccgaggagttatgccagatggaaccacaagattctcccttgatggaaagccattgatgcattacatgggttgttcaaccttttccaattacactgtaatgccagaaatttctttagccaaagttagagaagatgctccttttgaaaaaatctgttatatcggatgtggcgttacaactggcattggtgcagttgtatttcaagctaaagtagaaataggttcgacagtagctgtatttggacttggaggaattggtcttaatgtaattcagggatgtaaattagctggtgcgagcaggattataggtatagatattaattctgatagagaatcattagggaaaaagtttggtatgacggattttataaatcccaatagtgttgaaaacgttgtagatcaaattattcaaatgactgatggtgttgattatagttttgaatgcatcggtaatgttgatgtaatgcgtcaagcattagagtgttgtcataaaggctggggtgaatcttacataatagga

SEQ ID NO: 203715 - DNA, 934 bp, Unknown
  Bacterial polypeptide expressing nucleotide sequence isolated from the Sargasso Sea
tatgttcattaacgctgtgaagcgacgctggcccgatgtaatgattcagtttgaagattttgcgcagccaaatgctatgccgttattaaaccgctatcgcaacgacgtgtgttgttttaacgacgatatacaaggcactgctgccgttacccttggtactattttggcggcatgtaaaaccaagcagcaaaagctacgcgacatgaaggtggtgttcgtgggcgcgggttcggcaggctgtggtattgctgaaatgctcattcaacaaatggtatttgaaggcctgactgatgaacaagcacgtaagcaagtgttcatgattgaccgttttggtttggtaaccgaaggcatggaaggtctacgcgacttccaacaaaagcttcagcagaaaaatgctgacttggctgattggacgttcagtggagattatgcgtcactacttgatgttatgcactgcgcgcagccagacgtacttattggtgtttcaggccagcctggcttgttcactgaacaagttatccgtgccatgaagcaaggttgtgaactgccaatcatcttcccgttaagtaacccctcacgacaagttgaagcgcgtcctgagcaagtgattgaatggacagaaggtgacgtgattattgctacaggtagtccgttcaagcctgtagagtacgatggcaaaatattccctatcgctcaatgcaacaactcttacatcttcccgggcattggccttggtgttgttgcatctaaagcgaagcttattagtgacgaaatgctgatggctgcaagtaacgcacttgcttcagcgtcgccattagtcaacacgggtcagggttcactattgccaccccttgctgccattgcagaaattagcagagagattgcttttgaggtgggtagagtagcgatggagcaggggcttgctcttgaaatg

SEQ ID NO: 203716 - DNA, 781 bp, Unknown
  Bacterial polypeptide expressing nucleotide sequence isolated from the Sargasso Sea
atgtatcgcaaggtattcgccaacaaggtgttcgaccgcaaggtcgtactcatcacgggaggttgtgccggcatcggtcgcgccttggcgatgcgcctggcccaggctggtgcgcgcctggtgattctcgatctgcagcaggcagcgctggacagcctggtgcagcacctggccgatcatcacaacgccgaggcgctggggctgctctgcgacgtggccgacgccgaggcggtgcagcgcgcggtggcgctggcggtggagcgtttcggcggtatcgatgtgttggtcaacaatgccggcatcactcatcgcagcaccttcgccgagaccagtctggaagtgttccagcgggtcatggcggtcaactatttcggcgcgctctactgcacccaggcagcgctgcccagcctgattgcccggggcggacagatcatcgtgctcagctcactatcgggcatcgcgccgttgctctatcgcagcgcttacaacgccagcaagcacgcgctgcatggcttgttcgagacgctgcgctttgagctcaagggctcgggtgtgaacgtgatgctggtgtgcccaggttttaccgcgaccgacttgcgcaagaacgctctggtcggtgacggctcggtggctgcccaaccgcccttggcgatgggcaaggtggcttcgccgcaggatgtcgccgaggccatctatcatggggcactcaagcgccggcgtctgctggtgttgtccaacgtcgattggcgcgcccgggtgctggcgcgcttcttcccgaggc

SEQ ID NO: 203717 - DNA, 763 bp, Unknown
  Bacterial polypeptide expressing nucleotide sequence isolated from the Sargasso Sea
aatgattgaagatttatatgacgtaaaggatcgagttgctgtagtaacaggtagttctcgtggtattggtaagcaatgtgctcttgcttttgctgaggcaggtgcgaaattagttttaaattatgtaagcaacaaacaggctgcagaaattactgctgaagaaattgaaggtttagggtctgaagctattgttgttcaagcagatgttaaagactttgaagcttgtcagtctcttggcgaagaagctgtgaaaaaatacgggaaaattgattttctagttaacaatgctggtattaatagagatattactttcagcagaatgtcacaagaagagtggcaagaggtaattgataccaacttgggagcattatttaatatgtctaaagcttgtgttccacatatgagggatgcagggtttggttcaattgtttcaatttcgtcaattattggagaaacaggaaacattggccaatcaaattatgctgcaacaaaaagtggaatgtatggtttcacaagaagtttagcaagagaattagcaaaagataatattagagtaaatactgtttcacctggatttgttgaaacagatatgcttcatacagttccagctgatcttctagcaggcattaaaacagaaattccattaggtagatttggatatccagatgaagttgcattagcagttctttatttatgttcgactgctggctcttggattactggtactaatctaagtattaatggtggacacaatatgctgtaa

SEQ ID NO: 203718 - DNA, 942 bp, Unknown
  Bacterial polypeptide expressing nucleotide sequence isolated from the Sargasso Sea
gctgctcctgcatgttttatgatagagcaacaattatcagaaaaattagatatacctgtatttcatgacgatcaacatggaacagctattgttgctactgctggtttattaaatgctctaactatcacgggtagggatattaaaaattttaaaatggtcgttaatggtgctggtgcagccggtatagcttgtgttgaattattgaaagctatgggcatgccatcaaaaaatgtaattatgtgcgatagaaaaggtgttatttcaaaaagtagaaatgatttagatcaatggaagtcagctcatgctgtggatacaccacataaaacattggaagatgcactaaaaggtgcagatatagcatttggtctttcagttaagggagcttttacaaatgatatgatgctttctatgaatgataaaccaatcatctttgctatggctaacccagatccagaaatcacaccagatgaacttagaaaaataagacctgatgctattatagcaaccggtagatctgattatccaaatcaagtaaacaacgtcctagggtttccttatatttttagaggagcattagatgtaagagcttctgcaattaatattgatatgaaaatagctgctacaaaagctttagctgatttagcaaaacaagatgttcctgatgaagtagctaatgcttactcaggacaacacataaaatttggtcctgaatatatcattcctaaaccatttgatgcaagattgttaactgctattcctccagctgtagcaaaagctgctgaagagtccggggttgcgagaaagcctataagagacgaattaggctacagaagaagacttgctgccagattagataaaactgctacattaatacaaagcgttgcagatactgtcaaagcttctcaaaagaaaattgtttttgctgaaagagagcaagagaca

SEQ ID NO: 203719 - DNA, 514 bp, Unknown
  Bacterial polypeptide expressing nucleotide sequence isolated from the Sargasso Sea
tatgaaaattgaagatttatttaaaatcaaaggtaaggttgcattagttactggtggctcaagaggtatcggagaaatgattgccgctggatttttagctaatggagtaaaagtttacatatctgcaaggaaagaagatcagttaaatcaaaaagcagaagaattgtctgagaaatttggaggagagtgcatccccattcataatgatttgggcactttagatggtgttgaggaattagttgcaaagtatagttcttttgaggaatctctagattttctagtgaataatgctggcgcagcttggggagaacctttcgagtctttttctgagggtggatgggataaggttatggatttgaatgttaaaagtatgtttttcttatcaagaaatttaacaaatttattgaaaaaaaatgcatctctagatgacccatctaggataatcaacataggatcaattgaaggaatccaagtcccacctttgaaacttactcatatgcagcctccaaagcag

SEQ ID NO: 203720 - DNA, 602 bp, Unknown
  Bacterial polypeptide expressing nucleotide sequence isolated from the Sargasso Sea
aatgaagaacctttttgatttaacaggaaaagtggcactggttacaggtgcaagtcgcggtatcggtgagtctattgcccgtttgcttgcccagtatggcgcgcatgtaattgtatcaagccgcaaaattgacggctgtgaagccgttgcttcttcaattcgtgacgcaggtggtaaggcgacagcgctagcgtgtcatgtgggtgaaatggagcaaattacagaagcatttaacgtcattaaacgcgattttggaaaactggatattctagtaaacaacgcggcagccaatccttactttgggcatatcttagatactgatcttggcgcctacaataaaactgtagacgtcaatattcgtggctacttcttcatgtcgattgaagctggcaaaatgatgaaagagcagggtggtggcgtcattctcaacacggcatcggtaaatggagtaacaccgggcgacatgcaggggatttattctataacgaaagctgcggttatcagcatgactaagtcatttgcaaaagagtgcggtagcttgaacattcgcgtaaacgcattattgccaggtttaaccgatactaaatttgcgtcagcgttaa

SEQ ID NO: 203721 - DNA, 932 bp, Unknown
  Bacterial polypeptide expressing nucleotide sequence isolated from the Sargasso Sea
aatgataccggatgaaattattaaatctattaagaatttttcaaaaagttttggtggtattaatcttgaagatattgctgctccagattgttttataattgagaaaaaattaaaagagattttagatatccctgttttccatgatgatcaacatgggactgcaattattacatgtgctgcattaattaatgcaatcgatattgcaaaaaaagatattaaaaaaattaaagtcgtagttaatggcgcaggggcctctgcaatggcttgtaccaacctttttataaaaacaggtgttacaagaaaaaatattacaatgttagatagaaaaggagtaatccataaaaaacgtgatggtctgaatcaatggaaatcagcttttgctatagacacaaaagatagaacgttaaaagatgcgattaaagacgcagatgtgtttttaggtctctcctccgctggtgttttaaagaaggatatggtcaagttaatgagtaaaaatccaataatctttgcatgtgccaatccagatccggaaattacacctgaggaaatagaggaggtaagaaaagatgcgatagttgccactggcagatctgattacccaaatcaagtaaacaatttaataggctttccttatatttttagaggagcattagatgtaagagcaaaaacaataaacgaagaaatgaaagttgcagctgtgaaagcaatagcttctttagcaagagaacgtgttccagatgaagttgttgcagctatgggaggggaaagaccaacctatggaagagaatatattataccttctacttttgatccgagattaattagtgtcatacctgttgctgtggctaaggcagcaattaaaactggagttgcaagaaagaaaattgataattttaatatttactctgagcaacttaaacaaagacttgatc

SEQ ID NO: 203722 - DNA, 1059 bp, Unknown
  Bacterial polypeptide expressing nucleotide sequence isolated from the Sargasso Sea
tttgttattgaggaaaaattaaaaaaaatattagatatcccagtatttcatgatgatcaacatggtactgcaataataactactgcagcattaattaatgcactggatatatcaaaaaaatcaataaaaaaaattaaagtagtcgtcaatggagcaggagcttcagctatagcttgtacaaatttgttgaaaaatactggagtacttaaaaaaaacataataatgctagacagtaaaggtgtcttatatcggggaagaaaaaatcttaatcgatggaaatcagctcatgcaattgaaacaaaaaaaagaactttagatgaagctatagatggtgctgatgtttttttaggcttgtcttccaaaagtattttatcaaaaaaaatggtaaaaaaaatggccaaaaatccaattatatttgcatgtgcaaatcctgatccagaaataactcccgaggaagtagaagaagtaagaggtgatgcaataatcgcaactggaagatctgactaccccaaccaagtaaacaatctaattggttttccatacatattcagaggggcattagatgttagagctaagacaattaatgaggagatgaaagttgcagcagcaaatgcaatagcctctttggctcgagaaagagtgccggatgaagttgtagctgcaatgggtggggataggccaacttatggaaaggaatatattattccatctacattcgatccaagattaataagtgtaataccattagcagtagcaaaggctgcaattaaaagtggtgttgcaagaaaaaaaattaaaaactttgaaacttatgcagatcaactaaaacaaagattagatccatccgtaacaatcatgcaaggaataaattctcaaattaaaaaaacacaaaaaagaattgtgtttacagatggagaagatcaaaatactttaaaggctgcaatagcatttaaaaaaaatagtttgggtattccaattttagttgctaaagaaaaaatagtaaaaaaaaggcttcaagaaattggatatagcgaaaactttgatatagaaattacaaac

SEQ ID NO: 203723 - DNA, 985 bp, Unknown
  Bacterial polypeptide expressing nucleotide sequence isolated from the Sargasso Sea
aatttaggagcattagcatctaaaccagtaatggagggaaaagcagttttatttaagagatttgctgacatagactctatagatcttgaaatagattctaaagacagtggggaaattattaattctattaaaaattttgctccaagctttgggggaattaatttagaggatatagcggctccggattgctttataattgaacaaaaattaaaagaaattttggatattccagttttccatgatgatcagcatggtactgctataattacaacagccgcactaataaatgctctagatataagtggtaaatcaataaaagaaattaaagttgtggttaatggtgctggagcatctgcccaagcttgcactgaattatttaaaaattcaggagtggcttcagaaaatgtaatcatgcttgatagaaaaggtgtaatttataaaggtaggaccgagggtatagaccagtggaaatcaaaatatgcagttgagacaaaactaagaagtcttgaagacgcaatgaaaagtgcagatgtttttttagggttgtcagcaaaaggggttctcaaaaaagagatggttaagagtatggctaaaaatccaattatttttgcttgcgctaatccagaccctgaaattttacctgaagaaataaatgaagtaagaaatgatgcaattatagcaactggaagatcagattatcctaatcaagttaacaatttaattggtttcccttacatttttagaggagctttagatgtgcggtctaaaactattaatgaagagatgaaagttgctgcttctcaagcaatagctaaacttgcaagagaagatgttccagatgaagtggtggctgcaatgggcggtgaaagaccacattatggaaaagattatattattccatctacatttgatccaagattaataagcgttattccagctgctgtagcaaaagctgcaatggaaagtggagtagctagaaaaaata

SEQ ID NO: 203724 - DNA, 612 bp, Unknown
  Bacterial polypeptide expressing nucleotide sequence isolated from the Sargasso Sea
atctcgacccggcgggcgtggcgcctttgttgtgcgcgggtatcacgacctattcgccgctgcgcacgtggggtgccggtcccggcaagaaggtcgggatcgtcggtcttggcggtctgggtcacatgggcgtgaagttggcccgtgcgatgggcgcgcacgtggtgctgtttacgacgtcgccgtcgaagatcgaagatgccaggcggcttggtgcgcatgaggttgtcatttcgaagaatgctgacgagatgggcgcgcacgccaatagcttcgatttcatcctgaatacggttgctgcgcagcatgatttgaatccgtttttgaatctgctcaagcgcgatgggacgatgacgctggttggggcgcctgagcacgatcatccgtcgccgcaggtgttcaatctgattttcaagcgtcgccgcctggctggttcgctgattggcgggattgcggagacgcaggaaatgctggatttctgtggcgagcatgggattacttcggatattgaggtgattcctatgcaggggattaatgaggcttatgaacggatgcttaagagtgatgttaagtatcggtttgtggttgatctcgattccttacggaagtgat

SEQ ID NO: 203725 - DNA, 697 bp, Unknown
  Bacterial polypeptide expressing nucleotide sequence isolated from the Sargasso Sea
aatgaaatcaagagccgctgtagcattcgcctccggcgagcccctagaaatcgttgaagtagacctcgaaggacccaaggcaggtgaagttttaatcgaagtaaaagccacaggagtctgccacacagattcatttactctttctggtgatgatcccgaaggcgaattccctgttatcttagggcatgaaggtgcaggaattggaagagaaataggtcccggtgtaacttctgtaaaggtagatgatatcgtaatacctctgtacacgcctgaatgtcgccagtgtgatttctgtttgaatccaaaaacaaatctatgccaatcgattcgtgaaacacagggacgaggtttaatgccagataacagtagtcgattctcattagatggaaaacctatcctacactatatgggctgctcaaccttttccaattttaccgtcctgcctgaaatagcattagccaaggtaaggggtgatgcaccgttcgataaaatttgttatatcggttgcggagttactacgggtgttggagccgttgcttttgaggcgcgagttgagccaggaagctccgtggcagtgtttgggcttggaggtattgcccttaatgtcatccaaggcgcacgaatggttggagctgatcgaattatcgggatagacattaatcctgctcgggaaaactcggccgagattttggattga

SEQ ID NO: 203726 - DNA, 576 bp, Unknown
  Bacterial polypeptide expressing nucleotide sequence isolated from the Sargasso Sea
atgtagttgcttgtgatttaagtaaaaaaaatgaaattataaaacttattaaaaaaactgatgagcttttgggccatgttgatattcttataaacaatgcaggaatcacaaaagataatatttttcttaggatgtctgaaaacgaatgggaagatgtattaaatgttaatcttaactcaacatttagtattcttaaattaattaccaaaggtatgattaagcgaagatatggaagaattataaatatttcatcagttgttggagtaactggtggtgcaggccaagttaactactctgcatcaaaagctggtttaattggtctaacaaaatctttatcccaagaagtggcaacaagaaatattacagttaactgtattgctccgggttttatagaaacccccatgacagaaaaattagatgaaaaaagaaaagatgcaattttaaattccatacctatgaatagaattgggacaccggaagatttatcttctgctattatttttcttgccagtcaagaatcaacatacataactgggcaaactatacatattaatggcggtttgtatatgaattaaa

SEQ ID NO: 203727 - DNA, 785 bp, Unknown
  Bacterial polypeptide expressing nucleotide sequence isolated from the Sargasso Sea
aatgaaggcagcagtcttaagggaagtaaacaaacctctagaaatcgaggacgtcgagtgcaacagtccaggtccacgagaagtactgatcaagactgcggcagctggcgtatgtcactcagacctccacttcattaacggttcttatcctcatcaacttcccgtcattttaggtcacgaatccgcaggtattgttgaagctgtaggttcggcggtcaactatgttaaacccggcgatcacgtgattacttgcctttctgctttttgtggtcattgcgaaccgtgcctcaccggacgaatgtccctatgccaagagccagaattgcaaagaggatctgaagaaccaccacggctggcaaaaggtgaagagcgagttgaacaatttctcaatttgtcttcctttgccgagtatatgcttgttcacgaacacgcaattgcgaagattcgggaagatatgcctttagatagagccgccttaataggttgcggagtaactactggagtaggtgcggtaattcatactgccaaggtcgagcctggatctacagtggcagtaatcggttgtggaggagtaggcttgtcggcaataaatggagcagcaatcgctggcgcctcacaaattatcgccattgacatggtcgagagtaagctcgagctggctcgtaaattcggcgcgacagatgtcatcaatgcaaaaaatgatgatccggtccaagcagttcgagaactgacctccggaggagtacattattcatttgaagcaattgggctggcaaaaacagccc

SEQ ID NO: 203728 - DNA, 441 bp, Unknown
  Bacterial polypeptide expressing nucleotide sequence isolated from the Sargasso Sea
aatgtgaatattgcctaaaccctaaaactaacctttgtcaggcggtaagagaaactcaaggtcaagggatgatgccagacggaacaagtagattttctcttaatggtaaaccaataatgcactatatgggttgttctactttctcaaaatatagcgttataccagaaatctctttagctaaggtccgtgaagatgcgccttttgacaagatttgttatatcggatgtggtgttactacagggataggtgccgttgtttttcaagccaaagtagaaaagggttctaccgtggcagtattcggtcttggagggattggacttaatgttgttcaaggttcaaaaatggcgggtgcgagcagaattattggtatagatataaatcccgaacgggagtcattaggtaaatattttggtatgactgattttattaatcctaaatgag

SEQ ID NO: 203729 - DNA, 727 bp, Unknown
  Bacterial polypeptide expressing nucleotide sequence isolated from the Sargasso Sea
gatacaaatgaaatcattaaaagtattaaaaatattgcaggtagttttggtggaataaatttagaagatatagcggcgcccgactgttttattattgaggaaaaattaaaagaaatattagatattccagtatttcatgatgatcaacacggcaccgcaataattactaatgcggcattaataaacgcgcttgacatatcaaaaaaatcaataaaaaaaattaaagtagttgtaaatggtgcgggagcttcagctgtggcttgtactaatttattaaaaaataccggtgttcctcaaaaaaatataataatgcttgatagtaaaggtgttctttatcgaggtagagataatcttaaccaatggaaatcatctcatgcaattgaaacaaaaaaaagaactctagatgaggcgattgatggtgctgatgtttttttaggattgtcttctaaaagcattttatcaaaaaaaatggtaaaaaaaatggccaaaaatccaattatttttgcatgtgcaaaccctgatccagaaattacacctgaagaagttgaagaagttcgtaaagatgcaattgtagcaactggaagatccgactatcccaaccaagtaaataatttaattggttttccgtatatttttagaggagctttagatgttagggcgaaaacaataaatgaagaaatgaaggttgcagctgcaaatgctattgcggctcttgcaagagaagatg

SEQ ID NO: 203730 - DNA, 304 bp, Unknown
  Bacterial polypeptide expressing nucleotide sequence isolated from the Sargasso Sea
tatgaaaaaaaaaatttcgttaataggagctggtcaaataggaggaactttagctcatcttataagtattaaagaacttgctgacgttgttctttttgatgtagcggaaggagttgcaaaaggaaaagctttagatattgcgcaatcaacagcagttgatggttttaaatgtaatcttataggaactaataaatatgaagatattaaaaattctgacgtaataataattacagctggggtttcaagaaaacctggcatgtctagggatgatttactttcaactaatttaaaaataattaaacaa

SEQ ID NO: 203731 - DNA, 993 bp, Unknown
  Bacterial polypeptide expressing nucleotide sequence isolated from the Sargasso Sea
tatgacaactaagcgtgatctcgctttagcatattctccaggtgttgctgctcctgtaaaaaaaataagcgaaaacccagaagcagcttatgattacacaagtaaaggaaaccttgttgctgtaataagtaacggttcggcaatattgggtatgggaaatttaggtgctcttgcttcaaagcctgtgatggaaggaaaggctgtattatttaaaagatttgcagatattgattcgattgatttagagattgattgtaaaaatacagacgaaatcattaattcaattaaaaattttgcacctagctttggtggaataaatttagaagacattgcggccccagattgttttataatagaacagaaattaaaagaaattttggatattccagtttttcatgatgaccaacatggaacagcaattataactactgcagcattaattaatgccttagatatttgtggtaaatcaattaaaaaaattaaagttgtcgttaatggtgctggagcttcagcacaggcttgcactgagttatttaaaaactcgggagtaaaatctgaaaatttaataatgctagacagaaagggcgttatttatgaaggaagaactgagggaattgatcaatggaaatccagatatgcagttaaaactaaacatagaaatttagaggatgctattaaaggtgcggatgtttttttaggattgtctgctaaaggtgttctaaaaaaagagatggttaaatccatggcgaaaaatccaattatatttgcttgtgcaaatcccgatccagaaatcactccggaagagattaatgaaattagaaatgacgcaattattgcaacaggaagatcagattatcctaatcaagtaaataatttaattggattcccttatatatttagaggtgctttagatgttagatccaaaacaattaacgaagaaatgaaagttgctgcagccaatgcaatagccaaacttactagagaagatgttcc

SEQ ID NO: 203732 - DNA, 349 bp, Unknown
  Bacterial polypeptide expressing nucleotide sequence isolated from the Sargasso Sea
atggttttttatcaccatttttgggggcttgtcgtgggaagaattcaggatcgagttgctattgttacaggaggggcttctggcataggaaaggctgtcagcaaacgcctggctgaagagggagccaaggttgttgtcactgatattcaggaggagatgggtctaatcactatttcggagattaaggaagcgggaggaactgctgagtttttgcgccacgatgtgactcaagaggaggattggcagagtgtcgtagcaaaaactgttgaagcctatggtggtttacatattctggtgaataatgctgggattgccattggagggagtattgtcacgcttgcgctggagg

SEQ ID NO: 203733 - DNA, 659 bp, Unknown
  Bacterial polypeptide expressing nucleotide sequence isolated from the Sargasso Sea
taaccattttgcaaaaaataattatattgtaataggcacatctagaaataattttgaatttcaaaataaatgtgacaaccttataccaatcaaattagatgtaacatctagagatgatattaaagattgttttaattatcttaaaacaaaagaattacttccaaatatattaataaataatgcgggtataacatctgataaattaatgttaactatgaaggatgaagattgggataatgttattgaaacgaacttaactggaacctataacttaacaaagatttttattaaaaatatgattaaaaacaagtttggaagaataattaatatatcatcagtagctggtttaatgggtaatccaggacaggttaattattcatcttcaaaagcagccttaaatggttttactaaatctcttgcaaaggaagttggatcaagaaatattacaataaattcaatagcgccaggatttatagatactgatatgacagcttacataaatgaagctgaaaaaaataatataataaaagatattccgctaaaaagatttggtgatgtaagtgatatatcagaattagctatatttcttgcctcagaagaagcaagttatataacggggcaaaccatttctgttgatggcggattattaatgtattaat

SEQ ID NO: 203734 - DNA, 289 bp, Unknown
  Bacterial polypeptide expressing nucleotide sequence isolated from the Sargasso Sea
tatggatctaaataataaagtagcattagtcacaggcggggcctctggtttaggacaagctactgtagaagcctacgtggctaaaggagcaaaagcagtaatattagacataaatgaagataaggccctagaaataataaataatctgggcgaagacaaggtcatgtttatatctactgatattatgaaagaggatccagttattgaggcagtaaatgaaataaaagaaaattttggtgaacttcatattgcagtaaattgtgctggaactggatatccaggaagaatc

SEQ ID NO: 203735 - DNA, 877 bp, Unknown
  Bacterial polypeptide expressing nucleotide sequence isolated from the Sargasso Sea
ggtataaatttagaggatatcgctgctccaaattgttttataattgaagaaaaactaaaaaaacttttagatattcctgtatttcatgatgaccaacacggtactgcaataattacatctgcagcgctaattaatgctgttgatatagctaagaaagacttaaaaaaaattaaagtagtagtgaatggagctggagcatcagctatggcatgtgctagtctttttaaaaaaaccggagttcttgataaaaatataattatgattgatcggaaaggtgttatttacaaaggaagaaaaggtctaaataaatggaaatcaacttatgctatagaaactaaaaacagaacattgaatgacgcaataaatggtgctgatgtttttttaggtttatcatctgcaggtgttttaaaaaaagaaatgataaaaaaaatggcaaaaaatccaattatttttgcctgtgctaatccagatccagaaataacacctgaggaagttgaaaaagtaagaaaagacgcaataattgcaactggaagatcggattatccaaatcaggtaaataatttaattggatttccatatatttttagaggcgcactagatgtaagagcaaaaactataaatgaggaaatgaaaattgctgcagtaaatgctatagcatccttagctaaaaaaagagttccagatgaagttgttgcagccatgggaggagaaagacctaaatatggaaaagattatataattccatctacatttgatccaagattaataagtgttattcctgttgcagttgctagggctgcattaaaaactaaagttgcaagaaaaaaaatagatagctttgagacttatgccgaccaattaaaacaaagattagatc

SEQ ID NO: 203736 - DNA, 340 bp, Unknown
  Bacterial polypeptide expressing nucleotide sequence isolated from the Sargasso Sea
gatgagaaaaaaaatttcccttataggcgcaggtaatatcggtggtactttagctcatttaattgccttaaaagaattaggtgatgtaattttgatagatatcgttaaaggagtccctaaaggaaaggctctagaccttgctcaatcttctggtattgagtcttttgaatctaatataattggatcctcaaactacaaagatattataaactcagatgttgttatagttacagccggattccctagacgtccaggaatgtctagagatgatctagtcgaaaaaaattcaaaaattattaaagaagttggtaaagcaataaagaaattttgtcccaaagct

SEQ ID NO: 203737 - DNA, 880 bp, Unknown
  Bacterial polypeptide expressing nucleotide sequence isolated from the Sargasso Sea
cgccacgctcagcgccctcaacggctttcgcgctgcatcgcgcgccatcgacaagtacgtcttcctcaggcagctgcagcacgaggacgcgggggtcttctaccgactgcttgtgaacaacgccatggagatcatgccgtacgtgtacacccccacggtgggcgaggcttgccagacgtaccacacgctaccgatcgctcagcagggcgtgtacatcaccgcggacgataagggtcgcgtgggcgaagcgctgcggtcgcgggcacctccgtcgctggcgaacgacctgaaggttgcggtcgtgacggacggcgagcggatcttgggcctgggcgacctcggcgcgggcggcatgggcatcgccgagggcaagatcctgctgtacagcgtgtgcgcggggattcggccgaaccagtgtctgcccgtgtgcatcgacgtgggcaccgacaacaagaccctgctggaggacccgatgtacaaaggcctgaggcgggagcggctgcgcggaagggagtacgacgaggttgtggaggagttcatgtccgagatgcgctcgtggcagccgcggtgtctggtgcagttcgaggacttcggcaacaccaacgcgttcaggatactggagaggtatagacaccgtcagccgtgcttcaacgacgacatccagggcaccgcgtgcatcgccctcgcgggggtgctcagcggcttgagggcgacgggcgcggacctgacgacgcagcgcatcctcttctacggcgcgggtgaggcgggcgtgggcatcggcgagctcatcgccatggccctcgagaagcgcggcatgtcgcaccacgacgccatcaacaggtgctacttcatggacagcaaggggctggtggcaagcagc

SEQ ID NO: 203738 - DNA, 891 bp, Unknown
  Bacterial polypeptide expressing nucleotide sequence isolated from the Sargasso Sea
ataattaacagtattaaaaattttgcaggtagctttggaggaataaacttggaagatattgctgctccagattgttttataattgaaaaaaaattgaaaaaaattttaaatattcctgtatttcatgatgatcaacacggtactgcaataattacttgtgcgggattaattaatgcaattgatattgcaaaaaaaaaaattgataaaattaaagtagtagttaatggagctggggcttcagcaatggcttgtgcagatctttttataaaatctggagtgcttcaaaaaaatttaattatgattgataggaaaggagtaatttataagggaagaaaaaatttaaacgaatggaaattaaaacatgctataaaaactaaatatagaactttaaaagatgcaattaataatgcagatgtttttttaggtttatcggcagcaggtgttttaaaaaaagatatgattaaaaaaatgtcaaaaaatccaattatatttgcttgtgctaatcctgatccagaaataacacctgaagaagtagaagaagtaagaagtgacgcaatcattgctactggcagatcggattatccaaatcaagtaaataatttaataggttttccttacatatttagaggagcattagatgtaagagcaaaagttataaatgaagaaatgaaaattgctgcagtaaatgcaatttcttcattggccagagaaagggttccggatgaagttgtggcagctatgggtggggaaagacctaaatatggaaaaaattatataattccttctactttcgaccctagattaataagtgttattccagtagccgtagctaaagcagcagtaaaaagtggagttgcaagaaaaaaaattgaaaattttgaagtgtatgct

SEQ ID NO: 203739 - DNA, 445 bp, Unknown
  Bacterial polypeptide expressing nucleotide sequence isolated from the Sargasso Sea
tatgagtgaacgactaaaagactgcacagcgatcatcaccggtggggcgcgaggacaaggagcggcggaagcccgacgtttcgtcgaagagggggccttcgttgtcatagctgacgtccttgatagcgaagggcaagccctcgcaaaagagctcggtgactcagccacctttcagcatctcgatgtgaccgatgaggacaactgggacgctgttgttggtcgtttgatagatgaaggcagaacgatcgatgtcctcgtcaataatgctggaattcttttattcgaccggcttactcgatcttctagagaggacttcgagcgagtgatggaggtcaactgcaccggcgttttcctggggatgcaagccgtagcagaggagatgaagaaacaacagagcggctcgattgtaaatatttcttcggttgcaggtcttcaaggcgtcggc

SEQ ID NO: 203740 - DNA, 922 bp, Unknown
  Bacterial polypeptide expressing nucleotide sequence isolated from the Sargasso Sea
ataaccgttgacgacctttctcttgcctatacacctggggttgctgaaccatgtaaagaaatagcgaaagaccctaataaggcttttaattatacagcgaaaggaaaccttgtaggagttatatccaacggcacggcggtacttggattaggtgatataggacctctcgctggaaaaccagtcatggaaggtaaaggggttttattcaaaaggtttgccgatatcgatgtcttcgatattgaaattgatgaacccactgttgatgggatggtcaaaatcattaaggcactggaaccaacttttggtggtattaaccttgaggatattaaagctccggaatgctttgaagttgagcaacaactgattgaaaaaatgaatattccagtctttcacgatgatcagcatggtactgcaattattgcttctgctggctttttaaatgcggttgaagtccaaaacaaaaaaatggaagacattaaagttgtttttaatggagctggagcagcttcagtagcctgtgcaaacctcttttttgaaatgggtgttaaaagagaaaacctcatcatgtgtgattcaaaaggagtcatctttaaaggccgaacagaaagaatgaataaatataaggaacagtttgcagttgaaactgatagaaggactcttactgaagccttagagggtgctgatgcatttattggttgctctgttgctggagcagtaacaaaagacatggtcaaatctatggcgcccaaaccaattatttttgctatggccaacccaactcctgaaatttttccaagtgaagtcttagaggttagagatgatgcggttatggcaacaggaaggtctgactttcctaatcaggttaataatgttttagggttcccctttatttttagaggagcactagacgttcatgcaaaaa

SEQ ID NO: 203741 - DNA, 236 bp, Unknown
  Bacterial polypeptide expressing nucleotide sequence isolated from the Sargasso Sea
tatgagaaaaaaaatcacattaatcggagcaggacaaataggaggaactttagcgcatctaattgctttgaaagatttagctgatgttgttttattcgacgttgcagcagggatagcgagaggaaaggctttagatatagcacaatcttcacctgtcgatggttttaacataaatttatctgggaccgatgattatgaggacacaaaaaattcagacgttataataattactgctg

SEQ ID NO: 203742 - DNA, 730 bp, Unknown
  Bacterial polypeptide expressing nucleotide sequence isolated from the Sargasso Sea
catgaaagataaggtcatacttgtaacaggcgctaatagagggatagggctaaacatcatacaaagacttaataatgacggttatactataatcggcacttctagaactgatgatggtgcaaatataatatcgcaagaaatcaacagtaatggtgggaaaggattaaaaatggatgttacaaatcaagagtctattaattctgctataaaaagcattcaagatgaatacggtgcattgtatggacttgtaaataatgcaggtattaccaatgacaatttattaatgagaatgactgaagagcaatggttgtcagttatagagactaatttaacttcaatctacagggtaactaaatctattgttaaagacatgatgaaagcgagagaaggccgcatagtaaacattggatctattgttggcatgatgggtaatgcaggccaatcaaattactctgcatctaaatcaggccttttaggttttacaaaatctcttgcgagagagctatcatcaagaaatattaacgtaaactcaatttcacctggtttcatagatactgacatgaccaaagctttatctgccgagcaaattgataatctctccaaaaatatacctttaggtagaatcgcggaatcatctgaagtgtcaagcgttgtctcttttttactatctgacgattcatcatatataactggtgaaaatattaatgtaaatggcggcttatatatgtaa

SEQ ID NO: 203743 - DNA, 814 bp, Unknown
  Bacterial polypeptide expressing nucleotide sequence isolated from the Sargasso Sea
ggagggtaaagcagttttatttaaaagatttgctgacatagattctatagatcttgaaatagattctaaagacagtgaggaaattattaactctattaaaaattttgctccaagctttggtggaattaatttagaggatatagcagctccagattgctttataattgaagaaaaattaaaagaaattttggatattccagttttccatgatgaccagcatggcactgcaataattacaacagctgcattaattaacgctctagatataagtggtaaatcaatcaaagaaattaaagttgtggttaatggtgctggagcatctgcccaagcttgcactgaattatttaaaaattcaggagtgccttcagaaaatgtgatcatgcttgatagaaaaggtgtaatttataaagaaaggactgagggtatagaccagtggaaatcaaaatatgcagttgagacaaaactaagaactcttgaagacgcaataaaaggtgctgatgtttttttagggttgtcagcaaaaggagttcttaaaaaagagatggttaagagtatggcaaaaaatccaattatttttgcttgtgctaatccagatcctgaaattttaccagaagaaataaatgaagtaagaaatgatgcaattatagcaactggaagatcagattatcctaatcaagttaacaatttaattggtttcccttacatttttagaggagctttagatgtgcggtctaaaactattaatgaagaaatgaaagttgctgcatcgcaagcaattgctaaacttgcaagagaagatgttcctgatgaagtg

SEQ ID NO: 203744 - DNA, 954 bp, Unknown
  Bacterial polypeptide expressing nucleotide sequence isolated from the Sargasso Sea
taatggttcagcaatattagggatgggaaatctaggtgctcttgcatcaaagcctgtaatggaaggaaaggctgttttatttaaaagatttgcagacattgattcgatcgatttagaaatagattgtaaagactcagaagaaataattaactcaataaagaattttgctccaagttttggtggaataaatttagaagacatagcagccccagattgttttataatagagcaaaaattaaaagaaattttggatattccagtttttcatgatgatcaacatggaacagcaataattacaaccgcagcattaattaatgctttagatatctgcggtaaatcaataaaaaaaattaaagttgtagttaatggtgctggagcttcggcacaagcctgtactgagttatttaaaaactcaggtgtaaaatccgaaaatatcttaatgcttgacagaaagggtgttatttatgagggaagaacggagggaattgatcaatggaaatctagatatgctgttaaaaccaaacatagaactttagaggatgctattaacggtgcagatgtttttttaggattatctacaaaaggtgtcctaaaaaaagaaatggttaaatcaatggcaaaaaatccaattatatttgcttgtgctaatcctgatccagaaattactccagaggaaattagtgaggtaagaagtgatgcaattattgcaacaggaagatcagattatcctaatcaagtaaataatttaattggatttccttatatctttagaggagctttagatgttaggtccaaaacgataaatgaggaaatgaaagttgctgcagcaaatgcaatagctcagcttgcaagagaagatgttcctgatgaagtggttgctgctatgggtggagaaagacctcattatggaaaagattatattattccatctacatttgatccaagattaattag

SEQ ID NO: 203745 - DNA, 820 bp, Unknown
  Bacterial polypeptide expressing nucleotide sequence isolated from the Sargasso Sea
catgaaaaccgataacaaagttgctcttgtaacaggatccgggtcaggaataggtgctgcaactgccacattattgtcccaaaacaatatgaatgtaggcatcaattattcctcgaaccaagaaggagccaattcaacagctcaaatatgcgaatctaacggagttgaaaccttggtggtacaggcagatgtcgctaatcaatctgaatgcgactctatggttgaacagattattcaaaaatggggacgtctggattatttggtaaataatgcaggaatatccgtattcgccgggggcacagaccttgatacattgactgacgaagacttccttagcttatatcaagtaaacttggtgggcgcttttcatatggtcaaagcagcgagaatgcacatgaaagccgatagacatggggcaatagtcaatgtatcatctatctctagtgtcactggctcagggagttcaatcgcttacgctgcatccaaaggcgcgctcaatactatgacaaagtcacttgctcgtatgcttgcgccagaaattcgcgtaaacgccgtccttcctggggtggcagacacctcatggtggaccaaaggaataggagagaataatcatcaaaccttaatggatgctttccaagagaaagtccctctacaagaggtttgtagcgcagagtcagtagcagagacgatcgtgtggttactacaaggtgcaaaacatatcacaggtgagactttactcattgattcaggcactcatttgataactttttcacccttacatcgaatcatattaaaagagttagctttcaatggaacataa

SEQ ID NO: 203746 - DNA, 829 bp, Unknown
  Bacterial polypeptide expressing nucleotide sequence isolated from the Sargasso Sea
tttggtggcataaatcttgaggatattgcagctccaaactgttttataattgaagaagaattaaaaaaaattttagatattcctgtatttcatgacgatcaacatgggacagcaattataacaacagctgcattaattaacgcagtggatattgcaaaaaagaacttaaacaaaattaaaatagttataaatggtgcaggcgctgcagctatggcatgtgcaaaattatttagaagcactggtattccaaaaaataacataaaaatgttggattcaaaaggagttataaataaaaatagaaaagacattaattcttggaaaaaagagtttgcagttgaaacaaaagataaaagtttagatgacgctatgaaaaatgcagatgtatttttaggattatctgctgccggcgttgttaaaaaaagtatggttaaaaaaatggcaaaaaaaccaattatatttgcctgcgcaaatccagatcctgagataaaaccagaagacattgaagatgtcaggaatgatgcaataattgcaacaggcagatctgattatccaaaccaagtaaataacttaattggatttccatatatatttaggggagcattggatgttagagcaaaaactataaatgaagaaatgaaagttgcagcagctaatgctattgcatcacttgcaagagaatttgtacctgatgaagttgccgctgcaatgggtggagaaagaccgaattatggaaaagaatacatcataccatctacatttgacccaagacttataagtgtaataccggtggctgtagcaaaagctgctataaaatctggagttgctagaa

SEQ ID NO: 203747 - DNA, 825 bp, Unknown
  Bacterial polypeptide expressing nucleotide sequence isolated from the Sargasso Sea
catggccgtaaatacaaaactaagaactcttgaacaagttattgatggagctgatgtctttttaggattatcgggaaaaaatgtccttaccaaagatatggtaaaaaaaatggctaaaaatccaataatttttgcctgcgcaaatccagatccagaaattaaacctgaagatgttaaggaagtaagagacgatgctattattgctacgggaagatctgattatccaaaccaagtaaataatctaattggattcccttatatttttaggggtgctttagatgtaagagcaaaaacaattaatgagaaaatgaaggttgcggccgcacacgctattgctgaacttgctagagaagatgtgcccgatgaagtagttgccgccatgggaggagacaggccacattatggtaaagactatattattccttcaacttttgatccaagattaattagcgtaatccctgttgcagttgctaaagcagcaataaaaagtggcgtggcaagaaaatcgattaaggatattgaaacttataaagatcaactaaaacaaagattagatccttctgtaaccattatgcaaggtattaatagccaaattaaaaaaactcaaaaacgtgttgtctttgcggaaggagaagatgaaaatactttaaaagctgccattgcttttaaaaatgggggacttggtatccctatcttggtagcaaaaaaagaaaccttaaaagaaagattaaaagaaataggtctagatgaaaattttaatatagaagtaaccaattcgaatgataaagaaaaaagagataaatatgtaaattttttatttaaaaa

SEQ ID NO: 203748 - DNA, 573 bp, Unknown
  Bacterial polypeptide expressing nucleotide sequence isolated from the Sargasso Sea
gatggcaatactgcaaggaagagtggcgctagtcaccggcgctcaacaagggatcggtagagcaatcgctgaagctgttggccgtgagggtgcatcggttgtcgttcagtatctcgacgatcaagacactgccgaacgcattgccgagacgattaggtcatcgggatctgaagctcatgtggtgcaaggcgacgtcggtgttcggtcagattgtgcaaaggcctttgcagttggcagcgctttggggggcatagatcttctggtgaacaacgccgggattttcccgcgaggttcgttcttggagctcaccgatgacgattggaatcacgttcagaacataaatgtcgttggtggattccgttgtctacaaatgatggcgcgcgaactcattgagaatgacaaggttgggacggcggtgaacctttcctctgttgcgttctttcggaactctgctcggggaactcactatgccgcaagcaaaggtgccatcatcgggtttactcggtctgtttctaccgagctggcgccccacggcatcagggtgaacgcgatcgctccggggatcgtcgatac

SEQ ID NO: 203749 - DNA, 962 bp, Unknown
  Bacterial polypeptide expressing nucleotide sequence isolated from the Sargasso Sea
cttcaaacctgtcatggagggtaaggcagttttatttaaaagatttgcagacatagactcaattgatattgaaatagatacaaacgacacggaagaaataattaaatcaataaagaatatatccaaaagttttggaggaattaatctcgaagatataaaagcacctgagtgttttattatagagaggaaattaaaagagatactagatattcctgtttttcacgatgaccaacatggtactgcaataataactagtgcggcgttaataaatgcctgcgatattgctaaaaaaaagttaaacgaaataaatgtagttattaacggagctggtgcatccgcaatggcatgtgcaaagctttttataaattcaggcgtagataaaaataaaatcaaaatgcttgattcaaaaggggttatctataaagggagagataacttaaatgaatggaaaaatgaattctcaattaaaacagacgatagaaatttaagtgatgcaataaaaaatgctgacgtatttttaggtctatctcaagcaggagttctaaaaaaagacatggtaaaaagtatggcaaaaaatcctataatttttgcctgtgctaatcctgatccagaaattactcctgaagaaattgaagaagtacgagacgatgcaattattgcaactggtaggtcagattatcctaatcaagtaaataatttaattggcttcccttatatttttaggggcgctcttgatgttagatcaaaaacgataaacgaagatatgaaagttgctgcagttcatgctatagcctctttggcaagagagagggttccagatgaagtggttgcagctatgggtggagagagaccagtttatggcaaagactatattattccatcaacttttgatccaagattaataagtgttataccgctagcagtagcaaaagcggccattaaaactaaagtagcaagaatag

SEQ ID NO: 203750 - DNA, 658 bp, Unknown
  Bacterial polypeptide expressing nucleotide sequence isolated from the Sargasso Sea
aatgaattccatggcagcagtacttcatcaaatgaatttggaaagaccatattcaaaatctgcccctttgaaaattcaaaaagtaaaccttgatgctcctggttttaatgaggttcttgtaaaaattaaagctgctgggctttgtcactctgatttatctgttattgatggtaaccgacctagacctttacctatggtacttggtcatgaagcagctggaatagtaataggtttaggcaaaggagttcaaaaacttgctgtgggtgaccatgttgtttttgcttttttaccctcatgtggaaattgtagttactgccatagcggcaaagctgcactttgtgaaccaggggctgaagcgaacggaaaaggaactttaattgggggacatcaaagaatccataaccaaggtgagtattaccatcatcatctcggtgtctctggttttgctgaattttcagtagtatcttctcactcattaataaagatagataaggatattccatttgagattgcttcactctttggttgtgcagtcatgacaggagttggtgcagtggtgaatactgctcaactaaaatttggggaaagccttttagttgttggtcttggaggagtcggactatcagcaatcctggagcagcttctgctggggcttcta

SEQ ID NO: 203751 - DNA, 815 bp, Unknown
  Bacterial polypeptide expressing nucleotide sequence isolated from the Sargasso Sea
catggtagcagttattagtaatggatcagctattttgggactaggaaaccttggagccttagcatcaaaacctgtgatggaaggaaaggcagttctttttaaaagatttgcagatatagattctattgatttagaaattgattcaaatgatccggatgaaataatttcatcaattaaaaacttttcaaaaagtttcggagggataaatttagaagatattgcagctccaaactgttttattattgaggaaaagttaaaacaattattggatataccggtatttcatgatgatcaacatggtactgcaataattacatgtgcagctttaaaaaatgcaatagatattgcaaaaaaagatattaaaaaaataaagatagttgttaatggagctggtgcttcagcaatggcatgcgcaaatctttttaaacacacaggcgttccccaaaaaaatataattatgctagatagaaaaggagttatttacaggggtagagataatttaagtcaatggaaatcagcacatgctatagaaacaaaaaatagaactttggatgatgcaattaaaaatgctgatgtttttttaggtttatcttctgcaggtacattaaagaaagatatggtaaaaaaaatggcaaaaaatcctataatctttgcatgtgcaaatccagatccagaaattacacctgaagaagtagaagaaattagaagtgatgcaatagtagctactggtagatctgattacccaaatcaagttaataatctaattggtttcccttatatatttagaggagcacttgatgttagagcaaaaacaa

SEQ ID NO: 203752 - DNA, 921 bp, Unknown
  Bacterial polypeptide expressing nucleotide sequence isolated from the Sargasso Sea
agttttgtagaaaatattatgaaaacaaaggcagctgtagcatttgaaccaggaaaacccctagagatcgaattagttgatttagagggacctaaagaaggagaggtcttaataaaaattaattcaacaggagtttgtcataccgatgcttacacattatcaggaaaagatccggaaggaatttttccttctattttaggtcacgaaggtgctggagtagtagtagaaactggcaagaatgtaaattcaataaaaaaagatgacagtgttatcccgctttatacgcctgagtgtagaaaatgtaaattttgtttatctggaaaaactaatttgtgtcaagctattagagaaacgcaaggtaagggcttaatgcctgatggcacttctcgatttagttttaataataaaacaatttatcattatatgggcacttcaactttttcaaattatactgttgttccagaaatagccttagctaaagttagaaaagatgctcctcccaataaaatctgttacattggttgtggcgtaacaacaggtattggtgctgttttaaatactgcaaaaatggaagaaggatctacagctgtaatttttggcttaggtggtattggacttaatgtaattcaaggatgcaaaatagctaaagctaaaactatattaggtattgatattaattctaatagagaaactttaggtaaaaaatttggtatgacccattttttaaatcctaaagaagttggtgaagaaaatttaattgaaaaaattatagagataactgaaggaggagcggattatagttttgagtgcataggtagtgtaaaggtgatgagacaagctttggaatgctgccataaaggttggggtcaatctataattattggagttgctgcttcaggtgaagaaatatcaacgagacct

SEQ ID NO: 203753 - DNA, 748 bp, Unknown
  Bacterial polypeptide expressing nucleotide sequence isolated from the Sargasso Sea
aatgagtaaggatttagaaaataaaaaaacagcggtggttacaggtgcaggcaggggaattggcaaaaacattgccgaagcgttggcccgcgatgggattgaagtgtactgtgtgagtaagacggagtcttcctgcggagcagcaaccgaagaaattcgggcaaatggtgggatagctcatgccttgcccattgatgtttcttctggtgatgcgatacgttctgcctgtgaaaagcttctagaagagaaagaatgcattgatattctcgtaaataacgcagggatcacccgtgataacctactttttcgtatggaagaagatgattggaatgcggttatcaataccaaccttaccagctgttttcactggataaaagctctcgggcgtccaatgactcgaaaaagatggggtcggatcattaatgtttcttctgtagttggtcttaccggaaatgctggacaagcgaattattcagcagccaaggcaggtatgattggtttgactaaaagtttagcaagagaatttgctgctcgtactgtaactgttaatgcaattgcacccgggtttatcgacactgatatgacatccggacttgatgatcgcgtgaaagaagtggctcttggaacaatccctctcaaacgattcggcaaagtcgaagacattgccgaaatgacctcttttttatgttcagaaaaagcatcctatgtcaccggacaagtttttacggttgacggaggcatggtcatg

SEQ ID NO: 203754 - DNA, 320 bp, Unknown
  Bacterial polypeptide expressing nucleotide sequence isolated from the Sargasso Sea
aatggaattattagataagaaagttattgtaacaggtggtgcctctggatttggtctaggaattgtaaaaaaatttttaaataatggtgcaaaggtagtaattgcggatcaaaacaaaactttagctgatgaacaggcacaaaaattaggaagtaatgcattttcgattgaaacagatgtatctaatgaggaaagcatcgagaacttaaagaaacagacaaaacttactattggagatccagatatattagtaaataatgcaggcatcacacaccttcctgattttgtagaaaatatttctttagatgaatttgaaaaag

SEQ ID NO: 203755 - DNA, 502 bp, Unknown
  Bacterial polypeptide expressing nucleotide sequence isolated from the Sargasso Sea
atgaaacttctagacggacaaagagcattgatcaccggcgcaggaagtggaatcggtaaagtgatggcacagcatttcgaaaaagctggagcccggatctggatctgtgatgccgactccaacaatctggagcaatcactcaaggaaaacacttactggaatggaaccccatgtgatgttgctgatgagaaccaggtggatcagctttttaaagagatgtcaggctcctttggaggtttggaaatcctggtcaacaatgctggtattgccggacctactgccccggtggaagagatcgacccgggcgaatggagacgttcagtaggggtcaacctcaacggtgctttctattgcacaaggctcgcgacacctttgctaaaaaactccaccaaagcttcaatcatcaacatctcctcggtggcaggccgccttggatttgcccgccggcttccttatgcctccactaaatggtccatgatcggtttcactgaaagcctagcca

SEQ ID NO: 203756 - DNA, 284 bp, Unknown
  Bacterial polypeptide expressing nucleotide sequence isolated from the Sargasso Sea
aatgaattttaagaataaaaaaattttaattacgggagcaacaggaggaataggcaacgctttagtaaaaaaatttactgatcttgaaggaatagttttagccactggtacaaagatagaaaaattagatgatattaaaaaaaagtttcctaaagtcttagttaaaaaatttgatatttcagatcatttaaaaattgaagaatttgtggaaaattgttctttagagcttggtggtttagatgtgctcgttaacaatgctggaattaatgctgacaatctttctt

SEQ ID NO: 203757 - DNA, 717 bp, Unknown
  Bacterial polypeptide expressing nucleotide sequence isolated from the Sargasso Sea
cttgaatgaaatttcattagccaatcgggtaataatgattactggagcgtctagagggctcggattggtaatggcgcgtgccttcatcgaaagaggggcatttgttgttgccacaggctctaaaaactctcttgaacttgctgcagttcaaacggaatttggtgaccgagctatttgtgttccatctgatgtgaccaaaccagacagtgctgcagatttaacagctcagacaattaagaagtgggggaaaatagatgttttggtaaataacgcaggtttgggtatgcgtgcaatatcagaagaatttaatacaaagccgacaaagttttgggaagccgacgtagatgcctggcaaaatattgtaaatacaaatatcaatgggcctttttacctttctcgctccgtaatcccgcacatgctaaaaaataattatggtaaaataataaatatatctacttcctatcaaacaatggttcgtagaggttattctccttacggctcctcgaaggcatttttagaagctgcaacgtgcagttgggcggatgagttgaaagaaactggaattacagtgaatgttctattgcccgggggagcaacagatacggatttattgcctccgagcaaaaataaaaaaggtgctgatggaaatctgttagaaccctctattatgatggaaccagccgtttggttggcctctgaattttctgatagtgttac

SEQ ID NO: 203758 - DNA, 745 bp, Unknown
  Bacterial polypeptide expressing nucleotide sequence isolated from the Sargasso Sea
atgcatatcgatctgacaggtaaaaaagcgctggtcaccggagccagtcgtggattagggcgcgccattgcactgtcgctggcgaaagccggtgctgatgttgttataacctatgaaaaatctgcggagaaagcccaggccgttgccgatgaaattacagcacttggccgccatggtgaggcgattcaggcaaacagtgcagacgctcaggcgattcagaatgccgtaaaccgcacggtacagtcactcggtggactggatattctggtcaacaacgcagggatcgcacgcggcggcccgctggagtcgctgtcactggaggacatcgacgcattgattaacgtgaacatccgtggcgtggtagttgccatacaggccgcgctaccgcatctccctgaaggtgggcgaatcatcaatattggcagttgtcttgccaaccgcgtcgcccagccggggattgccgtctacgcgatgactaaatcagcgctcaactcgctaacccgtggcctggctcgcgatctcggcccacggggtattaccgttaatcttgtccatcccggcccaactgacagtgatatgaacccggcagatggcgagcaggcagaatcccaacggcagcttattgctacagggcattacggaacaccggaggatgttgcagcggcggtgacgtttctggcaagcccagcggctgggcagatttccggcaccggtctggacgtagatgggggtttgaatgcctgaa

SEQ ID NO: 203759 - DNA, 936 bp, Unknown
  Bacterial polypeptide expressing nucleotide sequence isolated from the Sargasso Sea
gttgctgttatcagtaacggaactgcaattttaggcttgggaaatctaggcccactggcatctaaacccgttatggaaggtaaagcacttctgtttaagcgctttgctgggcttgatgccattgatattgaagtaaaacatcgtacaactgaagagttcattaatacggttgccaatattgctgatacatttggcggtattaacttagaagacatcaaagcacctgaatgttttgagattgaacaagagctgattaaacgctgtaacattccggtgtttcacgacgaccagcatggtactgcgatagtaaccgcagccggtatgcttaatgccttggaaattcagggtaaaagcatagagagcgccaaaatagtttgtatgggagccggtgcagcagcagttgcttgtatggagcttcttattaaatgcggtgcccagcgtgagcgtatttatatgctagacagaaaaggcgtgatccatacgcgtcgcgaagacttaaccgagcacaaaaagctattcgctaacaatacggacaagcgcacgctggaagacgtaatggaaggggctgacatctttgtaggtgtatctggtcctgatgtcttaccaccagaaacgctggcgttaatggctgaaaacccgattgtatttgcatgctctaacccagatcctgagataaaacctgaacttgctcacgaagtacgtaaagatcttatcatggcgaccggacgttccgactaccctaaccaggttaacaacgtattgtgtttcccgtttattttccgtggagcactagatgttcgtgcaacggccatcaacgatgaaatgaaagtagcggcagtagaagcccttcgtgctattacgaaagagcccgtaccagaggaagtattagctgcaagtaaaagtgccagtctcacatttggcaaggaatatataatt

SEQ ID NO: 203760 - DNA, 934 bp, Unknown
  Bacterial polypeptide expressing nucleotide sequence isolated from the Sargasso Sea
tgttttgtttaagagatttgcagatatagactctatagatttagaaattgactcttcagatcccaatgaaattgtaaatagtattaaaaattttgctccaagttttggtggaataaatcttgaagatattgcagctccagattgttttattatagaggaaaaactcaaagagattttagacattcccgtttttcatgatgatcaacatggtacagcgataataactacagcagcattaataaatgcacttgatattaataaaaaggatataaataatattaaaattgtagtcaatggtgcgggtgcttctgcgatggcctgcacaaatctattcaaaaaaagtggcgttccccaaaaaaatattacaatgattgacagaaaaggagtaattttcaggggacgagataatttaaatcaatggaaatcaggtcatgcaattgatactgataaacgtagtttagatgatgcaatagaaaatgcagatgtttttttaggtttgtctgcaaaaggagcattaactaaaaatatggtaaaaaaaatggcgagaaatcctataatttttgcctgtgcaaatcctgatcctgaaattacacctgaagaaattgaggaagttagagatgatgcaattattgctactggaagatctgattaccctaaccaggttaataatttaattggttttccttatatattcaggggtgctttagatgttagatctaaaacgataaatgaggaaatgaaaattgctgctgcacatgcaatagcaaatttagctaaagaagatgtgcctgatgaagttgttgctgcaatgggtggtgaaagaccccattatggtaaagattatatcatcccatcaacatttgacccaagactaattagtgtaattccggcagctgtagcaaggcagcaattgatactggtgttgctagaataa

SEQ ID NO: 203761 - DNA, 842 bp, Unknown
  Bacterial polypeptide expressing nucleotide sequence isolated from the Sargasso Sea
aatggaaggtaaagcagtattatttaaacgttttgcagatatagatgcaattgatttagaaatagacagttcagatacagatgagattattaaaagtattgtaaatttttcaaaaagttttggtggaattaatttagaagatattgctgctccagactgctttgtcattgaagaaaaacttaaagaaatattagatattcctgtatttcatgatgaccagcacggtacagcaataataactactgcagcactaatcaatgcattaaatatatcaaaaaaatcaataaaaaaaattaaagtagttgtaaatggagctggagcatctgctattgcttgtacaaatttattaaagaaaactggtgtaccatcaaaaaatataattatgcttgatagcaaaggtgttctatatcgaggtagagataatttaaatcaatggaaatcagctcatgcaattgaaacaaaaaaaagaagtttagatgaagcaattgatggtgcagatgtctttttaggattatcttcaaaaagcattttgtcaaaaaaaatggtaaaaaaaatggcaaaaaatccaattatttttgcttgtgcaaatcctgatcctgaaattacccctgaggaagtggaagaagtgcgtaaggatgcaatagtagcaacaggaagatcagattatcctaatcaagttaataaccttattggctttccatatatatttagaggtgctctagatgtcagagcaaaaacaataaatgaagaaatgaaaattgcagcagcaaatgcaattgcagctcttgcaagagaagatgttcccgatgaagtcgccgctgcaatgggaggaggagaaagac

SEQ ID NO: 203762 - DNA, 577 bp, Unknown
  Bacterial polypeptide expressing nucleotide sequence isolated from the Sargasso Sea
atgagaaatgcactaatcacaggagctactggcggcataggatcatctcttatacaaaagttccatgagaatggatatactatctgcgcaactggcacaaacaatgaaaagctgatcgctttacaagaaaaatatcaagagcgcctcaagataatcaggtgtgacttgtcggactctactcaaattagggaattagtagataagtctaataaattttatggatcaacaaatattctagtaaacaatgcaggaataacaaaagataacctttttataaagatgaaagatgaccaatgggatgaagtaatcagtattaaccttaatgcaaactttttactaactaaacttattattaaggatatgattaaagccagatgggggcgaattattaatatctcatcggatgctgcaagaattggaaattcaggacaagcaaattatgtagcatcaaaatccgctgttgaaggaatgagtaaaacaattgctaatgaagtagctacaagaggaataactgtaaattgtgttgcacctggttttataaatacaaagatacttgactctgttgatgaaaaaagac

SEQ ID NO: 203763 - DNA, 377 bp, Unknown
  Bacterial polypeptide expressing nucleotide sequence isolated from the Sargasso Sea
aatgacatcaggaaatcaagaaaaatcaacatattctaataaagttgctcttgtcacaggaggtaccagaggaattggacaagaaatatcaaaaaaacttcaaaaagatggattctcagtaattgctaattacgcaagtaacgatcaaaaggcatcagagttctcgaatgaaaccggtatcgaaactattaaatgggacgtaagtgattatgaggaatgttcaaaccaaataaaaaaaatttatgataaacacaaaactatcgatattctaataaataatgctggaattacaaaagatgctccactacataaaatgccacttgaacaatggaataaagtaattgaagttaatttaaactctatttttaacgttacct

SEQ ID NO: 203764 - DNA, 436 bp, Unknown
  Bacterial polypeptide expressing nucleotide sequence isolated from the Sargasso Sea
atggcgcgcgtagctttcgtgacgggcgggacccggggcatcggcaaggcgatcgttcagcgcctgcatgaggacggcttcaaggtcgccgccggctattccggcaacgacgaggcggccaaggccatcgccgatgcgctggacgtcatggtggtgaagggcaacgtcggcagcttcgatgactgcgcccgcgcggtgaaggaggtcgaggatcagctcggccccatcgacatcctggtcaacaacgccggcatcacccgcgacggcttcttccacaagatgagccacgaccagtggtccgacgtgatccgcgtcaatatggacagcgtcttcaacatgacgcgccaggtcatcaacggcatgcgcgaccggggccacgggcgcatcgtcaacatctcctcgatcaacggccagaagggccagatcggccagacca

SEQ ID NO: 203765 - DNA, 878 bp, Unknown
  Bacterial polypeptide expressing nucleotide sequence isolated from the Sargasso Sea
agatatcggccccaaagccgcgatgcctgtgatggaagggaaagcgatgcttttcaaacagtttgcagacattgatgcctggccgatctgcctcgacactacagacaccgaagaaatcatttccatcgtcaaagccctggctccaggctttggaggaatcaatttggaggacatttcagcaccacgttgtttcgaaatcgaggaacggctgaggaacgaactcgacatccctgtctttcatgatgatcagcatggcacggcagtagtgacgacagccgccttgatcaacgctctcaaactcgttcggaaaaaacccaaggacatcaaggtggttgtttcaggtgcgggagcagcaggaactgcctgttcaaaaatgatcatgcatttgggagtcaaaaatctgatcggatgtgacagtaaaggggccattcataatcaacggaccgatatcaatcaaagtaaacgatggtttgctgataacgccaacccggatcaggaacaaggatctttgaaagaggttctcaaaggtgcagatgtttttgtcggggtttccgcaccgaatatcctggacgctggagacatccgaaatatggagaaggatgccatcgtctttgccatggcgaatcccgatccggagattcttcctgaggacgctagaccggttgctgcagtggttgcaacgggtaggagtgattacccgaaccagatcaacaatgtactttgctttccggggatctttcggggggcacttgattgcagagcaaaaacaatcaccgaagaaatgaaactcgctgcatcccatgccattgcggaaaccttggatgaacagcatctcaatccggattatatcattcctacggttttgacaaaagcgtgac

SEQ ID NO: 203766 - DNA, 946 bp, Unknown
  Bacterial polypeptide expressing nucleotide sequence isolated from the Sargasso Sea
gcagatatagatggaatagatattgaggtagatacaagtgatgcagatgaatttgttaactgtgttaaatatttaggaaaatcttgggggggaataaatttagaagatattgcagctcctgaatgttttatcatagaacaaaagttatctgagaaattggatattccagtttttcatgatgatcaacatggcactgctatagtagctacggcaggcgtattaaatgctctaacaataacgggaagagatataaaaaattttaagatggtagttaatggagctggtgcagctggaatagcttgcgttgagttattaaaagctatgggtatgccctccaacaatgtaattatgtgtgatagaaaaggtgtaatatcaaaagatagaaccaacctagatcaatggaaatccgctcacgcagtagaaacctctcataaaacgcttaaagatgctcttaaaggagcagatattgcctttggtttatcagcaaaaggagcatttactaacgagatgatgctttccatgaatgataagccaattgttttcgcaatggcaaatccagatcctgaaattagtcctgatgagcttagaaaaataagacccgatgcaattattgcgacaggaagatctgattatcctaatcaggtaaataatgtacttggctttccctacatttttagaggtgccctcgatgttagagcgtctgctatcaatattgatatgaaaattgccgcaacaaaagcattagctgatttagcaaaacaagatgttccagatgaagtttctaacgcatattctggtaagcacttacagtttggtccagaatatattattcctaagccgtttgatgcaagattacttacaacaatacctcctgcagttgctaaagctgcagaagagtctggtgtggcaagaaaacctataaaagatgaattaggatatagaagaa

SEQ ID NO: 203767 - DNA, 901 bp, Unknown
  Bacterial polypeptide expressing nucleotide sequence isolated from the Sargasso Sea
tgctttattatagaagaaaaattaaaaaaaattctagatattccagtttttcatgacgaccaacacgggactgcaattattacaactgcagcattaataaatgcattagatataagtggtaaatcaatatcagaaataaaagttgtagttaatggagctggtgcttctgctcaggcttgtactgaactattcaaaaattctggggtcccatctgagaatatagttatggttgatagaaaaggagttatatttaaaggaagaacagatggaatagatcaatggaaatctagatatgctgtggatactaaacttagaactcttggggacgcgatgaaaaatgctgatgtttttttaggattgtctgcaaaaggggttctaaaaaaagagatggttaaaagcatggcaaaaaatccaattatatttgcatgtgcaaatccagatcctgaaataacacctgaagaaataaatgaagttagaaatgacgcgatagtagcaactgggagatcagattatccaaatcaagtaaacaatttgattggatttccatatatttttagaggcgctttagatgttagatcaagaacgattaacgaagaaatgaaagttgcagcgtctcaagcaattgctaaacttgctcgagaagatgttcctgacgaagtagtggcagcaatgggtggggaaagacctcattatggaaaagattatattattccttctacatttgatccaagactgataagtgtaattcccgctgctgttgctaaggctgctgttgacagtggtgttgctaggaaaaaaattgacgattttgatatttataaagagcaactaaagcaacgattagatccaacagtcactattatgcaaggtataaattcgtttattaaaaaaaaccaaaaaa

SEQ ID NO: 203768 - DNA, 949 bp, Unknown
  Bacterial polypeptide expressing nucleotide sequence isolated from the Sargasso Sea
atgggaaatcttggggctttagcatctaaacctgttatggaaggtaaagcagtattatttaaaagatttgcagatattgatgctattgatttagaaatagattcaaataatccaaatgaaataattaatagtataaaaaatttttctggaagctttggaggaataaatttagaggatatagctgcgccagactgttttataattgaagagaaactaaaaaaaattttggatattcctgtatttcatgatgatcagcatggaactgctattattacttgtgcagcactaattaatgctatcgatataacaaaaaaaaacatcaaaaatataaaagtagtagttaatggtgcgggagcatctgcaatggcatgtgcaaacctttttaaaaaaacaggggttcttcaaaaaaatttaactatgattgatagaaaaggagttattcatactgaaagaaaaggtttaaacaaatggaaattaaatcatgcaataaaaactaaaaatagaactttaaatgatgcaataaaaaatgcagatgtttttttaggtttatcttctgcgggtgttttaaaaaaagaaatgataaaaaaaatggcaaaaaatccaatcatatttgcttgtgctaatccggatccagaaataacgcctgaagaagttgaggaagttagaaatgatgcaataatagcaactgggagatcagattatccaaaccaagtaaataatttaataggatttccatatattttcagaggagcactagatgtaagagcaaaaactataaatgaagatatgaaaatcgccgcagcaaatgctatagcatctttggctaaaaaaagagttccagatgaagttgtcgctgctatgggtggtgacagaccgaagtatggaaaggattatattattccatcaacatttgatccaagattaatagcgtcataccaattgctgtagc

SEQ ID NO: 203769 - DNA, 379 bp, Unknown
  Bacterial polypeptide expressing nucleotide sequence isolated from the Sargasso Sea
atgggtttagaagaaaaaaagttagtaattgttacaggagccgcaagagggattggactagcaacaagtaaactatttttacaaaacaattttaaagtagcaatggttgataaagatgaagaagagttgaataaaattaatatacataacccaaattacaaaacttttacatttgatatttccgatgtagataaaaattctataatgattgaagaaataataaattggggtaaaaggattgatgtcctggtaaataacgccggcatagctgattttggtaaaatagaaacagtaaattataatagttggcgtaaaataatggaaacagaatttagatggatcttttttaactactcaaaattggtattaaacatctaag

SEQ ID NO: 203770 - DNA, 574 bp, Unknown
  Bacterial polypeptide expressing nucleotide sequence isolated from the Sargasso Sea
tatgatagatttaaaagataaaaatattattgttactggtgcttcgggtgggatcggaaattcaataattgaaaaattaaatcaagcaggagcaaatattttagcttcaggcacaagaatagaaaaacttgaggagttaaaaaataaatatagaaatattaaaacattaaagtttgatatttctcaaagtgacaaaattgaggaatttgttgaaaactcagccaaagaacttggtggtagcttagattgcatagttaacaatgcgggtattacacaagataatttagcaataaggatgagtttagaggaatggcaaaaagttattgatattaatttgacgtcaacttttttattgagcaagtcagcaataaaaaaaatgcttaaaaataaatctggtaagattgttaacataacatctgttgtaggtcataccgggaatcttggacaggctaattatactgcatcaaaagcagggattattgcaatgtcaaaaagtttggcaatagagtatgcgaaaaaaaatattaatgtaaattgtatatcgccaggttttattaaaacagcgatgacagat

SEQ ID NO: 203771 - DNA, 770 bp, Unknown
  Bacterial polypeptide expressing nucleotide sequence isolated from the Sargasso Sea
tgcgcccagtgattcagcgaatgaggttgtagagcagattgaatctgagggcggtgatgctatagcaaatggagctagtgttactgatctagatgctgtaaaaagaatggttgatgagaccatggagaagtggggaagagtagatgtcctagtaaataatgcaggaatattaagagataaaagtttccataaaatatctattgaagatttcaatttagttatgtctgttcattttcaaggtactttgaattgcacacatacagtttttccaataatgagagagcaaaattatgggagaataatctttactagttcctctagtggtgtatttggaaactttggtcaatctaactatggatcagcaaaaatggctatggttggcttaatgaatacgcttaagatagaaggacaaaaatataatattcacacaaattcaataacccctgttgcttacacaagaatgacagatggattgctaccggatgaggttggagagagccttcagccaagatatgtaacgccggctgttatttacctttcaggtgatgaagcccctaatggagctattgtttcggctggtgctggagtttactcgcgaatatttattcatgaaacagatggagtatcgcttggaatgggtgaagaaatgactcctgaaaacattgctgcaagttgggactcaatatccgatatgaagggcgctaaggcccttcaaagtggaccagagcaatcgataaagatttttgaaaaattaaaccaaaaagattagt

SEQ ID NO: 203772 - DNA, 559 bp, Unknown
  Bacterial polypeptide expressing nucleotide sequence isolated from the Sargasso Sea
tatgcggcttgaaggaaaagtggcgctggtaaccggtgcgtcgcgcgggatcggtctcggcgtggtcgagcgtttctgcgaggagggcgcgatcgtctatgccggcagcagcagtaatccgacggggatttatcccgagggggtgaccgggctgaagctcgacgtcgcaaacgaggatgactgggccaaggccatcgaacggattattaccgagcagggccggatcgactgcctcgtcaacaatgccggcattgccgtctatgacggcgtggcggatggctccaccgagaactggcgcaaggttctgggcgtcaaccaggacggcgtgttcttcggcatgcgcgcggtgataccgcacatgcagggcaggaaatccggatcgatcatcaatatctcgtcgatctggggtaagggcgcggtgcccggcgcgcacgcctatcacgcttccaagggcgcggtgatcatgatgaccaagaatgcggcgattacccatgttggcgacggcatccgggtgaactcggtgcatccgggcttcatcgatacgccgctgacccaggcc

SEQ ID NO: 203773 - DNA, 404 bp, Unknown
  Bacterial polypeptide expressing nucleotide sequence isolated from the Sargasso Sea
aatgacaaaaatagcaatcgttacaggaggtactagaggaataggtgcttcaatttccaaaaagttaaaatcttcaaacttcaaagtcattgctaattacgcaagcaatgacgaagccgccaaatctttctcaaaagataataatattgaagtaattaagtgggatgtaagcaattttgatgaatgccaaaaatcagttagtcgcatttatgaggagaacaaaaatattgatattctagtaaataatgcaggaataactagagacgcacctcttcataaaatgagtaaagataattggcaaaaagttattgatgtaaacctaaattcagtctttaatatgacatctttagtgattaataaaatgagagaaaatagttttggaagattagttcacatttcttctg

SEQ ID NO: 203774 - DNA, 220 bp, Unknown
  Bacterial polypeptide expressing nucleotide sequence isolated from the Sargasso Sea
aatgtatttaaaaaaaataaatttaaaaaataaagttgctttagtaacaggtgcaggaaaaggtattggtagagcttgttcaattgctcttgcagaagctggtgcaacaataattggtttaagtagaactacttctgatctttataaacttcaaaaagatataaaaaaagttaaaggaaaattaattaaaataacctgtgatattatggattatgaagat

SEQ ID NO: 203775 - DNA, 268 bp, Unknown
  Bacterial polypeptide expressing nucleotide sequence isolated from the Sargasso Sea
atgaaaactgcattagtaaccggagccagcagaggtataggcaaagctatagctaaaaagctaaaagcagataattatgaagttcttggaacggccacgagtgtttccggggttgatacactaactagtgatggcattgaaggttatcttctagacctcaattcaaaagattcaattgatagcttttggagtcaattagaaagtgataataaaaccatatctgtgttggtgaataatgctggaattacaagagataatattatcctaa

SEQ ID NO: 203776 - DNA, 724 bp, Unknown
  Bacterial polypeptide expressing nucleotide sequence isolated from the Sargasso Sea
atgacaaaaatagcaattgttacaggaggaaccagaggaataggtgcctcaatttccaaaaaattaaaatcttcaaactttaaagtcattgcaaattatacaagcaatgacaatgctgcagaatcattttcaaaagaaaataatatagaagtagtcaagtgggatgttagtaattacgacgaatgccaaaattcggttaaaaaaatctatgaggataataaaaatgttgatattcttgtaaataatgcaggaattacaagagacgcaccccttcacaaaatgagtaaagataactggcaaaaagttattgatgttaacttaaactcaatctttaatatgacatcattagtaataaatcaaatgagagaaaataattttggaagaataattcatatttcctctgtaaatggacaaaaggggcagtttggtcaaaccaattatgcggcaacaaaatcagccctaatcggtttctcaaaatctttagcacttgaaagtgctagtaagggtattacttctaatgtaatttgtcctggttatatcaatacggaaatggtcgcggccattagagaagacatcttaaaatccattatcgaaacaattccaaataagagattaggtgaagctgatgaagtcgcagaaatggtagattttcttgtttcagataaagccagctatataaatggctctactttttctataaatggtggcttatggatggattaaa

SEQ ID NO: 203777 - DNA, 658 bp, Unknown
  Bacterial polypeptide expressing nucleotide sequence isolated from the Sargasso Sea
cctaacgagataataagtagtatcaaaaacttctctccaagttttggtggtattaatcttgaagatattgctgctccagattgttttattatagaagaaaagcttaaagaaattttagatataccagtttttcatgatgatcagcatggtacagcaattataactactgcagcattaatcaatgcacttgatattaataaaaaatcaattgaaaaagttaagatagttgtaaatggtgctggagcttctgcaatggcatgcacaaatttgttcaaaaaaagtggtgtcccacagaaaaatataacaatgattgatagaaaaggagtaatttttagaggtagagataatttaaatcaatggaaatcaagtcatgctattgaaactaaagatcgaaccttagatgatgcaattaaaaatgctgatgtttttttaggcttatcagctaagggagctttaacaaaagatatggttaaaaaaatggccaaaaatccaattatttttgcttgtgcaaatccagacccagaaattactccagaagaaatagaagaagtaagggatgatgccataattgcaactggaagatcagattatcctaatcaagtaaataatttaattggttttccttacatatttaggggagcactagatgtgcgctcta

SEQ ID NO: 203778 - DNA, 903 bp, Unknown
  Bacterial polypeptide expressing nucleotide sequence isolated from the Sargasso Sea
gcagcaccagattgctttataatagagcaaaaattaaaagaaattttagacataccagtttttcatgatgatcagcatggtactgcaataattaccacagctgcgttaataaacgctttagatataagtggtaaatccattaaaaaaattagagttgtagttaatggtgcaggagcttcagcccaagcttgtacggaattatttaaaaattcaggagttccatctgaaaatgtaattatgcttgatagaaaaggtgtgatctataaaggaagaactgaaggtattgaccagtggaaatcaaaatatgccgtcgaaacaaaactaaggacccttgatgatgcaattaaaggtgcagatgtttttttaggattgtcagcaaaaggcgtacttaaaaaagatatggtaaaaaatatggcaaagaatccaattatatttgcatgtgccaatcctgatcctgaaattttaccagaagaaataaacgaggtaagagatgatgcaatagtagcaaccggtagatcagattatcctaaccaagttaacaatctaattggtttcccgtatatttttagaggtgctttagatgttagatcaaaaacaattaacgaagagatgaaagttgcagcatcaaaagcaatcgccaaacttgcaagagaagatgttccagatgaagtggtggctgctatgggtggtgaaagacctcattatggaaaagattatattatcccatccacatttgacccaagattgataagtgttatcccagcagctgttgcaaaagctgctatggaaagtggtgtagctagaaaaaatattgaagattttgaaatttacaaagaccaattaaaacaaagactagatccaacagtaacgattatgcaaggtataaattcattcattaaaaaa

SEQ ID NO: 203779 - DNA, 907 bp, Unknown
  Bacterial polypeptide expressing nucleotide sequence isolated from the Sargasso Sea
aatgaaataattaatagtgttaaaaattttgctccaagttttggaggtattaatctggaggacattgctgctccagattgttttattatcgaggaaaaacttaaagaaattttagatattcctgtatttcatgatgatcaacatggtacggcaatcataactacagctgcattaatcaatgcactggatattaccaaaaaaaaaattgatgaagtaaaaatagttgtcaacggcgcaggtgcatcagcaatggcttgtgctaatttgtttaaaaaaagtggagttccaaagaaaaatattacaatggttgacagaacaggagtgatctatagtggaagagaaaatttaaaccagtggaaatcagctcatgctattgaaactaaacatcgaaatttaatagatgcaatcaataatgctgacgtatttttaggtttatcagcaaaaggggctttaacaaaagatatggttaaaaaaatggccaagaatcccattatatttgcatgcgcaaatcctgatccagaaattaaacctgaggaagttgctgaagtaagaagtgatgcaattatagccactggaagatcagactatccaaaccaggtaaataatctaattggttttccatatatatttagaggcgcattagatgttagatctaaaaccataaatgaggaaatgaaaattgctgccgcccacgcaatcgctaacctagctaaagaggaagttcctgatgaagttgttgctgcaatggggggtgagagaccacattatggaaaagattatataattccctcaacatttgatccaagacttataagtgtaattccagctgcagtagctaaagcagcaatagaatatggtgttgcgagaatagatataaaagattttgataattacaaagatcagtaag

SEQ ID NO: 203780 - DNA, 742 bp, Unknown
  Bacterial polypeptide expressing nucleotide sequence isolated from the Sargasso Sea
atgaattttaattttaaggataaaaatgtacttatcacaggtgcagcgggtggcattggatctgaaattgttaaaagcatgtattctttggaagcaaatataataatttcggggtcaaatgaaaaaaaattagctaatttttctaatcaatttagttcaccgctgctatattttccagctgacctaagtaaatataatgatatagaacaattagcagaaaatactctagataagtttaatgacaaattagacatattaattaataatgcaggtattactaaagacaatttaacgcttagaatgaaagattcagactggagcgatgtaataaatttaaatttaaatagtactttctacctcaccaagttttttctcaagtatatgattaaaaatcgttacggacgaataataaatatttcatcagtagttggttctagtggtaacctagggcaggctaattattcagcctcaaaagctgggatggaaggtatgagcaaatctatagcacttgaggtggcaagcagaaatgttactattaattgtgtagctccaggatttattgaaacagaaatgactaaagatatattagctaaaaacgaggaaagtttaaaaaaaagcattcctatgggaagagttggatttcctagtgaagttgcaagcctagtatcttttcttgcaagtgatttagcagggtatataactggacagacaatacatataaatggcgggctgtatatctaat

SEQ ID NO: 203781 - DNA, 885 bp, Unknown
  Bacterial polypeptide expressing nucleotide sequence isolated from the Sargasso Sea
ggtgctgttcaagaagttcgccggcatcgacgtcttcgatatcgagatcgacgcgccgtcgatcgatggcatggtctccaccatttccgcgcttgagcccacattcggggggatcaaccttgaggacatcaaggcgccggaatgtttcgaggtcgagcggatcctgcgcgagaaaatgcagatcccggtgttccacgacgaccagcacggcaccgccatcatcgtcgccgccgcgatcctgaacgggctggagcttgccggcaaatcgctggagaacgtcaagatcgtggcctcgggcgccggcgccgccgcgctcgcctgtctcaacctgctggtctcgctcggcgcgaagcgcgagaatatctgggtgttcgacattgacggcctcgtccatcccggccgcgagaccaatatggaccagtggaaggcgatctacgcgcaggagagcgacgcccatgcgcttgccgatcacatcgccggggcggacgtgtttctcggcctctcggtcgcaggcgcgctgaagccgtcgctgctcaagcagatggcgccgcggccgatgatcatggcgctcgccaacccggtgccggaaatcatgcccgacctcgcccgcgccgagcgcgatgacgcgatgatctgcaccggacgctcggacttccccaaccaggtcaacaatgtcctgtgtttcccctatatcttccgcggcgcgctggattgcggcgcgcggacgatcaacgaggaaatgaaaatggccgccgtgcgcgccattgccgggctcgcaaaggaggaggtgtgggaggcctctcgcactgcggccaatggcgagccgctgatcttcggtccggattacctgatcccctcgccgttcgacccgcgcctgatcctgag

SEQ ID NO: 203782 - DNA, 406 bp, Unknown
  Bacterial polypeptide expressing nucleotide sequence isolated from the Sargasso Sea
aatgtccgccgacgcacgcgtggccattgtcaccggcgcgtcgcgtggcattggggccgccatcgcccagcgcctggcgcgcgatgggctgcgtgtggtggtcaactacgcgggccgcgccgccgacgcgcaggccgtggtccagggcattgcggaagcaggaggacacgcagtggccgtgcaggccgatgtggccgactcccaggccgtgcagcggctgttcgacagcgcggaacaggcttttggccgcatcgacgtgctggtgaacaacgcgggtgtaatgccctccaccacgccccacctggtggacacggacgacgccaccttcgaccggctgatggccatcaacctcaagggcagcttccacaccctgcgcgaggccgcgcgccgcctgcagccgggcggg

SEQ ID NO: 203783 - DNA, 289 bp, Unknown
  Bacterial polypeptide expressing nucleotide sequence isolated from the Sargasso Sea
gatggatgatcgcaaaattttagttttaaccggtgctagccggggtattggccacgccacggttaaaagattctcaaaagcaggctggcgtgtcataacttgttcgcgtcatggttttccagaaaactgcccgtgggaggctggcccggaagatcatttgcaagttgatttggccacaccagcagatgttgaaacgcgcgcggaagagctgaaatcacggcttattggggtaccactgcatgcgcttgtcaataatgcgggtatttcgccaaagtctgctgaagggcaa

SEQ ID NO: 203784 - DNA, 571 bp, Unknown
  Bacterial polypeptide expressing nucleotide sequence isolated from the Sargasso Sea
atgtatttaaaaaaatataatttaaaaaataaagtagcattagtaacaggcgctggaaaaggtcttggaaaagcttgcgctatcgccttagctgaagctggtgccaatttaataataattagccggacaaacaaagatttacaacaagtatctaaaacaattaaaaaatttaaagttaaatgtaaatcatatgtatgtgacattactaattacaatgaaattaaaaaaattataaataaacaatcaagaattgatgttttggttaataatgcgggtaccaatatccccgaatattttacaaaagtaaaaacaaaaaatatggaatatatggttaaaattaataatattgctgcatttaatcttgctcaactttgcgcaattaaaatgattaatgcaaaaaatagaaaaaagattggcgggtcaattgtcaacatgtcctcgcaaatggggcatgtaagtggtccaaaaagaactgtttatagtatgaataaatttggcgtggaaggattaaccaaagaaatggctttagaacttgcaaaatataatattagagtaaatgcgatatcaccaa

SEQ ID NO: 203785 - DNA, 357 bp, Unknown
  Bacterial polypeptide expressing nucleotide sequence isolated from the Sargasso Sea
aaaatccaattgtatttgcgatgtcaaaccctgatccggaaatcagtccagaagaagcttcgccttttgcagcagtcatggctacaggtcgcagtgattatccaaatcaaatcaataatgtgctttgttttccaggaatatttcgtggtgcactggactgccgttcgaatacaattaatgaagaaatgaaattagctgcagcacatgcaattgctggggcagtagatgatgcgcatcttaacgcggattatataattcccagcgtttttgatactactgtagtaaaaaagatttcggagtcagttcaggctgctgcttataagactggagtagcaagccgaaaacaaagcaaataga

SEQ ID NO: 203786 - DNA, 739 bp, Unknown
  Bacterial polypeptide expressing nucleotide sequence isolated from the Sargasso Sea
atgttttcattaaaaggtaaaaatgtactcttaactggtagttcgggcgggataggtcaagaaatagccagagcatttcataaacagggagcaaatattattttgtccggaacaaatgaagacaaacttaatgatctatcaactgagttaggagaaagagctaactacattatcgctaatttagaaaaaagagaagatatagatcatttgtcttcaaaagctgaggagaaactcggtcatttagatattttagtaaataacgctggtattacatcagataatttatttataagaatgaaggatgaagagtgggataaggttttggatgttaacttaagagctaacgtaagactaactaaaaatattattagaggaatgttaaaaagaagatttggtagaataatttttatcagttctattattggatatacaggtaatattggacaatcaaattatgcatgttcaaaatctgctttatcagggttttctaagtcaatatctttagaagttgcaaacagaggtataacttgtaacttaattgcaccaggttttataaaaactccaatgacagataaattaaatgaaaatcaacaaaaaattatacttgataaaattcctatttcaagatttggaagacctgaagatatatctgctgcatgcatttatcttgcaagtgatgaggcaagttatctgactggaacaacaattcacgtaaacggtggaatgggcatgttttaaa

SEQ ID NO: 203787 - DNA, 395 bp, Unknown
  Bacterial polypeptide expressing nucleotide sequence isolated from the Sargasso Sea
aatgtttaatttaaatggtaaaaatgcactcataactggtgcttctggcggaattggaagggctattgcggagactcttcacgcatctggagccaggttaaccattagtggtactcgcatggaacctttggaggaacttgcaaagagtttaggtgatagggttcacataatgggctgcgatttatctaatggtgttgaagttgaaaatttatctaaaggggctcagaaaaaaatgggttcggtagatattctggtaaataatgccggtataacaagagacaatttattcttaagaatgacagatgaggactgggctagtgtgttggaggtaaatctgacttccactatgaaactttgtcgtggagtgttgcgaggaatgatgaagtcgagatggg

SEQ ID NO: 203788 - DNA, 735 bp, Unknown
  Bacterial polypeptide expressing nucleotide sequence isolated from the Sargasso Sea
taaatttaaaggataaaaatattatagttacaggagcttctggtggaataggtagttcaattgttgagcatctttatgaggctggtgcaaatattttagccactggtacaagaatagacaaattggatcagttaaaaagtaaatttagtaaaataaaaatactaccttttgatatttctaatcatgataaaattgagggttttattaatgatgctgatgaattattaggtgataatttaaattgtctagtaaacaatgcaggtattactaaagataatttggcgattagaatgaatttaatggaatggaataaagttatagatttaaatcttacttcaacatttttaatgagtaaatttgcaattaaaaagatgttaaaaaataaatctggaaagatcataaatattacctcagtagtaggtcacactggaaatataggacaagtaaattacactgcttcaaaagcaggtatagttgcaatgtctaagagtttatcaatcgaatacgcaaaaaaaaatattaatgtcaattgcatttctcctggatttattgacactgccatgactgaaaaaattgatgaaaaatttaaagaatcgattgtatcaaaaataccgtcaggtaaattgggaaaagcagaagatattgcaaatgctgtgatttttttagcttcatctaaatcagactacataaatggcgagacaattcatgttaatggtggtctgtatttaggttgac

SEQ ID NO: 203789 - DNA, 878 bp, Unknown
  Bacterial polypeptide expressing nucleotide sequence isolated from the Sargasso Sea
aaagtttattgataccgtatcagcattagagccaacttttggaggtattaatctagaagatattaaggcgcctgaatgttttattatagagaaagcgcttagggaaaaaatgaagataccggttttccatgatgatcagcatggaacagcaatttgtgtagctgctgctcttataaatggactaagaatcattgataaagatatatccaaagctaacctagtttgttctggtgctggtgcagctgcgttagcatgtcttgatcttctggtagagatgggaatgaaaccagataatataattgtttgtgatagattgggggttattcataaaggaagaaaaagtgatttggatgagtataagttaaagtacgcaattgagactaatgcgagagacttaaatgatgcaatagaaggtgctgatatttttctaggtgtttcaactgagggagttttatccaaagatatggtaaaaaaaatgtctagtaggccacttattcttgcattagccaatcctaatcctgaaattttaccagaagatgtaacggatgtaaggcctgatgcattaattgcgacaggtcgttcagactacccaaatcaagtaaataatgttttatgtttcccatttatgtttcggggtgctttagatgtgggtgcaacagaaataaatgaagctatgaagattgcagcggtatatgcaatagcagatttagctaaagctgaagtttcagatgtcgttgcaaaggcctattcgggtcaacagttagaattcggccctaattatttaatacctaaaccctttgatccaagattaattataaaagtttctagtgctgtggcaaaagcagcaatagaaacaggtgtgcaaccagacctataga

SEQ ID NO: 203790 - DNA, 682 bp, Unknown
  Bacterial polypeptide expressing nucleotide sequence isolated from the Sargasso Sea
attgattaatttaattgataaattaatgcttgttactggttcaggaacaggagtaggaagcggcattgcaagcaccctagccaaatgtggtgcagacgtagttgttcattataataacagcgaaagagaagcccataaaaccaaagaaatcatagattccttaggtcgaaagtgtaccctgataaaaagcgatttaaaagctgtcgatgaatgcagaaggacagtagatgaagctgcagaatttcttggtgggttagatggactagttaataatgctggaataacaatacctaaagatataaaagaaattgatgaaaaccactttaatgatattttctcccttaattttagaagttatttcttttgtgcacaacaagctataaaacacttagtaaaaagaggtaaaagtttgtctgagaataataaaaattataagtggtcaggaggtagcattgttaatatttcatcagttcacgggaaattgggtcatcctggtcattcagtttatgcatcaactaaaggagctataaacagttttacaaaacaattatcagttgaattaatttctgaacatataagagtgaatgcaattgcaccaggaacgattgaagtcccgagttattttgaaaaagatccatcttataatcgggaattagggaattctcttgtacctttggggtag

SEQ ID NO: 203791 - DNA, 625 bp, Unknown
  Bacterial polypeptide expressing nucleotide sequence isolated from the Sargasso Sea
ctctgaagttgaccagataataaagaaatatggcaaaattgatgttctagttaacaatgcaggaattaatataactggacccactgaaacaatgaaaatggatgatgttaaaagggtatttgatacaaatttttttagtcagcttaatctaatccaaacagtcttacctcacatgagatcaaaaaaaaagggtttaataattaatattacttcaattgcaggatatcttgggcttccattttggagtgcctattgtgcatcaaaagcttcatttagagttattgcggaaagtttaaatatagaacttaaaaaatacaatgttaacattgtaaatattgccccaggtgattataaaactgaaattttgaataataggagggattcaaacaatcctagttcttctccttattttcaagaatatgaaaaaattattaaaagtgttaatgaaaaaatgaatcatggaagggacccgattgaagttgccaacttagtgttgaaaattattaaagaaaagaaaccaaaaattaactaccttgtcggtggatttcttgaaaagaaaattacattgaaaagtctattaccagataagctttttcagaaaataataatgaaactatatagctaa

SEQ ID NO: 203792 - DNA, 262 bp, Unknown
  Bacterial polypeptide expressing nucleotide sequence isolated from the Sargasso Sea
tatgtcgaaagtagcactagtcacaggcggaacaagaggtataggtgccgcaatttcaatagctttaaaaaatgatggctgcaaagttgcagcaacttatggatcaaattcagatgctgcaaatgcttttgcctcggcaaatggaattgaagtatttcaatggaatgttgctgatgcagctgcctgtgaagcaggagtgaagcaggttgtggaaaaattaggctctgtagatattcttgttaacaatgctggaatcacaaag

SEQ ID NO: 203793 - DNA, 790 bp, Unknown
  Bacterial polypeptide expressing nucleotide sequence isolated from the Sargasso Sea
agttttggtggaattaatttagaagacatagcagcacctgaatgttttataattgaaaaaaaactaaaagaaattttggatattcctgtttttcatgatgatcaacatggaactgctataattacaacagcagcattgattaatgcagtagacataaccaaaagagatattaaaaaaataaaagttgtaattaacggtgctggtgcatcagcaatggcatgtgcaaatttatttaaaaatcagggtgtttctcaaaaaaatattacaatgttagatagtaaaggagttatttacaaaggtagaaaaaatttaaatgaatggaaatcattacatgctatagaaacaaaatcaagatcactagaagaagcaattaaaggcgctgatgtctttttaggattatccaaagctggaacattaaaaaaagagatggttaaaaaaatgtcaaaaaatccaattgtttttgcctgtgctaatccagacccagaaataactccagaagaaattgaacaagttagaagtgatgcaataattgctactggtagatctgattatccaaatcaagtaaataatttaattggtttcccctatatttttagaggagccttagatgttagagcaaaaacaattaatgaggagatgaaaatagctgcatctaatgcaatagctacattagcaagagaaagagttcctgatgaagtagttgctgcaatgggaggtgaaagaccaaaatatggaaaggattacataataccatcaacatttgacccaagactaattagtgttattccag

SEQ ID NO: 203794 - DNA, 416 bp, Unknown
  Bacterial polypeptide expressing nucleotide sequence isolated from the Sargasso Sea
aatgaatttaaaaaataaaaaagttttgattactggagcaactggaggtataggaaacagtttagttgaaaaatttaattcattaggttctactataatcgcaacaggaacaaatgaagataagctatcttcattaaagaaagaattttcagatattcacattgaaaaatttaaattggatgaacacaaaaaaattgaggaatttattaacaaaatggatcaaaaagttgatggactagatatccttgtcaataacgccggtataacactagacaatttatctattaggttaacagaggaaaattggaaaaaagttttagatataaatttaacttcaacatttttaatgtgtaagtatgcgataaaaaaaatgttaaggaaaaaaaaaggcaagataatcaacattacatcaattg

SEQ ID NO: 203795 - DNA, 484 bp, Unknown
  Bacterial polypeptide expressing nucleotide sequence isolated from the Sargasso Sea
catgcttagccattctgatggtctttttcgcgagataggtcagtcgattgcgagtgactatccggaaattgaatttgaaacctacatcatagatgactttttatgccggatgataagcgacccccatgcgttggacgtggtcgttatgccaaatctgtacggtgacattatgtcagatggagcggctggcttaatcggagggctagggttggcgccctctggttgctatggggatgactatgcgtatttcgagtcagctcacggcacagctcctgacattgctggccaaaatattatcaacccaacagccaccatattatcggcctgtatgatgctcgaatatctgtcttttggagaagctgcaatcaagttgaagagcagtttatcgcagatctatgctgagggtaatttgttaaccaaggatcagggcgggagtgctacgacgactcagttttgtgatgcgatcaaagggctggttgagtga

SEQ ID NO: 203796 - DNA, 902 bp, Unknown
  Bacterial polypeptide expressing nucleotide sequence isolated from the Sargasso Sea
tattgatattgaagttaatagtaataatgctaactcaataatagaaacaattaaaaatataagcggtacatttggtggtatcaatcttgaagacattgctgcgcctgattgttttataatagaacaaaaactcaaagaagttttagatatacctgtttttcatgatgaccagcatggtactgcgattattacaacggcagctttaattaatgctttagatgtttccaaaaaaaaaattaatgaagtaaaaattgttgtcaatggagcaggagcatccgctcaagcgtgcacaaatttatttaagagttcaggtgttaatagtgaaaatatcattatgtgtgatagtaaaggtgtaatttataaaggtagaaaaaatattgaccaatttaaatctgcttttgctataaatactaaattaagaactttagaagaagcaataaaaaatgccgatgtatttttaggtctatctacaaaagatgttgttactaaagatatgataaaatccatggcaaaaaatccaataatatttgcttgtgctaatcctgatcctgaaattaagcctgaaattataaatgaagttaggtctgatgctatagtagcaactggcagatccgactatcctaatcaggtgaataacttaattggatttccttatatttttagaggagcgctagatgtcagagctaaagaaattaatgaagagatgaaagttgctgcagcaaaagcgattgccttgttggccagagaggatgttcctgatgaagttgtgtctgcttatggtggagatagacctaaatatggaaaaaattatattataccttcaacatttgatcctagattaattagtgtaattccatcagcagtagctcaagcagctatgaaaagtggggtagctagaaaaa

SEQ ID NO: 203797 - DNA, 493 bp, Unknown
  Bacterial polypeptide expressing nucleotide sequence isolated from the Sargasso Sea
atggatcttaataataaagttgctttagtcactggaggtgcgtctggtttaggtcaagcaactgttgaaaattttgttgttgctggagcaaaagtcgtaatcttagatatcaatgaagataacgcaaacaaaataatagaaaatcttggtgctgataaagtttcctttatttcaacaaatattatggaggaagatccagttgtatcagcaataaataaaattaaagatgagtatggagcacttcatatcgcagtaaattgtgctggtaccggatatcctggaagaattttgggcaaggaagcaccacatcctttagatgctttccaatttattattaatttaaacctcgttggaacttttaatgtaatgagaattgctgctgaactaatggataagaatgaagctgatgaaggtggagaaaaaggggttattatcaatactgcatctgtagctggatatgaaggacaaataggtcaatccgcttatagcgcct

SEQ ID NO: 203798 - DNA, 775 bp, Unknown
  Bacterial polypeptide expressing nucleotide sequence isolated from the Sargasso Sea
ctcgggaatatcggtccactggcgtcgaagccggtgatggagggaaaggccgtcctcttcaagaagtttgcgggcatcaacgtttttgacatcgaagtggatgagattgatcccgacaaattggttgatatcatcgtcgccttggaacccacttttggagccataaatcttgaagatatcaaggcgccagagtgtttcgtggttgagcgtaaatgccgcgaacgcatgggcattcctgttttccatgacgatcagcacggcacggccatcgtcgcggttgccgcgatcctcaacggcctgcgcctggtcagcaaggattgtgctgacattaagctggtgtccacgggcggtggctcggcgggcattgcatgcctgaacctgcttttaagtttgggtgtgaagcgggaaaacgtatggctagttgatcatctgggtgtgatctacgagggtcgccacgaagagatgaatccggaaaaatccgcctatgctcagaaaacggatgcgcggtctctggacgatgttatcgacgatgcggatgtgtttctgggtttgtcggctggcaatattctaaaatcagaaatggttaagcgcatggggccgaagcctctaattctggcgctggctaatccagtaccggagatcaatccggacgacgcccgggccgtcaacccggatgcggtgatagccacaggccgttcggattatccgaaccaagtgaacaacgtcttgtgtttcccgtttattttccggggggctctggatgtgagagcgacga

SEQ ID NO: 203799 - DNA, 223 bp, Unknown
  Bacterial polypeptide expressing nucleotide sequence isolated from the Sargasso Sea
atgagaaaaaaaataactttaattggtgctggacaaataggtggaacattagcccatttgatagctctaaaagggcttgcggatgtagttttatttgatgttgcagtaggcatagcaaaaggaaaagcgttagacattgctcagtcatctcctgtgaatggatttaacgtaaacttgtctggaactgacaattatgatgatacgaaaaattcagatgttatta

SEQ ID NO: 203800 - DNA, 933 bp, Unknown
  Bacterial polypeptide expressing nucleotide sequence isolated from the Sargasso Sea
atcagtgaaaatccagaagcagcttatgattatacaagtaaagggaatttggttgcggttatcagtaatggttcagctattttaggaatggggaatttaggagcattagcatctaaaccagtaatggagggaaaagcagtgttatttaaaagatttgctgacatagactctatagatcttgaaatagattctaaagacagtgaggaaattattaactcaattaaaaattttgctccaagctttgggggaattaatttagaggatatagcggctccggattgctttataattgaacaaaaattaaaagaaattttggatattccagttttccatgatgatcagcatggtactgctataattacaacagccgcactaataaatgctctagatataagtggtaaatcaataaaagaaattaaagttgtggttaatggtgctggagcatctgcccaagcttgcactgaattatttaaaaattcaggagtggcttcagaaaatgtaatcatgcttgatagaaaaggtgtaatttataaaggtaggaccgagggtatagaccagtggaaatcaaaatatgcagttgagactaaactaagaagtcttgaagatgcaatgaaaggtgcagatgtttttttagggttgtcagcaaaaggggttctcaaaaaagagatggttaagagtatggctaaaaatccaattatttttgcttgcgctaatccagaccctgaaattttacctgaagaaataaatgaagtaagaaatgatgcaattatagcaactggaagatcagattatcctaatcaagttaacaatttaattggtttcccttacatttttagaggagctttagatgtgcggtctaaaactattaatgaagagatgaaaaaaggtgcttctcaagctatagctaaacttgcaagagaagatgtccagaga

SEQ ID NO: 203801 - DNA, 734 bp, Unknown
  Bacterial polypeptide expressing nucleotide sequence isolated from the Sargasso Sea
aatgttagatgataaaattgcattgataacgggtggttgtagaggcataggtaaagctgtagcgctagaatttgctaaagcaggagcgactgtcattctgaatgacgtaagctctcaagattcagcgcaagaagtgttaaaagaaattgaagatttaggcggtaaatccgaatttctacaatttaacgtaactgaatcaggtatagtggaagaaaaaataaaatatatattagagaagtatagcagaatagatattttggttaacaatgcaggaataacgcgagactcgttgtttatgagaatgaaagaagagcagtgggacgaagtctttaacgtaaatatgaaaggtgtttttcattgtacaaaaaacgtggttcggtcaatgattaaaaataaatatggaaagataattaatgttgcctcggtggctggtgaaatgggtaatccaggtcaggcaaattatgcatctacaaaatcaggcataatgggatttactaaatctttagcgaaagaattgggatcaaagaatattaatgttaatgctgtaagcccaggattcataatgacgcatcttacagatgttttgccagaagagactaaagagaagtataaggaattaataccgcttgcaagatttggcgagccggaagatgtggcaaaagctatattgtttttagcctcagatgattcatcatatataactggagagattttaaggattaatggtggtcttt

SEQ ID NO: 203802 - DNA, 676 bp, Unknown
  Bacterial polypeptide expressing nucleotide sequence isolated from the Sargasso Sea
aatggatttattagaagttaacgctggaatagttagtgtagtaactaaaaatattttaaagcactctgataatccaataatagtggttgtaacaaatcctctagatcagatgacaactcttacagctgaagtatcaaatctttcaaaaaatagagttattggtcaagcaggtgtattagattcttcaaggtttgcatattttatttcagaaaaagttggtgttgatatttcaagcgtagaagctctaactcttggaagtcatggagagacaatggttccagttccttcattatgtaaggtagatggaaaaccattggaagaattattgtcatctgaagaaataaatgatttagttcaaaagacatccgatggaggagctgaaattgtaagtttactaaaaactggaagtgcatattttgcccctgcctcatctgctgcaatcatggtcaaagcaatgctaagtgattctaatgagatatttccagtctgtgcctggcttaatggcgaatatggcataaatgacgtataccttggtgttcctgcaaggcttggagcagagggagtaacagaaatagtcgaatatgacctaacaaacatcgaaaaagacgctcttttagaagcttcaagggctgttaaagaaaaagtggccgaattagatagcataaaaaatcaataa

SEQ ID NO: 203803 - DNA, 370 bp, Unknown
  Bacterial polypeptide expressing nucleotide sequence isolated from the Sargasso Sea
aatgtatcttaaaaaagtaaatcttaaaaaaaaagttgctctagttacaggagcaggaaaaggcatagggaaagcttgtgctattgctttagctgaagctggggctgatttaattattataagtagaacacaaaaagatcttgatgcagtgtcaaaaattataaaaagatttaaatctaaatgttcatcttatgtttgtgatgtaactaactacaatcaaataaaaaatattataaataaacaaaaaaaaattgatattttggttaataatgcagggactaatatccccgaacattttacaaaagttcagaaaaaaaatatggaatatctagtaaagcttaatactatatctactttccattggctcaac

SEQ ID NO: 203804 - DNA, 367 bp, Unknown
  Bacterial polypeptide expressing nucleotide sequence isolated from the Sargasso Sea
tatgaggcttttaaataaggtagtaattgtaactggagccgctggcggtattggagaagctcagtgccggttatttgctactgagagagcgaaaatagtagtttctgatactaatgaagagaagggctctaagcttgcacatgatatatcactagcaggtggatcagctttcttcgttaacttagatgtatcttccgaatccgactggacttcattggttgaaatatcaatagatagatttaaaacaattgacgtgttggttaacaacgcaggtatttaccgaactgaatcgatccaagaggagaacccggatgattgggatagactaatgtctgtaaatttaaaaggtgcctttttgggaacaaaa

SEQ ID NO: 203805 - DNA, 886 bp, Unknown
  Bacterial polypeptide expressing nucleotide sequence isolated from the Sargasso Sea
ttaaaagaaactttagatatcccagtttttcacgatgatcaacatggaactgcgataatcactttggcagcattattaaatgctttagatatatctggaaaaaagatcgaggaggtaaaaattgtagttaatggagctggtgcatcagcaatagcttgtacagacttatttaaattatctggcgttaaaaatagtaatgttattatgtgtgatagtaagggagtgatttataaaggaagaaaaaatcttgataaatttaaatctttacacgctattgataccaagttcaggacattatcagaggcaatgaaaaatgcggacgtttttttagggctttctgctaaagatgttgtcacacaagacatgataaaatctatgaataaaaatccaataatttttgcttgcgctaatccagatcctgagattaaaccagaattaattgacgaggtaagagatgatgcaatcattgcaactggaaggtcagactatccaaatcaagttaataatttaatcggctttccctatatctttagaggtgctctagatgttagagcaaaagtgataaatgaagaaatgaaaatagctgctgcgaaagcgattgcttttttagcaaaaggagatgttcctgatgaagttgtagcagcttacggcggtgatagacctaagtatggaaagaattatataataccatcaacttttgatcccagattgataagcgtaatacctgcagcggttgctgaagctgcaatcaaaaccggggtagcaagaaagaaaattagtaatttagatgaatataaagaccagcttgttaatagacttgatccttcaatgtcattgatgcaaggaataaatagtaaggtaaaaagaaatcctaaaactgttgtat

SEQ ID NO: 203806 - DNA, 493 bp, Unknown
  Bacterial polypeptide expressing nucleotide sequence isolated from the Sargasso Sea
attcttattaataatgctggtattacacgtgatgcgttactcatgagaatgaatgaagaccaatgggatcaagttataaatatcaatctcaaagctgcattcattggtatgaaagccgctataagacccatgatgaaaaataaatttggaagaattattaatataacctctatagttggaattacagggaatccaggacaggcaaattattctgcttcaaaagcaggattaattggtatgacacaatctattgctaaagaagtaggtactagaggaattacagttaactgtatcgctccaggatggatcgatacagaaatgaccattgatctgccagaaaacggtaaagaagaattattaaatagaatccctattggaaaaattggtaagcctgaagatattgcatatgcaacactctttttagcatccgatgaagcgaactacatcaccggccaaaccattacagttgatggtggtcgagtaataaattaaa

SEQ ID NO: 203807 - DNA, 850 bp, Unknown
  Bacterial polypeptide expressing nucleotide sequence isolated from the Sargasso Sea
attgatgcctctgacccaaatgaaataattaatagtattaaaaactttgcacctagttttggtggtataaatcttgaagatattgctgcacctgactgttttataatagaagataaacttaaagaaattttagatattccagtttttcacgacgatcagcatggaactgcaataatcactactgcggccctaatcaatgctttggatattacaaaaaaaaaaatcagtaaaattaaagttgttgttaacggagctggagcatcagcgatggcgtgtgctaacttatttaaaaaaagtggagtacttcaggaaaatttaacaatggttgatcgtaaaggggtcatatatgagggccgagaaaatcttaatcaatggaaatctgcttttgctattgagacttcagcacgaacattaagtgatgcaattgataattctgacgtatttttaggtctttccgtcaaaggagctttaacaaaagacatggtaaaaaaaatggcaaaaaatccaatagtttttgcttgcgcaaaccctgatccagagataactcctgaggaaattgaagaagtgagaaatgatgcaattattgcaacaggaagatcagattatcccaaccaagtgaataatcttattggttttccttacatattcagaggtgctcttgatgtgaggtcaaaaacaattaatgaagaaatgaaggttgctgcagcacatgcaattgctaacttagcaaaagaggatgtgcctgatgaagtggtcgcggcaatgggaggagaaagaccccattatggtaaagattacataataccatctacatttgatcctagacttataagtgttattcctgcggcag

SEQ ID NO: 203808 - DNA, 712 bp, Unknown
  Bacterial polypeptide expressing nucleotide sequence isolated from the Sargasso Sea
gatgatcgataaaaaaaaagttgttattactggtgctagtcgtggcattggcgcttctatagcttcagcctttcaaatgcgtggcaattatgtgataggaacaagtacttctcatgtaaatgcgaaagcaagttgtaatgagtggatcatcgctgatttttcaataagagagcaaatagaatattgtgtaaaacaaattcatgaaatcagtcctgacatacttgttaacaacgctggtataaataaaattgcctcctttaatgaaataagtccagatgactttttacttattcaacaagtgaatttgttcgctcccttcagattatcacaagcggcaattccttcaatgttggaacaaaactggggtaggatcataaatatttcatctatatggggtaagattagtaaggaatatcgggcttcttattctgcatctaagtttgcattggacggagttacacttgctttagcagctgaatattcaaagaatggtattttagttaacagtgttgctccaggttttacagatacggaattaactaggaatgttttgggtgagaatggtattaaaaaattggctgctggaattccaattggtagaatagcaaaacctgaagagatagcaaatctagttgtttggttaagtagcgaagaaaatagttatatatccggtcaaaacattgcaatagatggaggatttacacgtgtctga

SEQ ID NO: 203809 - DNA, 748 bp, Unknown
  Bacterial polypeptide expressing nucleotide sequence isolated from the Sargasso Sea
tttgtttagtttacaaaataaaatagcaattgtaacaggtgcttctcaaggtattggaaaaactacagctgaattattttcaagatcaggggcgcacgtagtttgtattgctagaaatgagaaaaaaataaaagatttagtatatgaaattactaaaaacggtcattctgcaagttataattcttgtgatataaatgacggtgatttatttcaaaatactatcaaatctattattaacaattgtggaaaaattgatattttagtcaataatgctggtataacccgagactcgatactattaagaatgaaggatcatcaatgggacgatgttttaaacacaaatcttaaaggcgctttcttcgcgacaaaatcagttttgagatcaatgatgaaaaataagtatggaagaatcataaatattacttctattgttggactccaaggtaactcagggcaaagtaattactcagcatcaaaagctggcttaattggtttttctcagtcagttgctaaagaagttgcttctagagggataacaattaattgtattgctccaggatggatagaaactgaaatgacaaatgatttaccgcaagatataagagctgagattattaaaaatataccaatcggaaaaactggaacaactgaggatattgcatatactgctctttttctagcctcaaaagaatcaaaatacattactggacaaaccatcactgttgatggtggtcgtgttattaattaa

SEQ ID NO: 203810 - DNA, 587 bp, Unknown
  Bacterial polypeptide expressing nucleotide sequence isolated from the Sargasso Sea
tatgaatgatttgaaggataaaaatataattgttacaggagcttcaggcggtataggaaattcaattgtaaaaaaattatatgatagtggcgctaatgttttagcttcgggaacaaaaattgaaaaacttgaagaattaaaaaaagaattcaaaaaaataaatattttaaagtttgatatatctcaaagtgaaaaaattgaggaatttattgaaaatgcaacaaaagaattaggtggtagcttagattgtattgtcaataatgcaggtattactcaagataacttggcaattagaatgagtttggatgagtggagaaaggttattgatgttaatttaacgtcaacatttttgattagtaagtttgctataaaaaaaatgttaaaaaataaatctggaaaaatagttaatattacttctgtagttggacatacaggaaatttaggtcaagctaactataccgcatcaaaagcaggaatagtggcaatgtcaaaaagtttagcgatagagtatgctaagaaaaatataaatattaattgtatctcaccaggttttattaaaactacaatgacagataagatagatgaaa

SEQ ID NO: 203811 - DNA, 676 bp, Unknown
  Bacterial polypeptide expressing nucleotide sequence isolated from the Sargasso Sea
ttggtgacaggatcaacgtccggtatcggtgcagccattgcacgtgtccttagccgggcaggctatgcggtggtgctccattcgcgaaattctgcggatacgggacgcgcgatggttgccgaaatgaagcaggctatttacttgcaagctgatcttgctgtcgaagctgacagggtcaggcttgttaacgaggctatcgccgcgtgggggcagctcgacgtactggtcaataacgccggtattagcagagtcattgcgcacggcgaccttgccgctgccagttcgacggtgtggcacgagcttaacgaggttaatgtcgtggcaccgttccatctggttgctttggccgagtcggcactgcgcgatgctgcccgttaccgtcgagcaggttgcgtcgtaaacatcagttcgcatgccggtacccgtcctaagggcgcatcgattccctatgcggtaagcaaagctgcgctaaatcacatgacccgcttgctcgcgttatcgctggggccagacattcgcgtaaacgctgtggcgcctggcttggtcgacacgcctctgaccgcagagtggacagaagcccaagagttgtggcgaactcgcgcacccatgcgcagggccgccagcccaaacgacatcgcaaaagctgttgtcatgctggtcgagtcggactactgac

SEQ ID NO: 203812 - DNA, 397 bp, Unknown
  Bacterial polypeptide expressing nucleotide sequence isolated from the Sargasso Sea
tatgaaaacagccttagtaacaggtgcctctagaggaatagggagggctattgctctagaatttaaagaaaaaggttattctgtcatcggtacagctacctctgaaagtggtgccgctgaactgaatgatattggaattcaaggatatgttttagatcttaattctcatgaatcaatagatagtttttggcagaaactagaagacaataatcaaaatatatctctcttagtcaacaatgccggcatcactagagataatatagttttaagaatgtctgatgaagagtggtcagatattatgaatgttcatctttatggcacttttcaactttgtaagcgatcgttaaaaatgatgctgaaatctaaatggggacgtattattaatatttcttctgca

SEQ ID NO: 203813 - DNA, 886 bp, Unknown
  Bacterial polypeptide expressing nucleotide sequence isolated from the Sargasso Sea
aaaaagattagtgaaaacccagaagctgcttatgattacacaagtaaaggaaaccttgttgctgtaataagtaatggttcagcaatattaggaatgggaaatttaggtgctcttgcttcaaagcctgtaatggaaggaaaagccgtattatttaaaagatttgcagatattgattcaattgatttagagattgattgtaaagattcagacgaaatcataaattcaattaaaaatttttcacctagttttggtggaataaatttagaggacatagcagctccagattgttttataatagaacagaggttaaaagaaattttggatattccagtttttcatgatgatcaacatggaacagcaataataacaactgccgcattgataaatgctttagatatttgtggcaaatcaataaaaaaaattaaagttatagtaaatggtgctggcgcatcagcacaagcttgtactgaattatttaaaaactcaggtgtaaaatctgaaaatataataatgctagatagaaagggcgttatttatgaaggaagaactgagggaattgatcaatggaaatccagatatgcagttaaaactaaacatagaacgttagaggatgctgttaaaggtgcagatgtttttttaggattatctactaaaggtgttctaaaaaaacagatggttaaatcaatggcaaaaaatccaattatatttgcttgtgctaatcctgatccagaaattaccccagaggaaattagagaggttagaaatgatgcaattgttgcaacaggaagatcagactaccccaatcaagtaaataatttaattggatttccttacatttttcgaggagctttagatgttagatctaaaacgatcaatgaagaaatga

SEQ ID NO: 203814 - DNA, 715 bp, Unknown
  Bacterial polypeptide expressing nucleotide sequence isolated from the Sargasso Sea
atggttgatgactcagagcaaaaaataatattgttgacgggagcaagtagaggcattggccatgccaccgttcgaaaattttctgaagaaaagtggcgtgtaattacatgttctaggcaggcgtttgacacaaaatgtccctggcctgggggtgcggcgaatcatgttcaagtcgatctatcaaatccaaacaatacgctggaggctattaatgaggttaaaaaacgactaaatggtaaattgcatgcgcttgtaaacaatgctgggatatcgcctaaaggggaaaatggagaaaggctggatactctaggaacggacctaagtacatggggaaaggtttttcatgtcaacttttttgcctcggtaattttagcaagaggattaagggaagaactatttagagcgcaaggggcgattgtaaatgtgacatcaattgcagggagtagggtgcatccttttgctggcgctgcctacgccacatcaaaagcagctttgggagctttaactagagaaatgtcaaaagattttggtcccttaggtgtaagagtaaacgctattgcaccaggggaagttaagacggcaattttgagtgaaggtaccgacaaaatagttgctgatattccgatgaaacgacttggcttaccggaagaagtggctgacacgattttttatctatgttccaaagaagcgagttatgtatcaggcgcagaaatga

SEQ ID NO: 203815 - DNA, 637 bp, Unknown
  Bacterial polypeptide expressing nucleotide sequence isolated from the Sargasso Sea
ttgaaacgatctgtcattgtcactggcggcaatcgtggtatcggccgttcaataacagaatcttttgtcaaagctggctataccgttgtggtgggcgcgcgcacagagcaagctattcaatcaatcgattcaaagcatattatttttcgttcgatggatgtacgtgatgagatggcgcatcgcacacttgctgagactgcaattgatgccactgggcgtcttgatgcctgggtcaataatgcaggcatttcggcctggaaaccgatcgaaaagattgacgaggcattttttgatgaattaatgggcatcaacctcaaaggagcattttggggatgcaaagccgccgctcgttatatgaacgacgcgggtgggtctattgtaaatatttcaagtattgccggcaaacgcggtagcgcgaacaacgcaatgtattgcgccacaaaatttggcatgaatggcctgacgcaatcattagcgaaagagctgggtccccttggtattcgagttaatgcgttgtgtccagttttgataaaaacaaacggtttgatggaggcgcttgcccaaccgcacgctcctgccaatggtgatccagaagaatttttggctgggtttttgagagctaactcagcaaccggca

SEQ ID NO: 203816 - DNA, 838 bp, Unknown
  Bacterial polypeptide expressing nucleotide sequence isolated from the Sargasso Sea
actgtctgaggttataaaagacgcggatatttttcttgggttgtcgggtcccggaattgttaaaccagcgatgatcagaagtatgtctgagaatccacttgtttttgccttatctaatcctgtcccagaaattttacccgaagaagttaaagcaacacgttcagatgcgattattgctaccggccgatctgattatccaaatcaagttaacaatgttctttgttttccttttatttttcgtggggcacttgatgtatgcgctaccaaaattaaccacgagatgaaaatagcgcttgttcatgcgcttgctgatttagcaaaagaggaaacccctgatacagttgttgctgcatatggcggcgaagaacttaaatttgggaaagaatatctaattccaaaaccatttgatcctcgtctgataattaaactcgcacctgcaactgcccaagcagcaatggatagcggtgttgcaactcgaccaattaatgatatggatgcgtatcgccaacacttatcacattatattttcgaaacagtaattctgatgcgtccaatatttgaaaaagcaaaagctgacccaaaaaaaattatctatgcagaaggtgaagaaacaaaaatacttcatgctgttcagtcagttttagatgagggcatcgcaaagcctatacttataggtaataaggatattattgagtccagaattaatcagatgggacttcgtttacgcattaataaagatataagaattatcaatccacacgagtatatagcaaagaataattttactactgataatatttcagagcttaatacttttgtggcgacgaagatgattaat

SEQ ID NO: 203817 - DNA, 412 bp, Unknown
  Bacterial polypeptide expressing nucleotide sequence isolated from the Sargasso Sea
tttaggggtttctgccccaaatataattagccagaaagaaattaaaagtatggctaaagatccaattgtatttgcaatgtcaaaccctgatcctgaaattagtccggaagaagcttccccttatgcaggagtcatggctactggccgtagtgattatccaaatcaaatcaataatgtgctatgttttcctggaatatttcgtggtgctctggactgccgttcgaatacaattaacgaagaaatgaaattagccgctgcaaatgcaattgctaatgtagttgatgacacacatcttaacgcggattatataattcccagcgtttttgatactaccatatcaaaaaaaatttcggaatcagttcaggctgcagcttataagactggtgtagcacaacgcagacaaagcaaataa

SEQ ID NO: 203818 - DNA, 643 bp, Unknown
  Bacterial polypeptide expressing nucleotide sequence isolated from the Sargasso Sea
ctgtcgaactcaccgatcgtcatcccagccgacctttctgcgccaggatcaggtaccaagctcgccgaacagatcctcgagcacgtggcaggtgtggatgttttggtgaacaatgccggcattccgatgcgcagaatgcctgagaacctaactgaagaagaaatcgacctggtctttgccatcaacgtacggtcgctcctcacactgtccatagcgcttgccccctcgatgaaagcacgaggcggaggatcaatcattaacgtcagttcagtcgctgggattcgcggtccgggcgcccgtgtggcgtatgcgggcactaaaggagccgttgacgcgatgacgcgggcgcttgcgtctgattgggggccagatgggatcagagtcaattcgatcgccccagggctcatagcgacagcgatttgggaggaaagtcggaatacggtccctggcttgattgaggacatggagggccagatagcgctgaagcgatgggggttcggcgatgacatcgccgacgtcgtagcgttctttgcctctgatagctctagatacgtcactggtgagaccttggtagtcgacggaggcctagcgcgtgtcaccgcatcagcgcagcctcaagtgttaccggaactactcgagtgac

SEQ ID NO: 203819 - DNA, 934 bp, Unknown
  Bacterial polypeptide expressing nucleotide sequence isolated from the Sargasso Sea
tgaaaatccagaagcagcttatgattacacaagtaaaggaaaccttgttgctgtaataagtaatggttcggcaatattagggatgggaaatttaggtgctcttgcatcaaagcctgtaatggaaggaaaggccgtattatttaaaagatttgctgatatcgattcaattgatttagagattgattgtaaagattcagacgaaatcataaattcaataaaaaattttgcacctagttttggtggaataaatttagaagatatagcggccccagattgctttataattgaacaaaaattaaaagaaatattagatattcctgtttttcatgatgatcaacatggaacagcaattattacaactgcagcattaattaatgcattagatatttgtggtaaatcaataaaaaaaattaaagttgtagttaatggtgctggagcttcagcacaagcttgcaccgaattatttataaactcaggagtaaaatctgaaaatataataatgttagatagaaaaggtgtaatttatgaagacagagatgaaggaatagatcaatggaaatcaagatatgcagttaaaactaaacttagaactttagcagaagctgttaaaggagcagatgttttcttaggattgtctgcaaagggtgttttaaaaaaagagatggtaaaatcaatggcaaaaaatccaatcatatttgcatgtgcaaaccctgatccagaaatcacaccagaagaaattaacgaagtaagagatgatgcaattattgcgactggaagatcagattatcctaatcaagtaaataatctaattggatttccatatatattcagaggggctttggatgtcagatctaaaacaataaacgaagaaatgaaagttgctgctgcaaatgcaatagctaaacttgcaagagaagatgttcctgatgaagtt

SEQ ID NO: 203820 - DNA, 587 bp, Unknown
  Bacterial polypeptide expressing nucleotide sequence isolated from the Sargasso Sea
catgaatttaaaaaataaaaaaattttaataactggcgctactggaggaataggtcaaagcctagtaaaaaaatttaccgattttggtgcagaagtgcttgcaacaggtacaaaccaagaaaaattgaatgacattaaaaaaaattttataaattgccatataaaaagctttaagcttgatgagcaccaaaatattgaaaagtttattgatagttgcaatgaaacattaaaaggtctcgatgttttagtaaacaatgcaggcatcactttagacaatctttctttaagacttacagaagaaaattggaaaaaagtaattgatattaatttaacttccacatttttaatgtgtaaatatgcaataaaaaaaatgttaaaaaataaaaagggtaaaattattaatatcacttctatagtagggcacaccggaaactttggtcaggtaaattatgcagcatcaaaagctggaataattggttttagtaaaagccttgctttggaatatgctaaaaaaaatattaatataaattgtgtatcaccaggttttattcaaactgaaatgacaaataaaataaaagaagatttaa

SEQ ID NO: 203821 - DNA, 400 bp, Unknown
  Bacterial polypeptide expressing nucleotide sequence isolated from the Sargasso Sea
aatggtgccattaataggatctacttccgtaggcggggtacctgtatcatcattaattaaacctgatcgattggaagaaatagttcaaaggactagagatggaggagcggaaatagtaagcctgcttaagactggatctgcttattatgctccgtcagctgcttcagcacaaatggttgaatctatattattagataaaaaagaaattttaccatgtgcagcatttctagaaggtgagtatggaattaataacttatatgcaggtgttccaataaaactaggtgcctcaggtgttgaggaaatcattcaagttgatttaacagaagaagaatctatagcgcttaagaattctgcagattctgtacaagaactaattgaaatcatggaaaaaaatgcatag

SEQ ID NO: 203822 - DNA, 574 bp, Unknown
  Bacterial polypeptide expressing nucleotide sequence isolated from the Sargasso Sea
atgcgattagaaggcagaactgcgattattaccggtgcaggctcgggttttggagccagcatagcccaaaaattcagtacggagggcgctcaagttattgttgttgacatagatgaagacggagcaaaagaaattgctttacaggtcggcggagtaccattcgtttctgatgtttccagcagcgattcagtggactctttggtaaaatttgtagcaaaaagttttgataaaattgacatcttggtaaacaatgctgggattacccacctgccaaaccctatggaaaccatttccgagaaagagtttgataaaattctgtcagttaatgcaaaatcagttttcttgacagcccgtcgaatagtcccattttttaaaaggcagaaatcaggcgttattcttaacatagcttccactgcaggcatttcaccccgaccaaacttaacttggtacaacgcgtcaaaagggtggatgatcaccgcaacaaagagtatggctgtagagttagcgccccatggaataagagtaaacgccatcaatccagttgcaggcgaaactcctcttctcaagtcatttc

SEQ ID NO: 203823 - DNA, 643 bp, Unknown
  Bacterial polypeptide expressing nucleotide sequence isolated from the Sargasso Sea
ttgaaggacaaattaatacttgtaactggttccggaacaggagtagggagcggcatcgcaagtactcttgctaaatgtggtgcagacgttgttgttcactataataacagtgaaaaggaagcagaaaaaactaaagaaataatacattctttaggtcgaaaatgtaagatgataaaaagcaatttaaaagttgtagatgaatgcaaaagaactgtagatgaagctgctaaatttctagggggtttagatgcacttgtaaataatgctggtataactatacctaaagatttcaaggatattgatgaaaatcattttaatggtattttctcccttaattttagaagttatttcttttgcgcacaacaagctgtgaaacacctagtaaaaagaggtgaaaaattaacaggtaattataaaaattataattggccaggaggtagcattattaatatttcttcggttcacggtaaattgggtcatcctggtcattctgtttatgcatcaactaaaggagctataaatagttttacaaaacaattgtcagtagaattgattcctaaacatatacgagtgaatgcaattgctccaggaacaattgaagtaccaagttattttgaaaaagatccattatacaatagggagt

SEQ ID NO: 203824 - DNA, 376 bp, Unknown
  Bacterial polypeptide expressing nucleotide sequence isolated from the Sargasso Sea
catgtttgatctttccggcaatatcgccctcatcacaggtgcaagcggcggcatcggcgccgcgatcgcccgcacccttcacaggcgcggtgctacggttgtgcttcatggcacgcgcgccgagcgcttggcggaactggcgggtgagcttggcgaacgcacgcatgtcgtgacagccaacctgtcgagccgtgaagaggcggtggggttgatcgacgccgctgccgaggcagcaggcgcgccggtcacgatactcgtcaacaatgctggcatcacccgtgacaatctgacgatgcgcatgaaggacgaggaatgggacgaggttctcaacgtcaacatgacggccgcgatgatgattgcgcgtgccgcgtgcgcc

SEQ ID NO: 203825 - DNA, 753 bp, Unknown
  Bacterial polypeptide expressing nucleotide sequence isolated from the Sargasso Sea
cgatgatcagcacggtaccgccatcgtcaccgccgccggcctgctcaacgcgctggaagtgcagggcaagcagattggcgacagccgcatcgtctgcatgggcgccggggctgccgccaccgcctgcatggagctgctgatcaagtgtggtgccaagccccacaacatcttcatgctggatcgccagggcgtcatccacagcggtcgcaccgatctcaaccagtacaagcagcgcttcgccaacgacacccccctgcgcaccctgatggaggtgatcgacggggcggacgtgttcgtcggtgtctccggcccggacgtgctgcccgccgaggcagtggccctgatggcccccaacccggtgatcttcgcctgctccaacccggatcccgagatcaagccggcgctggctcacgcagtgcgcaaggatctcatcatgggcaccggtcgttccgactatccgaaccagatcaacaacgtgctctgcttccccttcatcttccgcggcgccctcgacgcccgtgccagtcgcatcaacgatgccatgaagatcgcggcggtcgaggcgatccgtggtctggccaaggagccggtaccggccgaggtactgaccgccgccggcgtcagcgagctcgccttcggcaaggactacgtcattcccaagccgatggatgcccgtctgctgccgcgcgtcgcccgtgccgtggcactggcggcggtggagtccggggtggcccgcatcgccctgccggcgga

SEQ ID NO: 203826 - DNA, 295 bp, Unknown
  Bacterial polypeptide expressing nucleotide sequence isolated from the Sargasso Sea
aatgacaaaaaaaatatctttgataggagctggtcaaattggcggaactcttgctcatctcatcgcaataaaagaattaggagatattgttctattcgacgttgcagaaggtttagcaaaaggaaaagctttggatattgcacaatcttctggtgtatctggttttaatgtaaatataactggcactaaagattataaagatacgaaagactctgacgttattattataaccgctggtgttccaagaaggccgggtatgtcacgagacgatttacttggtacaaatcttaaaatt

SEQ ID NO: 203827 - DNA, 931 bp, Unknown
  Bacterial polypeptide expressing nucleotide sequence isolated from the Sargasso Sea
gtagctgtaataagtaacggctcagcaatactaggtatgggtaatttaggtgctctggcatctaaacctgtaatggaaggtaaggcagtgctatttaaacgttttgcagatattgatgcaatagacttagaaattgataattcaaatacggacgaaattattaaaagtattgtaaatttttcaaaaagtttcggaggaataaatttagaagatattgctgctcctgattgttttatcattgaagagaaattaaaagaaatattagatataccagtattccatgatgatcaacacggtactgcaataataacaactgcagctctaattaatgcattagatatatcaaaaaaatcaatgaaaaaaattaaagtagttgttaatggagctggagcatctgcaattgcttgcacaaatttattaaaaaaatcaggcataccatcaaaaaatataattatgcttgatagcaaaggtgttttatatcgtggtagagataatttaaatcaatggaaatcttctcacgcaattgaaacaaaaaaaagaaatttagatcaagctattgatggtgcagatgtatttttgggattatcttcaaaaagtattttgtcaaaaaaaatggtaaaaaagatggcaaaaaatccaattatttttgcttgtgcaaaccctgatcctgagattactcctgaagaagtagaagaagttcgtaatgacgcaataattgcaactggaagatcagattatcctaatcaagttaataatcttatcggttttccatatatatttagaggtgctttagatgttagagcaaaaactattaatgaagaaatgaagattgcagcagcaaatgctatagctgcgcttgcaagagaagatgttcctgacgaagtagcagcggctatgggtggaggagaaagaccaaaatacggcaaggaat

SEQ ID NO: 203828 - DNA, 559 bp, Unknown
  Bacterial polypeptide expressing nucleotide sequence isolated from the Sargasso Sea
atgaatgatttaaaaaataaaaatattattgttacaggagcaactggtggtataggaagttcaatcgtaaaaagattgaatgattgtgaggtaaatattttagcatctggaacgaaaagtgaaaaattagatgaattaaaatctcaatttaaaaatattaagatattaaaatttgatatttcacaaatggacaaaatagaggaatttattgaaaatgcggtatcgcattttgatggtaatttagattgtattgtaaataatgctggtattacaattgataatttagcaataagaatggactttaatgattggaaaaaagtaattgatataaatttaaactcaacttttttattaagtaaatttgcaattaagaagatgttaaaaaataaatctggaaaaataattaatattacttcaatagttggccacactggaaatcttggacaagctaattattgtgcttcaaaagctggaatagttgcgatgtcaaaaagcttagcgattgaatatgcaaaaaaaaatatcaatataaattgtatttctcccaggttttattaaa

SEQ ID NO: 203829 - DNA, 868 bp, Unknown
  Bacterial polypeptide expressing nucleotide sequence isolated from the Sargasso Sea
attccagtttttcatgatgatcaacatgggacagcaattataacaaccgcagcattaattaatgccttagatatttgtggtaaatcaattaaaaaaattaaagttgtagttaatggtgctggagcttcagcacaagcttgtactgagttatttaaaaactcaggagtaaaatctgaaaatataataatgctagatagaaaaggcgttatttatgaaggaagaactgagggaattgatcaatggaaatccagatatgtagttaaaactaaacatagaactttagcggatgctattaaggatgcagatgtttttttaggattatctgcaaaaggtgttctaaaaaaagatatggttaaatctatggcaaaaaatccaattatatttgcttgtgctaatcctgatccagaaattactccagaagaaattaatgaagttagaaatgatgcaattattgcaacagggagatcagattaccccaatcaagtaaacaatttaattggatttccttatatctttagaggagctttagatgttagatccaaaacgataaatgaagaaatgaaagttgctgcagctaatgcaatagctaagttagcaagagaagatgttcctgatgaagttgtagcggccatgggcggtgaaagacctcactatggaaaagactatataattccatcaacatttgatccaagattgattagtgtaataccagctgctgtagcaaaagcagctataaatagtggagcagctagaaaaaatatagatgattttgaagtttataaagatcaactaaaacaaagactagacccaacagtaaccataatgcagggtataaattcctttattaaaaaaaatcagaaaagaattg

SEQ ID NO: 203830 - DNA, 251 bp, Unknown
  Bacterial polypeptide expressing nucleotide sequence isolated from the Sargasso Sea
aatgacaaaaaaaatatcgttaatcggagctggtcaaattggtggaacattagcgcacttaattgcaataaaagaacttggagatattgtcctttttgatgttgctgaaggattagcaaaaggcaaagccttagacattgcccaatcttcaggtgtaactggtttttatgtaaatatatcaggtacaaatgattatgaagatacaaaaaattctgatgtaattataataacagctggtggttcaagaaaaa

SEQ ID NO: 203831 - DNA, 874 bp, Unknown
  Bacterial polypeptide expressing nucleotide sequence isolated from the Sargasso Sea
atttcgctcgcgcccctgctggacatgcgaaaaggctttgaccagtgggtgtgtgaacgcccggcacgactgctccccggcgcacgccagtacctgaaagatgaccgtgccaaggacatcgatatgctggtgattcgcgagaacagcgagggtgagtacgtcagtcagggtggccggctgcgcccgggatcgcccgacgaagtggccacccagatggaggtgttcacccgccgggccactgagcgcattatccggtacggctttgaacaggctcgtaaacgggccggagaacgtattcagcaaggccgcacccgcagcttccggacactggatggcaagacctgcgaaagccaggtatgcctgatcaccaagcgcaatgccctgcgctactggggtgacatgtataccgaagtgtttgaggaaatcagccgggaattcccggatgtagccacccatcacgaactggtggatgccgcctgcatgaaatttgtctccagcccctgggcctttgacgtagtcgtagccagcaacctccagggcgatattctgaccgatctggccgccgtgatctcggggggcatgggggtagctccgtcctgcaacctgaacccgaccgacccggacatgccctccatgtttgaacccacccacggtagcgcgccggatatcgccggccagggcatcgctgatccgaccgccatgctgtttaccaccgcccgcatgctggactggctaggccgaaaagacccattgctggcccaggccgggcaggaactgtttgatgcggtggccgcggatctcgcagagaaaggctctgaacaacgcagcacccgggaaatcggggatgctatttgtaaacgccttggggcctgac

SEQ ID NO: 203832 - DNA, 625 bp, Unknown
  Bacterial polypeptide expressing nucleotide sequence isolated from the Sargasso Sea
gctgagcggcttcaaacttgagaatgcggtgggcattgaggcggatgtcacttcccccgatcagattgctgccgccttcgatgcattcggccacgtacctgacttactggtaaataatgcgggcatcgtaagatttggcagtatggaagagcagtctgttcaggattacatcgatgtggttaacgttaacctgctgggcagttgcttctgcgcccgcgccgtcgcgccggcaatgatagaccgaggatccgggcacatcatcaatttcacttctattaacggcgtccatcctgcgcctgggataggcctgtatggtccaaccaaagcagcgatggccaacatgactcaagcaatggcaatcgagtgggggccaaaaggtatccgcgtaaacgctattgccccaggcatgatagatgctggtatgtccaagccgattttcgagaaccccaaagtgcgcgcgacgcgagggggcggcgtgccgttgagatgtctgggggaagccgcagatattgcagaggcggtcctttttctggactcagatggcgctaaatatatctccggtcacgagctagtcgtcgatggcggcgtgtcgatcagcgtgatggcgcacttgccgcgcgaatga

SEQ ID NO: 203833 - DNA, 619 bp, Unknown
  Bacterial polypeptide expressing nucleotide sequence isolated from the Sargasso Sea
tatgagtaaaacagttttaattacaggtgcatcatcaggattaggtaaagctacctcagaatatttgtctaaaaaaggatacaatgtttatggaacaagtaggtacccttcaaaataccctactccaaaagcatacagtctaattaaactggatgttaatgatccattatcaattcgtaaagcagtgaactctattttaaaaaaagagaaaataattgatgtacttgttaataatgctggtattggaataactggtccaggtgaggaaactgatattgaggagatgaaaaaaaattttgacacaaatttttttggacaaattagggtcatgcaaaacctgttaccttcaatgagaaaaaacagaaaagggctgattattaatatttcatcgattgccggttatatgggtttaccctttagaggctgttattctgcatcgaaaggagctttacacttattttctgaatcaattagaatggaagtaaaaaattttggaattaatatattaacattagcacctggggatttttcaacaaatattgtgtcaagaagatatcattctccaatattagatggaccttacaaggatctttataaaaaaagtctcaatgaaatgaat

SEQ ID NO: 203834 - DNA, 922 bp, Unknown
  Bacterial polypeptide expressing nucleotide sequence isolated from the Sargasso Sea
gctgtcgcttttgaggcaggtaaacctttagagatatgtgatgttgaacttgagggtcctaaagaaggtgaggttctagtagaacttaaagctacaggtgtttgtcacactgatgcctttactctaagtggagacgatcctgagggagtatttccttctattcttggtcatgaaggagcaggaatagtagttgaagtaggtcctggcgtctcaactctcaaacctgatgatcatgtaatccctctatatacagctgaatgtagggaatgtgaatattgcctaaaccctaaaactaatctctgtcaggccgtacgggaaactcaaggtcaaggattaatgcccgatggaacgagtcgattttctcttaatggtaaacctataatgcactatatgggctgttctactttctcaaaatatagcgttatgcctgagatctctttagctaaagtccgagaagacgcaccttttgataagatctgttatatcgggtgtggagttactacaggtataggtgctgtggtttttcaggccaaagtagaaaaaggttctaccgtagctgtgtttggtcttggaggtattggtcttaatgttgttcaaggttctaaaatggctggtgctagcagagttattggtattgatataaatcctgaacgagagtcattaggtaaaaattttggtatgacggatttcattaaccccacagagattgataatgtcgtagatcaagttattcaaatgactggtggagttgattatagctttgaatgtatcggcaatgtggaggtgatgcgccaagctcttgaatgttgtcataagggctggggagagtcttatataatcggtgtagcaggtgcaggtcaagaaatctcaactcgcccctttcaattggtaactggccgtactggagaggaactgctttgga

SEQ ID NO: 203835 - DNA, 532 bp, Unknown
  Bacterial polypeptide expressing nucleotide sequence isolated from the Sargasso Sea
atgacaacaagaaaagtaacagtagtaggggcaggaaatgtaggagcgacaacagtgcaacggattgcagaaaagcaacttgcggatgttgtgatgattgatattgtagaagggttaccgcaaggaaaagcgttggatatgatgcaagctgcagcggttgaaggctatgattctaaaattattggcacaaatgattatcaagatacgaaagattctgacgtgattgtcattacagcgggtattgcccgtaagccagggatgtcacgggatgatttattgaaaacgaatgcgaatattgtagggagtgttgttgagcaatgtgtggcacaatctccaaatgcgattattattgttgtctcgaatcccttagacgtgatgacgcagttggcttggcaaaaatcgggtcttgattcaaaacgtgtgtttgggatggcgggtgtattagattcgtctcgctatgcatgttttattgcagaggccttaaactgttcgataaaagatgtgagagcgacggtattaggtggacatggag

SEQ ID NO: 203836 - DNA, 667 bp, Unknown
  Bacterial polypeptide expressing nucleotide sequence isolated from the Sargasso Sea
agagttaattgaaattaatgcaggtatcgtaaaatctgtttcagagaacttattaaaatattctccacaggctataataattgttgtatctaatccaatggatacaatgacatatttagtgaacaaatcatttgatatccctaagaatagagtgataggaatggggggtattcttgatagctccagatttaagacttacatctccttagaaactaatttctctcaacatgatattgatgctatggttattggaggtcatggagatacaacaatgattcctttaacctcaatttcaaaatgtaagaataagcttttatctgagattgtttctaaagataaacttgaaaaaatttcttcagatactatggttggtggagcaactttaacaaaactattaggtacttcagcctggtatgctccaggtgcctcagtttcatacttagttaatgcaataataaatgacacacaagaaatgcttccttgttcagtttatcttgaaggagagtataacagtagcgatttgtgtataggagttcccgtaataattggtaaaaaaggctttgagagagttgttaatgtagatattaataaaaatgaaatggaaatgtttgaaaatagtgtcaaagctgtaaaacaaaccaatttagccttagatggtttaatttag

SEQ ID NO: 203837 - DNA, 670 bp, Unknown
  Bacterial polypeptide expressing nucleotide sequence isolated from the Sargasso Sea
atgtccaacgaagatttcaaacaggctgccctcgattaccaccgcatgtcgccgccgggcaaaatccgcgtcgcagcgaccaagccgatgctgacccagcgtgatctgtcgttggcgtactcgccgggcgtggcacacgcctgcgaggccatcatggccgacccgcagcaggccagcgaactcaccgcccgcggcaacctggtcgcggtgatctccaacggcaccgccgtgctgggcctgggcaacatcggcccgctggccggcaagccggtgatggaaggcaagggcgtgctcttccagaagttcgccggcatcgatgtgttcgacatcgagatcgatgagaacgacccggacaagctggttgacatcatcgcctcgctcgagccgaccttcgggggcatcaacctggaagacatcaaggccccggagtgcttcatcgtcgagcgcaagctgcgcgagcggatgaacatcccggtgttccatgacgaccagcacggcaccgcgatcatcgtcggcgccgcagtgctcaacgcgatggtcgtcaccggcaagaagatcgaagacgtgaagctggccaccaccggcatgggcgcggcgggtatttcctgcgtcaacatgctggtgtcgctgggtctgaagaaggagaacatcctcgccttcgaccgcgacg

SEQ ID NO: 203838 - DNA, 631 bp, Unknown
  Bacterial polypeptide expressing nucleotide sequence isolated from the Sargasso Sea
catggactctaaaatgtcagataaagctatcaaagatttaaacaactctaatttaagttcaaatataatcgatgtatcaaattataaagaggtggagaactgtacaaaagaaattttaaaaaaatctaatattgatattttagttaataatgcaggtattacaggtccaacagcaactttatgggagtatgatattgaaatgtggaaaaaagttgtagatataaatttaatgggaacttttaattgctgtagagcgattgtacctaatatgattaaaaataattatggaagaattgtaaatgtagcctctgttgctggaaaagatggtaatgccaatgcaagcgcttatagcgtgggaaaagcaggggcaattggattaactaagtctttaggcaaagaattagctgacaaaaatatagcagtaaatgccgttactcctgctggagctaaaacaggtattttagaccaaatgacgaaagagcatgttcaaagaatgctatcaaaagtccctcgaggtagatttcttgaggttgaggaattcacctctcttgtatgctggctttcttctgaggaaaatacattctctactgctgcggtttttgatataagtggcggcagatcaacctattaa

SEQ ID NO: 203839 - DNA, 581 bp, Unknown
  Bacterial polypeptide expressing nucleotide sequence isolated from the Sargasso Sea
taaaaatttttattactgtctggatcttataaataaaacacactatgaaaaagaattagataaaattataaataatcacaaaatagatattttgataaataatgcaggaataacaaaagataacctttttcttagaatgaccgaagaacaatgggaagatgttataaaaataaatttaaactctaattattatttaataaaaaaaattcttcctactatgattaaaaatagaagtggttccattataggaatttcttcagtagttgcattaacgggaaatccaggccaagcaaactataccgcttctaaatctgcaatgatatcaatgtataaatcactggcgcaagaagtcgcacaaagaaatattaatatcaatattattgctcctggatttattgagtctcctatgactcaaaaactaaacgaatctcaagtaaaaaatattcttgataaaatacctatgaaaaggctaggcaagccagaagatattgcaaacattgcgttatttttatccagtgaaaaagcgagctatattactggtcaaactttccatataaacggtggcatgttaatggtttaga

SEQ ID NO: 203840 - DNA, 772 bp, Unknown
  Bacterial polypeptide expressing nucleotide sequence isolated from the Sargasso Sea
ctttggtggaattaatttagaggatatagcagctccagattgctttataattgagcaaaaattaaaagaaattttggatattccagtttttcatgatgatcagcatggtactgcaataattacaacagcagcactaataaacgctctagatataagtggtaaatcaataaaagaaattaaagttgttgttaatggtgctggagcatctgctcaagcttgcactgaattatttaaaaattcaggagtgccttcagaaaatgtaatcatgcttgatagaaaaggtgtaatttataaaggaagaaccgagggtatagaccaatggaaatcaaaatatgcagttgagactaaactaagaacccttgaagacgcaatgaaaagtgcagatgtttttttagggttgtcagcaaaaggagttcttaaaaaagagatggttaagagtatggcaaaaaatccaattatttttgcttgtgctaatccagatcctgaaattttaccagaagaaataaatgaagtaagaaatgatgcaattatagcaactggaagatcagattatcctaatcaagttaacaatttaattggttttccttacatttttagaggagctttagatgtacggtctaaaactattaatgaagaaatgaaagttgccgcatcacaagcaatagctaaacttgcaagagaagatgttcctgatgaagtggtggctgcaatgggtggtgaaagaccacattatggaaaagattatattattccatccacatttgattcccga

SEQ ID NO: 203841 - DNA, 724 bp, Unknown
  Bacterial polypeptide expressing nucleotide sequence isolated from the Sargasso Sea
tatgtctaaagtagcgttagtaactggtggaacaagaggaataggtgccgcaatatctcttgctttaaaaaaagagggctgcaatgttgctgcaacttatagttcaaattcagatgcagcaaataagttttcgtccgaaaatggtattgaggtatttcaatggaatgttgctgatgcagctgcatgtgaagcgggcgtaaagcaagttgctgacaagctaggcactgttgacattttagtaaataatgctggaatttctatagcttcaatggcgcataaaatgtctgttgaacaatgggatgacgttataaggactgacctggactctgttttttatatgacaagatgtgtgcttgaaggtatgagagaaaaatcttttggaagaataattagtatttcttctattaacggccaaaaaggtgagatgggtctaataaattacagtgcggcaaaagctggtttactaggttttaccaaagccttagcacaagaaactgctagaaaaaatattactgttaacgctattgcacccggttatattgatactgaaattctagcagatgtctccgaagaaatcatggagggtatagtaggaaaaatacctgtaggaagacttggaacagttgatgaggtttcacgaatagttacattccttgccagtgatgaagcgggctttataacaggttctacgatatccgctaacggtggacaatattttgcttaa

SEQ ID NO: 203842 - DNA, 797 bp, Unknown
  Bacterial polypeptide expressing nucleotide sequence isolated from the Sargasso Sea
ttgttttgtaattgagaaaaaattaaaaaaaattttaaatatacctgtgtttcatgatgatcaacatggaacagcaataataacttcggcggctctaattaatgcagtggatataagtaaaaaaaatattaaaaaaataaaagtagtagttaatggagctggagcatcagctatggcatgtgcaaatctatttattaaattaggtgtacaaaaaaataatttagttatgcttgatagcaagggagtcatacacaaagaaagaaaaaatttaaatgaatggaaaataaattatgcgataaacactaaagatagaactttaaatgatgttataaaagatgcagatgtttttttaggtctatcttcggcgggagttttaaaaaaagatatgattaaaaaaatggcaaaaaaaccaattatatttgcttgcgcaaatccagatccagaaattgttcctgaagaagtagaaaaagttagaagcgatgccatcattgctacaggtagatctgattatccaaaccaagtaaataatctaattggttttccttacatttttagaggagcattagacgtgagagctaaaacaataaatgaagaaatgaaaatggcagcagcttattcgatagcacagttagcaaaagaaagggtccctgatgaagttgcagcagcaatgggtggtgatagacctatatatggaaaagaatatataattccttctacatttgatccgagattgataagtgtaataccagttgcagttgctaaagcggcaattaaaagtaaagttgcaagaaaaaaaa

SEQ ID NO: 203843 - DNA, 199 bp, Unknown
  Bacterial polypeptide expressing nucleotide sequence isolated from the Sargasso Sea
atgaataaaaaaattgcattaattggtgcgggtcaaattggaggaacattagctcatttaataggattaaaagaattagcaaatgaagttattttgtttgatgtcgcaaaaggtattgcaaaaggaaaagctctagatatagagcaatcttcttctgtagatggatttaatgtaaaaatttcaggctcagataattatc

SEQ ID NO: 203844 - DNA, 694 bp, Unknown
  Bacterial polypeptide expressing nucleotide sequence isolated from the Sargasso Sea
atgagctggacgaatttagagaataaagttgtggtcgtaacagggggagcggctggaatcggccttgccgtggtcaaaggcttcgttgaggtcggagcgaaggtcatgattgccgattttgccgaggaggttggagttaaggccgtggaagaatccaatcaggcgggaagcggagaagcggcttttgccaaatgtgacgttacctcaaaggaagatgtcgacggtctggttaaggcaacgattgatcgatggggctcaatcgacgtcctggtcaacaatgcaggaattaatatcccgcgccttttggtggatcctgccggtaaggaagaaatgaccgaggacgtttgggacaaagtatttgcggttaacgtcaaggggcagtttctttgcgctcaggccgcttgccgacagatgctggccagtggaaacggtggcgtactgatcaatatgtcttcggaatcgggcttggagggaagcgagggtcaaagcgtctacgccgcgaccaaggcagccaaccaaaacctgacacgttcctgggccaaggaacttggaaacaagggcattcgcgtcgtaggcgtagctccgggaattatggagaccacgagcatgagaagtgatgcgtatgagcagtcacttgcctatacccgagggcttaccgttgaggaactgcgttccaaggatggatcttccatac

SEQ ID NO: 203845 - DNA, 908 bp, Unknown
  Bacterial polypeptide expressing nucleotide sequence isolated from the Sargasso Sea
gctgttttgtttaaaagatttgccgatattgattctattgatcttgaaatatactcaaatgatccagatgaaataattaattcaataaaaaacttttcaaaaagttttggtggaattaatttagaagacatagcagcacctgaatgttttataattgaaaaaaaactaaaagaaattttggatattcctgtttttcatgatgatcagcatggaactgctataattacaacagcagcattgattaatgcaatagacataactaaaagagatattaaaaaaacaaaagttgtaattaatggtgctggtgcatcagcaatggcatgtgcaaatttatttaaaaatcagggtgtttctcaaaaaaatattacaatgctagatagtaaaggagtcatttacaaaggtagaaaaaatttaagtgaatggaaatcgttacatgctatagaaacaaaatcaagatcactagaagaagcaattgaagacgctgatgtttttttaggattatctaaagctggaacattaaaaaaagagatggttaaaaaaatgtcaaaaaatccaattgtttttgcctgtgctaatccagacccagaaataactccagaagaaattgaacaagttagaagtgatgcaataattgctactggtagatctgattatccaaatcaagtaaataatttaattggtttcccctatatttttagaggagccttagatgttagagcaaaaactattaatgaggagatgaaaatagctgcatctaatgcaatagctacattagcaagagaaagagttcctgatgaagtagttgctgcaatgggaggtgaaagaccaaaatatggaaaggattatataataccatcaacatttgacccaagactaattagtgttattccagttgctgttgctaaagc

SEQ ID NO: 203846 - DNA, 574 bp, Unknown
  Bacterial polypeptide expressing nucleotide sequence isolated from the Sargasso Sea
tatgaataaatttgattttagaaacaaaacagcagtaattactggaggagcacaaggatttggatttgatatcgcaaaaaaatttttaaattttggtgcaaaagttataatttgggatgttaataaaaaagaattaaaaaaagcagcacaaaaaataaatcattcaaaattatcttttgatatagttgatgtttcggattttaaaaaagttaaaaaagctacagataagattactaaactttctaaaatagatatactagtaaataatgctggtataaccggaccaaccgctaaactgtggaagtactcatcaaatgattggaataaagttttagatataaatttaaatggaaccttcaattgttgcaaagcaatagttccttttatgattaaaagtaattatggcagaatagtcaatatagcttctgtatctggaaaagatggtaatgctaatgcaagcgcttatagttcggcaaaggctgcagtaatagctttaacaaaagccctaggaaaagaattagcagataaaaatatttcaataaacgctgttaccccatctactgctagaactaaa

SEQ ID NO: 203847 - DNA, 826 bp, Unknown
  Bacterial polypeptide expressing nucleotide sequence isolated from the Sargasso Sea
gatgaagttcgatgtctcgaactatgacgaggtggaagcggcagtcgcccagatcgaaaaggaactgggaccggtcgaaatcctggtgaacaacgcgggcattacccgcgacggcaccatgcaccgtatgtcgtacgaacagtggaaagaggtgatcgacaccaacctttcgggtgtcttcaactgttcacgccgcgtcatcgagggcatgcgcgaacgcagtttcggccggatcgtcaacatcggctcgatcaacggacaggccggccagtatggccaggtcaactacgccgcaaccaagtccggcatccacggacttcaccaaggcgctcgcccaggaaggcgcagccaagaacatcacggtgaatgccattgcacccggctatgtcgacaccgacatggtgcgcgcggtgccgccggacgtgctccagaaaatcatcgcacgcatccccgtgggacgcctcggcaaggcagacgatatcgcgcgcggggtcattttcctgacggccgacaatgcggagttcatcaccgggtcgaccctgtcgatcaacggtggccagcacatgtactaggccgccgacaatggtggtgggattgcgatgttcgaactcctgatttcgagtgcacggggcacgggatgagcgcccgcgaatatcccgaccgtccgatcgccggcgtcggcgtggtcgtcctcaagaacgaccaggtgctgatgatccggcgcgggcgggagccgcgattgggccagtggagcattcccggcggagaacagaagatcggggagacctggcgagagaccgcggcgcgcgaggtgcgcgaggaaacc

SEQ ID NO: 203848 - DNA, 421 bp, Unknown
  Bacterial polypeptide expressing nucleotide sequence isolated from the Sargasso Sea
aatgagcggtaatcacaaggaccaagttgtagtagtaaccggcgctggaaaaggtataggtcgtgcaatagcagaaagatttgcaactgaaggcgcgagagttgtagtaaatgatattgaagaagaccgggtcaacgaagtagttgcttctatcaaggacataaatggaaacgcaataggagctgtcgccgatgtatctgacagcagtcaagtaaaaaaaatttttgactctactttggatgcttttggaactgtagatgtcttagtaaataatgcgggaatagtaagtccgatgctgcacttcttcgatgctgatgaaacttggtggagacgaataattgatgtgaatttaactggccatttcctttgctcacaacaagctgcaagaataatggctaaaaatcaaaatggtgtcattatc

SEQ ID NO: 203849 - DNA, 682 bp, Unknown
  Bacterial polypeptide expressing nucleotide sequence isolated from the Sargasso Sea
atgtttaacttcgaaggaaaaacagtactaattacaggagcgagctacgggctcggagaacaattcgcttattcattcgcagaggctggcgctgatctaattctcacagcacgtacggaagatttgcttcaaaatgtggcggaaacttgcagagaaaaaggaagtaaagtcacagctgtcactggcgatgtttccatagaagaagacgtgaaaaacgtcgttagtacaggtatcgaagagcatggaagaatagatgtccttgtcaacaacgcaggaatagctgatatgcgcggcgtcgccccagaacactttgacagtgaaacgtttaatcagattgtttctgtcgacctcgttggagctttctattacgcccgagaatgcggccgacatatgttagaaaacgggtcgggttctatcgtcaacatcggatcaatacttggaagcggcggaagtgaaaacggtgtgattgcctacagcgctgcaaagggagggctacgaaacatgacccttcagctcggtagcgaatgggcggatagaggagtccgagtaaacgcggtctcccctggattcattgtgaccgagatgacaagagttgctctggaagcgatgggaatcgataaatggatcgcaagtcgaactccgatgcgtcgagtaggcgaatctcaagaagtaactaatgcag

SEQ ID NO: 203850 - DNA, 283 bp, Unknown
  Bacterial polypeptide expressing nucleotide sequence isolated from the Sargasso Sea
tatgtctcagaataaaataaaaaatcttgttttaacaggagcaagtagaggaattggccatgctactgttaaaaggttttcaagtgctggctggagagttattacttgttcaagagaaaaggttccagaaaaatgtccttggtctgaaggtctgcatgaccacgtgcaaatcgatttagagtctgtcgaaaatattgtcgaaggttcaacaaaaattgttgaaaaattaaatggaaaccccttgcatgcactcgtcaataatgctggaatttctcctaaagga

SEQ ID NO: 203851 - DNA, 592 bp, Unknown
  Bacterial polypeptide expressing nucleotide sequence isolated from the Sargasso Sea
atgaaaagccgagccgcagtcgcgtttgaagctgggaagccattggaaatagccgaagttgacgtcagtgggcccgccgccggcgaggtgatggtggagatcaaggccaccggcgtctgccataccgatgcctttaccttatcgggtgatgatcctgagggtgccttccccgccattctgggccatgagggcgcgggtgttgtggttgaagtgggcgacggcgtcaaagacctcaaggtcggagatcatgtgattccgctttacacgccagagtgtcggacatgtaacttctgtctgaatcccaagactaatctatgccaggcgattcgcgagactcagggtgaaggcttgatgccagatcgcaccagccgcttctccatcgacggcgagcccattctccactacatgggctgctcaaccttttcgaattacaccgtactgcccgaaatcgcggtggcgaaagttagagaggacgctccctttgacaagatctgctacgttggttgcggtgttaccactggcatcggtgccgtcgccttcaccatgaaggtcgagcccggcgccaccgtcgcggtattcggtttgggtggca

SEQ ID NO: 203852 - DNA, 468 bp, Unknown
  Bacterial polypeptide expressing nucleotide sequence isolated from the Sargasso Sea
tagctgaggaattagatgtttctgtgaacagcatagacgcatacgtattaggtggacatggggattcaatggttccactacttaaagcaaccacagttggtggagtcccagtagaagaattaattgaaaaaaatagattagaagaaattgttcaaagaacaagagatggtggagctgaaattgttgctcatctaaaaacaggaagtgcttattacgcgccttctgctgcagtagctcaaatggtagatgcaattatatttgataccaaagaggtatttccatgtgctgcaatgcttgatggagaatatggaataagtggtgtttatgcaggagttccagttaaacttggaagttcaggtatagaagaaatagttaatcttaatttgagtcaaagtgaaaaagacggacttactgcatcttctagagccgtagaagaactaatagaagtaatgaaaggtcaatcttaaa

SEQ ID NO: 203853 - DNA, 769 bp, Unknown
  Bacterial polypeptide expressing nucleotide sequence isolated from the Sargasso Sea
catgagcactgaaatcatcacctcaagagccgctgttgcttggcatcccgcaaaaccactttccattgaaaccattgatgttatgccgccacaagccggagaagtccgagttcgattacatgcaaccggcgtctgtcacaccgatgcctacacgctttcaggaaaagatcctgaagggctttttccttgtattttagggcatgaaggcgctgggattatcgaatcaatcggtgaaggcgtcactgatttagaggttggagaccacgttattccactgtacacggctgaatgcggggactgtaaattctgtttgtcggggaaaacaaacctttgtcaaaaaataagaacaacgcaaggacaaggattgatgcctgatggcagcagtcgtttttcaaaagatgggaaaccacttttccattacatgggctgctcaacgttttcccaatacacggttttgccggccatctctcttgcaaaaatcaacaaaaaagcgccactcgaggaagtttgtttattgggttgtggtatcaccaccggcatcggctcagtactcaacgttgcaaaagtagaggccggtgcaacggtggcaatttttggcttaggtggcgttggtctgtcggctattatcggtgccaaaatggcaaatgcaggccggattattgccattgatattaacgaaaagaaattttccttagcaaaaaaactaggtgcagacgaatgcatcaatccgaaaaaatatgataaatcgatcacagaagttattatcgag

SEQ ID NO: 203854 - DNA, 970 bp, Unknown
  Bacterial polypeptide expressing nucleotide sequence isolated from the Sargasso Sea
tatgaatatactactaaaggaaacctcgttgcagtattaagtaatggatcagcaatactaggattaggaaacttgggcgcgatagcttcaaaaccagttatggaaggaaaagctgttctatttaaaagatttgcagatattgactctatagacttagaaatagacacagaagataccaaagaaataattaattccataaagcatatagcaaacagttttggtggtataaatcttgaagacattgcggctccaaactgttttataatagaggaagaattaaaaaaaattttagatattccagtatttcatgatgatcaacatggaacagcaattataactacagctgctctaataaatgctgtggatattgcaaaaaaaaatttaaaaaaaattaaaatagtgatcaatggtgcgggtgctgcagctatggcatgtgcaaaattatttagaagcacaggtattccaaaaaataatattaaaatgttggatagaaaaggtgttattaataaaaaaagaaaagatattaattcttggaagaaagaatttgcagttgaaacaaaagataaaagtttagatgatgcaatgaaggatgcagatgtatttttaggcttatctgctgctgatgctctaaaaaaaaatatggttaaaaagatggcaaaaaatccaattatatttgcctgtgcaaatccagatcctgagataaaaccagaagatgtagaggaagtaagagatgatgcaataattgcaacgggtagatcagattatccaaatcaagttaataatttaattggatttccatatatatttagaggagcacttgatgttagggcaaaaaccataaatgaagaaatgaaagttgcggcagctaatgctattgcttcacttgcaagagaatttgtacctgacgaggtcgcagctgcaatgggtggcgaaaggcctaattatgaaaagaatacattatcccatctac

SEQ ID NO: 203855 - DNA, 742 bp, Unknown
  Bacterial polypeptide expressing nucleotide sequence isolated from the Sargasso Sea
cttgtttaaaagatttgctgatatagatgctattgatttagagatagattcaaatgatccaaatgaaataattaataatataaaaaatttttctggtagttttggtggaataaatttagaggatattgctgctccaaattgttttataattgaaaaaaaacttaaagaacttttagatatccctgtatttcatgatgatcaacatggcactgcgattattacttctgcggcactaattaatgcagttgatatagcgaagaaagacataaaaaaaattaaagtagtagttaatggagctggagcatctgctatggcatgtgcgagtctttttaaaaaaaatggagttcttaataacaatataactatggttgatcgaaaaggagttatttataaaggaagaaaaggtctaaataaatggaaatcaaatcacgcagtagaaactaaaaacagaactcttagtgatgcaataaaagatgccgatgtttttttaggtttatcatctgccggagttttaaaaaaagatatgataaaaaaaatggcaaaaaatccaattatatttgcctgtgctaatccagatccagaaataacacctgaagaaattgaagaagttagaagtgatgcaataattgcaactggaagatcagattatccaaatcaggtaaataatttaattggcttcccatatatttttagaggtgcattagatgtaagagcaaaaactataaatgaagaaatgaaaata

SEQ ID NO: 203856 - DNA, 854 bp, Unknown
  Bacterial polypeptide expressing nucleotide sequence isolated from the Sargasso Sea
gatgcaaattagatttgataataaagtagtaattgttactggagcaggttctgggctgggaaggtcttatgctatagctttagcgtcaagaggagcaaaagttcttattaatgacttggggagttcacttgatggttctggacgttcagttaatatcgcctctaatgtggctaaagaaatagttgaatctggaggagaagctattgcagataattctgatgtaacagataaaaaatctgttgataatatgattaaaaaagttttgtcagcatggggaagagtagacgtactagtaaataatgcaggtattcttcgagataaatctttttctaaaattacaatagaagactttaaagcagttgtagacgttcatttaaatggttcaatgatatgttctaaagcagtttgggattatatgaagaaacagaaaagtggtaatattattatgacaacttcatcttcagggctatacggaaattttggtcaatcaaattatggttcagctaaaatgggggttataggactaatgaatgttttagctattgagggagagaaatatggaattgtagttaatgcaatatctcccactgcatcaactaggatgactaaaaatattcttgagtcaaaaattcttaatctattggatgttgaaagtgtaacagctgctttgatataccttgtttcagagttttcaaaaactaggacaattttggccgctggtgcaggaggttatgctgtttctagaattttagaaactgagggtatatacttagcaccagatgatcaatcaccagagaatattcacaaaaatttttcgaaaatcattgattctcataatgctcaatatttaagtc

SEQ ID NO: 203857 - DNA, 320 bp, Unknown
  Bacterial polypeptide expressing nucleotide sequence isolated from the Sargasso Sea
attgcagtcatatagcctaaataataaaatagctattgtaactggtgcatctagaggtattggttcagctatagctaaatcgcttgctaaaaatggtgttaaagttgctttaaatgcaagaaactctgaagctttgaaaaggcttaaaaatgaaattacatcagctaatggtatagctgaaataatggtaggtgatgtttcatgtatagactcttttactaaagtagttaatgataccattaaaaaatttggaaatattgatatattagtaaataatgcaggtataactaaagataatattataatgaggatgaaagaat

SEQ ID NO: 203858 - DNA, 318 bp, Unknown
  Bacterial polypeptide expressing nucleotide sequence isolated from the Sargasso Sea
tatgagtgaggaatctcgaaagattgcgttggtcaccggcgcgagtcgggggatcggtgccgcgattgctagcgcgcttgccgatgcagggttggtcgtcgtaggaacagcaacctccgaacggggggcaggcaaaatcgacgaagccttgtcatcaagaggcggtcacgggcgtgtgctcaatgtcacagatgtaaccagcgtcgatgctttgttggctgggcttcgaaccgacctgggcgatcccttggtgctagtcaacaacgcaggcatcacccaagacaacatcatcatgcggatgaaagatgacgaatggca

SEQ ID NO: 203859 - DNA, 492 bp, Unknown
  Bacterial polypeptide expressing nucleotide sequence isolated from the Sargasso Sea
aatgtttaatttgaatggtaaaaatgcactcattactggtgcttctgggggaattggaaaggctattgcggagacgcttcacgcatctggagccaggttaaccattagcggcactcgcatggaacctttggaggaacttgcaaagagtttaggtgatagggttcacataatgggctgcgatttatctaatggtgttgaagttgaaaatttatctaaaggcgctcaggaaaaaatgggttcggtagatattttggtaaataacgctggcataacaagagataatttatttttaagaatgacggatgaggactgggctagtgttttggaggtaaatctgacttccactatgaaactttgtcgtggagtgttaaggggaatgatgaagtccagatggggcagaattgtaaatattggctcagtagttggttctactggcaatcctggtcaaggaaactatgctgcctccaaggcagccttagttggtatgtcgaa

SEQ ID NO: 203860 - DNA, 601 bp, Unknown
  Bacterial polypeptide expressing nucleotide sequence isolated from the Sargasso Sea
atgaatgatttaaaagataaaaatataattgttacaggtgcatctggagggataggaaattcaatcgtaaaaaaattaaatgaaagtggtgcaaatattttagcttcaggaactagaatagaaaaacttgagcaattaaaaagagaatttaaaaatataaatactttaaagtttgatatatcccaaagtgaaaaaattgaggaatttattgaaaatgccactcaagaactaggtggtagtttagactgcattgtaaataatgctggtattacccaagataatttagcaattagaatgagtttggatgagtggaaaaaagtaattgatattaatttaacttcaacatttttgatgagcaaatttgctataaaaaaaatgttaaaaaataaatcaggaaaaatagtcaacattacttctgttgttgggcatattggaaatttaggtcaagcgaactatactgcatctaaagcaggaatagtggcaatgtctaaaagtttagcaattgaatatgctaagaaaaatattaatgttaattgtatatcaccaggatttattaagacagcaatgacagacaagattgatgaaaagttaaagagaccat

SEQ ID NO: 203861 - DNA, 934 bp, Unknown
  Bacterial polypeptide expressing nucleotide sequence isolated from the Sargasso Sea
tggtgaaataaatttagaagatattgcggctcctgattgttttattatagaagataaattaaaaaaaatcttgaatatacctgtctttcatgatgatcaacacggtacggccataataacttgtgctgctttaattaacgcagttgatattgcaaaaaaaaaaattgataaaattaaagttgtaattaatggagctggtgcttctgcaatggcttgtgcaaatctatttaaaaaatctggagtgttaaaaaaaaatttaattatgattgatcgtaagggtgttattcataaagaaagaaaagatttaagtaaatggaaatccgatcatgctataaatacaaaaaatagaactttaaatgatgctataaataacgcagatgtatttttaggtttatcttctggtggtgttttaaaaaaagaaatggttaaaaaaatgtcaaaaaatccaattatatttgcatgtgcaaatcctgatccagaaataaccccggaagaaatagaagagaccagaaatgacgcaattatagccactggtcgatcggactatcccaatcaagtaaataatttaattggttttccatatattttcagaggagcacttgatgttagagcaaaggtaattaatgaggaaatgaaaattgctgcggtaaatgcaatagcatcattagcaaagaagagagttccagatgaagttgttgcagctatgggaggtgatagacctacttttggaaaagattatattataccttctacttttgatccaagactaattagtgttattcctgtagcagtcgccaaagctgctgttaagagtggggtggcaagaaaaaaaattgataattttgaaatttattcagaacaattaaaacaaagactagatccatcggtaacaataatgcagggtattaactcccaaattaaaaaaaatcaaaaa

SEQ ID NO: 203862 - DNA, 475 bp, Unknown
  Bacterial polypeptide expressing nucleotide sequence isolated from the Sargasso Sea
gatgcgcctgaaaggaaaagtggcgctagttaccggagggaataaaggcataggtgctgccgtcgtaaggcgttttgccagcgaaggagcaagagtatggtcgggcgacattgtaacggacaagacaaacaacttttcggatgatcttgcagataaaacagaaactatagttcatgaaaccttggatgtcacaagccacgactcctggcaacttattataaataaaatagtccaggagaccggtaagattgacattctcgtaaacaatgcgggtatttacgaccgtagatcaattgaagcaacaaccgaagaacaattcgataagatgctagcggtaaatacaaaaggtccttttctcggaataaagcttgcactcgaggcactcaaagcaagcgggaatgcgtccatagtaaatctctcttcgacggccggtctccgcggttcttttgccgtgcattacggagcatccaagggc

SEQ ID NO: 203863 - DNA, 859 bp, Unknown
  Bacterial polypeptide expressing nucleotide sequence isolated from the Sargasso Sea
tcgaccggcgtttgccatacagacgagttcacgctgtcaggtgccgaccccgaaggcattttccctgcaattctgggccacgaaggcgctggcgtggtggtggattgcggcccgggcgtgcaaaccctgaaaaagggcgatcacgtaattccgctctacattccggaatgccgccagtgcaaatcctgcctgtcgggcaaaaccaatctgtgcacgtctatccgcgacacccagggccaaggcgtcatgcccgacggcagcagccgtttctcggtcggcggcgacaaaattttccattacatgggtacgtcgacctttgccaatcacacagtggtgccggaaatcgcgctcgccaaagttcgcgaagacgcgccattcgacaagatctgctatatcggctgcggtgttacgaccggcatcggcgcggtcatcaacacggcgggcgtggaacccggctcgaacgtcgtggtcttcggacttggcggcatcgggctgaacgtcattcagggtgcgcggttggccggcgccaacaagatcgttggtgtcgacatcaacgattccaagaaggaaatggccgaacggttcggcatgacccatttcgtcaacccgaacgaagtcgagggcgatctggtgccctatctggtcgatctgaccgatggcggtgcggattattcgttcgaatgcatcggcaacgtcaacactatgcgccaggcactggaatgcgcccatcgcggctggggggaaagcatcatcatcggcgttgccggcgcgggtcaggaaatttccacccgcccattccagctggttaccggccgggtatggaaaggcacagccttcggcggcgcgaaaagccgccgcg

SEQ ID NO: 203864 - DNA, 826 bp, Unknown
  Bacterial polypeptide expressing nucleotide sequence isolated from the Sargasso Sea
aatgggctcagcaatattaggacttggaaatttgggtgcgattgcatcgaaaccagtaatggagggaaaggctgttttgtttaaaagattcgcagatatagattcgatagatttagaaatagactcgagtgatccaaatgagattataaaatcaattaaaaacttttcaaaaagttttggtggaattaatcttgaggacattgctgcgccagattgctttattatagaaaaaaaactaaaagaaattttagatattcctgtttttcatgatgatcaacatggaacagctattattacatgtgcggccctcattaatgcaattgatatagcaaagaaagatataaagaaaattaaagttgttgttaatggagccggggcatctgcgatggcatgtacaaatcttttcattaaatatggcgtcagtaagaaaaatattacgatgatagatagaaaaggtgttattcataaaaaaagagatgggttaaatgaatggaaatccgcttttgcaatagacacaaaagatagaacattaaaagatgcaataaaaaatgctgatgtttttttaggactttcctcagccggtgttctgaaaaaggatatggttaaatcgatgtcaaaaaatccagtaatatttgcttgcgcaaatcctgatccagaaataacccctgaggaagtagaagaagtaagaaaagatgcaatcatcgcaacaggtagatcagattacccaaatcaagttaacaatttaatcggctttccctatatatttagaggagcactagatgtaagagccaaaacgattaatgaagagatgaaggttgctgctgtt

SEQ ID NO: 203865 - DNA, 913 bp, Unknown
  Bacterial polypeptide expressing nucleotide sequence isolated from the Sargasso Sea
ttgctcggcccccggcgtgctcacggccgagatggtcaagaccatgggccccaagcccatcatcctggccctggccaaccccgagcctgaaattcgccctgagctggccaaggccatccgccccgactgcatcatcgccacgggccgctcggactacccgaaccaagtcaacaacgtgctgtgcttcccgtacattttccgtggcgcgctggactgcggcgccaccaagatcaccgaggccatgaagctggcctgcgtgcgtcagatcgccgacctggccaaggccgacatcagcgaagaagtggccagcgcctatgcaggcaaagagctgaccttcggccccgactacctgatccccacgccttttgactcgcgccttatcctcaagatcgcgcctgccgtggccaaggcggcggctgaatcgggcgtggccacgcgcccgatcgaggacatggaagcctacaaggagacgctgtcgcgcttcgtttaccagaccggcatgctgatgcgccccgtgatcatggcagcgaaggccctgcccgatgcgcaaaagcgcgtggcctatgccgacggcgaagacgagcgcgcgctgcgtgctgcgcagatggccatcgacgacaagattgcccagcccatcctcatcggccgccccgccgtgatcgcagcccgcatcgaaaaagccggcctgcgcatgcagttgggcaaggatgtggaggtgtgcaaccccgaggacgacccgcgcttccgccagtactgggagcattaccacagcctcatgaagcgcaacggcgcaacgcccgaagtcgccaaggcggcagtgcgccgctccaacaccatcatcgcctcgctgatggtcacgctgggcgacgccgacgcaatgatctgcggcctggtcggcacctatgagacgcac

SEQ ID NO: 203866 - DNA, 85 bp, Unknown
  Bacterial polypeptide expressing nucleotide sequence isolated from the Sargasso Sea
catggcacgtaataaaattgcactgattggcgcaggcaatatcgggggcacgcttgcccatctggcaggtctcaaggaattgggc

SEQ ID NO: 203867 - DNA, 862 bp, Unknown
  Bacterial polypeptide expressing nucleotide sequence isolated from the Sargasso Sea
gatataagtgttaaatcaatcaaagaaattaaagttgtggttaatggtgctggagcatctgcccaagcttgcactgaattatttaaaaattcaggagtgccatctgaaaatattatcatgattgatagaaagggtgttatttatgaaggaagaacagagggtatagatcaatggaaatcaaaatatgcggttaaaactaaactaagaactcttgaggaagcaataaaaggtgctgatgtatttttgggattatctgcaaaaggagttcttaaaaaagagatggttaagagtatggcaaaaaatccaattatttttgcttgtgctaatccagatcctgaaattttaccagaagaaataaatgaagtaagacatgatgcaattatagcaactggaagatcagattatcctaatcaagttaacaatttaattggtttcccttacatttttagaggagctttagatgtgcggtctaaaactattaatgaagaaatgaaagttgctgcatcgcaagcaattgctaaacttgcaagagaagatgttcctgatgaagtagtggctgcaatgggcggtgaaagaccacattatggaaaagattatattattccatctacatttgatccaagactaataagtgtaattccagctgctgtagcaaaagctgcaatgaaaagtggagtggctagaaaaaatattgaagattttgaaatttataaagaacaacttaaacaaagattagacccaaccgttactataatgcaaggtataaactcatttataaaaaataatcaaaaaagaattgtgttcgctgatggagaagatgaaaatacaaaaaaggcagcaattgcatttaaaaattcaaagt

SEQ ID NO: 203868 - DNA, 619 bp, Unknown
  Bacterial polypeptide expressing nucleotide sequence isolated from the Sargasso Sea
tgactggaatgggaccccatgtgatgtttctgaagagaaccaagttgatcagctttttaaagagatgtcatactcctttggaggtttggaaatcctggtcaacaatgctggtattgcaggacctactgccccggtggaagagatcgacccgggcgaatggagacgttcagtaggggtcaacctcaacggtgctttctattgcacaaggctcgcgacacctttgctgaaaaactcccccaaagcttcaatcatctacatctcctcggtggcaggccgccttggatttgcccgccggcttccgtatgcctccaccaaatgggccatgatcggtttcaccgaaagccttgccaaagaactcggaccctcgggaattcgggtcaacgcgttgcttccgggaatcgttgaaggtccccgtatagaaggagtttttcaagcaagggcagagagcgagggagtgccttatgaagaagtacgggatagagtattgaacaatgtatccatgaagcgcatggtcagcgcaggagatgttgcagaaatggcggtcttcctaagctctgaagcgggaaagaacatttccggtcaatcgatcagtgtctgtggaaatgtcgaaaacctttaa

SEQ ID NO: 203869 - DNA, 724 bp, Unknown
  Bacterial polypeptide expressing nucleotide sequence isolated from the Sargasso Sea
aatggatcttgaactgaccgacaaatacgtgattgttaccggggcttccagaggtattgggcgcgcaattagcgaaaagttctacgaggaaggaactcacctactcctcatcgctcgcgacgaagagcctctatcggatttgaaagaatcgttagataggcagggtacttctagtgttcataccctctcctgcgatgttgcgtcggctagtgcgccagacacaattgataggaaactgcaggaagtattccctcatgtggacgtcctcgtcaataatgcgggtgcgaccatccgaggaggcgatactgaaagtaattggaggcaatctttcgaactgaacgtgatggcgccattgagaataatggaaacattacgcgaatctctactgaaatcagagcacgcatcggtcataaatatttcttcgatattcggcagagaacacggtgggtctcctcagtatcagtcgtcgaaagctgcccagatagcactttcgaattcatatgcacgtaattgggcatccgatggcattcgaatcaacaatattgctcctggttcaattgcatttgagggtggctcctggggaaaccgcctagtcgaagacccggaagggatggctgagttcatccgaaatgaaatcccagggggtagattcggcaagcctgaggaagtagctgatgcggtagtatggctggcttcgaaacgggccatcgtggggttaatgatc

SEQ ID NO: 203870 - DNA, 669 bp, Unknown
  Bacterial polypeptide expressing nucleotide sequence isolated from the Sargasso Sea
tatgaaagatttattttcaattgaaggaaaagtagctcttgtaaccggtggttcaagaggtattggagaaatgattgcggcaggctttttagctaatggtgcaaaagtttatataagttcaagaaaagcagaagtatgtgacgctacagcagaaagattggcaaatgaatatggtggtgagtgtatttctattcctgcagatctatctaatcttgaaggcataggtgccttagcaaaagaattgtctgctaaagaaaattccttagacatattagtgaataatgctggagcttcttggggggaacctattgaagagtattctgaacttggttgggataaagtaatggacactaatgttaaaggtatatttttcctaacccagcagttattacctctattaagagaatctggtaaatctgataacccttccagggtaattaatattggatcaatcgatggaattaaaaccggtacttttgatgcattttcttacggaccttctaaagcagctgttcatcatctaactcgtgtcttggctgcaaggctaataaaagatcaaataatcgtaaatgcaattgctccaggcccatttccaacttggatgctaagtacaggagtaggtggaggaggagacacagacatagactggtcagctgtagggcaaagcaa

SEQ ID NO: 203871 - DNA, 813 bp, Unknown
  Bacterial polypeptide expressing nucleotide sequence isolated from the Sargasso Sea
aatcttggtgcattagcctctaaaccagtaatggaaggcaaagctgtactttttaaaagatttgcagatatagactcgatagatctagagatagaaagtaaagactctgaagagattgtcaattcaattaaaaattttgctccaagttttggtggaattaatttagaagatatagcagcaccagattgctttatcatagaacaaaagttaaaagaaatcttagatattccagtttttcatgatgatcaacatggcacagcaataattacaacagctgcattaattaacgctttagatataagtggtaaatctattaaagagattaaagttgttgttaacggagctggagcatctgcacaagcctgtacagaattatttaaaaattcaggagtaccttctaaaaatataatcatgcttgatagaaaaggtgtgatttatgaaggaaggactgaaggtatagatcagtggaaatcaaaatacgcagttgagactaaattaagaactcttgaagaggcaatgaagaatgctgatgtttttttgggattatcagcaaaaggagttcttaaaaaagagatggttaagagtatggcaaaaaatccaattatttttgcttgtgctaatccagacccagaaattttacctgaagagataaacgaagtaagagatgatgcaattattgcaacaggaaggtcagattatccaaatcaagtgaataatttaattggatttccatatatcttcagaggagctttagatgttagatctaaaacaatcaatgaagagatgaaagtcgcagcgtcacaagcaatcgct

SEQ ID NO: 203872 - DNA, 553 bp, Unknown
  Bacterial polypeptide expressing nucleotide sequence isolated from the Sargasso Sea
gttgctaacgccggtgaataagaacggtgcgattcacggccttgttaacaacgccggtatcgttcgcgctgcgatgatcaacaagatgcccatcgagacttggcaggaggtgattgacgtcaatctatcgggtgtcttctattgtttgcaggcagttgggcgccacatgtatcaacgttatgaggacggggataccagtccggcatctatcgttaacatttcatccgatgctggccgacgcggcacgattggccagattaattacggtgctgcgaagtccggcgttatgggcatcactatgagtgctgctcgtgaatgggcggctagtcaggtgcgtgtgaattcggtctgcttcggtgtagtcgagacagagatgaccgaaactatccgctccgataagttccgcgaccgcatcatggctcaggtcccaatgggcaggttctcaaaaccggaggaggtctgccagcctgtgtgcttcctgctatcacaggcggctagctatatcaccggtcagcacttgtctgttaacggaggctataccatcggcgtataa

SEQ ID NO: 203873 - DNA, 608 bp, Unknown
  Bacterial polypeptide expressing nucleotide sequence isolated from the Sargasso Sea
tatgtatttaaaaaattataatttaaaaaataaattttcattagtaacaggagctgggaaaggtcttggtaaagcttgtgcgatcgcacttgcagaagctggatcaaatttaattattttaagcagaacgaaaaaagacttagaactagtatctaaaaaaataagaaaatatcgagtaaaatgtaaatcttatttgtgcgatgtaacaaattatgaccaaattaaaaaaattataaatgaacaaaaaaggatagatgttttggtaaataatgcaggaattaatattccagaaaattttataaaagttaaaaccaaagacatggaatatatggttaaaataaataccgtcgctgcatttaatgttgctcaattaagtgctttaaaaatgattcaattaaaaaatagaaaaaaaattggcgcttcaataataaatatatcttcacaaatgggtcatgttggtggtccaataagaagtgtttataatatgaacaaatggggcttagaaggtctaacaaaaggtatggctgtggatctagcaaaatttaatataagagtaaatacggttgcccctacttttgttgtaacgccaatgacaaaaaaattcctaa

SEQ ID NO: 203874 - DNA, 557 bp, Unknown
  Bacterial polypeptide expressing nucleotide sequence isolated from the Sargasso Sea
tatgaaagttgcggttgtaactggtgcagcaaggggcattggattagccatttcaaagaagttccttgaagaaggtttccgagttgccattttggacattgatcaaaaaactctttcacagacgattaagcagttttttgataccaacaatgttcttggactcgaatgtaatgtttctgaacccgatcaggtcgatcaatccgtcaaccgagtggtcgaacagtttggacgtattgatgtcctggtcaacaatgctggcattgccgagtttaagccgatgcttgaaacgacatacgaggaatggtcacgtattcttgcagtcaatctcaatggtcctttcatatgttctcaagcctgtgcgccaatcatgctgaaaaacgaaggaggcagtattgtcaacattgcatccatttctggacttcgtgcgagtaccctccggattgcctatggaaccagtaaagcggcattaatgcatctaaccaaacaacaggctgctgagttgggaaataaaggtattcgggtgaatgcaatagctccaggacctgttgataccgcaa

SEQ ID NO: 203875 - DNA, 325 bp, Unknown
  Bacterial polypeptide expressing nucleotide sequence isolated from the Sargasso Sea
atgaaaaataaggtcatactcgtaacaggcgccaacagagggatagggcttaacatcatacaaagacttaataatgacggttacactgtaattggcacttctagaactgacgatggtgcgaatatcatatcgcaagaaaccaaaagtaatggcgggaaaggattaaaaatggatgttacaaatcaagagtctattgattctgcgataaaaaatattcaagatgaatacggtccattgtacggacttgtaaataatgcaggtattactaatgacaatttattaatgagaatgactgtagagcaatggttatcagttatagagacta

SEQ ID NO: 203876 - DNA, 756 bp, Unknown
  Bacterial polypeptide expressing nucleotide sequence isolated from the Sargasso Sea
catgaagacccgtgccgccgtagccgtgggagccggcaagccccttgaaatcatggaagtcgatctcgacggcccgcgcgccggcgaggtgctggtagaaatcatggccacaggtatctgccatacggatgccttcaccctgtcgggcgccgaccccgagggcatgttcccggccattctggggcatgaaggcgcgggtgtcgtccgcgaggttggacccggggtcaccagcctcgagccgggcgaccatgtcattccgctctacacgccggaatgccgcgagtgtgaatattgccttaatccgaagaccaacctgtgccagtcgatccgcaccacgcagggccagggcgtgatgcccgacggcaccagccggttctcgctgaacggcaagccgatcctgcactatatgggcacttcgacattcgccaatttcaccgtccttccggagatctcgctggccaaggtcaacaaggccgcgccgttcgacaagatctgctacatcggctgcggcgtgaccactggcattggcgcggtgatcaacaccgccaaggtggaaccgggctgcaacgctgtggtcttcggcctcggcggtattggcctcaatgtgatccgcgatcccgctgcgcagaaccgcccgtctttcattttatgggtgttgttacaggcaggatacattccgcctgtcgggccgatccggcccccgatgcgacgagcgcgcccgaacgcgtgccgccgccctgcccgtcagcgcgacgg

SEQ ID NO: 203877 - DNA, 894 bp, Unknown
  Bacterial polypeptide expressing nucleotide sequence isolated from the Sargasso Sea
ctcttgcttattcccaggtgttgctgcgccagtaaaagctattgctgaaaatcctgtccgtgcctacgattatacaactaaaggtaacttagttgcagtaataagtaatggttcagcaattttaggtttgggtaatttaggagccatagcttctaaacctgttatggaaggaaaggcggtgttatttaaaaggtttgctgatatagattcaattgacatagagatcgacactaatgatacagaggaaataattaaatcaataaaaaatatttctaagagttttggaggaataaaccttgaggatataaaggcacctgagtgttttattatagaaaaaaaattaaaagaaatattagatatacccgtttttcatgacgaccaacatggtacagcaataataactagtgcagcattaataaatgcttgtgatattgctaaaaaaaagcttaatgaaataaacgtagttattaatggtgctggtgcatcagcaatggcgtgtgcaaaactttttataaattcaggtgtagataaaaataaaattaaaatgcttgactcaaagggagttatttacaaaggcagagataatttaaatgagtggaaaaatgagttctcaattaaaacaaatgatagagatttaaaggatgccataaaaaatgcagatgtttttttgggattatcacaagcaggtgttctcaaaaaagatatggtaaaaagtatggcaaaaaatcctataatttttgcatgtgctaatcctgacccagagattactccagaggaaatcgaagaagtgagagatgacgcaattattgcaactggcagatccgattatcctaatcaggtaaataatttaattggatttccatatatttttagaggtgcacttgatgttagatc

SEQ ID NO: 203878 - DNA, 647 bp, Unknown
  Bacterial polypeptide expressing nucleotide sequence isolated from the Sargasso Sea
tatgcttaaacaaataaatttaaaaaataaagtagcgctagtaacaggagctggaaaaggtattggaaaagcatgtgctatagctttggctcaagcaggagcaaaagtaataattgtaagtcgtacaaaaagtgatttggataaggtaagtaaaataatcaaaaaaactaaaggatctagtcaatcatttgtatgtgacgttactcatatatctaaattcaacacaatagttaatggtttaaaaagattagacatattggtaaacaatgcaggtagtaatcgccctgaacattttacaaaagttaaaaaagaaaatatggattatttagttaatttaaatttaaaagcttgtttcaatattgctcaaatatgtaccaaaaaaatgttaattgcaaaaaatagaaaaaaaataggtggatcaataattaatatgtcctctcaaatggggaaagttggaggtcctattagaagtgtttataatatgactaagtttggtttagagggattaactagaggaatggcgattgatttagcaaaagataacattagagtaaatactgtttgtcctacttttgtattaacccctatggttaaaagtttttttaaaaacacaaagtttaaaaaagaaatgataagaaacatacctt

SEQ ID NO: 203879 - DNA, 871 bp, Unknown
  Bacterial polypeptide expressing nucleotide sequence isolated from the Sargasso Sea
gctttcggggcgcggccgggtgatctggcagtggtcggcgatatcgtctctcatactattgccgccatcgaaacggcggagcgccatggcggatggtgtgctttacccgaagcagatatttttgctgtcgagtactgggagcttgagcaggcaaaacttgcaaaatccgcgagttcgcctgtttttcagggacgctgtgctctggtgacaggaggcgccagcggtatcggatatgcctgcgcgcttgcattgtctgagcagggcgcgcaggtcacggttctagacaaagatccttcggttctgaaagtctttgatggcacaaacatccacggacgagtctgtgatgtcaaggatgccgatgccgtgcgtgacgcggtggccgaatcggtcgcgacttttgggggtctcgatattctggtgaacaacgccgggatcttctgcgcgagtgacgaggtagcggatatgcccgaagctgagtggcagcggtctctcgacatcaatctgacgggagccatgcacgtcgcgcgggagagtattccttacctgcgccttggctgggagccttccttgattatggtcggttcgaaaaatgtgccggcaccgggccccgcggccggggcctattccgtggccaaggcaggcctgacgcaactggcccgggtattggcccttgagctggcgggcgatggcatccgggtgaataccctgcatcccaatgccgtgtttgatacggcaatctggaccgacgaggtacttgaaggccgggccgcacactatggaatgagcgttgaggactatcgcagaaacaatctgcttcatcgagaagtcacttcagcagatgtcgccgcgctggtttgcgcgatggcagggt

SEQ ID NO: 203880 - DNA, 567 bp, Unknown
  Bacterial polypeptide expressing nucleotide sequence isolated from the Sargasso Sea
aatgaataaagttgctttagttactggaggaagtagaggtataggaagagctatctgtttgggattagcaaaaaaaggttataatatagtcatagccgctaaaagtatcagagataatgataaattaccaggtactatatttagtgtagccgaagaagttgaaaaattaggagtcaaggcgcttcctgtaagaacggatatgagatattcagaagaaattaaaaacttggtaaattcggtagataagaattttagtagattagatgttttgattaataatgctggagcattatggtggaaaaatatagacgaaacacctattgaaaaatatgatttaataaataatataaactcacgtggtagttttattttatcaaaattatgcttaccgttaatgaaacaaaatgatggaggtcatataattatgcaatcaccacctttatgtgatacacaaaatgagtataaaaaatatttaaatggtaaaacagcatacatgattagtaaatggggtatgactatgactgctttaggattggctgaagaaacaaaaaaaaataacatatcagt

SEQ ID NO: 203881 - DNA, 493 bp, Unknown
  Bacterial polypeptide expressing nucleotide sequence isolated from the Sargasso Sea
atgccacccttcaatttagacggaaaaactgccatcgtgaccggatcggcctctggaattggcctagcaatcgcaacagtctttgctgaggccggtgctgccgtgcaactccttgatttgagtcgtgacgccctcgacgccgcagcaaagggcatcaacgatcgcaagccggcaaagccttgtacagcgcatgtttgcgacgtgagcgatttgaccgccgtggatcgcgtattcaattcaatcgcgtcgtcttctggccggatcgatattcttgtcaacaacgccggcatctcggccgtcggcgacgtcctcaaatgcaccgacgccgacctcgatcgcgtgtgggcggtcaatgtaaaaggcgtcttccattgcctgcaggcgggtgtgcggcacatgctcgccgacggcaaaggcggcgctatcgtcaacctcgcctcgattgcctccattctcggcctggccgaccgcttcgcctactctgcgaccaagg

SEQ ID NO: 203882 - DNA, 772 bp, Unknown
  Bacterial polypeptide expressing nucleotide sequence isolated from the Sargasso Sea
atggatcttaatggaaaagttgctttggttacaggtggtgcttctggtttaggacaagcaactgttgaaaactttgttgctgctggggcaaaagtcgtaatccttgatattaatgaagataatgcgaacaagataatagaaaatcttggtgctgataaggtttcctttatttcaacaaatattatggaggaagatccagttgtatcagctatcaataaaatcaaagatctgcatggcgcacttcatattgcagttaactgtgctggaacaggttatccaggaaggattttaggtaaagaggcgccacatcctttggatgcctttcaatttatcattaatttaaaccttgttggaacattcaatgtaatgagaattgctgctgaactaatggataaaaatgaggctgatgaaggtggagagaaaggagttatcattaatacagcgtcagttgctggttatgaagggcaaataggtcaatccgcatacagtgcctctaaggcaggggttattggattaactataaccgcggctcgagacttagcaagacattcaattagagtttgtacaattgcgcccggtatatttgacactccattaatgcagcttgcgcctgataaggttcgcgatcctcttctagagtcaactcagtttcctcatagatttggccaaccaagtgaatttgggcaattagctgcacatatagttgaaaattcttatcttaatggagaaactataagactagattccggcatgagaatgaagccaagataat

SEQ ID NO: 203883 - DNA, 841 bp, Unknown
  Bacterial polypeptide expressing nucleotide sequence isolated from the Sargasso Sea
tttggttgcagttatcagtaatggttcagcaattcttggtatgggtaatctaggagcgctggcttctaaaccagttatggaaggaaaagcagttctatttaaaagatttgctgatattgactcaatagaccttgaaatagattgtaatgatacaaatgaaattattaattctataaaaaattttgctccaagttttggtggcataaatttggaagatatagctgcaccagattgttttgttattgaaaaaaaattaaaagaaattttagatattccagtttttcatgatgaccaacacggaacagcaataatcactactgctgctttaattaatgctttagatataagtggtaagtctattaaagaaattaaagttgttgttaatggagctggtgcatcagcgatggcatgtgcaaatttgttcaaaaatagtggggtaccccaaaaaaatttaacaatgattgatcgtaagggagttatttataaaggcagagaaaatttaaatcagtggaaatcaatttatgctgttgaaacagcagatagaactttagatgaagcaataaataaagctgatgtttttttaggtctttcagctaaaggtgctttaacaaaaaaaatggtaaaaaaaatggcaaaaaatccaataatttttgcttgtgcaaacccagatccagaaataacacccgaggaagttgaagaagttcgtgatgacgcaattattgcaacaggtagatctgattacccaaaccaagttaataatttaattggtttcccgtatatttttagaggtgctttagatgtaagatcaaaaaccattaatgaagaaatgaaagttgcagca

SEQ ID NO: 203884 - DNA, 498 bp, Unknown
  Bacterial polypeptide expressing nucleotide sequence isolated from the Sargasso Sea
cctgacagccacgcatcccattgccgttgccgcgccgagtgctactgttgcaggcgcagcatcacccgcgagaggacatcccatgcgtcgtaaaaccctgcttttgaccggagccagccggggcatcggtcatgccactgtgcgccggttcaatgccgagggctggcgggtgattacctgttcgcgccagccttttccaaaggaatgcccttggggtggcggcgaggaaaaccatgtgcagctggatctgtcggacccctcagataccatcaacgcggttggcatcattcaggaacggctggaggatggcaagctggatgcgctggtgaacaacgccgggatctcgcccaagggaccggaaggggagcgcctgagcacgctcaacaccgatctgatggactgggccaaggtgtttcacgtcaatttctttgcctccgtggtgctggcgcggggcctgcgggaggaactggcggccgccaagggcgcggtggtcaatgt

SEQ ID NO: 203885 - DNA, 568 bp, Unknown
  Bacterial polypeptide expressing nucleotide sequence isolated from the Sargasso Sea
atgattgaagatttatataatgttaaagataaagttgctgttgttactggaagttctagaggtatcggtaagcaatgtgctttagcttttgccgaagcgggagcaaaattagttctaaattatgttagcaataaagaagctgcagaaataactgctgaagaaattgctgatttaggttctgaggctattgtagttcaagcagatgtaaaagattttgaagcttgccaaactttaggtgaagaagcaattaaggcctatgggcaagttgattttctagtaaataatgctggaataaatagagatattacttttagccgtatgtctcaggatgagtggaaagaagtaatagatactaatttaggggcattatttaatatgtctaaagctgtggtgccacatatgagagatgctggttcaggagttatcgtatccatatcatctattattggtgaaactggaaatattggtcagtccaattatgcagctacaaaaagtggtatgtacggatttactcgaagtcttgcaagagaactggcaaaagataatattagagtaaatgctgtttccc

SEQ ID NO: 203886 - DNA, 823 bp, Unknown
  Bacterial polypeptide expressing nucleotide sequence isolated from the Sargasso Sea
tgatatagaagttgactcatcagacccaaatgaaattattaaaagtattaaaagtattgctagtagttttggtggtataaatttagaagatatagcagcaccagactgttttattattgaagaaaaattaaaacaaatattagatattccagtatttcatgatgatcagcatggaactgcaataataactacagcagccttaataaatgcacttgatatatcaaaaaaatcaataaataaaattaaagttgttgttaatggagctggagcttcagctatagcttgcactaatttattaataaataccggcgtaccaaaaaaaaatataacaatgcttgatagtaaaggcgttttataccgaggtagagataatttaaatcaatggaaatcaactcatgcaattgaaacaaaaaaaagaactctaatgcaagctattgatggagctgatgtttttttaggactttcttctaaaagtattttgtcaaaaagcatggtaaaaaaaatggcaaagaatccaattatatttgcttgtgctaatcctgatcctgaaattacacctgaagaagttgaagaggtaagaaaggatgcaataattgctactggaagatctgattatcctaaccaagttaataatcttattggattcccatacatatttagaggagcgttagatgtaagagctaaaacaattaatgaagagatgaaagttgctgctgcaaatgctatagcctcattagctcgagaaagagttccagatgaagttgttgctgcgatgggaggtgaaagaacagtttatggaaaagaatatattattccatctact

SEQ ID NO: 203887 - DNA, 559 bp, Unknown
  Bacterial polypeptide expressing nucleotide sequence isolated from the Sargasso Sea
atgaaacgccttgaaaataaaattgccttaattacaggagcagctcaaggaattggcttagccatagcaaaacttttcgtgctagaaggagccaaagttctgattacagatataaatgaaaaagaagcggctgttcaatcaaacaaaattaatgatgagtttcctggacatgccgcatcaataaaacacaatgtgacttctgttgaagactggaagaatgccattgattctgtcgaaaaaaattttggtgctgtaaatatacttgtaaataatgcaggaataatggctgtaggaacgatagaggaagaaagctatgaccaatggaaacatgttcataaagttgaccttgatagtgttttcctaggttgcaaatacggtataccggcaataaaaaaacaaaaaaatggatcaatagttaatatttcatctatttcagggattattgctggacataatttagcatcatacaattcggcgaaagctgcagtaaggcatttaactaaatctgtcgcaatacactgcgctagagaaaagaacgggattcgctgtaattcaattc

SEQ ID NO: 203888 - DNA, 943 bp, Unknown
  Bacterial polypeptide expressing nucleotide sequence isolated from the Sargasso Sea
gcttcaaaacctgtgatggagggaaaagcagtcttgtttaaaagatttgctgacatagactcaattgatcttgagatcgactctaaaaactctgatgaaattattaactcaattaaaaatttttcaccttcatttggtggtattaatttagaagacatagcagcaccagattgttttgtaattgaagaaaaactaaaagaaatattagacatccccgtatttcatgacgaccagcatggtaccgcaattattacaactgccgctttaataaatgctctagatataaataaaaaatcaataaaaaaaattaaaatcgttgttaatggtgctggagcatcagcaatggcatgtgcaaatttatttaaaaaaagtggagcgccacaaaaaaatattaaaatgattgatcgtagtggagttatttataaaggaagaaaaaaattgaatcaatggaaatcatctcatgcgatagagacatcggataggactttagaagatgcaataaagaatgcagatgtatttttagggctttcagctaaaggggctttgacaaaaaacatggtaaaaaaaatggcaaaaaatccaataatatttgcttgtgcaaatcctgatccagaaattacaccagaagaagttgaggaagtgcgtaaagatgcaataattgcaactggtagatcagattacccaaatcaagtaaataatttaattggttttccatatatatttagaggagctttagatgttagatccaaaacaattaatgaagaaatgaaagtagcagcagcaaatgcaattgcaaaattggcaagagaagatgttccagatgaagttgtagcagctatgggaggggagagaccacattatggtaaagattatataatcccgtcaacttttgatcctagattaataagtagaattcctattgctgtagctaaggctgcaataa

SEQ ID NO: 203889 - DNA, 259 bp, Unknown
  Bacterial polypeptide expressing nucleotide sequence isolated from the Sargasso Sea
atggatatcaataacaaagttgcacttgttaccggaggagcctcaggtctaggtcaggcgacagtcgaaaaattagtttcaaaaggtgcaaaggttgccattcttgatataaatgagcaaaaggctaacgaaattatagaaaagcttggagctgaaaatattatatttttatcgacaaatataatggaagaggagcctgtaataagttccattaataaaatccatgaaaagtttggtgctttacatattgcagttaact

SEQ ID NO: 203890 - DNA, 830 bp, Unknown
  Bacterial polypeptide expressing nucleotide sequence isolated from the Sargasso Sea
agttataagtaacgggtctgcaattcttggtttgggaaatttgggttcgttagcttcaaaacctgtgatggagggtaaggctgtgctatttaaaagatttgcagatatagattctatcgacatagaaattgacagccaaaatacagatgaaataatttctacaatcaaaaatattgcaggtacttttggtggtataaatcttgaggatattgctgctcctgattgttttatcatagagcaaaagttaaaagaaattttagatattcctgttttccatgatgatcaacatggaacagcaattataacaacagctgctttaattaacgcattagatatttcaaagaaaaaaattaacgaagtcaaaatagttgtaaacggagcaggcgcttcagcaatagcatgtacaaacttatttaaaaaaataggtgtaaaaaatgaaaatgtaattatgtgtgatcgaaaaggtgtaatttacaaaggaagagatcaggttgatcaatttaaatctgctcatgctgtagagactaagcttcgaacattagaacaagctatgaaaaatgctgatgtatttcttgggctgtccgcaaaagatgttgttaatcgtgaaatgattaaatcaatggcaaaaaatcctatagtgtttgcatgcgctaacccagatcctgagattaaaccggaaattataaatgaggtacgagatgatgtgataattgcaactggcagatcggactatcctaatcaagttaataatttaataggttttccctatatttttagaggagcactagatgttagggcaaaaattattaatgacgagatgaaagttgctg

SEQ ID NO: 203891 - DNA, 580 bp, Unknown
  Bacterial polypeptide expressing nucleotide sequence isolated from the Sargasso Sea
attgaacaaagtaattctagtaactggtgcttcaagaggaataggagctgaatgtgctaaactgttggctaaagctggcgcaaaagtcattgtaaattattacaaatgtgagaaggaagcgatcgaggtcgttcaatttattcagaaaaatggcggagatgctacgatgattaatgccaatctcagaaaaaaaagtgaaatattaaatctttttagtactatcaaagaaaaattcggtaggatcgatgttttagttaacaatgcagggataatggaaacgaatctattgacaatgataaacgacgaagaatttgatcagatggttgatcttaatattaaaggggcactatactgtatgcaacgcgctacaaggatgatgtctagacaggaaagtggtaagattataaatataagttcgattacgggacgttttggtgcaccggcccataccgcttattcagcaactaaagctgctctaattgcaatgactctatctgcggcaaaagagctcggtacttttggaatcacggtgaattgtattgctccaggaataattgaaactgatttgatcaaaaactta

SEQ ID NO: 203892 - DNA, 994 bp, Unknown
  Bacterial polypeptide expressing nucleotide sequence isolated from the Sargasso Sea
gtcgagcttttcaaaagcatgggcgtgccgcatgagaacatcattctggtcgaccgttccggcgtgatctatcaaggccgcgaggcatcaatgaaccagtggaagtcgacgcatgcggtcaagacggatgcccgcacgctggaggacgcgcttgtcggtgcggacgtctttctcggcctgtccgttgccggtgcggtaacgccgaaaatggtggaaaccatggcagagcgaccgatcatcttcgccatggccaacccggtgccggaaatcatgccggaagatgtcaagaaagtccgtcccgacgcgatcatcgccaccggccgttcggactatccgaaccaggttaacaatgtcctgggcttcccctatatcttccgcggcgcgcttgatgtgcgtgccagcaagatcaacgaggaaatgaagatcgcggccgccgaggccatcgccatgctggcccgcgaggatgtgccggacgccgttgctgaagcctatggcgggcaagtgctgcaatatggcgaggactacatcattccggcgccgttcgacccgcggctgatctcggccgtgtcatccgcggttgccgccgcggcaatggagagcggcgttgcccgcaagccgatcgaggatctggagcgatacaggcgggacctgtcagcccgtctcgacccgacagcatcgactcttcaggtgatcttcgaccgcatcagcgccaaccgcaaacgcgtggtctttgccgagggcgaggaagagaaagtcatccgcgcggcgatggcgttccgcaacgcaggctatggcgagccgattctcgtcggccgcgagcaccgcatccgcgagacgatcgagaagctggggctggaaggcgctgaggacattccggtcaccaatgccaaggtctcgggccataacgagcaatatatcgacttcctctacaataagctgcagcgcgagggggcgcttcgccgggactgccagcgcatggtcaatctgaccggaa

SEQ ID NO: 203893 - DNA, 646 bp, Unknown
  Bacterial polypeptide expressing nucleotide sequence isolated from the Sargasso Sea
tctggagcaatccctcaaggaaaaccctgactggaatggaaccccatgtgatgtttctgatgagaaccaagtgaatcagctttttaaagagatgacagactcctttggaggtttggaaatcctggtcaacaatgctggtattgccggacctactgccccggtggaagagatcggcccggacgaatggcgacgttcagttggggtcaatctcaacggagctttctattgcacaaggctcgcaactcctctgctgaaaaactctccaaaagcttcgatcatcaacatctcctcggtggcaggccgtcttggctttgcacgccggcttccttatgcctccaccaaatgggccatgatcggtttcaccgaaagccttgccaaagaactcggtccctccgaaattcgggtcaacgcgttgcttccgggaatcgttgaaggtccccgtatcgaaggagtttttcaagcaagggcaaagagtgagggagtgccttatgaagaagtgcggaatagagtattaaacaatgtatccatgaagcgcatggtcagcgcaggagatgttgcagaaatggcggtcttcctctgctctgaagcgggaaaaaacatttccggtcaatcgatcagtgtctgtggaaatgtcgaaaacctttaa

SEQ ID NO: 203894 - DNA, 945 bp, Unknown
  Bacterial polypeptide expressing nucleotide sequence isolated from the Sargasso Sea
cggcaagatagaaatcagagcttcaaagaatatgattcctttgagagatctggctttagcgtattcaccaggagttgctgttcctgtaaaaaaaataagtgaaaattcagaggccgcttacgattatacaagtaaaggaaatcttgtggctgtaattagcaatggttcagctattcttggtttaggaaatttgggagcactagcctctaaacctgtaatggaaggaaaagctgttttatttaaaagatttgctgatatagactctattgatcttgaaattgactccaatgatactgatgaaataatcacatctataaaaaattttgctcctagttttggtggcattaacttagaagatattgctgcacctgactgttttgtaattgaagaaaaactaaaggaaattttagatatacctgtatttcatgatgatcaacatggaactgcaataattacaacagctgctttaatcaatgctttagatataaataaaaaatcaatcgaaaaagtgaaaattgtagttaatggtgcaggtgcttctgcaatggcatgtgctaatttattcaaaaaaaatggagttgcacaaaataatattactatggttgatagaacaggtgtaatttttagaggtagagataatttaaatcaatggaaatctgctcatgcaatagaaactaaaaatagaactttgaatgatgctattaaagatgcagacgtttttttgggtttgtctgcaaaaggtgctcttactaaagaaatggtaaaaaaaatggcaaaaaatcctataatttttgcttgcgctaatccagatccagaaataactccagaagaaattgaacaagtaagggacgatgcaataattgctactggaagatcagattatcccaatcaagtaaataatctgatagggtttccatatatttttaggggtgctttagatgtaag

SEQ ID NO: 203895 - DNA, 532 bp, Unknown
  Bacterial polypeptide expressing nucleotide sequence isolated from the Sargasso Sea
gatggatcttaaccttgccgataaggtagtcattgttaccggagctagcaggggccttggtgaggcgatagtaaaagatcttgttgacgaaggagcgtctgtaattgcggccgcaaggtcagaaagtgcacttaaagcaatctccgaatattctcctgagaaaatagccgtttgtgtcgcagatatggaaaatcgtaatgatgtccaagggctcgtaaattttgctcttgatacttttggctctctgtctgcagtggtgaataatgctgggattgctcctgctgggaagtttgttgatatcgacatagagattatggaaaagacttttgcagtaaatgtctttgctcctgcaattcttgcccgggaagctgcgagatactttatcgaaagtggaattgaaggttccatagtaaatattgcatcgacctctggtcttaaaggtaaggctttgcttgtcggttattcagcttcgaaaggagcgatgatgaggttgacagaagcacttgcagccgagtgggcacggtttggaatc

SEQ ID NO: 203896 - DNA, 577 bp, Unknown
  Bacterial polypeptide expressing nucleotide sequence isolated from the Sargasso Sea
atgaaacgccttgaaaataaaattgccttaattacaggagcagctcaaggaattggcttagccatagcaaaacttttcgtgttagaaggagccaaagttctgattacagatataaatgaaaaagaagcggctattcaatcaaacaaaattaatgatgagtttcctgggcatgccgtatcaataaaacacgatgtgacttctgttgaagactggaagaatgcaattgattctgtcgaaaaaaattttggtgctgtaaatatacttgtaaataatgcaggaataatggctgtaggaacgatagaggaagaaagctatgaccaatggaaacatgttcataaagttgaccttgatagcgttttcctaggttgcaaatatgctataccagcaataaaaaaacaaaaaaatggatcaatagttaatatttcatcaatttcagggattattgctggacataacttagcctcatacaattcggcgaaagctgcagtaaggcatttaactaaatctgtcgcaatacactgcgctagagaaaagaacgggattcgctgcaattcaattcatcctgtgtttgttgata

SEQ ID NO: 203897 - DNA, 812 bp, Unknown
  Bacterial polypeptide expressing nucleotide sequence isolated from the Sargasso Sea
tttgttaacagcgataaagaatttaggagatgtagttttagttgatatagcaaaaggtgtagcaaaaggaaaagctttagatatttcacattcgctccctgtgcttcaatgtaatagaaaaattactggaacaacatcactaaaacaaattaaagattcagaagttattgttgtaactgcaggagtacctagaaaagcaggaatgagcagagatgatttagtggaaataaatttaaaagttatgaaagatgttggtagagctataaaaaaatatagtccaaaaagttttgtaattgttgtcacaaatcctttagatgttatgacttgggctttacaaaaaataacaggaatcccacattcacatgtagttggaatggcaggagttttagacacatctagatttaaatttcatctggcagaagcacttggtttttcagtacaagatgtttcctcttcagttttaggcgggcatggagatgatatggttgcacttttaagacatacaacaatttcaggaatcccacttgaagatatgataaaaatgaaaaaaatttctagacaaaaagtgaatgaaattgtcaaaagaattagaacatgtggtggagaaataatcacatatatgggaacatctgcatattattcaccagcagcatcagcagttgaaatggttgaatgttatttaagagatcaaaaaaaaattattccttgttctgcttatttgagaggtcaatatggagtaaaaggtatttatgtaggagttcctgttgttttgggaacaaatggtgctgaaaaaattgttgaaataaatttaa

SEQ ID NO: 203898 - DNA, 802 bp, Unknown
  Bacterial polypeptide expressing nucleotide sequence isolated from the Sargasso Sea
gctgatcgagcgctgcgacatcccggtgttccacgatgatcagcacggtaccgccatcgtcaccgccgccggcctgctcaacgcgctggaagtgcagggcaagcagattggcgacagccgcatcgtctgcatgggcgccggggctgccgccaccgcctgcatggagctgctgatcaagtgtggtgccaagccccacaacatcttcatgctggatcgccagggcgtcatccacagcggtcgcaccgatctcaaccagtacaagcagcgcttcgccaacgacacccccctgcgcaccctgatggaggtgatcgacggggcggacgtgttcgtcggtgtctccggcccggacgtgctgcccgccgaggcagtggccctgatggcccccaacccggtgatcttcgcctgctccaacccggatcccgagatcaagccggcgctggctcacgcagtgcgcaaggatctcatcatgggcaccggtcgttccgactatccgaaccagatcaacaacgtgctctgcttccccttcatcttccgcggcgccctcgacgcccgtgccagtcgcatcaacgatgccatgaagatcgcggcggtcgaggcgatccgtggtctggccaaggagccggtaccggccgaggtactgaccgccgccggcgtcagcgagctcgccttcggcaaggactacgtcattcccaagccgatggatgcccgtctgctgccgcgcgtcgcccgtgccgtggcactggcggcggtggagtccggggtggcccgcatcgccctgccggcggactatatgctgggctga

SEQ ID NO: 203899 - DNA, 877 bp, Unknown
  Bacterial polypeptide expressing nucleotide sequence isolated from the Sargasso Sea
atggaagaaaagttaaaaaaagttttagatataccagtgtttcatgatgatcaacacggaactgccattattactacagctgcattaattaatgctttagatatatgcaaaaaatctattaaagaagtcaaagtagtggttaatggagctggagcatcagctatggcttgtgctaatttatttaaaaaaagtggagttcctcaaaaaaatattacaatgattgatcgaaaaggagttatttataatggtagagataaccttaatgaatggaaaaaattacatgcagtcaaaacaaataatagaactcttaatgatgcaataaaaggagctgatgtttttttaggtttgtcagctaaaggagtactcacaaaagatatggttaaaaaaatggcaaaaaatccaataatttttgcttgtgcaaatccagatccagagattactcctgaagatgtggaagaagttagagatgacgctattgtagctactggaagatccgattatccaaatcaagttaataatttaattggattcccttatatatttagaggagcattagatgtaagagctaaaacaattaatgaggaaatgaaagttgcagctgctcacgcaattgctgatctagcaagagaagatgttccagatgaagttgttgctgctatgggaggagaaagacctcattatggaaaaaattatatcataccctctacttttgacccgagattaattagtgtaataccttctgctgttgcagaagcagctataaaaagtggtgtagcaagaaaaaaaattgaagattttcgagattataaagaacaattaaaacaaagactcgatccctcggtaacaataatgcagggaattaataatcaaattaaaa

SEQ ID NO: 203900 - DNA, 1537 bp, Unknown
  Bacterial polypeptide expressing nucleotide sequence isolated from the Sargasso Sea
gatgggcaccagcctgccctatgccgaacgcaagcgacagggactgatggggcgtatgccccacaaggaggagtcgctggcccagcagcggcgccgcatctaccggctggtttcggccatgcagagcccgtttgatcagcatctgctgctgcgccagctgcaggaggacaacccggtactgttctacgagctggtgcgccaccacctgccggagctgttgcccatcatctataccccggtggtgggggaggcgtgccagcgccacagcgacctttatctgcgcagccacggcctctacctttcctggcacgatcgggacgagctggaccacatcttcgcggcggtggagcaggaggtggacgtcatcgtcatctccgatggcgagcgggtgctggggctcggcgatctcggcatcggcggcatggggatctgcatcggcaagctggcgctctactccgccgccggcggcatcaacccggcgcgcaccctgccgctgtgcgtcgatgtgggcaccaacaaccccgagctgctggaagatgactcctacctcggctggcaggcgccgcgggtggatggcgagccctattaccagttcatggacaaggtggtggccgccattcgcaaacgctggccccaggtggtgctgcagtttgaagactttgccggcaagcatgccgccaatctgctggcgcgctaccgcgatgagctgtgcatgttcaacgacgacatccagggcacggcggcggtggcgtcggcctgtgtgctggccggcctgcagcaggcgggcagtgcgcttgccgagaccccggtgctgatcgtcggggccggctcggccggctgcggcatcgcagccatgctggcccagctggcgggcggtacggagcgggtgcagctgtttgatcaggatggcctggtctgccaggaccgcgccgggctcaccccggcccagcagccgtttgcccgcccggcggcggaggcgtgccactccttggccgcgctcatcgagcggctgcgccccggggtgctgatcggggtgagcggtcagggcggcttgttcgacgaggaggtactgacggccatgggggaggtgtgcgagcggccggtgatcctgccgctctccaaccccactcgcagcgccgaggcgaccccggcccaggtgtggcaggcgaccggcgggcgcgccttgctcgccaccggcagccccttcccgccggtgacggtggacggagcgccgcgggtggtttcccagtgcaacaacgtctatgtgttcccgggcatcggcctcggggcctgtgcggtcaaggcgcggcgcatcagcgatggcatgctgcgggcggcggtacaggcagtgggcgcctatccgctggccgaagggcggctgctgccccccatcgagcaggtgggagaggtggcccgcgccgtggcgagagcggtggcactgtgtgcccgtgccgaggggctggcggattttgccggcgatcccgcacctttgattgaccagacctggtggcgcccgcactattggtccgcgtcctga

SEQ ID NO: 203901 - DNA, 1873 bp, Unknown
  Bacterial polypeptide expressing nucleotide sequence isolated from the Sargasso Sea
aatggaaggtaaggcagttctttttaaaagattcgctgatattgactctatagaccttgaaatagattcaaataatccagatgaaataattaattcaattaaaaacttctcaaaaagttttggtggtataaatttagaagatattgctgcacctgactgttttgttattgaagaaaaacttaaaaaaattttagatattccagtttttcatgatgaccaacacggtacagcaataattacttgtgcagcattaataaatgctatccatattactaaaaaaaatattaaaaaaataaaaattattgttaatggagctggtgcttctgcaatggcttgttcgaagctttttgcaactataggcgtcccaaaaaaaaatattatcatgttagatagcaaaggagttatttttaaaggaagaaagaatcttaataagtggaaatctgaacatgccaaagaaacaaaatcaaaaacattggatgaagcaatagttggtgctgatgtttttttaggattatcaaaggccaaagttttaaaaaaagagatggttaaaaaaatgtcaaaaaagccaataatttttgcttgtgcaaatccggatccagaaattactcctgaggaagttgaagaagttagaagtgactgtatagtagctactggtagatcagattatcctaatcaagtaaataatttaattggttttccatatatatttcgaggtgccttagacgtaagagccaaaacaattaatgaagaaatgaaaatagctgcagcaaatgcaattgctgagcttgcaagagaaagagtcccggatgaagttgtagctgcaatgggtggtgatagaccaaagtatggaaaagattatattataccatccactttcgatcccagattaattagtgtaattccagttgcagttgctaaagctgcaattaaaagtggagttgcaagaaaaaatattgataattttgacgtttattctgaacaattaaaacaacgattggacccttcagtaacaattatgcaaggaattaactctcaaattaaaaaaaatcaaagaaaagttgtttttgcagatggtgaggatgaaaatactcttaaggctgcaattgcttttaaaaatagtggattaggaattccaattattgttgctaaagaaaaagtcgttaaacaaagattaaaagaaattggatatagtgaaaattttaacatagagatagttaattctacaataaaagaaaaaagggaaaaatatgtaaaatacatatttaaaaaattacatcgagatcagggtcttcttgaaagagattgtgatagaatggtaagaaatgatagggtaatttggggagcttgtatggtttcttgtggtgatgcagacgctatggttactggaaacacaagaagatatactcaatctttgcagaaaattaaaaaagttgttgatcctaggccaggtgaaattatgtttggtttaaatatggtggtcaacaaaggaagaacagtttttatagctgacactacagtgcatgaatatccttcatccttacaattagctgaaattgcaatatcgagtgcaagagtagttagactttttggttttgatccaaaaatagcatttttatctcattctacttttggtcagccaattacaagtagaactaaacatataagagacgcagttaaaatattaaaagaaaaaaatgttaattttaaatttgatggtgacatgcaaccagatgtggctttggatgaaaaatataaagaattatatcctttttcagaaattgttggtaatgcaaatgttttgattatgccaggacaacatagtgctgccataacatataaaactatgaaaactttaggtggatcaaaagtaatt

SEQ ID NO: 203902 - DNA, 851 bp, Unknown
  Bacterial polypeptide expressing nucleotide sequence isolated from the Sargasso Sea
tgagtgcttcgagatcgaaaaggccctgatcgagcagtgcgacattccggtattccacgatgaccagcacggcaccgcgatcgttaccgcggccggcatgatcaacgccttggaaattgctggcaaaaccctgggcgaggcgaaaatcgtctgcctgggcgccggtgccgcggccatttcctgcatgaagctgatcatcagcatgggcgccaagctggaaaacatctacatggtcgacagcaagggcgtgattcagtccgagcgtaccgacctgaaccagtacaaggcgatgtttgcccatccgtcctccaagcgcaccctggctgacgccctcgacggtgccgacgtgttcgttggcctgtccggcccgaacctgctgagcgctgaaggcctcaaatccatggcgccgaaccctatcgtgttcgcctgctccaacccggatccggaaatctctcctgagctggcccacgccactcgcagcgacgtgatcatggccaccggccgttcggactacccgaaccaggtcaacaacgtattgggcttcccgttcatcttccgtggtgccctggacgttcgcgccaagcgcatcaacgaagaaatgaaagtggccgctgccaacgccctgcgtgaactggccaaactgccggtacctcaggacgtgtgcgacgcctacggtggtgccaagctggaattcggtcgtgagtacatcattccgaaaccaatggacaagcgcctgatcaccctgatctccgatgccgtggccaaggccgctatcgagactggtgtggctaccctgccgtatccaaagaactacccgctgcaaagcgtggatgatgtgttcaacggctaag

SEQ ID NO: 203903 - DNA, 1295 bp, Unknown
  Bacterial polypeptide expressing nucleotide sequence isolated from the Sargasso Sea
aatgacaaaaaaatcaaaaattgatcattatacagataaagaggctttagattttcatataggcaataagtctggcaaaattgaggttaattcatctaaacctcttatctcaaaaagagatttatcacttgcttattcgcctggagtggcggcacctgtaaaggaaatttccaaagactcttccaaagcctatgactatacttctaagggaaatttagtagcggttataagtaacggttctgcaattcttggtttagggaatttgggctctttagcttcaaaacctgttatggagggcaaggcagttttatttaaaaggtttgcagatattgactccatagacatagaaattgatagccatgatgcagatgaaataatttctacaattaaaaatattgctggtacatttggtggtataaatcttgaagatattgctgctcctgattgtttcattatagagcagaagttaaaagaaattttagatattcctgtctttcatgatgatcaacatggaacagcaattataacaacagctgctttaattaatgcattagatatctcaaagaaaaaaattaatgaagttaaaatagttgtaaacggagcaggtgcatcggcaatagcatgtgcaaacttattcaaaaaaataggtgtaaaaaatgaaaatgtaatcatgtgtgatcgaaaaggggtaatttacaaaggaagaactcaagtagatcaatttaaatctgctcatgctattgagacaaatcatcgaacattagagcaggctatgaagaatgctgatgtatttcttggcttgtctgcaaaagatgttgttaatcgtgaaatgattaaatcaatggcaaaaaatcctataatatttgcgtgcgcaaatccagaccctgaaattaaaccggaaataattaacgaagtacgtgatgatgcaataattgcaacaggcagatcagactaccctaaccaagttaataatttaataggttttccgtatatttttagaggagcactagatgttagggcaaaaataattaatgatgaaatgaaagtcgctgcagctaacgcaatagcgttattagcaagagaggatgttcctgatgaagttgttgcagcctatgggggtgaaagaccaaagtatggaagagaatatattataccctcaactttcgaccctagactagttcgaaggattccttctgcagtagccgaagctgcaattaaaagtggtgtagcaagaaaaaaaattgaaagtttggaagattataaagatcagcttactgcaagattagacccgtcaa

SEQ ID NO: 203904 - DNA, 1024 bp, Unknown
  Bacterial polypeptide expressing nucleotide sequence isolated from the Sargasso Sea
aatgaaaacaagggcagctgttgctttagaagcagggaaacctcttgaggttatggaagttaatctcgaaggacctaaagaaggcgaagttttaatagaaatcaaagctactgggatttgtcatactgatgagtttactctttcaggtgctgatccagaaggattatttccggcaatacttggtcacgaaggagcaggagttgtagttgaaatagggtctggcgttaaagatttgaaagttggtgaccatgtcatacctctttacactcccgagtgtagacagtgtgaatattgcctaaatcccaaaacaaatctttgtcaagcgatacgcgagacacaaggccaaggattaatgccggacggaaccagtcgatttagcatgctcgatggaactcctattttgcactacatggggtgttcaaccttttcaaattacaccgttctcccagagatagcattagccaaaattaatcccgatgctccttttgaaaaggtttgttacattggttgtggcgtgactacgggacttggtgcagttatgaatactgcgaaagttgaaattggaagccgtgccatagtttttggccttgggggaattgggttaaatgtaattcaaggtttaaagcttgcaggtgcagatcaaatagttggtgtggatttaaatcctggtaagcagtccatggctgaaaaatttggtatgacagactttgttaatccttcagatgtgaatgatgatttggttgcgcacttagtcaacgtaacaaatgggggtgcagattatacttttgatgctacaggtaatgtaaatgtgatgagaactgcccttgagagtgctcataaaggctggggagaaagtataataattggggttgctcccgctggtgcagaaatttcaactagaccttttcagttggttacaggtcgcgtttggaaaggtacagcttttgggggtgcacgcggtcggacggatgttccaaaaatagtcgattggtacatggaaggaaaaattcaaatcgaccctatg

SEQ ID NO: 203905 - DNA, 841 bp, Unknown
  Bacterial polypeptide expressing nucleotide sequence isolated from the Sargasso Sea
ctgcttggagctatttttgcaactgataagcaaaaagtaattttaattactggtaccgcacatggtattggaaaatcaactgctcaatacttaattgataagggtcatattgtttatggcggagatatcctcatcgaagagaatttatatctaaatgatattggaggtgtggctttagaaatggatgttacaaaacaagatcatgtagataatgctatcaataaaattattgctgaacaaggaaggattgatgttttagttaataatgctggaattgctgtaggaagtgctatcgaagatgtttcaatggaagatgctctttatcaattcgaagtaaatttatttggcattggtagaactgttaaagctgccttgcctcatatgcgagcacagggaagtggaactataataaatatttcatctgttttaggaaaagtatataaccctctttatggatggtatgtttcatctaaacatgctcttgaaggctggtcagatgttttgagaattgaggttgaacagtttggtatagatgtggtaattatcgagccaggaatgattaaaacaaatattggtaactattctgctcaatattttgaaaaatatagcaagaattctgcttatgcgaacttttatggctctccagatgacaaggaagaaaatagttttgataattattctgatccaattgtaatagcaaaagtaattaataaagctattgatgctaaaaatcctaaaacaaggtattcagctggtgcatatagctggatacttttgacaatgagaagtatattacccgataagtggtttgacaaattaatcgtaaaagttactagttaat

SEQ ID NO: 203906 - DNA, 778 bp, Unknown
  Bacterial polypeptide expressing nucleotide sequence isolated from the Sargasso Sea
atgacaggacgacttgaaaataaagttgcaattataactggggcagctatggggcttggtgccgctgatgccgaactttttgcatcagaaggggctaaagtagttctaactgatattgccgaaaaagaaggtcaagaacttgcagataaattgaacggaacattttttcaccatgatgttacagatgaagatcgatggattgagataataaatgaaactgaaaaaaaatatgggcgaatagatgtgctcgttaataatgctgggattgtcaagccaggtgatccagaaaatcagactactgaagaatataaatttactatgtcagttcatatggacagtactttttttggttgcaagtatgtaatacctgttatggctaaaaatgggggtggatcgattgtaaatatgtgctcaattgcgtctgttcaaggtgaatcttatgttgcggcatactgtgctgccaaaggagcaattgaagcatatagtcgcgcagttgctgtccattgtggtcttgctaaaaatggtgtgaggtgtaatacaattcatccatctggaatagctactccaatggtagcaagtgttcctgctcttatggcagaaaaatttggcaatactggtgttcaggacgcaccagttgaatcaaacaaagttggagaacctatggatattgcacatgcagctctctatcttgcatcagacgagtcaaaatttgttaatggagctcaacttcgtgtggacaatgcaatgtctgtagtatcaggtaatatgcctgaatagt

SEQ ID NO: 203907 - DNA, 697 bp, Unknown
  Bacterial polypeptide expressing nucleotide sequence isolated from the Sargasso Sea
atgaaactattagacggacaaagagcattgatcaccggcgctggaagcggaatcggtaaagtgatggcacagcatttcgaaaaagctggagcccggatctggatctgtgatgccgacaccaacaatctggagcaatccctcaaggaaaaccctcactggaatggaaccccatgtgatgtctctgatgagaaccaagtgggtaagctttttaaagagatgtcagacttctttggaggtttggagatcctggtcaacaatgctggtattgccggacctaccgccccggtggaagagatcgacccgggtgaatggcgacgttcagttggggtcaacctcaacggtgctttctattgcacaaggctcgcgacacctttgctgaaaaactcccccaaagcttcgatcatcaacatctcctcggtggcaggccgccttggctttgcccgaagacttccgtatgcctccaccaaatgggccatgatcggttttaccgaaagccttgccaaggaactcggaccctctggaattcgggtcaacgcgttgcttccgggaatcgttgaaggtccccgtatcgaaggagtttttcaagcaagggcagagagtgagggagtgccttatgaagaagtacgggatagagtattgaacaatgtatccttgaagcgcatggtcagcgcaggagatgttgcagaaatggcggtct

SEQ ID NO: 203908 - DNA, 781 bp, Unknown
  Bacterial polypeptide expressing nucleotide sequence isolated from the Sargasso Sea
gatgggccgcctcgcggacaaggtcgcgatggtgacgggcgcgggccggggcatcggcgccgcgatcgcccgcgcgttcgttcgcgagggggcggccgtcgcgctcgtcgatctcgactttccgcaggcgcagcgcacggccgccgggattgcacaggagattgccggcgcgcgcgtgctgccgctgcacgcggatgtcgcgcggcaggagtcggtgcgtgctgcactggcgcagaccgaggcggcgttcggcccgctcgacgtgctcgtgaacaacgcgggcatcaacgtgttcgccgatccgctgacgatgaccgacgacgactggcggcgctgcttcgcggtcgacctcgacggcgtgtggcacggttgccgcgcggcgctggaggggatggtcgaacgcggccgcggcagcatcgtgaacattgcgtcgacgcacgcgttcaggatcattccgggctgctttccgtacccggtcgcgaagcacggcgtgctgggcctcacccgcgcgctcggcatcgaatacgcggcgcgcaacgtgcgcgtgaacgcgatcgcgccgggctacatcgagacgcagctcacgcgcgactggtgggacgcacaacccgaccctgctgccgcgcgcgccgaaacgctcgcgctgcagccgatgaagcggatcggccggccggaggaggtcgcgatgacggccgtgttcctcgcgtccgacgaggcgccgttcatcaatgccgcgtgcatcaccgtcgatggcgggcgcgcggcgctgtatcacgactga

SEQ ID NO: 203909 - DNA, 2344 bp, Unknown
  Bacterial polypeptide expressing nucleotide sequence isolated from the Sargasso Sea
aatgccgtcgaagagttattctaatccgcccgccaagagacacatgtctacccaagcctcctccaaagccaaacttcgcgaagccgcgctcgattatcacgaattcccgacccccgggaaaatcgcgatcgccccgaccaagcagatgatcaaccagcgcgacctcgcgctcgcgtactcgccgggtgtggcgtacgcatgcgaggagatcgtcgagaatccgctcaacgcggcgcgcttcaccgcgcgcagcaacctggtcggcgtggtcacgaacggcacggcggtgctcggtctcggcaacatcggcccgctcgcgtcgaagccggtgatggaaggcaaggccgtgctgttcaagaagttcgcgggcatcgacgtgttcgacatcgagctgaacgagtcggacccgcacaagctcgtcgacgtgatcgccgcgctggagccgaccttcggcgggatcaacctggaagacatcaaggcgccggattgcttcatcgtcgagcgcgaagcgcgcaagcggatgaagattccggtgttccacgacgaccagcacggcaccgcgatcgtggtggccgcggccgtcacgaacgggctgaaggtcgtcaacaaggacatcaagaaggtcaagctcgtcgcgtccggcgcgggtgcggccgcgctcgcgtgcctggacctgctggtcgacatcggcctgccgctcgagaacatcacggtgaccgacctggccggcgtggtctacaagggccgcaccgagctgatggatccggacaaggagcgtttcgcgcgcgaaacggaagcgcggacgctggccgaagtgatcgacggcgcggacatcttcctcggcctgtcggctgccggcgtgctgaagcaggagatggtgaagggcatggccgagcgcccgctgatcctcgcgctcgcgaacccgacgccggaaatcctgccggaagccgcgctcgaagtgcgccccgacgcgattctcgcgaccggccgcaccgactatccgaaccaggtcaacaacgtcctgtgcttcccgttcatcttccgcggcgcgctcgacgtcggcgcgacgacgatcacgcgtgaaatggagatcgcggccgtcaacgcgatcgccgagctcgcgcagcacgagcagagcgacatcgtcgcgaccgcgtacggcatccaggacctgtcgttcgggcccgaatacctgattccgaagccgttcgacccgcgcctgatcgtgaagatcgcaccggccgtcgcgcaggccgcgatggacggcggcgtcgcgacgcgcccgatcgaggacatggaggcgtaccgcgttcacctgcagcagttcgtgtaccacagcggcacgacgatgaagccgatcttccagatcgcgcgcgctgcgccggaagagaagaagcgcgttgtattcgcggaaggcgaagaagagcgcgtgttgcgcgccgttcagatcatcgtcgacgaaaaactcgcgaagccgatcctgatcggccgcccgtcggtgatcgagcaccgtatccatcgctacggcctgcgcctgacgccgggtaccgacttcacggtcgtgaacaccgagcacgacgagcgctaccgcgacttctggcagacgtactacaagatgatggcgcgcaagggcatcagcgagcagctcgcgcgcgtcgagatgcgccgccgcacgacgctgatcggctcgatgctggtgaagaagggcgaagcggacggcatgatctgcggcacgatcagcaccacgcaccgccacctgcacttcatcgaccaggtgatcggcaagcgcccgggctgcagcgtgtatgcggcgatgaacggcctcgtgctgccgggccgccagattttcctcgtcgacacgcacgtgaacgtcgatccgaccccggaagagctggccgagatcacgatcatggctgcggaagaagtgcgccgcttcggcatcgagccgaaggtcgcgctgctgtcgcactcgaatttcggcacgagcaacgcaccttcggcgaagaagatgcgcgatacgctcgcgatcctgcaggaacgcgcgccggagctgaaggtggacggcgagatgcacggcgacgtcgcgctcgatgcggcgctgcgcaaggaaatcctgccggaatcgacgcttgaaggcgaagcgaacctgctgatcctgccgaacatcgacgccgcgaacatcgcgtacaacctgctgaagacggccgcgggcaacaacatcgcgatcgggccgatcctgctgggcgctgcgcagccggtacacgtgctgaccgaatcggcgaccgttcgtcgcatcgtcaacatggcggcgctgctggtcgccgacgtgaacgccacgcgctga

SEQ ID NO: 203910 - DNA, 1909 bp, Unknown
  Bacterial polypeptide expressing nucleotide sequence isolated from the Sargasso Sea
aacctacatttttggtgggaattaacctttgaagatattaaagctccagaatgttttataattgaaaaagctttgagaaaaaggatgaaaattccagtgtttcatgatgatcaacatggaactgctatctgtgtagcagcagctttgataaatggattaagaattatagataaggaaatatcgaaagcaaatttggtttgctcaggtgctggggctgcagcattagcatgcttagatctacttgtcgagatgggtatgaaacctgataacatagtggtatgtgatagaaaaggtgtagtacataaaggaagagaaaaagaactagatgagtacaagctaaagtatgcaatcgatactaatgcaagagatctaaatgacgctatagatggcgctgatattttccttggagtttcaagtgcaggtgttttaaccaaagaaatggttaaaaaaatgtctaagaaaccattaattttggcacttgcaaatcctaaccctgaaattttacctgaagatgttatgaatgttaggccagatgcattaattgcaactggtcgatcagattaccctaatcaagtgaataatgtactatgttttccctttatgtttcgtggtgctcttgatgtgggggctactgaaataaatgaagctatgaaaattgcagctgtatacgcaattgcagacctcgctaaagctgaaatttctgacgttgttgctaaggcttattcagggcaacagttagaatttggacctgattatctcattccaaaaccttttgatccaagattaatcattaaagtttcgagtgctgttgcaaaagcagccatagagacaggtgtcgcaacaagaccaatagatgatttaaaagtttatgaggataaattagcacaatatgtctatagaacaggttttgttatgaagcctgttttcgagcaagctagaaccaaacctatgaaaattgcatactctgatgcagaagaagaaaatgttttgagggctgtaaaaatagctatcgatgaaggcattgcttcaccgattctaataggaagaaaatatgttattaaaatgagaatggaaaaagctgggttgcactttgaccttgaaaaagatgtagagataatagacccagaagatgatacacgatataaagaatattggatgacatatcataatttgatgtcaaggaagggtgtttcaccaaatgctgctaaaacaattgttagaactcgtaatacagtaattggtgccctggctgtaaagagaggtgatgctgatgctttggtttgtgggtatgttggaagatatggacggcatctacaatactgtattgatatattaggtttagagaaaaatgtaactgctccttgtgctgttcaacttttagtaactcctaaaaaaacaattttcataacagatacagaggtaaacttaaatccatcatctgatcaaatttcagaaatagtttctttatcttcaaaggtagtagagaggtttggaataaagccaaatgttgcattggttacccattctaattttggaacacactctgactctatagtattaaagatgcagcaagcatttagtaaaattaaaaaagaaaaccccttaatccaggttgatggagaaatgaacgcagatttagctctttcagaatcttcaagggagtatatttttcctgattgtattttaaaaggagaagctaatttgcttgtaatggccaaccaagattcagcgtcagtaagttttgcattggcaaagtctttaactgatggtttatctgttgggcccattttggctggtttatctgatgtagcacatatagttaatccatcaattacggtcagaggtctggttaatattactgcattagcttcagttcaagcttctagtaaaacttcaaataataattaaa

SEQ ID NO: 203911 - DNA, 664 bp, Unknown
  Bacterial polypeptide expressing nucleotide sequence isolated from the Sargasso Sea
ttgttctcttttgcgcgcgcagcggcgacgagcgcggatctgaagtcgttcgcgacgatcgacgcggtgagacacgacgtcggcgacgatgacgtgggattcgatctgagctactgcggcatttgtcacacggatttgcacttcatcaacaacgacttaggcgcgacgacgtatcccctcgttccgggacacgaactggcgggcgtcgtcaacgaggtggggaaaaacgtgactaaattcaaggtgggcgataaggtcggcgtcgggtgcatggtcgattcgtgcctgaactgtaaaagctgcctcgccgacgaggaacagtattgcgacaacgggatgacgatgacgtacggctccagaaccgcgcacggtcgcgcgggaccgaacggacgacagacgattggtggttactccacgaagatggtggtgaacgaacgcttcgccgttaagattccagataatgcgccgctcgacaagacggcgccgctcttgtgcgctggaatcactctgtacgatccaatgaaggctttcggcgtccagccccgcacgcgcgtcggcgtcgcgggtgtggggggattgggtatgatgggcatcaaaatcgcctctgccctcggcgccgaggtcacggccatctctcgatcgaacgcgaaagaaagcaagggcg

SEQ ID NO: 203912 - DNA, 796 bp, Unknown
  Bacterial polypeptide expressing nucleotide sequence isolated from the Sargasso Sea
tatgaaagatttattttcaattgaaggaaaagtagctcttgtaaccggtggttcaagaggtattggagaaatgattgcggcaggctttttagctaatggtgcaaaagtttatataagttcaagaaaagcagaagtatgtgacgctacagcagaaagattggcaaatgaatatggtggtgagtgtatttctattcctgcagatctatctaatcttgaaggcataggtgccttagcaaaagaattgtctgctaaagaaaattccttagacatattagtgaataatgctggagcttcttggggggaacctattgaagagtattctgaacttggttgggataaagtaatggacactaatgttaaaggtatatttttcctaacccagcagttattacctctattaagagaatctggtaaatctgataacccttccagggtaattaatattggatcaatcgatggaattaaaaccggtacttttgatgcattttcttacggaccttctaaagcagctgttcatcatctaactcgtgtcttggctgcaaggctaataaaagatcaaataatcgtaaatgcaattgctccaggcccatttccaacttggatgctaagtacaggagtaggtggaggaggagacacagacatagactggtcagctgtagggcaaagcaatccaagtggtagggtaggcgatgctgaggatattgctggtcttgctatctttctgagttccagagcaggtgcctatactgtaggtcaaacgatagcttgtgacggaggagctgtagctagttcataa

SEQ ID NO: 203913 - DNA, 1246 bp, Unknown
  Bacterial polypeptide expressing nucleotide sequence isolated from the Sargasso Sea
atgtcagatattcgtcaacaagcactcgattatcatgaattccccgttcccggtaaaaccgcagtctgcctcactaaacctgctgaaaccagccatgacctcgcactagcctatagccctggtgttgctgaaccggtacgtgaaattgctgctaatcctgacaatgcatatcgttacaccaataaaggtaacacagtcgctgttatcaccaacggcacagcgattctgggtttaggtaacttaggcccattagcatcaaaaccggtgatggaaggtaaggctctgttgtttaaacactttgcgaatatcgactcgaccgatatcgaagtgacccacaacacccctgaagagttcattaacacagttgcggccatcgctggcacctttggtgggattaacctcgaagacatcaaggcgccagagtgctttgttatcgagcgcgaattgattgagcgttgtaatgtgcctgtgttccacgatgaccagcatggcaccgccattgtgaccgcagcgggtatgatcaacgccttagaaatccaaggtaagctgatcagcgatgcgacttttgtgtgtatgggggctggcgcagcggctatcgcctgtatgaccatgttggttaagtgtggtgcaaaccgtgccaacatctatatgttagatactaaaggcgttatccatgcgggtcgtaccgatctgaatgaatataaagccttgtttgcaaacgataccgacaagcgcaccttgcaagatgtaattaaaggtgccgacgtattcttaggtttatctggcccgaacgtgattggcgctgaagaagtggccatgatggcggataagccagtgatttttgcctgctcaaacccagatcctgaaatcaaacctgagcttgcccacgcaacgcgcagcgatttaatcatgggtactggccgcagcgattatccaaaccaagtgaacaacgtactgtgtttcccattcattttccgtggtgccttggatgtacgtgcatcttgcattaacgacgagatgaaagtggccgcggttcacgcgattgctgctttagcaaaagaagaagttcccgcgagcgtattgaaggcctatccaaaggtgagttcattaagttttggccctgaatatgtgctgccaaaaccaatggatccacgattgttacctcgtgttgcccgtgcggttgcacaagctgcgattgattcgggtgttgcggcaatcactacgctgccacaatatgcggattaag

SEQ ID NO: 203914 - DNA, 1336 bp, Unknown
  Bacterial polypeptide expressing nucleotide sequence isolated from the Sargasso Sea
aatgaaaaaaaataaaattgaacattattctgataaagaagcattagaatttcataattcaaataaatctggcaagattgagataatttcatcaaaacctatgactactaaaagagaccttgccttagcgtattcgccaggggttgctgctccagtaaaagctatttctcaaaaccctgatcttgcttatgattataccactaaaggaaatctagttgcagtaataagcaatgggtctgctattttaggactaggaaaccttggtgcaattgcttctaagccagtaatggaaggtaaagcagttcttttcaagagatttgcagatatagattctattgacctagaaatagactcaagtgatcctgaagaaattgttaattctattaaaaatttttctaaaagttttggaggaattaatttagaagatattgctgctccagattgctttataattgaaaaaaaacttaaaaaacttttagatattcctgtttttcatgatgatcaacatggaactgcaataataacctgtgcagcgttaataaatgctttagacataactaaaaaagatattaaaaaaacaaaaatagtaattaacggagctggagcatcagcaatggcatgtgcagatctttttataattaaaggtgtgcctaaaaaaaatattacgatgttagatagaaaaggagttatttataaaggaagagaaaacttgaatgaatggaaatctaaacatgctattgaaactaaatctagaacattagatgaggcaattaaaggagctgatgtttttcttggattatctaaagctggaacacttaaaaaagatatggttaaaaaaatgtcaaagaatccaataatttttgcgtgtgcaaatccagatcctgagattacccctgaagaaattgaagaagtaagaactgacgcaataattgctactggtagatcagattatccaaatcaagtaaataatttaattggatttccatatatttttagaggtgctttagatgtaagggcaaaaacaattaatgaagaaatgaagttggctgcatcaaatgcaatagctgcactagcaagggaaagagtgcctgatgaagttgttgctgcaatgggaggtgaaagaccaaaatatggaaaagattatattataccttctacattcgatccaagattgattagtgtaattcctgttgctgttgccaaagctgcaataaaaagtggagtttcaagaaaaagaattgaaaattttgaaatttattctgaacaacttaaacaaaggttagatccttcggtaactataatgcaaggtatcaactcacaaattaagaaaacacaa

SEQ ID NO: 203915 - DNA, 718 bp, Unknown
  Bacterial polypeptide expressing nucleotide sequence isolated from the Sargasso Sea
aatgaaagcagtatttgttacaggtgtatcaaggggaataggcttggagattgcaaaggtattctctgaagatggatattatatttatggttcatcaagatcaaattttgatttgaacaaagcgttaaataccgataatgcaaagcactttgctttggatgttaatgataggaattctattaatgatatttttagtgaaatagcaaaatcagaatttattttagagtgtttaattaacaatgcaggtataactgcagataacattttcttaagaatgaaagaagaggaatgggatgctgtaattgaaacaaatttaactggcatctttaatattactaaaccagctgtaaaaattatggtaaaaaataaatttggaagaataataaatatatcaagtgtatcaggattaatgggtaatcctggacaagttaattattctgcatctaaagctggaataattggcttttcaaagtcactagcaaaagaactagcctcaagaaatattactgttaatactttatgtcctggattcattgaaagtgatatgacagatgcaatgaatgaaagtcaaattcaatcggcactggaaatgattccaacaaaaagatttggtacttcaagtgaggttgcaaatactgctctctttttagcatcaaaaaatgcagattatattactggtcaaacgttaagtgttgacggtggtttatttatgcactaa

SEQ ID NO: 203916 - DNA, 1090 bp, Unknown
  Bacterial polypeptide expressing nucleotide sequence isolated from the Sargasso Sea
aatgacaaaaaaatcaaaaattgatcattatacagataaagaagcattagattttcatataggtaataagtctggcaaaattgaggttaactcatccaaacctcttatttcaaaaagagatttatcgcttgcttactcccctggggttgctgcaccagtaaaagaaatatctaaagacgcttcaaaagcttacgattatacctccaaaggaaatttagtagctgtaataagtaatggttctgcaattcttggtttaggaaatctgggttcattagcgtcaaaaccagtaatggaaggaaaggcagtattatttaaaagatttgctgatatagactcgattgatattgaaatagataataagaattctgaagaaatcatctctacaataaaaaacattgctggaactttcggtggtataaatttagaagacattgcagctcctgattgttttataatagagcaaaaattaaaagaaattttagacataccagtttttcatgatgaccagcatggtactgctattattaccgctgctgctttaataaatgcgttagatatttcacataaaaagattgataaagttaaaatagttgtgaacggtgcgggtgcatcagctattgcatgtacaaatttgtttaaaaagttaggtgtaaaaaatgaaaatgttatcatgtgcgatagaaaaggagtaatctacaaaggtagagatcaagtagatcagttcaaatctgctcatgcagctgaaactaaacttagaacattacaacaagcaatggaaggtgcggatgtgtttttaggattgtcggcaaaagatgtcgttaatcgcgacatgattaaatcaatgacaaaaaatcctattatatttgcatgtgcaaatcctgatcctgagataaaacctgaaataattaatgaggtacgtgatgacgcaattatagcaacgggaagatctgactatcctaaccaagtaaataatcttataggtttcccatacatttttaggggagcgctagatgtcagagctaaaataattaatgatgaaatgaaagttgctgctgctaatgctatagccttgttagcaagagaagatgtt

SEQ ID NO: 203917 - DNA, 953 bp, Unknown
  Bacterial polypeptide expressing nucleotide sequence isolated from the Sargasso Sea
aatgaaaaccaaggcagctgttgctttagaagcaggaaaacctcttgaggttatggaagttaatttagaaggacccaaagaaggtgaagttttaatagaaattaaagcaactgggatttgccatactgatgagtttactctttcaggtgctgatccagaagggttatttccagcgatacttggccatgaaggcgcaggagttgtggttgagttaggggttggcgtgaaagatctaaaagttggtgaccacgttataccgctttacactccagagtgtagacagtgtgaatattgcctgaatcccaaaacaaatctttgtcaagctatacgcgagacacaaggccaagggctaatgcccgatggaactagtcgatttagcatgctagatggcacgcctattttgcattatatgggctgttcgactttttcgaattataccgttcttccagagatagcattagccaaaattaatcccaatgccccttttgaaaaggtttgctatattggttgtggcgtgactacgggacttggtgccgttatgaatactgcgaaagttgaaattggtagccgtgccatagtttttggtctcggaggtattgggttaaatgtaattcagggtttgaagcttgcaggcgcagatcaaatagttggtgtggatttaaattcaagtaagcagtcaatggctgaacaatttggtatgacagactttgttaacccttcagatataaaggatgatttggttgcgcacttagtcaatgtaacacatgggggcgcagattatacttttgatgcgacaggtaatgttaatgtgatgagaactgcacttgagagtgctcacaaaggctggggagaaagtataataattggggttgctcccgcaggtgcagaaatttcaactagaccttttcagctggtcacaggtcgcgtttggaaaggtacagctttcgggggtg

SEQ ID NO: 203918 - DNA, 763 bp, Unknown
  Bacterial polypeptide expressing nucleotide sequence isolated from the Sargasso Sea
atgaacacaactcccatcgcgctgatcaccggtgcaagccgtggcttaggtaaaaatgcggccctaaccttagctgcacaaggtgttgatattattctaacttaccaaagcaatgccgctgcagccgccgaggtggtagcggaaattgaatggcatggacgcaaggctgtcgctttaccgttagatgtgggtgatagccagtcatttaacgatttttcgctgcgcgtaaaagccgcactcgaacagacttggcagcgggatagttttgactatctagttaataatgctgggattggtatccatgtgcccatggctgaaaccagtgtggagcagttcgatactttgatgaatatccatgttaaaggacccttctttttaactcaggcgttgctgcctctacttgccgataacggcagtattatcaatgtctccacggggttaacgcgctttgctgtcccggggtttggtgcctacgccaccatgaaaggcgcggtcgaaaccatgaccaaatactgggcgaaggagcttggtccacgcgggatccgcgttaatgtgctggctcccggtgcaattgaaacggactttggcggtggtgcggtgcgggataatccacaaatgaatgagtttttagcgcagcaaacggctttggggcgggtgggattacccgaggatattggtggcgcaatcagtgtcttgttgtcacccgctgcggcatggataaacgcccagcgtatcgaggcttctggcggtatgttcttatagt

SEQ ID NO: 203919 - DNA, 1189 bp, Unknown
  Bacterial polypeptide expressing nucleotide sequence isolated from the Sargasso Sea
aatgaaaaaaaataaaattgaacattactcggataaagaagcattagattttcataatactaataaatctggcaagattgagatcatttcttctaaaccaatgacttcaaaaagagatttggccttagcatattcgcctggtgttgctgcaccggtaaaagcaatttcaaaaaatcctgacctcgcatatgactatactactaagggtaatctggtagctgtaataagtaatggttcagcaattttaggtcttggaaatttgggtgcaattgcttcgaaaccagttatggaaggaaaggctgttttatttaaaaggtttgcagacatagattccattgatattgaaatagattcttcagatacaaaagaaattattaattcggtaaaaaatatttcaaaaagctttggcggaattaatttagaagacataaaagcacctgagtgttttataatagagaacgaattaaaaaaattattagatattcctgtattccatgatgatcagcatggtacagctataataacaagtgcggcccttattaatgcttgtgatattgcaaaaaaaaatattaaggatgtaaaagttgtcattaatggtgcaggtgcatctgcaatggcttgtgcaaatctttttataaatacaggtgtaaaagataaaaatatcacaatgctcgattcaaagggggttattcattctgaaagggatgatttaaatgaatggaaaaagaaatttgctatcaaaacaaaaaatagaactttgaatgatgtgattaacggggcagatgtgttcttaggtctttctcaagctggggtcttgaaaaaagagatggttaaaaaaatgtcaaagaatccaattgtattcgcatgtgcaaacccagatcctgaaatcattcctgaggacgttgaagatgtgagagatgatgctattatagctactgggagatcagactatccaaatcaagtaaataatttaattggtttcccgtatatttttagaggagctctagatgtaagagctaaaacaataaatgaagaaatgaaagtcgctgcagtaaaagctattgcaacattagcaagagaaagagttccggatgaagtggtagcagcaatgggtggggacagacctcattacgggaaggattatataattccatccactttcgatcctagattaataagtgtaattcca

SEQ ID NO: 203920 - DNA, 1258 bp, Unknown
  Bacterial polypeptide expressing nucleotide sequence isolated from the Sargasso Sea
catgtccgatcagcgtcacgatcttcgtcaacaagcactcgattaccacgcccagcccgtgccgggcaaaatcgccatcgccctcaccaagcccgccgagaccgcccgcgatctggcgctggcctacagcccgggtgtggccgagccggtgcgcgagatcgccgccaacccggccgatgcctaccgctacaccggcaagggcaacctggtggccgtcatctccaacggcaccgccattctggggctgggcaatctgggtccgctggcctccaagccggtgatggagggcaaggccctgctgttcaagcgctttgccggcatcgacgccatcgacatcgaagtgaagcacgagaccagcgcgcagttcatcgacaccgttgccgccatcgccgacaccttcggtggcatcaacctggaagacatcaaggcccccgagtgcttcgagatcgagcaggcgctgatcgagcgctgcgacatcccggtgttccacgatgatcagcacggtaccgccatcgtcaccgccgccggcctgctcaacgcgctggaagtgcagggcaagcagattggcgacagccgcatcgtctgcatgggcgccggggctgccgctaccgcctgcatggagctgctgatcaagtgtggtgccaagccccacaacatcttcatgctggatcgtcagggcgtcatccacagcgctcgcaccgatctgaaccagtacaagcagcgcttcgccaatgacacccccctgcgcaccctgatggaggtgatcgacggggcggacgtgttcgtcggtgtctccggcccggatgtgctgcccgccgaggcggtggcgctgatggcccccaacccggtgatcttcgcctgctccaacccggatcccgagatcaagcccgcactggctcacgcagtgcgcggtgacctcatcatgggtaccggtcgttccgactatccgaaccagatcaacaacgtgctctgcttccccttcatcttccgcggcgccctcgacgctcgtgccagccgcatcaacgatgccatgaagatcgcggcggtcgaggcgatccgtggtctggccaaagagccggtaccggccgaggtgctgaccgccgccggcgtcagcgagctggccttcggcaaggactacgtcattcccaagccgatggatgcccgtctgctgccgcgcgtcgcccgtgccgtggcactggcggcggtggagtccggggtggcccgcatcgccctgccggcggactacatgctgggctga

SEQ ID NO: 203921 - DNA, 1720 bp, Unknown
  Bacterial polypeptide expressing nucleotide sequence isolated from the Sargasso Sea
aatgaaaaaaacaaaaattgatcattacacagataaagaggccttagattttcattttaccaataaatcaggcaagattgagattatatcttccaaacctatgacaacaaaaagagacttggctttagcttattctccaggtgttgcggctccagttagggaaatatctaaaaatcccaatgccgcttatgattatacaactaaaggaaatttagtagctgtaataagtaacggttctgcagttttaggtatgggaaatttaggctctttagcctcgaaacccgtaatggaaggaaaggctgttttgtttaaaagatttgcagatatcaattcgattgatattgaaattgactcatctgatccaaatgaaattattagaagtataaaaagtatagcaggaagttttggtggtataaatttagaagatatagctgctccagattgttttgtaatagaagaaaaacttaaaaaaattttagatatacctgtctttcatgatgatcaacatggaactgcaataataactactgcagctttaattaacgcattggacatttcaaaaaaatcattaaaaaaaattaaagtggttgtaaacggagcaggtgcatcagcgattgcctgtactaatttgctaaaaaaaacaggagtacctcaaaaaaatataataatgcttgatagcaagggtgtcttacataaagggagagataatttaaatcaatggaaatctactcacgcaattgaaacaaaaaatagaacattagatgatgcaataaaagatgctgatgtttttttgggattatcttcaaagagtattttgtcaaaaaaaatggtaaaaaaaatgtcaaaaaacccaattatttttgcatgtgcaaatcctgatccagaaattacacctgaagaagtcgaagaagtccgcgatgatgcgattgtagcaactggaaggtctgattatccaaatcaagtaaataatcttattggatttccatatatatttagaggagctttagatgtaagggctaaaacaataaatgaggaaatgaaaattgcagcagcaaatgcgatagcagcacttgcaagagaagatgtacctgacgaagtggttgcggctatgggaggtgaaagaccaaagtatggaaaagaatatattatcccatcaacttttgacccaaggttaattgttgaaataccagttgcggtagctaaagcagccataaaaacaggtgttgcaagaaaaaatataaaagattttgaaatttataaagaacaacttaaacaaaggcttgatccttcggtaactattatgcaaggtataaataaccaaattaaaaaaaatccaaaaaaaattatttttgcagatggagaagatgagaatactttaaaagctgcaattgcatttaaaaacagtaaattaggaattcctgtgctagttggtaaaaaagaaaaaataaaagagcaacttaaaaatattggatacagtgaaaaccttgatatagaaatagtcaattcaactaataaagaaaaaagagcaaagtatgcaaattatttgtttaaaagattacaaagaaaagagggcttattagaaagagactgtgatcgaatgataagaaatgacagggttacctgggcatcttgtatggtcgcctgcggtgatgccgatggtgctgtaactggtaatactagaaaatatgccacctcactagaaaaaataaataaggtgata

SEQ ID NO: 203922 - DNA, 1915 bp, Unknown
  Bacterial polypeptide expressing nucleotide sequence isolated from the Sargasso Sea
aattaatagcattaaaaattttgctccaagttttgggggcattaacttagaggacattgcagctccagattgttttgttattgaggaaaaactaaaagaaattttagatatccctgtctttcacgacgatcaacatggtactgcgattataactacagctgcattaatcaatgcacttgatattactaaaaaaaaaattgacgaagtaaaaatagttgtaaatggtgcaggagcgtctgcaatggcatgtgcaaatttattcaaaaaaagtggcgttccacaaaaaaatattacaatggttgatagaacgggggttatttataatggacgagataatttaaaccaatggaaatcagcccatgctattgaaactaaacatcgaactttaaaagatgcaattgataatgcagatgtttttttgggtttatctgcaaaaggtgctttgacaaaagatatggttaaaacaatggccaaaaatcctataatatttgcatgtgcaaatcctgatccagaaatcaaaccagaggaagttgcagaggtaagaaatgatgccatcatggctactggaagatcagactatccaaaccaagtaaataatttgattggctttccttacatttttagaggtgcattagatgtaagatctaaaactataaatgaagagatgaaaattgctgcagctcacgcgattgctaaccttgcaaaagaagaggtcccagatgaagttgttgctgcgatgggaggagaaagaccacattatggaaaagattatataattccctcaacatttgacccaagattaataagcgtgattcctgctgctgtagctaaagcagcgatagatagtggtgttgctagaattaatataaaaaattttgatgactacaaagatcaattaagacaaagattagacccaacagttacgatcatgcagggtataaataattatataaggaaaaaacctaaaaaagtagtctttgcagatggtgaggatgaaaatatgctaaaagcagcaatagcatttaaaaactcaaacttaggaataccaattttagtcggcaaagaagatttgattataaatcaactaaaaaaaataggttacagcgaaaattttgacatagaaattattaattcaaaagatgataagaaaagagaaaagtatacaaaatatctttttgaaaaacttcaaagaaataaaggcatgctggagcgtgattgtgatcgtttagtaagaaatgatagagttatttgggcatcttgtatggtagcatgtaaggatgctgatgcgatggtgactggaaatactaggagatactcttcatcactagaaaagataactcaagttgtagatcctagagctggagaaattatgtttggcttaaacttaatagttaatagaggaaaaacaatttttatatgtgatacatctgtgattgaataccctaatgcaaatcagcttgctgaaatggcaaaatcagcagctagagtagttagattatttggatttgatcctaaagtcgcattcttatctcactctacttttggagaaccagctactgatagaacaaaaagactaagcgatgcagttgaaatcttaaagaaagataaagttgattttaaatttgatggagaaatgcagccagatgttgcgctagaagagttatataaagagctttaccctttctcagaaattgtaggaaattcaaatgtcttaataatgcctagtcagcacagtgcagctatttcttataaaatgataaaatcaatgagcagagcaaaggttattgggccattgttaattgggttaggtcttccaatagaaattgctcccctaagaacttctacatcggaaatcattaatctagcatcgatagcagcgtattcatcagatgtaattgattataaaaaatattaa

SEQ ID NO: 203923 - DNA, 1426 bp, Unknown
  Bacterial polypeptide expressing nucleotide sequence isolated from the Sargasso Sea
agccgagtgatggaaggcaaggccgtcctgttcaagaagttcgcgggcgtcgatgtgttcgacatcgagatcgacgaaaaggaccccgccaagctggtcgaggtgatcgcagcgctggagcccacctttggcgccgtcaacctcgaagacatcaaggctcccgattgcttctacgtagaacgcgagctgcgcaagcgcatgaagatcccggtgttccacgacgaccagcacggcacagccatcacggtggcggctgccatcgtgaatgcgctgaaggtggcaggcaagaagattgaagatgtgaagctggtcaccagcggcgcgggcgctgcggccctggcctgcctgaacctgctgctcaaggtcggcgtgcagcgcaagaacgtgttcgtcaccgatctggccggtgtggtctatgaaggccgcgacgagctgatggacgacgacaagcgccagttcatgcagaagaccgacgcgcgcaagctggccgaggtgatggtcggcgccgacgtgttcctgggcctgtcggccggcaacgtgctcaagcccgagatggtgtccaccatggccgagcgcccggtgatcttcgccctggcgaaccccaaccccgagatcacgcccgagctggcgcacagcgtgcgcaacgacatcatcatggccacgggccgttcggactatccgaaccaggtgaacaacgtcttgtgcttcccctacatcttccggggcgcattggactgcggcgccaccaccatcaccgatgagatggaaattgcggccgtgcacgcgattgccgagctggcccaggccgagcagagcgaggtggtggccgccgcctacgtgggcgagaagctgaccttcggccccgaatacctgattcccaagccgtttgacccccggctgatgatgaagatcgcgcccgcagtggcccaggccgccatggacagcggcgtggcgcagcgccccatcgctgacatggacgcttaccgcgaccgtctgcagacctttgtgtatgcctcgggcacgacgatgaagcccatcttcgacgcggcccgcaatgctgccaagaagcgcgtggcctatgccgagggcgaagaagaacgtgtgctgcgcgctgcacagatcgtggtggacgagaaggtcgcccgccccacgctgatcgggcgccccgccatcatcgcccagcgcatcgaaaagtttggcctgcgcctgaaggaaggcgtggactacgacgtggtcaacaccgacttcgaccaccgctaccgcgacttctggcagacctaccaccgcatgaccgagcgcaagggcatcacccagcaggtcgcgaagatcgagatgcgccgccgcctcacgctcatcggttcgatgatgctgcacaagggcgaggtggacggcctgatctgcggcacctggggcaccacggccaacc

SEQ ID NO: 203924 - DNA, 1174 bp, Unknown
  Bacterial polypeptide expressing nucleotide sequence isolated from the Sargasso Sea
atgaaaaaaaataaaattgaacattattcagataaagaagcattagaatttcataattggaataaatctggaaagattgagataatttcatctaaaccaatgacaaccaaaagagacctggctttagcatattctcctggtgttgcagctccagttaaagcaatttcacaaaatccagatcttgcctatgattatacaactaaaggaaatcttgtagcagttatcagcaatggttccgctattttagggctaggtaacctaggtgcaatagcttccaaaccagtaatggaaggaaaagcagttttgttcaaaagatttgctgatatcgattcaatcgatttagaaatagattcaaacaatcccgaagaaatcattcaatctataaaaaatttttcaaaaagttttggtggaattaatttggaagatatagcagctccagattgttttataattgaaaaaaaactaaaagaaattttagatattccggtttttcatgatgatcagcatggtactgcaataattacttgtgctgcattaataaatgcagttcatatcacgaaaagggaaatgaaaaaaattaaaatagtagtcaatggtgcaggtgcatctgctatggcatgtgtaaatctttttaaaactaaaggagtgcctcaaaaaaatatcacaatgttagatagaaagggagtaatttataaaggaagagaaaatttaaatgaatggaaatctgaacacgcaatagaaacaaaagtccgaacattagatgatgctataaaaggtgcagatgtttttctcgggttatctaaagctggagtgttaaaaaaaaatatggttaaaaaaatggccaaaaatcctataatttttgcttgtgccaatccagatccagaaattacacccgaagaaattgaagaagttagaaatgatgcaataatagcaactggaagatcagattatccaaatcaagtaaataatttaattggtttcccttacatttttagaggagctctagatgttagagcaaaaacaattaatgaagagatgaaactagctgcatctaatgcgatagctacactagcaagagaaagggttcctgatgaagtggtcgctgcgatgggtggtgatagacctaaatatggtaaagattatataataccttcaacatttgatccaagactaa

SEQ ID NO: 203925 - DNA, 733 bp, Unknown
  Bacterial polypeptide expressing nucleotide sequence isolated from the Sargasso Sea
atgcttaacttttcaacaaaaactgcaattgtaactggtggatctagaggaattggtaaagaaatttctttaattcttgctaaaaataattttaatgttgtagcagtggctaccagtgaaaaatccctagattcaatcagagatattgaaaatattcaccctttctgtagtgatatttctgacgaaaaatcaattgaaaaactatatgaatttgttatttcaaaatttggatatgcagatgttcttatcaataatgctggtattcatatggataatattcttctaagaatgaagcctgaagaatggaatcaagtaatgaatgttaatcttaatgggccctttcatctcacaaaaacagtcttaaaagacatggtaaaaaataaaaatggtagaattattaatatttcttctatttcaggaacggacggtaataaagggcaaggaaattatgctgcttcaaaaggcggtttgttagcattaacaaaatctttagcaaaagaagttgggcgtagaaatattacagtaaattgcattgcgccaggattaattgaaaccgacatgatttctcacctttcagatactattaaacaaggatatttagatagaattcctttaaaaaaacttggaaaaccaaaagatattggtcaaatgattttatttttatgttccgaagaagccagttatattacaggacaaacattttatattgacggtggaatgtcattaaattaat

SEQ ID NO: 203926 - DNA, 983 bp, Unknown
  Bacterial polypeptide expressing nucleotide sequence isolated from the Sargasso Sea
ccttgaatatgcccgtaatcatgcccgtaaaaaagtcacctgtatggtgaaagacaacatcatgaaaatgaccgatggtttgttttataaggtgtttcaggagattggcgcagaatatcccgatatactacaagaccgctatatcatagatataggcagcgcccgcctggcgacacggccagagctttttgatgtcatagtcaccagcaacttatacggtgacatcatcagtgatatcgccgctgaactgtccggcagtattggcttagcgggcagtgccaatataggtgagcatgtggcgatgtttgaggcgattcatggcagtgctcctgatattgcaggtcagaatatcgccaaccccagtggcttattactggcggcagtgatgatgctggtgcacataggtcaggcggatatagcgcaaaaaatacataacgcctggttaaaaactattgaagatggcattcataccaaagacttaaaaagtgagtacaccaaggtgctggttacaaccgaccaatttgccgaagctgtgatagcacggctgggaaccgaacctcagagatttagcgccgtgagttatcagaattcaactcaacagcaaaaagctgtgactgtcgcttaccaaccgcaggccgctgcagagaaaattctggtcggcgttgatgtttttttacatcagcaccagcacagtgccgacgaactggcgcagcatctgaagcagctggaaacgacagaactggagctacaaatgatcaccaacagaggagtcaaagtctggcctgatggctttcctgaaaccttctgcaccgatcactggcgctgccgttttatgctcagccctggtctgacacaactcgcttacagcgacattatccgcctgcttagccaaatctcgggcgataagttggatgtgataaaaactgagaacctgtgcagctttaatggtgagccgggttttactttaggacaagggcaataga

SEQ ID NO: 203927 - DNA, 640 bp, Unknown
  Bacterial polypeptide expressing nucleotide sequence isolated from the Sargasso Sea
gttgtttccagtagaaaaaatcttagccgggacaagcttcttttttgctcatgaatattatgaaaaaaaagatctcagtgatattattcaagctatcaggccgacagctttaatagggatctctggccaggcgaatgcattttcaaagaatgttcttgagctgatgaagggtattaacgattatcctttggtatttgctctttctaatcctacttcctcatctgagtgcacagcagagaatgcgtacaaatggacaagggggaaatgtttatttgctagtggcagtccttttgatagtgttgaaatcgaaggaaaaacatttatcccagggcagggtaataatgcatacatttttccaggagtcggccttggcattatactatcaaaggctgaggttatttctgatgacctttttttagctgcagcagaaaccttatccattctggtttctgataaggaactgtcaagtggtcagctatatccgtgcataaaagatatcaaaaaagtttcaaaggaaattgcaattaccgtagcgaaaaaagcattctccgaaggcttgacgaatatggcgattcctcaaaatatcgaaaggtcgctggataggataatttataatcccgtgtatccagactatatctaa

SEQ ID NO: 203928 - DNA, 739 bp, Unknown
  Bacterial polypeptide expressing nucleotide sequence isolated from the Sargasso Sea
ttgaaagataaaatagctatggttactggggcgtccagagggattggtgcggctatcgccaaaagattggcgagtgaaggagcaaaggttgctatcaattacaactctagtaaagaacaagctcttcaagtactttcagcagttcaggaagtgtctgaaggaatgctcgtgcaaggggatgtttctgttcaagccgatgctgagaaagtactttctcaggtaatagagaattggggcaagattgatatattagttaataacgctggtattaaccgggacaaattgttgatgaggatggatgcatctgattgggatgatgttatgaatgttaaccttaggggaacgttcttatgtactaaattggtgttgccttatctgattaaacaacgtagaggtaatatagtaaacgtttcttctgtagtgggtttatctggtaatcctgggcaagttaactacgcggcctctaaagcaggattggtaggatttactaaagcgttagcacgagaggttgcttctagaaatattactgttaatgctttagctccaggttttataaccagtggaggaatggtagacgaactgtcttctgatgccaaagagacaatactgaagaagattcctatgggacgtttcggcaccgtggacgaagtggcggagtgttgcttgtttttatgcagcgatcaatctagttacattactggtcaagttataactatggatggcggtatgattgcttgat

SEQ ID NO: 203929 - DNA, 1108 bp, Unknown
  Bacterial polypeptide expressing nucleotide sequence isolated from the Sargasso Sea
aatgaaaacaaaagcagcaattgcagttaaagccggtgaagatcttgtcattgaagaattggatttagatggcccaggtgataatgaagtattggtagagatcaaagcaactggtgtgtgtcacacagatgcatttacattatctggcgatgatccagaaggtatctttccttcagtgcttggacatgaaggcgctggtatagtaatggaagtaggcaaaaatgtgacttctgtaaagcctggagatcatgttatacctctatatacacctgaatgcagagactgtaatttttgtttgaatccaaaaacaaacctttgccaatcaattagagaaacacaaggtcagggtctgatgccggatggaacgtcaagattttctctgaatggtgatcctatataccactatatgggttgctctacattctcaaattattcagtcatgcctgagattgcagttgcgaaggtgagacaagacgcaccgtttgacaaaatttgctacataggttgcggtgtaacaacaggcatcggtgctgtggtttatgatgcaaaagttgagccgggctctaatgtcgtagtatttggattaggtggtattggcctgaatgttatccaaggagcaaaaatggttggtgctaataaaatagttggaatcgatattaacgaatcgaaagtacctttagcgacaaaatttggaatgactgactttataaacccaacaaaaatagatgatgtagtggaagctataattgatctcacaggtggtggtgccgattattcatttgagtgcattggtaatgtggagacaatgagacaagctcttgagtgttgtcataaaggatggggtgaatctgtaatcattggtgttgcgggtgcaggtcaggaaatatcgacaagaccatttcaattagtgactggacgagtatggagagggtctgcttttggtggagcaagaggtcgaacagatgtaccaaaaattgttgattggtatatggatggaaagattaatatagatgatatgatcacacatacaatgccccttgaagaaatcaatgaagcctttcatctaatgcacaaaggtgagtcaataaggtcagtcgtattatattaa

SEQ ID NO: 203930 - DNA, 631 bp, Unknown
  Bacterial polypeptide expressing nucleotide sequence isolated from the Sargasso Sea
atgtttaaagataagattgtatttataactggtggctctagaggtataggcaaagctgttgctctagaatttgctaaacatgatgcaactgtaatttttaactatacaaattcagatgattcagctaatgaaactatcagattgatgaaagaaattaattcgcaaggaactttcgaggcagtaaaatttgatatttctattacttccgattctgatgaaaagataggagcaattttagataagtatggaagaattgatattttggtaaataatgctggaataacgagagactcactttttatgaggatgaaagaatctcaatgggatgaagtatttaatgttaatgcaaaaggagtgtttaattgcacaaaaaatgttgtcagatcaatggttaaaaatcaatatggaaaaattatatctataacctcagtagttggcgaaatgggtaaccctgggcaagccaattattcttctaccaaatctgcaattttcggttttacaaagtcacttgctaaggaacttggttcaaaaaatattaatgttaatgcaattagcccaggttttattgaaacagatatcactgaaggtttaccagatgcgattaagcaaaaatatatggaaatgattcccc

SEQ ID NO: 203931 - DNA, 739 bp, Unknown
  Bacterial polypeptide expressing nucleotide sequence isolated from the Sargasso Sea
aatgttcaatttaaaaaataaaactgctctagttacaggtgcctctggcggaataggagaggctattgctaaagctttgtataaacaaggtgcaaaagtatgtatcaccggaactaatgagtctaaattaaataacattaatctaaagtcttcaatgtcttatagtcagataatatgtaatttaaataaaagagaagaattaaagaatttagtaagtaatgtagaaaaagaaattggcaatattgacatattagtaaataatgctggtattactaaagatcaacttacgatgagaatgtcagaagaaagctgggatgatgttttagaaacaaatttatatgcctcattttatttatctaaatctgttattcgtaatatgatgaaaaaaaaatttggaagaattattcaaataagttccgtagtaggttttactggaaatccgggacaagctaactatgttgcatcaaaagctggtctaataggaatgactaaatcattggcattagaagtagccagtagaaatataacagtaaattgtatagctcctgggtttattaaaacttctatgactgatgcattaacagaagagcaaaaaagtaaattattagaaaaaattccttcacaaaagtttgggttgccggaagatgttgcagccgcagcagtttttttagcttctgatgaagcttcatatataaatggtactactattcacttgaatggcggtttagctatgatctag

SEQ ID NO: 203932 - DNA, 659 bp, Unknown
  Bacterial polypeptide expressing nucleotide sequence isolated from the Sargasso Sea
tatgaaagatttattttctatagagggcaaagtagctttagtaactggtggctcaagaggaataggagaaatgattgcagcaggatttttagctaatggagcaaaagtttatataagttctagaaaagcagaagtgtgtgatgcaactgctaaaagacttcaaaaagaatatggcggagaatgtatttccgttcctggagacttatcaaatttagatgggataaatgcacttagagatatgttacccgctgacgagacgttggatattttagtcaataatgcaggtgcttcatggggagaaccgatagatgaatattccgaaaaaggatgggataaagtcatggatactaatgtgaagggagttttctttttaacacaacaattgctacccaagctcagagaatcaggcagtgcagaagatccttcaagagtaattaacataggaagtatagatggaatcaaaacaggaacttttaatgcattttcttatggcccttcaaaagcagccttgcatcatttaacaagagttttagctgcatctcttgttaaagaaaatattattgttaatgcgattgctcctggtccttttccaacttggatgttgagtacaggagttggtggaggtggtgatcttgatattaattggtctgaggttggta

SEQ ID NO: 203933 - DNA, 1420 bp, Unknown
  Bacterial polypeptide expressing nucleotide sequence isolated from the Sargasso Sea
aaatccagaaactgcatttgactatacaagtaagggaaatcttgtggcagtaattagtaatggttctgctattttaggtatgggtaacctgggagctttagcctcaaaacctgttatggaaggaaaagcagtattatttaaaaggtttgctgatattgactcgatagatcttgaaattgactcgcaagatcacaatgaaataattaatagtgttaaaaattttgctccaagttttggaggtattaatctggaggatattgctgctcccgattgttttattattgaggaaaaacttaaagaaattttagatattcctgtctttcatgatgatcaacatggtaccgcaatcatcactacagctgcattaatcaacgcactggatattaccaaaaaaaaaattgataaagtaaaaattgttgtcaacggcgcaggtgcatcagcaatggcttgtgctaatttatttaaaaaaagtggtgttccacaagaaaacattacaatggttgatagaacaggagtgatctacagtggaagagaaaatttaaaccaatggaaatcagctcatgctattgaaactaaacatagaactttatcagatgcgatcaataatgctgacgtatttttaggtttatcagcaaaaggggctttaacaaaagatatggttaaaaaaatggctaagaatcccattatatttgcatgcgcaaatcctgatccagaaattaaacctgaggaagttgctgaagtaagaagtgatgcaattatggccactggaagatcagactatccaaaccaggtaaataatctaattggttttccatatatatttagaggcgcattagatgtaagatctaaaaccataaatgaggaaatgaaaattgctgccgcccacgcaattgctaacctagctaaagaggaagttcctgatgaagttgttgctgcaatgggaggtgagagaccacattatggtaaagattatataataccctcaacatttgatccaagacttataagtgtaattcctgctgcagtagctaaagcggcaatagactctggtgttgcgagaataaatataaaagattttgatacttacaaagaacagttaagacaaagaatggatccaacagttacgatcatgcagggtataaacaactatataaaaaagaaaccaaaaaaagtaatttttgcagatggtgaggatgaaaacatgcttaaagctgccatagcatttaaaaactccaatctaggtataccaatcttagttggaaaagaggatctaattaaaaatcaattaaagaagataggttacggtgaaaattttgacttagaaattactaattcaaaagacgctaaaaaaagagaaaaatatgtaaaatatctttttggaaacttcaaagaaataaggcatgctggagcgagattgtga

SEQ ID NO: 203934 - DNA, 772 bp, Unknown
  Bacterial polypeptide expressing nucleotide sequence isolated from the Sargasso Sea
atggatctcaataacaaagtagcattagttacaggtggagcttctggtttaggacaggctaccgtagaagcatacgtggctaaaggcgcgaaagtagtcatattagatataaatgaagacaaggctctagaaataataaataatctcggcgaagacaaagtcatgtttatatctaccgatattatgaaagaggatccagtagtggaggctataaataaaataaaagataattttgggggactacatattgcagttaattgtgctggaactggatatccgggaagaatattaggtaaagaagcacctcatccattagatgccttccaatttattgttaacttaaatcttgtagggacttttaatgttatgagaatagcagctgaattaatggataaaaatgaaccggacgaaaaaggtgaaaagggggttattattaatacggcttctattgcaggtattgagggtcaaattggtcagtcagcatatagtgcatctaaagcaggcgttattggattaacaattactgctgcaagagatcttgcaagacatgccataagagtatgcacaattgctccagggatttttgatactcctctaatgcaattagcaccagataaggtacgagatcctttattagaatctactcaatttcctcatagatttgggcaaccaaatgaatttgcagatttagcagttcatattgtagaaaattcatacctaaatggtgaaacaattaggttggattctggaatgagaatgaagccaagataaa

SEQ ID NO: 203935 - DNA, 1054 bp, Unknown
  Bacterial polypeptide expressing nucleotide sequence isolated from the Sargasso Sea
catgagcactacctatgcctacgcggcgaccgattcgcgctcgccgctcgccccgttcgaattccagcgtcgcgcactgcgcgacctcgacgtccagatcgacgtcctctactgcggcgtctgccactcggacctgcaccaggcccgcaacgaatggcgcaacacgatctatccggtcgtgccgggccatgaaatcgtcggccgcgtgaccgcgaccggcccggaagtgacgcgcttcaaggtcggcgaactggtcggcgtcggctgcctcgtcgattcgtgccgcacctgcccgagctgcgccgacggcctcgagcaatattgcgagaacggcttcgtcggcacctacaacggccaggatcgcgtgacgggcgacatcacgttcggcggctattcgacgcagctcgtcgtcgacgaggcgttcgtgctgcgcgtgcccgagacgctcgacccggccggtgccgcgccgttgctttgcgcggggatcacgacctactcgccgctgcggcagtggaacgtcggccccggcaagaaggtcggcatcgtcgggctcggcggcctcggccacatgggcgtgaagctggcgcgcgcaatgggcgcgcacgtcgtgctgttcaccacgtcgccgtcgaagatcgaggacggcaagcgggtcggcgcgcacgaagtcgtgatctcgaaggacgaagcgcagatgaacgcgcacctgaacagcttcgacttcatcctgaacacggtcgccgcgcagcacgacctgaacccgttcctgcacctgctgaagcgcgacggtacgatgacactcgtcggcgcgccggagcacgaccatccgtcgccgcaggtgttcaacctgatcttcaagcgccgccgcctcgccggctcgctgatcggcgggatcgcggaaacgcaggaaatgctcgacttctgcgcggagcacgggatcacgtcggatatcgaaacgattccgatgcagcagatcaacgcggcctacgagcggatgctgaagagcgacgtgaagtaccggttcgtgatcgacatggcgtcgctcaagcagtaa

SEQ ID NO: 203936 - DNA, 859 bp, Unknown
  Bacterial polypeptide expressing nucleotide sequence isolated from the Sargasso Sea
catgactaccgcacagacaccaccgccgcagaagcaggaccaccagccgggcaccgagcgcgacatgcatccggagccgcgcgacttggcggccgattacgtcggcagcggcaagctcgccggcaaggtcgcgctcgtgacgggcggcgacagcgggatcggccgcgcggtcgcgatcggcttcgcgaaggaaggggcggacgtcgcgatcgtctatctgaacgagtcggacgacgccgcgcatacgaagcagctgatcgaacaggccggccggcgttgcgaggcgatcaggtgcgacgtcggcgaccgccggcaggcgcacgacgcggtggcgcgcacggtcgagcggctcgggcggctcgacgtgctcgtgaacaacgcgggcgaacagcatccgcgcccgggcatcgaggacgtgaccgaggaacagctcgaacgcacgttccgcacgaacgtgtacgggatgttcttctgcacgcaggctgcgctgccgcacatgaagcacggcggacgcatcgtcaacaccgcgtcggtgaccgcgtatcacggcaatccgaaactgccggactactcggcgaccaagggcgcgatcgtcgcattcacgcggtcgctgtcggcggagctggccgaacgcgacatccgcgtcaacgcggtcgcgcccggaccgatctggacgccgctgattccatcgacgttcaccgccgagcaggtcgcgaagttcggcgcgaacgtgccgctcaagcggccggggcagccggacgaactgatcggctgctacgtgctgctcgcgtcggaaggcgcgagctacatgaccgggcagacgctgcatccgaacggcggctcgatcgtcggcggctga

SEQ ID NO: 203937 - DNA, 847 bp, Unknown
  Bacterial polypeptide expressing nucleotide sequence isolated from the Sargasso Sea
aatgaatattcagtggcgtaatcaagtggtacttcttacaggtgcaactggcggtattggtcaagcaatagccaaggcgcttgatgaaaaaggcgcgcacattatcctaactggtagaagtaaggcgaagctcgaacagctgcaacaaaatttaacccttcatcatactgctattgtggctgacattacgtcagatgaaggcagagatagagtagtaagtgcctgccaacgacttcctataagtattctggttaacaatgctggcattacctatatgggcgagtttgagggcaccccaatcgagtcaattgtgtcgacaaatatgctggctccgatgctactaacccaacgcctactgccgttactcgaacgaagaccgtctgcgcacgtcgtgaatgtaggctcagcttttgggagcataggttttgctgcgcacggaacctactgcgcaactaaattcgctttgaaaggctggacggaagcgatgcacagggaattcagcgatagcaaaattaaatttcactatctagcgccacgcgcaacgcgtaccgatataaatgacgatcgcgctaatgcgctaaatgaggcattgggcaaccagacagacgagcctgatgcagtagcacaagcattcattaaacagttagaaaacaatttgccaagggtcgcgctaggacatgctgaacgcttttttgccaagcttaacgcgctagttcccagtgttgttgacaatgcgttggcaaagaaacttccaacaattaaacgctatgcctttcaaaaaacgcaatcacaagacaaacagaccagcgctcaaaacgatacccgtctgggtaacaagctggtttaa

SEQ ID NO: 203938 - DNA, 1108 bp, Unknown
  Bacterial polypeptide expressing nucleotide sequence isolated from the Sargasso Sea
atgaaaacgaaagcagcattagcaataaaagccggagaagatcttgtcatagaagaattagatctagatgggccgggtgacaacgaggtattggtagaaataaaagcaaccggagtatgtcatacagacgcattcacactatcaggcgatgatccggaagggattttcccttcagtgctaggacatgagggtgccggtatcattatggaagttggaaagaatgtgacctcagtaaagccaggcgatcacgtaattccactctatacccctgaatgtagagaatgtaatttttgccttaatccaaaaacaaatctttgtcagtcaatcagggaaactcaaggacaaggggtaatgccagatggaacttcaaggttttctctcaatggtgaaccaatttatcactacatgggctgttcaactttctcaaactactctgtaatgccagaaattgctgtagcaaaagttagagaagacgccccgtttgataaaatctgttatatcggttgtggagtcacaactggtataggcgctgttgtttacgatgcaaaagtagaacctggatcaacagttgctgtatttggcttgggaggtatagggcttaatgtaatacagggtgcaagaatggtaggtgcagacaaaattattggtatcgatataaatgaagataaggttgcacttgcagaaaagtttgggatgacagactttgttaaccctaaaaaatcagagaatgtagttgaaaacataattgatattactgatggaggagtagattactcatttgaatgcataggtaatgtggagactatgcgacaagccttagaaagttgtcacaaaggatggggtgagtctgtcattatcggcgttgcaggtgctggtcaggaaatatcaacaaggccatttcaattagtcacaggaagagtatggagaggctctgcttttggtggtgctagagggagaactgatgtacctacaattgttgactggtatatggatggaaagattgatattgataatctaattacacatacaatgccgctggaagaaatcaatgaggcatttcatctaatgcatgaaggtgaatcaataagatctgtggtaatatattaat

SEQ ID NO: 203939 - DNA, 1396 bp, Unknown
  Bacterial polypeptide expressing nucleotide sequence isolated from the Sargasso Sea
atgaccgaatcgccctccgcccgcacgcccgtgctgctgcacatcggcgcgggctcgtttcaccgcgcgcaccaggcgtggtatctgcatcgcgtgaacgcggccgtcccggccgacgagcgctggtcgctgaccgtcggcaacatccgtgacgacatgcacgcgacgatggacgcactcgccgcgcagcacggcgcctacacgctcgaaaccgtcacgccgcaaggcgagcgcgcatacgagacgatccgcgcgatcacgcgcgtgctgccgtggtcgatcgacctcgccgcgctgatcgacgccggcgccgacccggcctgccggatcgtgtcgttcaccgtcaccgaaggcggctactacctcgacgaacacaaccggctcgacctcgcgaacgccgatctcgcggccgacctgcagggcgcacgcacgacgctgtacggcgcactcgccgcgctgctcgccgagcgcgtgacgcgcggcgcgggcccgctcacgctgcagagctgcgacaacctgcgcaacaacggcgcgcgctttcgcgcggggatgcgcgaattcctcgagcggcgcgggctgctcgagctgcttgcatggttcgatgcgaacgtcgccacgccgagcgcgatggtcgaccgcatcacgccgcgcccgaccgccgacgtgcgcgagcgcgtgctggccgccaccggcttcgacgacgcgtgcccggtgatgggcgaatcgttcatccagtgggtgatcgaggaccgcttcgcggccggccggccgaagtgggagctggccggcgccgaactcgtcgacgacgtgcacccgtacgaggaagcgaagatccgcatcctcaacgcgacgcacagctgcatcgcgtgggccggcacgctcgcgggccatacgtatatccacgaagggacgcacgacgcggcgatccgccgcttcgcgcacgactacgtgacgcaggacgtgatcccgtgcctcacgccgagcccgctcgatctcgcgcgctaccgcgacgtcgtgctcgaacgcttcggcaacccgtacgtgctcgacacgaaccagcgcgtcgcggccgacggcttctcgaagattcccggcttcatcgcgccgacgctcgccgaatcgttcgcacgcggcgcggcgccggtcgccaccgccgtgctgcccgcgttgttcctgcgctttctcgaacgctgggcgcgcggcgcgctgccgtacgtgtaccaggacggcgtgatggacgaaagcgccgcgcgggcgatcgtccaggccgacgacccggttgtcgcgctctgcgccagccgcgcactgtggggctcgctcgccggcaacgcggcgctgttcgaggcgctgcgcgccgggctcgcgcgggtcgacgcatggctcgcggcacgctgac

SEQ ID NO: 203940 - DNA, 763 bp, Unknown
  Bacterial polypeptide expressing nucleotide sequence isolated from the Sargasso Sea
atgaccgcactgtccgaccgcaaggccgtcctcatcaccggcgcgagccgtggcatcggccgcgcgaccgccgtgctcgcggccgagcgcggctgggacgtcggcatcaactacgcgcgggacgcggcggcggccgaactcaccgcgcaggccgtccgcgacgcgggcggtcgtgcgtgcgtcgtcgcgggcgacgtcgcgaacgaagccgatgtcgtcgcgatgttcgactccgtcacggccgcattcggtcgcatcgacgcgctcgtcaacaacgcgggcatcgtcgcgcagtcgatgccgctcgccgacatgccggccgaccggctgcagcggatgttcgacaccaacgtgctcggcacctacctgtgcgcgcgcgaagccgcgcgccggctgtccaccgaccgcggcggccgcggcggcgcgatcgtcaacgtatcgtcgatcgcctcccggctcggctcgccgaacgaatacgtcgactatgcggggtcgaaaggcgcggtcgactcgctgacgatcggcctcgcgaaggaactcggcccgcacggcgtgcgcgtcaatgcagtacgccccggcctgatcgagaccgagattcacgcgagcggcggccagccgggccgtgccgcccgcctcggcgcaacgaccccgctcggccgcgcgggcgaagcgcaggagatcgccgaagcgatcgtctggctgctgagcgacgcggcgtcctacacgaccggcgccctgctcgacgtcggcggcggccggtaat

SEQ ID NO: 203941 - DNA, 521 bp, Unknown
  Bacterial polypeptide expressing nucleotide sequence isolated from the Sargasso Sea
gcttgtgaacaatgccgggattgtgcgctttggcgctatggaattgcagtcagcgcaagactacatcgacgtggtcaatgtgaatctactggggagctgcttctgtgcccgagagatcgcgccggccatgatagagagaggctcgggccatataatcaactttacatctatcaacggcattcacccggcccccggagtcggactctacggcccaaccaaggccgccatggcaaacatgacgcaggccatggccatcgaatggggcccaaaggggatccgcgtaaacgccatcgcgcccgggatgatcgacgcaggcatgtccaaaccgatctttgagaatccgaaagtgcgggcagtaagaggcggcggtgtgccactgcgcgctttgggtgaggcggccgacattgcggaagccgtgctctttctcgactccgagggcgcaaaatacatctccggtcacgaactagtggtggatggcggggtttcgacaagtgtcatggcccacctcccccgcgaatgac

SEQ ID NO: 203942 - DNA, 992 bp, Unknown
  Bacterial polypeptide expressing nucleotide sequence isolated from the Sargasso Sea
catggtaggagctagtaaaataagcgatcaagatgctctcgattttcatgcccaaggaaagcctggaaagcttgaaatggcgccaactaagagtttaacgacacaaagagacctatctcttgcctattctccgggcgttgctgttccctgtctagaaatcgagaaggatccatcgaccgcatacgactatacctcaaaaggtaatatggttgcggttatttcgaatggcaccgccgtacttggcttaggtaatattggcgctctggcagccaaacccgtcatggaggggaaagcagttctttttaaaaagttcgctgatatcgacggaatagaccttgaggtcgatacagaagacgtggaggaattcttcaatagtgtccgggttcttggaaaatcttttggaggtataaatctggaagatattaaagcgccagaatgtttcattatagaacaaaaattaaaggaaagccttgatatacctgtttttcacgatgaccaacatggaacagctatcatttcccttgctggtttattgaatgctcttcacttaacgaacagagacataaggaaaactagggttgtcgtcaatggagcaggagcagcggccattgcgggtgtagaattatttaaagctctgggaatgcctcacaaaaatgtgatcatgtgcgattctaatggtgtcgtctataagggaagaaaaaatggcatgaatcaatggaaatcagctcatgcggttgaaactaaatatcgcactctggaagaggccgcagaaaattccgatgtattgatgggtttatcaataaagggggccttttccgaaaaaataatttcatctatggcaaacgacccaataatttttgcgatggcaaatccagaccctgaaataacaccagaagaagtaaagaaaattcgggccgacgcaattatggctacaggtcgttccgactatcctaaccaagtaaataatgtacttggttttccaatatattttt

SEQ ID NO: 203943 - DNA, 1140 bp, Unknown
  Bacterial polypeptide expressing nucleotide sequence isolated from the Sargasso Sea
aatgaaaaaaacaaaaatcgatcattacacagataaagaagctttagattttcataaagacaaaaaacctggcaagattgagattatttcttcaaaaaatatgacaactaagcgtgatctcgctttagcgtattccccaggagttgctgctccagttaaaaagataagtgaaaacccagaggctgcttatgattatacaagcaaaggaaacctagttgctgtaataagcaatggttcagcaatattaggaatgggtaatttaggtgctcttgcatctaaacctgtaatggagggaaaagctgtattatttaaaagatttgcagacatcgactctattgatttagaaatagattctaaaaactctaacgaaataattaattcaataaaaaattttgctcctagctttggtggaataaatttagaagacatagcggccccagattgttttataattgaacaaaaattaaaagaaattttagatattccagtttttcatgatgatcagcatggaacagcaattataacaactgcagcattaataaatgcattagatatttgtggtaaatcaataaagaaaattaaagttgtagttaatggcgctggtgcatcagcacaagcttgtacagaattatttataaactcaggagtaaaatctgaaaacataacaatgttagacagaaagggtgtaatttacgaaggaagatctgaaggaattgatcaatggaaatctagatatgcaattaaaactaaacatagatctctagaagatgctgttaaaggtgcagatgtttttttaggtttatctacaaaaggtgttctgaaaaaagagatggttaaatcaatggcaaaaaatccaattctatttgcttgtgcaaaccctgatccagagataactccagaagaaattaaagaggttagagatgatgcaattgttgcaactggaagatcagattaccccaatcaagtaaataatttaattggatttccttacatatttcggggagctttagatgttagatctaaaactataaatgaagaaatgaaagttgcagctgctaatgcaatagctaagcttgcaagagaagatgttcctgatgaagttgttgcagctatgggtggtgaaagacctcattatggaaa

SEQ ID NO: 203944 - DNA, 346 bp, Unknown
  Bacterial polypeptide expressing nucleotide sequence isolated from the Sargasso Sea
tatctttaaggttcttggaacagctacgagtgatcaaggggttgatacactaaatagcaatggtattgaaggttatttattagatctcaattcaaaagattcaattgatagcttttggagtcaattagaaagtgataacaaaacaatatctgtattggttaataatgccggcattacaagagataatatagttttaagaatgtctgacgaagaatggtcagatattatgaatgtccatctttatggaacatttcaactaagtaaaagagcattgaaaatgatgctaaaaaataaattgggcacgcataataaatgtttcgtctgcttccgcctcaataggcaatag

SEQ ID NO: 203945 - DNA, 790 bp, Unknown
  Bacterial polypeptide expressing nucleotide sequence isolated from the Sargasso Sea
tatttctgcaccacgctgttttgaaatagaacaaagattaagagaagaacttgatatacctgtttttcatgatgatcagcatggaaccgcagtagtcactacagcagccttaatcaatgctctcaaagtagtcgggaaaaatgttggggaaattaaagttattgtttcgggagcaggtgcagcaggcattgcctgcacaaaaatgattatgcatcttggtgtaaaaaatttgattgtttgtgacagtaaaggtgctatccattctaaacgaacaaatctaaatccaagtaaaaactggcttgcagaaaactcaaatcctgaaaaagaatctggatcccttaaggaggtggttgcaggagctgatgtatttttaggagtttctgccccaaatataattgaacagcaagatctaaaaaatatggctaaagatccaatcgtttttgcaatgtcaaacccagatcctgaaataagcccagaagaagcatcgtcctttgcagcagtaatggctacaggtcgcagtgattatccaaatcaaatcaataatgtactttgtttcccaggaatattccgtggtgcactagactgtaggtcaagaacaattaacgaagaaatgaaattagctgcagcacaagcaattgctggcgcagtggatgatgcccaccttaacgcggattatattattcccagcgtgtttgatactactgtagcacaaaagatttcggaatcagtcaaggcggctgcttacaagtctggagtagcactccgaagacaaaataaaaaactctattga

SEQ ID NO: 203946 - DNA, 748 bp, Unknown
  Bacterial polypeptide expressing nucleotide sequence isolated from the Sargasso Sea
atgaacaaatatgatttaacgggtaaagttgctattgttacaggtggcgctcaaggatttggtttagctataacaaaaaagtttttagattctggtgcagaagttattatttgggatctagacaaaactgctgctcaaaaggcaatgaatgaaaataaagataaaaaattatcttacaaaatcttagacattacaaattttgaagaaattcaaaaaaatgtaaaagaaatttctgaaaaaaagaaaattgatattttggttaataatgccggcataaccggaaaaaatgcatctgtctgggaatatcctgttgaagaatggaaaaaagttttagatactaatctacaaggaaccttttattgttgtaaagcagtcgttcctataatgattaagaataattatggaagaattgtaaatgttgcttcaatatccggcaaagaaggtaacgcaaatgctagcgcttacagttcagcaaaagctggtgtaattggtttaacaaaagcactaggcaaagaattagctaataaaaatatcgcagtaaatgctgtgactcctactacagctaatacaagaattttaaaacagatgaccgataagcatgtaaaatttatgttatcaaaagtgccaagaaatagatatttagaactcaacgagttagcctccatggtggcctggttatcaagtgacgaaaattctttttcaactggtgcagtttttgatattagtggcggaagagccacatattaaa

SEQ ID NO: 203947 - DNA, 1063 bp, Unknown
  Bacterial polypeptide expressing nucleotide sequence isolated from the Sargasso Sea
aatgattgaaaccaaagcggcggtcgctaccaaagccggtcagccattaagtattgagacggtcaaagttgacggaccgcgtgctggagaagtgctggtggaaatcaaggccaccggtgtgtgccataccgatgcctttacgctgtcgggtgatgacccggagggacttttccccgccatcctcggacacgaaggcgccggagtcgtggtggaggtcggcgaaggtgtgacctccctgtcaccgggcgatcatgtcattccgctttacacacccgagtgccgcacttgtgactactgtacttcgggcaagaccaatctgtgtcaagccatccgcgaaacccagggacgcggactgatgccggatgaaagcagccgcttctcactgggcagcgacaagctgtttcactacatggggacgtcgaccttctcaaactacaccgttgtgccggaaatcgcgctcgccaagattcgcgaagacgcccccttcgacaaggtgtgctacatcggctgcggcgtcaccacggggatcggtgccgtaatcaatacagcgaaagttgaacccggcgcgaacgttgtggtcttcggactcggcgggatcgggctgaatgtgattcaaggcgcccgactggtcggggccgacaagattgtcggggtcgacctcaacccggatcgcgaagcccttggcagaaaattcggcatgacgcacttcgtgaatccggccgaggttgaaggggatctcgttccccacctggtcgaactcaccgacggcggtgccgattacagtttcgaatgtattggcaacgttgaggtcatgcgccaggctctggagtgctgtcataagggctggggcaccagcatcattatcggcgttgcaccggctggggcagaaatctcgacccggccctttcagctcgttaccggacgcaattggcgcggcaccgcttttggcggagccaaaggccgaacggatgtgcccaagattgttgactggtacatggacggcaagatcaacatcgatgatctcatcacgcacaccatgccgcttgaggagatcaacagcgct

SEQ ID NO: 203948 - DNA, 636 bp, Unknown
  Bacterial polypeptide expressing nucleotide sequence isolated from the Sargasso Sea
catgaacacgatcaaaaacgcacgagtcgccatcgttaccggcgcatcccgcggcatcggcgcagccgttgcgcaacgcctcgccaacgacggcttcgcggtcgccgtcaactacgcatcgagttcatcggaggccgatgcgctggtcgcgcaactcacggcggcgggcacgagagccatcgcggtgaaggccgatgttgcaaacgccgacgatgtgcgccgcatgttcgagaccaccgaacagcaactcggcaaagtagatgtactggtcaacaacgccggcatactcaagaccgggccgctcgccgacaccagcgacgcgctctacgaccagacgttcgacatcaacgtacgcggcaccttcaataccctgcgcgaagcagccgcgcggatgaacgacggcggacgcatcgtcaacttctcgagcacgacgctcgcgctgaacatgccgggctacgcgatctacaacggcaccaaagccgccgtcgaagccttcacgcacgtgttcgccaaggaattgcgcggccgcaatatcaccgtcaacgcagtggcgcctggcccggtcgcgaccgcgctgttcctcgacggcaagaccgaagaacagatccagaccttcgcgaagatgccgccgctgca

SEQ ID NO: 203949 - DNA, 661 bp, Unknown
  Bacterial polypeptide expressing nucleotide sequence isolated from the Sargasso Sea
gatgattgaggagaccatggagaaatggggtcggatagatattcttgtaaataatgctggaatcttgagagataaaagttttcataagatttctatagaagaatttgaccaggttatggatgttcatttccaaggaagtttttatgcttcgcatggtgtttatccgataatgagagagcaaaacttcggtagaattatttttacaacttcatctggaggcctttgcggcaattttggacaagcaaattatggggcagcaaaaatggggatgattggcttaatgaattgtctaaaaatagaaggtcaaaaatacaatgtcttctcgagtgctgtagctccagttgcgttatcaagaatgacagaatctttatttcctgagggcatcggagagaggtttatgcctgaatatgttactcctgctgtgatttatcttgctagtgacgaaagtgaaaacggggctattattggtgcaggtgcaggtgtttttacaaggttcagaattttggagacaatgggcctagctttgggtactggcgagggaatgacaccagaaaatatagccgctggctgggattcagtttctgatatggatgatgcaagagaattatttagcggtcctgaacaaaccattaaaattcttgaacaggcagataaatcttag

SEQ ID NO: 203950 - DNA, 1288 bp, Unknown
  Bacterial polypeptide expressing nucleotide sequence isolated from the Sargasso Sea
tatgagcgaaacaaaacgaaaagaagcactggattatcattctagttttcccaaaggtaaaattgaaacaaaaataacaaaacctagtgaaacggaagagcaactctctctagcttactctccatgggttgctgagccttgtaaggaaattcacaaagatgttcaaaatgtttatgaatatacaaataaaggaaatttagttgctgttgtatccaacgggactgcggttttaggattaggtgatttaggtccagaagcaagtaaacctgtaatggaaggtaaggcagtattgtttaaaagatttgcccaagttgatgctttcgatattgaaattaaaacaacagatatagaagaaataattagaacagttgaattattagagccaacgtttggtggaattaatcttgaagatattaaagcaccagaatgttttaggatagaagatgaattaaaagaaaaaatgaatattcctgtctttcatgatgatcaacatggcactgctatcatttcaggtgcggggctcgtaaacgcagttgaattaacagatcgcaaaatgtctgaaataaaaataaatattaatggtgcaggtgcgtctgcaatttcctgtgctcgattatttgtaacattaggagccaacccttcaaatattcttatgtgcgatagtaagggtgttatatataaaggtagagaaggtttaaataaacaaaaagaagaatttgcagtagaaacagaatgcagaacactagcggatacctttaaaggctcagatgtatttattggtttatctattggtaatgtagtttcaaaagaaatgatacttgagatgaatgataatcctattgttttcgcaatggcgaatcccgatccagaaatttctcctgaagatgctcatgcggctagaaacgatatcataatggcaacagggagaacagattatcctaatcaggttaataatgtattaggatttccttttatatttagaggtgccctagatgttgcagctacagatatcaatgaagaaatgaaagtagcagcttctatagccttagcaaaactagcgaagttgggagcgggttctgaaattgcaaaaaaacataatagagatactttagtctatggaaaagattatatcgtaccatcacctttcgatccaagaatactagtttgggaatcatatgctgtagcaaaagctgcaattgaaacaggtgttgcgagaaagaaaattaatcttgatgaatacaaggctcgtctagaagagatggcaggtgtagagccacagactttctaa

SEQ ID NO: 203951 - DNA, 587 bp, Unknown
  Bacterial polypeptide expressing nucleotide sequence isolated from the Sargasso Sea
tatgaattttgaaggaaaaaaaattttagttactggagctacgggtggaattggtggagcaataataaaaaaattcttatctctaaatgcgtcagttttaggaactggtacaaatttagaaaaattaaatttattaaaaaatgaatttccaagtttattaactgaacaatttgatatttctaagcatgaaaaaattgaagaatttgtagaaaaagttttttcaagtttaggtgggcttgatattttagtaaataacgctggtattactaaagataatttatctttgagaatgaaaagtgatgaatggcaaaaagttattgatatcaacctaacatcaactttttacttatgtaaaagtgtaataaaaaaaatgttaaaaaataaatttggaagagtagtaaacattacttctattgttggtcatactggaaatgtaggacaaggaaattactcagcatcaaaagcaggtgttgtggctatgtcaaaaagtttagctatcgagtatgcaaaaaaaaatatcacaatcaattgtgtctcccctggatttataaaaacaaatatgacagataatatctcagagaaattaa

SEQ ID NO: 203952 - DNA, 847 bp, Unknown
  Bacterial polypeptide expressing nucleotide sequence isolated from the Sargasso Sea
atgaatattcagtggtgtaatcaagttgtactacttacaggtgcaactggcggtattggtcaagcaatagccaaggcgcttgatgaaaaaggcgcgcacattatcctaactggcagaagtaaagcgaagctcgaacagctgcaacaaaatttaacccttcatcatactgccattgtggctgacattacgtcagatgaaggcagagatagagtcgtaagtgcctgccaacgacttcctttaagtattctggttaacaatgctggcattacctatatgggcgagtttgagggcacccctatcgagtcaattgtgtcgacaaatatgctggctccgatgctactaacccaacgcctactgccgttactcgaacgtagaccgtctgcgcacgttgtgaatgtaggctcagcttttggaagcataggatttgctgcgcacggaacctactgcgcaactaaattcgctttaaaaggctggacggaagcgatgcacagagaattcagcgatagcaaaatcaaatttcactatctagcgccacgcgcaacgcgtaccgacataaatgacgaacgcgctaatgcgctaaatgaggcattgggcaaccagacagacgagcctgatgcagtagcacaagcattcattaaacagttagaaaacaatttgccaagggtcgcgctcggatgcgctgaacgcttttttgccaagcttaacgcgctagttcccagtgttgttgacaacgcgttggcaaagaaacttccaacaattaaacgctatgcctttcaaaaaacgcaatcacaagacaaacagaccagcgctcaaaacgatacccgcctgggtaacaagctggtttaac

SEQ ID NO: 203953 - DNA, 314 bp, Unknown
  Bacterial polypeptide expressing nucleotide sequence isolated from the Sargasso Sea
tatggaaagtaaatcagttctaatcacaggcggcagtaggggaattggaaaacagctggtaagtgcttttcttgacgagggtcataaagttattgcaacctgcagagataaaagcaaaccacaatttcaaaaacataagaatttaacagttgaaaatttagatatatcttcaactgaatccgtgaattcgttaaagaaactagttgaagatatgaacatttctatactggtaaataatgcaggaattacaaaagacaacctttttctaagattgtctgatgaggattgggaagaggtaataacacgaaccttaa

SEQ ID NO: 203954 - DNA, 1075 bp, Unknown
  Bacterial polypeptide expressing nucleotide sequence isolated from the Sargasso Sea
gcagttttattcaaaagatttgcggatatagatgctattgatttagaaatagactcgaacaacccagatgaaataattaataatataaaaaatttttctagtagttttggaggaataaatttagaggatatcgctgctccaaattgttttataattgaggagaaactaaaaaaacttttagatattcctgtatttcatgatgaccaacatggtactgcaataattacttctgcagcactaattaatgctgttgatatagctaagaaagacataaaaaaaattaaggtagtagtgaatggagcaggagcatcagctatggcatgtgctagtctttttaaaaaaactggagttctttataaaaatataattatgattgatcggaaaggtgttatttataaaggaagaaaaggtctaaataaatggaaatcagcttatgctatagaaactaaaaacagaacattgaatgatgcaataaaaggtgctgatgtttttttaggcttatcatctgcaggtgttttaaaaaaagaaatgataaaaaaaatggcaaaaaatccaattatatttgcctgtgctaatccagatccagaaataacacctgaggaagttgaaaaagttagaaaagatgcaataattgcaactggaagatcggattatccaaatcaagtaaataatttaattggatttccatatatttttagaggcgcactagatgtaagagcaaaaactataaatgaagaaatgaaaattgctgcagtaaatgctatcgcatctttggctaaaaaaagagttccagatgaagttgttgctgccatgggaggagaaagacctaaatacggaaaagattatataattccatctacatttgatccaagattaataagtgttatacctgttgcggttgctagggctgccttaaaaactaaagttgcacgaaaagaaatagataactttgaaacttataccgaccaattaaaacaaagattagatccttctgtaactataatgcaaggtataaattctaaaatcaaaaaaaatcaaaaaagagttgtttttacagatggcgaagacgaaaata

SEQ ID NO: 203955 - DNA, 1063 bp, Unknown
  Bacterial polypeptide expressing nucleotide sequence isolated from the Sargasso Sea
gatggccaaaaattcaaaagacatcttgcgtaaagctgctttagattatcatgccctaccaaaaccgggcaaactcgaaattagagctacaaagccgatggctaatgggcgcgacttagctcgggcctactctccaggagtagctgaagcttcaatcgccatcgacaataatccggatgacgcaggtaaatatacctctcgggctaatttagtagcagtggtaaccaatggttcagctgtcctcgggttggggaatataggagctcttgcttcaaagcctgtaatggagggaaaagcagtcttgtttaaaaaatttgctgatattgactgttttgatttagaggtaaacgaaaatgatccaaaaagacttgcggatatcatttgtgctcttgaaccaacttttggcgctgtaaacttagaagatatcaaagcacccgattgctttgaggttgaaagaatttgtcggagcaggatgaaaattcctgtttttcatgacgaccaacacggaacagcaatcgttgtctgtgcagctgctaaaaatgcacttctaattacgaaaaaacattttaaagacgttaaaatagtttctactgggggaggcgctgcaggcatagcttgcctcaatatgctggttaagctgggtgttaagaaaaagaatatatggctctgcgacaaacatggattagtttacgcaggtagaaaaatagatatgaactctgaaaaatccgcttttgctcaaaatactaatttcagatctttggaacaagttattgaaaatgcagatatgtttcttgggctatcaggacctaatgttttaaagcctgcattgataaaaaaaatgaatgcaaagccaattatttttgccttagcaaatccaagtcctgaaataatgccagacattgctcggaaagccgctcccgatgcaattatagccacaggacggagtgattttttcaatcaggtgaataatgttttatgttttccatttattttcagaggggctctagacgtagaagcaatggaaataaacgatgaaatgcaacttgcatgtattgatgcaata

SEQ ID NO: 203956 - DNA, 689 bp, Unknown
  Bacterial polypeptide expressing nucleotide sequence isolated from the Sargasso Sea
cctgctccaacgttatcactgtaaacacctcccgcatcgatccgtcgacgttatcacagagaacgttcgcgggaagaccatcatcgtgaccgggcccacggccgggatcggcatcgccaccgcgcgctcgttggccaatcgcggcgcgcgcatcatcttggcgtgcagaacaccgtccaagggcgaggatttggtgcgacagtggacgaaagaggccgaggcgttgcgcacggaggcgcccgagtgtcgagtgatgaagttggatttggatagtctcgcgagcgttcgagccttcgcgaaggagtttcgcgacacggagacgcgtttggacgttctcgtgaataacgcgggtattttcgacatgtctggcgcgtacgtgtgcacgaaggatggacatgaacagcatttacaggcgaacttcttagcgccggcgttgctgacgatgtcgctgttggacctcttgaaggagagcgcggaggagacgggcgacgcgcgagtaatcttcgtgagcagtaagcttcacgaattgtgcggaggattggatttggacgatatgagttttgagtgccgcgcgtacggttcgcaggcggcgtacgcgtcgagtaaactcgcggaagtactcttcgtgaaggagctcgacggaattcttcgagcaagcaactgcgggacgcgagcgttggtgttgcatc

SEQ ID NO: 203957 - DNA, 724 bp, Unknown
  Bacterial polypeptide expressing nucleotide sequence isolated from the Sargasso Sea
tatgtctaaagtagcattagtaactggaggaacaagaggaataggtgctgcaatatctcttgctttaaaaaaggaggggtgcaatgttgctgcaacctatagttcaaattcagatgcagcaaataagttttcatccgaaaacggtattgaggtatttcaatggaatgttgctgatgcagctgcatgtgaagcgggcgtaaagcaagttgctgataagctgggtactgttgacattttagtgaataatgccggcatttccaaagcttcaatggctcataaaatgtcagttgaacaatgggatgatgtaataagaactgacttagattcagttttttatatgacaagatgtgtacttgaaggcatgagagaaaaatcttttggaagaataatcagcatttcttctattaacggtcaaaaaggtgagatgggtctaataaattatagtgcggcaaaagctggtttactaggttttaccaaagccttagcgcaagaaactgctagaaagaatattacagttaacgctattgcacctggctatatcgatactgaaattctagcggatgcctccgaggattttatgaaaagtttaattggaaaaattcctgtaggaaggcttggaacagttgatgaggtttcacgaatagttacattccttgctagtgatgaagcgggctttataacaggttctacgatatctgcaaacggtggacaatattttacttaa

SEQ ID NO: 203958 - DNA, 376 bp, Unknown
  Bacterial polypeptide expressing nucleotide sequence isolated from the Sargasso Sea
tatggatctaaataataaagtagcattggtcacaggtggagcttctggattaggacaggctaccgtagaagcatatgtggctaaaggcgcaaaagcagtcatattagatataaatgaagataaggctcaagaaataataaataatcttggtgaagagaaagtcatgtttatatctaccgatattatgaaagaggatccagtagtggaggctataaataaaataaaagataattttgggggactgcatatcgcagtcaattgtgctggaactggatatccgggaagaatattaggcaaagaagcacctcatccattagatgccttccaatttattgttaacttaaatcttgtagggacttttaatgttatgagaata

SEQ ID NO: 203959 - DNA, 739 bp, Unknown
  Bacterial polypeptide expressing nucleotide sequence isolated from the Sargasso Sea
ttgtttagtttaaaagataaaaaagcacttattactggggcgagtggcggtattggtaaagaattagcaagagttttggtagaatatgatgctgaagtttgtatttctggaagaaatattgaagaattaaatgaacttaaagaatctttaggagataagtgccatataatcccatgtgatttgagtgataaaaatgaaatttctgaacttgtttcaaaatctgaagaggtattgggacaaattgatattttagttaataatgccggaataactaaagataatatttttcttagaatgtctgaacaagaatgggaggatgttttaaatataaacttaaactcaacttttaatattcttaaattaattacaaaaggcatggtaaaaagaaaatatggaaggattataaatatatcctctgtcgttggggcaacaggaggcgcaggtcaagttaattatgcagcttcaaaagcaggattaattgggctaacaaaatctttatcccaagagttggctacaagaaatataacagttaattgtattgctccaggttttattgaaacacctatgactgaaaaattggatgataatagaaaagatataattattagttctatacctgcgaatagaattggtacaccaaaagacctgtcttctgctgttatttttctagcaagtcaagaatcaagctatataacaggtcaaactattcatattaatggcggtttatatatgaattaaa

SEQ ID NO: 203960 - DNA, 326 bp, Unknown
  Bacterial polypeptide expressing nucleotide sequence isolated from the Sargasso Sea
tatgcttaacttttcaacaaaaacagcaattgtaactggaggatcaagaggaattggaaaagaaatttctcttattcttgctcaaaataattttaatgttgtagcagtcgctacgagtgaaaaatctttagattctgtcagagacataaaaaatatacatcctttctgttgtgatatctctgatgaaaaatcaattgaaaaactatatgaattcgttatttcaaaatttggttatgcagatgttctagttaataatgctggtattcatatggataatattctactaagaatgaaatctgaagaatggaatcaagtaatgaatgtta

SEQ ID NO: 203961 - DNA, 793 bp, Unknown
  Bacterial polypeptide expressing nucleotide sequence isolated from the Sargasso Sea
tctgaatactgaaacttcccgccgtaccccttcttccctcactcatccgcgcgtcgcgctcgtcaccggcggtggcgcgggcatcggcgcggctatctcgcagcagcttgccgaagccgggcacatcgtcttcatcggcgacatcaacgcgcataccgcgaacgatcttgccggttcgctgtgcgcagccgggcacgaagcgtatgccgtgcagctcgacgtgtcggcgtcggcttcgatcgatgccgccttcagcaccatcgagaaccagttcggccgctgcgacatcctggtgaacaacgccggcatcgccaagacatttccgtttctcgactatccggtcgagcactggcgcaaagtcttcgacgtgaacgtcaccggacccatgctatgcggccagcacgctgcacggctgatgcgcaagaacggctgggggcggatcgtgaacatcgcctcggtcagcggactgcgcgcgagttcgggccgcaccgcctacggcacgtcgaaggctgccgtggtcggactgacgcgacagatggcgatcgaactcgctgaatacggcatcacgaccaacggcgtggcgccggggccgatcgacaccccgatgacgctcgatctgcattcgcaagtcgcgcgcgacaactacacgcgcgcggtgccggcgaagcgctacggcatccctgcggaaatcgccgcggtagtccagttcctgtgttccgaacaggcgtcgtatgtgaacgggcagacggtgccggtggatggcggcttcatggccgcaggcgtgctggagatt

SEQ ID NO: 203962 - DNA, 227 bp, Unknown
  Bacterial polypeptide expressing nucleotide sequence isolated from the Sargasso Sea
aatgacaaaaaaaatatctttgataggagcaggtcaaatcggtggtacattagctcatcttatagccttaaaagaacttgcagatgtagttttgtttgatgttgcagaaggtctcgcaaaaggaaaagccctagatatagctcaatcatcaggagtgagtggttttaatatagatctcaaaggaacaaataattatgaggatactaaaaattcggatgtaataatta

SEQ ID NO: 203963 - DNA, 1458 bp, Unknown
  Bacterial polypeptide expressing nucleotide sequence isolated from the Sargasso Sea
aaatttgggtgcgatagcatcaaaaccagtgatggaaggaaaagctgttctatttaaaagatttgcagatatagactctatagatttagaaatagacacagaagatacaaaagaaataattaattcaataaaacatatcgcaaaaagttttggtggtataaatcttgaagacattgcagctccaaactgttttataattgaagaagaattaaaaaaaattctagatattcctgtatttcatgatgatcaacatggaactgcaattattacaacagccgcactaattaacgctgttgatattgcaaaaaaaaacttaaaaaaaattaaaatagtgattaatggtgcaggagctgcagctatggcatgcgcaaaattatttagaagcactggtattccaaaaaataatattaagatgttggatacaaagggcgtaataaataaaaatagaaaagacattaattcttggaaaaaagaatttgcagtagaaacaaaggataaaagtttagacgatgcgatgaaaaatgcagatgtatttttaggcttatccgcagcaggtgttgttaaaaagagtatggttaaaaaaatggccaaaaatccaattatatttgcttgcgcaaatccagatcctgaaattaaaccagaagatatagaagaagtgagaaatgacgcaattatagcaacgggtagatccgattatccaaatcaagtaaataatttaattgggtttccttatatatttaggggagcattagatgttagagcaaaaactattaatgaagaaatgaaagttgcggcagctaatgctatcgcctctcttgcaagagaatttgtgcctgatgaggtcgcagctgcaatgggtggtgaaaggccaaattatgggaaagaatatattatcccgtcaacttttgacccacggttaataagcgttataccagtagcagtagcaaaagcagccattaaatctggagttgctagaaaaaaaatagaaaattttgatcaatattctgaacagctaaaacaaaggcttgatccatctgtaacaattatgcagggaataaataaccaaattaaaaaaacgaacaaaaaagttgtatttgctgatggtgaagatgaaaatactttaaaagcagctatagcttttaaaaatagtggattaggtacgcctattttggttgctaaagaaaaagtggttaaagaaaaactgagagagattggttatggagaaaactttgatattcaaattgtgaattctactttgagtgacaagcgaaaaaaatatgtgaattacttatttaaaaaacttcaaagaacagagggattgcttgaaagagattgtgataaaatggttagaaatgacagggttatatggggttcttgcatggttgcatgtggagatgctgatgcaatggtaactggaaattcaagaaggtatggacaatctcttgataaagtaaaaaa

SEQ ID NO: 203964 - DNA, 2072 bp, Unknown
  Bacterial polypeptide expressing nucleotide sequence isolated from the Sargasso Sea
aaatctgggaagattgagattatttcatcaaaacctatgaccacaaaaagagatttggctttagcatattctccaggggttgctgtaccagtaaaagaaatttcaaaagatcctgctcttgcttatgagtacacaacaaaaggaaacttagtagccgttataagtaatggatctgctatattaggtatgggaaatcttggagctttggcttctaaaccagtaatggaaggtaaagcagtattgtttaaaaggtttgcagatattgatgctattgatttagaaatagattctaataatccaaaagaaataattaatagtataaaaaatttttctggaagttttggtggaataaatttagaagatattgctgctccagattgttttataattgaagaaaaattaaaaaaaatattagatattccagtatttcatgatgaccagcatggaactgcgattattacgtgtgcagcattgattaacgcagttgatataacaaaaaaagacataaaaaaattaaaagttgttgttaatggagctggagcttcagctatggcctgtgcaaatctttttaaaaaaaaaggagtactacaaaaaaatttaacaatgattgatagaaaaggcgtcattcataaaggaagaagaggattaaataaatggaaatcaagtcatgcgataaaaactaaaaacagaactttgaatgatgcaataaaagatgctgacgtttttttaggtttatcatctgcaggtgttttgaaaaaagaaatggtaaaaaaaatggcaaaaaatccgatcatatttgcttgtgctaatcctgatccagaaataacgcctgaagaagttgaagaggttagaagtgatgcaataatcgctactggtaggtcagactatccaaatcaagtaaataatttaattggatttccttacatttttaggggcgcactagatgtaagagccaaaactataaatgaagatatgaaaattgcagctgcgaacgctattgcgtctttggctaaaaaaagagttccagatgaagttgttgctgctatgggaggagataggccaatatatggaagggattatattattccctcaacattcgatccaagattaattagtgtcataccagttgctgtggctaaggctgcaattaaaagcaaagtcgcaagaaaaaaaataaaaaattttgacatttattcagaaaaattaaaacagagactagatccatcagtaactataatgcagggaataaattcaaaaattaaaaaaaatcaaaaaaaagttgttttcacagatggcgaagatgaaaatactttaaaggccgcaatagcatttaaaaatgctggactaggagtgcctataattattgcaaaagaaaaagttgttaaacagaaattaatagagatcggttatatagaaaatcttgatattcaaatcataaattccagtgacaaaaaaaagacggataaatattcaaattttatttttaaaaaattacacggagataaaggtaatcttgaaccggatgttaacgaactgtacttaagagattgcaatagaatggttaaaaatgataaggttatctggggatcttgcatggtttcaacaggagatgcggatgcaatggtgactggaaatactagaagatactctcaatctttagaaaaaattaataaagtagtagatgctagacccggcgaaataatgtttggtttaaatatggttataaataaaggaaaaacagtttttattgctgatacaagtgtcaatgaatatccttcatcagaacagttagctgatattgctatatcttctgcacgggtagtaaagttatttggttttgatccaaaagttgcttttttatctcattcaacttttggacagcctttaactagtagaacaaaacacattagagatgcggtcgacatattgaaaaaaaagaaagttgattttaaatttgatggagatatgcagcctgacgtggctttagatgaagaatattcagatttatatccatcttcaaaaatagttggtaaagcaaatattcttataatgcccgggcaacatagtgcagc

SEQ ID NO: 203965 - DNA, 1366 bp, Unknown
  Bacterial polypeptide expressing nucleotide sequence isolated from the Sargasso Sea
aatgaaaaaaacaaaaatcgatcattacacagataaagaagctttagattttcataaagacaaaaaaccaggcaagattgagattatttcttcaaaaaatatgacaactaagcgtgatctcgctttagcatattctccaggagttgctgctcctgtaaaaaagataagtgaaaacccagaagcagcttatgattatacaagtaaaggaaaccttgttgctgtaataagtaatggttcagcaattttaggtatgggaaatttaggtgctcttgcatcaaagcctgtgatggaaggaaaggccgtattatttaagagatttgcagatatcgattcgattgatttggagattgattgtagagactcagatgaaatcataaattcaattaaaaattttgcacctagctttgggggtataaatttagaagacatcgcggcaccagattgttttataatagaacaaaaattaaaagaaattttggatattccagtttttcatgatgatcaacatgggacagcaattataacaaccgcagcattaattaatgctttggatatttgtggaaaatcaataaaaaaaattaaagttgtagttaatggtgctggagcttcagcacaagcttgtactgagttatttataaactcaggagtaaaatctgaaaatattataatgctagacagaaagggtgttatttatgaaggtagaactgagggaattgatcaatggaaatccagatataaagttaaaactaaacatagaactttagcagatgctattaagggtgcagatgtttttttaggattatctgcaaaaggtgttctaaaaaaagatatggttaaatctatggcaaaaaatccaattatatttgcttgtgctaatcctgatccagaaattaccccagaggaaattaatgaagttagaaatgatgcaattgttgcaactgggagatcagattatcctaatcaagtaaataatttaattggatttccttatatttttcgaggagctctagatgttagatctaaaactataaatgaagaaatgaaagttgctgcagctaatgcaatagctatgcttgcaagagaagatgttcctgatgaagttgttgcagctatgggtggggaaagacctcattatggaaaagattatattattccatctacatttgatccaagattgattagtgtaataccagcggctgtagcaaaagcagctataggtagtggagtagctagaaaaaatatagatgattttgatatttataaagatgatctaaaacaaagactagatcctaacagtaaccatcatgcaaggtataaattcatttatcaagaaaaatcaaaaaagaattgtttttgcagatggtga

SEQ ID NO: 203966 - DNA, 772 bp, Unknown
  Bacterial polypeptide expressing nucleotide sequence isolated from the Sargasso Sea
tatggatcttaacaataaagttgctttagtcactggaggtgcgtctggtttagggcaagcaacggttgaaaactttgttgctgcaggagcaaaagtcgtaatcctagacatcaatgaagataatgcaaacaaaataatagaaaatcttggtgctgacaaagtttccttcatttctacaaatattatggaggaagatccagttgtctcagcaataaacaaaattaaagatgagcacggtgcacttcatattgcagtcaactgtgctggtacaggataccctggaagaattttaggtaaggaagcaccacatcctttagatgctttccaatttatcattaatttaaatctagttggaacttttaatgtaatgagaatcgctgcggaactaatggataagaatgaagctgatgaagggggagaaaaaggagttattatcaatactgcatcagttgctggatatgaaggacaaattggtcaatctgcttatagcgcctctaaggctggagttattggattaactatcacagctgcacgagacttagccaggcattcaattagagtttgtacaatcgcacctggtatatttgatacaccgctaatgcaactcgcacctgataagattcgtgatccactccttgaatcaacacaattcccgcacaggtttggccaaccaagtgagtttggtcaattggctgcacatatagtagaaaactcttatcttaatggagaaactataaggctagattctggcatgagaatgaagccaagataa

SEQ ID NO: 203967 - DNA, 727 bp, Unknown
  Bacterial polypeptide expressing nucleotide sequence isolated from the Sargasso Sea
atgaaaactgtattaattactggtggatcaagaggaataggtaaagctatagcaatagagctagggaagtcctttaatgttgctgttggttactcctcatcaaaagaagatggtgaagaagttgtagaagaaataatgaaatcaaatggtactgcaactgctgtcgagattaacgtaacaagtactgaatcagtagaaaatgcttttgttgcaattgaaaaagaatatggtggaatagatgtacttgtaaataatgctggaattgctaaagataatatacttccaaggttgaaggaagatgaatgggatgaggtcattaatactaacttaactggatcatttagaacttctcaaagagctatcaagcatatgatgaaaagcaaatggggaagaattatttacatctcttctattgttggtttagctggaaaccaaggacaaactaactatgctgcatcaaaagctggcttagtcggtttgagtaaatcaattgctaaagaaatgggatctagaaacattacatcaaatgttatagcaccaggatatatcgacactgatatgacatcttttcttactgatgagcaaaaggacaatattttagataaattatccatcaaacgcataggaaaacctgaagatatagcaaatatagtatcttttttggcttcagatgagtcagagtatataacaggacaagtaatctctgttgatggaggaattacttaat

SEQ ID NO: 203968 - DNA, 772 bp, Unknown
  Bacterial polypeptide expressing nucleotide sequence isolated from the Sargasso Sea
tatgacaggacgacttgaaaacaaggttgcaataataactggagcagctatgggcttaggcgcagcagatgcaacattatttgctaaagaaggcgcaaaagttatacttaccgatgttgctgctgataaaggtcaagagttagctgataaaattggagctacttttatgcagcaagatgtaacggatgaagaaagatggaaagaaataatttctgatactgttaaccttcacggtaaattagatgttcttgttaataatgcaggtatagttgaagttggtgatccagaaaatcaaacaaccgaagaatatagaaaaacgatggccgttcatatggatagtaccttctttgggtgtaaatattctataccagtaatggccgaatctggcggtgggtcaattgttaacatgtgttcaatcgcatccgtacagggcgaatcttatgttgccgcttattgtgcagcaaaaggagctattgaagcttatactagagctgtagcagttcattgtggtttaaagaaaaatggagttagatgtaattctattcatccatcaggaattattactcccatggttgaaagtgtaccagagaaaatggaagctaaatttggcggtgcacctaatcaggatgctccagcaagcaagcaaggtgaaccaaatgacatagcttatgcagcattatatcttgcatctgatgaatctaaatttatgaatggcgctcaactaagggtagataatgctatgtctgttgcctcaggttctatgccagaataa

SEQ ID NO: 203969 - DNA, 1220 bp, Unknown
  Bacterial polypeptide expressing nucleotide sequence isolated from the Sargasso Sea
caggcgaacctgcggcaagcgaccctgcggcaagcgacccgcgacaccggcgcgccgcgcgatatttcagcgcgacgcgccagccattcacagacttacaggagtattcaccatgaagaccaaggcagcaatcgcatggaaagccggcgccccgttgacgatcgaggaagtggatctggaaggcccgcgcgccggtgaagtcctgatcgaagtgaaggccaccgggatctgccataccgactactacacgctctccggcgccgatccggaaggcatcttcccggcgattctcggccacgaaggcgcgggcgtgatcgtcgacgtcggtccgggtgtcggcacgctgaagaagggcgaccacgtgattccgctctacacgccggaatgccgccagtgcaaattctgtctgtcgcgcaagaccaatctttgccaggcgatccgttcgacgcaaggcaaagggttgatgcccgacgcgacctcgcgcttctcgctggatggcaagccgctgcttcactacatgggcacatccacgttttcgaactacatcgtcgtgccggaaatcgcggtggcgaaggtgcgtgaagacgcgccgttcgacaagatctgctacatcggctgcggcgtgacgacgggcgtgggcgcggtcgtgtattcggcgaaggtcgaggcgggcgcgaacgtggtggtgttcggtctgggcggcatcggcctcaatgtgatccagggcgcgaagatggtcggcgcggacaagatcatcggtgtcgacctcaatccgggacgcgtcgaactggcgaagaaattcggcatgacccacttcatcaacccgaacgaagtggagaacgtggtcgatcacatcgtgcagctcaccgatggcggcgcggactactcgttcgaatgcatcggcaacaccaaggtgatgcgtcaggcgctggagtgcacgcacaaaggctggggtcagtcgttcatcatcggcgtggcggcggcgggcgaggaaatcagcacgcggccgttccagctggtgacgggccgcgagtggaagggctcggcgttcggcggcgcacgtgggcgcacggacgtgccgaagatcgtcgactggtacatggaaggcaagatcaatatcgacgatctgatcacgcaccgtctgccgctcgaacgcatcaacgagggcttcgacctgatgaagaagggcgagtcgatccgctcggtcgtgctgtactaaa

SEQ ID NO: 203970 - DNA, 742 bp, Unknown
  Bacterial polypeptide expressing nucleotide sequence isolated from the Sargasso Sea
ttattagataagaaagttattgtaacaggtggcgcctctggatttggtctaggaattgtaaaaaaatttttaaataatggtgcaaaggtagtaattgcagatcaaaacaaaaccttagctgatgaacaggtacaaaaattaggaagtaatgtattttcgattgaaacagatgtatctaatgaggaaagcatcgagaacttaaaaaaacagacaaaacttactattggagatccagatatattagtaaataatgcaggcattacacaccttcccgattttgtagaaaatatttctttagaagaatttgaaaaagttttgaatgtaaatgtaaaatcagtttttctgataactaaagcttttgttccaaagatgaaagaagataaatctggtgtaattctaaatattgcctccactgcaggaattagtcctagaccaaaattaacatggtataatgcaactaaaggatggatgattactgcgactaagtcactggctgtagaacttgcacaatataatataagagtaaacgcattaaatccagttgctggagaaacacctttattgaaaaaatttatgggagaagatacacctgaaattcgagcaaaattcttatcgacaattccattgggtcgattttcaacaccagaagatatggggaatgctgcagtttttttatgctctgaaaaagcaaatatgattactggtgttgctttagaagttgatggcggtagatgtatataga

SEQ ID NO: 203971 - DNA, 718 bp, Unknown
  Bacterial polypeptide expressing nucleotide sequence isolated from the Sargasso Sea
tatgacaaagaaaaacatatttatatctggagcatcaaggggtattggaaaatcaatggcacagcattttgctaaaaataatttcaatgtagttggcacttcaagaaataactttaagtttgataacgatttagaaaatttatttccaataaaacttgatgtcacctcaagaaatgatgtaaaagattgttttgatgaacttaaatcaaaaaatcttcttcctgatattttaattaacaatgcgggcattaccgctgatcaattatttttgagaatgagtgatgatgattgggataatgtaattaatacaaatttaacaggaacgttcaatcttacaaaaatttttttaaaaaatatgattaagaataaatttggaaggataataaatatatcttcgatatcaggtttaatgggaaatcctggacaagtaaattattcttcttcaaaggctgctttaaatggttttacaaaatctctagcaaaagaagttggctcaagaaatattacagttaattgcgttgcacctggttttattgataccgatatgacttcttatattggtgataatgaaagaaatgaaattcttaaacaaataccacttaataaatttggattacctgaagatatttccaaattggtcatgtttttaatgtcagacgaagcttcttatattactggtcaaactatttcaattgatggtggattattaatgaactaa

SEQ ID NO: 203972 - DNA, 1173 bp, Unknown
  Bacterial polypeptide expressing nucleotide sequence isolated from the Sargasso Sea
aatgaaaaaaacaaagattgatcattacacagataaagaagctttagattttcataaagataaaaaacctggcaagatcgaaataatttcttcaaaaaacatgactactaaaagagaccttgctcttgcttattctccaggggttgctgccccagttaaaaaaataagtgaggatccagaagcagcttatgattatacgagtaaaggaaatttagtagcagtaattagtaatggttctgcaattttaggattgggcaatttaggtgcattagcctctaaaccagttatggaaggaaaggcagtactatttaaaaggtttgcagatatagattcgattgatttagaaatagactgcaaagatgctaatgaaattatcaattcagttaaaaactttgctccgagttttggaggaataaatttagaagatatagccgcaccagattgttttattattgaacaaaagctcaaagaaatattagatattccagtatttcatgatgatcaacatggaacagcaattataacaaccgctgctttgctgaatgcactcgacataagtggaaaatccattaaagatataaaagtcgttgttaatggagctggtgcatctgctcaggcatgtacagagttatttattaactcaggtgttaaatctgaaaatgtaataatgctagatcgaaaaggtgtgatttataaaggaagagcagaaggtatagatcaatggaaatcaagatttgcaattaatacagatttaagaactttaagtgatgctattaaaggggctgatgtattcttaggattatcctctaaaggtgttttgaaaaaagatatggttaaaagcatgtctaaaaatccaattatatttgcatgtgcaaatcctgatccagagattacaccagaggaaataaatcaagtaagaaatgatgcgattattgcaactggaagatcagattatcccaaccaagtaaataatttaattggatttccttacatattcaggggtgcgctagatgtgagatcaaaaacaattaatgaagaaatgaaggttgctgctgctaaagctatagcaaaacttgctagagaagatgtgccagatgaggttgtggcagctatgggtggagaaagacctcattatgggaaagattatataatcccatcaacctttgatccaag

SEQ ID NO: 203973 - DNA, 208 bp, Unknown
  Bacterial polypeptide expressing nucleotide sequence isolated from the Sargasso Sea
tatggatctaaataataaagtagcattagttacgggtggagcttctggtttaggacaagctaccgtagaagcctacgtcgctaaaggagcaaaagctgtcatattagatataaatgaagataaggctctagaaataataaataatctaggtgaagacaaggttatgtttatatctactgatattatgaaaagaggatccagtagttga

SEQ ID NO: 203974 - DNA, 466 bp, Unknown
  Bacterial polypeptide expressing nucleotide sequence isolated from the Sargasso Sea
tatgaacttagacaataaagtagcacttgtaacaggcggagcgtcgggacttggtcaagcaactgttgaaaaattcgttgagaaaggtgcaaagacagtaattttagatattaatgaagaaaatgctaataaaattatagaaaaccttggtgatgaaaatgttatgtttgtttctaccaacattatggaagaagagcctgtagtaaatgctgttaatcagattaaagataaatttggtggattgcacatagcagtcaattgtgcaggaactggctatccagggaggattttaggcaaagaggcgccacatccgcttgatgcatttcaatttattatcaacttaaacttagtaggaacgtttaatgttatgagaattgctgcagaactaatggataaaaatgagcctgatgagaaaggtgagaagggagttattattaacacagcttcagtagcaggttatgaaggt

SEQ ID NO: 203975 - DNA, 2290 bp, Unknown
  Bacterial polypeptide expressing nucleotide sequence isolated from the Sargasso Sea
aatgaaaaaaaataaaattgaacattactcagataaagaagcattagattttcataatactaataaatctggcaagattgagattatttcctctaaaccaatgacttcaaaaagagatttagccttagcatattcgcctggagttgctgcaccggtaaaagcaatttcaaaaaacccagacctcgcatatgactacactactaaaggtaatctagtagctgtaataagtaatggctcagcaattttaggtcttggaaatttaggtgcaattgcttcaaaaccagttatggaaggaaaggctgttttatttaaaagatttgcagacatagattccattgatattgaaatagattcttcggatacaaaagaaattattaattctgtaaaaaatatttcaaaaagctttggtggaattaatctagaagacataaaagcacctgagtgttttataatagagaacgaattaaaaagattattagatattcctgtattccatgacgatcagcatggtacagctataatcacaagtgcggctcttattaatgcttgtgatattgcaaaaaaaaatattaaggatgtaaaagtggtcattaatggtgcaggtgcatctgcaatggcttgtgcaaatctttttataaatacaggtgtaaaagataaaaatatcacaatgctcgattcaaagggggttattcattctgaaagagatgatttaaatgaatggaaaaagaaatttgctatcaaaacaaaaaatagaactctaaacgatgcaattaatggggcagatgtgttcttaggtctttctcaagctggggtcttaaaaaaagagatggttaaaaaaatgtccaagaatccaattgtattcgcatgtgcaaacccagatcctgaaatcattcctgaggacgtcgaagatgtgagagatgatgcaattatagcaactggaagatcagactatccaaatcaagtaaataatttaattggttttccatatatctttagaggagctctagatgtaagagctaaaacaattaatgaagaaatgaaagtcgctgctgtaaaagctattgctacattagcaagagaaagagtgccggatgaagtggtggctgcaatgggtggggacaggcctcattacgggagggattatataattccttcaactttcgatcctagattaataagtgtaattccggttgcagttgcaaaagcggcaatcaaaacaggtgttgcaagaaaaaatattgaagatttcgatatttatgctgaacaactcaaaaaccgattagatccatcagtggcggtaattcagggaataaactcccaaattaaaaaaaatcaaaaaagagtggtgttcgcagatggagaagatgaaaataatttgaaagcagcaatagcatttaaaaataatggacttggtgagccaatcttaattgctaaagaggatatagtaaaaaaaaaattatatgaaattggttatgaagaaaagctcgatattaaaataatcaactcaactgataaagaattaagagagagatatgtgaaatttttatttgaaaaacttcaaagaaaagagggtttattagagagagattgtgacaaattaatcagaaatgacagagttatatggggggcttgtatggtttcttgtggagacgcagatgcaatggtaactggaaataccagacgttattcttcatcattagagaaaattacaaaagttgtagatccaaggccaggtgaaataatgtttggtctaaacatgataattaacagaggtaaaacaatatttgtctgtgatacctccgtaattgagtatccagatgcaaaccaattggcagaaatggcaatttcaacagcaagagtagtgagattatttggctttgatccaaaggtcgcctttttatcacattcaacttttggtcagcctgtaacagatagaacaaaacgaataagtgatgcagtgcaaattttaaaagagagaaaagtcgattttaaatttgatggtgaaatgcaacccgatgtcgctttagaggaaacttataaagaattatatccattttcagaaatcgtgggtaatgcaaatgttttaataatgccaagccagcacagtgcagcgatatcatttaaaacaatgaaatcaatgagtagagcgaaagtaattggtccacttcttataggattaggacaagcaatagagatagctccacttagaagttcaacttcagaaattttaaacttagcgtctgttgccgcatattctgctggtgtaattgactataacaaaaaaaactaa

SEQ ID NO: 203976 - DNA, 364 bp, Unknown
  Bacterial polypeptide expressing nucleotide sequence isolated from the Sargasso Sea
tatgataaaaaataaaaatggaagaattataaatatctcttcagttgctggactcatgggaaatccaggccaagtaaattattcatcatcaaaatcagcactgaatggctttacaaagtcattagcaaaagaaattggatcaaggaatataactgtaaactctatcgcaccaggattcatagatactgatatgacatcttttttagatgatgatgcaaaaaatggaataattaaagatatacctttaaagaggtttggtgaggctagtgacgttgctgaattaacattattcttagcttctaaagaggcatcgtatatcacaggtcaaaccatatctattgatggcggattattaatgtattaa

SEQ ID NO: 203977 - DNA, 829 bp, Unknown
  Bacterial polypeptide expressing nucleotide sequence isolated from the Sargasso Sea
ttgataaatttaattgataaattaatgcttgttactggttcaggaacaggagtaggaagcggcattgcaagcaccctagctaaatgtggtgcacacgtagttgttcattataataacagcgaaaaagaagcccaaaaaaccaaagaaatcattgattccttaggtcgaaattgtaccctgataaaaagtgatttaaaagttgtcgatgaatgcagaagaactgtagatgaagctgcagaatttcttggtgggttagatggactagttaataatgctggaataacaatacctaaagatataaaagaaattgatgaaaaccactttaatgatattttctcccttaattttagaagttatttcttttgtgcacaacaagctttaaaacacttaataaaaagaggtaaaaatttatctgagaataacaaaaattataaatggtcaggaggtagtattgttaatatttcatcagttcacgggaaattgggtcatcctggtcattcagtttacgcatcaactaaaggagctataaacagttttacaaaacaattatcagttgaattaatttctgaacatataagagtgaatgcaattgcaccaggtacaattgaagtccctagttattttgaaaaagatccatcttataaccgggaattagggaattctcttgtaccttggggtagagtgggattaccagaggaagtcggctatctggcagcttatttggtttcagatttttcagaatttatgacaggtgaaataattcacatgaaaggcggactgacttcaacaatgaacttgaatacaaaaaaacaaaatttgcaactctaat

SEQ ID NO: 203978 - DNA, 633 bp, Unknown
  Bacterial polypeptide expressing nucleotide sequence isolated from the Sargasso Sea
cagcaaatgctgttgtcgaggagataaaagctgagggcggtgaggctatttcaaatggctctagtgttgcagataaagagggtgtgtctaagatggttgcagaaacaatggatacttgggggcgcatagatgttctggttaataatgctggcatcttaagagataaaagctttcacaagattacaattgaggagttcaaccaagtgatggatgttcactttcaaggaagcttctatgcttctcatgcagtctatccaattatgagagagcaaaactttggcagaataatttttacaacttcctcgggaggcttatgtggaaattttggtcaagcaaactatggcgcagcaaaaatgggcatgattggcttgatgaactgcttaaagattgaggggcaaaaatacaatgtattctctagcgctgttgcaccagtagctttgtcacggatgactgattcattgtttccagagggtattggagagagatttatgcctgaatatgttacccctgcagttatatatttagctagtgaagaaagtcaaaatggtgcgattattggagctggagcgggcgtatttaccagatttaggattttagaaacaatgggtctagcacttggaacaggaggatgaa

SEQ ID NO: 203979 - DNA, 916 bp, Unknown
  Bacterial polypeptide expressing nucleotide sequence isolated from the Sargasso Sea
atgattacaattatcggtgcaggtaaagttggcggagatgcagcattattctcagcattaagaagattagacgatgagattttactattagatattgcagaaggactcccacaaggagaagcaatggatctaaaccacatgttgtcagaacagggaattgacgtcaacgtgaaaggttcaaacaattatgaggatatgagaggttcaaaaattgtcgtagtagttgcaggtgcaggaagaaaacctggaatgacaagaatggatttgttaaaaattaacgcaggagttgtaaaagatgttgttggcaacataaagaaatttgcagatgatgcaatgattattcctgtaacaaacccactagacccaatggcacaaattgcatacaaaacttcaggattcgatagaagtagagtttttggtatgggtggaatgttagatttgtcacgattcaaacaattcatacatgaagcaacaggatattcccgtgaatcaacaaaagcattagtgattggcgaacatggtgaaaacatgttaccattaacaagatttgcaacagtttcaggaattccattacctacaatacttgcaaaagaaaaacttgacgagattttcacagcaacaaaaggagtagctgcagaagttatcaaacttaaaggagcaacagtccatgcaccaggaaatgcaatttcagctatgatagaatcagttgtacaggacaaaaaacaggtaattccagtttcaaccaacttagatggggaatatggacaaaaagatgtttcaattggagtcccagctgtaattggaaagaatggagttgagaaaatagtcgaattagaactaaacgatgaagaaaaggaatggttcaacaaaggcgttgacagtgttaaaaatgcattgtcaggcgttgagttttaaa

SEQ ID NO: 203980 - DNA, 799 bp, Unknown
  Bacterial polypeptide expressing nucleotide sequence isolated from the Sargasso Sea
ttgaaaagtgcgaactcccagagcggccgactttcaggaaaaacggctcttattactggtgcgagtcgcggaattggttatgaaattgcgcgggctttcgctagggagggcgctgatctcataataagtgcaaccagtttgggttctctacaaattcttaaagaggaactggagtcgtctggagcttcggtgatttgttgtcccgcagatttatctgacgcatcccaaactgagactctgtttagtcgggccgttgaagagcgtcccgaattggatgtgctggtaaacaacgcgggcatacacttgggcaaagcgtttaccgaatattctatggaagaattcgatcgtttgatgaaagtaaatgtctattcaatattccaacttactcagtccgctattactcacatgagagcattaggccgcggcaaggttatcaatatctcttctacggcgggaaagtgggagagcttgaaccaagtcgcctataatacttccaagcatgctgtggtaggcatggcaaagtgcatcgcgcttgaaaacgcgagccataacataaacgttaatacgatctgcccagggatcgtcgagaccgatatcattagaaatgcgcagaaaagtttagagtccacaggcgtcaccgctgatcaattcaggactatgattgaggaacaaatacccaatggaaggatgctacagccggacgaggtggctcacatagctatttatcttgccagccgtgaatcggatggcatgactggccaaacgattacaatctctggtggaatgagaatggcttgag

SEQ ID NO: 203981 - DNA, 2278 bp, Unknown
  Bacterial polypeptide expressing nucleotide sequence isolated from the Sargasso Sea
atgaacgataaaaataaaaattctagcgaaagctatgatgacaaagaagccttaaggtttcatgctgagggtaaaccaggaaaaattgcgatatctgctacaaaacctatggaaacgcaatctgacttgtctttagcatattctccaggagttgctgcacctgttattgctataagcgagaaaccagagacagtatatgactatacttcaaaaggaaatttagttgctgtcatttcaaatggttcagctattttgggtttaggaaatttaggctctcttgctgcaaagcccgttatggagggtaaagcagttttattcaaaagatttgccgatgttgatgcaattgacatagaaattgactcagaagatgctgaagtattttcctcgacggtagaaaaaattggcagaacttttggtggcatcaatcttgaagatattagtgcgccagattgttttatcatagaaagtgagcttagagagaaattagatattccagtctttcatgatgaccaacatggaacagctataatttctactgcaggtataataaatgctttagacctaacaaataaaaaaatagaaaatgttaaagtggtggttaacggagccggtgctgctggcatagcttgtcttgagcttcttaaatcaatgggattgcctcatgagaatgcgatcttgtgtgactcaaaagggcctatctatattggaagggatgaaaatatcaatcaatggaaggcggcgcacgcagttgatacagatgcaagatctttagctgatgccattaaaggttcagatatatttcttggtttatcagttaaagatgctttaacgaaagaaatgctggaaaccatgaataaagatccaatagtttttgctatggcaaatccagatccggaaatagaccctaaattggctaaggaagttagacctgattgtattattgcaaccggtagatcagattaccctaatcaggtaaataatgttttaggtttcccatatatctttagaggagctttagatgttagggcaaaaactatcaatgacgaaatgaaaatagcatgtgctgaggctctggctaaacttgctagagaagatgtacccgatgaagtagcagctgcctattctggtataagaccaaggtatggtcctgattatattattccagctccatttgatcctagattaataagagacattccgccagcagttgcaaaagcggcactagaatctggagttgcaagaatgccaatcgttgatgaagatgcttacaaaaataggttatcagcaagattagatcctgctgctgcagtcatgcaaccaatatatcaaaaggcaaaaagattaatgaaaaaagttgtctttgctgaaggcgaagaagaaaaagttattcgagcagcattaaatttcagagagcttggattaggtatacctgttttggttggtagaaaagaaaatatagaaaagtcattatcagaaattgggcaacaactgcactcaggaattgaaatagtaaatgctgaaatttcagataagtcagatgaatatactaattatttatactcaagacttcaaagaagaggtgttttggcaagagattgtttaagaatggtaaacaatgacagaaatatattttctgcatgtatggtttctatgggtgatgcagatgctatggttactggagtaacaagaaattactctcttgctcttgaagacataaggaaagtaattgacccagctgaaaataagagaatggttggtatttctgtaattatatctgaaaataaaacagtattagttggtgatactaatgttcatgatatgcctagtgctgaagaaattgctgatatcacacaagccggagcagatttagctagaaaacttggtcttgatcctcatgctgctcttttagcttattcatcttttggatatcctgaaggcgaacgctcaacatttatgagagaagctgtagatatacttgataaaagaaatgtagattttgattacgatggagaaatggcagcagatgttgctttaaatcctgaagcaatgaagctttaccctttttgtagattgactgaaccagctaatgttttaattatgcctgcgattcattctgcttccatatcaacaaaacttttacaagaattagggggagcaacattagtaggcccacttttggtaggattatcaaaacctgttcaaatcgctccaacaggatgtactgtttcggaactcgtaaacttagcaactattgctgcatgtgatttgggcaactaag

SEQ ID NO: 203982 - DNA, 748 bp, Unknown
  Bacterial polypeptide expressing nucleotide sequence isolated from the Sargasso Sea
aatgaaaaaagttgttattgtgacaggaggcagcagaggtattggtgctgctactgcaaaactggctgcagctcagggttacgcggtttgtgtaaattatcttcataatcaacaggctgctgatgctgtggttgccgaaatccaggctttgggcggtattgccatagcgatgcaggcggatcttgctgttgaagcagaaatagtggctttatttcagcgggttgatcaggagctggggcctgtgaatgcattggtgaataacgcaggtattctggaaactcaaagtggtctgctggatatggatcaagcgcgtttacagcgggtttttactgcgaatgttgttggcccaatgttatgtgcacgcgaagcggtaaaacgaatgtcggtaaaattaggcggcaaaggcggtgctattgtaaatgtatcttctgtggcctctcgtttaggtgcgcctggagaatacattgattacgccgcatccaaaggtgctttggatagtttcactctgggcttatccaaagaagtggccgatcagggcattcgtgtcaattcagtccggccaggttttatctacacagatattcacgccagcggcggcgagccaggtcgtgtcgaccgaattaaagatgccattccaatgaaacgaggcgggcagccggaagaagtcgcgcaggcgattttatggctattatccgagcaggcttcttatgctaccggcacttttatagatttggcaggaggaaggtaa

SEQ ID NO: 203983 - DNA, 700 bp, Unknown
  Bacterial polypeptide expressing nucleotide sequence isolated from the Sargasso Sea
gcgcgcgagggcgcggcggtcgtactggcggagctggatatcgaaacggcgcggcagacggcggagcagatcaagtcgcaaaccggtgcgcgtgcgctggccgtgcatacggacgtgacgcaatcggcgtcggttcagcacgcggtgagcgaggcggagcaagcgttcggcgcgctcgacgtgctggtcaacaacgccggcatcaacgtgttctgcgatccgctgacaatgaccgacgacgactggcgccgctgcttcgcggtcgatctcgacggcgtatggaacgggtgtcgcgcggtgttgccgggcatggtcgaacgcggcgcgggcagcatcgtgaatatcgcgtcgacgcatgcattcaagatcattccgggatgctttccgtacccggtcgcgaagcacggcgtaatcggtttgacgcgcgcgctcggcatcgagtacgcgccacgcaatgtgcgggtcaacgcaatcgcgccgggctacatcgagacgcaactgacgcatgactggtggaacgaacaagccgatccggccgccgcgaaacaggcaacgctcgatctgcaaccgatgaagcgcatcggccgcccggaagaagtggcgatgacggcggtgtttctcgcctcggacgaagcaccgttcatcaacgctacctgcatcaccgtggatggcgggcgctcggcgctgtatcacgactgaa

SEQ ID NO: 203984 - DNA, 735 bp, Unknown
  Bacterial polypeptide expressing nucleotide sequence isolated from the Sargasso Sea
tatgactaaaaggttaagtaaaaaagtagcattggtaactggcggagcttctggctttggaaaagcgacagcagagttattcaagagagagggcgctgaggtttatatttcagatatcaatgagcaaaatggcaaaaaagtctctaaagagctgggggtagtttttatatcccacgacgttaccaaaacggaagattggataagtgtcattgatgaaataaaagaacaatcttcgggattaaatgtacttgttaacaatgccggcataggtttcatggctgatgtagaagcaaccacggaggaagagtgggaattggtacacaaagttgatctcgattccgtatttcttggatgcaaatatgccattccgctcatgagagagtctggcaatggctcaatcatcaatatttcgtcaatttctggcattgttgctggacataattttgcagcctataacagtgcaaaagctgcggtgagacacttaaccaagtcggtggcacttcattgtgcgagaagcactgatttagtcagatgcaatagcgtgcatccagtttttgctcaaaccgagatgatgaaagcattttttgaaaatccaaatgaggagcttgtctccaaaatagagagacaaattcccgtcagaaaattagtgaccgttgaagatgtagcaaactcaatcctattccttgcgagcgatgaatcaaaaatgatcacaggatcagagctggtgattgatgg

SEQ ID NO: 203985 - DNA, 739 bp, Unknown
  Bacterial polypeptide expressing nucleotide sequence isolated from the Sargasso Sea
attgtttgatttagatggtaaaaaggcactgattactggcgcaagtggtggcattggtaaagagatagcaaaagttttaattaaacataatgctcaggtttgtatatcaggaagaaaccttgatgagttaaatgcgcttaaagaattgcttggagagaaatgccatgtagttgcttgtgatttaagtaaaaaagatgaaattataaaacttattaaaaaaactgatgaatttttaggtcatattgatattcttataaacaatgcagggataacaaaagataatatttttcttcggatgtctgaaaacgaatgggaagatgtattaaatgttaatcttaattcaacatttagtattcttaaattaattaccaaaggcatgattaaaagaagatatggaagaattataaatatttcatcagttgttggagtaactggtggtgcaggccaagttaactactctgcatcaaaagctggtttaattggtctaacaaaatctttatcccaagaagtggcaacaagaaatattacagttaactgtattgctcctggttttatagaaactcctatgacagaaaaattagatgataaaagaaaagatacaattcttaattcaattcctatgaacagaattggcagaccagaagatttatcttctgctattatttttctagccagtcaagaatcaagctatataactgggcaaacaatacacattaatggcggtttatatatgaattaa

SEQ ID NO: 203986 - DNA, 1966 bp, Unknown
  Bacterial polypeptide expressing nucleotide sequence isolated from the Sargasso Sea
atgaaaaaaacaaaaatcgatcattacacagataaagaagctttagattttcataaagacaaaaaaccaggcaagattgagattatttcttcaaaaaatatgacaactaagcgtgatctcgctttagcatattctccaggagttgctgctcctgtaaaaaaaataagcgaaaacccggaagcagcttatgattacacaagtaaaggaaaccttgttgctgtaataagtaatggttcagcaatactagggatgggaaatttaggtgctcttgcatcgaagcccgtgatggaaggaaaggctgtactatttaaaagatttgcagatatcgattcgattgatttagagattgattgtaaagattcagaagaaatcataaattcaattaaaaattttgcacctagctttggtggaataaatttagaagatatagcggccccagattgttttataatagaacagaaattaaaggaaattttagatattcctgtttttcacgatgatcaacatggaacagcaattataacaaccgcagcattaattaatgcgttagatatttgtggtaaatcaataaaaaaaattaaagttgtagttaatggtgctggagcttcagcacaagcttgtactgagttatttaaaaactcaggagtaaaatctgaaaatataataatgctagacagaaagggtgttatttatgaaggaagaactgagggaattgatcaatggaaatccagatatgcagttaaaactaaacatagaactttagaagatgctgttaaaggtgcagatgtttttttaggattatctgcaaaaggtgttctaaaaaaagagatggttaaatctatggcaaaaaatccaattatatttgcttgtgctaatcctgatccagaaattacccctgaggaaattaatgaggttagaaatgatgcaattgttgcgacaggaagatcagattatcccaatcaagtaaataatttaattgggtttccttacatttttcgaggagctttagatgttagatccaaaacgataaatgaagaaatgaaagttgctgcagctaatgcaattgctaagcttgcaagagaagatgttcctgatgaagtggttgcagctatgggtggagaaagacctcattatggaaaagattatattattccatctacatttgatccaagattaattagtgtaataccagcagctgtagcaaaagcagctatagatagtggagtagctagaaaaaatatagatgattttgatgtttataaagatcaactaaaacaaagactagacccaacagtaaccatcatgcaaggtataaattcatttattaagaaaaatcagaaaagaattgtttttgcagatggtgaagatgaaaatactttaaaggccgctatagcattcaaaaattcaaaattaggtattccaatcttggttggtaaagagagtaaaattaaagaacagattaaaaatattggttacagtgaaaattttgacattgagattgttaactcaaaagatgaagaaaaaagaaaaagatatgtaaaacatttatttgaaaaattgcaaagagaacaaggattattagaacgagattgtgacagaatgattagaaatgatagggttgtctgggctactagtatggttgcctgcggtgatgctgatggtgctgtaacaggaaatacaagacgatttggtgcttcacttgaaaaaattaagcaagttgttgatgtgagaaaaggtgaaataatgttcggtttaaacatgatcgttcataaagggagaactatttttgttggtgatacaagtgtccatgaatatccaacttctgaacaaatggctgaaattgctatatctacagcaagagtagttagactttttggatttgatcctaaagttgcttttgtatcccactctacatttgggcaacctcttactagtagaacaaaacatattcgaaaccgcggttgag

SEQ ID NO: 203987 - DNA, 421 bp, Unknown
  Bacterial polypeptide expressing nucleotide sequence isolated from the Sargasso Sea
atgaaagttgcggttgtaactggtgcagccaggggcattggattagccatttcaaagaagttccttgaagaaggttaccgagtcgccattttggacattgatcaaaaaacgctttcacagacgatgaagcaggattttgatacctacaacgttcttggactcgaatgtaatgtttcagaacccgatcaggtcgatcaatccgtcaaccgagtggtcgaacagtttggaggtattgatgtcctggtcaataatgcaggcatagccgagtttaagccgatgcttgaaacttcatacgaggaatggtcacgtattcttgcagtcaatctcaatggtccattcatctgcactcaagcctgcgcgccattcatgctgaaaaacgaaggaggtagtattgtcaacattgcttccatttctggacttc

SEQ ID NO: 203988 - DNA, 1192 bp, Unknown
  Bacterial polypeptide expressing nucleotide sequence isolated from the Sargasso Sea
cgtcgcgggtggtggattcgatccccaacacgtgctcccggtcgtcctggacgtgggcacgaacaacccggatttgttgaacgacccgtattatctcggaagtcagcacgcgcgtctggagggccaggagtacgacgacttcatcgaggagtttattcgcggcgtgcgcaaccgctggccgaacgcgttgattcagtttgaagatttccaaaccaagcacgcgaatacgattctcgagcggtatcgccgcgacgcgctgtgcttcaacgacgacattcagggcaccgcggcggtggtgctcgcgggagtgtacggggcgatgaaatgcttgggcggtcatcgaaaagacatcaccaagcaacggttcgtcgtggcgggcgcggggagcgcgggatgcggcatcgcgacgtttttgcaccaagccatggtggcgcagggattatctccagacgaggcgtacgcgagattcttcatcgtggataaagacggtctgatcacgaacgaacgcgcgttggacggacccgggagtgaacctctgcgcggtttcgttcgaaaccgcacggatttaccggacggttcgtcgctcgtggatgtcattcgggcggcgaaaccgacgacgctgctcggcgtgtcgactgtgaagggattattcacggaggaggtattgcgagagatgggtaagatcaacgagcgtccgataatcatgcctctgtccaatcccacgtctcgcgccgagtgcaccgccgaggaagcggcgcgagcgacgggcggccgcgccatcttttccgcgggatctccgtttgaagacgtcgagatcgacgggcgcgcgatgaaggcgaatcaagggaataatttctacgtctttccgggactcggtctcggcgccgtgctctcgaaatcgcgcgtcatctcggacggtatgcttcaagcggcggcgctggccattcctaacatgttgacgtctgctcaatacgaatccgggacgattttcccgtccatcgacagaattagagatatctccgcctacgtcgccgtgaaggttatcgaagccgccgcgcgcgaggggcgcgtgccggatgagattcgtcggttggtcgccacgggggaagacgccatcagcgagtacgtgtactcgaccatgtacctcccgacgtatcgaccgacggtgttttcgtgctcgagtcgcaagtaa

SEQ ID NO: 203989 - DNA, 313 bp, Unknown
  Bacterial polypeptide expressing nucleotide sequence isolated from the Sargasso Sea
catggagctagagcttgccggaaaaaaagttattgttacaggtgcgagtagagggattggtcttgctattgccagtgagtttgcaaaggagggtgcttctgtttctatctgtgcgcgtggtcgtgatagtcttgacactgctcgagagattgttgcagctcatggcggtaatgtacatgcggaagtctgcgatgtgtcagataaaaaaaatcttatagattatattgaaaatgcagttcgacactttggcggtctcaatgttctagttaataatccatctggtttcggtagaagcgacaatgaggacggatgg

SEQ ID NO: 203990 - DNA, 3097 bp, Unknown
  Bacterial polypeptide expressing nucleotide sequence isolated from the Sargasso Sea
atgggaggtggtgtttcaacaggagatattaataatgatggtttagtagatatttattttactggtaatatggttgataataaactttatctaaataaaggtaatatggtatttgaagacataacagattcttctggtactaaaggagaccttagatggtatacaggttcaactatggtagatattaataatgatggattgttagatatatattgttcagttggcgggaagtttagccctaagaataatgaattatatataaataatggagataatacatttactgagtcttctaaagaatatggaatagatgatattggaagcagcgttcaagctactttttttgattatgataaagatggagatctagacctttatgtagccaactatcctcccactcctttcgatgctcctaatacctattattactataaaatgcaaaatgttaaagaccaggaatcagataatttatatagaaacgataacggatcttttacaaaagttacagatcaagcaggcttaagatcttttggtcttacactgagtgctacaattggagatattaataatgactcttatccagatatttttgtttcaaatgactttagctcacctgattatatgtatataaataatcaggatggaactttttctgatataataaaggaatcaactagtcaaacttctttttatgggatgggagctgatattgcagattttaataatgattttaaccttgattatattcaagtagatatggatgctagagacaatagaaggtcaaaggcaaatatggctagtatgaatattgatctattttggagtactgttaattatggatttcactatcaatatatgcacaatactcttcagttaaatcgtggagtatttaatggtaaaaacccattcttcagtaatgtatctagattatctggaatatcatctacagattggagctgggggcctttgtttgcagattttgataatgatggatggaaagatatttttatctctaacgggacaagaagggagataaatcatagagactattttaatgaattaaaacttagacctatggcaaaagacagtcttctttattattcacagaatatcccatcagaagctatttctaattttatattccaaaataataaagatcttagtttttctgatgtaacagaagaatgggggttagactataaaaacttttctaatggaactgcctatgctgatttagacaatgatggagatcttgaaataatagttaataatattgatcaagaagctcaaatatttaataataactcatcatataactatattaaaataaaacttaaaggttctgatttaaatccatttgggattggtgctagggtttttgttaagtcaagtgacttaaaccaaatgcaagagatgaccctttcaagaggttttcagtcttcagtatccccagaattccattttggattatcggataatactagtatagacctaatatctattgaatggccaaatggtaattactatgagttagctaatcctgagattaatcaattgattacgcttgacattaatgattcttattccaatgaaaaaactaattctaaaaatgataaactactctttgtttcagaagagatagtcgaatataaacatatagagaacgattataatgattatgaaaaagaagtattactacctcaccagaattctagattaggtcctggcatcgcaacaggagatattaatggtgatggtttagatgacctagtaattggaggagctaaagatcaatctacatcattttactttcagttaaataatggaaaatttagaaataaaacatatagctttttaaaacaagatagtgtatatgaggatatggatatacttctatttgatgctgataatgatggagataatgattgttacattgtctctggaggaaatgaatttgaaatagactctccaaatctattagataggctttatataaatgatggaaaaggcaatttcactaaatctaataattctattccattaaattattcaagtggtatgagagtatcagctaatgattttgataaagatggtgacatagacctttttgtaggaggtagagtagttccaggtagctatcctcttcctgctgagagcaaacttcttattaatgaatccaatgctaatcaagtgaaatttgtgaacgcagatagctctattttcccttttagtgatattggtctagtctcttcttctgtttggactgattacaataacgataactgggatgatcttatagtagttggagagtggatgccaataaaattttataaaaatattgaagggaagtttgtagaagacacatcattaattgactctgaatcaacaaacggatggtggtatgatgttatttctgaagattttgataaagatggggatatggacttagtagttgggaatctaggaaataattataaatatcaagcatctgaagaagaaacctttgatatatactataatgattttgatcaaaatcagagtggagatattgtattaagttactataatgatggtgataaatatccattaagaggaaggcagtgttcttctgaacagatccccgctattaaaatgaaatttcaagattatgatgccttttcaatagctactttagaagatgtatatactgaacctgctcttgaaaactctcttcattattacgctaaaacattttcaagtgtttatcttgaaaatacaggagaaaagtttgtgatgaataatctacctaaatattctcagctttctgctataaataagatactagccaaagatcttgataatgatggctataaggatataatagtctcaggtaatatgtataactcagaagttgaaacacctagaaatgatgctagcgttggcttactaatgaactatacaaaagagaatggttttcaagctattccatcaaaagaaagtgggctttttgttaaaggtgatgtcaaagacatggagtttataaaaattggagatatagattatatagtttctgcaaaaaatgatgattaccttgagtttacaagaataaataagtaac

SEQ ID NO: 203991 - DNA, 748 bp, Unknown
  Bacterial polypeptide expressing nucleotide sequence isolated from the Sargasso Sea
aatggaattattaaataaaaaagttattgtaacaggtggtgcctctggatttggtctaggaattgtaaaaaaatttttaaataatggtgctaaggtagtaattgcggatcaaaacaaaactttagctgatgaacaggcacaaaaattaggaagtaatgcattttcgattgaaacagatgtatctaatgaggaaagcatcgagaacttaaagaaacagacaaaacttactattggatatccagatatattagtaaataatgcaggcatcacacactttcctgattttgtagaaaatatttctttagatgaatttgaaaaagtattgaatgtaaatgtaaaatcagtttttctgataacaaaagcttttatcccaaagatgaaagaagctaaatctggtataattttaaatattgcctctactgcaggaattagtcctagaccgaaattaacatggtataatgcaactaaaggatggatgattactgcgactaagtcactggctgtagaactcgcgccatataatataagagtgaatgcaataaatccagttgctggagaaacacctttattgaaaaaatttatgggagaagatacgcctgaaattcgtgcaaaattcttatcgacaattccattgggtcggttttcaactccagaagatatggggaatgctgcagtttttttatgctctgaaaaagcaaatatgattactggtgttgctttagaagttgatggcggtagatgtatatag

SEQ ID NO: 203992 - DNA, 712 bp, Unknown
  Bacterial polypeptide expressing nucleotide sequence isolated from the Sargasso Sea
tatgaaagtagctttagtaacaggggctagtagaggaattggtcaagcaatttcattacagttaaaagatgatggttatagggtactaggaactgccaccacttcatcagggataaagagtttaaaggacaaaggaatagaaggtttagagcttgatttaaattctcccaattctaaagaaacattttggcaagaaattgaatctagagaagtcaatatctctattcttataaataacgcaggaataacaagagataacattgtacttagaatgtcagataatgaatggcaggacattatgaatgtcaaccttaatggaactttttacttaaccaaaaaaattctaaaaatgatgctcaaattaaaatggggaagagtgatcaacataacctcgacttctgcatcaataggaaacaaaggccaatctaactactcagcagctaaagctggtgtagaagcattcactaagtcacttgcaagagaagtgggtaaaagaaacataacaataaactctatagctccaggctttatatctacagatatgacagagcaaaatgatgcagtaaactcgcaagatttaataaatgaaataccattagggaggtttggcaaaccagaagaagtagctcacctggcttcttttctctgctcagaggaagcgtcttatattactggacaaatcttacatataaatggtggtttatatatgtaa

SEQ ID NO: 203993 - DNA, 277 bp, Unknown
  Bacterial polypeptide expressing nucleotide sequence isolated from the Sargasso Sea
aatgaatttaaaaaataaaaaagtcttaattactggtgctacaggtggaataggaaattctttattacaaaaatttagtgaactcggagcttctatacttgctactgggactaacgaagaaaaactggcaaatataaaaaaaaattatccgaaaatagaagtagaaagttttaaacttcaagaacatgataaaatagaaaaatttatcgaaaatgtagaaaaaaaattggatggattagatattttagttaataatgctggtattacattagataac

SEQ ID NO: 203994 - DNA, 2272 bp, Unknown
  Bacterial polypeptide expressing nucleotide sequence isolated from the Sargasso Sea
catggacgaacaactgaagcaggccgcactcgcttatcacctgaacccgaaacccggcaagatttcggtcaccccgaccaagccgctgtcgaaccagctcgatctgtcgctcgcgtattcgccgggcgtcgccgctgcgtgcgaagcgatccacgccgatccgctcgacgcgcagaagtacacgtcgcgcggcaacctcgtcggcgtcatcacgaacggcaccgccgtgctcggcctgggcaacatcggcccgctcgccgcgaagccggtgatggaaggcaagggctgcctcttcaagaaattcgcgggcatcgacgtgttcgacatcgaactgtcggagtccgaccccgacaagctcgtcgaggcgatcgcgatgctcgagccgacgctcggcggcatcaacctcgaggacatcaaggcgccggaatgcttctacatcgagcagaagctgcgcgagcgcatgaagattcccgttttccacgatgaccagcacggcaccgcgatcatcgcgtcggccgcgatcctgaacggcctgaaggtcgtcggcaagaagctgtccgaagtgaagctcgtgtgctcgggcgcgggcgcagcggccatcgcgtgtctggacctgctcgtgaacctcggcctgacgaagtcgaacatcctcgtcgccgattcgaagggcgtgatctacgaagggcgcggcaacctcgatccgtcgaagcagcgctatgcggcgaccaccgacgcacgcacgctcgccgacgcgatcgtcggcgcggacgtgttcctcggctgctcgagcgcgggcgtgctgaagcaggacatggtcaagacgatgggcgacaagccgctgatcctggcgctcgcgaacccggaaccggaaatccgcccggaagacgcgaaggccgtgcgtccggacgcgatcgtagcgaccggccgttcggactacccgaaccaggtcaacaacgtgctgtgcttcccgttcatcttccgcggcgcgctcgacgtcggcgcgacgacgatcacggaagaaatgaagctcgcgtgcgtgcgcgcgatcgccgagctggcgcaggaaaccgaccagagcgaagaagtcgcgaaggcgtatgaaggccactcgctcgaattcgggccggactacctgattccgaagccgttcgacccgcgcctgatcatcaagatcgcgccggccgtcgcgcaagccgcgatggactcgggcgttgccacccgcccgatccaggacatggacgcgtaccgcgagcagctcggcgcgaccgtctaccgcaccggcatggtgatgcgtccggtgttcgccaccgcgaagcagaagcaggcccgcatcgtgttcgccgagggcgaagacgagcgcgtgctgcgcgccgcgcagttcgtgctgcaggaaaagatcgcgaagccgatcctcgtcggccgtccgtcggtcatcgacatgcgcctcgcgaagatcggctcgaagctgaaggccggcaccgatttcgagatcgtcgacccggaagacgatgcgcgctaccaccgctactggcaggcgtatcaggagatcggcgcgcgcgacggcgtgacgccggaagtcgcgaaggccgcgatgcgcaagttcaacacgctgatcggcgcgatgctcgtgcatctgggcgacgcggacgggatgatctgcgggatgatcgacacgttccacagccacctgaagttcatcgaacaggtgctgggccgtgcgaagggcgccgagcacttcgcggcgatgaacctgctgatgctgccgggccgcaacctgttcgtgtgcgatacgtacgtgaacgaactgccgagcgccgaacagctcgccgacatgacgatccaggccgcggccgagatcgagcgcttcggcattgcgccgaaggctgcgctgctgtcgaactcgaacttcggcagcgcgccgtcggcgtcgtcgcgccggatgggcgaggctcgcaagctgatcgtcgaacgcgcaccgaacctggaagtcgatggcgaaatgcacggcgacgcggcgctgtcggagctgatccgcaagcaggcattccccggcacgacgctgtcgggtgaagcgaacctgctgatcatgccgaacgtcgaagcggcgaacatcgcgtacaacctgctgaagatggtcggcggcgaaggcgtgacggttggcccgttcctgctcggcgcggcgaagccggctcacatcctgacgccggctgcgaccgtgcgccggatcatcaacatgacggccgttgccgccgcgaacgtgaacacgaagtaa

SEQ ID NO: 203995 - DNA, 955 bp, Unknown
  Bacterial polypeptide expressing nucleotide sequence isolated from the Sargasso Sea
ggtatttttccatcaatactaggtcatgagggagctggaattgttgttgaagtaggtgaaggagtaacctcattaaagaaagatgatcatgttatacctttgtacactcctgaatgtcgtaaatgtaagttttgtttatccggtaaaacaaatttatgccaagctatccgtgaaactcaaggtaaaggattgatgccagatggaacttcaagattttcttataaaggaaaaactttataccattatatgggcacatcaacatttgcaaattatacagttgttccagaaattgccttagctaaaatacgagaagacgcacctgcaagtaaagcttgttatattggttgtggtgtaaccactgggataggtgccgtgattaatactgctaaagttgaagaaggtgcaacaactgttgtttttggcttaggtggaattggtcttaatgttattcaaggatgtaagttagctaaagcaagtgttattgttggtgtagatttaaatccagaacgtaaacaaattgcagaaaaatttggaatgacacattttgttaatccaaaagattatccagataacaaattacaagaaaaaataattgaattaaccaatggtggtgctgattatagttttgaatgcattggtaacgtaaatgtgatgcgtcaagcattagaatgttgtcataaaggatggggtgaatcaattattattggtgtagctggctctggtcaagaaattgcaactagaccatttcaattagttacaggaagagtttggaaaggaactgcttttggtggagcaaaaggaagaacagatgttcctaaaattgttgattggtatatggataaaaaaattaatatagatgatttaattactcatgagtttgctattgaagatatcaacaaagcatttgatttaatgcatgaaggtaaatcaataagaagtgtaattaatttctaga

SEQ ID NO: 203996 - DNA, 748 bp, Unknown
  Bacterial polypeptide expressing nucleotide sequence isolated from the Sargasso Sea
ttgtttgacctatcaaatagaattgcaattgttactggcgctagccaaggtataggtaatacaattgcaaaagttctggcacattcgggcgcccatgttatatgcatcgctagaactgaggaaaaattaaaagatataacaaatcagatcaaggattctggtggctcagctgattatatttcttgtgacataagtgatggaagtcattttacaaattcaataaaaacagtgataaagaatcatgagaaattagatattcttatcaataacgctggtattacacgtgatgcattacttatgagaatgaatgaaaaacaatgggatcaggtgataaataccaatctcaaagctgcattcattggtatgaaggctgctataaggcccatgatgaaaaataaatttggaagaattataaatataacctccatagttggaattacaggcaatccagggcaggcaaattattctgcttcaaaagcaggattgattggtatgacacaatctattgctaaagaagtaggtactagaggaattacggttaactgtatcgctcctggatggattgatacagaaatgactatagatctgccagaaaacggtaaagaagaattattaaatagaattcctattgggaagattggtaagcctgaagatattgcatatgcagcactctttctagcatccaatgaagcaaactacatcaccggccaaaccattacagttgatggtggtcgagtcataaattaaa

SEQ ID NO: 203997 - DNA, 859 bp, Unknown
  Bacterial polypeptide expressing nucleotide sequence isolated from the Sargasso Sea
atgactgtgacactggtgaccggcgcaaactctggtctcggccgagcaaccgctctgctattggcccaaaaagggcacaaagtatatgcgggtatgcgaaacgtcgagaagggcgcgaaacttcttgaactggccgagagttacgacctttccgctattgaaatcgacgtggctgacaacgattcggttcttagctgcgcagaacaaatcaaggccaacggtgacactgttgacgtactggtgaataacgctggcattgcgctcaactcagtcactgaagacatcgatatcgataaggcgaaagaggttatggaggtcaacgtctgggggcctgtcagatgcgtgaaggcattcgttccaggcatgagagaacagggctcagggcatatctttcaggtctcatcgatagcgggcttgattggccacattggtcaaacagtttacgtggggtcgaagttcgctctggaaggcatgagtgaggctctagctcaagagctcattagtttcggaatccgagtgcacatcgtggagccgggtgtcacccgcaccgctattttgcccaaaaacgaggggaatcctgtccccactgcctatcaggatcactacgaccgcatgttccagttttataccgccggtatcgaagcagcagtgcaagccgaatcatttgcagaaactatttacggggccctaaccagcgacgaataccagttgcgttacgtgtgtggctggggcggaaaagaaattggtgaccgtcataaaacaatgagcgacgaagagtttgttgagatggggtcactggtgtcatccgcggaagagtacggtctcgcgttcttcgaccttttcggcctgcgtatctgag

SEQ ID NO: 203998 - DNA, 553 bp, Unknown
  Bacterial polypeptide expressing nucleotide sequence isolated from the Sargasso Sea
atgtcaaaaatttctattatcggagcagcaggaacggtaggctcttcatttggatatcatttagcagttcaagccatagcagatgaaatagtatacgtcgatattccctcgaaacactctttcacggttggacaagcagaagacacaaaccacgccctggcctatcattctgacaccaatgtctcttgcggggactattcagacacagaaaattccgatatcatagttatcactgctggaaaaccaagacaacctggacaaactagaatcgacctagccgctgataatattgccattttggattctattattaattcccttttagaatacaacgacgattttatatcgattataacaaccaatcctgtagatttactaaatcgacatgtattcgaatcgggtgaccgcccccgggaaagcgtactagggtttggtggtattctcgattctgcacgattccgttacacactttctaaaaaactttctctccctgtcactgacatcgacgcaacaattttaggtgaacatggtgattctcaagtgcctatttttt

SEQ ID NO: 203999 - DNA, 757 bp, Unknown
  Bacterial polypeptide expressing nucleotide sequence isolated from the Sargasso Sea
atggcccaccccatcgcactcatcaccggcgccagccgtggccttggcaaacaggcggcgctggcactcgccgctcgcggcgtcgatctcatcatcacctatcgcagtcaggccgatgaagcggccgccgtggtggccgaggcgaccgcactcggcgtcaaggcccacgccttgcccctcgatgtggccgacagcagcagctttgccgccttctcccaccaggtgcgcgagcaactgagtgcatggcagcgccagcagatcgattttctggtcaacaacgccggcatcggcattcacgcgaccatagaacagaccaccgaacagcagttcgataccctgttcaacattcacctgaagggggtcttctttctgacgcaacagctgctgccactgatccgcgatggcgggcgcatcctcaacctgtcgagcgggctcacccgctttgcgctgcccggctatgccgcctatgcggccatgaaggggggtgtcgaagtgctgacccgctatctggccaaggagctggggccgcgcggcatcgccgtcaacgtggtggcgccaggggccatcgaaaccgactttggcgggggtgtggtgcgggacaatcaggtcgtcaacgacttcatcgccagtcagaccgcccttggacgggtgggccagccggaagacatcggtggcgtgattgccgccctgctctcccctgacagccgctggatcaatgcccagcgcatcgaagcctcgggcggcatgttcctctaga

SEQ ID NO: 204000 - DNA, 515 bp, Unknown
  Bacterial polypeptide expressing nucleotide sequence isolated from the Sargasso Sea
gaaaatagatatattggttaacaatgctggtataagtagaagaagtgatgagcctcatctattatctaaaaatgattgggacgatgttattgatactaacttaaattcaattcatcatatgacttctgctgtgttcccacacttaaagaaaaataaatcagggaaaatcataaatataggttcgatgatgtctatttttgggaatgcaaattctgcagcttatgcagcaagtaaaggtggtgtagtgcaatatacaaaaagctgtgcaattgcttgggctaaatataatattcaaatcaacactatacttcctggttggatcgtgacagatatgacaaatgaatttaaaaaagtaaatccaaaaagatacgctacgattgcagggagaacgccagcagaaagatggggattacctgaagatatggcaggtactgctatttttctttcaagtaaattttcagattttgtaaatggagtatctattcctgtagatggtggttatagtgtaatgtaag

SEQ ID NO: 204001 - DNA, 2203 bp, Unknown
  Bacterial polypeptide expressing nucleotide sequence isolated from the Sargasso Sea
acctggaaaaattgcaatatctgcaacaaaaccaatggaaacacaatctgacttgtccttagcatattcgccaggggtggcggcacctgttattgcaataagtgaaaaaccagaaactgtatatgattatacttcaaaaggaaatttagtagcagtcatatcaaatggttcagccattttaggattaggcaacttgggttctcttgcggccaaacctgtaatggaaggtaaagctgtgctatttaaaagatttgcagatgttgatgctatagatatagaaattgattcagaagatgctgaaattttttctacaacagttgaaaaaataggtagaacttttggcggaataaatcttgaagatattagtgctccagattgttttattatagagagcgagcttagagaaaaattagatattcctgtttttcatgacgatcagcatggaacagctataatttcaactgcaggcattataaatgcactagacctgactaataaaaaaatagaagatgttaaagtcgttgttaatggagcgggtgcagcaggaatagcttgcctcgaactacttaagtctatgggattacctcacgaaaatgctattttatgtgattcaaaaggtcctatctatattggtagagatgaaaatattaaccaatggaaggcagcacatgcaattgatacagatgcacgatctttagcagatgcaatgagaggttcagatatatttcttggtttatctgttaaagatgctttaactcaagaaatgctcaaaactatgaataaggatcctataatttttgcaatggcaaatcctgatccagaaatagatccaaaattagcaagagaagttaggccggattgcataattgccactggtagatcagattaccctaatcaggtaaataatgtcttgggctttccttatatctttagaggcgcattagatgtcagagcaaagacaattaatgatgagatgaaaatagcatgtgcagaagcattggctaaacttgcaagagaggatgttcctgatgaggttgcagctgcttactctggtattagaccgcgatatgggcctgattatattattcctgctccatttgatccaagattaattagagatattccgcctgcagttgctaaagctgctcaagagtcaggtgttgctagaatgccaatcgtagatgaagatgcctacaaaaacagattatcagcaagattagatcctgcagcagaagtaatgcaaccgatataccaaaaggcaaaaagattgatgaaaagagttgtttttgcagaaggtgaagaagaaaaagtaatacgagcagcattaaacttcagagagcttggcttaggtattccagtattagttggaagaaaagaaaaaattgaaaaatctttatcagaaattggtcaacaacttcactcaggtattgaaatagtgaatgctgaaatttcagaaaaatcagatgaatatgctaactatttgtactcaaggcttcagagaagaggtgttttaacaagagactgcttgaggatggttaataatgatagaaatatattttctgcatgtatggtatctttgggctatgctgatgctatggttactggggtaacaagaaattactctcttgctcttgaagatataagaaaagtaattgatccagctgaaaacaagagaatggttggtatttcagtaataatatctaaagaaaaaacagttcttgtaggtgatactaatgttcatgatatgccaagtgcagaggaaattgcagacattacacaagctggagcagatttagccaggaaacttggcttggaccctcatgctgctcttcttgcatattcttcttttggttatccggaaggtgagcgctcaacatttatgagagaagcagttgatatacttgataagagaaatgtagattttgaatatgatggagaaatggcagcagatgttgctctaaatcctgaagcaatgaaactttacccattttgtagattgactgagccagcaaatgttttaattatgccagcaattcattcggcatcaatttctacaaagttattacaagagcttggaggagcaactttagtaggacctcttctagtagggctatcaaaaccagttcaaattgctccaacaggatgtactgtttctgaactcgtaaacctagccactattgcagcatgtgatatgggtaattaa

SEQ ID NO: 204002 - DNA, 1375 bp, Unknown
  Bacterial polypeptide expressing nucleotide sequence isolated from the Sargasso Sea
aaggaaaagcgattttggtttaaaagatttgctgatattaattccattgatattgagattgattcaacggatccagtgaaaattataaaaagtattaagaatattgcaggtagctttggtggaataaatttagaagatatagcagcacccgactgttttgttattgaagaaaaattaaaaaatttattaaacatcccagtatttcatgatgatcaacacggaactgcaataataacgaccgcagcattaattaacgcacttgatatatcaaaaaaatcaataaagaaaattaaagtagttgttaatggggctggagcatcagctatagcttgtacaaatttgttaaaaaaaactggtgtaccaaaaagaaatataacgatgcttgatagcaagggaataatataccaaggaagaaaaaaacttaataaatggaaatcagctcatgcaattaaaacaaaaaaaagaactctagatgaagctatagatggtgctgatgtttttttaggactatcttcaaaaagtattttgtctaaaagtatggtaaaaaaaatgtcaaaaaatccaattatatttgcctgcgcgaatcccgatccagaaataacacctgaagaagtagaaatggtaagaaaggatgcaataattgcaacaggaagatctgattacccaaatcaagtaaataatcttattggtttcccatatatatttagaggtgcattagatgtaagagctaagacaattaacgaagagatgaaagttgctgctgcaaatgcaatagctaacttggctcgagatagagtgcccgatgaagttgtggctgcaatgggaggcgatagaccaacttatggaaaagattatattataccatctacatttgatccaagattgataagtgtaattcctatagcggtagcaaaagctgcaattaaaagtggagttgcaagaaaagtaattaaaaattttaatatttatgctgaccaattgaagcaaagattagacccatcagtaacaatcatgcaaggaataaacactcaaataaaaaaatcacaaaaaagaattgtttttgcagatggagatgatgaaaatactttaaaagctgctattgcatttaaaaaaagtggattaggaattccaattttagttgctaaagaaaaaatagtaaaggcaaagcttagagaaattggatatagtgaaaactttgatattcaaattgttaactctaaatcaaaggataaaagagagaaatatttaaaatatatttttaaaaagcttcatggagataaaggtgagcttgatccagatatttacgaaatatatttgaaagattgtgataaaataataagaaatgatagagtagcatgggcttcatgcatggttt

SEQ ID NO: 204003 - DNA, 916 bp, Unknown
  Bacterial polypeptide expressing nucleotide sequence isolated from the Sargasso Sea
catgattacaataattggagctggaaaagtaggcggagatgctgcattatttactgcattaagaagattagatgatgaggttctacttctagacattgctgaaggacttcctcaaggagaagcaatggatctaaaccacatgttgtcagaacaaggaatcgatgttaacgtaaaaggctcaaataattatgaagatatgaaaggttcaaagattgtggttgttgttgcaggagcaggaagaaagccaggaatgacaagaatggatttattaaaaattaatgccggagttgtaaaagatgttgtcggtaatattaagaaatttgcggatgatgcaatgattattccagtaaccaacccacttgatccaatggcacaaattgcatacaaaacatcaggatttgaaagaagtagagtgttcggaatgggcggaatgttagacttgtcaagatttaaacaattcatacatgaagcaacaggatattctcgtgaatcaacaaaggcattagtaattggtgaacatggcgaaaacatgttaccattaacaagatttgcaacagtttcaggaattccattgccaacaatacttactaaagaaaaactagatgagattttcactgcaacaaaaaatgttgctgcagaagttatcaaactaaaaggagcaacagttcatgcaccaggaaatgcaatttctgccatgattgaatctgttgtacaggacaaaaaacaagtaattccagtttcaactaatctagatggtgaatatggacaaaaagatgtttcaattggagttccggcagtgattggaaagaatggtgtagaaaaaatagtcgaactagaattaaatgatgaagaaaaagaatggttcaacaaaggcatagacagtgtaaaaagtgcactatctggcgttgaattttaa

SEQ ID NO: 204004 - DNA, 309 bp, Unknown
  Bacterial polypeptide expressing nucleotide sequence isolated from the Sargasso Sea
tatggatcttaataataaagttgctttggttaccggtggggcgtctggattagggcaagcaactgttgaaaactttgttgctgctggagcaaaagcagtaatcctagacatcaatgaagataatgcaaacaaaataatagaaaatcttggtgctgataaagtttccttcatctcgacaaatatcatggaggaagatccagttatatcagctataaataaaattaaagatgagcatggagcacttcatattgcagttaactgtgcaggtaccggatacccaggaaggattctaggtaaagaagcaccaca

SEQ ID NO: 204005 - DNA, 1090 bp, Unknown
  Bacterial polypeptide expressing nucleotide sequence isolated from the Sargasso Sea
atgaagacaggtgaattaattgtttcttcttttaatcgagaagagtgtaaattaggaattgttcatttaggtgtaggtaattttcatagagcgcatcaggctctgtatataaatgattatttaaataagtctggtgatctaaattggggaatttgtggaattatttacgaaaagaagagagagagaattttaattttcttaaaaaaaagagagggtaaatatattttaaaaactatttctactattggtgaagaagagtttttagaaataaactcaattaagaaattaattgattggagtgttcaaaaagaagaagccgaaaatattttgtgtgaacctaatatagaaattataactatgacggttactgaaagtggttattacatttcagaaaataatgagttaaatgtaaatttaaaaattgtagaagacaatataaataaaaaagaaaataccataattttttcttatttgttatctggattaaaaaaaagaatgaatacaattaataaagaaataacacttctttgttgtgataatattcgagaaaatggtattatgcttaaaaaagcattaaaagcatttgtagaaagttctaatgagttagatcttttacaatggattgaaaaaaaagtgagttttccgtcttgtgttgtagatagaatcacccctagagctccaaaatatttaaaaaaagaaattaaaaataaattttcaattgatgaagactgtagcgtaatggcagaaccttttatacaatgggttattgaagataattttattggagtaaggccaaaactagaggatgttggtgtaaaatttgtaaaaaatgtttttccctatgaagaagctaaaattagaatattaaacggtggtcatgtagcgttaagttatattggtgctttaaagggtcatactacatacgatcaagcaattaatgataaacaattacaacagtatttttttgaattagaaataaaagagattgttccagcattaggaaaagatattccttttgagcttgaagaatatatgatgataatttttgataggtttaaaaataagtatattggtgataaattagagagga

SEQ ID NO: 204006 - DNA, 1258 bp, Unknown
  Bacterial polypeptide expressing nucleotide sequence isolated from the Sargasso Sea
atggaacctctacctatgtcagattttcgagaacaggcgctgaagtatcacgccgagcctaaaccgggcaaaatcagtattgaaatcagtaaacccgctgaaacggtcagagacctcgctttagcttatagtcctggtgtagctgaaccagtacgtgaaatcgctaataatattgacgatgtctacaagtacacaggcaaaggcaatctggtggctgtgatcagcaatggcacggctattttgggtttaggtaacttaggccctatggcctctaaaccagtgatggaaggcaaggccttgttgtttaaacgttttgctggcctcgattcgatagatattgaagtcacacaccgcactaccgaagagtttatcgataccgtagccaatattgccgatacctttggtggtattaacctggaagatattaaatcacctgagtgttttgaaattgaaaaagagctgatcagacgctgcaacattccggtctttcatgacgatcagcatggcacagctattgtgacagctgcaggtttactcaatgcgttggaaattcagggcaaagacatccgtaaagtagtgattgtctgtttaggtgctggcgctgccgcaattgcctgtatggaactgctgattaaatgtggtgcgaaacgcgaacatatttatatgctcgacaccaaaggtgtgatccacactcgccgtaacgatttgaataaatacaaagagttgtttgccaacaataccgacaaacgcacgctggaagatgcaatggagggcgctgatgtatttgtgggggtgtcaggtcctgatgccttaccagcagaagccttaaagctgatggcggacaagccggtgatttttgcctgctcgaacccggatccggaaattaaacctgaactggcgcatgcccagcgtagcgatttaattatggcgacagggcgttcggattacccaaatcaggtcaacaacgtcttgtgtttcccctttattttccgtggagccttagatgtacgtgccaaggtcattaacgatgaaatgaagttggcggcagtgcatgcgattcgcgctatagccaaagaacctgtatctcaggcgatattaactgcagctcaagtagataaactggagtttggtgcggattatattattccaaagccaatggacccacgtttattatcccgtgttgcccgtgcagtggctgaagctgctgtggcatcaggagtggcgcgtttgccaatgcctgaaaactatatgcagtaat

SEQ ID NO: 204007 - DNA, 796 bp, Unknown
  Bacterial polypeptide expressing nucleotide sequence isolated from the Sargasso Sea
atgggcaaggttattttaatcactggaacttcttccggatttggaagaacaatagctgaaaaacttcactctgaaggatacactgtaattgggacatctagaaatgctgaaaaaattaactctgattatttaaccattaaacttgatataaatgactatgaagcatcaaagtctgaagttgaccagataataaagaaatatggcaaaattgatgttctagttaacaatgcaggaattaatattacaggacccactgaaacaatgaaaatggttgatattaaaagggtatttgatacaaatttttttagtcagcttaatctaatccaaacagtcttacctcacatgagatccaaaaaaatgggtttaataattaatattacttcaattgcaggatatcttggtcttccattttggagtgcttattgtgcatcaaaagcttcatttagagttattgcggaaagtttaaatatagaacttaaaaaatacaatgttaacgttgtaaatattgccccaggtgattataaaactgaaattttgaataataggagggattcaaacaatcctagttcttctccttattttcaagaatatgaaaaaatcattaaaagtgttaatgaaaaaatgaatcatggaagggacccgattgaagttgccaacttagtgttgaaaattattaaagaaaagaaaccaaaaattaactaccttgtcggtggatttcttgaaaagaaaattacattgaaaagtctattaccagataagctttttcagaaaataataataaaactatatagctaag

SEQ ID NO: 204008 - DNA, 1108 bp, Unknown
  Bacterial polypeptide expressing nucleotide sequence isolated from the Sargasso Sea
atgaaaacaaaagcagcaattgcagttaaagccggtgaagatcttgtcattgatgaattggatttagatggcccaggtgataatgaagtattggtagagatcaaagcaactggtgtgtgtcacacagatgcatttacattatctggcgatgatccagaagggatctttccttcagtgctcggacatgaaggcgctggtatagtaatggaagtaggcaaaaatgtgacttctgtaaaacctggagatcatgtcatacctctatatactcctgaatgcagagaatgtaatttttgtttgaatccaaagacaaacctttgccagtcgattagagaaacacaaggtcagggtctgatgccggatggaacgtcaaggttttctctgaatggtgaccctatatatcattatatgggttgctctacattctcaaattattcagtcatgcctgagattgcagttgcaaaggtaagagaggacgcaccatttgacaaaatttgctacattggttgcggtgtaacaacaggtatcggcgcggtagtttatgatgcaaaagttgaaccaggctcaaatgtcgtagtatttggattaggtggtataggtctgaatgttattcagggagcaaaaatggttggtgcaaataaaatagttggcattgatattaacgaatcaaaagttcctttagcgactaaattcggaatgactgactttataaatccaacaaaaacagaagatgtagtcgaagcaataattgatgtaacaaatggtggtgctgattattcatttgagtgtataggtaacatcgatactatgagacaagctctcgagtgttgtcataaaggatggggtgagtctgtaattataggtgttgcaggtgcaggacaagagatatcaactagaccatttcaattagtaactggacgagtatggagagggtctgcattcggtggagcaagaggtcgaactgatgtgccaagaattgtagattggtatatggatggaaagattaatatagacgatatgatcacacataccatgccacttgaagagattaatgaagcatttcacttaatgcataaaggtgagtcaataaggtcggttgtgttatattaat

SEQ ID NO: 204009 - DNA, 1111 bp, Unknown
  Bacterial polypeptide expressing nucleotide sequence isolated from the Sargasso Sea
atgaaaactagagctgccgttgcttttgaagctaaaaaaccattagagttattagaaattgatttagaaggccctcaagaaggcgaagttttagttgaaattaaagcaactggtatatgtcatacagatgcttatacattatcaggcaaagatcctgaaggtttgtttccttcaattatgggtcatgaaggtgcaggtatagtccaagaagttggaaagaatgtaaaaggtttaaaacaaggtgaccatgtaataccactttatactcccgagtgtagagaatgtgattactgcctaaacccaaaaactaacctttgtcagtctattagaaccactcaagggcaaggattaatgccaaatggaacaagtaggttttcttacaaaggtaaaacaatttaccattatatgggtacatcaactttttctaatttcacagttcttcctgaaattgccctagctaaaatcaatccttcagcgccttttgataaggtttgttatgttggctgtggagtgacaacaggcattggagctgtgattaatacagcaaaggctgaagcaggatgcagagcagtagtgtttggccttggtggtataggcttaaacgttattcagggattaaaactaattggtgctgaaatgattgttggggttgatttaaattcagataaagaaatctggggtaaaaaatatggaatgacgcactttattaatccaaaaaatgtagagggaaatttaactgatcacattgtagaggttacaggtggaggagctgattatagttttgaatgtattggaaatgttgaggttatgagaactgctctagagtgcgctcacaaaggatggggcgagagtattataattggtgtagctggctctggtgaagaaattagcactcgaccttttcagcttgttactggcagaacttggaaaggaacagcttttggcggggcgagaggaagaactgatgttcccaagatcgtagactggtatatggatggaaaaatagaaattgattcaatgatcactcacgctctaaaattcgaagacataaataagggatttgatttgcttcatcaaggaaaatcaataaggtctgtagttattttttaat

SEQ ID NO: 204010 - DNA, 814 bp, Unknown
  Bacterial polypeptide expressing nucleotide sequence isolated from the Sargasso Sea
tttgaaggacaaattaatactagtaactggttctggaacaggagtaggaagcggcatcgctagtacccttgctaaatgtggtgcagacgttgttgttcactataataacagtgaaaaggaagctgataaaacaaaagaaataatagattctttaggtcgaaaatgtaagctgataaaaagcaatttaaaagttgtagatgaatgcagaagaactgtagatgaagctgttacatttctaggtggtttagatgctcttgtaaataatgctggtataactatacctaaagatttcacagatattgatgaaagtcatttaaatgatattttctcccttaattttagaagttattttttttgcgcacaacaagctgtgaaacacttagtaaaaagaggcgaaaaattatcgggtaattacaaaaaatataattggccaggaggtagcattattaatatttcatcggttcacggtaaattgggtcatcctggtcattctgtttatgcatcaactaaaggtgctataaatagttttacaaaacaactttcagtagaattgatttctaaacatatacgagtaaatgcaattgctccaggcacaattgaagtcccaagctattttgaaaaagatccatcctacaatagggaatttggtgattctcttgtaccttggggtagagtggggttaccagaggaagttggttacctagcagcttatttggtctcagatttatcggaattcctgactggtgaaataattcacatggatggcggcttgacctctactatgaacttgaatacaaacaataaaaaagcttaa

SEQ ID NO: 204011 - DNA, 1402 bp, Unknown
  Bacterial polypeptide expressing nucleotide sequence isolated from the Sargasso Sea
atgaccgttagttactcaccccataatcccagtaacagtgttattgtccggctcagactatttaatgaagtcggtgtgctcaatcgtgtgacccagaaaatttcagatcttggaggaaacattggggcaattgacattgtccgtcctgagcccgatgccctgattcgggacatcaccatattcacccacaatccggaacatggtgaaaaactggtcgagggattaagggaaattgaggatgtagaattcatcaatttttcagacaggactttcctggcccaccttcaggggaaaatcgaaatcaataaccgactcccgctcagtacccgtgatgacctctccattgcttacacccctggagtcgcgagagtatgcacggaaatccataaaaatcctgaaaatgcttataagttgaccatcaaaggcaacacggttgcggtggtcacggatggaactgcagtattgggtctgggagatattggccccaaagccgcgatgcccgtgatggaaggaaaagcgatgctttttaaacagtttgcagacattgatgcctggccaatctgcctcgacaccacagacaccgaagaaatcatttccatcgtcaaagccctggctccaggctttggaggaatcaatttggaggacatttccgcaccacgttgtttcgaaatcgaggaacggcttcggaacgaactcgacatccctgtttttcatgatgatcaacatggcacggctgtggtgacgacagccgccttgatcaacgctctcaaactcgttcggaaaaaacccaaggacatcaaggtggttgtttcaggtgcgggagcagcaggaactgcctgttcaaaaatgatcatgcatttgggagtcaaaaatctgatcggatgtgacagtaaaggggccattcataatcaacggaccgatatcaatcaaagtaaacgatggtttgctgataacgccaacccggatcaggaacaaggatctttgaaagaggttctcaaaggtgcagatgtttttgtcggggtttccgcaccgaatatcctggatgctggagacatccgaaatatggagaaggacgccatcgtctttgccatggcgaatcccgatccggagattcttcctgaggatgccagaccggttgctgcagtggttgcaacgggtagaagtgattacccgaaccagatcaacaatgtactttgctttccggggatctttcggggggcacttgattgcagagcaaaaacaatcaccgaagaaatgaaactcgctgcatcccatgcgattgcggaaaccttggatgaacagcatctcaatccggattacatcattcctacggtttttgacaaaagcgtgacccccaaaattgctgccgcgattgcggaatgtcatgccaatgaaacttaaa

SEQ ID NO: 204012 - DNA, 1044 bp, Unknown
  Bacterial polypeptide expressing nucleotide sequence isolated from the Sargasso Sea
aagccagtcatggaaggaaaggcagttttattcaaaagatttgcagacatagactctattgatatcgaaattgattcatctgatacaaaggaaattatcaattcaataaaaagtatttcaaaaagttttgggggaattaatttagaggacataaaagcacccgaatgcttcataattgaaaatgaattaaaaaaattattagatataccagtatttcatgacgaccaacatggcactgcaataattacaagtgcagcacttataaatgcatgcgatattgcaaaaaaaaatattaaagacataaaagtagttattaacggagcaggtgcgtctgctatggcttgtgcaaatctttttataaataccggagttaacgaaaaaaacattacaatgttagattctaaaggagtaatacattcggaaagagataatttaaacgaatggaaaaagaaatttgctattaaaacaaaaaataggaagcttaatgatgctattgaagatgcagatgtgtttttaggtctatctcaagcaggtgttttaaaaaaggagatgattaagaaaatgtcaaaaaatcctataatcttcgcatgcgcaaatccagacccagaaatcattcctgaggatgttgaagaagtaagagaagacgcaattatagcaactgggagatcagactatccaaatcaagttaacaatttaattggcttcccatatatttttagaggggctctcgatgtacgagctaaaacaattaatgaagcaatgaaagttgctgctgtaaaagctatagcctctttagcaagagaaagagttccagatgaggtggttgctgcaatgggtggagatagaccgcattatggaaaggaatatataattccatccacttttgatccaagattgataagcgttattcctgtggcagttgctaaagctgctatcaaaacaggtgttgcaagaaaaaatattgaagattttgatatttatgctgaacaactcaaaaaccgcttagatccatcagttgcagtaatccagggaattaattctaaa

SEQ ID NO: 204013 - DNA, 2122 bp, Unknown
  Bacterial polypeptide expressing nucleotide sequence isolated from the Sargasso Sea
aatgaaaaaaacaaagattgatcattacactgataaagaagctttagattttcatagagagaaaaaacctggcaagattgagatcatttcttcaaaaaatatgattactaaaagggatcttgcccttgcatattctccaggggttgcggccccagtaaaagaaatcagtgaaaatccagaagcggcttatgattatacaagtaaaggaaatttagttgcagttatcagtaatggttcagctattttgggaatgggtaatttaggggcgttagcatctaaaccagtaatggagggtaaagcagtgttatttaaaagatttgctgacatagactctatagatcttgaaatagattcaaaagacagtgaggaaattattaattcaattaagaattttgctccaagctttggtggaattaatttagaggatatagcagctccagattgctttataattgagcaaaaattaaaagaaattttggatattccagtttttcatgatgatcagcatggtactgcaataattacaacagcagcactaataaacgctctagatataagtggtaaatcaataaaagaaattaaagttgttgttaatggtgctggagcatctgcccaagcttgcactgaattatttaaaaattcaggagtgccttcagaaaatgtgatcatgcttgatagaaaaggtgtaatttataagggaagaacagagggtatagatcaatggaaatcaaaatatgcagttgagactaaactaagaacccttgaagacgcaatgaaaggtgcagatgtttttttagggttgtcagcaaaaggagttctcaaaaaagagatggttaagagtatggctaaaaatccaataatttttgcttgcgctaatccagaccctgaaattttaccagaggatataaatgaagtcagaaatgatgcaattatagcaactggaagatcagactatccaaatcaagttaacaatttaattggtttcccttatatttttagaggagctttggatgtacggtctaaaactattaatgaagaaatgaaagttgccgcatcacaagcaattgctaaacttgcaagagaagatgttccagatgaagtggtggctgcaatgggtggtgaaagaccacattatggaaaagattatattattccatctacatttgatccaagattaataagtgtaattccagctgctgtagcgaaagctgcaatgaaaagtggagtagctagaaaaaatattgaagattttgaaatttataaagaacaacttaaacaaagattagatccaaccgtaactataatgcaaggtataaactcatttataaaaaataatcaaaaaagaattgtgtttgctgatggagaagatgaaaatacattaaaggcagcaattgcatttaaaaattcaaaattaggaatacctattttagtaggcaaagaaagtaaaattaaggaacaaattaaaaatattggatacagtgaaaactttgatatcgaaataataaattctaaagatgaagaaaaaagaaacaaatacgtcaaacatctatttaaaaaattacaaagagaacagggtttactcgaacgagattgtgatagattagtaaggaatgacagggttatatgggctacaagcatggttgcgtgtggagacgctgacggtgctgtaactgggaatacaagacgttttggtgcttctttggaaaaaattaagcaagttgtagatgttagaaaaggtgagataatgtttggcctaaacatggtggttcataaaggaaaaactatatttataggtgatactagtgttcacgaatacccaacatcagaacaaatggcagaaattgcattgtcgactgcaagagttgttcgactatttggatttgacccaaaagttgcatttgtttcgcattcaactttcggccagcctttaacaagtcggacaaagcacataagagatgcggttgaaattttaaaagaaaaaaaagttgattttgaatttgatggagacatgcaacccgatgttgccttaaactcagaatatgaagaattgtatccttttgcaaaaattgttggtaaagcaaatattctaattatgcctggtcagcacagtgcagcaatatca

SEQ ID NO: 204014 - DNA, 745 bp, Unknown
  Bacterial polypeptide expressing nucleotide sequence isolated from the Sargasso Sea
tatgaatattgatcaggataaatcaacggttttaattacgggctcaaatagagggattggtttggctttggcagagaattatgcagaacaagggtggaatgtcatagccacttgcagaaaaccagaaaaagcgacggatctaatgtctcttagagagaagtttagcaatgtcaatattgaagaacttgacgtgacttcagaggagcaaattaatgctttggcgaaaaaatacaatggaatacctattgatgttttagtgaataatgccggcatactaggagaggttaaggaccaggtttttggagcattgaatgaacaaacttttgaactagtctttgccgtcaatacccttgcgcctttgaaaatttcagaagcattcattgagaacgtagcaatcagccaacaaaaaaagattgtttcaatgacaagtgggcttgcctcaatgcaaatcacagccaatcagagttacttctatttttatcgaatgagcaaggcagctttgaatatgggcatagtcgcaatgaatgcgagtctaaaaaaaagaggcatcatctcagctctgattgcacctggacaggttgaaaccaagatgcttgaagagtcaggttacagaggccccaataagataacacccgatgagagtgccaaaagcctcattaaaattattgattcaatttcacaagaagtgctaacaaagaatggaaataaagcgattaatgtcgatcagagagttcttccctggtaa

SEQ ID NO: 204015 - DNA, 1243 bp, Unknown
  Bacterial polypeptide expressing nucleotide sequence isolated from the Sargasso Sea
atggcagatttcagagagcaggcactgcgttatcatgcagagcctaaacccggcaaaattagtatcgagatcagtaaaccggccgagacggtaactgatttagcgctcgcttacagcccgggtgtggctgagccggtgcgggaaattgccgccgacgtcgataatgtttacaagtacaccggcaaaggcaatctggtggcagtaatttcgaatggtactgccattttaggcttgtgtaatctggggcctatggcatctaagccggtgatggagggtaaggcattattatttaaacgttttgctaatctggactcgattgatattgaagtgtctcaccgcagtacggaagactttatcaatacggtagcgaacatcgctgacacctttggtggcattaatttagaagatattaaagcgccagagtgttatgaaattgagaaagagctgattaagcgctgcaatatcccggtgtttcatgatgatcagcatggcaccgctattgttaccgccgccggcatgcttaatgcgctggaaattcagggtaaagacattaaaaacgctattatcgtttgtatgggcgccggcgcggctgctattgcctgtatggagctgctgattaaatgcggtgcccagcgtgagcatatttatatgctggataccaagggcgtgattcatacccgccgtaacgatttaaatgaatacaaaaagctgtttgccaataataccgataagcgcactttagaagatgcgctaacgggcgctgatgtgtttgtcggtgtgtccggcccggacgtgctgccggccgaagcattaagcttgatggcagataagccggtgatttttgcctgctccaacccggatccggaaattaaacctgagctggcccatgctacgcgtaacgacattattatggctaccggccgctcggattaccctaatcaggtcaataatgtattgtgcttcccctttatcttccgcggtgcattggatgtgcgtgccagtgttattaacgatgagatgaagcttgccgcggtgcatgctattcgtgctattgccaaagagccggtaccgcaggaagtgctaacagcggccaaagtgagcgatttacagttcggcaaacagtacattattcccaagccgatggacccacgcttattgccacgtgtcgcgcgggcggtggcagaggcagctgttgcatcaggtgtagcgcggattagcctaccagagaattgttaccgttaaa

SEQ ID NO: 204016 - DNA, 769 bp, Unknown
  Bacterial polypeptide expressing nucleotide sequence isolated from the Sargasso Sea
atgaaagttgcggttgtaactggtgcagccaggggcattggattagccatttcaaagaagttccttgaagaaggctaccggatcgccattttggacattgatcaaaaaacgctttcacagacgatgaagcaagatttcgataccaaaaatgtacttggactcgaatgtgatgtttctgaacccgatcaggtcgaccaatccgtcaaccgggtgctcgaacaatttggacgtattgatgtgctggtcaataatgctggcattgcggagtttaagccgatgcttgaaacgacatacgaggaatggtcacgtattcttgcagtcaatctcaatggtccattcatctgttctcaagcctgtgcgccattcatgctgaaaaacgaaggaggcagtattgtcaacattacttccatttctggacttcgtgcgagtacccttcggattgcctatggaaccagcaaagcggcattgatgcatctaaccaaacaacaggctgctgagttgggaaataaaggtgtccgggttaatgcaatagctccagggcctgttgacaccgcaatggccaaaaaagtccatactgcagacatacgatccgactatcatgatgtgattcctcttaatcgttatgggcttgaagaggaaattgcagacgcggtttggtttctttgcagtgattctgccagttacatcaacggacagatcattgctgccgatggtggatttgacgccaccgggataggattgacgagtttaagacagtcaaaaaattgag

SEQ ID NO: 204017 - DNA, 1246 bp, Unknown
  Bacterial polypeptide expressing nucleotide sequence isolated from the Sargasso Sea
atgtcagatattcgtcaacaagcactcgattatcatgaattccccgttcccggtaaaactgcagtatgcctcaccaaacctgctgaaacgagccatgacctcgcgctagcctatagccctggtgtggctgaaccagtacgtgaaattgccgctaatcctgaaaatgcctatcgttataccaacaaaggtaacactgttgccgttatttctaatggtacggcgattctgggcctaggcaacttaggtccattggcttcaaagccagttatggaaggtaaggcactattattcaaacactttgctaatatcgactcgaccgatattgaagtaacgcataacactgctgaagagtttattaatacagttgcggctattgctggcacctttggtgggattaaccttgaagatattaaagcgcctgagtgctttgttatcgagcgcgaattgattgagcgttgtaatgtgcctgtgtttcacgatgaccagcatggcactgccattgttaccgcagctggcatgattaacgctttagagattcaaggtaaactgattagcgatgccacttttgtgtgtatgggtgctggtgcggctgccattgcctgtatgaccatgttagtgaagtgtggtgctaaccgcgccaacatttacatgcttgacaccaaaggcgtgatccatgcgggtcgtactgatctgaatgaatacaaagccttgtttgcgaatgagactgacaagcgtaccttgcaagatgtgattaaaggcgctgatgttttcttagggctatccggcccaaatgtgattggtgctgaagaagtggccatgatggcggataagccagtgatttttgcctgctcaaacccagaccctgaaataaaacctgaacttgcccacgcgacgcgcagcgatttaattatgggcactggtcgcagcgattatccaaaccaagtgaacaacgtactgtgtttcccatttattttccgcggtgcattagatgtgcgtgcatcgtgcattaacgatgagatgaagattgcggctgtgcatgccattgccggattagcgaaagaagaagtcccagcaagtgtacttaaggcttatccaaaggtaagttcattaagttttggtcctgaatatgtgttaccaaaaccgatggatccacgtttattgccgcgcgtggcccgcgccgtggcgcaagcggccattgattcgggtgttgctgcaataacgactttgccccaatatgcggattaag

SEQ ID NO: 204018 - DNA, 736 bp, Unknown
  Bacterial polypeptide expressing nucleotide sequence isolated from the Sargasso Sea
tatgaattcgatggacggcaaggtcatcatgattaccggggcgagcagcggcataggcgaggcgaccgccagacggctggtccagcagggcgccagactcgtgttgggcgcacggcgcacggaccgcctgaagcatctggcggagcaactcggcggcgatgccagcgtgttgtgggccgccaccgacgtcacgcaagctgccgagctgcaacaactcgcagagaaggggcgcgagcggtttggccgcatcgacgtgctcgtcaacaatgccggcatcatgcctgtatcgatgatcgcgcaaggctgcgtggacgactggaaccgcatgatcgatgtgaacatcaagggcgtgctgtacggcattcatgccgtgctcggcggcatgctggagcagggatcgggacatgtgatcaatatttcatcggtggcgggattgacggtggggccaggcggcgccgtctattcggcgaccaagttcgcggtgcgtgcgatcagcgagggtttgcgtcaggaatgcgcgggcaaggtgcgcgtgacctcgatctgcccaggtctcgtcgcgagcgaactcaccgacagcatcacggtgccggctttccgcgagcgcgcgcaaaaactgttcgagggcgccatgtcaccggacgtgatcgccgacgctatcgtctatgcgattgcgcaaccggagcatgttgcggtcaacgagatcgtcgtgcggccgttgtcgcaaagtttctga

SEQ ID NO: 204019 - DNA, 1456 bp, Unknown
  Bacterial polypeptide expressing nucleotide sequence isolated from the Sargasso Sea
caagaccatggcgccgaagccgatcatcctggcgctgccaatcccgagccggaaatccgcccggaaatcgccaaggccgcgcgcccggactgcatcatcgccacgggccgttcggactacccgaaccaggtcaacaacgtgctgtgcttcccgtacatcttccgcggtgcgctcgattgcggcgccaccaagatcacggaagagatgaagctggcctgcgtgaaagccattgccgagctggccgaagccgaaacgaacgatgccgtggcgcaggcttacgccggccaggacctgaccttcggcccggattacatcatcccgaagccgttcgattcgcgcctgatcgagaagatcgcgccggccgtcgccaaggccgcagaagagtccggtgtggccacgcgcccgatcaaggatctggacgcctatcgcgcccagctgagcgacttcgtgtaccacacgggcctgaccatgcggccggtgttctcggccgccaaggccaacccgaagcgcgtcgtgtacgccgaaggcgaagaagagcgcgtgctgcgcgcggtgcagacggtggtcgacgaaggcctcgccaagccgatcctgatcggccgtccgcacgtgatcgaaatgcgcatccagaaggccggcctgcgcctgaagcccggcgtgcatttcgagctggtcgatccggaagacgaccgccgctatcaccagtaccacaccgcttaccacgagctgatgggccgcaacggcgtgacgccggacatggccaagtcggcgctgcgccgttcgaacacgctgatcggtgcactgctggtgcgtctgggcgatgccgatgcgctgctgtgcggcacggttggccgcttcgacgcccacctggaacacgtgcgcgacgtgatcggcctggccccgaacgccaaggtgttcgccgccatgaacggcctgatgctcgagaagcacacgctgttcatcaccgacacgttcgtcaacgaaatgccgagcgcagaagagctggccgacatcaccaagctggcggcagaagaagtgcgccgtttcggccaggagccgaaggtcgcgatgctgtcgcactcgatgttcggctcgtcgaagaacgcgtcggcccgccgcatgcgcgctgcgtatgacctgctgaaggtggaagcgcccgacctgcaggtggaaggcgagatccagggtgacgcagcgttgtcggaagacatccgccaccacttcctgcccaagagcgcgttctcgggcagcgcaaacctgctggtgatgccgtcgctcgacgccgccaacatcgcgttcaacctgctcaagatcacgggcgggcagggcgtgacggtgggcccgatcctgctgggcgcggccaagcccgtgcacatcctgaacccgtcggcaacatcgcgccgcatcgtcaacatgacggcgctggcggtggcggacgtgtcggctacgcgttgac

SEQ ID NO: 204020 - DNA, 500 bp, Unknown
  Bacterial polypeptide expressing nucleotide sequence isolated from the Sargasso Sea
tatccacatccttgtcaataatgccggtataactaaagataatttgttaataagaatgaaagatgatgagtggggtgatgttttggatacaaacctaaaagggacttttaaaatttgcaaatctactattaaaatcatgatgaaacaaagatatggcagaataataaatatcagctctgttgtagccatatctggaaatccagggcaaacaaattatgctgcaagcaaagcaggcatgattggattcacaaaatctctagcaaaagaggttgcgtcacgcaatattacggtaaattgcattgctccaggatttattgcaacagatatgacggaccatctttcagacgatgttcaatcgtctttaatgagtggtataccattacaaagattaggtaaattgagagaaataagcaattctgtcgtatttttatcatcagaagggggatcctacattaccggtgaaacaatcaatattaatggtggtatgttaatgaattagt

SEQ ID NO: 204021 - DNA, 754 bp, Unknown
  Bacterial polypeptide expressing nucleotide sequence isolated from the Sargasso Sea
atgactaaaaggttaagtgaaaaagtagcattggtgacaggcggcgcttctggctttggaaaagcaacagcagagttattcaagaaagaaggggcagaagtttatatttcggatatcaatgaagaaaatggcaaaaaagtctctagtgagctcggagtaacctttgtttctcatgatgtaaccaaaacagaagaatggatacgtgtcatcgatgaaataaaagcacaatcatctggattgaatgtgcttgtgaacaatgccggtattggttttatggccgatgtagaggcaacaacagaggaagaatgggaattggttcacaaagttgatcttgattcagtatttcttggttgtaaatatgcaattccactgatgagagaatctggcaatggttcaatcatcaatatctcatccatatctggtattgttgctgggcataattttgcagcctacaacagtgcaaaagctgcagtaagacatctaaccaagtccgtggcacttcactgtgctagaacgactgatatagtgagatgcaacagtgttcacccagtttttgctcaaaccgagatgatgaaatcattttttgataaccccaatgaggagcttgtatcgaaaatagagagacaaatccctctcagaaagttagtcacagtcgaggacgttgccaactcaattctatttctcgcaagcgatgagtcaaaaatgatcaccggatctgagttggtaattgatggaggcttatcagctcaataat

SEQ ID NO: 204022 - DNA, 718 bp, Unknown
  Bacterial polypeptide expressing nucleotide sequence isolated from the Sargasso Sea
atgacaaaaagaaatattttcatttccggagcttcaagaggtattgggaagtctatggcaattcattttgcaaataataattttaatgttgtcgggacatcgagaaacaattttaacttcgatgatgaatcagaaaacttatttccaattaaacttgatgtaacatcaagagatgatgttaaaaaatgttatgaagaacttgaatcaaaaaatcttcttcctaacattttaattaacaatgctggcataactgctgatcaattatttttaaggatgagtgatgatgattgggataatgtaataaatactaacttaaatggaacgtttaatcttacgaaagtttttcttaagcatatgattaaaaatagatttggtagaattattaatatatcttcaatatcagggttaatgggcaatccaggtcaagtcaattattcatcctcaaaagcagcacttaatggatttacaagatcactagcaaaagaggttggttccaggaatattactgttaattgtattgctcccggctttatcgatacagatatgacatcatatttaaatgagaatgaaaaaactgaaatacttaaaaaaatacctcttaaaaagtttggaagaccagaggatatttcaaaattagcaatgtttttaatttctgatgaggcctcttatattacgggacaaactatttcaattgatggcggcttattaatgtactaat

SEQ ID NO: 204023 - DNA, 772 bp, Unknown
  Bacterial polypeptide expressing nucleotide sequence isolated from the Sargasso Sea
tatggatcttaataataaagttgctttagtcactggaggtgcgtctggtttaggtcaagcaactgttgaaaattttgttgctgctggagcaaaagttgtaatcctagatatcaatgaagataacgcaaacaaaataataaaaaatcttggtgctgataaagtttccttcatttcgacaaatattatggaggaagatccagttgtatcagctataaataaaattaaagatgagcatggagcacttcatgttgcagttaactgtgcaggtaccggatacccaggaaggattttaggtaaggaagcgccacatccattggatgctttccaatttatcattaatttaaaccttgtaggaacatttaatgtaatgagaattgctgcggaactaatggataagaatgaagctgaagaaggcggagaaaaaggagttattattaatactgcatcagttgccggatatgaaggacaaataggtcaatctgcatatagcgcctctaaggctggagttattggattaactattactgcggctcgagacttagctaggcattcaattagagtttgcacaattgcacctggtatatttgatactccgttaatgcaactcgcgcctgataaggttcgtgatcctctcctagaatcaactcagttccctcatagatttggtcaacctagtgaatttggccaattagctgctcatatagttgaaaactcttaccttaatggagaaactataaggctagattctggcatgaggatgaagccaagataa

SEQ ID NO: 204024 - DNA, 283 bp, Unknown
  Bacterial polypeptide expressing nucleotide sequence isolated from the Sargasso Sea
atgataaatttaaaaaataaaaatattataataactggagcaactggaggaataggtaattccatagttgatacattgacctctttgaattcaaaacttgttgtgactggaactaatgaaaaaaagttagagcaattgaaaaacaaaaatgcaaatttaattataataaaacaagatatctctatccatgacgaactagaagcatttgttgaaaaatgtaataatgaacttggtggtaaaattgacgttttggttaacaatgctggtatcacgaaaagataat

SEQ ID NO: 204025 - DNA, 790 bp, Unknown
  Bacterial polypeptide expressing nucleotide sequence isolated from the Sargasso Sea
catgaagctcatcgaagacctgttcgacctgcgcggcaaggtggccgcgatcaccggcggcgcgcgcggcatcggtgcggaaaccgcacgcacgctggctgccgccggcgcgagcgtcgcgattctcgacgtgctgtcgcaaccggccgaagcgctcgtcgaggaaatccgcgcgcagggcggccaggccgcgttctggtcgctcgacgtcacgcatgaggccgatgtggcgcgcgtgttcggcgagatcgtcgcgcgcttcgggcgcctcgacgtgctcgtgaacaacgcgggcatcgaaggccacaacgtgccgacgcacgagctcacgcttgcgcagtggcagcgcgtgcaggacgtgaacgtgaacggcgtgttcctgtgcacgcgtgcggcgattccgcatatcgacgcggccggcggcggctcgatcgtgaacctgtcgtcgatgtacgggatcgtcggcgggcccgacgtgcccgcgtatcacgcgtcgaaggcggcggtacggatgatggcgaaggtcgacgcgatgctgtacgcggcgaagaacattcgtgcgaactcggtgcatcccggctatatccgcacgccgatgctcgaggaagcgttccgccagatggggcaggaccccgatcgcgccttcgagtacatgcagacgaacgtgccgatggcgaagatcggcagcccgcgcgacattgcggccggcatcctgtatctcgtgtcgccggcaggccgctacgtgacgggtgcggagctcgtgatcgacggcggctttaccgcgcgctga

SEQ ID NO: 204026 - DNA, 913 bp, Unknown
  Bacterial polypeptide expressing nucleotide sequence isolated from the Sargasso Sea
atggcggccatgagctgcgcgccaacccgcgcgtcgacgacacgatcgcgcagatctacggcgcggccgcgctcgatgcgatcaaggccggccgcgcgccgggcgccgcatgagcgccgtccttctttcaacgtcaacggaatccgaccgaccatgaatcgagtcgcaaacaaggtcgcgctggtcaccggcgcggcaagcggcgtcggccgcgcggatgcactgctgctcgccgccgaaggcgcacgtgtcgtactgaccgacatcgacgaggacgcgggtcgtgcgctcgcccgcgagatcggcgacgcggcgctgttcgtccgtcacgacatcgccgacgaagccggttggcagcacgcgatcgcatcgacgctcgagcgcttcggccgtctcgacgtgctcgtcaacaacgcggcgatctgcccggtcggctcgatcgaggacacgagcctcgacacgtggcggcgcgtgatgcgcaccaatgccgacggctatttcctcggctgcaagtacgcgatcggcgcgatgaagggcaacgacacgccggggtcgatcgtgatgatgtcgtcggtcgccgcgctcggcgggctgccgatgatgtgcgcgtacaccgggtcgaaaggcgcggtgacggcgctcgcgcgcagcgtcgccgtgcactgcaagcgcagcggctaccggatccgctgcaactcgatccatccggacggcatctggacgccgatgacgcaggcgctgatgcccgatctcgacccggccgcgctcggcatcggcagcgatccgatggcgcgcatgtgcgacccgcaggacgtcgcgaatctcgtgctgtttctcgcgtccgacgaatcgcgcttcgtgaacggtgcggagctgcggatcgacaacgcgcaactggtgtcgtcgctgtgac

SEQ ID NO: 204027 - DNA, 796 bp, Unknown
  Bacterial polypeptide expressing nucleotide sequence isolated from the Sargasso Sea
catgcatatcgatctgaaaggcaagaccgcggtcgttaccgcctccaccgccggcatcgggctcgcgatcgccgaagggctcgcgcgcgccggcgcgcgcgtcgtcgtcaacggccgcagcgatgcgtcggtgcagtccgcgctcgcgcacctgcgcgccgccatccccagtgcagacttcgacggcgtcgcggccgacctgtccgatgccgccggcgtcgcgcgcgtcacgcagcacacgccggatgccgacatcctcgtcaacaatgcgggcatctacggcctgaaggcgttcttcgagatcgacgacgccgagtgggaacattacttccagatgaacgtgatgtccggcgtgcggctcgcgcggcattacctgaaggggatgatcgaacgcaatgccgggcgcatcgtgttcatttcgtcggaatccggcttgaacatcccggtcgacatgattcattacgggttcacgaaaacggcgcagctgtcgatcgcacgcggcctcgcgaagctcgcggcgggcacccacgtgaccgtcaactcggtgctgccggggccgacgatgtcggacggcgtgcgggcgctgctgaaggaaacggccgacgaaaccggccgcagcgtcgaggacgtggccgtggatttcgtgcgcaaccaccgctcgagctcgatcatccagcggccggcaacaccggaggaagtcgcgaacatggtggtctacgtgtgctcgccgctcgcctcggcaacgacgggcgccgcattgcgggtggacggcggcgtggtcgacacgatcgcgtaa

SEQ ID NO: 204028 - DNA, 712 bp, Unknown
  Bacterial polypeptide expressing nucleotide sequence isolated from the Sargasso Sea
atgagtatcaaaggtgcagttgtgtttgtgaccggcgcaagccgtggtcttggacttgcattcgtgcgagaggcagtggctcggggcgccgcgaaagtatacgcaggcgtgcgcaatccggatagcttcagtgagcccggtgttaccccggtcaagcttgatgtaacggattctcgttcggttgccgaggcagccaagattgcggcagacaccacggtgctggtcaacaacgctggaattgctgaagtcaccagcgctccattttccgaagatgttgcagagcaggctcgtcgcttctttgagacaaactactacggtgtgatgcgcgtgactgccgcgttccagccgtcgctaccgaaagatggcacgggagcgattatcaacgtgctgtcagatgccacgtggcgagtcgtcccgtttctcgcaccctatgcggcgtcgaaggctgcggcttggagctatacgaacaatatccgtgcggtggtggcggaagagcgtattcaggtgttggggcttcacgttggcgtgatggataccgatctcacgagaggcttcgatgtgccgaagagcgcgccagccgatgtggcccgtcaaacgttcgatgcactggaagcaggcgagagtgagattctggccgacgagcaaacgcgtgctttgaagcggacactgtcctcgaagcattcggcttacatcgacccgacggttgcttaag

SEQ ID NO: 204029 - DNA, 763 bp, Unknown
  Bacterial polypeptide expressing nucleotide sequence isolated from the Sargasso Sea
atgaacacaactcccatcgcgctgatcactggtgcaagccgtggcttaggtaaaaatgcggccctgaccatagccgcacaaggtgttgatattattctaacttaccaaagtaatgccgctgcggccgccgaggtggtagcggaaattgaatggcacggacgcaaggctgtcgcgttaccgttagatgtgggtaatagccagtcctttagtgatttttctcaacgcgttaaaaccgcactcgaacagacttggcagcgggatagttttaactatctagttaataatgctgggattggtatccatgttcccatggctgaaaccagtgtggagcagttcgataccttgatgaatattcatgttaaagggcctttcttcttaactcaggtgctgctgcctctgcttgccgataacggcagtattatcaatgtctctacggggttaacgcgctttgctgttccgggatttggtgcttacgccaccatgaaaggcgcggtcgaaaccatgaccaaatactgggcgaaggagcttggtccacggggcattcgcgttaatgtgctggctcccggtgcaatcgaaacggactttggcggcggtgcggcgcgggataatccacagatgaatgagtttttagcgcagcaaacggcgttggggcgggtggggttacccgaggatattggcggtgcaatcagtgtcttgttgtcacccgctgcggcgtggataaacgcacaacgtatcgaggcatctggcggtatgttcttatagt

SEQ ID NO: 204030 - DNA, 293 bp, Unknown
  Bacterial polypeptide expressing nucleotide sequence isolated from the Sargasso Sea
catgaaaaaaaaaatttcacttataggggctggtcaaataggaggcacgctagcgcatttaattgggattaaagaaattgtttctgaagttgtattgtttgatgttgccccgggtgttgcaaaaggtaaagcattagatattgcacaatcatcctcagttgatggtttcgatgtaaaatttaaaggtactgacaagtatgaggatattaaagactccgatgttataataattactgcaggcgtacctagaaaacctaaaatgagtagagatgatctattaggtatcaatttaa

SEQ ID NO: 204031 - DNA, 678 bp, Unknown
  Bacterial polypeptide expressing nucleotide sequence isolated from the Sargasso Sea
gggattggaaatcgattgcagaacattttttaattaataattatattgttataggcacttcaagatctgatagtaatattgataaagactataaaaattatcatcatttttctatagacattacttcacgtatagatatccaaaatttgcatcagtccttggaaaatgatgatttgctaccagacatacttattaataacgctgggatcactgatgacaaacttttccttaaaatgtcagatgaaaattgggacaatgtgataaatactaatctaacaggaacatttaatctaactaaagtatttattaaaaatatgattaaaaaaaggtatgggagaattataaatatatcatctgtatctggactaatgggtaatccaggtcaagttaattattcatcatcaaaatcagctcttaatggttttactaaatctttagcaaaggaattaggctctagaaatattacagtcaattcagttgctcctggttttataagcacagatatgacaacatttttagataataataaaaaagatgaaattataagagatattcctttaaaaagatttggtaaaagtgaggatgtttctcaattagtttttttcttagcatcagataattcatcttatataactggtcaaactatctctgtagatggtggattattaatgcattaat

SEQ ID NO: 204032 - DNA, 337 bp, Unknown
  Bacterial polypeptide expressing nucleotide sequence isolated from the Sargasso Sea
atggaactaaataaaaaaaatattattgtaacaggtggagcatctggatttggtttaggcattgtgcagaaatttattaataatggtgctaaagtaataattgctgatagaaatgctgatttagctgaacaggaggcagataaacttggtcaaagtgcatactcaataaataccgatgtttctaatttaaaaagtattgaaaatttgaaaaatgaagcaaaaaagatatttggtcatcctgatattattgtgaataatgcaggtataactcatatgccagattttattgaaaatatctcttatgaggagtttgaaaggttctcaatgttaatgtaaa

SEQ ID NO: 204033 - DNA, 517 bp, Unknown
  Bacterial polypeptide expressing nucleotide sequence isolated from the Sargasso Sea
aatgagattaaaagataaagtagcacttatcacgggaggagcctctggatttggtaaagaaacagctcgtttatttaaagagcacggcgcaactgtttttataagtgatataaattttgaacgtggaaagactgtagctaaggaattagatatagatttttttgagcatgatgtaactgattcgaaaaggtgggaggaggtcataaatgaaattgaggctaaagctggcaatttaaatattttagtaaataatgccggtataggttttatatctgatgttgagtcaactactgaagaagattgggagcttgttcataaagtagacttagattcagtatttttaggatgtaaatatgccttgccattaatgagaaaatcaggaaatggctcgatcataaatatttcttctatatctggtatagttgccggacataattttgctgcttataacagtgctaaagcaggtgtaagacatttatcaaagtccgtggctttgcattgcgcaagaacaactgat

SEQ ID NO: 204034 - DNA, 1572 bp, Unknown
  Bacterial polypeptide expressing nucleotide sequence isolated from the Sargasso Sea
caataaaaagtatttcaaaaagttttggggggattaatttagaagacataaaagcacccgaatgcttcataattgaaaatgaattaaaaaaattatcagatataccagtatttcatgacgaccaacacggaactgcaataattacaagcgcagcactaattaatgcttgtgatatagcgaaaaaaaatatcaaagacataaaagtagttattaatggtgcaggcgcatctgctatggcttgtgcaaatctttttataaatactggagttaatgaaaaaaacattacaatgttagactccaaaggtgtaatacatttagaaagagataacttaaatgaatggaaaaagaaatttgctattaaaacaaaaaatagaactcttgatgacgccattgataaagcggatgtattcttgggtctttcacaagccggtgttttaaaaaaagaaatgattaagaaaatgtcaaaaaatccgattatcttcgcatgcgcaaatccagacccagaaataattcctgaagacgttgaagaagtaagagaggacgcaattatagcaaccggaaggtcagattatccaaatcaagttaataatttaattgggttcccatatatttttagaggagcgctcgatgtaagagctaaaacaataaatgaagagatgaaagttgctgccgtaaaagcaatagccaccttagcaagagaaagagttccggatgaagtagttgctgcaatgggtggagacaggccccactacggaaaagaatatataattccttcaacttttgatccaagattaataagtgtaattccagttgctgtagcaaaagctgcaatcaaaacaggtgtagcaagaaaaaatattgaagattttgatatttatgctgaccaactcaaaaatcgtttagatccatcagttgcagtaattcagggaattaattctcaaatcaaaaaaaatcaaaaaaaagtagtttttgctgatggggaggatgaaaataatttgaaagctgctattgcatttaaaaataatggtcttggagaaccaattttaattgcaaaagaagatatagttaaaaagaaattatatgaaattggttatggggaaaaactagatatcagaatagttaactcaacaaataaagaattaagagaaagatatgtgaaatttctatttgaaaaactgcagagaaaagaaggtttgctagaaagagactgtgataaattggtaagaaatgacagagttatatggggggcttgtatggtttcttgtggagacgcagatgcaatggtaactggaaataccagacgttattcttcatcattagagaaaattacaaaagttgtagatccaaggccaggcgaaataatgtttggtctaaacatgataattaatagaggcaaaacaatatttgtctgtgatacctccgtaattgagtatccagacgcaaatcagctagcagaaatggcaatttcaacagctagagttgtaagattatttggttttgatcctaaagtcgcgtttttatctcactcaacttttgggcagcccggttacagaatagaacaaaaagaataag

SEQ ID NO: 204035 - DNA, 1753 bp, Unknown
  Bacterial polypeptide expressing nucleotide sequence isolated from the Sargasso Sea
aaacttaaagaaatattagatattccagtatttcatgatgatcaacatggaacagcaattatcacaacagcagctttactgaacgcgctcgatataagtggaaaattgattaaagatataaaagtcgttgttaatggcgctggtgcatctgctcaggcatgtacagagttatttattaactcaggtgttaaatctgaaaatataataatgctagatcgaaaaggagtgatttataaaggaagagcagaaggtatagatcaatggaaatcaagatttgcaattaatacagatttaagaactttaagtgatgctattaaaggggctgatgtattcttaggattgtcctcaaaaggtgttttaaaaaaagaaatggttaagagtatgtccaaaaatccaattatatttgcatgtgcaaatccagatccagaaattacaccggaagaaataaatgaagtaagaaatgatgcaattgttgcaactggaagatcagattatcccaatcaagtaaataatttaattggatttccttacatatttagaggtgcactagatgtaagatcgaaaacaatcaatgaggaaatgaaagttgctgctgctgaagctatagcaaaacttgctagagaagatgtgccagatgaggttgtagcagctatgggtggagaaagacctcattatgggaaagattatataataccatcaacctttgatccaagattaattagtgttattccagctgctgtagcaagagcagcaattgaaagtggagttgctagaaaaaaaattgatgactttgaaaactataaagagcgacttaaacaaagattagacccaacagttacaattatgcaaggtataaactctttcattaaaaaaaatcaaaaaagaattgtttttgcagatggggaagatgaaaatactttaaaagccgcaatagcatttaaaaattcaaaacttggtattccaattttagttggtaaagaaagtaaaattaaagagcagattaaaaatataggttacagcgaaaattttgatattgaaattactaattcaaaagacgaagaaaaaagaaaaaaatatgtaaatcatctattcaagaagcttcaaagagaacaaggtttattagaaagagattgtgatcgaatggtcagaaacgatagggttgtctgggctactagcatggtcgcttgtggagatgcggatggtgcagttacaggaaatactagacgttttggagcatctcttgaaaaaattaaacaagttgttgatgttagaaaaggtgaaataatgtttggactaaacatggttgtcaataaggggaaaactattttcattgcagatacaagcgttcatgaataccctacatcagaagaaatggctgagattgcaatttcagctgcaagagtagtaagactttttggaattgatccaaaaatagcatttgtttcacactccacattcggacaaccattgacaagtagaaccaaacatattcgtacggcagtagatattttaaaagataaacaagttaattttgaatttgacggtgatatgcagcctgatgttgctctaaatcctgattacgaagaactctatccttttgcaaaaatagtaggtaaagccaatatcttaattatgcctggacaacatagtgcagcaatatcttataaactaatgaaaactttaggtgatacaaaagttataggaccattattgattggacttggtttaccaattggaaattgctccgcttaga

SEQ ID NO: 204036 - DNA, 2163 bp, Unknown
  Bacterial polypeptide expressing nucleotide sequence isolated from the Sargasso Sea
cgggcgtcgccgcggcctgtatggcgatctacgacgaaccgctcgacgcgcagaagtacacctcgcgcggcaacctcgtcggcgtgatcacgaacggcacggctgtgctcggtctcggcaacatcggcccgctcgccgcgaagccggtgatggaaggcaagggttgcctgttcaagaagttcgccggcatcgacgtgttcgacatcgaactcgccgagtcggatccggacaagctggtcgaagcgatcgccatgctcgagccgacgctcggcggcatcaaccttgaagacatcaaggcaccggaatgcttctacatcgagaagaagctgcgcgagcgcatgaagattccggtcttccacgacgatcagcacggtaccgcgatcatcgcctcggcggcgatactgaatggcctgaaagtggtcggcaagaagctcgacgaagtgaagctggtatgttcgggcgctggcgcggcggccatcgcgtgtctggatctgctggtgaatctgggtctgtcgaaaaagaacgtgctggtcacggactcgaagggcgtgatctacgaaggtcgcggcaatctcgatccctcgaaggaacgctacgcggcgaacactgaagcgcgtaccctggccgacgcgatccgtggcgccgacgtgttcctcggttgctcgagcgccggcgtgctgaagccggaaatggtcgccgaaatgggcacgcaaccgctgatcctcgcgctggcgaatccggaaccggaaatccgtccggaagaagcaaagaaggtgcgcccggactgcatcatcgcaacgggtcgttcggactatccgaaccaggtcaataacgtgctgtgcttcccgttcatcttccgtggcgcgctggatgtcggcgcaaccacgatcacggaagaaatgaagctcgcgtgcgtgcgcgcgattgctgaactggccgaagaaaccgatcagggcgatgaagtcgccaaggcctacgaaggccactcgctcgaattcggcccggaatacctgattccgaagccgttcgatccgcgtctgatcatcaagatcgcgccggctgttgcgcaagccgcgatggattcgggcgtcgcaacccgtccgatcaaggacatggacgcgtatcgcgaagaactcggcacgaccgtgtaccgcaccggcatggtgatgcgtccggtgttcgcggcggcgaagtccgagccggcgcgtatcgtgttcgccgaaggtgaagacgagcgcgtgctgcgtgccgcgcaattcgtgctgctggaaaagatcgccaagccgattctggtcggccgtccgtcggtgatcgagatgcgtctgaagaagatgggctcgaagctgaagtgcggtgaagactttgtagtggtcgatccggaagacgatccgcgctatcagcaatgctggcaggcataccacgaactcggcgcgcgcgaaggcgtgacgccggacgtcgcgaaggccgcgatgcgcaagttcaatacgctgatcggcgcgatcctggttcgcctcggcgaagcagacggcatgatctgcgggatgattggccagtaccacacgcatctgaaattcatcgagcaggtgctgggcaaagcggacaacgtgcagaacttcgctgcaatgaacctgctgatgctgccgggccgcaacctgtttatctgcgatacgtacgtgaacgaaacgccgaccgccgaacagctcgccgacatgacgatgctggcttcgcgcgaaatcgaaaagttcggcatcacgccgaaggtcgcgttgctgtcgaattcgaacttcggcagcgcgccgtcggcgtcgtcgcaacgtatggctgcagcgcgcaagctgattgctgaacgtgcgccttcgctcgagatcgacggtgaaatgcacggcgacgcggcgttgtcggaaatggtccgcaaggctgcgttccctggcacgacgctgagcggtgaagcgaacctgctgatcatgccgaacgtcgaagcagccaatatcgcgtacaacctgctgaagatggttggcggcgaaggcgtgacggtcggtccattcctgctgggcgcggaaaagccggtgcacatcctgacaccggccgcgactgtgcgccgcatcatcaacatgacggcagtggcctcggccaatgcacgcaagcgggtgagcgcgcagtaat

SEQ ID NO: 204037 - DNA, 707 bp, Unknown
  Bacterial polypeptide expressing nucleotide sequence isolated from the Sargasso Sea
tactgccggaattgctagaaaacctggaatgagtagagatgatttattgataactaatatgaacattgttggttcagttactgaaagcataatgaagtattcaaaaaaccctattatcatagttgtttccaatccgcttgatgcaatggttcagcacagtttttcaaaaagcggtctttctaaagaaagagtaattgggatggctgggattttagatacaggaagatttagaacttttcttgctgaagaattagatgtttcagttaatagcatagatgcatatgtattaggtggccatggagattctatggttcctttacttaaagcaaccactgttggtggggttccagttaaagaattaattgaaaaaaataggctggaagaaattgttcaaaggacaagagatggaggagcagaaatagttgctcacctaaagaccggaagtgcttattatgccccttccgctgctgttgctcaaatggtagatgcaataatatttgatactaaagaagtgttcccttgtgcagcgatgctagatggtgaatacgatatcaaaggtgtctatgctggagttcctgttaaacttggtagctcaggcatagaagaaatagttaaattaaacctgagccaaagtgaaaaagacgggcttacggcatcttcaaaggctgttgaagaattaattgatgtaatgaaaggtcagtcataaa

SEQ ID NO: 204038 - DNA, 898 bp, Unknown
  Bacterial polypeptide expressing nucleotide sequence isolated from the Sargasso Sea
gcgaaaggaaatctagttgcagtaatttcaaacggaacggccgttttaggtttaggtaatattggacccagtgcttcaaagcctgtgatggaggggaaggccgtcctatttaagaagtttgcaaatattgactgttttgatattgaagtaaaggaagataacccacagaaactagccgagatagtagcatctttagagccaacttttggtgcaataaatttagaggatattaaagcaccagactgttttgaagttgagagactttgtaaagaaaagatgaaaatacctgttttccatgacgatcaacatggaacagctattgtggtaggggcagcagcggtcaacgcaatcgagctctcacagaggaaaattgaaagcactaaaatcgttgcagtaggggcgggcgcgtcaggaatagcatgcttggaaatgttggttaaacttggtgtaaaaagagaaaatatatggctatgcgatagtaagggcctaattactaaaaatagaagtgaaataaacgaagagaaaaaaagatttgctcaagatagtcaattttctaaattagatgatgttattgaaaactgtgacctgtttttaggactttcagggccgggagtgttaacaagtgaaatggttctcaaaatgagcgagcaaccaataatatttgctcttgcaaaccctgatccagaaatcaatccagctgatgcgctaaaggtggcacctaatgcgctaatagcaactggtaggtctgattatccaaatcaagtaaataacgttttatgttttccttttatttttagaggagctcttgatgttggagcgacacaaataaatgatgagatgaaattagcgtgtatatacgcccattgcaaatctggcgagacagacttcaacagctgaa

SEQ ID NO: 204039 - DNA, 460 bp, Unknown
  Bacterial polypeptide expressing nucleotide sequence isolated from the Sargasso Sea
ttgtctagtcttccaaaaatttctgtaattggcgcagggaatgttgggtcttccgcagcatatagggctcttgaattaaaccttgctgatgttgttttgttagatattgttgatggcttacctcaaggtaaggcacttgacatgactcaaatgatgtcagtaaatggatcatcttcaagaatcattggtacaactgattattcagatactaaagattcagatattgttatagttacttctggtctagctagaaaacctggaatgagtcgtgacgatttaattaatactaatacaaagattataaaagatgtaacagaaaaagttgtccaacattcacctaatagtattataatcgttgttacaaatcccctggatgcaatgacttatgtttcatataaagttaacggtttccctaaagagagagttattgggatggccaggtgtattagatgctgctaga

SEQ ID NO: 204040 - DNA, 380 bp, Unknown
  Bacterial polypeptide expressing nucleotide sequence isolated from the Sargasso Sea
aatgtatttaaaaaaaattaatttaaaaaataaagttgctttagttactggtgcaggaaaaggtattggtagagcttgttcaattgcacttgcagaagctggtgcaacaataattggagtgagcagaactgcttctgatcttaataaacttcaaaaagatataaaaaaagttaaaggaaaattaacaaaaataacttgcgatataatggattatgaagatctttcatctaaattaaaaaaagtaaagaaagttgatatacttgtaaataatgctggtacaaatattccagagccttttgaaaaaattaaacaaacaagtatgaactatcttgtagatttaaatatgaaagcagcattcaatgttgcacaattagtagtcc

SEQ ID NO: 204041 - DNA, 886 bp, Unknown
  Bacterial polypeptide expressing nucleotide sequence isolated from the Sargasso Sea
gcaaaaaaaaatgatcttgaaaaatatatatacatgatagctcttcaggatcgaaatgaaacactattttactatactttaataagcgaaattaagaatatgatgccgattatttatactcctacagtaggccgcgcatgtcaaaaatttgatcatatttttaggaggccaaggggattgtatatatcttttaaagaccttggaaaagtagaaactatattaaaaaattggccatttaaccaagttgaagtaattgttgtaactgatggtgagcgtattctcggtttaggggatttgggtgcaaatggaatggggattcctattggtaagttatcattatacacagcttgcgctgggattgatccttccaaatgcttaccaattacattagatgttggaacaaataatgataatcttttgaagaaccctttctatctcggtcttcaaaagaggcgtattgcaggtaggatttatgatgattttttagatgaattcatggcatcggtttctaaaatatttcctaatgctgtgatccaatttgaagactttgctaattctaatgctgctcgccttctcaaaaagtatcgaggctcttattgtatgtttaatgatgatatccaaggtactgccgcagttactttatcaggattgatttccagtatgaaattaacatctcagaaattggaagaccaaaagttactattttacggctcaggaacagctggtataggtattggtaacttattttctcaagccttggttgatattggaatacctgaatcagatgcgcgaaaaaaatgttggtttgttgatagtaaaggtctggtagtaaaaagtagggacgatttatcattgggcaaactactttttgcccaggattcataaa
